United States Patent Application Publication US 2014/0057251 A1 - sequence listing, part 115

SEQ ID NO: 216386 - DNA, 1000 bp, Cannabis indica
tctcacataaagacaaatggtctggaacagaaaaacatggtgacaaaactattggaataaagtattaataagggttgaaaaacagaccaaaatcaatactattgaccaaaaaaaaatggttggtttagccaaaagagagaaatccagactcggcagaaagggaacctgcaggttaatttggggaagtcatgcttgatcctaagaagaaaaggatgttgttggaacctaacctaaatggaataccaatcgagagaatttggttgccaattgtttttgaaatcgataggaattagggattagagattttaacttttgatttttgggattttttttttcttaatatcttaattggggcagctcggtctcgacccgaaagaaagtgtggcatggtgggggtagaaacccgattaaaacccgagcatagcaaggtaggagtcacacaccgagtcgagtcgggcccgactcaacctgcaaaaagatccaaactgccatctcaagccaccctcaaaactttaaaaaaataaaagaattttttttttcatttttacactttaaaataattttttttttttttgtatttttatagaatttccacataaaaaattttatagcaactaacagaacaacttaaatcgcaataaaaatctgtatagcaacttatataaaaactactggagaaactaccgaaataactcaaactataaattaaaaaaaaataagtataatggtcattttccaaaaaataaaagaatgtcaaaggacactcatggtagcacttgtgatatgtaatatcgttattagtatacttatttctataagaggatctctaatagggcaacatttatagttgtcaaaatacacacatcatttaaaaatattatttgttttatatttcctctcatccactttaaatttgttacattttcttaaaaaaattactccaattgttgacaactctaaaagtgtctactatagtatcacatcacattaaattaataat

SEQ ID NO: 216387 - DNA, 629 bp, Cannabis indica
gtctctggtttttgtttttgtgtaagtgagattagtgattagaggtagagaagagtagtgtatttataaacttgttaaagcgagtggttttgttctaacggaaatggttttgggatagattggtgggtgaaagggaacgacccttgtttttgtcgttttgtacttttttggtttgtttttgggtgttgatgtggatggatggattggatcaattgaaatccaaaatttgtgagattatcgtctcgagagaaattgggttttcatgtaattattattactttattaaagtaggtgtggaaaaattatgatatgggaccactcacttattaaaatgttataatttggagaagaaaatgaatgattttatgattaagattgggataaaaataaaagtgtggtgcagtgtcagttatagaacccaatacatagtaaaatttgaataaaccatctgtgttattattattattttgcttagttatttttttacttagttattttttctcattctaaacgatactattatattttagtttacttaccaagaattttaagatttaacaaaatcaactatcccaccaagaaatttataaggtttattataattacaaccagctatttcttaggtctat

SEQ ID NO: 216388 - DNA, 702 bp, Cannabis indica
  modified_base (59)..(59): a, c, t, g, unknown or other
acatgtgtcccaaagctgaatgtcagtgatctcaaggagatctcaggaggaacagtgcncttgggaaacacaaagcatgtagtgtacttggtattgggtctttggtcatcactatgtttgatggcataccaagaacacttaagaatgtcagacatgtacctgatttgaagagaaacctgttgtcaattggtatgctggacagcattggttgcatcatcaaggtggaaggtggaatgcttgtgatctcaaagaattccacacctgtgatgaaaggagaattaaagaatggtctatattctttaattgggaaaactgttatgggaaatgctgcaccagccataacagatcaggagattgacaaaaccaggctttggcaccttaagcttggtcatgtgagtgaaaggggcctgcaagaactcgaaaaaacagggactgttgaaaagacaagttggatggcaagctaggattctgtgaagattgtgtttatgggaagtgttgtaaggcaaaattctcatcagatctacacatcagcaaggaaccattgaactacatacactctgacttatgggggccatctagaatcaagacactgggaggagctagctactttctcagcatcatagatgatttttctaggaaggtatgggtgtatctactcaattctaaggatcatgctttcagtacatttgtcacttggaagag

SEQ ID NO: 216389 - DNA, 882 bp, Cannabis indica
aaaagatagaggggttaagtgtataaatattaaaacatagggggttttgccacaaaaaaaaagataagggagttaagtgtattaaaactaaaacataagggggttttgccacaaaaaaaaataagagggttaagtgtgtaaaaattaaaacataagggggtttcgccgcaaattactctattaactttatatgtttatgatgctaaagataaactttaaaataatatttagttgcacacataaaaaaaaataaacaaatacacatgtaattaatagtattgaaatatgttttagatgccaaaaaagtatttaaaatttgttgaaagttaataaaatatgtgttagttacatataaactatgtaaatttcatttttttgatattataaataataaaaaaatttataagtagtactaaataattataacatacacaattataaaaaaaaaaaattaagttaaaaaaactctcttagatatcgtaaaatgataagaggtctatcgaaacactcccttaaaggatgtactgtaaacttaccccgaatatatataaatatagcattattattggataccaatagtgcctaacacctttagatatgtcgtcttgtgattggctaacgatactccttaaaaattattatactaaactatatgagacccgatatttatttggactaataatgatattaacacataaaaaagtattagacactactgataccttttagcgtttctcatacaaataagaggagtcataactattacttattagtatagtaaatatttgtttttagggttaagtgagaaaaataaagtgatgtacttaaacaactcaatttgggatttctttttccccttactattcaaatccaatgatctaa

SEQ ID NO: 216390 - DNA, 825 bp, Cannabis indica
ctactcctcccattgtcaattcgtttttgagatggaacctcattcatctttttctccaaaattctaacaaatgtgatatatcatatatcatcaacttttttcatattaatttaatttatattattaattggtggttgattgataaatctttctctaatgcacgcaaatatatattaattcttatgtgatttgttttatcttaaagggaaaagcataaagtataaaaagtgagaagaattaatgtcaggatcgaatatagccgggctaggtccgtgcttagggtctatattttttggggactcaaaataaaataaaagttttattaggttttaatttaagtaaaattaagtatatcgtaaataataaatattcatagcttaattgatgagagaagttgaaaaatacccattttttatacattaactaaatttacctctaaataaaatttaattcaaatatatatctttttatgagtattgtactcaaatcatcctcacacactcacataaataagatataatttcaaacaaaatagatttgtattctttgtagatggatgtataagtttgtgagaaagttggagcaaaattttaattagagaagaatgaaaattaaaaactatcgtaaaataataggaataaaattagtagaatgattaaataaaaggtaaacataatagatttcaaaagagatcataaaaattaaaaacatcaaatcaaattaaaagaagtacatcttataattttttcttaattaattgtagtatattgcatagtatattggatcccaaaatttaaatagccggtccatatattctcaggctca

SEQ ID NO: 216391 - DNA, 1391 bp, Cannabis indica
aaataaaaaataggtagtaattaggacaaagtattacttaaatataaccaatcactctgggaacctgcattggtcctaggggctggcggcttttctcaattatttttataattaattcttttttttttttcaaaaaaaaaaaaaaaactctcttctatttatatatataatatatttaaatatatctacctaacacaaacccacaatattcctatatcacatttatattagttataatttctaatattccccataaatatatttcaaacattacatctaaatcgaaaaaaaaaaaaaacatttttttaacttactcaactcgttctgtacatgtgcttaattgctttttttttttttgctgaaaacgtgtgcttgcttgttttgttataaactatttattttggcttttattttatctcaaattttggtcaatatattatactgaaaactaacccaggaaactaaatatgtaaccaatagaaaatgtatacaaattttgaaagtgctaattgtatgagttattatgatggtatgcctataaataaaacaaagaaaagtaatcagaaacttgaaagttaattatttctcaaagaataaaaaagaaagatgatataaatagaaaagcatcgattctaattgactcaatatgttgcaggcttttctgaaggctttagaagtggcccatttaaacatagtcactcactcactcaccatctcaaactcaaatctccaataataaagaggataactggataaaatgtgtttttaacttatttatatatgctaattttttttatttttttattttttaatttttggaacacattttttttcatttagagattaaatatctgctatatttgtgctatttttgggattttttaccctcttattcattttcactgaaataaacaaaatgtttataacttataagtggagattagattttgtatgatttctttatgtttaacttaacataagttaagtggagattagactttttccctcttattccttttcattaatagaaagagaatgttcaactttacataagtcgagattagcttttgtatgatttaataaattttactagttacttacaaaaaatctaataatactaaatatacaaaaagatttatagttataggagatattaggaaagtatcatgttagtttaatatttaccataaattcaacaacctaattattgttttatttcacctaatccacatcttcatcatccataccatactgttagtaagataaaaacctttaaatttaaaatatcttattcaatccataaagtatctaactatactatgagggtatttttcaaaagggtgggatgaatgaggtataagagagaatatgcctaaaaaaagtgagctgaa

SEQ ID NO: 216392 - DNA, 503 bp, Cannabis indica
acgtggtgtagatccttttctcatttcttcagtagatttgataatttcgataatttgtggaggttttggtctctatatatttgaacattagttagacttatctattccggctcttgttgtgtttgaagacttgcttgttgccaattttagtaaaatactcaagacttagcttaacgatttgtaacagaatatgttaattgtgttacaacttacctaagctcatccactctctttctcaccctatatatatttaaactcttaatgtgacaaaaattatataatgatatttctattttctagagagaaaatttcaaagaaaaaaaaaaaaaaaaaaactaaaaaaaacttgtattacgataagaagtaaatttgtaatgggagacttaagtgaagaatatatttttgatctgagagtgtgtagcacatttctgcattagtgaattcaactcaagacactaccttagtctagagtaggaccagttacattgactcgcatctaaacc

SEQ ID NO: 216393 - DNA, 447 bp, Cannabis indica
agagagaggaggctctactgtgtttggtggcagagtatcacgcgctctcagatatcttctgtacacgctccaatcactagccatgatcatattataatttataattattttttcattgttaataatagaacaatttaatcaaaatataatagaacgaggctacgaccaggtgtgctgtaaatatattaataatcaaatcagtgaaattatgccatataaaaaacaataggtttttcttattattattatttataagcatttttttaaagcattaataaagtaaaaaaaaaacatttgtagggatacaagtttctttttttagtcaaaattagatagttgatcaactaagactgccactccaaccaagaagaaagaaggaaaaaaaaaattgttttgaagcttcttctacggcatcatcacttttggattcggtaaatttttgacaac

SEQ ID NO: 216394 - DNA, 602 bp, Cannabis indica
acagagaaactgacaaggagacaactgatctagaaatgctaaatgtcagagaagaaactaatggttctgatcaggtggatactcaagagcactcatactcagagattgatgagcatgcaactgaggaagaaagcttgccagatgattcacaagaatacctactggttagagacagagaaagaagacaaatcaaaccaccagagagattttgctttgctgactgcacaacttttgctcttgcatcagcagaagagattgacactacagtccctagtacatatcaggaagcaatcaactcaagaaataaaagaaatggcttgctgcaattaatgaagaaatgagttctctacacaagaacaagacttagaaaactgtgacaagatcaccagggcagaaattgataggctgcaaatggatttttagggaaaaggaaggactaccaggtgaagaaatcagatttaaagctaggctagttgcagcgggattcaatcaaagagaaggtgttgatttcaatgacattttctctcctgtggttagacaaacatctataaggatcatgatgactaaagtggccaagtttaacctagaaatggatcaaatgg

SEQ ID NO: 216395 - DNA, 564 bp, Cannabis indica
ttagcttttagctgtagcttttcgataaattcttaaataagtttttaataccaaaagcctttttatcactaattttttttttaaaaacaacttttagtttttccaaaaaatgtgtcaaacaggcgctcaatctaatccgcacaaatacagatatccacactttgcgaatttaattagatcgtacaaattgaaacggattagattaattattttacgaacacttctactctaaggaaaattagaaagtaactaattaacaataacttaaagtagggagtccacatcattacaaaagtatttcccaagaaaacagtgatcaaagttgaaaacagatcaatgttgttgtgtgcatgaaagttgctattatcaatcttgatgctgctaatgatacattgtcctgttgtcgtatccaattggcttattcagcagtagtcagtttctgattttaatttgttttcaagtatttgtgtgtggattttgcatgtcaaatgtaggtctctcctattaatgcgtaccgccatcaacacttaaggatctataaaactagagtgatgtgatgagaga

SEQ ID NO: 216396 - DNA, 594 bp, Cannabis indica
actttgcaagctactatgtattccacttccatggttgaatatacaatacttgttcgcttcatgcttctccagacgacatctcctccaccaatagtaaatactgacctagatgtcgaccttcgactatctttgtctaattgaaaatcagaatcaatatatctagctagtaggattcgactctccaccagaatatacaaccatgagatctctcattctctgaagatacttgagaatgtgttttacagctattgagtgttctaaacctagattagattggtaacgactaataatccctacaacatagcatttgtccagccttgtagacaacatttcatacatcaagctcccaacagctaatgcataagggtactttctcatttcctcttcctcttgaggagtctttagacattgatccatacaaagagtaattacatgtctaaatgatagttatccttcttggaattctccattgagaatctttcaagcaacttatcaatataatttacatgagaaagttctaatgttctccactttctatctctatagattttgatccaaagaatatcgattgcttctcccgaatccttcatttgg

SEQ ID NO: 216397 - DNA, 1274 bp, Cannabis indica
acaaatagcatattaggatctgtaaaattaaaaatatggatgatgatttcttattattattttcgttagtgaccagaaagtggtcaaaatattcataattctattctagctaaatactcaattttatgttatgagtgatataaggcaatggtggatttgctattataagcaaactatattgattcaatactgtatatgaatagaaaagtggtatttttctcttgcttattttaattaattagagctactgatctaatagcacaatatttttctagacattcgtttctgtatgaattgcatcttctttgcacgcttggcaaaggatagatgactcatatcctgatctgttggtctattatgcagactttggaccccattgatggtgaatttgataattacatttccctatatatatacaatgaaatgtggaaatttaaagaaaagtaaatatgcttactttgatgttatgctctgttttgctatttgatgtttgatgtttaagtgcaattttaaatttgttttgatcttgaaatgttatttttagggtaatttcacaggtgtgttttaaagctgctctgattttcaattatttgcattaatcttgaatgtgagtttcttgattttttttcttttggggaagtgactactgtaagtttgccatgtagctattatgttttttttttttttttgaaatttttccatgtagctatatgttgtttcagaaaaaatcaagaagatggtcaatagagtcaatgaaaggatttaatccattgattgagttgagttgtatagctattatttaatatgggatgagaaaatagaacttcggttcaattgggatattagtattgtctcttagagtgcattttgaaaatttgtcttgtactctcgaagaggacatgttatctaacggtaagtggcggttagactggaagagaagaacaaagttcgacttgtcggtgccgagagagactggtgaaaataattatttctcaaatttgcacaatatttttatataacaggactattcttgagcttatgtacttagcggatttcatgaaaatgaaatgaattaattactggaatatttactattatttattgattattatttcattatactaataatattagtcactaaagcaatacaagattagaaacacctcttataattatcttaaattattaataaaaattaagaatttatttttgaaactttacacactgtttttctttttattttatattatatattttttttttaaaatgaaatt

SEQ ID NO: 216398 - DNA, 721 bp, Cannabis indica
taaatggtacgtaatagaacatttttataggatcaaaagagaggaagcaagataaattattatacctaaaggaatcaaaggaaaaagaggaagaagtaacaataactgtacatgatgcatacaatgtatgtttcgtaagagctataacttaattcaatgtataaatatatatatatatatatatattattattatgagtgttcatccaattcaatctacactattttgactcatagtacatccaattcgtgcgaattttatattttgtatccaatctaatcagcacaatagcttaaatttagtctaattcaatcggcaaaagtatagattgaattgattattttgaattagttactttacaatattaaattatttaatatttattaaaaaataattttatttaacataactaacaacaaaataaacaaactattgttattttatatgtctctaataataaattaaaataattaaaataaaaaaataacaaattcaaatgaaaaaaaaattaattttgtttaaattgtatgtagacaagaaaaaattatatatatattttgatctattgaattttgaaatatatttttattatatgtattagatttttaaattactaattttttacattaagatagtaattgtatatataattttttaaaattttagtataaataggtgtggattggaaaacttttaaacaatcaacatccaattcgcataa

SEQ ID NO: 216399 - DNA, 678 bp, Cannabis indica
aaggcatttattacgtattggttatcgtgacataggaccgggatcgcccaaccttgtttccactcaggtcagccagcacacttgagctctggcttgaggtaagaaaagtgatatgcaccgtttatggttaaatgttaacagttatatgcttatagcctcgattatgatcgagattctagttaaatatttgttgaggctcggttatgccgagggttgaaaacggtcgttaccgtcaagagtaattactcttgaaaccgcgaataggtttcttacttatcattcgttgtatcgagaaaccatagtgacatacatagctcatggttgacgagtggtaagggtactttatgaagttccaatattatgagaaattgattatgcatgttaatacatactgagtccttgtgactcacaggtgctacatggtgtaggtaaagggaaggcaaaggttgagcagccatgagtccgaggtcgcagcagaaatgtacatatcagtcgcggtgccacggtctagtgggcaagatgttctaatctgattgtattttaggatataaacttattttataatacttttaatccagattgtaaatattttgataatagggggtccccgtagataataatatttatcttttataaaaagaaatattatgcgttattttaaattgcaaaattttaatt

SEQ ID NO: 216400 - DNA, 536 bp, Cannabis indica
gttgagagttcagcagatagttgttcctcgtttgctaaagcagtatctttagttgagcgtaattcctagacatgattagaattataacatatatgatacccagctaataaggaatgagatgcaacataattttgtatctcaatacctcctccaatgatgttactttgcaagctttgaatcatgctttctccacaactcaataagattgtctactttggatgtaaactcatcattaagccatgcattatgtctttcgcctttcaaagagttctttctcctgctcacattcaaataaatgatgaagaagaaataaatgatttaaatcactttaatcaaaaaaaaaaaaaaaaaaaaaaaaataaaatgatgaagaagaaataaaaagagttgaaaaataatcacaccaaaattagttcagaaattaaaagaattgaaaaataaaaaccataccaaaattagtgaataaaaaccataccaaaattagttacgaaatcaaaagagttgataaacaaaaaccataataaataaaaaaaata

SEQ ID NO: 216401 - DNA, 664 bp, Cannabis indica
acctcaactcatacaataataaaaagtactactaggagggaatataagatttgtacagtgatcttggacaatcccttgggcacttatgatgatgtcgggctaacctttgaatgctctaggtcactcatcgaaggtcgggattgaccatgttgaagaagaggctcccaagttgcgggttctcgagtacagagatcagcagcgatggatatctcctccactttcctatgggccaagaagcttgacaacatcaaggaaatgggactcgtgggaaaaagtccaatgtgtcaagcccactagggtcctgttggcgcattatctgttgtccaactggatggcttggtcgggtcctcatatcgagcaaggggctgtcctacccttgcatccctatttcagggacatatctaacttctttagcctgtgtccgactcagattaccccgaaagacattaagtacctgctgacgcttttcattctcttcgcatagttaggctagccacaactctcaccttacgaggtaggctactactttgagctaacatctgttttaaaacagggcaggtccggatacttttactttagccagttaggtaacaaggctatgtcaaaaaattgggaaatactctaggagttattccttgcctgggatgtcaggtatgtaagccac

SEQ ID NO: 216402 - DNA, 685 bp, Cannabis indica
tttaaggcaaggtgatcctcttctcctcatctttttgtgttgattatggaatatttgactagacggttgacaatggctgctgatcaatcgaaatttaaataccaccctatgtgcaagagtctcaaaataattagtctctgttttgcggatgatttgatgctgtttagtaaggggaccctaagctccttacaggtgataaaaagtattttgaatgagtttgaggctgcttcgggtcttgccatcaatgcaaataaatcccaactttattttggaggggtaaaagaagacgaaaggcaggctgtgttgagagaaatgaacctgttagaggatgtgtatcccctcaagtacttgggggtgcctcttagaccaaccaaatggaaagcggaagactgtggggtgatcattaagaaaattaaacagagacttcatacttgggcaacaagacatctatcttttccacgtagggctcttctcattcattcagttttgcttgggcttcgcaactactggatgagtatctttgtcttgcctcatagcattacaagggagattgagaaactttgtagagggtttctttggggctggaatggtaacagagcaagctgcatgtggcctcgtgggagaaagtttgccttccgaagggttatggtggtttaggatttaaagatggggtcaaatggaatca

SEQ ID NO: 216403 - DNA, 664 bp, Cannabis indica
atgtcggatggccatctgtgtgggtaaggattataactggttgggtaactgcagctctgtacatctggtctctcattgcacctattatgttcccagagagggagttctaaacccttgtttgtaaacaaaccgtggaatttggtactttgcttacgcttgtctattttatactttgttttgctgtaattttggataaatttcgtagtgctatgtaaataaaatggtaatggggaatgactgaactgtgacagttgtgtgttgatcatatatttcctaaatgtactaatatgttgacaattgtgtgctgagtctcaatgaagaaaactcttttgggttttgatggggaatatgagattgggtggccactatttcaatattggcctacttatttcgtaatcatataattaaagataatttagggtcttaattatattttctaattctcttaactcttgtaattacgaagtatagtattaaatttacagcttttttttttttttttattatttttatacttcaaaatagagttttttttttttttgcatttttatagaattttacattgaaacctctattgcaactaaatctaaattgtcactaaaattcgtataggaacctacataaaatcaccggataaattacatgagaaattcaaattgtaatt

SEQ ID NO: 216404 - DNA, 743 bp, Cannabis indica
ggtcttgaagactggtcgaatatataaatttgctgcgaggacaggtcgactcatggtatagtaagtgtttatattatttgctattgaattacctgcctagactattataaaatattttaggaaaagtagcataatgatgattatgataagaatttgtgtatggtatgcgcatattaatattgatatctatctgagttttaaattcttggaagatgtggattaaaagtgtgataaattatgcaaccaaagcaatcgaacaatccgattagcgagctatcttggctcgggatggatggtaagaaagaaaatcctttatcgcctcaacactgggaacaagtaattgctgctatgcaagatatgattagacaacaaggggaatagatccgagatctgagagaacaacatgcttgtcttgtgtctattcttgtaccaatatcgacacttcttgttgtgccactggatgtgttgaaacatatggaaccaacttatgagaagatcaggaagcaaaagctaaataaaccactaattataggatagaataaaaggttccaggatgaccaggatagcggtcaaggtgagaacaagaaatggtgaccctatcctaagtgtccaagatgcaaaggatgccatttaggccaatgtaaagccaaatcgtatttttattgtggagtagtgagtcatctaaaaagaaactgcctgcaattaagaaagactaatgtataaggagaagaatgtgtgctttc

SEQ ID NO: 216405 - DNA, 639 bp, Cannabis indica
  modified_base (149)..(149): a, c, t, g, unknown or other
cagattttacagctactttttcaactgttgatttacacttgggatcaatgttgcatgtttatttataagcccttggaagatatatcttattgatcatacttttgctggcggacttgattttgtatttctccaaatgagttttttttttntttttatgtatatttgcttgctgaattaaatttgttcggtattgatatatcaacatttgtgaattcttagttcttctggtatagttttgtttgtttaaagtatggcttttgtctatagttgaaatttgtgtattttctttttctttcgtttttttttttaaaccaattttcattcaatttttctgattagttccttgcaatgtatttttattaccctgtttgcttaaagaaattcagcaaacatgacattaattcttagtacttttttctttttttaataatgttatatacatttaaatttgcttaatcagattgatatatatttttttcgaaccattagaattttttagattgaagaattaattagaaaaatggtgccatgagagtatggtataaattgaaaaataatcctttttttttaggacttgttcagtttgtgtgaatattatgttacattattcaaattgtctattcctgttttcttttggct

SEQ ID NO: 216406 - DNA, 785 bp, Cannabis indica
ttttaagggggtgcattatagaaattaccaatcttatatattagtaggcatcagccgcttaataggtatattactactgcgagtctgcgcacaagaagactcaggattttaaaaaacaaagtcacctttcaataactgtactatttttaattttctatgtaaatcgtgtgcaaaatattttgccgacaaatatttttttttttgggaaacgggccgacaaatatagttaagagaaattataataaatgacaaatgatggtattatattagtaaatgtttttattttaaaatttataaaaaaaataatcttttcactaattattatttatattattttttaatataaaaaataataatttttttttatattttttttaagaattaaaaacaaattatttaaagattatagtatatctatattaattttgttaatttttttttattttaaaaattatgtcaatttttttaaaatttttacgagttattgtaagttgttggtatataaattttattgtacagtataattctgttttattgtacaatatattattattcttaaatgatatttattttttattttgtttatgtataatagtaatatataattttgttaatatagtataaatattttaatatatataattttagaaaatagctatgatagagaccttagttttgtccctatagttgagatacttttttagccctttgattgttgatctaatgataataaagttaaaaaaaatatgatgataataatgaaacctaactagtaatatttttac

SEQ ID NO: 216407 - DNA, 1391 bp, Cannabis indica
ttattaaagcaaaattgcagcaattctttaatatataattatagctagagatgaatggatgtttgactttataacttgaagaattatttttacttaataaaaataaaaaattacttttaaaaaataataagaggtgtttggccaaatttttttgaaacatatttatgaaatttagagttaaaaaataaacaaaaaataaacaaaaacttcaaaatgttgatattgttttctattttaaaaataaatttattttttatctaacatttttttttacatactcgggtttgggattggggtctgattccaatttcggggccctaggctagattcgggtcaaggtctaagatcaggtctaagttagagtcgaatataagtttaaaatttgggttcgctcataggtctaagtctaaagtctaaatctgtagaagagatcgagtttgaaagctaggaatattttttaagcaaacgatgacaaccaattgaaaaataatgttaccactattaaatcaatcataaataaaagcccaaaggagagcctttataagcttcatttatgttcttctttcctcctttaatgaagtgtaaggtgttagctttaaagtaaaagtaggtgattttttttgttgttgttggaattagatggagcttttcttttttgttggaataaaagcaaatggtgttagttgtcactattattaacttccggttaaaccattggcctatagaaaattctttcacaattatagagaatatacttaattaaatttcactctctttgactatagtccataataatgtcaaataatgtggttttgcactcacttgtttgaatgaatccacatttgtggattatttaaaatacatatttttgttttctttttgacataagaatggaaaaaaaaaaaaaaaaccttttaagtacaatattgaccctatcaagcacatttttgtccccttgtcaatgaattaagatataaaaaaaagaaattaagatagcttctccttctccggaaagttgaaattaactatttgaaaaagataagaaacacaatactattcacacaaattattgtagattatatatcaaagaaaataaaaatcaataaaaggataattgaaggcttttgggctaagatggaagtcaataaactagtgcaaaactattagaaaattagttacctttaactaaatatgttatttcgtcactaagactagcttagtagtgagggaggaatgggaaaagagaaaggtcatgggttcgaactcaagacctttaagaattaagctattaattaattgtaaaaaatactattaacgctacactaaaaaaaaaataatgttaatttagtcggtattttatagtgatgtatgatacatagataccctttaat

SEQ ID NO: 216408 - DNA, 773 bp, Cannabis indica
aaagaatggaaaattctacaatcttacaatggatatattgatgcacatctatctgttttagcatccaaaataattttttagtcatattttttctcatggtcatgtacattatagttatttaagacatcctgcaaaattttaagaaatttgaaaaagtttaacacactgaatactacgttcaaccagtgtgttgcacgcgtaactattttatttatacgcgtgtaaaataaactatttaaacattgttttctatattataaattatttcgaatttctcaaaattttgtaggatatcttaaatagttataacgtacatttttttagatgccgaaacaagttaagaatgcatcagtatatctattttaatgggatgcatttttagaatcagccttaaataataataatgaaaaaattaatttgtaatgatgattgactgtttgatttgacggttattgggacaaacaaaatactataacctccctctctttctcctgaccctctttctcactcttatttttcatttctctgcatttgaaatggtagttctctctcaatttatctcttcttcatcacaaaaaaaataaaaaaaaaaaaattttgtgtcatttttacaattatgttccactgactcatattcattaaggttgttcatacttcagaattgagttgaaattcggcacgtaaagttagttcttgaaagacttggttgtgatgggggaactcttgaatgttgatatatgatttttttttttttttttttagttctgtatgta

SEQ ID NO: 216409 - DNA, 651 bp, Cannabis indica
cacacattactaaggtaaaaatataacaatatatataaaatttaagaactataccatcctagctagcgttccccaataacattactcatagacaaatgtaaagggcatctgtttaaattatagtgtcattatagtatgagaaatgttaaagggcatctgtggtatctagcactctcctacatattaatatcgctattggttcaattaagtatcgagtcccatataatttaatataataatttttaggaagtcgctaaccaatcacaatgcgacatgtcaagaaggtactaggcaccactagtacttcataacaatactcttatagtattatctaaaacttctaaaagtagagttaaataatggagaggagatagagattaccatttgtagttgaagatgcacttattatgtaacaagattttactcattgtcattactatgtatataaacacatgtttttctttttatattgttttgacagagtatgggatacgtaaatacgatcttgttcaggcatgggatcctttgacagctaacattatttccttttccaacaaagtgtcttcttataaatacaagcaccagtaataaaaaaaacttaactaaataaattgtctcctataatcgccatggcatattagtatttagtgg

SEQ ID NO: 216410 - DNA, 951 bp, Cannabis indica
ttttttactttttttattgtatttttatgcgatatttttgttatatttttcttcaaatactatatttgattgtttctattaaacaattctgaaactcatgaatcttgatttttcatcaaaaaacttgtttctttattagaaaattaattttttcatcaagaaactatgttgagtagtgggttgatggtcgagtcttggagcttctgagaagtttgtaattaggtttagttttagtattgtgttggatttgttcaatattctatacagtaaactagaatacaaagcatgtgaaatttatatgagtttgttatttataaactggtttcttaatgattatatggaagtaacttgtgacagtcagtagtcttatgatccgtaaagggaaataccaggtaagttgtgcaatcccacatcgcctcaggaaggtcgtgtatgatgattctgagactatgtaggtatgggactgcacagttgaagatgacttaaatggattgattggtactacctatattaacaaggtgcatgttattttctggtagcccatcagaaaagaactccacagttaagcgtgcttggcctggggtaattttaggatgggtgacctcctaggaagttttcccaaaaagcgtgcgagtgaggacaaagcacactggaaacactcgtgttggtttgtagggtcagtcgtcgatgtactcgtgtataagagccatcattccatgggggtaagggcccaatggaggcttgaagcggggacattacataactaatttcttagtttggcggaacctgtataaacattcttgtgtctcattcttcatttttttttcatttttaatctttgtttattttttcagtttttgatttacttgtttgttaattttgatgtgattggtattaacttgttttgattttttttttatttgtagttatgtgttgtatgaatgcaacagt

SEQ ID NO: 216411 - DNA, 1082 bp, Cannabis indica
tttatattgggttttaattaaatgattacctatcttgtgaaaatatcataatattttaccttcgcatttaataaaactttaactatctttagaaaattgctacaactactctaagtaataatctcaactcactaacaacataaataaataaaataattatcctcatgtaattgaaatacttaaaaaaaaaaaaaataaaatactattttagtttagatattacaggattcctctctaatgacggcatactatttgagcatttagctttcttgtccactcggaactgaacgaaaggaaatatttaattccacactgtaaggttttttttaaaatttttatgtgtttaatttgaattgtattaaggttcaatgtttaggatgttagattaataataatcaatatatttgaatattaaaagtaatatcttggttaaatatgatttccatcaactgatatcagaacaatagtaatcttttactgttcatgctaaattggataaaaataattttaattttgtttttttttttacatatttatgagatttggatgttacatgttaagtggagtatgcattatatgaaatattgataaattacgagttttaaaaaataattggaattttcttctagaattatatttatctaaaaatttaggaaaaattatgcaactttactttttatggatctcaatttcgatgaaaattgagtgagttatgaattttttaaatttagaaactatggcagccacacacttggatgacatccgagtgcatgcacgcggatgcaagcacaaatgcctagttttctgggtgcatcagctcgtgcacgcgcacagaaccaatgaggccatgcactctcatgttttcctttttttttttgttttctttattttatttttgtccatatcttttgatagaaatgtcatttttttcagtttttcttttactttgggagggtgatcaacttgaacctcctctttatgtggagaagtgtagaactactaggctattcctataaccacatataaatgccttttttggatgtttcaaaagccaaattttataatttttcgagtactttcca

SEQ ID NO: 216412 - DNA, 594 bp, Cannabis indica
aatatataataggaaatgaatgtacaataaatgtcacttttgttagtatatttttgtgttggtaaaagttgatattgcgctagtaaaatacaatttacttctgatgtgttgacaaaaaagttggcaaatcaacgttggtattaaaacttttaccagcacaaaatgaaaagcgttggcaaaagtgacttttcctagcgcgcaaatacgctggtaaaagttagattttagctactgcaaatgtgcgttggtaaaactttgacctttttgcaagcacagtttgcgaaatgcactgataaaagttatttttacgagcgcagcgcaatagcgagcgacatttcttgtaagaactttctaaatatacagagctctttattttattttttttctaaacttttttaatactattttaataagaaacactatttatttttttattataatataaattaatttatattaaataaatttaaattataaatattattaaaataatcaaataataactacatagaaaaaaaaaaacccaatataactagaattattatacatagtggcagacccaatataagattgagggtgtcatatgcccacctt

SEQ ID NO: 216413 - DNA, 537 bp, Cannabis indica
cgttaatacttaaaatttaaaaaattaaataattaattacatgtcaaattactaagtaacaaagaatcttaattaaaccttaaaaactaaaaaaaaaaaattgcaactccaatacgtaataataatccattatagtcagtctttataaataagaaaaaatatatgtaatctcttttctatttttgttagaataggttaatattgctctctctatatatagtaatggaaaatgaaagtagaattaatgaaataaaatttaatagaaactaataattgatataacaatagaaattagaaaagtcataattaattccaccaaacttatatgtaaccatttcatcaaaaaaaaaacttatatgtaaccaaacaaagatttttcttttgacaaaccaaacaaagaaatttaattacctatatactctaaatttagctacaatatttgaggcagtccacacagctaagctagaataataattgaactggtctagtcagactgcaccagagagagggattgcataatatatatttatatatata

SEQ ID NO: 216414 - DNA, 1091 bp, Cannabis indica
tcaccttttagaatataaacacaaaatttcattcctatatgtttgaaaactacaaagagcatttctaatctattatgtaagccaactattgttgcttccatctaaagtgaaaagctatttaatattacagagcaatattgaaacatgaagagtaataaatttttaaatccttacataatagattcttcaatgttaaattacagtgagatttacaatagagagcctgtggatactattccaatagatgaggcaaaacctcatattatctaatgttaacaataatgaaaataataaccataaggttttattttactttcggttaattacagtgcttccaatcctgttttttgtttttgttaatacctataaatctctaaaactcgaatttaagaaggaaagactcaaactccatgcctcttgggcggattcccaatagtgttatttgaatcattaaactttgttaaatgtaacacttatgcagacaggccatgtagatagaattttcaagagattagattagatatagagtccaccttgaattttagatggtaggtactcgtctgataaaaaagataaggcgcgaacagataatgcttctatctcgaacttcactcctctttgcagcatcacctctagctccactctttcaagttaaaagaaactattgtacattataccaattatagccaaccaaaaaaagttagcatcgaaaaagcacatggaggtttacctccattgtggcacctctctttgtaaatagcatctgagtaacatggattcagttttccttttgtctgaaaaagtcataactcatcggtttaagattcacaactggaagattaagatttattaaagaccagtccatttctcaccttctagtgtcaaaggaagaaaacactggtttggaatacagtacttgtcaaaatctgaaggtaaaactccaatccattttatctctgggacccttaaattttttagaatcgtatgccatttgcttaaataacagaagagtgagtttagattggatgagaaaactaacaattatagtagaagtcaagcatagaaagtagataattcagtgtcaagatgct

SEQ ID NO: 216415 - DNA, 523 bp, Cannabis indica
gttccaaagaaagatttcaccgcaaaattgaaaaatcatatcattctaaaatcgattttatggactctaatacgcttctgctaatatttttttgttctattatttaatttatagtgaattatttaagactaaatacagatttaaattttccaacatccaattccttatcacacgtgataaagcaacacaacttagatttttaacatatccaaatccaatgtaaaattatgctcggagactgttaattaaccgcctgttatttactaaatagtgctaactggaagctagctagcttgcttacttgctgtatggattagtcattcactcagcataatgacctatacatctattcattatgtgtcatatacatttttttgataaccatatgtgtcgtatacataattgatatgttagtgatcaatttatgctagaagatacgtaaatataaacagatcaaacaattatcaaccatgcaaaacaataacaaaaagacagtcttctgaaatattaaaatttgaatgag

SEQ ID NO: 216416 - DNA, 727 bp, Cannabis indica
ctctctctctctctctctctctctctctctctctctctctctctctctctctctctctctctctctctctatatatatatatatatatatataatgaaaagaagaagaagatacggaaaaaagtgtctttaataaaaaatgggtatcgatagcgacaaacatattgattcagactatgagtggctcaatcagtctggcgagcgactaatcccaccacacgacagccacagaccctctcccttaaccacttcttgacacatccccaaatcgacagaccccctctctctttctcgtcttcgtctctcctcatcaccattgtgccacctaatagcccccactgttggtctcatcgcacagaaagctccaatccaagcttcgtcacttctaacttctctatcttttttctttctttctgtctgtgtgtctttctttcgtttgttctttttttagtagattatttttggggttttttaatataaccctataatatatatacttatatatgatattagatattatataaaagccaaaattaaaacttgccaacctacccaacccacaactcgtgatccactgactcatcgattcgtccaacctagccattgaatgggcatgtatgggtgttatttttgttaacccaaaactgtgaacctgatacctagtgaaccggaccgatttttagccctagatgtgactcctacccagggtcatcatcaatgggatcctg

SEQ ID NO: 216417 - DNA, 617 bp, Cannabis indica
aatgctatgtttacttaaacaaatctagattttctcaaaaaaaaaaaaaaagactcaaacttattcccgtaaaaattatttttttacaaaattaaaattttaaaatattttttttacatctaaatgcattttcttaataataaataaataatttttaaatcgcttaattagttttaaaatttaatttaattattcaaaataattttttttttaagttctaaattaattttttaagatttacttgaaaaaaaaattaatccttctcatttttattttgaaagagtacgatttgatagttgtcaaaatttgaaaagcaaaattactaaatataaagacaccttagcatataaacaaaataatgagacaaaaactaacataagaattaaatttactataaatataaaaattcagaaagatttttaatctatagatttaatctattttcttatttttaattaacatatatcatttgaattccatcttcaattagatatttatatatctatctatctaaatttgcatcaaatacttgcttaaatcttttatttatttttttattttatattctctctttaattatctcattttttttattctatcaactttctccttaattc

SEQ ID NO: 216418 - DNA, 635 bp, Cannabis indica
gcgctcgggataaatagcacaaaagctaaaactcttaaggaagagtatctttaggcgggtccatagaagtagcagcaccgggaatattagtagtgggaggaagcgtggtttctcgaaggagtcttgccttgcacttcataagctccttatctttagtttgggggagcatgtgcgaaaggttaagattttggttatttttccacaattgataaaattggtcgtcgaaggcacgcttgtagttctgacggtctctcgctgccctctcctcatgcttctgaataatatccttcaaagccttcaccgttgagtcatgttctttaggaaccttatctagcgccttctctagtgccgtattcttctttggaagagcaaagttctgatcaatgtaataattcacttgaccctttctctccttcagccatgtttgcgcatcattgagttccgtcaacctcttaccaagaatgtccttaagttcatccttgtcacgctcatactttgcgtccaaaagagcagagagcttcttctgctccttaagcgctgcttctgtggcaaccagtttctcgtgtaaatttgaagaattaaaattggagaccatgaattgagttacagcctaaaaaatataagagaatgaaagg

SEQ ID NO: 216419 - DNA, 596 bp, Cannabis indica
tttagggcacaaagcccaataaagaggtcttatgtaagagttagtacgcactagaccagacacttgttgtttaatgagagtcgtgagcatgcatcagtctaatccaagataggaatattagaagacaatcaaataaattttaagaataaaagagaatctgtgttagtctataagaatggtgcttatgaaacccttcaagtagcaccaacccagatttttaaatttctattaatgctagaaaatctacatctgagatgatgattactttcgggatggagcagtgattttagagaaatgtaaaagccaatttagaatatctaactctactagtcagactgaatattaaagtagccctgaaggttactagacaattattcagaatccacagtttgtcattattcttgacttcgattaattgatagtgttactttgtgataacacatatttattgccaaacaataaggaatccacaacccaaacgaagagtaaacatataaacaggaatttcacaaagtggtggatttgtgactaagaagaatttaatggagaagaaggttaatactgaatataatatgtcaaatcctattacaaagata

SEQ ID NO: 216420 - DNA, 671 bp, Cannabis indica
ttggctttcttggaatattgctccgagatcaactcatgtcttttttaggaacatcctctttcgattgtccaagagccacattacatccgatttgtgtcgctttgtacccaaataaatgggtttgagtaggtgcaagcaccgacacgaggggtcccataaatcataagagtatatagagttctgggaacaagagtggatgaggaaaatttgagagtggaggtttctggggctggtgttggagggactccaaatgcttgttaatatgcatcctctaagctaataaagccttatgcctaagccataaattggaatagtgtctcaccctccttctttgcatttgccctcataacaaagatcctactacgagtctatactgtagggccatgagtttcatgttgtcgttcactttggacttagttttcgcttccatcattcattgaatgaaacttttcaggctttctcctgcttgctgtttgatgttggtgatggatcccatctcaagttcatagtcacaggcggctataaattgcttccagaagatagattacaaatccttccaagaatgaatggatctgggagcaatttccaccaatcctcagcaaacttggtgagagtcaagaaaaaagcataaacacttagcgtcatcactcaccctcgccatttgcatcatc

SEQ ID NO: 216421 - DNA, 653 bp, Cannabis indica
ctcttaaaggaggagagaataggccataaagtcaagtattatccggatatagcttttgcaaactgtgttgagcagtgtcgattggaagatgtgaaggcaactgggaattttttcacatggtcaaacaaacaacaagggaaagatagaatttgttcaaaaattgatagagttatggctaaccaagcgtggcttgatcaatatcagacagcagaggcaaactttctgagcgaagggacatttgatcattctccttgtgtgttatccttgtatcaaaggagagttgaaggaaggagaccatttcgttatttcagaatgtggagtagttacccgaacttcagcaataaggtttagaatgtatggaacaatcgggtatatgggaccaagatgtatcaagtgatatccaagctcaaagctctaaagccagttctaaaagatattaacaaagatggtttatctgatatgcacacggctgtccaaagagcccaaggtgatctagaaaatgtgcaacaacaactacaacatgatccgcttgatattgagatgattgatagagaattggctgcgagaactaagctaatccgagtgcagcaagactattcaacatttctgcaacagaaggctaaggtcacttggatccaaaatggagatttgaa

SEQ ID NO: 216422 - DNA, 675 bp, Cannabis indica
cccgattggagggcaaaaatatcacaacggttttaattaaaaatattgataggattgtggggataagttgattttaaaaatattaaggtattttgcgatactcaaagttggccaaataccttaaaaatagatatttcttagagactaagaaataataagataactattgataataaattttttattaatattatattattacaatgattattattattaatatattatattatatatataccaaaaaattatcacgtaggataagtctcaatgggtaatatctattaatgggtactaaaaaaattgatgaagtaacaatttggtgacttgctatagcaggttaccaagaagttttttttaaaaaaaaattatatttttttttaattatagaaaatgatgattcttagaaattaagtttttttttttaaattcttatattatccttacattaaatatttaaatgtattagatgagggttattagtgatattaatttattatgttgttctttgtttcaccattgaagacattgagattggtatgaagaatacactggttttttacgtaggaaattaaatcaaacttttttaaccttttatttaactaattaattgggtctttgtgttgtgttgggttctatgcatattcacaaggtagacactctagtatcatacaa

SEQ ID NO: 216423 - DNA, 732 bp, Cannabis indica
gcctttttcaaggctatgatttcccaaaccttgtgaaggtcacccacattcatcttccaaaactcaaatatttggacgtactaaataaaagttttgattaatacataaacaaataaataaaaaaaaactacaatggagagttataaatatgctgtataattattttttttagaacatgtttctaaaacttaattttaataggtgatataaatgtgtgttgaattcggcccaagctaataattgtgccaaatttagtacaaaagatagcatgagcctaaattttaatccacaataaatacttatttttttaaaggtaaattgcggcataaatacctaatgtttttagagtttatacacttaaatacttaatgttttaattaaaaaaaaaaaatacctaatgtttatttttggaggcaaaaatacctaatgttataattctcttacaccgttactactattttcgttaattcataaatataaatgcgcggagggttcaaatgcattacatttattttttattttattttaaaacttaatattcttaatatcagaaactaaatgctacttgtttaaaaaaaaaaaaaaaccagttctcataacaattttcacatgatattggcacttcaattcgataatcatgttccatatactgcactggttcactcaactatggtaatttagtattgcatctctttttttttaaaaaacaagtagtatttagtttttgatatt

SEQ ID NO: 216424 - DNA, 802 bp, Cannabis indica
gtccgacccacacatctctcgcttgcacttgccaatgctgacaagccgtctcgctactgagagagacacagctggggacgtgaagtccaggagatggaggaccagggagaggtccgtcctgctactcctcttgaagccaaaagagatgaggaagaaggagtagctcgagtgctgccatttgatggcttcaataaagaaggaaaactcgtgtctgaggctggggagatcctagaggccagtgaagactatgttactaaagagtacaccgaggtttttcctttgaggagactaggtgcactaggaaatcgatgggtctctccaccttctatggtgaccatggccaagatgaagaatttactcaaccgtagttacttagagagtgtcaaatgcttccttccctcccccgaccagcgggagactagcctgggagaaggttattgcgcttggtcgggcgttcataccaagcatggtgctatgtagcccttgctcccatacttcaggaggattgcaaactattaccatataagtccgacccagtttactcccaagggcatcaagtacttgtccgccctattcgtcctctatgcctcacaaggatggggtgagccgtcctcacacgacaccaactagctctttgattggaagtcaagtcccaagcagaacaggtcaggatacttctatttttctcagatcgagaagaaatggttgacgggcaccatggccaccgaggtgactaagataagggtactttgtggacgagtactacttcgttaagggaatggacactgtccgcaccagtttc

SEQ ID NO: 216425 - DNA, 624 bp, Cannabis indica
aagtaaagagttagttattgagcatttcaccttaaatacatgtaatagggagattagaataatttaactctttcagctttatctgcaaaatcaatagtttgattgaaaaattaaaattaacttcattaatagaagttaagaataattgttgagagtggagaataacctttaactatttatctcatatcaaagtatcacatttaattcgtttttatttttatttatgttattttattctcatcatctaaaccgtctatttctaatttttcacgctataatttttgaataattgaactaacatagtcattgtaggatcgattcttacttacatttatactaaaataattgaaagtattggaatcaaaacaatagtaaatttgatacgacatatgataagtgatgtgacacgcatcacttgtctaacacgattaataaacaggttgtgtccgggttgacacagctaacacgaaactaacccgttaataacatatttaaagttatttagtactttaaggactcgtttggtacgccgtataagggtcgtattgtattaaataataaataacactatatttggataaaataatgtattatattaattactacgactaaattttttaaaac

SEQ ID NO: 216426 - DNA, 1103 bp, Cannabis indica
gcaaggcgctctaccaatctactagttctaatttggcgattgtcctctctaaggtgctcctctacaataccacttagtgacacccaaattttttctatttatgtatccatccttttgagatgatgatgataattgtattagtgatccaagattgtttaatcttgatgttgttgtgagcctctagttttactagagaagaactttataatcctattattaaactttggtgatagtggatgatttgagcggactacggtcccgtagtttttttcgcattgggttcccacataaaaatcttagtgtctcacttttatgcttgattttgtatttttatattgtttgtggtgctttggttgatatttgatattgcatatagtggtgtttgataagtatcctagtttttgacatacaacgagggaaatattgtggttaattacaataggttttcccaacaatttataacgattgtgcgaccgcacaactaatctcatacgttattatcattttaattatcgcaaaataataagacaaataaatatttcattattgaaataattagtcatatggatcatgacctccttttttattttcacaatttaaggtataaattatgcattcaaatttttttaattaaaatcaatcatcttatctaaacattttatatagaaaaattctatcactaatattttcatataaatccctcaatttttcagttttaaaaaacaagtaatgttgtgatggccccttttgtagttgtcatattacatttaattttgtggagaagacattctaatgacaacacaaaacaaaatataaacactttaataaatagtagttaaattatttattttcattatacaaaaaagtctaaatagtcacttaataataactacatcatcagtcataccaatttatcaaactcaaaaactgttaatttattttattataaaaacacatgtaatttctttgttaattttacagtctttaatatatatatcataaaatcaccatctttctatatattttaaaaataataaattatgtttctaatttcaatggtccgtcggacatcatctatctctacattggtatgatattgtccg

SEQ ID NO: 216427 - DNA, 632 bp, Cannabis indica
atactgagtcatatattcccgtgatattgggcaaaccgaccacaaaatctatcgtaatatcctcccacttctattttggaagtgctagtggttgtagtaaccttgctattttcttatgttctgtcttaatttgctgacatgttaagcatttagacatgtattccactacatctttcttcattccacaccactaataataagatttcttagtgtctaggaaaataaatgtatacccaaaattatacctacatttaaaaattcacagctaattaccttagcaagattatctgatttattatgtgtaactaattcactatctccaagatacaatagcaatggaacaactaagggatatatttcactcaaagtaaatcaaaatattctccatgttgcttcgagtagagaaatccacagagtgaaattgttgaatctcatcaacatcgtttgaagcattgtcactatttacagaaaaatttatctgatcttgacctttgtatacacatttatatgaatattttacgagcttaatagtagaataaattttaacattaatatgaaaatcaaactaacataacaaatataaattatatgggattacccatccattatctaggtaatgtccatgaattttg

SEQ ID NO: 216428 - DNA, 759 bp, Cannabis indica
ttttatttttctgtgtgaaatttctagtgtgaggctcaaatttagtaaacgaaaatctgcgttaacaatttggtgctctcattgagagcctccgtgaaaaagctaagaaaaagcctcctgacataaaagtaatggatgacgccaaagataatgatcctcaagaaggaatcagtcatcaccctggaaaagaaccatggagtcctcagggatctattgaatcatcgcatgaatagactgcaagccccaagaaaactcggtattggggtccctagtttgatggaccttgggacaacaacaaccagtcacttcctaaccaggttgaggaggatggcacctacgacacaaccagatacataccaattgtggaattagaaaaatcaccatcttaggcgtcgattggaggaagtaaaccggcgtaatgccgagttagagcatgaaatagctgcagcgagggtagcgcatgagaatgaaacccaaaatcaacctaaccttgggagaagagatccacgaggcaaaccttatggctcgcaaaccaaggggcaggagacaacccatagataaacttaaaactctcaggagatgtaaacctgaagaaactgaagaaaaatctagggatgcagcctgggatatgcagaacttcagatggaaatcgccaaccctctcttcagattcatcaaaaagaaatcgtgcaaaccgttatagggagaataaggtgaactcaaaaccttaagaggaagagcacggtccgaccgcagtcac

SEQ ID NO: 216429 - DNA, 1432 bp, Cannabis indica
gaaaagtccttaggccgaccagctttcacctcatctcgagtcttgattagctcaaaatcttcaaactgtgcctttctgattctctctagtaaatcagattggagtgtcaagttatgcaactttccaactacaagctcaattcccacattaaccatctttgaggccagttgaggagatatcattatagtggtgaaaacctgcccaggacgtcttctactcagtgcatctaccacaatattggctttcccggggtgatacaaaatctcgcagttgtaatctagttccaaccaccttctctgcctcatatttagatctttttggctgaaaaagtacttgagactcttatgatcagtgtaaatctctgtaacttgtcctcagtctgcgtgctaccctttgaggatctcttacttcaggagctttgctgagctcctgccatactggtgtctggtgtggattgggacaaagtttggacactcacctcaaaggggttgctcatgggcgcaccaaaatgtgacaacgcaggatttaaagcgagactttgattttatcctagggtagcagagaactatagtccgcttgcttggggagtggcagcaggtggagctcttgaagctgtgctctggcgcatatcctgacaccccggtcgggtaataccctccgtaagccacaatttgggcttcttcaaaattgatatatttttttggactctatttttaaagtcttggaggctagctgctcctcttattgtaacacattccaaaaaggggttcccgtacggattcctgcctgaagaagggccagatgttgccttcgtctaccatcttggtaattgaggcctctctttgaatctttttataaagttctttagggtttccacgggcagttgttttatgttggttagggtgctaacctcgaggttgatctttcttgttgcaacaaactgccgccggaaacttacttgcaacttgttccaacgatccactgatcctggctccagttttttgaaccattcttcagcaaactcgcttagtgttagtggaaagcacaaacactttgcgtagttactgaccctcatgacggtcattaccctgttaaatcgcgacagatggtcactggggtccgaatctcttgtgtaagtttccatttcgggtattatgaaatttttggggagctccgctccttagatatttctagcacacggttcccggtcctcgcaatcagagttcgaatcatcccctttctatctccgagaaactctagcaatgtctttgcagaggatttctaactcggccaagattccttcattcaaggcgcaccagatactggtaatgcgtgctttttcttctcgagatggtttctcaagtcaccatgcttctcgttgattttttgccgaagatcaactgggggatgcctttgacctttcctccctctt

SEQ ID NO: 216430 - DNA, 991 bp, Cannabis indica
gaattataatattcttaatgtatcattcaaataatagatacaatgacgatttgtgggtaacgtattacttttacagtataataatgtcgggctttaacaaccaatggtgaacgcgccaaaaaaaattataaaaaggtttagtaactcactttggaggatcactaaatattttctttcccgtcactcaaattaatggcgtacactaataagtcactaaagtagtttagagtccttaatgtgtgtggctcaaacccattttatagtatgtttcaaaaaaaaaaaaaaacccattttatagtagtgatttgtatcgtaattaattgaaacctgatgtgagctatatcctccactgctcttgtagctgagctaggctaggagtttcttgggccttgatattccttttctttttttaaggaaaactgagcccaaatatttggactcaatatatactgtttataatgacaataataggagctaacgtttagtttcattatctcgtcgtacatacttcaaatggataacaaattaaattaatatagataaatcattttctaattatagagcattccttttgcacatgatcaatcaatatcatcttaatttccaaattaaatcaagtataatcttttgtcaaaccaaatgagttctaacttattattaaactgcaagataaacatcaatttattttaacaaagaagaagaagaacaattaatcttattccatagttttcaattaactaataatttacatcatcacaatattaggatatgtttcaaacgatttgaatcttaatttttgtagatagtgatgataattctccaatatctatcatcatggtcattgatattcttaactaatttaatttaattttatagcttaaggtgttaattataattagtactttcaatcaatttccgagggcctggaattacatcttcaggaaaggtcaatccgtacttgcttcattatcattttaaagtaaactacata

SEQ ID NO: 216431 - DNA, 981 bp, Cannabis indica
aatcagcgcccataagacaaagtttgatggcaagcaacaatgtcgaggtaggcatgagaaatgcttcagctaccaacattacaaatggtcctccaatccacccagaacaataataaaataaatgtggatgctgtcttagacaaccgaaggcattgtacaaggttaggagtgattgttactgattgggaaggaaacacgatagtagggttttcatctcctatggtgggttctgcctctcctctttacactgaagttcaggcccttttttttgctctcagatggtgctccttaatgaagaggccaatcacacacatagagatagattgtctccaattgacattgaagattaaacacaaatggaaagatcgttcagcaacctcaaggttcatctcaaagattatagactctttatctactttcctaatatatctctgtacaacgtttcaacttataatattgatagagaattagtttggagagcttagctccccttttttgttgtaattataaccttgtactcgtttcccttttttcttgttacaattacctctaaaaaagtatagatgtgaaagtagaatctttgaagcaaattgtcaagtaatagtagtgcaagcgatttagagctttattcagacgtcttctcattggtttgattgtgaatgtcaataaacagttgatgttaacttgcccaagtatttctattgattttgtaaaatagagttgcccatattcttgttagaagcatctccagtgggagttgcctattaaagtgatttcgccacatatgtaatgtggtctaatttttaagactaattttatgtgaagtgttgctcaatatagataacgactatataatttttttttatttttaattagaaaaaagttattttgtacccaaaagaaattattaatttaatgtgctgttgaattatggtggacaatttttagagttttcaactattgaagtattttttttaaaaa

SEQ ID NO: 216432 - DNA, 1068 bp, Cannabis indica
taatctttttttagagagaaatatgataataatcctaatttcattaaataacccggttattaattctatgtgcggatatataagctttcaatttgatcttatttagataaaaataattagatattcaataataatttgattattttgcaaagttttaagtaataatgcaaataaagagaaatattagaggaaattagactctatatcctttttatattgtactcttttatttttatcctcttttttaaagtttattatttttacttctttttttaaacattgtatcaattttacccctttcacttcaagatactctccatgtgactcccttatgtcagggcattttagaggtaaatttggttaattgcttaataaaaaaaggcatttttcaacttacccccatttgattagactgtatattcatttttttatgttaatttttatcattttttaatacttttaatttatatctaattttataggtcatgataagttatgtgaggtcttttttttaaactaaaagttactttcaaaaacaattacgaaaggataggcgaattctcgttgtaaatgcgagactagcataagagggattaacaccaatccactggcactaattttattagtcaaagtataattggctaaagcgtcaataaccctatttgtttcaccgtatacaaaagaaattccatctacattctagaaaaagaacaaatgaacgaatataatttagtacactgtcaatgtctcaacaaccttcctcctttgaatagatcaattggatagtttaagtacaatccgattcaaactaaactgcgttaatcgtggttggataccaagctataaaccagctgaaatggccaagagtttagcatgcaaaggtggaatttcctgctgcaacacagtagacgatgcataatgaattgattccatatatacaattgcaatctcaaatacacatatgtatgttaaaaaaattaaaacgtaaagttttctttttaagaaactttttggttaacattttggagtctggtcccgcccttgcctgacccacccgttatcgtcgag

SEQ ID NO: 216433 - DNA, 1672 bp, Cannabis indica
aatttaacttttaaacataacccaagagttcccaccttaataaaaatagtaccgttacaataagttaacctcctaaaaaatcaagcatatataaacccttgagtggctgtggtggtataacccttgatccaaacaaaaaacgatatcagtgaaatatctgtattactacagtacacaacacgtggttatataagctatgccaattaattttgagaatatatacatacatcttttaccatacaactcaccatattctttactttctcaactaactttcagatgtacatgatatcattctagtttagcatctagttgtattagagagtcttacattaataatgtgtgggaatataatactatacaattttttattgcctattaattttaaaattgaatttcatacgtgtatatcttaatattattcaaatcgaagcgtgaatgtgatataaaaaaaagatttttcttaacatttttaaatattaatgaaattaaaaaagaataataaagacgtaagtatacaaaatattaattttctaaacaacataaacttaatgattttttttaacgttataagtacttaatattaataaaatataatttttgttaattttatcagtataaattctgttagtgtcttaaacatatgacacatgtaagaatcatatttaatatcattaggtttttaacaaaaatatgtgatatcacttacttttaaatttaagatattaatgaagtcaataatgacaaaattatgccgccaaaaaaattaataaatttattataccgtttataaattcaaaattttaagcatttaggctatacaaactccaatttagtaaaattttattagcaaaatgctccaaccaaatggcaaaaggcatgctatttatgtgtctatagtgttgcatgattttctttaactttttactaattaaataaccattttatataaaaaaaataaaaaataaataattaaataatctatttataattaaaacttatgaataaaatattatactaatatactattttaagtgtattttagtattatggttgaaatatgaagaaaaaaaatactaaaaatatcaatagtgtctaacactctctttaatcttatattgctattaaccatgaaattaagtatcaaattatatacataatttaatataataatttgtgttaaaactgttatttttttttgttgggattcaacaataaaatttgagtatgctatatacccaatcaacaatgatagtaagggctatatatattataggagcatagtatatatatagggatatgattttgttccgtgatgtactttcacggaatgtattccgtggtacattagatgggtctcagggtacattaaatgagtgtcagggtacgtttctactttttaaccctaattactcctagatcaatctcagccgtcagatcaaataatttcatcatctgacggttgtcgtacatcacggattacaatccgtgaaattacaatataacagggcaaaatcatatccctatatatatataataaaaaagatgtgtgaaatgagagagagagagagaatgtggtgtaattgaaacgaaatcaagagagaaaaggcggttgaatttaaccgaaaatcaatgtgcttctagggtgaatcacgcgttggagagctacggc

SEQ ID NO: 216434 - DNA, 600 bp, Cannabis indica
gtttgtatgtaaattgtgtgtgccatatgcctagtaaaagttaaaatagtttattgtacagtaaaataaaacaggtacacgttattaatttataatttctttatatgcttaaaataaaaaacatctattttgcccctactaattttcttttcttcatgtataaatgtttttttttttcttttctttttttgaaaaatacatattacgaaagtcactttgaaagttaactttaggagaatgttttcctctgttttcttctcaaaaacattttgttaattagggcatatttaaaattagtgtataattattatgtcgtataattattagagtagcaattataatataatttaaataaaatatgttcgaatatgagttaataatttatgaatttttaatgtgttgttcggtaaaatagttaataattacctatgaaatgattattttttttagcggttaatatttaaaatataaatttagtaattacacagtgaaattacacttaattttacaacaaaatcatgaaaattgaagagtataattaaaaacttttgatgacctcaaattatatagttacagtttaattatatgacaaataaatat

SEQ ID NO: 216435 - DNA, 906 bp, Cannabis indica
ttatattttggcccccattaattttttacataactctatagtattctttttaggagttggatgattttttttctcgggttggatgaaattgattatgcttaaaagagacaaataaatattattaagattatatttgtaattgcgtaaaaaatatatatatatataatgattttttgatgaattaatttaagtgaatgcactttattaatttgctctaggttttttgtgatttattattatcattattatttttatatatagatataaaaaaagaacgtggctaattaatttgatcatataaatatatatatcatgattatctactttttaattgtctaattatatcgtcccttctttaaaacctagggattcgagggttaataacatacaaatattatatgtattatatcttatatatgcacaattaataaagtgacatatatactttattattgttagaaagaaaaaaaaatgtgagtgttacattgtggtgtgtaatttcagctatagtgagatggaaattataatagatttaagtattcagtttttaacaatatatatccaagtgggtccaatttataattaataattaccaaagacaaaagcaatattcaacagttgaaatttctttatcttcaaaaacgatatatatatttgaaaattctgttatataattttcctttcaatcctggcacgcataatcttatccaaaaattttcataacacaaaagaaaaaagttacataattttgtagcctaacacatacgaaatagaaatcattttgatcataataattaatgattacatatgtgagaattaaagttattatatttatatatctatatatacatatatatgttgtagtagtagtactctaactttgactggttaatttcatttatataa

SEQ ID NO: 216436 - DNA, 881 bp, Cannabis indica
gttcttatttgtgaggagagtgttttatgtgagaacttagttgttcagctaggttttagtattttcttagtatagtcttacgatcgatttgaacaacttgactgaacaagtgaaaagtcttcgaaagaagacttgttcaagccttacttcgagagaaagtaagcactcacacatcaaagtcgaaggaagttcgctatttgatggtgtttcagaaatcagattcgtcaagtgaattacaaaggattacgacaaagatttagaggaagtctaaatttgttaaagtcaattgtctttgtaattatttaagactttactaattaattacattctctgggtgtgactccgtggactaagagcgttcgaaaggatactaataccacgtataattctcttgtgtcaagtgattttattttctagtgttattttatttctagttttgtttctgcaaaactgtattctataatgatagaattatattttgctgttgtagactattagttgtatttatactgttattttgaaaaaatttattgcctttcgcaaaaacaagattttcaattattattattattattattattattattattattattattattattattatcatgataaattacagtagagtaggcacactagacgaattttcatgtactatgttgtttttcgtatcaatctattattatatcatatcatatggtgattgtttttttttttgtcttaactatcatatgatgatgtcgaggattactagaaatatttttattttatttatttggtattttaactaaataacttgaaaaaatataaaagaaaattaaaattaattttttttaaaaaaagtacattaccagagcatgactgccgaagcgagagac

SEQ ID NO: 216437 - DNA, 518 bp, Cannabis indica
gcagtacttaatttatataatacaaacgtatgagtgtttatatatactatagtgttatatataatccacatataaatagtactcctattagaaaaaaagatatatacataatcctatattgttaaggacaatatcagattttaaaaacattcgttatcttactttttttttaaaaaaaaaacaaaaaataagaatttgttataatataactactcatttaatgattttaattaactagtaaaaaaaatagtgggtaataatataatataatatattatagtaattaaatggtgtaattgtgttagaattatgttgggaggttctgatacagtagagcgcgtccatggcgtgttggtaggccaccggtggtaagttgaaaacgtaattaattatgaggtaattaatgtcccttacccaatatatatatctgctatttattttctttgttcatcttctcctgaattgctttcaaaattactaattaaatcaatatacaatataaaacatacatttgttcc

SEQ ID NO: 216438 - DNA, 640 bp, Cannabis indica
atcaattcttagtattaaccatcgtaatatgtcatatcacttttcatgtaattaataattattataaaaaaaattgttagttattcttaaaacgtcaccgtatactgataatatttggcaccaatatgcttatatatatacatattgagcaagaaagcattcaatgaatagtggtaatatatattatagatataaatgtgtaaatatccttagaaggagaaaattgaaaaaactacttatatatatatattctcacgtatattcgaccccataattaatcttataaattctaaatctgaatgggcagttataatgtgaacttgaagaacatttaattaatttatttcaaattaatataattcagaaattgttggaatattcaagggctgtgatcattttgatttatttcatgatactgactactcttttcactaacagttcccaaacttaatgcctatatcaatgatggtccatgctactttcattggataaaacacaaatataaaaaaagtagttgtaaattagtaatgactcgtctcatttttatatttatatttacatatatattaatacactttttaattttgccttttttgaaagtcaaaatttcaaataacaaaatacgggtgatctaactcgt

SEQ ID NO: 216439 - DNA, 615 bp, Cannabis indica
tgaatctgagagatcgatctgccagagaacctcttcaccgagaaatccaggccaaatcggccagagaatcgatggctgaacgggaaaatgaagaagtttgggtgagagggagagtacaatacagccttatacactgtttttattcagcataaaataatacaggatagattgtattaaaaattagggttgtaatatctattacaatacaaggttccacccaaacattgtactcttataatttaatacaatacggaccccttatacagggatccaaacgagccctaaaagtattaatccaaattatgtaaacacgtcagtcctttcaaaaagaaattatgtaaaaaaatactttaatcattaaaaatatatgaatctaattaagtattagttttgtcagatttctgggtccatagacaaagaatttaaggttcaggcaatttattttttgtttccataggcaaaaataatattattataattttcccaccgatttgactaaataaaaaaacatgtatagttattattgaaaaaaataaaaggactcaagaattattgatgatccattcttgttgtacttcatttaaaaaataaaaataataattgtctcctaaaacg

SEQ ID NO: 216440 - DNA, 594 bp, Cannabis indica
aaccctttagtgtcgccctgatcagcgtcggtagcgaatttcgccaaaatcgacgctgaaagggctaaaaaatcgcttctaaagggatttttgtagtagtgattgcatctacactttttcagcattttatgtggagcgtataatctctattccattaagtttctttaggaaaccaaataggcttgtttggcactaccatgaatcgagtttatttacggtcaaaataggttatcacttggcagcgtatgtagataaacttgagtgctcttcttcctctacaagccatgaagcttggtgaaaaactttttggtctctacatttgccatctaaaatttaaaaaaaaaaatctcagaaggttatctatgattcactagctaccagtggcaaaaaaacttatttaaaagaaagattatcactagtattacatgttctctctgctcacatgcttgggaaaccattgggcatgctttatttggttataaatatgcgaaataagtttggaagctctcaagtttttctatagatatctagcaagccaatacaatggtgcaagacgattatttgatgcatttatctactctatactcaaaattt

SEQ ID NO: 216441 - DNA, 832 bp, Cannabis indica
atcggaatcaatatttgtaatatgttatttactaaaatcttttagaaatggaatagttatgatttatcttgtttactttattaggaaacgtaatcggaatgcttaaattgactaaattgcccttttgagttaaactatattatatggtagttattttgcaagacatattttaaaggacaaaattgtcattatatatttaatattaaaaataaaataaaaataataaaaatccattacccttaatggcattccttacaaaattggtgggggaagttctccctttcttttctcccttatttaatcaacttctccctttcctaattttaataatgcaagtaaacaaatgtaagggaatgattactttactataaatttccattacttattagtaaacatgccataaatgatcacacatgtctttttcaatagtcttcttatgaggatgagtttaagcgttaaattgttgtcgtttagactttagataatatggtttgagcccaataaggccaatcatcaagcacaacaacctagaacttcctaggatgctttttgtggacactggtcgttatttagtttggttgcgttaggctaggtggctactagtcacatctgtgctatttttggtgacaatggtggggacagagaattaagtacgtagttggaagaagtcatattccaaatgttaattagctggccataagtaatggtaggtttaaggttttttctgatatgatagaagagaagttggactcacataagaaaaaaggttgtaagatatcaataagctaaatgtcatctagatagaacctagctagctgtatgcattgatatt

SEQ ID NO: 216442 - DNA, 1161 bp, Cannabis indica
cttcaaagcagcaactaagtttggctcatccttgtagttaaagcatcatcaaacccaaacttattcttcaataaatcaacctataccattaattttcacttgtgaaatttgattttattaaaatgtaaacattattctaaaaaataatatgactatacgattaacttatatacacatgcatgaattatatattggaaaactttttatatagttggagtggtacttttatcctaatcaattaatatcctcatttttagcatttagaataatcataatttaaattgtctatataattgtgtacattataattattgttaacattttatttattttgaaaaatttaaaataatttattatattaaaaataagatttaaacaattcaattgcactggtactcttattttttcatactcctataattgattaatttttgtaacaatttatgatatggatgaaaatgcttatattgtaaatttttattggattatagtcatatagctaataagttttaattccataatatagtttgataattaaataaataatatatgtatgattaaaatacatataaacaataatataaatcttcatataacaaaattgtgttataatatctttaaatactaaaaacataaaaactctcctatcaataataacaaaagtagcaaaccactcgtagtgcttagcacttttctacgtgttaatatcgttattagtgaaattaagtatagtgactcatatagtttaatgtaataacttttagagagtactagtactagccaactacaaggcgatacatctaaaaagtgttaggacaacactaatattcaataacaatacttttttgttttcatatataaaaatattctaataataatagtttattatgaataaaataatagtaaataatttactttgtcatttgaaccagcagttccaaccacataacaaccatgtaacttagcaagttggccaacaagttgaccaacagcaccagaagctgttgaaacaaaaacattttctcctttctttggggagcacacctcaaaaaatcccacataagctgtaaaaccaggcattcctgcataatcacacattttctatatatttataacacaaattaaaaatatatatataaccaataagatataaaaaaatat

SEQ ID NO: 216443 - DNA, 1090 bp, Cannabis indica
ggatcaatcgtaatttctcacttattattaattagttttgagatgtaagttgatgcttatcaatatggtatcagagtctatctctaacaatctttcaatattctcagccgtaaacaagaataagctagtaaatgacactcccagccagaaaagcaatgattctcaacagctattactaaaatttgtgcttgaaggttcgttgatcagatttctctggtcttctttggtttgttgagccatactgacagtacattgaaaaatacagccgagtatagtatcttaagcagtaactattggtaccatattgatattgtctgcacgcataaacaagtttgacacagatcaagtcccgtttctggttatttatgaaagtatgaagccaatctgataggatctaaatctcaccatgcatgcacatattcttaatccatggttaattctatatccagtccaattcaaaggattcttttggatgaataccaattcaaaggattcttgatatattaaaactcttaattaagaatgttccatatatcgagtactcatcttggcagcaaatcagaaactgtcatcccagcattgacggagaaactattcatagctattatatcttggcgactagtacgtctggtcgaaatgaaagcaggtcgttcaggttgagaaagagtgggagcttcacttttcagagttaaaactacagatgacatggaaggcctcaagtttgcatcttcttgaacgcacaataaagcaatctgtatgtatctcataaattcattgggataacatgaatctttgaagcacggatccatcaaatctaccactttctcttcattccatagttgccaagcctgttagtatatgtagagtttcagaatatgaaacttgaggaacagagtaacaaagaaccaggaaaaacaaaacagagtatatgaaaaactaaaaccagaacttgcttacttgacaattcttaatgtgtttatatacaagagagagatagaaacaagactgtaacaactaagaaaacagttacaaagtagttaaaacagataactaactcttacaccttactcaactatactaacatccccct

SEQ ID NO: 216444 - DNA, 782 bp, Cannabis indica
gacaaattaattaaattaaatgtggatataatttctaactacctcgagataaatcaagcaagataatttttcttcactatatctatatttaaaacaaatttatttgcaatatataatatctaacctaaaaataatataattaacatgcttctattttcgaaagatgatcacagtgtgtctactcatatttcagattgtacttaattttgtttattccatttccacttcttgagaaagaaaaaaaatctaataacttgtttctcttcctataacacatcatatcctacattaccttaaaatgatatttttcatgctatttttatatatttttttttaaaaaaaatagaatagagacacagatgggagtgagctcttagatacatttgattacctttagaaattaactaattagttaccaaaagtgtatgtatcttacaatttaaaaaataacatatatagtgttactgttgtacaaagtaacaagattttcattgatatgataacaatttagtttatttatatgttgtcctttttaaggcttggtaaagtaagcttggattggatatatcgttatacatcggattggaccgtttttcctggcagtgactcaaaaaaaatggcctaccgttttagagaaacgacctaccattttttaggggtttttttttccaaaattctatttttggtattttcttgatatttagggtattgatagcatgtatgagtttggattaaagataagaaaagtatcttcgtaccacttagcatgtcaaaataagtta

SEQ ID NO: 216445 - DNA, 507 bp, Cannabis indica
gtccaagtttgggttcggatccgcgtccggctcccagatcgggtctatgtctaatttggagtccgggacttggtccggttacggttctagatctagctctgattttagttatggttccaagtcaaagtcctagttccagtcccagtaaacttctggttttggttccaattttgggtcacagggtacgggttcaggtcaacttttgggtttaggattgggttcaggtgcgagtgacggttcgtgtccttgtcatggtttgagtcgaggggtgggtcccaaatccagacaccgactataggttttgtccaagccctaggtccagatccggatcctaatctcgggtcccagtctggttccattttttgtgtcgtgtcgcgaactgggtcctaggttcaagttcgggtctaggttgggtactatgtctcggtcctagttctgtttcctaggtcactatcctgattttttatccaggtccaagttatgttgtgggtttcggtcccggtctag

SEQ ID NO: 216446 - DNA, 670 bp, Cannabis indica
gatggagatcgggtttggaagtgtcaggatttgattctccgacgtcgtttaggagatcgcctatgcaaagaagtggtcctccgacacctctcatcttatcgctctctcttctttctccccgttgcggcctaccctacagtgtctacactacacatctataagtgttttccataatatttttgtttttaaatattttaatcacaaaattaagagtaaattttttatttttaattttttttttcttttttttagtaaaaccaaagtatattttattggctcaaaaatttagactaaagacttttaaactatacgcgcttgctatattgacaagaataaaatagttgctaattaattataaaatagaaatataaatttatagtagttcacttcttgtatcgcgacagctagtcactaattctcggtgatgttgcgcagattttcgttaacaaaaaaattaagcctttttcgtaataaattaaacacagtatatgtataggaaaattaataagtataaaaattataataacgccaagtattttacgtgtttttgcagttaaatctgcatactccacgagtctatcttattcaagatatttctgagtatttgatacaatattacaatttgcgatttttttctctcaaagattttcagtccttttctctgtagaat

SEQ ID NO: 216447 - DNA, 725 bp, Cannabis indica
ctagggttcttgagcttgtaaaaccccattgtagtacataaaggccattcggccaaatacaattgactcatagactaggattcactaataactgaaccatgtaaaaatctcaatctttattctctattaatttatataatctcgcaactcttattttaatcgggttttaaaaatctcgataaatacaatctaattcgcatatgtgtagattgatcaatcgattattttggattggttactttttaatattgaattatttaatatttattaaagtatattttttttcacataactaacaattgaatcaaacatatgtttaattttattttagattatatttttcttataaataataataaaatttacgtttgacctcttaagtgttgaaatttttgtatcatatgtattaaatttttaaattatttttttatattaaaatattaattgtatgtataatatttttttaaatatatattcgattggatcgattatttttatatgtcaattaacatctaatacgtcaaagtacgaatcttagatttttcaattcaagtgctgattggcgtgaattagatcatacaagttgaattaaattggagtatgaacaccgttgtacatttgtatacacttaaacagtctactttaacacttaactgaactttttcaacgaaaaaataaaaatttaatttctaagattaagtgtcccttattctaaaagtcaaaac

SEQ ID NO: 216448 - DNA, 526 bp, Cannabis indica
tgatcttctctctgacaatgtggtaatcgatttcaacgtgttttgtgagttcatggaagacagagttttctgatatgtggattgcaccgttgttgtcgtagaaaagaacagaaggcatgctgattttgatgttgagttcttggagaagggatgtgagccatgtgagttcacatgtagcattagcgattgcatgatattctgcctcagctgatgatcgagaaactgttggctgcttttttgatttccatgaaatgagtgtttgtctaaggaaaacacaatatccagatataaattttctggtatcgacacaagctccccagtcagcattagcgaaagcttgaagctggagtttgggaggtggggaagcatagatacagaggccttggcctgttgaattttttaagtattgaagtattcaggtggcagccaacatgtgaggttgtctaggagattgaaggtattggttgagtttattaacgacaaagcttatatttggccgagttatagtgaggtataaaagtttacc

SEQ ID NO: 216449 - DNA, 502 bp, Cannabis indica
aaggcccttcattttgaatctagaattgagcttatccttaatgagttttatcatgccttgtctttgctaatgatcatcatatcatcaacctaaagcattaggtacattaccttaggtgtccctaattccttgtaatataggcaagagtcaaactttgatcttgagaatctaataacttggacaaacatggtgaacctatgattccactcccttggtgattgcttaaacccatatatagaccttttcagtagacataccatttcagtcatcccattttccacctaaaaactaggtggttgttctatgtaaatctcctcatccaaaaaaccatttaagaaagcaattttgacatctaactgctcaacttctagatcatagtttgcagcaatggcttacatcatcgtgatagttttgtatttcacaataggtgagaatatatctgtgtagtctattccctcaacctgtgtgattcctttagtcagcatcctagctttatacctag

SEQ ID NO: 216450 - DNA, 921 bp, Cannabis indica
cctggaggctaaaagatgaagaagtaatctgatcatattatcaaggttttatttccgtttcatttttcgttttgccataacttttaaatatttcatcttttatgagttatgttttccattcgattttagtataggttttacatttttttggttgtttaaatgtttgattactactttgaacatttgttaggttttaggttttttttttttttttagtattttttttttcagtattgtacattttaatgtttgttttattgttagtgaattgtattctttattcttttttttttttttggtattttgtaatcttttccctattttaggggttcgccctaaattagtgtatataatgttttttttctttgacatggtgtagttactctatttttttctttgttttttagttttatttcgatttcagttttaaaactttttatgtgtacatatattagattgtggaacacattctattccttgtgatttgtatattatttgatttttatgtggtatggtatttaatatgtttttagttttgtcctgatttagttaagtattgtatacacttgttttttttttttttttttttaatttggtgtagttgttatatgtgactggatttatttatagtttcattatattattttagtattaaaacggtttgagaattctatgttataagccttggtatgaagctgaccaaattttgtttattatgaatcttcgaaaagttagccattgggtattggacggcttgatttgaatgagagaattatatttctgtataattctttgaggactgccaagataaatgcgacagcaaagaatgcaataaagacatactatgtttttgcttcctttattctttgatgttctggtttgtagaaaaagaatagtggagattgctagtcttcctggggc

SEQ ID NO: 216451 - DNA, 563 bp, Cannabis indica
tccatcttcctccttttttgcttgaccgggatgtaattttggttcacatttaatttgtgggtaattatagctgggtctattctgagcatatccgagtgtttccatgtaaaaacctgaaaatattcttttaataagtttacaatctggtccttctgattcctcgtaagtcccatgctaatgtaagtaatcttggttggatctgtcgagtggatgggtacctcctattactcctcgactgcagggtgttgcttttgggctggggtcaaggagttaattaattgttataacttgtttttgctcctcaaggatgaggtataggactcgcaagcccctagctgatctcctcatatttctcttacttcgcctttgcatggaaacttgatcacctgatggtaagactaagtgactgccttcattgcatggatccatggtcggccgaggatgacattataggctgatggacaatccacaattaggaatttgaccaacttgtttattccattagcgtagacagaaattgaacgaaacttcgagcgacggcactttcccctaagaatcctacc

SEQ ID NO: 216452 - DNA, 578 bp, Cannabis indica
actggtgataagtctgattctacctatttataggaataaatggggtcctctactatacaatcaaaaagtaagaaattaatttatatgtacattaattctttaattcaagtcttaattaataatatatatatatatatatatatatataaatattttgagcagggaaggtggacatggccgtaaacacagtggaagcggtggctgaggctgtagaaaaggtcgccgagaaagtggaagacatcgccgacgatatcgccgataaccttcccgacaacggaaagttgaaggatgctgtctttttattgaaaaagttgcccacgaaacagccaaggacgctcaccttctggacgactttattgaaaaggtattatatatatataaatactatgttatttataatattgctatgcattactattgctttcatttcgccatctaactttcaatataatgttatatatcataattaaaaaaaaaaaggattattaattaagagattattataagtccaataaccagcatattcatagatccatcatccatgtgctacgcattgttaatatattatgtatagatta

SEQ ID NO: 216453 - DNA, 644 bp, Cannabis indica
aatagtccatcatttttgctaaacacctcgatgacttttccttttgtggaggcgtttcaacaattctttgcgctccatgtttaggctattgtagaagttcttgatgaaagcttccgctaaatcatcaatattcttctcctcgcgatcgagttgtcgtctactaatcacttcctttcttgtagttcccttgatcttgttgttgtgaattgttgttcttcacaactgctttaaatctattctcactctattcgaaagttataaggtttagaaaaagagaaagaattatgttcaaatttgcttcttattagttggagaaatcttaactttaatctttgttttattatctctatcaatatgtgaatagtacaagatataagaggccttagttagttagagactatcattacaattaatctaaccgaaggttatataaccataaactaactgtaggactacttatcctaataggcccatttaagatggagtgaaaagtttttataccattttggatataatgtctttgaaatgtgcagggaagaggggtttagtgaaattatcagcaaggttggtctttgaagtcacatgattcattttgaaggtgtcgtttgcaatttcttctcgaacaatgtaacaatctatatcta

SEQ ID NO: 216454 - DNA, 580 bp, Cannabis indica
tatactaaccaaattatataccagaattaaaatatatctaccatgataataaaattatataccgtcattgtatataagaaaatagaaactaattaaatattatttaaaataaatatatcatacaattaaaatatataaaaaaaataataattaaatatatgtagcatgttaataaaattatatacatatattaaaatatttgtattatgttaacaaaattatataccactattctacatagcaaaataaaaaataataatatactatacaacaaaataaaaataaactatataacaaaatctatataccaacaacccataacaactcataaaaaataaaaaaaaaactacaacataaactttcaaataaaaaagtttttaataaaattaatatagatataccatactctttaagtaatttgcttttaatttttaaaaagatatgaaaaaaaaattattaattttttatgtgataaagacaataaaataataaataatctaaaagaaatgaacatttactataaattttaaaatgaggacatttactaacaaaatcctataatttgagactatttactata

SEQ ID NO: 216455 - DNA, 624 bp, Cannabis indica
gttgagatctctggcggatataacgttgatctcaagtaatctttgctccattggaaagaataagaagaagaagaagaagaagaaagaagagtgtagttttgtgaaatgttaatggatggaacctaattattaataataataaactagttgttaatactataataattaataatgtaaattacttgttaaatgttatatgtatataacgtggaaaggaatggaagatcagtaaagcaatatatattactcaataagtcaacgcttttgttgtggtcaacttttgtgttaggtcgcttgtaatataaggttaactaccatccatgagggcagttaaagatacatataaactctgttgttcgaaaatgctatatagatatttatcaaacactaaaataagtaatatcaaaaatatacaactaaaacaccacaattaaataaaatacacacaccaatttttaaccttgaaaactcaaagtggaaaaaaaatacacaggagagaaagaagatttggactgaagaagaacctttgctctctcttgaagaagagcctttccctggaggaatgcctcaacagccagatctgactatagaagatcttcttgatcggacgggaaacatgagagt

SEQ ID NO: 216456 - DNA, 802 bp, Cannabis indica
tgatatatgtcgctttcgtcttcgtacgtgaactgtccttgatgcctcgctattctcattcagcaacatatggtttctcgctaatatactaagcaccagtttctatattgattcatcgcctaagaccttaccgtctgcaggttacaaatatactttgatactcacataattaatgagttattccatataaagtgattgcatcgatctatattcccatattctccttatcttgacacgtgtcctccactgagatggcagccgaatttgggtataacactctctataccatttcgcaacctgctccttcctctccatcgacgacgaccctgcctctccgtcaacgacggcaccaccgcacgaaggactgtgcatccgtcccctctctctctctcttttgcgtgagcaccaccacgcacatccatcctccctctctctctctctcttgctcgagctccaccgcaccacccaccacaacgttgacgttgaagcaccaccacaatgtcaacgtcagagcaaaccactaccaccgccgcgggttcgtaattaatatttatttatttatttatttataatctaaatttatatagttatatatttatttatttatatatattaatttttttaaagctgaatgtatatatttatttagtaaaaatatttaaggtaaaaaacgttaattttttaatttaaagttagttgttattgtctaaatttaatgtgtggtaaacttatgttagtttaaaaatgtaatgtgttataaattaggtgttgttagtaaagtatttagtgtgtatagtaaaaa

SEQ ID NO: 216457 - DNA, 583 bp, Cannabis indica
tgttcctttcctgggttggactaataccttctcataattcccactgcatagcaaatgtctggtctagtgcataacatatcatacattagacttccaactattgaagcataaggaatttttctcatatcttctaggggtgttcatcaaatcgttcaaaccgctcaaactgcccgcaccgcaaaaaaaaatgcgatttgaaattctttgtggtgcggttgtagtttgaatttttcctaagccgcgcggtgcggtgcattttacagttttgaattgttaatatgcggttcaagccgcaccgcactacatattataaaaataccaatttttatatttatttaggtctaatatgtgaatgtccaacccaaaacccactaattactgtattgttgaaacttaaaagttttttttcatatttattttcaagccttatggtatttttgacaagtgttgctcaagctttgttgtatttttgatagtttaattatttggtaataatctaaactgcagaaaccgcaaaaaccgtaccgcaccgcaccttttttttgcagtacagtttctgatattttttagtatcgtggtgcgg

SEQ ID NO: 216458 - DNA, 583 bp, Cannabis indica
taagtgaacgttcgggtataaaaaaactaattagcctaaatattttgtaaggaagtgaagctagagcgcgagaggggtagcgggagtaaaaaaaaagaaaagagtaaagggtaaaatggtgataaaagggaggtaggcgtggtttaacggcataaataaaaaagaaagctccttaaaaagtcctctgcgccaccctgtaacacagtcccctactaacccctattccaacagagtagtaaacacactacacaactactttctctctctatctctaactttcctttgcttttctctttctctcattaaaattttcctggaaaatattcagagagaggaaagaagaagggacaacttcgtcagagacaacacccgatcagatatcgtcaattagagatagatagagagagagagagggaatggttcattgagattcgcgctcacacagcaaaaccctccaaatctcagcggatcaggatgattaaaagcaaaggcggcgataatttattatgtgcttttttattggagagagaagcagctgaatcacattgaattcaattacatttactttctctctctctctctc

SEQ ID NO: 216459 - DNA, 633 bp, Cannabis indica
gatctcgttttggttctcagtgacggtaagttcaaatatatactgctactaactgcccataatcctatggcactaaatcagaacaacgtacatcattcacatatgcttcatattttcgttaagatgctttggtgatacacaaaattaatttaaaccatgctttttcttattaatagttaatacatattctctagttccaatatcattgtgataaattgaaactaatgtttgaccatgcaacaggaagagttgcagaatatgacactccagcaagattacttgagagagatgattcctttttctctaaactcgtgaaggaatactctatgaggtccaagagtttcaacaacttaacaaactataactaatatcacttcaaatattatgcattgtttagttagaccaacaagttcttaataattatagacttcaagttctctagatcaacaaaacatttatttaattaaacaagactacaaatgattagaagcccaaatgatatgagatcatgcatgaattgcttgtttgttgaaaaaactctgaggttatctccatttctgatgttgatgctattattttgaatagatttttcctagtttagaaattttactatctatgatattactctttgag

SEQ ID NO: 216460 - DNA, 724 bp, Cannabis indica
taaataacgaaaaaactactactaaaaattagttaagttaacctttacccttaatttaactaaaaaagttcctaactaagtaaaaaaattttttgggaaacctaaatttcggtaaaaaaaaatttacgactagtttcgtacggtaaaaacggttaactttttaagttttaaattagtaccaaaaaaatttagtacttttagtaaacttaagttacctttagtttaggtacgttttttttccgtttttcgaaaattcgggggggaccttagtaacttaaggttaccgtttaggttttaacgaaaacggttggaacttttgggaagggtcgtcgtttttactaaggacttaaaagtcgaatttaaaaaccggacgggttttacgtcggtaaatttaaaaaaaaaggggttaaaccgaactacttttttcgtaaagtacgtaaggtacgtttcggcccttaacgtttttaccttagtaaccggacgttaaaattaaacttttttcccgtacgtaaaggtacgttaaaaagttcctaaaagttaaaaattaagtttacggaactacgggtacgttaaccgtaaggtaaaaattaggggttagtaattaccgtacgttagtacggtttaggtaaggggggttagaaattaagttaactaaccttacgggtaacttaaacgtttttacccgtaaatttttaactaaaaaaacttacgaaattaacctaaa

SEQ ID NO: 216461 - DNA, 486 bp, Cannabis indica
acctggatatgtccttccatgaaaatatattggttccgcattcgtaaagtcttccaccttcagtaatttgtacccggaagacatgtccggtaccacaagactggagagataaaaccgtgcgttcccagaaggcccttctgagtttcctttatattccaatacacaaataaggaaactacaattgttagatcacaacagagtatcgtatcaagattaaagggaaaacttcttataacaaatattaacaactaggagtaaccaaacttgtgataactaggagtaaccaagcttgtggtacttggtttgatccacatgggacaaccaggaaaagtaatgactataaactagaaccgttattatgttccctacttgccggttatctttataaatagtatattaattaaacttgttattatgggacaattcttatagattttttttttaattttctaattgttgtatacaataaaataagacgtgtgataa

SEQ ID NO: 216462 - DNA, 951 bp, Cannabis indica
acttgtagttgtaatacttaattacacaactaatctagacttgtgtgactttatacatacaagaaattggactttataatagaatactaattctcttacttttaatgtacggaaactatagtgtagatttgtgttaatgatttcaacttttatggtcatatattattaaccctttttatattcactaaattcatgcccacccactacttaacatgttaatttgtcaaagatgatttgggcgcgtttagaaactattatagtaattacacttttattttaatatagaaataaaaatgaattaatttttttgattatttttttacaataatgtagttttgatggtagtatcgaaggaaccaagaaagtagaaaaaattatagaactaataattttgataaaagtaagaaagaataatgtaaaaattttatttggataataataattagggattttttacataaatattttattttaattatgtgtgacctcctattaagtatagaaaagattaagtttttcttttatttaaccttaataagaaattcctttttatttttatttaaaaaaatttgattttttgtgatttcagttcaagacggtaatataagtttgtgactcataaataacacaaaattagttaatttaaatttaatataagtaaatacatgttagtagatataattaaatttcgagtaagaatttaataaattgacccatttaatatgattaagcaaaatttataagcaaataattgatctaacgttatctcatttataagcctatttacatcatttagtacacttatttattaatattattttggactattgttttacaaaaattactaattagatcttctattaaatgataatttaaattttgtacttttttaactaaaaaaaattatatcctaagctaactttgcgtcaaaaataaaactttaaaataacc

SEQ ID NO: 216463 - DNA, 600 bp, Cannabis indica
attaataatgagaaaataaagtgacatgtcattgcattataacaattttttatatatattgatgattttttatttttttaataaaattttatataatttaattttaattttttgttataatattaaaaatataatttatttttattcgatagatatatttgaaaaaaaaattaaaaaaattgatataactaaatatatatttttttatatcaaataaaaattattaaaataaggtgtacgtataaaattttagactgtaaataaaatttctataattatggagtaaaactacattattgatattagggtacgtttggtatgttgtattacactgtattgtattgtatagtatcatattaaattgtattttatgtaatatttttatgtaaaactatatctaatattaatttttatagatacctaaatatataatatttttagtataaattaaaatttaacataaaattatataaaaatataatatataatccaatttaatataatacctcctaatacaacgttccaaaccggtggttaaaaaattatttgcgtgtaagatataaaagttaaagataaatggatgaagtccacaaaaagtga

SEQ ID NO: 216464 - DNA, 770 bp, Cannabis indica
gtttctctttctccacttgaaagatgattcacctttgccacggttatgggtaactatgttctcccctgcagcaacaattctccgacacttcttgcatcgatacacaacttgaggcttttggcttggttccatgtcagagttattagcttcagccattgcaactggtcacttttactacaaagaggaacaaataatttgttaagctgctagaaacatgaatcaattcgattataacccgaagcagtgaagaaacatcaatttattgcaattcaacaataccctaattacaaaaaaaaactccaaccagaaaacaaagacaaattcttatgcaaataaaatataagaacgtcacaagaaaaacaaaagacatatattgataagaacctcaagtttctaaaccattaatttgcgtccaatcactttcttctgagactggcaatctactgtgagctttagaccatttacaggcaatagatttacacgtaggccagtcctgtataattatttatatgtaatccactacgagttttgatgggtttaaaacaacgaaaaatagaaaaaaattaatatgtgctccattctatcatcttgaatcacatatagacatgtattaactgaagctgctctgcatatttcagtgaatacaacaaaatctaatcagaaccgcgttacaacaaatctacaaaatgtaacatttttagcatcaagagctagaataatgtataatataaagttctttactccataaaaaactagatgtggcaaacaat

SEQ ID NO: 216465 - DNA, 663 bp, Cannabis indica
attacattttcttactattcacagtcaaactatttcatactatttctctttaattaatcatattttataaaatacaatcttaattaatttcttttaaccttaactaaaatacgattcttttactttcccattttctctcatatttttttaactctcttactatatcttagaaaaaaaattaagagaactcctcctatatctttctctgttttatatgattaataaaaatagtattttttgaaatattttgtagtttattcgaagttgatttattaataatttgcatatttaaggttgatgtcttcgtatttttctattgatttatagatatctttttattattttatagttatttttatgttactttagatattttatagttatttttatgtgttttcttttgtaaagttgttgtttagtttatgtgtattttttatggtgtatattttaagttttttctacacaatttttttgtcgtatatatgtcactaccacaaacaaaggcctttaatctcggtttttaaggccttttatcttagttttcgctaaaatgaaaatcgggatctatgccaataggttaaaaagtctttgaaaaaactgggataaaaagtactattttatcctagtttttatcagaaacctgggataaaaagtaccctttta

SEQ ID NO: 216466 - DNA, 760 bp, Cannabis indica
agcgtagtagcgaactctgctggtaaaaagtgatattttcgttgtagtggaaagtcgaatccccctttgctgacaccacactaggaaacgatttttcatacaggctcttcgttgagaaaaatgttcagggaagcgagaagatgcactgagaaacccattacgaaatctattcggagccttgaaactttggagcacatggttaataaaccgccaactaagcttatcataggccttaacaaaatcaattttaattgcaaaaaagccttcttttcctagctttcttccttttaaatgagtgaataatctcctggattagtacattgttatcttgaatactccttatagtagcaaaagctacttgcgtaggatatatgattctaagaaggataggccaaattctatttgcaatgatttttgaaatcaccttataaaccacattgcaaagagagataagtctaaactggaaaactgtttttggattgagaacttttggaattaaaaccgcatttggtagcattgatacccttatatgcatacgaccagacataaagaagtcctttatagcttcacaaaaatcccttcttacactattctaataatgcttaaaaaaaagtaccgacataacgtccagacacagaatctttaaattgctgtagaatatatatatttaggtagcaaacattatgttgcaaacgggaagatgacatattaatgtgacaaaaatacatacatatcatgataacattttgttggcaaacat

SEQ ID NO: 216467 - DNA, 668 bp, Cannabis indica
aaaatcttgaagaatcatttgttgtaacatttgttagccactttggttgcaactgaataccttaaaattttcaaattgcaggttgtaagggtagcctttttttgctgaaggagaacttgcagatgaagctagagcagcaggagctgatatatagtggtttggatccaaaacctgagcttgaatctaatgctgtttcttgcagttaaaatttacttgtcagaaacagagtgtaaacattatatatatatatatatatatattccagctacataggattttacctccacagaattacaaatttacaattttcttttccatactgcccaaaaagattgacaagaggaaactagccaaatttagatcaatctgttctaagccatgctattatatgaaactagcataattttgtcactaaaaaaaagctatatgttaatcacagcctacttctactgcattaattaaagcttgaacccgagtaagaactgtgttggaagatcttcggtcagtttcgtggtatcacttccaataatgatggatctttccaagggggtaacactccatgcgacaaattctgaaagcatttacacaaacacgatacccgtcagaaattgaatgatattgaattacattaatcacgaatcgcaattatttaaattggaactttattt

SEQ ID NO: 216468 - DNA, 529 bp, Cannabis indica
gcatgctctgtggttagacgatgagctatcctggttcgaggaggttccagcgccggtggcggacgtgggcgtcgtaaattcatgagtgattttaatcaactttgtaacaaaaaaaaaaaaaaaaaggtaactaataatatacataaaattataaattctccaatataaaattatatgtggtatttatatataaaattatatgttggtattgatttttatacaatatttatatataaactaatgtggtaattggtgataatgattgacaaaatcttgttattaaattttggtattaatttttatatgatttagttattattacaaattaaattaaagttttattttatgttcaaataattttattaaatgtatataagtgttaacatttcttattttgtataaattttattatttgtttgatttatggtattgtatcctttaattttcaattatcttatcttacttctcatagctgttatatcaatttattatcttatacgtggctttatttttgtaatcatgttttatt

SEQ ID NO: 216469 - DNA, 663 bp, Cannabis indica
agtggtagcaaaacataataaaataccactatccaaaatcataccctattacaccaaaatagtttctaaacaaatagggaacactagggtggacgacagaaaatactgactgcatctcgcaactgttcaggcatcctctctactccactcaacagtcgagtcatggattctacagtaattctatacgtcttctttgtccatttggaagattatgaacttcaggaattcgacgttatactcgagatacatgagattcattgttagagttgctagatggtcgttgctatcactagatgaattgttagtttcaatgttattttccattagtagtggctgctgatatataacagatgatgcacttgaaggcattttatgtttattatacaaataatcaaagcataacacctttatatagagctggttgttcctcacattccttaccgcctttactttcaaaaacctgataggaatagtttttatttaatttttaaatttattacataaacaaaaacatcggtttgggtacacatgtcgattatgactcagcatttattatatgaaaattattttaattaaattaatatattttttttgaaaaagtattactcattaatgttcaacttattaacaatctgaatacatcaattatttatcatcaattta

SEQ ID NO: 216470 - DNA, 565 bp, Cannabis indica
ggagcttaataatttatattggtctctgtatgcggtctgttacttaaattagatgctacttattttggagggttattttttttttttttttcacaaacgctagtattttttttactcatgggatttcttttttgcttatatattctggactatttttttttttctttttgcagagaggtttgtgtgagctttagtgatgggcaagtttaacacatctataaattagggatatatatatatatatattatttttttttttttaaaaaaataaattagggctattagttttaaccaatatacgtgtaaatgagcttgataatctaatatagatgtagattgttgatataaggataaatcggtaattttaaccaaaatgatttagtttctaaaaggggagctctatttgcaccccttaaacttataaatacaccccattattaaaaaaaatataaacttaaataatttttaaaaattactcttaatatttttttaaaattttttcttcacattattttatgttaatttcaatacttattttgatttcattttcataattttttctaac

SEQ ID NO: 216471 - DNA, 555 bp, Cannabis indica
tatatatatattacaaatataaacaaatgtgatttggtgtaatgaaatataagaaataaaagtagagtacacttgtttttagatacctatttttaagttcatataaaaattaagtatatgtaattatactaaagctttctatattttaaatattgttatatatacatgcattttataattactaactagtttagaaaaattaagtatatgtaatgactaaagctttctatattaagtattataatatatacatttttataattactaactaatttataaatgaagataatatataatagaattttttaccttcacaccttatttttaatataattgtcaaaaataacttcatcaaatatgaataatatttttatttgtttaatatgtttgctatgacagaaatcttttctttgttactgaaatgaaagttatatatgagggaatttcatatttatattcataccctttaattaaacgattcaaaaagattattgcgtcgattactaatgtctagtttatcgtaaattcttaaatgattcaaattgttatacatgt

SEQ ID NO: 216472 - DNA, 1021 bp, Cannabis indica
aaaaaaaaaaaaaagaaaaggcaacaagacaaatcaacgactgcctatcaaaagtaaagagaataaattcatgagcataatcttttttcttaattgcattgtacttagttttaagactaaatatgacgtttaatttgtatcaccttaacaatgacaaatacatgcacatgcatgcacaaacacatatacacatactcagatcttataattcgaataataattccatccacaaacatcttgatcaattcgactatcctagtcttatttcacacactaacaacaaggtactttagaattagcatttgtagtaaacattagtttattcagtttaaatccctcttttctctttctctccactcttgccaggtgtccatgtgacaagtggttaatgttgtttcaggtgttactaattagttcgacttgttagaaatatatttagatactatacaatatgattatactaactgcaggttattagaaatggggatgatctctaatcatattgtatatagcgattaagacagttcaagtcgtgaggctatgaattcaaaagggtatttaattttattggtccccggctgccataattcccattcgtgtccaatatttctgtcattgagaaaagaagaggttaatattattagattctatgtggatggtccaactccaaattaagcatatttatattttctgatatttgggaggaaaggattccaattcggatcttctaacttttcctcagcatagcagtgtagcaatactaagctaataatatcacaatacaaaacataattattaattatctttttttttttttcaaatatttatcatgcatcgaacttaaaaacatgctaaaccaatctaattaatctctataagttgcttaaacaaaaacaagaaagacatgtccaaaacattaaaaaattacacaaaaaatttgagaatttatttatttttattctttttatgtcaacgaaaagaattggagaattttaattattttgaacccaaataataatcc

SEQ ID NO: 216473 - DNA, 528 bp, Cannabis indica
agatcaccttcattagctcttcaagaagggaatgatgctctttgttgttgagtacgaagagaaagagagagtgaggtgtagacgacggtggagctttggccggaactccttttgggggttggcggctagggttgagccgaacggaggaggagaagtatctaactagactttctttttgttatctatatttatatatatgggtgcactctgagaattacttataaacgagtaaaatagaaaaaattgagtttttatgcttaattttctattgaatttttttttttagcaatatagaaaaagataaataaaagttgagtttgaatatatatttttatatgaatatatttttgatatagtgtaaagaaatatattttttaatatttttttaattaagtagttaaactaagtataaaaattcaaatttctcttttattattccttgttagattaaaatttttaaaaataaaatttataattaaatttgtttaacaattatgggtaatactccttaattatatatatatatat

SEQ ID NO: 216474 - DNA, 603 bp, Cannabis indica
atagattaattataaatataaaacttgtttataactaataaaattatttgtacgttaagtttttcttaatattaattaaacacatataaattattaatatattattgtttattattttaattaaatatttgttaaaataaaaatatctttataataaatcatactaaagtggataataaacatttatattataacaaaaaatagtatgttctattacattaaactatttatttaattttattttaaaacatatttatttatttttttttaaaaaaacaacttatatttataataattataaatttataataaagcatactaaaatagatcataaacatttatattataataaaaaatattttaaagattttaatttttatggtatcacaatttctgtttcatagtatttaatttttttacttaaaacataatttttaacattattttaataagagtaaaatttaaaagattattttaattacatatgaattttatgtatattactgtttaataattttatttttataattttattattttgtttaaattataataagtcataataaaacagataataaatatttattttataataacaaaata

SEQ ID NO: 216475 - DNA, 743 bp, Cannabis indica
caggaccgcatacgatgtgagtttgacagatgatagctggccaaaggatttatttgacattgtcagcggtaacgtctccaagtcatgggaaaagcttgatgcgtgagtaccctactagtgacagttttttcagtttacatttccaacatcaaattagcatagtcttatttttgtttatttttgagttcggttatacagtggtggtattctgtcccacacttttgaattggaggccaaaactaaaggtatcttcaacggcgcacccgctctcatcacataccgagttcctacaaaggctgctctacaggtgggatatatttttgaagaatcttcctcgttagttttctgtttctgtgtaaaactttatttactaactcttactcgactgcaggaggcattttcaactccaattttgcctttggacgttcttgcagacagacctcctgagaagaagtttgaatgggttagtttctacacaaatggtctatattttacaatctcaatttgaacccttctctcataattctaactgatgcctctgttattgttttcatttcatgtgattatcttcattctggctcaaatctcttcaggttaaggtatggctaattctttttgattcaagtgacactttgatcaattggtgatttcactaagatataatctcaaaagggtcaaagcaatgtactaattccgagctttgtctaattttgcagaggctgttgatgaagtatggatcccta

SEQ ID NO: 216476 - DNA, 654 bp, Cannabis indica
taatttttctctaattttgttaatacaaactctgttattttcttaaacataccacatataaggtctagattctagatcattgagtctagacaaaaacacgtagtatcagttacttccaaatattttttttaataaattcaaaatagagtctatactgacaaaattggaggaaaattacagttttataaacattgggtacttatgccgttaaaaataaacattgggtttataccgcttacaaacttaaaattttggatacttatgtcgctatttacccttttttttttatgtacatgagtttctatttttttttttacatgtgataaaacataaaaatactataaattatttttatcaaatggatataaaattatatttgaacaaaaattaaaaatatataaaaaaataaaatattattatataaaataagatcttacatatttgttattataataaactatattataccattattattatcattatacaatactttaaaatttataatttaccaaacactcagctcagcttttttccacagttctactggagctgctttttctcacagcacagctgtttttttccacagcacagctgtgtgtagaactcacatgctacatcacataaaagttgcatctttcctttaggggctcg

SEQ ID NO: 216477 - DNA, 589 bp, Cannabis indica
cacgatcaattgcaacatttattattctattgaggtttctaatgcaatacaaaaatctgtgtggtataattagtgaactcgagtccaactggtcatactttaagataatgatcagataatccatgctcatgtttagttttgttttgcttaaaatcttcttactttagaattgtgagagagttttacattaataatatattgaaactaaataccatatataagaaatatgagctttttctctcattgttaattaattttgagataccgtacactcacctattttaccaacttaatcatacacttccgcattttaacaagaaccggacaatcacccaatacttgctctctagatccacacacactaacatttaaaaaaatacatgaaaaataaaattaagagtaattattattattattattttcacataaaaagtacctaagatccagatttcattaaaggatgaagatcaaaataattttctgataatattaacaaaaaaaaaagggacctaaacaacagatataaagaagcaaaaaagttacagtaaagatcaaaaggggaaaaaaagtcaatttggcagaaatagta

SEQ ID NO: 216478 - DNA, 693 bp, Cannabis indica
tacttcttgttttaacgttttttttttttaatcatttctaaagcggaacgtgaataagttgagctcattatcttttatcaataaaaattataaaatgttagggtctcagcaaaaaaaaaaaaagagtgtaagggtattttagtcatttctgagtgagttattgattccggtcaatttgaagcacaaagtataaaaattagtgtacggttataattgactagatggcaggattgttgtcatttctggttattcaggattgttgtcatttgttgtcttctctacctagtgttaaaataagttttattaaacgatcagccaatcgagttgctcatgctgttactaggcatgctcgattttcctctggttgtagcattttttatcacaatgtttgggccgatcttaaggctctcttgtattcagaatgcttttaattcaatgaagttactatttcatttcaaaaaaaaaaaaaaaagttaatagagaaatacaataaaattaatgattaataattaaaattaatatttgtaatgaggaaatttagataattcatgtttaaaaattatactatggtctttaaatatgctacattaaaatatattggaatttaatactttaaattatttaaatttcaaataccttcctcttatcttctctctttctctgagtcctctctctccctctctttctaactct

SEQ ID NO: 216479 - DNA, 613 bp, Cannabis indica
agaaagcagtgagaccacttgcacattacgtccgagtaatcatggcctccacccgaaccgaatctggccttcgtttaactggccctagtgccagagctggagattctagtgacccccaagaggtgactagtcgttgagacgaagatcagaatcaagatgatcccatcattgaggacgcaaagtacaaaaaaagtagttcgaaggacgttgaagttaacgtcaaagatgtactagaggacatgcatgaagacgacccttgggataaagttgttgatgatgacgctggagagaagagctagcctgatgagtcagacctcgtggtcatcatggcaagacaacttcaactagccgaaaagtaggttaactaggcaagatcaattcaatgagtttctcgaaattttgcaggatgtcttaaataattataacgtaaacgatcatgaaaaattggactaaaaattctctcatatgctgaaataaatagggggtgtatcgatggacccctaatgcattgtagatttttttcatggttgtgtacattatagttatttatgacatcctgcaaaattttaaaaaaatcaaaaaaaattaatagaccaaaactaaagtttaaact

SEQ ID NO: 216480 - DNA, 532 bp, Cannabis indica
tgtggaattatttcaaaattcatggtgaagcccaatttgaaatttgcataaagaaagagaagaggagaatgagtcattagagtttttaatcttcctctctttctttatataaacatagattaaaaatttatttaattacaataaatgaaatattttaagtggtcgagattaaatctcactcaaaataattgtaattttttaagttgttaatctttgtattgagaacactatttttactatatagatatttttcactttgctttgtgtaaaattaacattacatagtatttatgtggataattgagaattcatgtttaattagttataattttttaaatgaaaatatttttaaattattttccatttcaattttatattatatttttttatagtttgaaatttcgaataattttcaagttatgatgtttagttgagcttgacgtctaagattaaattgttaatttcaatttatagttctcatatgataaaaataatacttctattaattattttatttttaacttacacatat

SEQ ID NO: 216481 - DNA, 698 bp, Cannabis indica
atgggttttggtgttcctttagtcgagttgattcttcgctgtctacgctcaatttcctattctttcttgttgaatgtttctattcaaggatcagtgacaccgcaacgtggtatcaggtagggtgatccattatcactctatctgtttctaatttgctctaaaggcttttctaggctgctgcaatatgaagaatctgctggtgcacttcaaggtcttaaagtctcaagaacaaccccccgatatcacatctactctttgctgatgacagtgttgtattctgtcgtgcttctctgtcctatgctatagctactcattgatgccttgatctctatagatgtgcctcaggccaagttattaatctcgataagagtgttctctcttttctccaaacataagagcttcagatcaacagttgtttcaataacttcttaacatgcctattcagccatgtcatgaacaatatctggggctaccttcattctcgggtagggataagactcaattgttagtggaattactaataaattggaaatttcttaactcgtagaggacaactctctctattggaggaaagaagtcctgctcaaagcagttgttcaagcaattccaacctatgctatgagttgctttcaattgccggtcaagctatgtaatcaaattgagtagctcatgtcaaggttttggtgggcttcgtctgc

SEQ ID NO: 216482 - DNA, 943 bp, Cannabis indica
tgagattaataaaaaaccttagatctaaaatattaatttttatctttctaaacactaataaaattatcaatgcgtattgaataaatgttattttttagcggttttattataagatcatgagaattaggttggattaaactaatgtttattatgtatattggattataaagttttaaattatgtttttatatatatatatatttttctttttaatgaaattaacttaaatggtagctaaaatagaatgaatggatccaatccaatccaataaaaaaccagtcaatgcatatggttggaaccgatccaatccaatacattcattggatcggatgactcaattcgattggattggatcggatggcaatattcaatatccaataaataattggattggatcggttaggtccaaatccattggatgtgatccaatgaacattcctaactatattagtaaagatgaaaattgggcggttgatgtatggagaatgtaatttccgttcccatctccgctacctatttatactcatatcccgcttcatcctcgtctaataacagatttggggtagggaaatacccatcagttatggggaacccatcaagtattcactaagacaaaataaaaaataaaaaagtaaagcacaaatataagcgtgaatatgaaaatagactgacctatttaagaaatacgggcaggcatgaagaaagtacgatacgaaaatactgggcctactctttaaaattgttggcacgacacgacaagtacaacctatatgtttttcggcacgacatgacacgatttatttttaaaaaaacacgaataaatacgggtcagactatcacatcacagaccaacttacatcactaattacaaccaatatgggtatatatacgctactagttggagcagggccgcccaacaaatttggaggctttggacgaaaaa

SEQ ID NO: 216483 - DNA, 670 bp, Cannabis indica
aattttaaaattattttccccataattttggtgggtaaattaattacttaatttattattaatattattgatatttatttgatattaattataaaattaaaaatattgataatataaaaaattaaaaattaaaaaaactaaataaatagagtagttttaaaatattttagagtgtcacatttaaaaaaaaaattaatctattttttctattaatttttaatttaaaatatctatatattataatattttatttttatggactgtatcccattatcataaattactttttttgaaaagcaaaattttatttacattttttactatatattgtaaaaatatatataattcaaattcaaattttagtttgatttattatatttttttttttatttaaatcataatatataacttaaaataattagttttttttaaataataaaatatctcccagaaaaacacatgtcccttgataaaaattaatatcgtaagataaaaattaaattttttaaaaaaaaagtcatacgtgtatacatgtagattttttttaatgttttgttaattaataggaaggacggttaatcggaacgaatcagaacttttcttctatgatcgatcagtaaaaatatcagtaactttgaattggatcagtttctcctcaacaaataagtgc

SEQ ID NO: 216484 - DNA, 682 bp, Cannabis indica
aacagggcaggcccgagatttttatggcccattagggcccattaaatttattatggctcatagacttgttagttttttttgtttttgaacttataacttttaaagtcaaaattaagtacataattgattcaattagatcagtattataatgtttggtaagcctagcaaactagagcttataaatttgagaaatgagcacggcaagtggtggcatgatgttattggtgcaattcaatattatgtctcacatatttgatttaataaataaataaatatagaatagtgttagttattcacaagtgacacatcgtattgagttagggatgtacacggggcggggaattggcagggagtgctcttccgtccccatcccaattattaaacaaaaattaattaataattataattaaaattaattttaaaataaattatgaaaacaaaatatattaattaataaaatgaaatgaggttagtatgtggttacagtaatttattaattatttttaattcatttctaaattaattataactcttcaataataatccaatagttaaactaatgtaaccattcttgcaaaaaaaaaaaaaaaataaatgtaactattatttttatttttgactttggaggaggaaaggagaattcaaacttggatctcctcattatgaggagtaatttaaatct

SEQ ID NO: 216485 - DNA, 804 bp, Cannabis indica
gttttttttttttttttattaaaactatatttacttatttattatatattaaaaaataaaaatatttaaaataaataattattaaatctcttattttttaagaaaataatttatattttattttaataaaatattggataaaatgaatttttacatatttatgaatataataaactagataattattatctttataataggtcttaataactcagagtattttaaaatttagggtgattctacaatgcactcccttaaaaaagatgtactgatgcacccttgacttgtttcagcatttagaagaattttttagtctaattttttttcatattcatgtacgttataactatttataaaggtaacctacaaaattttgagaaattcagaataatttacaatatagaaaataatgttcaaacagtctattttacatgtgtataaaataaaatagtcatgcatgcaacacactgtttgaacgtatttttcggcgtgttaaacttttccaaattgtttaaaattttgcaggatatcttaaataactataacgtatatgacagaaaaaatttgactaaaaaattatttcaagtgctaaaacagataaggatatatcaatatatccattttgaaagagtgcattgtagaattcccctaaaaaatataatttaccaactaaatttttttcaaactagcccttaaacttaaactgaactaaaatcgacatttaaaaaaaaatatattattatttattttcgatttgatatatataataaagtgtaaataatagtgaaaaaaaaaaaaaagtaa

SEQ ID NO: 216486 - DNA, 855 bp, Cannabis indica
accattgtatgaactctgtctctcgtctcatcaaattcaatccaaatttacaaaaaagccattttattttttttttttaaaaacaaagtcatttattttttaataaatttgtatagtcatcttacttatacaacacatttttgttttactcacaagtggaagccattctccgagaagtacaggggggatggaatagtcggccttatatattatatgtatatatgtgctatatacttatatatgcataatctatatacatataatatattgcttaaaaattttaatatattgtttagattttaattcattatttgtaataatttatatattatgtaataaatataatttatagggttatattatttaattttgttacaaatgttatgctattaatttttaaaaaaattttacaaataggtaaaaaattataaatttgtttaataattgattatgtaattaattttttaaaattttagtgaaaaattagaataaaaatgtattaattactgaaaaaagttaattataatcaaaatattatttaagaataattatataattgtaaatatatatagaaatgatttttatctatataaaaattaaaaagaaagtatttctatgttaataattatataatatttttatatttaaatagtaaaaatttaacatagaaaaaaaattataaataataattttttaaaaaataaatttaattaattaataatataataatttataaatacttaatattaaaaataataatatatttttttaaaaattataaaaatttaatatataacaaatttgaagtaataattacttaaaaataaatataaaaaatagatttaattagtaaat

SEQ ID NO: 216487 - DNA, 574 bp, Cannabis indica
atactgtattgcagggtcggttctgagttgaaatgggctataggtcctaattttttttttttgggcccttactatatagataaatggtatttttaaaaatattaaaaaaatgtatatttttaaagggtagttttttttatttgggcccctaaaatgagtggactctaggcgcgggcctagcctgcctatgcccagggccggcactgctatattgtattgtataatattatattgaattatatttatgcaatatttttatgtaaaactataagtgatattatttttatgaacacctaaatatataatattttagtataaattaaaatttaacataatattatataaaaatatgatatataatccaatttaatatatatatatataacatataatataatacgacgttctaaacgagtcctagtgagaactttatcacatatcagtgatagtgccgttgatgatacccatgattcttgtagtgtattttgccctgttttgcgatgatcgaataagcattggtcataaaatatatacaatacccaatcattttaaacggttgggatcaaatcccctt

SEQ ID NO: 216488 - DNA, 623 bp, Cannabis indica
aaaatattcggataaatttaaaacaccgaaaataaagttcaaactgtctattacacgggtaactcttttatttagagagtgcattgtaaaagcaccttttaattattgtgtgtaaatttaaatatgaatactataaattatttttatggtaataaaaataaattattaatgcacatctttaaaagtggtatactgatatactcctacttgtttcggcaatcgagagacaaaaacaattcaataatgtgaaagattattttctgatttaccgagataatcataatatggattataatcttgtggggcatgattaagttttaccgattttacagtattattatcttttaacaattctactgattttattaaattaatataatattaattttttttacttattattaaaaattaatataataatatgtaatattttttagttgtaattttggttgttatggttagagtagtaattgtgtaccaaaatagatactcattatatatcttaaataatttaattaagacaaaatttaagtactgaatcgaaatagatgactgcaagtagcaacaagatatttaactaatttctaagtagagtaaaaaaaaatctgagactaaaacctcat

SEQ ID NO: 216489 - DNA, 633 bp, Cannabis indica
aggaaaaaaaccgtgaggaatcgtgactttagtgggagttgaaaaattttggaagaacaaaaaatgagaaggaaaaaaccgtgatgaatcgtggatagttatgcttcaataatggaggttattgatctttaaaaaaaaagaaaaactgaaaataaatcaaaaatcaaatgaaaaacaaaaggaaaaaaaagaggaaagtgattggaagttgattgatggttgatagggaagccacacgtgtctgtgcatggaattgatgtgtaagtggtataattgtaataaaagaaagaggaaaggtaaaaatgatgatgtaagcgtgtaggaatttttttgtaataaattgtgtaaattggatttttggtgtaaaaatttcaaaataaaataatatttttttaaaatttattcccaatattaataattattattattaagagaatataaaagtttattagtgtgttctatttatttatttattaggaagttttaaagattatattattaatccgtatatatgtagatttattaaaccaaatcatccaaaactaaggatgcaaatacggagggtagggaatctccactaaaagtacgatcagcctcaaaaagagaagatctaacggagtaaatttagtaatg

SEQ ID NO: 216490 - DNA, 1151 bp, Cannabis indica
tttagtgtaaaaatttctattaaaagactactatgatttctaaataatgtgggacaaaagtaaatttaagtaaaaaaaaaatatgtaacttattttttaagcacaaaatattaaacttttctaaaattaaaaaaataaaatgaaaaaaaaatgttatttaattatttttgtgttttctattattgtattaaataatatgttatatttttttaagtttttaatgtgtttttgtaaccattaagtgatgtaatataaaatatgacttcatattataagaattatgagtatatagattttaatagttttctttatataaatatatagattaaatcaaattgaaaactattttttagtattttgtttatcgatgtaattgacgtaataaatcggaaaaatgacctatacttacaaataaaaaaaaaaatgaatttttacagtatatcttactattataaaagtgttgtaatgaggtgatagtttgaagaccattttaccctttaagaaattcaatattaactattttgccttttcacctttatttaattctctgtcttaattgacaactcatctcaaaaagtgtaatagtcaattgacagctaatgttttggttaatgtaatgcttttaataattctctgtcttaattgacaactcatctcaaaaagtgtaatagtcatttgacagctcatgttttggttaatgtaatgcttttaatatattaaatattttccattttaccctttaagaaattcaaaagctcaaaaagtgtaacaattgacagcaaagcgtaaaggtatatttaatgcttttaattaagattttcaattaagattttcaaggtaaaaaaagtgtaagagtcaatattagattatattaacagctcacatattcctattttctaatattatattatatttaattctttctcctaatattttgaaggtgaatatattaatcctcttttgatatttctggaagtttccttttaaatatttatctcttcctcttcttctctctctcagtttctctgcaattactgtgtatagttgggaaatgatgaagacaacaaataacaacgtccattgatcaatgacaagagaaggcttgcgatggcagcaccaccaccagcaccaccgaattcatcacggcggtc

SEQ ID NO: 216491 - DNA, 506 bp, Cannabis indica
gggtagtcatgggactagttttgttgttttcttgctgaaattgaggagaatttgggttagaaatcgagtttaacactttttaaagcttagtctgagaattagtggcgttttacatttaaggggtcgattttaatttcggtaatgtaagaatggtagtattcatggtatatatgtgccctgtgaagtttggagtgatttgaataagttttggtagtgttttgtgagtgcaaaaattgagatttttcgtgtttcataggagatcacaaattgtataaattgtttcgaagcttgaaacgagctctacgatatggtgtatagtttagagccaaaatataagttttatttagtgtatttataccacagagtttgggtagataatcctagattgtcttaggcgagtgataaggtagtgttttgggataaacacttattgatttattattgttatgacataggacccaagattatttatcgttttccaagctacagatgaaagaagaatgtaa

SEQ ID NO: 216492 - DNA, 416 bp, Cannabis indica
taaacgaacattaaaagaaatatcaagaggaaaatattgttttatatgttacccaaaggtcttttctttagggccaattgaatgatgagtttattgcaatgaaggtcattttgctagtccaaaatcataaacaaaaaaaaaaaaaaaaaaaattaaagatacccaaaaacataataataataatgaaattgaaattgaaaagaagacaaaaaatttacgagagaaaaagagaaggatagttaatactgttaagtgcaagtgaaatgatagttaatactgtttaaccgcaatatattcttattatttttatctaaaatattaatttaattgaattaattagtaaaacattttaaaattattgaatgttccaaagttcaatcctctatatttacattttaaaaataacaaaaaaaata

SEQ ID NO: 216493 - DNA, 467 bp, Cannabis indica
attattatagtatgttagatgtatatactaaaaaatattaatgatcgcaaggtctaattttagtttaatatatgaatactttttagtagacttttttattttttactacttttaaaatagtttgtttttttttttttttttgtgcattttttacagaattaggcatagaagctcctattgcaactagcgctgcaacctaaattgcaacaaaaaatcgtacagaaacccctactgcaactagcgctgcaaccactttagaaatacaaaccgtaaattaaaaaaaattaaaaaaatagtatatgaagtaatttctctactttttatttcaaaaaataaataataattgaagattgtacttttgtatacataaatatattttaacatttaaattaaaatataataataataatacccgtgcttaatttacgatttctggttcattgtacaaaaaaaaaaaaaaaaaatta

SEQ ID NO: 216494 - DNA, 671 bp, Cannabis indica
aataatattttttgtcggaaaagtcgttggtgtcagaaaagtcaccggaaaaatcgttagtatcaaaaaagtcaccgaaaaagtcagttgccggaaaagtcactggaaaagtcactaaaagtacatgtctcaaatataaataaaaatagaaccagttcaataacataatgaataaaaacaaataatacaaaataacttaaaccaattataattaaaataaaactagttcgataacatactataatggaaaaaaaaaaacacgaaataactcaaaactgattataactaaaatagaaccaattatataacataatgaatacaaataagtaacacgcaacaactcaaactaattacagttaaaaaacaaagagaaaatcagtttctaaaacactgaaacataaattaaaaacaaaactagttccacaacaaaatacctcatagcacataatatcttataaaaccagttataatttttttaaaaaaaaaaaaacaaagttggggcttaattctaaaaaatattgaaggcagaaatataaaaagaactggtttaataacaaaataaataaatacaaataataacacacaataactcaaatataatataaattataaagaaaccggttataatttatcaactaaaagacaaaaaaattagattctgtaaagcaact

SEQ ID NO: 216495 - DNA, 534 bp, Cannabis indica
atgtttgttggtgataagttgggaccagcataagcatatgtaatgtaacccaattttgggtccaatatcaatttcatccaattaccaaacttgatcgatcgttgcttttgctactcctcttttatgctcttttgttgcgtaaacaacaaaggaagttcaaaatgtgaccgaatcatcctggtaactttctttttttactagtttcatctcataaaagtacctatttttcatttttttttaatatatatatatatttattttcttgaatttttatttttgtaatttattagttataaaaaattttaaataattttttatgtaatattttgaattgaacagttactcaaaaaaatctgaaaaaaaaagtctttgtaaattttaagttatttaaagaaggtaataaccaacaaaaaaaaaaagatgttaccgataaagttatatattttacttattttatagctaaatatgaggctatttttgcttcttattgttgtttgaagggatcaatttgttttgtctcatatttttagagtt

SEQ ID NO: 216496 - DNA, 624 bp, Cannabis indica
ttgtaaatttttaaaaaatttgagcagtttataatactaaaaataaagtttaaatatttttttacacgcacgattatttattacgcgtagtaaataaattgtttaaactttatttttgaaattttctaaaaatttacaaatattttcaaataattacaacttctatgatcatgaaaaaaaatagaataaaatacttttctaaatattgtagaaaatctatcagaacactcaagtaaaaaaattcctatgacactttttaattagctaataaattttacaagttttgtaattttacattaaaacataataatactaaattttaatatgaaattactttttatactcaatataacactattttttatatctttctcattttttatataagagcattgctattaggcactagtggtgcctaacactttctcgacatgtcgcgttgcgattggctagcaatactctctaaaagctattatattaaattatgtaagatcagatacttaattaaagagcattgctattaggcaccagtggtgcctagcaccttcttgacatgtcgcgtagccattggctagcgatactccctaaaagctattatattaaattatatgtagacccgatatt

SEQ ID NO: 216497 - DNA, 1352 bp, Cannabis indica
atttgaaatgtattgggagctaatccaccaatttaccattttttgaaggattttagtaaaaagggtttttggggcatcatggtattgttttaggctcaaaattgactatgggtctaagtcatggtgcggtctaacgatgaggcaacgagagatcaagttgtggaggcgggagtggttcaattcgatcgaaaggcagtcattgttcgaccctggtctgctaacctaaatacagtgaatctggtgcgtacagttcctttatggattagattacatgacttagggttccaatatcggggtaccaaaattctaagtgctcttgttagcacaattgggaaatctataatggtggatcaacacaccaaagataggtctcggttacaatacgcaagaattctggtggaaatggaagtcacaaatgaaccccccggttcattccttacttaaatgaatttggacaattgcaagatcagaatgtggaatatgagcggctcctagccaaatgtgcagcttgttctaggtacagccacaacaaagcaacttgtaggcatgatgaaatttttaaagcgagggcggagaaacagcaggagctggaaaaaacaagcagaaaaaaaaaaaaaaaaagggagccaagaacaacacaaccaccaacaaaccacaacaacaagaatgggagacccctaagaagacaaccactatggtgacaactcaaccaacagtacacacgaagggaatgctgaaaaaaacagaacacttttcagcattggaggagcaaaggaggacatagtagctcttcagttagctatagattctaatactcttgatgtttctttaactgcttatggataacaacaatattggttgttgtaatgtgagggggttgaataaaatggagaagcaaaacactgtctttgaattgtgttgtctgaataaaataggagtttgtggtttaccggagacgaaacttaaagggaataaaattagagagatgattgatagaaagttctttaattgggatttttacacaagtcccactattgagaatcatattttgattatatggaggaaacattttgttcgagtaattgttgttagagaagatccttaatatgttcattgctttacaaaaatggttggccaaccgaatgctatgagtcttacttttgtgtatgggttcaacacgatggaggaaagaaaagggttatgggatgggttgatcaaccttaagctagctgctaagccatggttggttacaagcgacttcaattttctctttgaattggaagataggaaggatggaaatgtggttaccctgaatgacataagggatgctaatattgttggaaattatttta

SEQ ID NO: 216498 - DNA, 504 bp, Cannabis indica
aactctcatgattatgtaaactagttatgagagtgttgttgcatgttattattagttaaatatataaataaagtgtacaatagtagtgtacacatctttatgtgggattttttctcttttaagctaaaattacttaaaataaatatttatactactcaaaggaaaaataaatatttataatatctaatatttacaaaaatattatttttaaagtttggtacttacaaaaatactgtagagaaataagattagacaaaaaaatgaacaagcagagcgcgtgaaaggcacattcaagtagagaacaatatttaaactcattgacgcagatgggtctgcagctacaatattacagaggctgccacgtgaaactcttattattattaaaacaaaattgacaactatgtgagaaatcacctttttcacaaaaaaaataaataaataaataaataaataaaaaatttatctttagacctaaaaaaaggattaaatttataaaaaaaataa

SEQ ID NO: 216499 - DNA, 599 bp, Cannabis indica
ctttgccacgactagatatagatcacgttaataatagtactcttacaattaaaaataaaatagttttttttttttttttttttgtaaataaaatatagtttcattagcatcaatttatatcatgtacaggtggcaatttcaccaaatatttttgacaagtactctctaattatataattaatgaatagagtgagttaggtgattgtagtccctcactatttcacaaacgttttaccaaatcaaaacaataacatttttatacaaaataaacatatttacaacaacactaggtcgatcacttacgaaataaaaaaattttctgggaaaaaaacacgaaataagactatttaaagcctaaataattataggaaaaaaaaaaggaaactaacgtcacatgaaattttaaaaaatcattgtcaaaaagtaaagaaaaatattaatacctttttataaaagaaaaataaagtaaaaaaattcagtatatagtaattaataaactagaaaaaaagaatgcctacttttgcaaccacaattaattttcttattaatatattttgattgtgtaggaaattataacatccgaaactgcccctacaccc

SEQ ID NO: 216500 - DNA, 834 bp, Cannabis indica
gagaaagagcgcattgcagggaaaaaccatgaaatgtcccaattggattcttcatctatatctatgcactacgactgagttggacctggcggtggccttcatggtggttggcgaaattcggctccggtgagcattgtcaatgccagcattgaagatgaatgatattgtgggccaaccacggtgccttcgttcgaatctatgttatgtcatttggttctttaatcttggaaattataattattaaataagaaaaatttgattaattatgcatttaatagactaaattttttttgaattaccttatatattatttttttaattttacggtttgagtttctaaagtgcttacagcgctagttataataaggttttctatacaattttttgttgcaatttaagttgcaacgctagttgcaataggagtttctatgtattatttcataaaaatataaaaaaaaaaatttagaagtgtaaaaataaaaaatctcctaattttttttgtaaatctaaactattcaaaaaaaaacattggtagaatatattattttttcctaaaatctcattctacccatatatatatatgtcatacccttataaccttaaagggttatacactaattaggcttaagtggttcaacaatggtatactataatttaataagccaattaattatagttttaagggtgttcttatgtgcctctaacataataaataattattaaccatcccattataattgttgacaaatattgggcatatagttaataattgtgtttatagtattagacgtgtgattatattagtctacagtaataattctaacaagacactct

SEQ ID NO: 216501 - DNA, 721 bp, Cannabis indica
cagggaccatgactttttgattcatatgatcacaatcacattccactgtgttgacgatactgtaattgtgaataaacatatgatctggatttaactgattctgtgtgtaaatgtaataaacatatttaaaccattagcatgtagaattcatgcaaacatcaatcacttcaaatttcttatattgataactaatcagattgtaaagagttttatttagggcataaaacccaacacttatatcgcctgcaagggaaggcaggccttgcctatgggacttggattaaggcagagacggctatctttaattgttttagctccagaaaccaatgtgactagtttagagatgaggcaagatgaccaattccgatgatcgggagaccctctagaatagatacgatgaacgaggataacgaaaaatgacccagccatgaggctcgtacttcgccagctctgcagtcaaacctcaataaaaaaccattaaagaaagtcatcagagtttcaagtaatgcttcaggagctattctggaaaaaaattaaaagttcttgaaaaattgacccttttcccagtgattttaatgggagatggctcagttgcaaagtaatcttctcccattatctcatttcgtgaaaggaggactcggtcactctcacctggattcatgcgtagacaaaagaatggaaatcctaactttgtctcgaaagaagagattatttcaaaatt

SEQ ID NO: 216502 - DNA, 880 bp, Cannabis indica
gtcgctctgctctgatgaggtcgggtgtcttctttttcgattacattctgttctttactctaaaaccgttatgtttagatggaagtttgtttgacagttgaaaaacatggtagatccttctctactacactcttcacttgacccatttcgtctgatgcaacattcgaccaaccacccagcaaccttcggccaactacccagcaactatcgtctgattgtataagaggtattttggtaattaaaaatacataaaaaagtataaatattgtccacaccttatggagatatttttgtaaataaagtatcaatttgtgttttccatgtaataattcttaaaatatatattaaactgtttttaagatattagttattttttttaaataacaaaatgtaaaagaaattacaacgttaattaactttatccaattgctcgcggtgttgccctagaagattgtcctattgtttttttatcttaattaatacttcaattgtgtgtgtgttttttattctttctcagtttgtacaatttttttaagttaattattgttattttatggttcataaagggttcaagatgattgtgtaatgaagatgtgtatttttttttttgtgtttattttctgtagtacacactatagaagctaaaacttaattaaatataatatggaaaaataatagatgattaaaatgacatcaaaaattttaacaaactaacaaacattttttttatgtttatgggatttttgctttaattaaagccaattttgatttgttaatttggtacaaaaatatgagaaaaaggtgtacctatagagcgaagctgcacacgtgttgattcatcttcttcactggtttcaacgactgcatcttcttctactcc

SEQ ID NO: 216503 - DNA, 286 bp, Cannabis indica
ctactattttttttttgtttaaacactaattatttcattaaaagcagcagaaaaaaatcagtttcatcaacatcatcctaaaaaaaataacataaaaaactataatctacaaataatacaaactttaaaaacaagttttatcaatattgaaagaaactaataatttcattaaaagaataaaaaaaaaatagtttcatcaacaagataataataaaaaaaaaattaatctaaaaacgatactaactttgaaaattaatttcatcaatatttaaagaaactaattatt

SEQ ID NO: 216504 - DNA, 348 bp, Cannabis indica
tagtcattcttttatagatatgttggttaaataattttaaagtaagttttaagtgtaattttaatatttagttaaaaaaaatttctttcttccactaaataaaatctttataacactaaggaataggtaagtactcacaacgattctaggctttacaagttgaaacattcttcacaattaaaatctccacggtctaaaattatatcaatccaaaattaaattaaaataaatatacaaaaaagaaagtttatggttataattattgtcataaaaataagtattaggcacacctaatttttaactaccaaaaattaacaatattactactcacttatttagtaaattttt

SEQ ID NO: 216505 - DNA, 1438 bp, Cannabis indica
actcgggggagaataccaagctttcaccaatcacttcaagacatggcataatcatagagactcatgtcctaacacccatgaaaaaaaatagagcagttgagaggaagcatatgcacattgttgaaagtggtttagcacttctagctcatgtttctttaccacttaaatattgggatgaagcctctagggttgctgcctttctcataaatagaatgtctactccagagttacatttcaagtctcctcttgagattttgtttaacatacaacctgactattctactcgtaaggcctttaattgcttatgctatccaaatcttagaccctataattatttaaactccaatatagagctataccatgtgtctttctgattttagcatatcacataagggatacaaatgctttttcaaagatggcagactctacatctcaaggaattttcttttgatgagaatgtatttcccttcaatcaaagctgcccttttgactcaacgtgcatctggtatgacatctgctcagacacatgtgcctgacaaatacatattctatgaatatgtagtaatattatttagtatttaccaaataaaataataataagttagatagttggtcaataaatattctataagatataatgagtttattgatacatgtattagaggtgttgtttatttgtaagagttagtggtatcaggtataatgtgagtactggcccattttctagtgttagtacgtagtggattaataaccctatataaagagcataagcttgtatgaatttgtgtgtgaataataaaacaataaaaatcttttctaatttactttgtcctgtacctattaatataatgtatatgtattaataaactagtaacacattattcttgtttgatagaacttgatataacttaaactagctaattagattgtctaacccacaattaattaaacatactttttattcactgtatggatactagctagaccacgtatttgtgtttgtttaataaaagaagatatttcatatacattgataagaatatccaaagtctacctcttttctaataatgtgttgaaaaaaagaaaaaaataaatggatcataatccaaaatgttggtaagatatttatacgaaaaagaagaaataatatccaggtcttttctaatcatggggttcgaacccctattttagctagctagcaaaagttattacgatcacacgaattttccaaggatcaaaatcaattagtagtagccctcatgaaaatgttgttctatatagtttagttagagaaatcagtggaccaaaaaaataaaaatgaatgtttagaaaacgacacattttaattttatatagcacaaagacgacatggctgcgtgaaaagctcgtgagagccatggctgctgcctttcctatactaaacatataacaatatata

SEQ ID NO: 216506 - DNA, 583 bp, Cannabis indica
gaaggaacaccattattatttagattgaattagagttgaagcatgtagaagttatatatggaaaattataagagttttattttgatgttataaataaattatattattgggttatgtgtctgttgttttttttaattttttttttatatttatatggagtattttatgtctttttgtaaagaaaaataaaaattttatatttgtaaaagaatattaagtttcgtcgaaaaagtatgttagaaaagttattgtcgctgaaaaatttgacagaaaagtcacagttgtcagaaaagtcaccgaaaaagtcaccaaaagtaaatatcatagatataaataaaaataaaatcgtttctataacatagtgaataaaaataaataacataagataacgcaaaatggttatgattgaaatataatcggttctgtaacataatgaacaaaaacaaataacacgaaataattcaaactagttataattaaaatagaactagttttataacagtgttacaatgaataaaaataaataacatgaaataattcaaagtggtataactaaataaactagttatataacatagtgaat

SEQ ID NO: 216507 - DNA, 726 bp, Cannabis indica
tgttgtgactataaatctaaaaatgtactcttatatacgcaaagtgaaaaaaagaacaagcaaaaaaaaattagataatatgttatagtttcttttattcaatttaattcctattttaaaaaaagaataataataaaaaaaaaagaaaaaaaaaaatcatgtaactcaattctagcaattccaaattactgtcttttcaacaattgtatttttttttgtaatttttatgattttttattatattttattattatattcaactctacttaattacttatatattatatataaaatataattaaatatgatatttatatgtagtcatcaacaaaacataattaagttctaaactaataaaaacataataaataataataataatactaaactgaaataaaaaaatcaaaaaagtcacaataaataataaatgtacttaacagcttagagtaactaataaaaatatcataataataataataaataataataataataataataataataataataataaattaagaatagaacgcctctgacctaggttctctcgttcctccatggcaaggaagaaaaaaccaggtcgtcggtcgggaacgaaggtggcaattgatgcaggttcaccagagcagcgtcgggatttggagagggagagcgttgctggttcttcgataaccaggacccgctgctagtcgtttacatccagacagaaaacggttcaggaac

SEQ ID NO: 216508 - DNA, 731 bp, Cannabis indica
taatgatttctaattcaagagttttacctaaaggagtaaattttagaatttgtgatagacattaatagacactgcaccttaaatttatgttggcttcctcttgtccttttattttttaccattcatgaatgtaggtattgtgattactagtaatcattgtttataataaaataaaaattacacgagtggttatcattgccctcatttcctacgatcaatagcaaagtaataatgcccccccctccccctcttacccccccccccaaaaaaaaaaaaatagcaaaataataatgctagatgcactaattattggattcaataatatctaacatttatatgaagaaaaatagatttttacataaactgtcatttttgacacaattgtaatctttatatggtgaaaatattttttaattataatttttcagaatcttataaaaacaataaaaaaacaacatataaaaaaatgtaaatcaatagtcagtaactttgtaagatggggtttgagggattttgatagtttgaagatggtgcctagcttctatgaactcctgttcgggttatggatattttgtccaaagaagaagttgaataatttctggtcttttgttggagaatttaatatcgtcgcaatacatttgtgcatgatttctgttgatttttcaagatatggtaagtagatggactcttagctatctctagcgttttcaagatgcccaacaccatcatga

SEQ ID NO: 216509 - DNA, 657 bp, Cannabis indica
aacctcatcaattacatcttaattaattaatgaaatatatgtagagcaaaaaaaaaaaaaaaaataacatgtaaaaatgtaaatgaataaacatggttcccaagcaaaagaataggattttgaaggtttgagtttctgaatgaaagagagaaaaagaaaaaaaaaaattaattggaagaggtaagaataaattagtaatctttttgaataattattatttaatttaagaatattattaaaaaaaattaattttatgaataacttagtacattccatatattaaccatttatatacacttatcaatttattatcattacattaaatatctatggctataaaaatatacctaccaatagaaacaaaactaagatgtttaccatagacatacatatcctatatatattattttttttatataaataagaaaattatattgctccaaccaattcattacaagctattaccctatcaaaagggcctaactaaatcgattatacaatctgtacaatttttcctcccatttttgagttttttttagtgacattataatgcatgaaaccatgctttgccaggccaaatcaaatcgagtctctaaaccaaacttgctttaacatcactgataagcttggtaggttcctttagtcaatccctccata

SEQ ID NO: 216510 - DNA, 694 bp, Cannabis indica
aagcgttggacgattccctcgaagcatttacagaatttgatagcgtgaatcctacgaacaagcttcgtcaaattcttattgtgttagccaaatggttgcagaaggctgcgagatctaaatatattcaacaaaaaatagaatggaaaggctttaaatccggatttttccctaaaggtgatattttaagctatgagaataaatgggaagatctttcgaaagcaatccagaattctaaagatggaaattttcctaaaataaaattacaaaatgaagattatagtgatcgttatgtgtccaaagttacagaagtgaaaaaagacatggcactcttgttgaacattgcagcataagcaaattattaggctttgtccaaggttttacttaaatattgttgccaaaaataagtgacatcaatcttttgatgccctatgttatttgagtttgtgtggtatttttaataatgttttcccttatcatcttcctatattgtatgatatttgcaagggaaaaatatcaatttggctttcatgtactttgttaaataataattcaaaactttatatttgtgttacaatgaattaaattttcaatctttaatattgctgaaattaagagcatgtagtgaaagagcaccctcaaaacacaacgaaattacaactcaaaaatagttcggatcaaatctcatactgaggaa

SEQ ID NO: 216511 - DNA, 525 bp, Cannabis indica
gttaataataacttaatacatatgatttcttttattttattgctatgtaataaatggtgacatatatattaactctaagtgagtcacgtgtggaggtgtcaagcgggaaaaaatacaactaatccctataattattctactaatattaaccattaggctaactttagaatctcacatagaacaaagccaacttagttaggtgaaagaccattttaccatttgcttagcttctaagtaacttctacaactatgggtaatttggtcaactcttagtatcctaaaatatcccggtaattctaaaatcaacttattataatattcccatcaattctatcaatactttaaggttgtcaaacctgaaaaatatttttatcccacatatagttcatattacattcacacatgatatataaatctccatgatttaaaaattacgcttatttatccacttatataaaatttaaaattttatgttgtaaactgtttagtaggatcataatcccacgtattacctggttaactcat

SEQ ID NO: 216512 - DNA, 506 bp, Cannabis indica
atgtttatatgtaatggtttggaatattttattgaaattgtcataaatttagaattccaagtttattgatttgaggaaagcaagacttgaccttaaactagatttaacgtaaaagtattagatatataatccatttaagaaattcataaatattgtatagtagtatatgtttgtttctatcttctcatatatataaatcctaggcttacctagctaaagctgtatatgccttatttctttatgaaatcaatcaaaaataaaaaatatttgaagattaaatacttatatacatttaatccaaaccatcaatgaaaatttaaataatatcatttaaaatattaccgtagtcttacttaattatggcagaggaaaaccgtagttacaagcagcaacactattatatggcaagtgtaattacacaagaacaatatataaatatatatatatgcatagactgagaacagcaaataaataattaaagcctaaacctgtaattaaacctgtct

SEQ ID NO: 216513 - DNA, 505 bp, Cannabis indica
tttgaatccaaattaacaagtttttaactttttatttaaacaaaataaaatagaaaatttttgaaaatgaaagagtacaaatacaaagccaatacttggcctaaacccgacctgcatgaagctgtcctatgtctaacaaccagtgaaatttgagactacattggacaaaatcggtagtcatatttacaacttttttttttttttttaccgaaacccctatttacaaagagagatgtttatggcgtaagtactaaagttttaagtttgtaagcggcataaaattaattatttttttttaacagcataagtatataatattagtaaaactataattttttgtctagttctatcagtgcggactttgttagtgtcttaaatttgtaagcagatttagtttttgaattgttgaaacttgaaagtagatttgaaagtaatcgatactacacatttatctcaaaatctaatgatttgaaatctaagacatacacatatttaaagaaattcg

SEQ ID NO: 216514 - DNA, 647 bp, Cannabis indica
actatgtttgggaatgttgaagcggctccatacaatgttactccattctatcttaggtgggttttcatgtagcacttgatagccgtgagcaaagaataacaaaataacgagaaatcaacttcacgacaaccatgaatcaactataaaacaatcaaaagtataatctcgtgacaactacaaataaaatattaaataacaaaaaaaaattattatttttactgaaaaaagtatttttgtaaataaaaaaattcaaaacataaatataaattttttttgggttaatgtatttttgtaatttttttaaaattattaatttattatgtaatttttttaaaaaaatttctcttatacatggataagcaataaatttatattccaccacttatcaacttgaaaccttgcattattaattctaaacaaaatagctaataataaggtgacacaaacaaaccaaaagataattaatggcatatatatagtagaagaaattgacacttttttttatgctctttattattattatcttcaatcaattatatcttagtcttacaaaaacacaattatatataatatatatattcaagttgatgagtgaagtgaacataattcctttacttttatactaggaataacataaccttatagct

SEQ ID NO: 216515 - DNA, 537 bp, Cannabis indica
tttcaagtctttattgaatctaggagatgcggtcagatctagcttgagtccggtcgagtttggaatgagacaagttgaatctgggctgggtcttctcaactccaatggtagactgacccccataaaattgagatcttagtcgttctccgcagatatctctaatcatcctccctcgatttgttttctaaatcacaacttggtggatagattttccaaattttttattatttttttaataatttaggatataaatctggttaaatggatattttgtgtttttttagatttaaatctgagaaatataatagtgttggtggtgatggttgcattggagtttcagtgggatagtgtagcggtggtggtttcggtatgttgtaatggtggtggtggtggttgtggaagagaagagttgggtggtagtgtggtggttatgattatgggagagaaggaattagggttgagttttggtgtggtggtggtggttatggtggtagtgattttggggagagtgtgtgttacaaagagagagagagagag

SEQ ID NO: 216516 - DNA, 346 bp, Cannabis indica
tatattattaataatttctaaattaatagtatattaaacatacgagataattaaatttataataaatcatattaaaataaaaaaaaataatatatattttgtataaaactattaattatttatttaattttgtttaaaatttgtttatttattttttaacgaaggtcttatatttataataaatcataaatttatagtaactcctacaagtgagagagaataataagaaggctaattaggatttttatttctaaattttgacatgtattaaattatgttttctaaattttatgattgttaaaaacaatttgataaaagttgggagacatgatttggtacatataaa

SEQ ID NO: 216517 - DNA, 500 bp, Cannabis indica
catattataatgttttaaatggaaaatagcgaataaataaggggtattaaattaatgctaattggattttggcttggtgtttattgtttctctcggatattggcggctaaaccacctgaactttacggtttgtaacacttaaccacataaactgaatttttggcggctaaactacctaaactctgattccgttttgctctgcacacctccgtccaaaaatcacagttaagtgccacggtggattttccacgtgtacacacttgtacacgtggcaagtttttagtggtccacgtaatattagttttaaaaaataattataaatatttaaaaataattaaaaatcagaaattaatttttttttctttttaacttttttaattttaaaaaattaattttttttttaacttttttttctttttcttcttcttcttctttttctgcagaatccctcccagcttacaagaacaaaaatacataaacaatctcaaatcttaaccttc

SEQ ID NO: 216518 - DNA, 526 bp, Cannabis indica
tgcataattgaagtcctaagtccaaactacaaagactatatttttaagtaagtgcccgagtggggttcagttttctctcttttctccagtgcaatttccctctctttgccgttttccccttctttcgccggcggtttcctccatgtcctcgcacttttcttctcaatccaacttcaatggagtcgtgctccacgatgatatgagtcccaggcagttcttatggattcctagtgttatatatgaatcacagttctgcatttatgccttattccttcgctttctgttcacttactctattcttctctcttttatggattcgattcttcttgatatggattcccgattggtgctttcagaaaaggaaagtgcagtccattccttgacttctgctgatctcactgatgagaacaatgctcccaaattttttcttgtggcgcgatgtctatctaatgctattaacccaataacttttattaagaaaatgggtgacttctggagtaacaaatgccgcttccaggttgaggtt

SEQ ID NO: 216519 - DNA, 914 bp, Cannabis indica
agcatatggcagtttgggccattacacaatatcctttataataaaagtctcatttttttttatcatcaatattttgtatatataatatttttttataacctttgacattctcagttcgtgggtggcgctcggtggttggggaattccgttggtggtgcgaggtggttgggctacttggcgctcggtgttgaaatattggtggtggtttggtgccgtttcaatttagggaagaaggagaagagagtgagagagaaaagagtgaaaagacatgagtggaggggtttcaaaaatggagagagcatttttagaataaggaaaagttgacctattcccccaatatcggtacacataagtttagggaattaatttactcctaatgtatgcatagataatcaaatctccctttttgagatgtaatctcatgcttcttaaaccacactttaccaaattttaacatggtatcagagcagtttgtgatccattgtgagcccaaaatgttgtcggtccgaaaagacgagccaaaactaaaaataacttacgatgtctcccctttgacctctatttgggacctttcgcagccaatgttttgctagtgtccagtgttagggtctttgattcttttttttcaaaagccacaaatttctcaatatgtacacccacaaattttgcgatttagcttttgagactcttctaaatgtcaggtttcagctctgtggtcttttaaaggtcatccattatacccacactttccaggcccaaacgtaaatggtgtattagaattagtctcacattactaatgtgtggaaatatataaattatcatatataaaataaatggactgctcctctcattgtcaattagttttgagatggaacctcagacatcttaacccataccttaccaaattctaacac

SEQ ID NO: 216520 - DNA, 517 bp, Cannabis indica
aaaatgatttagcttcttcagtaagtatagatgtacttacctcgtactgacactttggattgggattgggttgattgggaagctttcccttttccctttcagctacagcaatagcaagcttaccaatttgtgtctcaagctttcacagggattgagaatttgtgtgttaagcttgttgggtggtttgcatgaactgttgtagggtatcctctaaagattgttttctttgttgttgaggatatggcatattaggttgggcatgactctgattaggcgtgttgtactattgcccttggttaggctcgttgtgtctccatgaaaaatttggatgatttctccaatttgaattgtaggattgagaaaatgggctatcagatgacttcccataagtctgaagagcgtttacttcttaagagaatgcctcttggtatataggcaatgatggataggactgggtcctatgacttgcactatagcataaggaaaaaaatttaattcctatgtataggagtattca

SEQ ID NO: 216521 - DNA, 1327 bp, Cannabis indica
ttaagagaaaattaaaattagaaaacaataaagaaacaatgaaaaataagaagaagtaaattaataaagaaatgctaacaaaattatatactactattatacatagcaaaataaaaaattaatatcatttaagaataataaaaactatacaataaaacagaaatatactctacaacaaaatctatataccaacaaccaataataatcaataaaaaattaaaaaatcgacataactttcagatatttttttttaataaaattaatataaatattctataatttttaagtaatttgtttctaattctaaaaaaaattattaattttaatttttttgattttttcatatgctaaaaaataatttaaacaacaaatagtattgggtgattctagaatgcactctttaaaagggatgtgctgatacacccttaacttgtttcggtatcaaaaaaaatttttagtctaatttttttttatattcatatacgttataactatttaagataacttacaaaattttaaaaaattctgaataatttatattatagaaaacaatgttcaaacaacttatcttacacacgtataaaataaaatagtcacgcgtgcaatacactgtttgaacgtagttttcggcgtgttaaatttttctaaatttcttaaaattttacaggatgtcttaaataactataaggtacatgaccataagaaaaattttgaattaaaaaattatttcgggtgctaaaacagataagggtgcattaatgtatccattttaaaggggtgcattgtagaatttcctaaggggaaatttgattttttatgcttacatttggttaaatttttttttctaaacaaataataactaatatttgtaagatatgacaatttttatgatatccttaaaatactcccatttacatcactccatttacactatcggaccacccatcgggccacccatcggacccatcggaccacccatcggactacatcggaccaaatctgctactaattttttttttatgtttttgtacatacaaaagtagcatcaggtgattatcggaccaccatcggaccccatcggactactatttttttttttctttatgtttttgcactaaaaaaagtatggaaaatttgagaggggtatttttgggttttagataaagtggtcatatatttatattttcaatggtgatatgtattagtttagaaatagaaaatcaaattttcctttcccaatagtatttgcgggacggttcccctttatgatacctaaacgacgccgcctttgagttaatttaacgagtaaaggtgtcaacttcaagtt

SEQ ID NO: 216522 - DNA, 1080 bp, Cannabis indica
gtcacatggagagtatcttgaagtgacatgggcaaaattggtataatattttaaaaaagaggtaaaaatgatagaatttaaaaaagagagtaaaaataaaagaacaatataaaaaggatagagtgtaatttcctcattaagcaaagtatgacccaataatttacattttcacaatttttttctttatttaaattttaatgaaaaaataacataaaaacaacataataagtataagtatagtagcaacataaaaacaatgcgcaaatttgctaaaataacatcaaaataattgtttatatttaaaagaaatcgtaaaaatattaaaaatactgtagaaacgtaattttattttattttacttttcttttttgggtaattataaggaaaaaaaaaagtccatgatttttttctttggaaaaagaaaacttttaaaactaccataatattttgtggcaaataaaagaagaaattacagttaatatgattttgtaaaactttagaacaaaaacatgacacttttagatttgactactttttatggcatattttagtttttaaattattttatggtattttctatgtcatatatgtaaactgaattttttaaagcccatattagatgtttagtaataatttttttttttttaaaaaaaaaaaaaaaaaattaaaactcaaaaactaatttcttctctccattcaagtacattacctacctcaatcctcaacagtccacctacctaacttcgttcaccagcgatagattcgaggactgacgactcaaacaaattatggaaatgagatctccaccaccaaaacttcaaaggatcgaatggcttctgtcgtaattggagatttagaaaccagtttcctaaactgaaaaaaccgttttcataataaacaaatcttttatgaattttggtattcgtaactggtttttttattgagaaactaattttgattatatgaaagtaactggtttcttaatttattgccttaacaaaattacttttaactagtttttttatcatgaaattagtttttttttgtatgagaaaattgattttaattatatagaagtaa

SEQ ID NO: 216523 - DNA, 711 bp, Cannabis indica
tcgatcacaagtgactcttttggctcacagtaactctttgtggcttaatatcctcgaatcacaagcaaattttttggctcatctttttagaccgatttttagatttagatcagatactcgttagagtttagtttggctctgataccatgttagaatgtaagatgcatgaggttttatctaaaaaccaattggctatgagaggagtagcccatacaccttaagtatgtaatttagtttcacaatgtgagactctctaatattactcctcgggtttaccactccctagctagggatatggtatcaaccttgtgttaaacaagtagtttttacaacatacccaatggctatgcaacagtgcttgttagctagcaaatttaagagagatgtttacatttatttctcagacgaaagaggagagcttggtaaacggcgggctagtgaatttcattctcttagcactgagcaatattgagatttgaatccaaacatactttgtgaggactgaggactatgtcttcttaccactaagtccagatctcatttttattgacgtttttaatcacaatgtgctattatatatgacaatgcacgattggcattctcgtttaaattacgtaagatcctttcatgagcatgtttaaaattttgttgttcattcagttactttaaaaatgctgagaaagagagtttttgattccattggtctcttaa

SEQ ID NO: 216524 - DNA, 839 bp, Cannabis indica
ttttttttttttttggtttgaaaagtaggaaaaacatttctacgtgcaaagatatgataattcccggattgcctactatgcttggtaacgagtcaaagtgaattagcgaggatgcattcaaaatttaggggtgtacgtaggtcggtttagtcgggttatagtataatttaactaagctaatataaatatcgggttgcaaatattcaagtgtaattcgctcaattaaaaattagaaaaaatttaacccgtgcaatgattttatcggtttctaattcaaaaaattaaatttgaaaaaataaaaataaattatttatatttgaagttaaaaaaaaaatttaatctaaaataattttaaaaattttaatataagataaatataattgagtaaacataaaataattaaataaaataataaaaaaataataatattgtataaattttaaacttcatctttaatatccaaatacaataaaaattattaattataaagtctagatttaaaggtaaacaataaaatgtcaaaactgtaaatacaaaatagtttgactaataaatataatttatgtaatatattatatacacttttattaaaaaatatatattaatcggtttaattcgttaattaagcggtttagaataatttgtaaattacttaatatactcattgagcggttcgaattttcattatattatttcgggttgtattttttatcggtttatttggtttaatttggacaatttcttcgggttgagcggtttataaattttagggcattttacaattttgtatacattattttaattaattacaaaatatgtgcaaaaaaacttattatcat

SEQ ID NO: 216525 - DNA, 671 bp, Cannabis indica
ggcgtgccaagtacaagctcattccatggttggctttaaaataagtagatttaataattaagagatcgtttatttgtttcagtgtgacttttgatcttcattgtcttatttgtggtcagcacaatgaatttattgtagcatttattttttcaaaatgctattttaatttgaggtgccttaaaacatatagttctttggctcaagattgagactcattgttgtatcttaattggtataagtaaagatgcaagcacaacaaaaatagaaaaaaggtttttgcttttgcaattactgcttgtgttttttatatttggagtgcttgaaatgatgattttttgatttctgatgttattagaaacattaagattgttgtttgcaatagcattaagtttttaaatacaaagaaaacagataaaggagatatagattggttggggcaattatttttgtaagtattattctttttttcttaagtggtatacggttggggttttttgtaaatggtactggatttattaaaaaaataataataattataagaaagggcattttatttttcataaaaataagatgattatatgcaccccaacaatttattaatgcatccattttaataatttttattttatataaaatatgtatctttaattttaatagttttttaatttttt

SEQ ID NO: 216526 - DNA, 948 bp, Cannabis indica
aaattcttaaaattgattaagttttttaaaaaaaaaaattatttaaaaaaaattgggggtgtaaataaaaactttcggtaaataataactataaataactttaaagttcaaacggacatttatgtaaattacaaattcttttgggaaattttatttacaccccaaaattttctaaaggcaccccattttaataattttaatttaatataaaatttatatctttagttatactaaatttttttaacttttttcttccaattcataaacttaaaaaatatacttatcaaataaaattaaattatattttaaatattatgacaaaaaaattaaaataaaaatttttatgaaattttcttagtaaaaataaaaaaatataaatacatgagttaaaaaaaattatgaaaataaaattaaaataagtattaaaactaacattaaataatgtgagaaaaaaatttaaaagaaaatatcaagagtaatttttaaaaattatttaaatttatatatatttttaataatgaggtgtatttataacttgatgggtgcaaataaaatctctctttttgatagaatctattccactacggttgtggtccttgtggatcacctaatttcatatttgtcaacgttacacaatccaatatttctacacgcgttttacgtataggatatgtttttataatttataaatacagtattaatttttgtagttactgaatttaatatgcatctatatatgtatcgacaaaatctatgacgttttcattttattattgagaatatatgacatattatatcattctaaataatcatcttcagaaaataattcaaagctagcttaattaatcaactacatatataaataaatgaaaaaaagacaaacaaaaagatcagatagttgaaatctaaataagcatacaatatatattatatatgtgtaacatgtca

SEQ ID NO: 216527 - DNA, 633 bp, Cannabis indica
atttttttttttaaatattaaattggaccatgtattttctgaaataatactaaatagtatcttgaactattttttttttcttaaaataaaatttaattataattcttatgataaaattgttatattttctacatctattcgtgctagaaattatctttaagttgataatattaaaaaaaaaatcaaaaaattgagctcatggttctgtttgtactattttaaaaaatacagagtttatttcgttatttaataaaaggataattacataaaacaccattttttgtaaaaaaaaaaaaatacattttacgtttgaagaattttttttttacatttttacagttttccataaaaacaacaagaaaactacataacaataatatgaaaataacatctaaatatcaaaacaacaacaaaaaataatatacagattacgaaaaattaccaacaaattaacaagagtacaacataaaaagatcgtatatattgtaaataaaataaaaaaaatcgtaaaaatattcaaaatttcgtgaaatcgtagttttgtaatttttttggttgtttttgtgtatttggaaaataattcttttaataaaacagtgagtcaaatcggttacaaaacataagatctaaaat

SEQ ID NO: 216528 - DNA, 791 bp, Cannabis indica
ttgaggacaaagtttggaaccaagtttgaaaagcaaactaataatcaaactttttccattaagctatagaacatatagaacatgtgaaatcaaattcatcttcttatagctcttctaaaacctggtttttagggggtttttttgatgagacaacaatgtaatagtattttatgtttggttaatatgaaagaaacaagttaagaaattctaggaatattgttggctttaacttgataaaaaagacaagttatgtgtagtctatttctttgttggcatatatagttgtaaaatatatggaaggaacatacatattttggtggtacttgaactcaagaacaaatccaataatttagtggaaaccaaccaaatgaatagaattacaataagaataaaaagactgcagtgttcttttttttattttatttttttttccttttaactttaactaatataatatatattttgtagttgaagaataacaaaagtgtgaacccaccaaaatatatgaaggaatctcaactgtaaagagatgtctctaactaagtataactagttatagtataataataattaaagagaactatgcaccatgggcatgaccttctctaaggtgatcataagtactttattttctaaagttcatagtatatatatacgtacaccttctattcggatgaattttgtggcttcatatttatgatcgagataaatttaacacccaaaagcacataattaatatattgcatattgcatagataagactaataaaatattgtacacatatatagata

SEQ ID NO: 216529 - DNA, 528 bp, Cannabis indica
atataatatcatctattaaatgcttaaagtctaaaatgttctcatttccaacaagattgaaaaagcatcaaatctttgtagtcgtggaaggtatgtttataggaagtaatgctcaagccgatgtcatgaataaaatgcccttaactaccagatatacacttactagatccgaagaaaaggaagaaaaaaacactcacagcaaaatcttttggaaccaaagccacattatgagaaagaagcatttggtaaacatcacgcgcagaatgcccaactgctaaaacaacagaatcaaatccccacttttggctattagactgtgattgatcttttgaatcagatactttgacgccaacgacttgtccatcttctatgagaagatcatccactctcttcccaaactcaatagtaaccttagatgtttatgaaaaggaaaaagaaaagttaagcaaacaagtttgaagaaagaaacatatctctgacaatataagtttgactcagccaaaagcatgtatgtcactcacacccaga

SEQ ID NO: 216530 - DNA, 783 bp, Cannabis indica
cataagagtttattaatttaagtctgacacatctaagattataaatataatcacttaattacaatctttttatttaatggaaacaccctttgattccaattatgattatattaagtaatttaggtaagcttagagaaaattgaggtgaatttagagttgcaactgagcttagtaaacttaattaaccgagcttagagagcttaggtcaaagtggaccataaaaaatttataaaatcttagattaattttgagcagcataacagtattgatttttttttttttaatatttactatatcttccatggatatatctcactcttgaagatcttttatgactcaaaaagcctggatcaaagtgaaccatgaaaatataagaaatctattgaattaatttgagcagcataacagtatataaatgtgagattttcccccattaatttttggctatatctcacttttggagacattttatggcttataaagcctacgccaaagtagaccaaagataaagagagaaaatctaattaaagtaaaaaaaaaaaacaagatttagagagaagagcaaaaatagggattaccaccctatcacttactgtgtagaaatctttgtagaagctcttgaagataaaaatcttgtacacaaagctttctttctcttttttttctctcctatttcacttttacgtttaattcaaaactacccaaaaaaaaataccatccccttctattctgctatctgttgggttttatgccctaaataaaactcatttcaatataatcaga

SEQ ID NO: 216531 - DNA, 738 bp, Cannabis indica
taatttcacttaatttattctatttatatgggtcgaacataataattgtttataatcatacattataattcatggttatttctactacttacaagtaaaacatttcatatttttgaaaaacactctaaaatttacttaaaaagaaacgttaataaatgttcatttttcttcacaaaacgtttaatcataaaattggcatcgtttttttttctttccatcatgttccttgaaaattgattctgtagcgttattcgctcattattgtcggtttacatttgttgttttattacgagtgttatgccgtccttttagcatttctctttgatttattgtcattggttacaatatgcaatttttttcattatttattgttatccacttggagtgtgtgaataacacactaccgagttattaatttacacaatttctgtagtcaaaaccggataaagttattaattaatgggggttaagtttatattgcttcctttaccttctttctactcagcaatttcttcactcattgaaaataacaggcttgatgggaaggtggcactaataacaggagcagcaagcggaataggcaaagcaacagccaccaaattcatcaacaatggtgccaaagtagtcatagcagacatccaacacaatctcggcctagccacggctaaggagctcggtccaaacgcaaccttgtagcctgcgatgtgacacaagagtcagcatctccgcagccgtgga

SEQ ID NO: 216532 - DNA, 1092 bp, Cannabis indica
aattaatgataattgttattaaattcaacggtttaaagttattttgggtgatgtgaacaaccatatcgtatgcaaatacacgtgcctttgttggaactatgcacagaaatagatatatcttaaccttaataattatttatataacttaattactttccctattattaatctcattcactatagtgaaagttaacgtctacagttccactagtggaaaatacttttctccattgtactatagtactttaaaaatacatatttatatctcatatatataataatatgatattgcacatatatatacatatttataaagttgtgtacatcgaccatttgtataaatacatatatttatacattcatgatctaaatttatatacagcttcaaataggatgtagagttattgccttccttgttgggatatgaaaatagctaactacccctttgcactaaaaagataatgattttttttttatgtatagaaaataaaaaaagagaaccataatattatttgatcaaaagttgacactaccaaacaattaatgaagcaacgaatttttatgcattttcttttcgattttttgaaaatctcttttcttttctccccgttttcttccaccttcactacaccaaaatatagaattggtgacatttggattggtaacatttgtaaaaaatgtcataataatataatttaagtaacatttgataggaaatgtcactttaaagagaagacttgacattttaattaataacattttattaaaatgtaactatctatatactttagtgacatttgattaaaaatgccattagttttttcatatttaactttagtaacatttaaaaaatatcactaaaatatattaatactaacatttgtaaaaaggacacaaaatattaaatttaatgacattttaaaatgtcacttaaaattaaaaaaaaaataattactgaaaatatttagtagcaattttaatttgtcaataataattgtaaataataacttaaaatttaaactgctaacaaaaaatatattaaaaaacccacgtatgctctcatatcccttgattttctctcctacatctcac

SEQ ID NO: 216533 - DNA, 654 bp, Cannabis indica
tttcctgcacaatcatatttgataaatttgaaccacaactgtcaagagcaatattcaagacaattatccataagagcaaaccaaactatataaaaatgttcaaattaacagcacgccagcaaaatagataatcaaaacatgaaacatagtcatatcaaaaacagattataaaacatcataacacctatccatatcagtaaaacaaataagggagctgagacactgtgagaagagaaacagagtaagaaatccaattgagggtcagcaatgcagtatcagaacaaaatagaattacaatgaataaaccaaaattgaaaataatacctgcagtttagagaaatgccgcagacccaagttaacagaaaactgtacagtgtctgtaaggtgaaggggcgagagaatcacatagactagcaggaaagatcaggagagttagtgagttgagagagagagagtccggcgagtggtgaggtgtgagagaaagcggtggaagtggcggtggcagaagggaagtaatattaagattaagaagaggaagatgaagaagcttggggaagagggcaatggaatgttgtagaagaaactaactaatggctttcgcactttcttcttgattgttctgttcagttctattctattctattctaataaaac

SEQ ID NO: 216534 - DNA, 857 bp, Cannabis indica
ctttagctttttttatatatatataccttattataattattaggagtattaattgtttttggtattggttaaatttttttaaaaatttatatacatatatcgtacacgatttaataattttaaaataaacttaaaaaaaaattaaatatcgaaacaaataaataatgcatggatatactctgaatgaacagaaattttccaaatatttattattataactataaaatatatcctcatataaataaattgagttatacttatattatttgaaaagagaaagcaaaaaagatgaagacatttccaaaaatgttcaccacacaataattatttagatatataaatttaaattgtggatattaaaaagtagtatatatatatatataccagctggaaattccaagtcaaacaaacaagccccagttggattcaatagtatatacaaaaataaaaataaaaataaaaataaaaacaaaagaacagtcttagtttattagtcttgaaaattaataagaaaaaaccaaccagacagcaagtaaacgagactgataataattaaggaacatcactgtcgtcttatgatatattaaattaatattccttaataatacgaaattaattaaacaaaataaaaatatagacttaattaattggcacgtttttgttttgacttacaaggatcaaccaatcagaaacttacacgtcatctaactaggaatgtgaaaaccggtttcgaggaaacaagagaaaagatacttatattatattcaatagcgtcaaccgttgaatattattattacttttttgtaactatatatatatataaacttgaattgagatatatatcataattcattata

SEQ ID NO: 216535 - DNA, 834 bp, Cannabis indica
tatgagttttactatctataacataataattgttttggtgtaaacattataaatgtgaagatttcataatcaatgggagatggggacattaattaatagtgaatttgggaatttttttgattttattttattattgagaagatactgaaataagtgggtagtaaaggttaatgagtattgaatttattgttttttcgttgtatagataaatatcaatatgaatagttttttaataaatcgaatggctaaaataattagaagattttagtattggctatgatgttggtattctaacccagataataaataagaaataattaagttgaattagattgtgattatattagttaattttaattaatttatattgactataattatgatttttaccttagataaataaaataatagagctttcttgtataaattataaatgtgaggattttgtcatcaatgggagataggagacattaataatgaattggaaaattttgatttaatcctataagatgctaaaataaatggacaataaagcttaataagtatgagttttattatttttcattgtattgaaaaatactaatatgtatagttatatatagtattaggaaagcattaagatatacattactattttcctctcacatctatctatcttaatactactagtatatattataatttatttaaaatacaatcaactccaatagagttaaataatagtgtttatcctattggtaatgtcaatcaaaaaagtttaaatttttctaaggttgtttttggaaggtctttatcaaacaagacaatcaacttttatgattgatataatagaaa

SEQ ID NO: 216536 - DNA, 525 bp, Cannabis indica
agaagcagtttgaggagagccaagataatcttcacaaggatccacttaatccagcctttcaggaacaagaattgaatgctaaaaataaagtccttgaaacttaaaaagcctactactcttttatgcagtagaaaattaagctccaggggatcaaggagggtgactcaaactcagagttgtttcacaaggaactcaagcacagaaggagccaaaataacattttctcaattactaatagggaaggtacaagagtagatcaacctaatgaggttagtgttacttttttagctttctagcaaagcctgttaggctccaagatgcagaataggagatatgttaacaaaaagcttgtccaacaaggcccattacttactatagaacatatacaattgctggagaagaattattctggggaggaagttaaagtagcggtttttagaatccctggtatcaaaggcccaggtccggacagatttggaagctccttctgtcaagaaaatttggaattgattggggaagacatca

SEQ ID NO: 216537 - DNA, 826 bp, Cannabis indica
gtgtaagttttagtgttaccttggatccatttcttgcaccaaatccaatatttgaagatacaatggaggtgctcttaaggttctctcatttgagattcttccatttatattatattatgagatatttacaagtcaaattatttaatataatattaaggaaattatattgaaatatgttaaagtatgctattattttcatatgtaaataataagaaaacaaatattaatttgatctttaattgtttgagtttgttctcatgaaattatgtgtagattttctaaactatcaattacaaagttgaagattaagataaatataaaatatatgtacataagccataagggatggtaataaggtaataaaaacaaagatcaacagaaaaatgttaagggtaaaacttaagtaattagtattattaagtataaacaagtacatgcatgatcatgaaatccaatttaactaaaaagaaaataaataaataaaaaaagaataagattagagtaatatgctattattaaagtagcatgctatattttacttttcacctactttgataagacaagtttacaccaagtataagttttctagtctactaatttttttacttttaaaattattaaataattattattattttcttttacaaatattaattattaaaattaaatacacactagtaattaggttgtatagatctaccaagccttaaccccatatatgattttggtaattgagaaaatgatatgtgaaatatgattgtaacaaaaaaaaaaatagtatgtatagattgtatatttaagtgtatctctaatattattggtatac

SEQ ID NO: 216538 - DNA, 591 bp, Cannabis indica
gtccccgaatgttaaacgggacgaggacggggacccgtttagtatattatcttatatttctagtaatattttataatttataattaatgtttgtatttttttagtatatcagtttttttttttatgaattatatgttgtgttttggataataattagtttattgaataataattaatgtgtaatattttaattcttatatattttaatattttgtatattaaaatttttattataaactttatttttctattaggggattcctcgccccgtccccgctctcattaggggattccccgtcccatccccaatggggaataagcggggatggggattaaaatcgttaacggggatggggacgggagagcactccccgccaattccccgccccgtgtgcatccctacctgagagagagaaatagaaagagaactagggactccaccgacaatctgccattgttactaattagagaaatggatgtccatttaacttgaatttttgcatcttgacttattgagaaatataatatatattgaatgagttaattattctttctttgataatattaggaatgaacaaagggattgactta

SEQ ID NO: 216539 - DNA, 843 bp, Cannabis indica
  modified_base (830)..(830): a, c, t, g, unknown or other
gtagcattatgtatggtgatccggttactctgattgtattactgatgatttcaaataaattcttatgattaatagtattgtcgggtagtcttttttcttttgaggttaaggttttaatgaggctgttttttaaaaaaaaatatcgagaattacatattatgtattttaaattagattatgcaatctcataataaattatacaaataatgtgataccatgtcaaatagtgttggtaacattgatttgattccctttatcaatgttcaattaataattacttgatatcaattgttaagttatggtttatatatatatatataagtacttgcttaattttagttaacttataaactcattaacatgtttataataaatttagtatgtttataacatttttataacacacttatgaacaatttaatatatttatgtcctatttaactaaaagatataatttaaatataataaatttaagagtgtatactcttacataggtcattgccatgttatttttggattaggcatgtcaaccattaaacgacccgtttaattgggttagtcgtgtcaacccagaatgactcaaacctatttaaggcaaacccaaactcatttgtttcgtgtggatattaagtcgtgttatcgtgtttgtcccatattgccaacactaccgatacacgcctgatttctattatttttaatatatcatgaacctttttatccttataattttttgtcaagttattttcaaaaagagttgctaaagggggttgtgcatatatccgtctttttgtaggcggttttacgaactgagattgcaatgtgaaacctgntaaaaattcaacc

SEQ ID NO: 216540 - DNA, 622 bp, Cannabis indica
atatgataatgtatcattggagatactcttaggtgagaacacttttttttttagctctcacgggtagagacagttttttgttagtcgtttagatttaaatctaataggtgttgacgcaaaagattggccaacactcgctatagatgtgcgagagaaaatagaagtaagtagagtaaatgagagagacacacagatttaaagtagttacccccgtgttgtgacggtaatggagctatatttacttcgagtttttgttgctcacgagaattacacaaaaaattgacaaaggcaaaactagagagaaatgctttgaccttaagggctcttttctgaatgtgtaaaatgaactagtagagctctcattttatatggaagcatattttattaaaataataataaaatattacaaaaaatataaaaaaaaaaacttttggattgatcttggctcttgatgatgatctaatagtaaaaataacttcggatgatgattagaaattttcgaagctcaaatctcgtctgttggatcacttttcgggtaatttgttaaaaaattgcacttgtattggaggacgaattttggccttgaaatctttaaaatcacgatatgggtgtgagacatgat

SEQ ID NO: 216541 - DNA, 661 bp, Cannabis indica
gatcaccaattagctttgcaacggtaccagatcactggaatcgaattagtacttagtacttagagagatatgacagttttacttagacataaatttgaaaaataaaataaaaaaacaagacctacgaatctttccctattgtgaactatagatgtgtaaacttaaaattatttacctcaaatacttcaagcttattggatcaagagacattagaagggtgaattgataataattgtaaggagttacatggatttggcaaagagtataatagtgaggttgaacactttaggatttagaataatcagtttgtttataagtgagaacagaacgatatagcttttaaggttgtttgactaaaacatatactgaatcttgataaatttagtattataaataataataataatagaataactaaataaatttagaaaaaaaaataaaccacctacaacacaataattgcctgaaaaatgaaaaaaaattagaagaagaagatgaacaataaaacatgggagagtgagatttatgcaatattatttaatatttaaaaataataaagaataatttttaaatagattaaaacaaaaaaaaagtaaaaaaaattgtcacaaacagtgacatccaattccagtcaccctttttaaaagaagaaattttttta

SEQ ID NO: 216542 - DNA, 608 bp, Cannabis indica
gtgaaaaaaacgttcaacatcattatcatcatcagtactaaattaacactacaaagcttaaaatatttgggtgttaccattttcacattaaatttcaaaaaagatcgaaaatgggttatgtagagaggcatcatggtaagccttgaggagagtttatatagagatcaatgaaatggactattgtacaacaatattagttattctataaatgagaaagaaatgtgaaaatgagaaagagtcgtggtgttctggaacatatagctgtagcagccgctagtcgacaagaaattaaagccactcgtatccaatgggaataataatgtctttattaactaataaagtatttttatcggccattactattagtaaagtacggttcaacatagaagcattttctcttttttgaaaaaaaaaacgcaaaaaataattagttataacttataatatatgtttttaataaaaagaataatatttataaacataatatcaaaatttatttaataattaaattaaattgtatatagaatagaggtcatcattcaaattcctccaatttttattttttttttattttttttttatttttttttaagtttacttccaatcct

SEQ ID NO: 216543 - DNA, 665 bp, Cannabis indica
ggtcatccaaaaaataataataatacgtgatttacattaatattaatacttttaatttgagttttgtgttagccatttggctcacatgggcagcagttagctttagtatgactttttttttggtttaatatttgattaggaggattaatctaattaattattatatattacacaaaaaaatattattattttatcaaataaaaatataataaaatattatgttgtaatattatctcaaatatatgtacattttttaatatataacctatgattgtattataaatatatatagttgagagaataaaaaatattattataaatgaaagaaaatatttttatttttatgacgaaatatatattttccgtctggaaaaatctctgtttttttttccttttgtattacttgtaacatttaaagatttatttggacagacatagtagaaactttaagtggaaaaaaataataaaaaagagaaaaccctaaaatggagagacttaagatcatgaaaaagaatgatgattgtccataatataaactttacataaatatatacaattagaagaagaagcaattgtggtaatggagtattgagatcaaatggattaacaatacagcatgttactaggtgtaagtggtgattaacaacttaggcgtttggttggga

SEQ ID NO: 216544 - DNA, 775 bp, Cannabis indica
actccagtgaagatccaacgtccacaattcatttcaaccaactcccttcttcatttggtgctcttttaatcagctctcctctcttgtaaggctcaccaacttttaatcacctaccacctctttctctctctctgtctccttcagccatcaactttgacaaccccactttctctcttcaaatcctcattcttcaaaacctatataacaccctcataccatctctttacgcttcagaaacgaaatcccgtttcatatattactttatcatatatagcattatttacatacatattactagctagttcttgttattgtattacttagaagtactatacacaaatacaaatattgatatggagcagaaaaacgacgtgtcgttggagagtttctgtgtgacaggtgatcccctcaactggggtttggcagctgagtcgatgagtgggagtcacttggacgaggtcaagagaatggttgctgaataccgaaaaccggtagtcaggctaggtggtgagactttgacgatatctcaggtggctgccatcgccgctgtcgatggggtgaaggtggagctgtctgagtcttccagggcgggtgttaaagctagtagtgactgggttatggagagtatgaacaaaggtaccgacagctatggtgtcaccaccgggttcggtgccacctcccacaggagaaccaaaaatggtggtgcccttcagaaggagttaattaggtaaatccactcagtctacttttcgcatgttttcttcttcttcttctt

SEQ ID NO: 216545 - DNA, 622 bp, Cannabis indica
aaataagaaaaattcaatattttcgtttagtaaatcttttaaaaaaaaatcattttgaataattaagaaagttttttaaagaaagagtaaattacgatataaataacataagtttaactctggttgtaaataaatacttaaatttaatttttagcattaatagtaactaattgttaagtaaattatcatatgataatctctaattggtccaaatcattcaattttatttttaaaaaatagtttaaaaatatcaattataaatgataatatcttgacatttacattaccttattttgattaggccttatttatctaaagagcattgctaccaagctttcatagcgtctaataccacaataaagtgtcatcatataattgattagcgattttttataatatttattaaagtaaaataaattaaattttatattaaattgtaccaacaataatactgtattacaccgacattaggtctcttttaataattctcttttcgaaatttccagccacgtgtaaattaggattacgtggcaaactttacaggcttcaacccattttgctgagttgtcactatctaattggttcaactaacgaaacaaacgaaaatcacacgccaaaaaaa

SEQ ID NO: 216546 - DNA, 592 bp, Cannabis indica
gaaattttttcaaaaatactgtatttttataaaacaacagtggaacacaaaacataataactaaaaacaacagtagaacaactaaaaaacaaacgtagaataacaataaaaacttaacacagtacaccgtatttttgaaaaaaaaaaaactcagtatttttgaaaaaaatttcaccccacagtataaaagtaaaaaaattgaaaattttagtatgtggtgtaattatccctattttgaatggctggacagggcgtgaccattaaagagtaatgggcccacaaatgtccaacgatacccactttgatttacatgtttttacctttattttttatttttttttaaaattatacccacttttataaatgatgttcatattatacctcttaagttaatataaattatatgctaaatttaagtgaaaggtgatggtatattgggcaacccactcacaaaagtgggtatatttcaatgaaatataatatagggatattttttataatggatacaaaaaaaaagtattcctcaacttatcccatgtccaattctattatcaatccatgctataatgtaaatgtatatcatgtccatctc

SEQ ID NO: 216547 - DNA, 727 bp, Cannabis indica
gatgttgtcgagatgcttgcatgcatgcaagcctcgccgagattcttgcatgtaagtttgccgagatgcttgcatgcaagctttgccgagtttcttgcatgcatgcttgtcgagatgctttcatgatgcttgacaagatgcttgctgagatgcttgcatgaaagtctgttgagatgcttgcatgcaagccttgccagaattcttgctagcttgctcgtcttgatgcttgagtcttcaagataagggacttgaagtggggatggcttcgacttcatcaccttaagcttaatgacgaaacttagtcaatggcgcactttgcctgaataatctcgaaacatagccttgttaatattcagggttaacacacatttatgtggcaagcaattttaaccacttatttcttataaaaaaaggtattactaatcataaggccctcttacaaaaagataataggctgcaaatgggtatataagtacaaggaagagatcccaggggttgaggaagcaaggtacaaggctatgttggttgccaaaggcttcacacagaaggaaggagtggattttcatgagattttttcacctatagtaaagcacacttcaatcaaaatgattttagcaatggtagcaatccaagatcttgaacttgagcaaatggatgtcaaaaaagtctcttgcatggagaattagaggaggagatctttatgaagcaaccatagggtttgtaggtt

SEQ ID NO: 216548 - DNA, 606 bp, Cannabis indica
actaaattttaaaatttggccccccttgcattgaagtcctggctccgcccctgcctgggacccacatgctgtacaacggaatacattctgtgttttgcatttctgggtacaaaatcggcggcctataaatatatatcatacaaaagtacttttcaaaaataaattatattaattattttttttttgtcactttttagaattaaataaataactaatttaaatgggctattggatttgcgtttcatttttaattttaacttcacaattttttattaggcttagtagtaagagaattttcacattcttctaataagtaaaatttaattattctaatttaatttatatattatgtatatttttttttctaaaaagtcaggggggtcgtggccacttcatacatatatagagtttcgtcactgtgtaaattattcggaatttttaaaaaatttacagagataatattgtaactataacaaatgtcactataaaaaattaaaaaaaaaatattttagcatgtaattttaaacttgagaattacctaagaaattataatatgagattgtaattagcatttctcattttacaaaacgtcagctcagtacactt

SEQ ID NO: 216549 - DNA, 980 bp, Cannabis indica
gtacacctacaaatttcccaatattcggccttagtagggtattcgttttaaatgtcacgttggtcctgtggtctacttaaaggtacgttttgttatactcacactttccaggcccaaacgttgaggagggtgtattagagttagtcccacattgctaatgtgtggaaataaattgtgatacataagatgaatggactactcctcccattgccaattggttttgagatggaaccccattcatcttatcccaaattctaacagtgacagttttttgtttttggttttttttttttccttaaaatattttttttttcagtttttttttttaaatttgggcaatccacgagatctcccattctaaagtctttatatttgtttatatatatactaggtggatgttacgtatagagccatgtaaatattagttttatttaaattttagtgttttttttctttttaaattttagtaactaatttttgaatgattatttgaacaatttattttataaaagttattaatgcaaatttttattaaccaaaattaaacagcctttcagtaataaatactcaaaaaaaattaataggtaacaaaagatataacaactctagatatttttacgtggttttgtagttaaaatctacatactctacgagttcttattattaaggataattatgtttacagaatacaatctttgaatttgaataatgatcattcactctcaaacttgttgtcattttttccatagaatctgcccctatttataggagtataggttagtagttattccttttaaggattgattcaaatatgactgttaatgaaatgtggacaatccccatgtttcatttaaatcacatgcgggataatactaaataactaccaactgctctttagttttatcctttagataattattactgacatggaaggttatatcttctctcattagagtcatcttccttgtccatcttgataa

SEQ ID NO: 216550 - DNA, 975 bp, Cannabis indica
ttcaatatctgaccctcacacgaccagatatctcctttgcagttaataaattgtcccagtatctcaagagtcccacaaatgatcactggcttgcttcaaaacggcttcttcgatatttggtaggcaccatagactatggccttcacttcagaccagctgccacccttcaactcactgcctatacagacgctgattgggcaagttctatagacgaccggagatccacctctggctattgtgtttacctcggtggcaaccttataatgtggagttcacgaaaacaaacagtggtagcacgctcaagtactgaatcggagtaccgagccattgctcttgccactaccgaacttgtatggattcagtctctttttagtgaactccgaattcaacttcactcctgccccgtcctttggtgtgacaacttaggtgccacctctcttgcctcgaatcctgtttttcatcaacgaaccaagcacatagaagtggaccttcactttatcagagacaaagttcttgatcacacacttgacattcggcacatctcaactgatcaccaaacaactgatatattgactaaaccatttcctcaacttccttttgccaagttcagagacaagttaactctcaaagtataacttgagggggggtgttagagttcgttatggtttagttagttattattccttctgttacagttagttagttacacatttcagttacatgtttcttttgccctctgtaaccaatgtaacagtacatctataaatacaatatcagctcacatctaagattgagcttttcctttcattttttcttctctgtttctttctctctttctctgcttcaactcttacagactgtgaggactgaatcagggtcatacatgggaaaatggggcccaagtaaggtaaaattatgggcttttttatttatttattttttaagataagaaaaaattcaccttcaacagaattc

SEQ ID NO: 216551 - DNA, 622 bp, Cannabis indica
aactaaaaacaaaaaaaaacctaaaactaattgtcgcactatgtgtgaaaataaataactactttatagttatttagatggtggctttaacttgtgactgtaaaccaaaccaaagcttcaattttggtgataatataacataccacaggttgtattggtatggggaagggagagagatatttttttgctgagtaaaatttacatatgttgtttaggcaaaaaagtggagtctatacttgtgacaatatactttagaagttttgatttctaagcaacccaaaccgccccctaaaaaaccgcccaacccaaacttttattgggcaagtatgggttgtgattttaaaaaaccgttaaataaaaaaattgtcaaaccgcccaaaaaccgtccaacccaacccatgtgcaggcctaataaacacgatctattttttaaaagtacaagtaaataaccagcacaacacacaataacacaacatacaataacatactataatcataaattttataaaatgcttggtctatatttaattgctttgacttttcaaaataccgttgcgtacacatttcccttttagaattttgacaaaattaagcaagttatctccttttaaaaagtagcttc

SEQ ID NO: 216552 - DNA, 718 bp, Cannabis indica
ctattattttatcaatataataaaaatattttaatactaaatatttattaaatccaataaattatattagtaaatattatttaatcattaaaaactaaaaaaaaaatatcgtgatctacactgtcccactattaatagtgagacagtgtagatccccataaaaatagtgtgacaattgcagtcccattagagtaaaaaaaaaagaaaatttcacgctatatatagaaaaataccgttgggttggagatgccttaggggtgagggaggaattgggaaaaaaagggcatgaattttaatcaaagatccctaaattgttagttaatatgtaataccatcactactctaacctaaagaaaaaaatattttaatatgtaaaaaactgaataagtaatgatatatgaacctaaaaaatgagggaaaaaattagttaattgttttttcaaattttatatttttggtgcacaataaaaataaaggatcaaactctaatttttttagtacttttttggtcacaaatgtaaaactttttataactaaaaatgagtaattataataatattggtgtaattaaatattaagtttactatttaaaaaaattattaagtttatataaaataattattttaaaaatgtagttgaatgacacatcatgataatattgaacatcaacatgtgcctaagtaataacaatgccctagtgcctagttgatagtgatat

SEQ ID NO: 216553 - DNA, 623 bp, Cannabis indica
tgcaagccgtgggagagagtgtgtgtgagtggagggaatgtgtgtgagtgggggctcacatgcgagccgtgtgtgcatgtgggagagtgtgtgcgagtggggctcgcatgcgagccgtgttgcatgcatctaggggagtctgtgcgagttgaaggagtgtgtgttagtggggggctcgcatgcgagccaagtgtacatgtgggggagtgtgtacgagtagagggatgtgtgcgagtggggggcttcacatgcgagcccatagggggatcgcatgcgagccgtgcgtgcatgtgggggagtgtgtgtaaatttggggagggggggggggagttgagtgtatgggagaaggatgccaagtgtaaggtggcatgggtgtatttttagagtgtgaagataaggtgagaggtgaatgcatgatgacaagaatgacattgggagaggaatcaaaagacaaggcatgcaaggaaagagtgtacaaccacaccttctgaacattgagaacaaggaggtacaagtagcggcgacaacagacctgcaaggcctgaatacccgaccaagagtacattgcaaccactctccaacaccccataacctggggaccaccctgcgtgcaacctgcaact

SEQ ID NO: 216554 - DNA, 701 bp, Cannabis indica
aaggggaacaaattagagaactaaggaaacaataggtttggcttgctcatgatcctaatcctctgatacctttggttgtcactagatattggaaactatttggaattattgtatgaacggtttcggaagcaaaatccttcagtgtttgagggggatccaaatccacttgaggcggaacagtagatgagtatgataacttccatttttgattttatgagggttgagggtaacgatagtgtatgttgtgctatagttatgttacaggaggatgatcgtatatggtgggagatggtgtcccaaggttatgaggtgaataccatgactttggatactttttagacgttaagtactataataagtccatccgtgccgcaaaagtggaagagtttacccatttggttcatggtgacattgttgggattttataccctaaataaattctatttcaatataattagatttactaattaataaaagattaaacattattatatgttgcatagttcacatgattactttcatgattatatgtttaatgtataaattctattaaatcatgaacatatagttattcatgattataatgttgtctacacagtgaaaaatatttgatttcttgagtcctggccttgaagagcatgatattagggtcttagatcaggacttactgctgatgaagttaggtagagctgtctttcaac

SEQ ID NO: 216555 - DNA, 1346 bp, Cannabis indica
gctacacagattataggtacttacgtccaatatcaaaaatttatgtctattttactatattataatcaatactcacttttttagatttttgcattgaattcataaaataaataattggtgatcaaataattataagcattaaatacaaatgaaatagattcacataaaaaagttgaagggaaaactaaaattatattaaaatcataggcaagtatcaaacaatatctattaaaattttaatttggagtttagctcctgatcattgtcaacaattgattaagattaattgaaaacataaaaatagagggagaagaaaagaactcgtcgaaaataaatagtggtagtctctaaggtcgctttctatctatattgtgtaagatacgtaactacactactaacaattccttcagtcgtagagaatttggtattcccaaccactaacaacaatttgatgacgagtcatcgaagaacaaagaagaaccaacaacacaaaatcatgtcacacagataagaataaaatactcaaaacatattacggagacaagatcactaaaacactcaaaatcatatcacacagagacaagactaattgtagtagcaaaaatcgaattgtagtagcaccccgactaagccacactagcagggcctagccagagaaaaaagacaacatccgatagctatagatttaagaaacgagaaaccctaatttttcttttaatctgtcctatattagtttaaccaaactaatggataaatagataaaaataatactaatatgtattaaatacttaattatttaaaatataacaaattcttttttaacgctaaaataaaattatttaaataacttcatacatacaatataaaaaatggtgaagcaacatatccttatttctctctatatatatataataaaaattaaatatattaagagttatgctaagatttggattgtttttgttagagttatgctaaacgcataacaaaaaaaaataaagaaattggttctttctgccggcatgcaggcattcatgcacatgaaaaataaataacttgtatgtattatattatgaaagatttttataatatacttcttaaaagagatttaccgatataccccttatttgttttggtatttagaaaaaaaattagtttaatttttttttattggtcgtctacgttgtagttatttaggacatcctacaaaattttgagaaattcaaaaatatttaacacgtcgaaaataggattcaaactatctatttcacacgcatataaaataaaagaagtttcgcgtgcaacagactgtttgaaccctatttttgtacataatagattttttcaaa

SEQ ID NO: 216556 - DNA, 683 bp, Cannabis indica
ctactctacacccacgtgcaacgcacgagcactcatcttagttagggtattaatatatggtgaattttcaaaaataccattttttaggaaataaattgagaaatattctttttttgtatctattaatcaaaaataccttcatactatattttattaaaatatacccacttctgtgagtgagttttttaatataccgtcactcttcacttaagtatagcacataatttacacagggtcggttctgagttgaaatgggctatagaaaaaaaaaagggtccttattataaaaaactggtatatttaaaaattattaaaaaaatatgtatatttttaaaatgtattttttatttgggccccaaatatgagtgtgtcctaggcacgggcctaacccgcctatgcctagggtcagccctgaatttacattaacctaagggatataatgaagagatcatctataaaagtgagtatatcttaaagaatatggaaataaaggtaaatttataacagataaagtaaagtgggtgtataaggtaatttttcttttttagaagaatgtacattcaatattggttttaaattttcttttacttaaatatgatagtattaagtttgttcattttttatgatttttttgtttttaaattatttgatggtatttgctatgtcatgtgtatgtaaattaa

SEQ ID NO: 216557 - DNA, 742 bp, Cannabis indica
atttcaaattataatacatgtataaatattatatatactcgaaaataattttaatatgatatagtattaagaattgtttattggtatttttgttacattgatattttttgatattttgattttttttttcaagtgtaactctatttagttataacctctcaattagaatattattttcttagtcccaagtgtattcttggatagaggttctactgtattataaatttaaatctagagtaaataacgaataatgaaatagaaattttaatatctatgtttaatttagttatttaattaaaaaaatatcacaaaaatattttttttacactatatttaaaatatatttagatacaaaatatttaagtcaaacttcattttttttatcttctttttactgaataacttttttctatttttttttttcctatatgatggaacaacctcaaactcataaaatgtaaaaattaaaattaaaataattagatagaaaaactaaacttaaaaattaaaatttactcattcatgagtaatattcattaagagtgcacccatatatatataacattttcaaatgcaggattcatattctataattgcacaatcataatattttttactaaaaatgtaccaattactatttcttttttgagtgtagcgtaatagtattacaatcaattaatagtttaaagatcttaggttggaacccataacctcttcttttttctcatcactccctcaccac

SEQ ID NO: 216558 - DNA, 833 bp, Cannabis indica
aataataataataatataatgatgatgatgatggtaaagtcattttgtacaatgttaatattttagatttcccaaacaggacattagtcttatcatatgtgagacattggaaataagatttgagaaataaaattcttctgatattgagttgcgagatcttgtagagttttataacatcattaatggatttcactataatattttgtggaacgtttaacaacaaagtcaaagtgatcctgtacacaacgatcattaatttattaaattattttggatggttttgtaaaacttattaatacattctatatttttttgaaaattatataaataggaccttaaattacaaattaaaatttaataataatcggatctaatgacaaaattagttatattttttatatttttttgtgttaaaaatttaaaaaataaaattattgaaaattgaactcatgtcatattttactattttaaaatagagtaatttatggcataaataatcaaataaatactaagtttaattattagtaataattttatatttttggaactacgtgatttttaaattttaagtcattatcacacgttatttttttattagtatatttaaatatttttttttgaaaaaaataaaaatttgatgacttgcaccattaaaaattgacatgtgtcaagttatttaatattaacagctagtaccttaagtaagtattattattgataaaaattaaacttgggtatttatttacagaaattcaataaataatttttgtaaaatataatttttaaaatggtatttttaacaatttattaattaaagaaaagaaaaaagagag

SEQ ID NO: 216559 - DNA, 986 bp, Cannabis indica
gatatcaatgttacaaaataataaaataaaaaaaataaaaataaaagaagactaaaagtggttagggtaaaattttaattttgttaagtaaaaatgactatttgactttctctttgacgtttaccaaagttgtaggtttaaatcggtacccttttacaaaaaaaaaaaaaaatggttaaatggcgacacattctaaaaattgtttcaacaaatttaaaagtaaataattataaagagcactattgttttataatgttctaatatttaaattaaaattatttttattctttaattttttatctaaacaaatagattttttaattctaaaaagcttaaaaaaataggctatagaagttaatgtaaatataataatacaccacccgaggctagctcaagtggccataagtggagtgggtgtgtgtattgaaggtcttggattcgaatctcggtaaaacatagttgcaatatataaacgtttaaataaaaaaaaataggtaaatataataatataatataattatataatataccactggtatttttctcttctcattagttcttaacagcttttttttttgtttttttattttgttttctaaggctttattttgcttttgtatctctattatggattatagtttatctcaatttcttcttttttaaattacaacatcatatcgaacttgttaaagggtgttttttcactgtctttgtacccagattctgtgatagaaacctctgcccatgaatcataatattcagttgtgtataattctacggttttaccattacaaatatgaataagaaacattaacttaacacaataggattcctgatacaacactagtaaagtaataattttgtaaaagagttgtctttatagtaaagttcttagttttctattgtcataagcattaccaccataatcaattatacacttggttttgttactttgatgttttcctctgttttttgttggtttgttc

SEQ ID NO: 216560 - DNA, 1188 bp, Cannabis indica
taaataaggctctgctgtcagttaaccagattctaagtcaataatttgcttagagttgttattatctaattattaatttatataataataaagttaaatctaatataatttaattaaaaattttaaatatataaaatttaatttagttttaaatttatgtaaaaaaatatataactaattttattaaacaataaaataaataagtttaaatattttaaataatataattaataaatttattataaaatataattaattaattgaattaacgtgaaatctaaatttaaatatttaaaattaatttaaggttgttaatttttaaaaaaccattaaacaacgatgtcttagagatgagaaatgtgcatctactgactgaggagcatatcaccgggctacatctgtcacatcttcctttcgcaatccacaccgtaagatctgagtcctctccctctaaatctacctcttaagtttttttttttttacttcaaaagaaatctgtgctcagatccggcacaattgtttcgatttgaacacacattttctcaattttgcagatccaacaatggatttcatgaaggtttttgaccagacagttcgcgaaatgtcaacttttcttttcaccctttccgattttttgcaattattttatttttattattcccgatgttctttttaatttctcccaatgttagaatctgagttgaattaaatttgattaattttgaaatttgcagaaagagggaagttaatttgaaggtcttgaaggttccggagattgaacagaaggtaattcagtaaaatacaatcgaatattcatagattatagtttaacagtggtatttactgctttttatttttcttttggattggtttatgattcttttttgtttggtttaggtaatattctaattattgatacaggtattggatgcaacggacaatgaaccttaggggtacctcatggctactgcactagctgagattgcgcaagccactaagaagttgtatgtgtttccattatttttaattgaattttttaatatgaaatctctgtactattactgtgtttttgagaaagggaagctcacactcttatcatggtctaaatttgaatgagctttgatgttccagtgcggagtgtcagatggtatgaatgtgttgtggacaagattagctgaaactggcaaa

SEQ ID NO: 216561 - DNA, 710 bp, Cannabis indica
aaattttgtacttaaaaaaaaaaaaataaataaataaaacttggtggttataatacatgccaataaaaaacttgtggcacatgggacacttttaaaaatcattattttataaaagttacacctaactcctccaaaataaaaattgaaaaaaagaggttacactaacttgtactgatattatcaatctaatatttggttcgaaggtgagatcacaaattaataaaaaaaagctatgacctaaatttaagttgtatctaactaatcaaatttagatattaaaaataaaaaaagaattacattaaaatataaaaaattaactttatcataatttacttatataagtatagtcaacatttatacttttttttatatattttatttatcaaaaaccatcttacacacaatttgcatgcgtaaaccaacttcaaaatacaattctcatgagtatgtaatgctcactgatgagggagagccaaaaacttaccaagaaattatcctacatgagcatataataatgagtgggatggaggcatgcaagaagagatgagttccttgcatgaaaatcacacatatgacatggtgaagttgcctaaagggaagaaagctctaaaaaaacaaatgggtttacatgcataagactgtaaacaatgactcacaatgatacaggcacgattggttgtgaagggttcgattagaagaaaggtattgac

SEQ ID NO: 216562 - DNA, 695 bp, Cannabis indica
ctcctatggtgtcacatttttcaggtaaaaaatctttgatccctaactctaaatggatcattgacacaggtgctactcaccatgtgtgcaatgacatttctttgttcaaagatatacaatttgatcagtctataccttctatcaaattgcctaatggaaattttgctaaagttgcaaacattggtacagtttacatttcacaagatctttctttgtttaatgttcttcatgtaccaaagtttcattgcaatctcctgtctgtttctgcactaactaactgtggcaattattcctttcatttttatcctaatcattgtgaaatacaggacaatttgaagaagcaaatgattggaatgggtgagagaataggcagattgtcttatctcatttcaggtgtaaaaaatgtcattccttatgctctttctgttattttagattctaaaataagagatgacacagtctggcattatagacttggacactcttcttgtatcaaagatcactcattgaataaagctttacattttcactcaaattcttccaatgattttcactgttctgtgtgtcattatgccaaacaaaaaaaactgtcttttgtttcaaatcataacatgtctactgcaccatttgatttaattcatgttgatatattgggaccttttagtaccctagctatagatggctgcaagtatttc

SEQ ID NO: 216563 - DNA, 1096 bp, Cannabis indica
catgccccaaccatctcagtaaagtggtataatttattgctgaaatgttccaatctaaccattgcttaatctgaaactaacacaactgactatatctacaagaaaaaaatataattaaaaaataataataaaagagcagaatcttctctttcataaccacaaatcaaacaatttggagcctcaataactctaaacttaaacaatctatgacaagtcttcaacttgtccaatttagccaaccataagatgaaagaatgtttggagatactcataatctttttaaacaacttgatgatatataatactaatgtgatgcaaatgtagtgtagtacaagagtggagacaagttttgaaataaatatctacattcttactagaaataatagttgtatgtttagtgctcataaattgaattttgactaaagttataaatagattcttcattaatattcacatgtggcctatgatggtataatatattgtttttttaaaaaaatgaataaagttttctaaaaatgaataaaatatagctataaggagacatttacaagaattttttggttcgagatttttttaaaaataaaaaatgaaagacaaaaatctagctgagtaataatttatgaaagaaaaaaaaaatattttctttattgtggtttgtattaattaaatttttatttatttaaaacttcttttatatccttttaataattagtaagtatgattaaattgacattctagtttaaatgtggaaactgttttttttaacgaaagatagtaaattgactcagacttagagcatattcttaacatatgagctaaaatagctccttagctaaaattttaaagaatttgctaaaattgaacctccaacaagtgatatttagtgatgtaaatagtgagctaaaatagttatagttatttttttagccacatgcagggacggacctattagcctccattaataaaaatattgtcttttaaaaaattaaatgtaatttttttaatttgataattatagactaaaataataaaaaaaaatcctacaaaattaaataaatctagcaagagtgattataatagggaaatttgaaaaaat

SEQ ID NO: 216564 - DNA, 555 bp, Cannabis indica
attttttttttaaaatctaattttaatcaatttatatgtaaacaatttctagcacaaataaattttaatttgtaactaacctagtcgtaacacttccctattagagtattttgatgttctattttttgctcaaggtattatattattatattttaaaaagtgtagggtccaaatattatcattcaataaaatagataaaccaattaataccttttactaaacacattaaccggtattacccctaatatatagcctaaaaataaattcatactttaaaaagtaagtaaccgaaataagaaacttaaaatattttttatcaatatatattttactatattttatttataatttaatgacttaatttttttatttacagttttacaaaattattgtttcaaaaatacaatcttaaattttaaaattcaaaaaatacaactttgtcaacaaaaaaaaataaaaagtgtaagaaaacaacgagaaaattattttcacaacaattataaataaactataaaataacaaaaacaatgaaaaaattaacatcatgacaactat

SEQ ID NO: 216565 - DNA, 502 bp, Cannabis indica
aattattcctttagttagtccctttgaaggaccacattagcaatcctaaccaccaaattacaaaaaaaaaaaaaaaagtaaacttccacctactaacaagtcaacattataacacccatttgatcaatatctcatatatatacaaaaataaaaacaataaggactgctagtactactaaacaaaaataaaataataaacgtgatatgtaaattgaccataattatattattattattttaatgtagtatttgaagcattcaattttaaaagggacttaaataatatctttatctagtcaaaaaaaaactattaataataagatattagattttaattaaattacatcttttcatataaaatttcttatataatcatcacatctaacattcttgtattcaatttatcttatttatatttaaagttcttattgtagtttatttaggattttagttagtcatattaggtaactagtttatgtttttttaattcttttttaatttt

SEQ ID NO: 216566 - DNA, 765 bp, Cannabis indica
ttttaaaatcatataataaatttattatatttttaaatctttattttgtacgagaattatcattgtatgatgaattttatgcaagtaaaaaagtaaaagtttagtaaaataattacttacactattaaatatatatgtgtaaaaaaattaaaatttgaaattatatagagttttataacttaattatcctcaaacagtgcggtttgtttcctaattctttatacataagagtttaaatacaatacttgtaataaatatttataaattcattttcaaataaataaatatttataaattcttaaaagtttttcaattttttttcttaacataaaaattcattaacaaaaaaaaaaaaaggacaaaagccaaccagaaatacaaaatcttaagtgaaaataagatgttccacaccaccctagcatcaatcaaagaatctagccgatccataagaagattgaacgaacacttatcatgccagcatagaactttttaagcagaaatatcatcaaccaatactttacaatccgaaaaagaagaatagaactttaacgggcacccaagaagcagaaagaagctgcatgaagaaaaataatgatttctcctttaatgatagtataaaacttcattaaatagctaaatatgctattacaatggaacagaaaacattaggaatgatactcttagtgaaactacgatcttaccaataataagagtcatgagccaaacagtgaatagtttgttaacaaatcgtttaacatcgtaaac

SEQ ID NO: 216567 - DNA, 545 bp, Cannabis indica
aagtttttttttaattttgttataaatatgtgtggattggattggatcggttacttttacatgtcaatcaacatccaatccgcacaagtgcggattttaaatttccaatccaatccaatccgcacaagtgcggatatccgcactttgcggattggattggattggatcgtgcggattgaattggatcggctattttatgaacacccctagttttgagtgattatcgatttgtattatgttagagtatattgattgcttgagttagttagaaatcggttataagttggttggttgttattgtccagctatctgttcttaactaacttgtaacagtctcattgtaacggtttccgttattcttgatctaagtgtaagcttgtatataagtcatgattaatggctttgttattcaatgaatcaattcattctcattgttcatctttctcttcatctttcttctttctttcttctctcttttctttcctatttctggtttgttttcttttagttcaataatatcgagaaggtctaatacaaaataacat

SEQ ID NO: 216568 - DNA, 908 bp, Cannabis indica
gcattaaatcaagtgtaactcacaatacacgtatgtgtagatatatgttttttctttatcaaacttgttacatattttatcctagtcgtagaagttttgcaatcttatatccttgtccaaatattatgttactgtattatattttaggaacattaaaatgacaggtgcatgttaattcttagatcatctcaaatataagatataaatttggtgctaaatttaacttaatatataaatttatattatgttttatccattattatttataattttgttttaatgcacatgatgtaaattatgtaaaaaaaaaaaaaacgtcagttattattgatggttattgaaaatatacaaaagaattattattattattattattattattattattattattattattattattatttttcaaaattattataatataataaataaagaatgtaatagtttataataatcaatgaattataataattaatagcattattatatagtgaataaaaataattatgagttaaatttgacataattcttcaattaaacttaacaaattattttagaaaattattagagtactgtatttttttattttattttattgcaaaatttaaaaagtgtgagttttggctgttacatgtgtcttttctggaacatattgtcgggaaagacgggattatggtagacccagagaatattgaaacagtgaagaactggcttaggccgaaaacagttactgaggtgcggagttttcttagtttaatgggtttttgcgttttgtggaaggtttttccaagatcgcaatgtcgttatcttagctgaccagaaagaatcagcgatttgtgtggtcagacaagtgtgaaaatagtttccaagagttgaaacaacgattaatcacaatttcagtg

SEQ ID NO: 216569 - DNA, 776 bp, Cannabis indica
ggacatatcgacgaatgtataacttagcaaatataatcaatatatagttgattctagcactcttttaaaaagaatacactgatgcactctctagtctctacttgtttcggcatctaattttttttttaatccatttattttttcatattcgtatatattatagttatttaagatacctacaaaattttgagaaattcggaataatttataatatagaatgcagtgttacaaacaatatacttcacacgcgtataaaataaaatactcacacgttcaatatatcatttgaatcctgttttcagtgtgttaaaatttttttgaaattcttaaaattttaattttaaataactataattataaactaaataatcatagagaaaaaaattgactaaaaaattattttgaatacataagtcgagttttaaaaaatgcatcactttctcaaacgtttttaattacaggccctaaatgttatttttttttaagtatagatactagcttttacaaaaatgatatatccaattaatatttagtaagaatttaattttaaaaatactagcttccattccctgtacatatttaccgagacattacaactgctaaatgatgtcaaatttgtatttaaagaaatttgaattcaaaagacaatttgtgcatacactttttttttttcttttactattactaagcttatctgtaatagaacattacacaataagtagagagataacaacaaactaagcacacactctttactaggaacatacatacatata

SEQ ID NO: 216570 - DNA, 663 bp, Cannabis indica
aatcaagaataaattatacactaatttatcctaatacccaaactattctttgtgtttggtggatcaatttgaaagactacggtgtgagtttctaatcaatatccaaaatgtttaaacttgtgagaaattttgagaataccatgatagccatcaagaggtatatatttctttcatataatttatattttgatttaatatttatacatctagagatatatttggggctatggtataatgataatcaaatatacaactgcataccttattactataaaactaataattggtattaggagtagttccatgaatgtatacacattaaatgttgtgtgaattttatgcattcatatatatatatatgtgatatgtacgtgaatggatggttatattattcagatgtatgggaggtgatgaatcgttaattatttggtaaaatttggtgtaggttttgttattatataatctagaaaatattgtaagctaatattgggacataggaatttttatgtaattttatttaatgagattaattttatgtacaaaatgtataatgtaatgtacattgcatgtgagttcagtttttaatcttgtaaacccgacccattcacgaaaaaaatcacttgctagtgtgagtcgttagggttaacctttttacccgttacg

SEQ ID NO: 216571 - DNA, 670 bp, Cannabis indica
tatcatcttcactcatctaaccattacttaattactatgtaatattatataagactaaattacacttggtcaaactcccttcattcatcaccgtacattatattcaagttttagatgatttatcaactatgaactttgaataataccataatattaatcagtctaaaaaatatcataactttctaaattatccgatcatttccttttcatcacacaagtaaaataattataagcaattactgtcaaacaattaatattgtcacacaaaattattcaaaaaaaaaaaaacttagtgttacaaaattagttttttttgccaagtcagatggtggtccaatgccttcttgttgctaaaatgagtaaagattgaagacgaaggtccaatagtggcccgataatatggtccaatggtgacccgataccttcctgacgagcttaataaatggagcttaatatctataaatgtagaatatggtccgatggtagcctggtgctactttttttatgtacaaattaacataaaaaaaataaaaaaaataagtaagtatcggacaactatcggacctctatcggaccaccatcagtatagatgtgaatgtggagtatggacggtgaagttagaagagaacagaagagagaaatgtattatgggtatgaatataaaatgtgc

SEQ ID NO: 216572 - DNA, 626 bp, Cannabis indica
aaatcactctctcaaaatatatatataccttaacaaacaaaaaaaaaaaataatatgacatataaacttaaagagaatcattcatcacatagcaatgtatgattgtcattttctaatgtttgaaagtcatcaacaatcgtaaaccctggaatatcatccctttcccatgtaacaggttgaactatgtcatcatctttgttttgcaattaaatattggatgagctgatgatttcttttgttggtatggctccatatcttcatataccacatcctcattatcgtcaacttctttgattggaatattatagaaatccctaggttcaatcttcacaattacaagctgatccaaatttttaacatctcttttgttggtattgttcattagttttcaataaccgttttgtgttcacacccacaaatccatgtgtattaacaacaattcctttagcacattgacatcccacatatcactcttaaacaatacaacccttaaatctccactgtaatagagttctattatctctaccaaaacaccataatagtcacgagtattagaattatgctctactttcacaacaacaccattattttgagtattctttctacttgaatagcttttggtatga

SEQ ID NO: 216573 - DNA, 1028 bp, Cannabis indica
agagacaacaaaaactttcagcttagatgatagaaacgatggagcaactttagagagtttgatgacttgacaggactgatggatacccatcagagaagccgtgagggtgagctcataaacaaaataaggctaaaaacctcaaaaccctcgacaagaaaagagtaaaggctgacacactttcgagcctagatgcccttctgaccctcgaggcagagcattgcgaagggaccagccacaaagttctctaagcctagaagatgtgtaaatccattgagtgattctgttaaccaagatgggaggatccttgccagtcactccagagacagttggtccacgacagatctgcaaaaacgtaaggccacgtggggtgatctttagaaatcatctaagtgataagaagaggggacgtgatctccccgaaagtgataccaaaatattggatgaacaaattgttgcgttgactaagttagtcaaaaaccaaagtggagcattgttagatcctaaggatgaggacccggagcccagtgtcagaaggatcacgaaaactccactcttagaaaactttaagatgccccacatcaaattgtatggagggacaactgatcgacaagcacatatggccaaagtaacaagatgatgtaggttgcctatgtcagtgatgatgctaagtgtttgtgtttttctctaactttgaccaagtccgtggaagactatttgtgtttttcagtgataatttgaagctgatggttctccagtccggactggctataggctccctattgtgagtagagatgcaaaggaagagagctgagaccttgaattagtttatggctaaggcgtaaggcatcattaaccttgaagatgcttatattcaagcctttggagttcctcctgcaccaactccaaccacagatgctcctagtttttcatcctagactctagccccatctttgtcccttccaagacctcaatcctctccgactttctacggacctactgcatctggtctcgtccctacgcaaacccat

SEQ ID NO: 216574 - DNA, 560 bp, Cannabis indica
tgtaaggtaaaaagttttagggggaaatttatgttagtaatcagcagactaaaaattaatttaattactataacattattactttgattaattacatataattaagttttttaatgtatttaattatgtattatatacaaaaattaatgaaatttccaatgaaggggaccatattaaacaggactgtttaaagattggatttggaatttgatgcaatcaatgaagattattgacttaactatttaattataaatttttaatatatgattgatataaacaaaggttaatatatatatatatattcttttaaatgagtttaattgactttttaagataaatttagtagcaaatgaatggttcttgcaaaattatatattaatttaaaggctttgtttagattgtattcttatttgtaacgaataattgagatgtacaatgttgttgtaaaacaggccatttaaaaataaatgaataaataaaaatgaaagggagctagactcggacttgagtacaggtcgcacttgtacttgaagtccacctagtttagtggctcaaaataa

SEQ ID NO: 216575 - DNA, 543 bp, Cannabis indica
aatttttttgggcagagtgcttggcagctagtgaaattctgataatagagaagaaaagaactttttcaaagaaaaaaaagagagaagaaaagaaatgataggcaaaataatttcatttgagaatttgttttgacagcccatagaaatccaatcctaatacataataataacaaaaataatttcaatttgtggtaaaatctctttattttttaattcttatatatttaaccctcttatttttattttagcggtaaaattctcttaaatttataattctttgtaaatttgagggtcagttaaatattatcattaaacatcaactggataagtactctgtatatgtgatagtaaaatctcgaaaccaacaaagtgataattttaattggtatttaacagttataactaactgacacctcaaatttacaattaaaagtaaacatataaagagattttgtcacaaaaaaaaaaaattaaaaaaagttaaatacttataaattaaagtataagagagtttcgctacaaataaaccataataataataat

SEQ ID NO: 216576 - DNA, 417 bp, Cannabis indica
tgcatctctctcgaatctaaagttgaactaagaatgagtaactctattgtgttatcattgacttttatttaattcttgctgttgaaagtttaccactgcataaaagtataaactccataataattctccattgtacgggcatcttgttgtatcatgagctcttactcttcttgaagtataatgagcatttaaaatatgacacaagtatattaatagagtcaacaaaaaaatttcaccttattaactaattcattccatctatcttattgtattttttgaatcagaatcttagtagataaaacaagatactttgcatttgaaatatcttgagactaaagttgcaaggcttgacagagtatagtagaaatctctccaatttttttaaatgagatgtaaaatgaaaataaattcaaaaga

SEQ ID NO: 216577 - DNA, 629 bp, Cannabis indica
ttttaaaaatattttttattttttataatatataataataattaataaatttttagtaaaatatttattataaagtcttttaatcaaaacagattttttctaaaagttgggttgtaccagcttttagcttttagctgtagctttttccataatttcttcaataagctgttttttaactgcttaccaaacacatttttgtcacagctttttttgaaaagcagcttttagcttttccaaaagctgtgccaaacgggcccttagtctttttgaaaaaaagaggttaattgtcttttccttattcaaaatttgcggccataacaaacactagctcatcattctaataagatgattaggtcccataataataataataataacaacaataataaaaaggctaaattgaacatgattattaattagaattagtgtatgatgaccactttaatttggtaccaaagtcctatttaagatgtagtgtagattgcgcatgcattgccattgataggtagcttagctttatagtcctattaataatttcaagaaactacaaattataaacattaaaatgtttgggcccatttgttttgagcttcagccctctttgtttgccaatgtttgtgtgcattttt

SEQ ID NO: 216578 - DNA, 667 bp, Cannabis indica
ataaaaaactcacatatatatatactctttttggaaccaaattcaagctaagcacatgcagtcctgtgtataaatgatatatgtattgggaagaatcatgtaaatggttacattcaaaagctaaagatatggcttatcaagactgggaaaaagatataaataaagggttatttacaaaaaaaaaaaaaactaaggtttaagaagaaagtttgatatatatatatatagtatccaatttaattaattgcagtagtaatttaaaaaaaatattacaaaataggagataaattattatataaataaagaaaaaaaataactattatcaaatcaaggttctcctatatatagaatagattgttaagaaaataaaattcactcatcctcactgtgccttatcctagtctgcctacacctgatcttgcacgatactgtgtgtggtcccacagtaacaaactctgattttgccgttagaatattcccttgtaatcattgtaatgattgtaaattatttggttatgatttggtgagctgtaatagtctagaatattctttgtaaccctacttgtgaatataaatacaaaccaagagccagccttcaagctagctgagcatttttacaaatacagtcagtattctttactctgccttttactctgttttcaaactt

SEQ ID NO: 216579 - DNA, 839 bp, Cannabis indica
acttttattagactttgtcacacatttcttaaatgttaaactttaatcttcgaagaaacatattttgaagggacaagttgaaaaatgtctatttttttatattttaattaaatttacctttaaataaaatttaattcaaatatatatctattttaagtattatacccaaagtatcctcgtacactcacataattaaaacataatttcaaagataatagatttaatataagtttgtgggaaagttgaggtaaaattttgattagagaagaatgaaaattatcgtgaagtgatataaataaaattgatataatgatttaaaaaaaaaaaactaaatataatagatttcgaaagagatggtaaaattaaattaaaaacatcaaattaaaagaaatatatagtgtaattttttgtttttttattttgaaccctcaatcttttattattgtcatcatgctcccttttttaggcttatggatacttacaaaaaaatacttccaaaaaaatatatatatataaataaataaaggcatcaaatttaaaaattctacagatgttgccaatttcaatgtagctctcagttctctaactaaccaaaacataatcctttattggcaagtttgggtgaaattttttgtcacattaatgtgtaaaattaattatttaagcaaatgaaataatttgaagtgagaaactatacatgttagaagagcatagcacacatgggctaatctcatatataaccaaaatttatacacaaatgcatcatcctttttcttaaaacaagaaactaagttcaacatttatgaaactcaacgttccaaaatatgaacagattacat

SEQ ID NO: 216580 - DNA, 917 bp, Cannabis indica
aattaagcactcttatagagatcttacttagatgcataaaataaaatgtctttcgacttggattttaccttagtgtagttaccaaagagtttattgaaattttagttgccgtagcattaaacaactattcttttaatacaaactggtgataacacacacatgtttgctagaattcactagagacctcattatgtctcgcttgtgcaccgttaatggccatttgcaacatccatttcatgggctctctagagaatagcgtccaatcttcataagaggcaacaccacctctagtccatataggtgaaaattagtttctctcaacttctcttaaggcacacatctttccattaaaaaccctttcgattttaaccctccaaattttaccattagtactcattcatagatgggacaagttaagtactattttttcactctattgtcttattattacctattgaacttcaaattagatttttactagtgttaagatagattaccataaatgagtaaaactataaaggagtttagatttcatcttcgaaatttgatgttttaatattatacggagattaaacgatttgttataaccacacactttttgattccaagcgaatcttgctaaccaaattagtgtctattattacatggtcacttttctacttagtatcttaaagctttgaaatttaatcatagaagattagttttcactgtttctcatttcctcacacattttaataccaagtatatcaaaattatgtaataactttagacactaaacatgtttaagttatactcaagtcttagacaccaagcatgtctaaatttcacatatcattcattcttctactaaatttgtttgatactattggatatcaccaccacacttttacatttatatgaaaataaagggtaaatac

SEQ ID NO: 216581 - DNA, 660 bp, Cannabis indica
gtttggtaggttgagtgatttctctatcctgaacattattttatataatgaccgtgaggtctaattgctatttataaacgctttattttaaaaaaaataatataaataaaattaattattttgtataatatattttcaatgagcattaatggtagtattaacttttatatttaatttgcatgtgcattaaattacaaatacaaaaatttgatcaaatatagctttatggtatattttaaggccaaatttaacccaaaatacacatcatttattgaatagtctaatgtgtcaataccaaataggaattctcattttccacttataacgactattgttactatttatcaatactgtttatttacagtaaaaatttattttatttacagtaaaaatttattataaattttgtagcaatatttatttatttattataattatttttttttaatttttgttcttattaatgtatttttttgtttattttgtagttaaaatattttttcttacaaaattttcacatttatgttgctaaaatttttctcctattgaaagttattcattgttggattttttttcattttctttgtagagagtgatgctaaagttgttgtcgattttgtcaattttttttctaagggtgtctgtaattgaaattatttt

SEQ ID NO: 216582 - DNA, 1038 bp, Cannabis indica
aaaatgttatttttcattttcataaacaactttatattgtctcacatatatttttcttacagtttttttacatgtttgggtcgaggggcgagtcttggtcgaggatttggggttggggttggatctaggtccagggtctgcggtcggatctaagctggaatttgagtcctaattcgggtttgggactgtatctgggatcaaatctttgttcacagttgtgtttgggtccattgtcctaggttctagggccaagcctgggttcgcggtctgagtctggggtcccaaggctaggtccgtgatcgaggttcgaggtcaggtcttggtttggggtttaggatttgagtgtaggtctggattctaagttagtgacatagtgtggtgtggaataatagaatattttttaataaaacaatataaaaacggattttagaaaacattagcataataaccccatcaatttttttttttttaaaaaaaaatgatataaaactattttttattattaattttgaaaatacaattatgaaaactaaaaattaaaaaacactgccaaacatgctcataggattcgaaagaacattctacaatgtatgaaaaataaaaatttatgcatatttgacattgttttctgttttttatttttgaatctgtactttttagaaataaggctaaaaataatttttgtaatattcaaaatacaagatgcttttggtcaatattttctaaaagttgtttttggattttttttttacccaaaagaaaaaccttaatgctccacacctagacttggacccgacttgggtcttgacgtcgacatcgaatctcgaaccctagagttggatccaaccccgtacatggatcttgggttcagaactcgaacaacgaacttggccttgaatcttggccccagaactcggactccgaacctcgaccttagctccagacctcgaagttggaactggccccaaattcaatgctaatcccgaacctcggactcgttaccatgagaaaatgataagaaaaaagtgatgtgagagg

SEQ ID NO: 216583 - DNA, 565 bp, Cannabis indica
catagttggtctttatccacataataattaagtgtttatattatatatatatatataagaatgactatagataaagagagagtaatttaaacactaaattcgagagctaagggaaaaaaaaacacttatttgaataaaatgtcaattacctcagactcagagtatcaatgcattgccccaatcgactttatttctatgaccaaagtacctgagtcccacacatgggtgctcaacccttgtgatgagaacttgttagaatcaatacccacaattgatcttttggacccaaatgccatttctctcataagacatgcttgtgagaaatggggtatttttcatgtgatcaaccatggtgtttcctctcaactgcttgatgaagttgagctccagactcgtggattgttttctctaccgtttgatcagaagctccaagcctttagatcagccaatagtattagtgggtatggaacctgtcgaagatcgtgtttgcatccgaagagaatgtggtctgaggggtttaccatcgttgaatctcccaaacaagatgttcataaactttggccac

SEQ ID NO: 216584 - DNA, 698 bp, Cannabis indica
ggcttgcagaatcaattagtagggtgaaagcccaaaaaaaatcaggaagtcaatgaaataatcttggaggggaagcatagcttcggacatcagatgagtttgactccatgccctaaagccattatagttgtggtttggtgtctcctcatccttgggaaagcgataataaactccagaaccggagggtttgatccccgtagtagtgacaatcttctccaattgatgggcgcaggtcagtgttgaatgcatttcgtcagcctcccaaccgttggaacaacatgcaaacttcttgtagatagctgggcccttcatgacctcctccaaggtggttagcttttttggccccttttttgaggattttgctccgacggccgcagcggtagatatggagttgacctaatgaagattgagggtttcttggtcaaacccaaagaaacagtctgtgtgaagatcacaaaggacttcactcatctgaaacaacaaaaattcagtagttagcccccacatcaaaccctaaaattaaaaaaggggaatgggggtcccctaaccactggaaagaggtcccctccggatgtctgccaaaaggaatccaacaattcataaaggcacacattgagtgcaaaacatccaagcaacaaaggaaagaaaatatgaaagtacgaaaactgcttcggaccatcaaaaaagggcgtatgaaa

SEQ ID NO: 216585 - DNA, 514 bp, Cannabis indica
aagtatattgtgactgatgagttgccctaccgacatgtcgagggggaaggtttcaaagaatttgttcggaccttgcaaccaagatttgaaatcccttctagaatcactattgcaagggatgttctcaagtgtttttgtgaagaaaaagagaaattgaaggatattttgaagagtcaaagggtgtccatcactactgacacatggacatcaattcagaatctcaattatatggtgataacggcacattggattgatgatgatttcaactatcagaaaagaattatcacattttgtatagttgaagatcacaagggagacacaatcgcggcacaaattcatgagtctttagatgcatggggcattactaaattatttgcaatcacagttgacaatgcttcttcgaatgatgttgctattcggagcttgcgacagaagtatggtcaaatgacagatggtctcatattaaatgggaaatttttacacatgagatgttgtgctcacatcatcaacttga

SEQ ID NO: 216586 - DNA, 789 bp, Cannabis indica
  modified_base (33)..(33): a, c, t, g, unknown or other
tagcacttccatatgatgcgtgaacccggtttntggaagcccgttctccgagctttctggaactgtcgtatcctgaaagcgtctctcgggtaatgggctgggctctggaactgtttactacgtagtcatccgtacgtcttgtacctgtcaataaagatattttgaacaaaaccgaatacgaaattatttgcttaacttaaggaaaaggaaggaaacacatactgttgtcgggttcctttcctttttccccctagttggtttgtatgaggaaacactcggagcagggtgggatttggttgaaccggagaggtcacttgtagtaggaccaccaacaccggaagataactgctttgtggctgtccctggcctcacattctcggtttggcttctcggtatgtcactctgtaaacaaatggataatacaacatccacatttggagttggacctgaaaaattataagcacaacttaaggagtttaagtccatgaaaattacacattttatggattttatatacaatttttttcaaaaataagaagttaaaaatatgagaaaatagtataaagtagctgattatcctaaggagagaactgattacccatttttctcatatttttgtagctatatttttgtaaactttgcttaaaaaatccataaaaagaaaattcccctaagctaacaaagaatttaaagctagatgactagaaatacactaaccataaatatcaaccaaaaatgaaaagggaaaacttaagtattaccctcaatagcaggcaaatttgttaaaaa

SEQ ID NO: 216587 - DNA, 802 bp, Cannabis indica
cttgtcgataacctatcgagaatctgtcgataattaatcaagaacatacataaccaccaccaccacactagatcagaaaacaccataaccaccatataaaaccgattataaattaagaaaaattcatcaaaataaaatctatttcaacataaataatatataatctctgtaaattaaccaaaaaaaaaactaaaaataaacttttttattaacaatactttcttggtgctgaaaatatcttgaaggttaagggctccttcatgatgtcatcttcaaaataccccttctgcaccggtgaagaagaacgctgcgactctgaaagcaaaggcttcgaaagctggttgcgagagaggaaaagtaggctgggggagggtggggacggcggctgggggtcgggctgggggccggaggcgtgggggagtggctggggtacgggttggggggagtggctggtcgacttggggagggcgaagaagaaattagagaggggcggctagagagagagagagattgtttttgagtttatttaggttttgaaaataaataaataataagggtatttttggaaaaagaagaagttaatagattactattgtacaaaatattttagagggtattttttaaaataggagttttttttatgtatattaaatgaaatttccctctaataatctatattttctaagtggtagatttttctaattttttcatttcattttctctttttcaacattttttatacttttaattcttttgaaaaagtcccacatgtttaaaaaccatagtgagtttatacttttag

SEQ ID NO: 216588 - DNA, 1258 bp, Cannabis indica
cactcatctgagtaacaacagaatccattcaaagagagttgagagagcgaggaagcccgaattcgcataccgaagctattgcaaggattgaagttcagacatcaatggctgaaggtatttcggtcttttcatcgcatatttcattttcgatatgtctgtagttatttagcattacatatcgttcatatatgctttattttcatattatattatagtctaaacaattttataatggatggttgactgttaatgagatctaatgattatatatgattttataatggatgtggttgagactgttttattgggttatatatatgatcttgtcctagtctcttaattatagttttgctttgataaagttaattgcattggagatcctatagatccatcatttgcaatcggctggccatcattggtgttttggaggaaaggcttttgaacttgtgcccttaaacaaggtcggaagctcaatttcctatttccaagtagaatttttatgttgcatgaaagcttttctctgttcaattttcattgagtactgatttttatgatcatggacattactcttcatggtgaccaatctttatttacaaaaccatattcttttttcacagttgtatctggagtctatttatgatctactagcaccagaacttgcaccagaaaagattaatattcccatttataaagatcctaagattggtgaggtgttgttgctaggtgctatagtaatatgagctcattcattacatatcttttcatgttcaacatttttactgttaaaaaacctgtcaatgaaaatgtaaaggatggccttaatttacaagagaaggcagcaatggggtacctatagttagtgatataccttcaactttgtttgacataaggtgtgaagtttttccgtgtcaacggtagattgtgacataaggtaacgcaaaatggagttcatgtgaacaaagtcacacaagattatcagtgattgctaaacaaaaagtttgcattaaacctttactaatttatatttagttaaatactccgtaatacttcataaaagcggcattttcaaattacaaaaaaaaaaaaaacaatttaattctttttttttttttaaaaaaaaaggtaacaactttctttgcaccattcaaatcagatatataaacaccagttgtttaggaacatgtaagttgaatatatacctgcagtgcagactggatttgatatttcaaacaatggacctatactcgagctgaagatg

SEQ ID NO: 216589 - DNA, 704 bp, Cannabis indica
cttctcgggtcaaaattactgaactgccactggctcaccaacaaggtcttaacatatcaaatctcatattaattcacatgtatgaaattatataataatataatttcacaataatactcaatcaactagttaggtatttgctaatccattctcttaatcctagggaattacataaacagttagtacatttttgtctcgcacaagactattcaactagccaagttataaacttactctgcaaattgtgtttttaacgagttatcccatgccaagtgtacttacgattgcgtgtttcagtccttcgttcttccttgcttgacacgtgtctttctttgatgtgcttaccgaattttgggtataacaattaccccattaatagttcttttttaataaaaagagctttttaatgattacaaagggtattttcgtcatgatcctctttttgaaaagacacatgtcctttgattttggcggttgtgcaattttgaggtacatcagaattaaatgaacatcttttccaatctgctttgaattatatccgtaggatcaaacctttctctgatctaacgaagccaacatcaagggtataacgtaagaaaaaaggaaccacctttgcgttatttcctccattttagaaagtctaaaaaaactcttaagcttctttgtcaagaatcaccattaagtttgtccaaggacttgcatgc

SEQ ID NO: 216590 - DNA, 816 bp, Cannabis indica
tttttatggatttgaacatgagttttttgaactaaattatttagggatatgatgaatgttatatgatgtttctttaatttagttagtgtgattattagtttctctttcctatattgtgttatttattcttatttgttttaattacatattttagagtggccatcttaaatatgatttatgatcctaatatgaaatctaagaagtgaatattagaaatgctctaataggaaaaacataagttttgatgtaaaacgagagtatttacatagcttatgtaatttttagattctaaatttaatgcaagttatatgttaatttactttagaaatacaagtagataatatcataatatatgatttaggaccttaatgatctaagaagggttaggattaatttgataatctgtcattaccaaaagggagagaattaataattaacattaacaattggtaaactgaactaacaagatcatattcctaaaattacattttttttttttatttctttcatttactaatttttagttatttagttattcaactttattatcgatactaccaaacaaaataaaaattcaattgtttggtacttagctacagtcctcgtgggaacgatctcacttacatgagtattacttgttaaactttacgtatacttgcatgttggatttacctacgtaagtttttaaaaaaattagatataccgtatacaaaaatacatatatcattacctaaacaatatttacttaacaactaataataaaataatatattagtaatatatatatatatatatatactatactaatcaaattat

SEQ ID NO: 216591 - DNA, 720 bp, Cannabis indica
gtacatgcacaagaaaacaaagaaggagttagatcgagaacaaatcaagtgaaaacaacaaaaacataaagtgtaaaagagagaaatcgagtttacctggtcgatttctgtgataggaagctccaaatcttgtaactcaacattttgatagtggatatcaagcttctatctctgagaagagcttgacagagacgtagcccagatttgggtgaactctgaaacaaatctatggtgttttctctccttatttttcattttcactcgtttaaactaatttgtgtttgtgtgtgggtgtgaatctgggttttctagcttggattcgagcaagttcttgagcagaacttgctctgctagggtttcgagtttgggaggctgagtgttgtgtttgagtggctagggtttctagactcttcgatcagagtctttaaacctaaagttcaatacgacactgagtttggtgtcgtggggatttgaacggtgccgtttagtctaagggattaattagactaggaaaggttatttttgaccttgatactgatattaaaaatcatttgttggtgtagggcaaaaaagtaaaaatcctacagagtgtataggatatgtaaaactcagctcagatgagactgaggcagagtattcaatttatagcaatattggatacatagtataacaacactagccataggtaatagaacaggtgtcacaatacaattgcataaa

SEQ ID NO: 216592 - DNA, 926 bp, Cannabis indica
tccaaccactcaaaatgtagatccgagatcccaaccccgaaaaccaaaggttgatatcactttttacttctctatttctaaggggcccaactggccgcttttttttttcgtgcagtcggacggcgttgaacaacaaacttcggcgtggtgttgatagtttttaggtttattttgtttatatttattttttaactattatgaaatttttctaggtttgtattgagctccacacccatattcgagctatatgtattgaattttattgattaatgggaatatttcagttcaaaatgtttggtatttttttttaattaatctgtaaatgaatttttgttttgagtgtatatcgattatatatatccatttcttatttaattttatggaacggatataattttttttggtttattttttttattatatttttgacatttaatcccggtttttatatgactttttatcccactggcatatatcccggtttttattttagcgaaaaccgggataaaatgcccttaaaaaccgggataaaaagccttttttgtagtagtgagttttgaattagagtgttgctttagttgttttattgcatatttgggtgagagaagtcagccaagaaaaaaaaagaagtcaaatgaaaaaaaaaaataaaaagaaatgtaaaggaagaaaaaaaaaccctttatagtagctttaatagataaaaggtgtaaacaaagaaaagaaaataggtagagctacaaagtataaatataaaaatttaatttgtcaaagtatagatataaactttagagaaaaatttaaatatggtgtaaatattctaaaaacaaaataagaaaccttttcttaaaacttgaagacaacttttacaaacattgtttttaataaaaaatcaatgctattgcatgaataacaagataatcata

SEQ ID NO: 216593 - DNA, 652 bp, Cannabis indica
aaccaagttccacaagaaccaagacagaccttccactacccaaaggaggataaatcttgccacaaagatctggtggcaagaatagccagatcctgacaaccagcagtctagggggtcggtcagagatctcaagctcaacaacacccatagttggtcaacctctgaccgggcaaccccttggtggtacacctttggttggccaacagggtgaactcccgtcttagggcctttgggagtgagtaacccaaaggctaatctttaaccgactaggtccaggaatgggtcgaaacacctaagataacaacttgagaagtgagtctagtcacttcaaatatctagatccacctaactctttcaactagtgtgattaaccccctgtcaacacacatgctacaccaaccaatcagaggagcacgggtaaccagaccatatttgttggaatatcttttacaaggatttagatttactaacaaatatgtttttaacatcctaaatatgaatttctaaaacgataaaaataaacacataaaaggtatgagaaaccttacattggctgtagcagaattaaatgactccttccgctcagatctctaactcttgtatcctttctgtcatagagtatcatcaagatcttttaccattcaaactttca

SEQ ID NO: 216594 - DNA, 540 bp, Cannabis indica
  modified_base (47)..(47): a, c, t, g, unknown or other
agtttttaaaaaatatatatattacctttcaaaaaaaaaaaaaaatntatattgatatattagaggctagaagtggataattttaaggtaacattttataagtagttaatttttttaataaagctaataattttctatagtagttaatattaaattaaaatatgcggaacatgaatttaaaattacattaatagttatatgaaatatcttgatggttttaggcattggtggtaccgttaaatatttttcttaaacacgaaaaataccctatatatgccaaacacaattacaggtgtcctacttaatgtagttaaatattgtgtttcccataatttaatataataattattataaaagtactactaaccatatccctattaataaatatgttttttcttttttctttttaatatgaatagagatgaaaatcatcatttttgagtatatatatagtaccttaactatatttgaggacaattaataatgggcattgttttaagaacatgaatgtatagttattaggttagtaaaatgaaaatg

SEQ ID NO: 216595 - DNA, 1008 bp, Cannabis indica
atttataccgtaaattattctaataaataaatataattagctacataaatttagagattaatttataaatatacaaaaatattattatatgaaattttttatattttttaatgtatttttaattatatttttgttaatttattgtttatttatttaaaaaatagtatttaatataattatcacttaattttaattaattaaccccgacatcgcacgtggcggcgatgatacttggttgattgtcttgtagttgagtggtgggggcccattggacggcccatttgcatgtgatgtgaggttatgggtgggacccacctcagtccccacgttccatttcccaatttggtgagtagttgcagtaggtaaggttagatacgcaaatatttttgctactttaacacgtgatcctcacgtgcctgccttttatttttcctttaattaattgttagattattttttccttaaaaaaaaaacattttgtcttttttgtaggtaatgtaaataaattaatattttgaatatgtttttaacgttaaatttagtaggctatatgattatttgattctttaattaaaaatattcatttaatttaatttattacactagattatccaataattttaaggaaataatccaactaattaatatagagtatattctaaatatctttttagatatattgtttgattaaatgtggatagtatctttttcaaattatttcgtaaataatatatggttttttttttttatataaaaaaagtgaaatcaaactcctagaatctaaattactatatttagaatttttttcgtttttatatgtaatttctagaatattcttttctttttttttttttgttaaggtattctagaatattccttatttacaattttatataaggtaattcaaattagttacatttgaatttaatggatttttatcttgtaataagaagaaaaaaaatcaactaatatctacatttccatattccataattgccaaattccttt

SEQ ID NO: 216596 - DNA, 880 bp, Cannabis indica
gtattgcagatggcttcatccagcaatggggataatctcactaagaaatgggctgacatttgtttggaggaggaagaagaacatgaagtgttgtttgatgatgattgcatagaggaagagacactagttttgatgataggtggtgccttgtaggccgattattatctagaaaagtttcagactttcagatttttcaaaatattatggcagatttatggaaaccagggaaagggattacgataaaaatccttgaacaaaaccgatttctattccaattttaccacgaaatcgatgttcaacgaataatcgatggcagtccatggacttatgatagaaaacaactattgcttgaaagactcaaaccaggtgaaaatccaagaatggttgctctgaattttatcgaaatgtgggttcaaattcatgaattgaggccagggttcaaaaccgaatgggctattagagaggcagccaaatacattggtacatatgtcagttctgatcctaataactttcaaggagtgtggcgtgattacttacgggtgcgtgttaagattaatgtgactgaaccactcaaaagacgaatgaagtttcgtagtagaaatggtgactggttttatgcttatttcaagtatgaacgtgtgcccactttttgtttcatctgtggaatcatgggccatgctgagaagctttgtaacaaagtgtatgatattcctgctagtcatattgtcaaaccgtatagcttagagatgaaagctcctctccgaagacaaaatttcttgactgcttctccgtggctgagatccggcaaggtagaccaccgtgaggcaaatcaagaagcaaatccgccagctgatgccacatctacaggaatgaatgcaat

SEQ ID NO: 216597 - DNA, 1018 bp, Cannabis indica
taaacaaccatgtcatcattttacctgtcgcgtataacaaaacttgacagaatgacaaatttacaacactgaaaatagttcagtaaccatttgaatgggttgaaaagttcaagacataataatatacatagatcacaattcagaaataaaaatcctaaatggcctttaaaaatcataacgactaaaaagaacactaaaagctaaaaaaccatttaaacaattttttgtttgttaatttaatgaaaaaaaaaagtacttttagaaaatataattcattaaattatttttattttttattatttaaaaggaaaataaaatttcaaaactaatacattaattgccttaatttatttaaacaattttttcactactacaaaagagttttttgagatagttttttggccctttagcagtactttcgaagaaattcacaaccattggcgttgcaagtgtagctaaagggtactgaagtaatcgtagccataaggaaccctatagctaggattgaatattttgaccaagtttgacccagacccgtccaaccagcccggacccgacttggtgaacctgtcaaattaaaaaacactcatcctattcaggcggggcgggttcaacccagtacaatgttgagcatgtgagcaggttggttctttatggtcactgggtttcgggttgaacctgaacccgcccaccaacccggtcactttttattttattttttatttttattacatatataatatattaaaaatatatataaaaaaccctaaaatctaattactttaatttttattacatagataatatattaaaaataacaatatataatatattatataaaatttgcaacttgacatttgtattttaaatttgaaattaatgtattttttatttttttaatctaacgaatataaattgtggtgttataagtttataacgtatatgtttaatttaatatatagaaaactacataaatttacaatttttttaaaaaaaaaaaaaaaaaacgaattaaacg

SEQ ID NO: 216598 - DNA, 722 bp, Cannabis indica
agagcagttttaaaacactctttttgtggaatctgaaagtggataattggatagctttgtggatttcgttggaaacgggattacgtataaaatctagacagaagcattctcagaaacttctttctgatgtttgcattcaagtcacagaattgaacattcctttcatagtacaggtttgaaacactctttctgtactatctggaagtggacatttcaagcgctttcaggcctatggggagaaaggaaatatcttcaaattaaaaactagacagaaggattctcagaaacttattggtgatgtgtgtcctaacgaacacagttgaacctttgtttgatacagcatttggaaacactcccttgtagaatcgtgcaggtggatatttggatagattttaagatttcattggaaacgggaatttcttcatataaactcaagacagatgcattctcagaaacttctctgtgatgtttgcattccactcacagagttgaaaacttcctttcatagagcaggtttgaaacactctttttgtaatatttggaagtggacatttgcagcgctttgaggcctatggtgaaaaaggaaatatcttctcataaaaaccagaaacaagcattctcagaaacttctttttgatgtgtgtactcaagtaacagagttgaaccttccttttgacacagcagttttgtaaacatctttttgtagaatctgcaagtggata

SEQ ID NO: 216599 - DNA, 560 bp, Cannabis indica
gttccgtcccgaacaaaaaaaaaaaaatatcacaaattttgtttcgcgtgaaaagttaattgtgctcttcttcaactttttgatttgaaaaaaagaatatatgggaatatccttacattttttgtgtatagaataattttctcattggaaataatgttcctaaaccaagctcttgataatatgatactacaaaaaagtgtggcatggcatatgcaatatgctcctttttcttaaaaaaatgatatattattaatttgtgaagtaaaattgtttttatgttattgtatcttaaagatatgatcaaatatagtgtcaacatagtggttttcaacaacatagaactttcctgaaaattactttcgaaaatactttctatatatacaagccaaagcctccttccctttttgttaaagcaaaattcgagtttttcaattttcacaacttagctacagttagggttctacatttaagtcgaaatttttagcacgataccaaactaacacaaaattaaatgttacaattataacacaacatgagaaaatatgaacttataagattca

SEQ ID NO: 216600 - DNA, 768 bp, Cannabis indica
atgcattaaattttctacgactcttcttatacattattaaattggttgccgaaaacctcagttaacattatttttgttaaaaaaatttatggtatataattatattattataatatattaattttttgtgctatgatatattaaatattattatatatacaatatttatttaataatataatatatttccttgtaattataataaattaatatgacatataattaaaaagtttatataatatgattatatccattatgtaaaaaaaataataaaaaaaaattaacgtgaaatgaagatttttttaatatgattttaattatctaatttgttatatttgaatattttattatttttttaaatcaatgtttacctaactaatctttttatttgagactattttcaattttccaacttaacccaatctaatattcaaatttaagatttagtaagtagcataaaattaaattaggcctatgtgaaatttgacatataacgagaagttgaagaatacccaattttttttttttatttttttatatatatattaatcaaatttatcttcaaataaaatttaattcaaatataactctttttataagtattgtactcaaattatcttcacacactcacataattaagacataacttcaagcataataaatttgtgttctttgtagatgaatgtgcaagtttatgagaaagttgggacaaaattttgattagagaggaataaaaactattataaagtgatatgagtaaaattggta

SEQ ID NO: 216601 - DNA, 792 bp, Cannabis indica
ttttttttttaaatttcaaacaatgagcatatatgacaaaaaaaaagtaaaacaaaaaagaaaaaagaaaaaatagaatctctttacagaagtcttttgtgatgtggctttacagccttttttgattcgacgaaaaaagagaagttaaaatttaattattatataatataggaaaattctacgatgcactcccttaaaatgaatacattgatacacccttatctattttagcacccgaaataattttttagtcaaattttttctcatggtcatgtacgttatagttatttaagacatcctgtcaaaattttaaaaaaaattagaaaagtttaacacgtcaaaaaatatgttcaaacagtgtgttgcacgcgtgactattttattttatacgcgtgtaaaatagactgtttgaacattgttttttatattgtaaattattctgaatttctcaaaattttgtaggttaccttaaatagttataacgtacatgaatatgaaaaaaaaaattagactaaaaaattattctgggtgtcgaaacaagtcaagagtgcatcagtacatctctttttaaagatgtgcattgtagaatcaccctataatatatattaatatacagtacactagtaaatatagtcgcgctttgcgcggttatgtaatagagtaaatataaattttaattttgtatttttaaaattattagttgttctctttatttagttaaattataatttctgaaaaataaaatataatgatacactgagtctaattgtaatcaaatctttttaccctcac

SEQ ID NO: 216602 - DNA, 758 bp, Cannabis indica
aacccatttttctagtagtgtcaggtacagtacacacatgatgtggtccaattaaattaaattaaatgtaaaaatatatatatatatatatataatacaaaatattatgtatgcatgattattaaaatcatgaaaaaattggagacaaaaatgcctttcactatatatatactcacaaaaaaatattgaaagatatgtatcaaataaatatatatgatacgtcgatctcaatataaatataataataattgacttttttgtctttatttaattattttttgcaccaagagagagccccccaaacaaatattataatgtgtgtcaagtcaaaagccaaccactagtactatacatatattccaattcactaaataataccattttatttatggttattaataaaataaaatggcaaaataaatcaaacaccataattgaaattcgcacaaaattataaataaaatttggatttactttaaatatatttaaataacatgacacaacaacctaactatttaaaatatatgccattattttgtattaagttagttaaatatatatgacataaacatattaactaaatgacgtatgaatgtatcataaaaattttctaaacatataaatttattataaacaagatcattaatataaatagatatatatatataattttataatggtaagtcatgtcaacttatttataacagttgaattcagttaagttttttgattcttttttaaaaaaaaaaaaatttagt

SEQ ID NO: 216603 - DNA, 658 bp, Cannabis indica
tcaaatctaatttatagtcattttagtctagtttgttgaaagtttgaatgtgcttcttgaagatttgaaggcagatctttgaagcctatagctacgataccatgtgaatttaattcacatttcatttgttgttatagtcattaacagccaataggaatcaataattcaaacacaaaacagagttaattaagaaccagaaaattgaacaagaattgaagatatttagctcgatttcaaaatggataaattttattgatcaactcggcacattacaatgagagttttataactcaattacaatcattaatggtgtcaaacaccaattacacaaaatctcactctgaggaacgaggaaccttattacaaccctcttttcactcagtttcttgaacaagtcttagaactagggagagatgaatctgtgggagttagaatcttctaggtgctgagagatgccttgagttttttaactgaggtgcctttatagtgtgcagttagggtagttgtgctgatgtggcagctggtttaatgagctaagtctcacaacattattgttttttggaaatctgtcagacagtatctttggagagcatcagaggattcaatattgaatccctcccatcaaagaagctctgtacaagaatggtgtacatgatat

SEQ ID NO: 216604 - DNA, 1007 bp, Cannabis indica
agattttagccactgacaaatgtatgctggtaaaactttgatctctttgccagtgtagtttgcgaaatgcgctggtaaaagttacttttaccagtgcagtagcgaactatgctggtaaaagtgacattttttgtagtgatttattcatttcaaacataacattaatatttacacatatttctatataaaaagtaaaattaaaatcttaaccaattaataaaatatgtttagttataaatgtagaacatatataataaattttaaataagccttaaaatagaaaaagagtttagagtttctgatatagtgtatttttaatttaattctttaaatattttgaagattctctatttaaaatatatgagtattcttgtaaggttatttaagccttaaacataacaaaaagacttggcatacaacaattctatttgaaagtatgattatataagagatatttatgttggaccaaaaataaggggcaataactcatgaaaaataataaaaaaaaatacatggcagccattgttgcggtctgacgctgtaatcctgtgcgcatcagtcaactttgatggttttatctcctacttccgtgttctcactcgcctgcatagtccacttgtgtatttcactttttccttttgcgagtaggttttgtctccaactgtactcttataaataaaaactttataaattctatttttgaaattagcaaatactatacatgtttatttctcattatgattgtataaatatttattttgaatagtattagccaaaatagaaaaaaaaaaaaagaaaaaaaaagactttaaaaataataaagtgaaaactttagcatttaggtggcgtttggttggaggtaatgaaatagaatggaatggaaattaggaaagatttttcattctattcttttgtttgattttcatatgagtaatttgcggcaaaaaccccccgaacctacttactttaactttcgtacgaaaaccaaaaactctaactactctact

SEQ ID NO: 216605 - DNA, 821 bp, Cannabis indica
tgagaaatcttttaggaactttctaatatttcaattatcagtatgatattaacctaggcatacacaggttaattatcattgaaattgttattattttgattaattaaactgatgaccccttatatatatggtcctctcaatacatatatacttgtatagataagattcatctacaagtaatatatataagtaatgggtttatatatgttattactacttttaaaaagtctatatatgtttgatcttgttagagaagttaaaaattaaagctgagacttcataggaataaaccataaaactaattactcaatccaaaaagcagcagtcacttctactaatggtagaagaaattccaccaatagaagtagctaacatgaatgattgtgtcttgtggtgataaacactaattttgttcttttaacaatcctatcaattatgtaaagaattgcatagtcttactaacaaataatgtatttgtgattgcttttttatttttttctatactaatatatagttggtcttttaaataatttggtcttttatttttgttactatatatagtagtataagtgtggtacagaatcatggaatttttactgagaaatgtaatttatcaaccttgtctctgaagtgatttgtgcttatttcacccttctcttttgcagttgaaaaattaatttgtagtaggatcttcttttttctgtatttagcaccctttttggtagtttaaatgaaaatttactcactgttgtcttcgttgatttttgcttcgtgtggtcttctctgttgagtatcagtgtttctacattgatttttttctt

SEQ ID NO: 216606 - DNA, 1033 bp, Cannabis indica
tacttacctcgtagctgtaacaggactcttacatatcccaggtgtgtacatgcatgggtatgtatatatatatttatattatatatataaacacacaacagctgtgactactttaatcaagctcatgaggcccacaagccacgtggcaaaaagcacaaataacatatacgtggttccacgtattaaaaatttatcttttataataccctttaatttcttacctactcatataaacggtaagagtccccacttttctttaaccgcggttaaacggtaaaatatatataatccatttatttttgttttcattggcctaaaatatatttaccttttttgattaagaccacgttaatggttatatttatataatttcatataaaagaatatgaaaaataaagaaactaaaaatagtaacaacttacagaagatggaggaagagacttggttgattcaacggtttgaagaaagccatcaagattacgatcgcatgactcgttatccgcagcgtactccaacgcgtacacaagcatacctctcaaaccagcttctcgaagcttcaagatcgttttgccggcggctgcggtgtcttcgccggcgcaaaaatgctcgtaaaacgtgtgacgtattgtctccataacgacgttcttaaccaactccgtttccataagcttcgatttcatcacccacattcccaagtccaccaccggctcgatagccgcgacgtggagattcgccgacgctctcagcagcctcgtcgtgggaatggaagagaaaagcttctcggtgttgtaaacgtcgaacacaccggggcttccagtttggaattcgtcggcgacggcgacggcagatgtctcagatttctcagcgaaattgagcggcggaacgcccggagcagagaaggccgaggaagaggccgccgagtttagaggccttgagaagtaacgtaggcttttcaggagatttccacggggaacacggcttgccataaactctcttgttctttctttctaactcttttttctctttctctttt

SEQ ID NO: 216607 - DNA, 473 bp, Cannabis indica
attactactccaccaaaaataagtgcaacaatcatacaacatttgcataatatcactaatatttgaacgctttccatcactactatatatatttatataacaagttaacaactaaggagatatatatatatatagagttaatatatataacttataagagacttaagaaaaatatttatgtttggaggaaataataatgcactaagaaaagtaagtaagaatttataatttgatggtgtttgatactcgtatttagctgagtatttataaccaaaccacaacattattccctgttagcaccataaccgctcatttttttaattatttatatatatgtaaaatttataattaattataagaattatatagcatgtcttttctatgatcaggtcctattttcttgagaagaatcatattatactatagatgatgaatcactagtatatagtagatggaatagtagaagccaagct

SEQ ID NO: 216608 - DNA, 658 bp, Cannabis indica
gtaaaacctcttaaactcatgttaacacttccatccatttttaactgttaactgccatggtggaatgtctacgtgtacataatatacacgtggcacaattttattggtccacgtaaataaatatttaaaaaaataaaaaaaaattaattattttaaaaataaaaaaattatttaaaaattaaaaaattaaaattaaaaaaacaattttaaaaaaataaaaattaaaaaataccctaataaccctaatatcattaaaaaaaaaagggactttttctataataggcattttaggtctaaattttacatttttatcttattaagataattaaacaaaaaagaaaatacaaaacttttttttttcaaaaatacggactgactaaataatccgcatatacacgttgcccactacctctaaatgaccccacttactactaacatatatagactccactgccacctatttctatacataatataacgtagaaatcagtgaccatcattcctcatatggactcaatagataggtagctagtatgaaggtccattatcatatttattaatattgtatacattttgttattatttaacgaataattgaaaaaagtttaaaaataactaaacataaatcacaattttttttaaaaaaaataaaaagtta

SEQ ID NO: 216609 - DNA, 641 bp, Cannabis indica
gcaacaatagctcttacactagatgaacaaaaaatttacaaatgagatttatatcgaataacaatacttagcaacagagatggtaattatcgaaggtgaagacaaagcaacatattgccatatattacaaataaaaaaaaactacacaaaaataccttgaagggacattaatgtgctcccattctgagcaattgacctttttaacatgcagcctcagaatattttttagtcccctgagcaacaaaagtgttaagaataagcaaatacaggctataatcaagattgagtattgttaacaaccctcttaacaaacaaactgcttaaactgaatgatatctcaccttaatcgtggatcacttgtacaaggtgtaaagaaccaaccttgaccgcaactataaccagaatagatcaactgcaacaatcaattagaagagttcagctggtaaaataaataagcacagtgtttttctcttttcggtcagtaaaacacattaacatcatgatacaataacaattctaactctaaaaaaccatcgataatagtacataatcacgagacttttcatataataagaagacaaagcgcaccttattgtaaatggtcctgtgccagtaaggttctcgtacgtgatgatgaaccc

SEQ ID NO: 216610 - DNA, 625 bp, Cannabis indica
cttttcgttttttttttttttttgagttcaagaccatgtattttctaaaatagtaaaaatagaccctgagcttaatttttgacaacttttttttttaatacaaccaacttgaagacaatgcttaatacgaacagatacaaaaaatataaacagttttgtcatagcacttttagatcggattataattaaacttattttgacaaaaaatcaattcaaggtcctatttgtactattttagaaaatacagggtccattttgtcatttacaaaacataggatccaattagtaacttttataaaacagagggtctaaaatggtatttacccatatatatataaatatatatatatatatatataatcatactcttattttgtgatgccaccaaattattttttttttccacacatatataatagaacaaataatattattaaaaaaccattaaagtttaaaaaaaaaatctttttattttatttttttaatttaaaaagatatttttactacacatttaactttttggtctcaaaaattgcatcactgcaatttattctttaatgtgatcattttaatatgcgggaaatatatattttttaatcataatcgaagaagatgaccaaaatca

SEQ ID NO: 216611 - DNA, 566 bp, Cannabis indica
cgtattccatgtttctatgctaacaaagtacgcttcagaccctgctcatgtactaatttatgaaaatgttgggctgcaaccagatttgtcatacgaagaacaactagtttagatccttgacaaaaaggataaggtccttcggaataagaccagtcaaagtactctggagaaacaacaaggtggaggaagccacctgggagttagaatctgacatgacagctcaatatccaaagttgttcaggttagattttcgaggatgaaatcattttaaaggggggataattgtaaagaccgcttagctttaatttggaaattagcagataattagggtttaattatgaaacttgtttattacctttgaattagtaatttttgataatttatttgaatttagaatgtattttatatgtcatatatagaatttcattaattttgtcatgttttgtgcccgacaacattggaacgcggtgtttggctattgaaaccacatccttgtatttttagtatagcggtgtagtttagttagataattagaatgtcagaaatagtcagaattctagaagtga

SEQ ID NO: 216612 - DNA, 803 bp, Cannabis indica
aatcaaagaacacgaataacctcttgagattgagcctaatcataacaggattaagatcatttgatctaggatcaactaggcgatattgacttgaatagatattacggtaagtttaataaatctaagtcaaagttcaatatcggtcccttccgatgcatactccaaatgcaagtaaactctgttgtagattatcatatcagtaaaatcctgtgtatgacaaaatctaggaaactttattcacatagtcatgtttactttccaatgcattgacaacacaataaacaggatcaagtatgtgaaaagggtttcagatgaattcatacattatgtacatataatcatgaaataaatcatgtgaaccatgcaacattaaatgttatttctgatctatattaataagtaaatctgattatattgaaatgagttttatttagggcataaaacccaacattaatatcataacataattaaacagtaatattccaatagctatataatataaccaaccatatttattagactaagaagtaatcatctctatcacattacattgcctaattaggcaagccgatgctttaacttgatatccatgtatcacattacctaatcaggcaagcatatgccgtaacctggcatccaaatatatcgcgttgcctaatcaggtaagcccatgccataacctgtcattcacatatatcgcattgcctaatcaagcaagcacatgctataacctgacattcacatatatcgcattgcctatggcaagtccatgccttaacttggcattcacatatatcgcattg

SEQ ID NO: 216613 - DNA, 721 bp, Cannabis indica
cgtagatcgcatcacacataggtttgatagtttgtatcacaggttccacgtccaaattagttgtactgagtcgtactaagagatagccgagcagtacaagaccatgacaaataggctaagtcatttagacgcgagctgggatttagaaccaattatagtccttctacctcgccttctagtgattatggtaaattccttatgcaggaaatgatgccccaatctccccttttacttgttttgcaataaattctaacacttcatcttgtctcacagaaataaatttcgagggtctcgtccacagaaagggaaagaagaggtttaccatctcggaggctccatcagacttcgatgtggagcccccaaaaaggccaaagaagactactgctaataagaagcgagcctcccagaccactaatcttgaggtccctgaaattgagactcaggatccaatccctcctcttgcccctgcaagtactggcgagcctattcctaaagcgattcaagcttctgcctcctcaagccaagccctcgaaacattgcctgtcgaggttgggaaagctggcccagaatacactgcagaatttggtgcaatagctggcgtcatttcaaggctttcctcccccatgaatgggatttaatcaataatgggaatctaggggagatgcttataaggagcttatctcatagcctctcggtaaattcctttatccttatctgttca

SEQ ID NO: 216614 - DNA, 734 bp, Cannabis indica
caacttgaatatccaccaatagactcaaaatcagaagttagcaccattagccctagaatattcaatccactaaacatcatagagtctcaaaatgcaatcacccaacactaaaattatcatcatgacgcaaacttgggcagcactttcaacattattgtcacaataaattagagcagaattttatcccaacaatatcaccaaccaaaacaagagaaaatgagcataccacacaaaaatccaaagaatgcaatgccaaagtcggcacaaagtggaagctcctcccactcaacagtcaccaactaaaaatggtggtttcggactactggagcagccggagaagggcggtggtgagtgtgtccgacgggtgagggatggtggtcaaagagagggaggtcgggtctgtaggttctggaggaatgaggttctggtgggttttgaggtgggttcgggtttctggggtgggtttgggtttctggggtgggttctgaggtggacagaggcgcctgggtgatgtgctgagatgggggaggtgatggtgggggtcgggtccgcctggggtggtgggcgaatggtggaggcggagtcgaaatgggttcttcggacagaggcggtggtcgaatggggttcggctgtggggtgcggtcgggtttggacggtggtgagcggatggtggaggcgaacggagaaggtggtcgaactggagaaggggctgtttcgaaggtgaagaggaatgg

SEQ ID NO: 216615 - DNA, 824 bp, Cannabis indica
cttcggtcatgcgttttcctgttaagcgaggccaacctgcgatcgatgggccttgttactgataaggaatatacttgtgattacaagattcctaagtattcttctttgcagcagattactgttgcgactgaggacaaggccttggatcgcttggctcaaggatgataccttcaaaaaactccccctcaggaatccgatgaaggagcatcccgaggtaatcaatgtggttggtctcccactatacttagggctgaacgtagtacattagtcaccttccaagactcatttcttaatttttatacttggaattcccttcttgtggactacattgctcataagtttgacagctggtatcctagattccacgtccaggttaactgtaacgagtcatattatggtatagctgagcaatacggtactatggatgataggataggtcacatatatgtgagatgggatttagaaccaattgagccttttgatttattcaagattataggctgtagggattttaatggatattatattcctccctttttcatcagccttcttaataattgtaacattttgtcttgttttgcagacatggattatgaagatatcatggaccagaaggggaagaaatggggaaccaaccctggggtccctacagttgctaaagtggttcctcccaagaggcaaaggaaaccactgcccataagaagaaatcacttgccaagcccatcgatcttgaggcctctgacaatgatatccaataactaagttcctcctccagtcgtttccgatgccaatgctcctcgtcccgaggcaacccctgctactga

SEQ ID NO: 216616 - DNA, 557 bp, Cannabis indica
gtaatttaagaagcccaaaacaatatttcctctttaatatatttatagattattgataattctttttttaactaataactcactacaatattaatttagatttaatggtaattaaaaaagtaaataaggataattttgtaatttaatgtaggaagcccaaaaccacattctctcttttatatgtaggaattcccttatatgtatattcattatgtatatttttagggacacgattttgtcttgtgatgtattttcacggaatatattccgtggtacattagatgggtctcggggtacattaaatgagtgtcagagtacgtttctactttttaaccctaattaccctagatcaataccagccgtcatatcaaataagtccctcatttgacggctgtcgtacatcacagaatgcattccgtgaaagtacaatcacgggacaaaatcatatccctatatttttatatgaatataggtatatatattatgagtaattttatggtaggacctagcaaaagttccctactagtaaggaacttttttttatcgttgattttaga

SEQ ID NO: 216617 - DNA, 521 bp, Cannabis indica
aacttaccaatgtaattgccaacatcacgaaccactctctcagacttaaaacccgaagttatgtcatgtaactgaacccaaaaatccagttggttcaactgaattgatccacgtgcacagcacgtataactttcactagtaaacttaaatgtgtatttgaatgaaagagagttgtttgtagaagtataaaaatttacatagtatagaatgaaaagtactatatactttcgtccttatttttgtcccatttaacattttaaaagtgcataactatcatcttctctatcttatttcacgtttagataatgaatctttgccaaattaagatagagtaactcactcacttcaaagccctaatcccgaaagaataatgtgcattttcaggtctacatattataaagactacttatagtatttgccaggctcgatcctaatcataggcagattaagcttgtgcttaaggcccacctagtttaggagcccaaaaaaagaaatttactttttaaaattacacatttttt

SEQ ID NO: 216618 - DNA, 637 bp, Cannabis indica
gtcacgatttttaagaaaaaccatttgagtaacaaaggtggcactataattgaaaaatcactgtagcgcgcctaagtatcagggtgttacatatggtgtataatagcatcaaataataacaccgacgtataatttattttttaataaataaatttattactattaataagtaattagataatttaattttaatattggaatatttatttaaaaaattattatttactatattgataaataatcattttatattattatactaacaaaattataacagccgcacgaagagtgactatattgtctagtttaattataaacgtcaatttaataagctcattttttactttaatttgctgtggtatttaatagcaacaaacctaattttgggaaaattatgaaacattttagaatagtaaactaatatagtactttcagccaaaaaaaaaaactaatgtagtactattgattgcaagcagggtctgttgaaggatgggacagtaggggctcacgccaaggtcccctatccaggcccaaaaaactctttaaaaaaattacttcaaatttattttttaaaaatactatttttattttactattatttattaggaaatataattatttttttataaataaaaat

SEQ ID NO: 216619 - DNA, 532 bp, Cannabis indica
tcataccttttacgtgtttatttcatttctttttagaagttcatgtttaggatgttaaaaacatacttgtttgtaaatctagatcctcgcaaaatatattccaacacatacgtctcctagatctccccaacctctgtcaacagttttgggtttcggagcaacaaacttgtcctccttaacagcctctttgatggcttttctaagtcatgaactatcacttccttggcctcttttaaagcttgtctttggccccagccactgatgctctcaatgctgtggaagccaacaatgatttcgtgctcacatattaaaggtgtagtggctaaacactcaacttttgactatgcttcggtaaaggccttgtattggaccaccttcttggccaattcctcagtctcagcactctgaggcataggctctgtcaaaatacacaaagaaatgtggaggtttgattagtactcaaataaaattataggaggctttgaaatgaaaatgatcgaaacaaccagttcaaaatatttacctaagatct

SEQ ID NO: 216620 - DNA, 740 bp, Cannabis indica
aaaaagatcagagagtgagaatgagataccctgtataactgtaccttttgacgcgagaatggggatttgaggagttgtgcagagttgagagaacaaagatattagggttcgtatttttgggaggggaggggggtttaacattctccaattgaaaactcgtactgataagaagaccattttacccttcctagctttttccagattattcaaaattaaaataaataaataaataatcttatatgctaaaaaaaacattcaagcataggaaataaggtattaataagaatgctctttccttataccatggtttttttttttaaaattaaactcttattaacaagaactagagtttaatacaaatcaataagaaaagatgaaaaaatctcagtctaagctaaaagaaacttttccttataccatggtgctttaagtgagcttgccaattttttcaagtcttctatttattttttttccccaacactaatcacacgcataattccaaatcgtctacaataatttaggattaaaaaacaaatctttcattagtaaatatcttaatttacctcaatgtctttctaagactaaaagaaactttttctctttttttattaaaaaagacgtttaattaattaagcttacacctcgcggtcattacaaaagaggttcataggaatggacgagatagcaagtcgcccaatccggttgtgggcaaatgcccacttggtcacattatgagtcat

SEQ ID NO: 216621 - DNA, 564 bp, Cannabis indica
cttcgatacctcaaaggaagccctgggcaaggtctattatactcaacctcatcctctctacaactttgaggtttttccgattcagactgggcttcctgcccaactacacggcgttctacaactggtttctgcatcttccttggggactgtttaatttcttggagaaccaagaaacaacccaccatatcccgaagctccgctgaagcagaatatcgtgcattggttgccactggcagcgagattacttggctgcaatatttgcttcaagactttcatataccacaaacgcaacctgccttcatcttttgtgacaatcactcagcgatacacatcgccaacaacccaatttcacgaaagaacaaaacacattgagctcgactgccatttcatccttgacaagatcaaccgctccaaaattcgactaagtcctatcaacaccaccttacaactagctgacgttttcacaaagcctcttgcttcaaccaccttacattctcacattcgcaaaatgtctgtccgacgatgtgtacagtccatcgtggaggggggggggggtattaagta

SEQ ID NO: 216622 - DNA, 703 bp, Cannabis indica
ttttatttttattttactgtttttttagaacgtgataaagaagttttctttttccttaaaaaaaataagtaaaaattaaaaaatatatattttacataaaataaaataaaataaaaaaatgtggtgaaaaaaaatagctacttttgtacatattaattgttttgaacaattgtacacatattcaaagtcatactttcaaagtcattcttgaccaaaaagttacatgaacaattgtacacccaaatattagatatgtaattgtgatcagatcggattggatattaattttaaatatccaattagattggatcggatgttgaatgttgtgtctaaaaatctaatacatcaaacatgtaattaaactaattagtattttgatttagtttggatgagtaattagattttataatattatacgtaacatatatatgtatacataaaaattaatattaaaattgtattctttttttcttggatcagatggattcagtctaatctaatatatattgaatctaaaatattagatggatccgatccgatccaaaaatactagtctaaaatattaaataaattcaaattaaaccaataaatatattgatatacatccaacggatagaatcgatctaatccaacatcccatgaatattggatcgattggatgacttgaatcaattagatcgaatcgcatggtaaaatctaacat

SEQ ID NO: 216623 - DNA, 965 bp, Cannabis indica
attaaatattgatattattgtgtcaatttgtgattataactcatttgaatttattatgttttacataaaagagaatgaattttctttatgaaagttatttaatatagtttatatttggttataattgactggaatcaatccttgattaatatcttcggtgttgacttcatttttagtcaacgacgcggaatcaatattaaaataataatttaagtatttgagattataaaaaactgtaaacgacacacaaaatttatagaagtttaaccccttttagcgataatagtctactctcttttttgttgtattacttttacgaaagtatataaagatcacaaggtctgcccaggtgagtgtctcaatgaaaataggaaagtatctctaaagatattttagcgaattccagtcggccattcacgcttagtggctcacatcgctgagcgcgaggtgaggtcttgagcccatccaaaggttttggtattagctagcctggtcaatacaaattggtgcccagggacattctcccttccacgtgttagcctgctagatgccatgtcatcagtgaaaattttgggataacgtttgtcccctaagtttgcgtggaaacttatagttgtacgggggctttctatgcctcacgtgttgcacaactaggtgcacgtgtttatgcccacgtacttgcactgatatgtcatcagtcttgcttgaagcgtgtgaatccttccttgtctcttcaaatctctgcagtctgcattaattgtgttgccttagaactgcatcttagggatcgtgcacttacagttactcaaacttgcaaatattcccgctaaacttcaataaaattcttcggatctgcctccacgaaaacccccacatagttccctattgctttaagcattatgtcaaacataaagcctgggacaaaaccccatgaatctgcacccacatgtacaatctgtttacgg

SEQ ID NO: 216624 - DNA, 514 bp, Cannabis indica
tggtcctttctgtgggtggaaagcaaagttggtacagtatagctcttctaaattggggtgccacagtgatattagggactgtgtttaatattacccatttcatgctaacaagattgcatatgccagatattttcataatgctcttcactatgttatagagtgctttataaactgtttctctgaaacttgggttgtctccattagaggagtatgagaaggcatttaacagtttctcagtcataacgtagtcctaatagcacaataacctctccctcaggttaacatgagtagagaattgtggaccttaaattaattttgctgacaactttgattagatctagagcagaaaatgacattatcaaatatactgtatttgcaagtattttcagttctctaatgagacccataaagaagtatcatttgtcattgaaatgaaacctatttctgtaaaatatgctgctaaatttccctcattagaaacattaaataacttttttttttacctttcgtagac

SEQ ID NO: 216625 - DNA, 631 bp, Cannabis indica
gaatctggatttcgatattagggggagttgttttgatcgaataaaaccgaaaacaaatgtgcaatttcaatttcttcacagttttttctgggtttttttcgtcattttctgtttagatcattgcaagtcttcttttccagttgatttcgccaaaattaatggtggtatttccctcgttttggtttcattttgcctgtgttgctaatttgaacgatcgaggtctgttcttcttgatcgttctattccgtgcggcggaaggtttagagcatgtagtattttcgtaaatatttgtatgtgggttgtataaatgtttaaagggccagtccataatatatttataattttttttctttttttatattttcctattttttttctttatttttaagtgaataataattataaaacttgtatatactaataatcattcaatataacaaatgaaattatttgtatgtagaattaaactaagacaatatctatctataatctataatctataataattataataaaatgttaataattttagttcttccatattaatttacaaaatattatttcactactaaattattacttttaagactaaacattaattattaatgtatttttcttaaatttttgtcaa

SEQ ID NO: 216626 - DNA, 650 bp, Cannabis indica
aaaaaaaacaacaacaacaaaattataatattgctgtacagaattttaaacatttttacgatatttataattttatttacttaaaaatacggtcttttgatgtattttatgttatactcatgttatttaattattgatgttttgttattttgatgttattttttgttatttgaatgttattttcttattacttctatgtagttttcttgttatttttgtgttatttttataaaacactgtaaaaatttaaaaaaaatcttcaaatgtaaaattgtaaaaaatttacaaaaaataatgcattatgtaatcatccctaatttttaatatttgaattacttttcaacaataattatacataattatatataaaaaaaatatttataattattaaaatttgaatatttactatcatcataagtgttatattttaagaattagtttatttgtgcttacatactgcttagatttatattttttttgttgttaagatcgtgctcatacctctcgaacaatgtgaaaaaatctaacccttattcacaatactagaatcatcaatgaaattagctacaattaccataataggttgtgtaattgtatttaaagaaaaaaaaaaactagctatatctcattatcttacttccatcctcaaa

SEQ ID NO: 216627 - DNA, 921 bp, Cannabis indica
tttgtccatatggaggattaatggtttcaatcccagaagatacaagcccaccagtgtcagagttagaatcaccaaagttaaaaacagcagggaagttgaactcaacagatttggccagaggaaaacagagatgaaccaaggtgaggatgaagagagctaaagtcttggtagccatggcaaatgagagacaagtttgttgggttttcagttttcactcttataataagtaccaacaacccaaaaaataaaataataacaaatctcttactatggaagtattaacatcttctggtggtggcctggtgggcctcatcagtcagttgtctatgactttgcttttaattttggtgagccaaagtaagaaaacaaatgtttaaagttatcttcctaccttctatatgcactttgcaaaagggtctctactaatacaatttttagtgcagaatcatgcatattagtgtacacacatatataaatatatacttcagtaaaagggtgagaaaatttacttgaaaatctacgattagacggccatcacaggctctgccagatgggtttttgaagtatgattggccataaggggattaagggagacccgataagcagcaacaagctcaccagtgtcagagtttgaatcaccaaattaaaacagctggatagttgaattcacaactgaatctacacaaggtgcgagaattgataatagggttaagatgtggggaatcatcatggtcttggaagccatggataaggagcttggtttcacaattgaaatcccacaagtatgtgcgttattatttataagtgtacacaattatgtttgctaagaaaaagttcagttactttgccacaaaaaaaagttcatttacttattattttgtcacgagaaaaagcaagttgggagttttctctctctctctc

SEQ ID NO: 216628 - DNA, 428 bp, Cannabis indica
tttgctaatgccttggaaaggacataacacttatccaaggtgtaagtatactttattgatgattatcatgtcagtctaaatctagtgtaccgacaaatcatgagacttaaacttttgaaacatataatcatgattgtattccattgtgttgatcacactacaatcataaataactatatactctagacttaaaagaatttatacattaaacatataatcatgaaataaatcatgtgaaccatgcaatataaaataatttatgatctcttattaattagtaaacttgaatcatattgaaattagttttatttaggatacaaaatctaacagttataaccttgccatgtccaaggctaagaaagagaagatgcctgccaaaagttctaaagaagggcccagcatagggcaatgaagtccagcccaaagta

SEQ ID NO: 216629 - DNA, 566 bp, Cannabis indica
acccccacccccgcccctgcagatataattgtcatccctaagtctcacattgttaatgtatgaaaatatgacactatatataaggtttatgagttacttctcttattgtcagttagttttgagatagaaccttatgcatcttacaattctaatatggtatcaaaaccaaataaaactctaacgagtctgatcaaaatccaacagctggtccaaaaagacagtcaaaagaggcgcttttaattcgggaatagtgaaccaaaaaaattaatgtgaactaaaaagtaacgcttatgatcgagtcgttcaagattggtgagaaaaatataatcaccatcttaaaagaatcttagagaatttcacattgctaatgtaaaaatataatatcatatataaaattcatagattactccttttattgtaaattgattttgaaatatacatgcatcttacaattttaacataagccatgtcaaaattatcacaccctttttgtaacactacttgaagttgcgcactcaaatgaatctatttcaaaacaaaaatcttgaggatagtattgaaacggt

SEQ ID NO: 216630 - DNA, 627 bp, Cannabis indica
tcgccatttgtctacaatgaacaattatttctgcagatgtcttcatttctttttgaagaaaattattatagaaatagtcaattaataagaaaattatctctattttttttttgttaggatggtatttatagctacttaaaactacttgtaaatttttaaaaaaaattaaataatttataaaatcaaaagtaaaattcaaatagtaacaaaaataaaattcaaataatttaccgtaactatttaattgtataatttttaagttgtatggttgtatcataaattggtcagcctattataagtgtgaggagtgtactgataattgtataaaaagaagaaataacagtagtagtggggttggtaataggtagtaatagtataatgggggccaagccaagaagggacacaccaaatggcgtcggtggtgcgaaccctgaccaaccaacaccgaatcatggtcactgaggagaagaagtcacgctatatgtattgttggtctcaaagactcaccaccaccagccaccaggggcattgggctggcttagctgagctgtcctctgcctcttccatgtggtggaatacagagtaatacatacaaactacaaactccaactaggaatggcaaattgg

SEQ ID NO: 216631 - DNA, 725 bp, Cannabis indica
ttttaaatttaacaaaaagcgagaaaaaaatataagagagagagaggggcaatgaaagtttgtaaatgttaaggaaacctttaaaaaaaaaaaaaaaaaaaaaaaagaagacataattgtaaattagattcaattaaaagtattagatgtaaattctccaattatttattcatttaaaatttatatgaaagcaaaaaagaattcaaataaaataaaacaaatatacacattgtaagtatctttcacctaatatagaaagaattaaaaaaatatatactatggcatacctcagaaatcacgcaatgcacatgagcaatatatttgcactcgccacaatagtacacgcaaattcgtggatttctttcagtttcacagatatcacaataatattcaccaaaacaatcttcaatgaaggaatcaacaagaagtaaggagtgcacatgactttcatgctttatagtagaaggtagtggaccacataataaatgaagcttgaaatcacaatcacaacaccagaatttgaaggactcagttttttggaattctttagaactagacatgactgatgtcttaaaacaagtgtcgtaaacattgcattgttcaatttcaaatgcagaggacatgttcttgacaaaggaaagaggatgctcatgatatttataatttaaaactctgataactttgcaatccatacacaattgaaaatcacattgaggacgattagg

SEQ ID NO: 216632 - DNA, 658 bp, Cannabis indica
atctagcatggcttggactttaggcgagtcaactgccacaccttcagatgaaattatgtgccccaagtattgcaaatgtcgtcgagcaaagcagcaaaggaaatcttcttcatattagcatataactgatgcttggaaagagtttgcaacacaatgtcgagatgctcaacatgagtagcttcatcaagactataaacaaggatatcatcaaagaataccagcacaaaacgacgaagaaaaggcctaaaaattcattcatgagtgcctggaaggtagctggtgcattagttaaaggtactggtccttcctctcccagacttttctaaaagttttgtggtggaaacagatgcttcggttatggaatcagggttgttttgatgcaagaatgatcgttttagttggaccgatgatgctacaaaatcatagccaaacaacttaacctgccacttctggttgtcaggtgtcaccagatgcacagtatcccagtttaaccaagtggtagaggtgagaactgagcatgctattgtgggaactcgagataaagcatcaatgacactattggccgccccaagtctgaaatcccatgatcacagcttgggcgtgatcacaaaactaaagacgtaatgatggtcaagctcgtattgccgatgaactcgct

SEQ ID NO: 216633 - DNA, 301 bp, Cannabis indica
ttttattttattttttaaaaagtcagcccttaataatataaaatacctatactgaataatggcagacttgccctgcaagaaacttaaattctaaaaataacctaggcgcattttggtaattttactaatccattaaaccgacattctaaaaattctaatctagttagaaataccctcaaaataatacttccatcaatgtcatgacatttctaaccataatactaaatttccacagtcgtcgggcccgataaaatatttttatttcaaaaatggtatcttcgatacacacatatcccaatat

SEQ ID NO: 216634 - DNA, 756 bp, Cannabis indica
gcataatttaacatacattataaacttgctaattacttacaagaagtctaataattgactggccaagtacaatattacaaagacaaaacaccctatgatataaacaagtttctataaacacataattacatattcatccttggcacttaaaacaattcacataatagcccatgattggtcaccaaggaatgaaaatcaaaatgacttggttctcattagtggttagttataatagccaatatgttccatgagttgggttttaacatctactaactcaagtttgagtcttttaaactcactaagataattctttagtaactccacatcaaatcccatattttgcaatttgttcaattgctttattatggaatcaacagtatctgttgtagtagattcttcatgcaatttcgagatcatgtcaattacatatgcaaattttaccttattagtcaaagctataacttcaagctcaatttcatttttagctgccaaaaactgaaattgaggattctgtggcaatttcttgaacacttctaatgaatccacaaattcccagattgcagatcttctcacaatgggaagattttgaggacttccttgtacattgctaactgtcaatgaaaaataataatgaaaagaaaacaataccatgtcagaagaatttcaaatggaactattcaagttcaataaatgataatttaaattactgcaccctcatgttttcgatttctgtctatttcacaaatggctccaatg

SEQ ID NO: 216635 - DNA, 650 bp, Cannabis indica
gaaactgtctacatgacactcctcaagggatataaacctaatggagatattcctccaaatattttttgtaaactaaacaaaagtctctatggcttgaaacaagcctctagacaatggtttacaaaacttagcaattatcttttatccactggatttactcaatcccttttagatcccacattgttcattaaaaattacaaaggcatttttcttgctcttttaatatatgtggatgacatagtggttacctacaataatgatgatgatgttctttcctttaaacaacaacttaattgtgtgtttcaacttaaggatcttggccttttacgttttttcttaggtttggaaattggccgatccccctctaggatttctgtatcccaaagatcattcaccctacaacttttaactgacacaagttacttatgagcttctcctgattctacaccaatggaacctaatattcggctctcattcgatattgggaaaccattagaaaacctaaaaatacattgcaacatcataggtaaactcatttacctaactattactcgccctgatatttcctttgctattaacaaactaattaaatttttatctaacccaagagctccccatcttaatgcggctcatagaattttacgatatct

SEQ ID NO: 216636 - DNA, 543 bp, Cannabis indica
aatgtgagtaattgataaatttagttttctccaattaattgtatttttttaaaaaaattaatgcaacatatatttttgtatttttcaatctttaatattaattaaaacaattcttaaagtttcttaataaataagaaaatatatattttaattttaaattattattttttgtagaacatatataatattatcatgtataaaaacacatgtatttcttttttttttttgtttaaatttactatttttaatatttgtcacaaaattactatttttctatatatttaaaaaaagcaaattatgtttctaatttcaatactattactttatttataataacacacatcaaaatattatattttaaattatatcactcagtataagtacaatatatatatataaaatattacaaaagttgagctcccttgtttaatataaagtaaagagagaacacacaacacgaagacaacttacagtaaaaaaaaatattaaattcgaacttaactaaaaattaaataaatataaattatagaaaatattcttttt

SEQ ID NO: 216637 - DNA, 577 bp, Cannabis indica
aattctcttgtacgaccttacaagattataccaactccatatgaatgaggaatttttagatatttattaattatacttctataattaatgtatttatttatcttataattacattccatattttattatattatctactaaatacttatttttagggcataaatcccaacaagtccatagtccctggaacaccattgtataatacaatcaaggaaattaatgtcacaaaataaagaaatgagagatttattttactagtgcaaaatagtaattatttaatttttataatctatttaaatattataaaaaatattatttatcatttataataaataaatatcttatttaattaaactttatagatataattaattataccggtataatcttaattctaaatatacaatatatttaggagcctaaaaatattaatggcataattaagttttctctcatgtaaattatttttgttcatgtgtggaggcaaaacaagattaagaaatatttttgaatcctatcaacttctgatcattgtatgtggtggtagatgtgaaagatcgcatatgagttctaaacc

SEQ ID NO: 216638 - DNA, 565 bp, Cannabis indica
tttactatctattatttgattgatcgatccttaatattggaatgggttaaaagtcatgtatatttttgcctataaggaggttgcatatagtccaattcctaacccctttctactagccaaacctaatgacatatacagcagaacttctatttaagaataattcatttaagaataacttctaatttgttatataaaaaaaaatcaaatcctaatttgggccaattataaataagaataacctctaaattgtaattacttataaattttctaagtcccatattaacaaagtataataattacatcttaaaaaaatatatacatatatttgtaaatttattttacataaaattaataattctattcaaaattgtatatatgtattaacattatatttactctaaaaataattctattatagtattaataattatttattgttattattgttatattaatattgtttggtattttaatttttttagttgtaactctatttaattataatctctcaattaaaatataatttatttggtcccaatgtattgaagtgtatatatcttatttc

SEQ ID NO: 216639 - DNA, 510 bp, Cannabis indica
gtctgcatttgtgacctgtaatccaataaaccaaaaaaaacccattaaaaatcataactttaacaaagaaaaaccctaacaacacaaacacatttgattgatgagaattgagaccaatatacctaaagtaacgtattttatcaggtaaaggaatacccaaatcttcactgattccttcaatggcgtccttcaaagtaatactattaataacattgttaggaaaatacttagtgaattgcaaagacaaagattcatcgcaaaccacaagctcccaaagctttttccctcttatatcaagaatgggtcttgagcaaaaatcaagctcccattcagtaagactgttgggattcgtttcaggatcgagatagcaaagctcaacagttggatcatcatcatcatcatcatcttcttcttctttttcgtcttcaatttccacttcttcctttatcgaaaccgagcttctccgaaacccccgaaacgacgctagttttggccagcttctggggcttt

SEQ ID NO: 216640 - DNA, 663 bp, Cannabis indica
agctgtgatccacatagctaatcctgcaaccaatgctatttccccagccacaaccgatatatcaactttctcccatgtcaacatctgcaatgcattatatatatatgttattgattaagttcatcatttctttatatatatgctaagatgaagtattatttaatgtatctttgttcacttgaataaaaggtgttgcaataggttacctaagtcacacattattaagattgacgtcctctcaccttttatattattatagtgttatggagaatttggtttatacaatgtacttaaaatcgaaattttcttattattttttttttttgtatggattctgatttttatttttcatattgtttcaataattttattttaaaaacaaaactatgaatttttgttaaaaaaaaatctataaaaatatatattttttcatttttagctatttgaaataatccctttagaaaaggccataactttaaaaagttttatcatgattattgaaaaatatattattttacaaaatttggagtagccaaagcttccatatctccgtctcaaaacatatgtattaagtattatgtttgtaataaaatcttttgtggggtcaaaaaaatttaatcttaagtttgactgcaccatctaaattaaaaagaagaaaaaaaa

SEQ ID NO: 216641 - DNA, 432 bp, Cannabis indica
aatggggggttcctcggttttcacctttttgaagttttgggggcaaaaaccgactgctctttctttatttctttcacatataagcgttattgctttcccctataatatgcggccctcctgaaataaccaagaggtcctctccttccacaggaagaggttgtaacccctggttgtttaggttattaggctcacggggctggttgtatccatagccctgtcttttcacatacgacttaaaatggcctcgagcaatgagactctctctctcatctttcaactggcgacattcctcgatcgcatgcccgatatcttaatgaaatttacagtatttgttaggatctcttttgctcctcgaattcctcataggctcgggtttacaaaaggctaccttctgctcatgtttgaggtgaatattttctcaagtttcattaa

SEQ ID NO: 216642 - DNA, 676 bp, Cannabis indica
ataatagttataagaaaaagggaatttggtggcatgtgagttaggggggaccatcggcctttttcgcacaatagaaaaaataaataaataaaacaaaatgaacatagttaattaacacattttgggagcttagacgatgattgctctcctcattgcacgaaactcaaatagtacccttcatagtaatatttgaaagtgtttctaaattattagataaatattaacgtgaataaattcatctgcccttctgtaccatttttgtgaggctgctccacttctagctaactttctcaaattttcttcaaaacttgaacgttcgttgaaaataaaagtgttttttttttaaaaaaaaataaaataaaaatgattattgaataagaaaataaaactctttcttttgttagcgctctatataattggtagaggtgttcatcaaatcgtcaatacaaaaaataactatctttagtgataattttttagtcacaatataatttttttgtgattaaaacatagtatttagatacaaattctcactaatttagttttagtcacgagaagtattttgattaaaaacacaattagttacaacaaattctgatttttgtgactaatatctttagccacggacttttttagcacaacataaaaaatattttttataattagtcaaaaaaaa

SEQ ID NO: 216643 - DNA, 751 bp, Cannabis indica
gtgatcaaaattattgtggatgtggcactctttggtgtccaaaatgcttatgtatcatttcggctagtggctcgggatgctaatgaatatttggtggaggctctgattgggttgcaatatggtagagtaaagtagttctggaagttattgaagccattggaattaaagaggctttaagctgggtagtggctaagctatcagggatgggatactgtgtcaaagcaattcgaagcaatgtctcttccatggtttcattttttgatttagtcattgataattgtagctaattatttcataatttaagcaatgtttctatgttttttgttaaaactatctcctaacaagattgctcataattttgttagaactctctattttttttcatgatcgaatctttagtaagaatgatattcatactaagttataatcttatctgtggactaatttagcaaactaattaaattttatttaatttaaaaagaaaacaatataaattgtattagtttatcatcaaattttaataaacacaatgtaacacgctcttataataaagtgtaaaatatgagattgtttatagttgtaaaatttattatctatttttagttaaggtaagtaagcattaatgtaattttcaaaattctttcaaactaagtttttatttttctctaaacaaagtcaaattatattcttcaaatttcttacaaataatttctcgtttgttttattattatttattttatttttaattttg

SEQ ID NO: 216644 - DNA, 761 bp, Cannabis indica
tctttagaagctacacgagctgttcatggttttgtgctgaagtctgggtttccagaatcagacttggtagtcctgttaaatcatgtattgcacgctttattcgaaatgcatggactttgccactgctcatcgagtgtttgataaaatgtctgaaagaaatatattctcttggactgctatgattgttgggtcgactgagaatgggttattctatgatgggtttgagttcttttgtgagatgatgaatcatggaatctttccggataagtttgcgtattctgcaattcttcagacatgtattggtttggattgtattgaattgggtaagatggtacatgctcaaattgttggaagtggcttttcatctcttacttttgtaagtgtatctcttcttaacatgtatgcgaagttgggctccattgaagattcatataaggtgtttaggaacatgaaagaacataatcaagtctcctggaatgcaatgatatcaggattcacatcaaaaaaccatcacttagaagcgttccaattttttctcaaaatgaagaatgagggaatttcacccaatatatacaccataattagtgtctcaaaagctgttggtaaattaggtgatactgacaagggtaaaatagttcaggcttatgcttctgaacttcatctggattctaacattaatgtgggaactgctttaatagacatgtactcaaaatgtaagtctttgtctgatgcaagatccatttttgactcaaatttcacta

SEQ ID NO: 216645 - DNA, 588 bp, Cannabis indica
gatttccttcattctttactaactaggttacttctagttcccattttaccccttcccaccaatttgttgctgtcatgatccctacgctcctcaaccccaatgttggtgggatgattccaccttttggtaggtcgggtattagttcttactcaaacccttcttctttcacctcctattccactgatttcattttagttgttgatagaacaaaccttgcttgctttgagtctatgagagatgcctttcccactcaaatcaatacccctgccccaagctgtggaggtctagctcttggtagcaatactatgaagctggaagttggtgctcttacaggccagccagatccttctatgaaaggaaagggtttggcctcggcttcaggggttaaacgcccttcctttcaaacccatcaagctgttgttggtggctccttgaggtctccctcaagcgagctcgtgctggtcacaatgaagatggcccatctgcaacaactttagaacctgaacaggcaggtgatgcggagcacacccgcccagaaaaattattttattaagctagaatgcacgtggtttagggagtacacgtgca

SEQ ID NO: 216646 - DNA, 551 bp, Cannabis indica
tatcccctgtgtgccttgcaagcagtaatctgggaaccagtggtgcgacaagtactagtggctcgactagtatgggtgcctggagcctcgagcacatcagtgcaggggccacccttcctctttgagactacttcaaagattatgtaaaccacatctttcgtggattgacaatgcttgggttcgggtttgaatgtactagttattttagatttacttattgttatgttccacgttctacttattgcaatgtttagttatttttttctttttttttcaaggacaatgtttagttattgagtgtttctttaagattgtaaaactgatatctagctttattttctcagtttgatttttattttgtaattgtagtaatttttttatatacatacatatttttatgttccccgttctactaattgcaatgtttagttatttagtgtttcttttagattgtaaaattgatatctaagtttattctctcagtttgattttatgttgtgtaattgtagtaatattttatatacatgcttaggttagagatgcttcaattt

SEQ ID NO: 216647 - DNA, 578 bp, Cannabis indica
agagaactaattcccatctgcactttttttttatagcattaataaaactttatggagagaagtatacttatataaatttaaataatttgtagggcttcttttgggaacccttataaccatatatattgtttttcttttctttattccctgccatttttgttgcttcttggccaaaatatattgtctctgaaatccaatattaattttttcttttctcgaggattgggaaaaattcttcttggttctctcttcttgttctatccttctcatttctaaaccattctcttagtttagtcagtactaaaggaacatatatacatacatatatatatatatttacctctgtacttaatccggcctgcacagtctttcgttgcagtgtttctgacccttttgccatcataactggtagtgtatacatacataaatatatataatataagcacttgtccatatactcgttgaaattacttataattaaaaaaaagaaaggaaaaaagaagcagaaatggaagctgggaaagtgtaaaagcatagacaattgagtgtgtgaagttggaagatatatatatatatat

SEQ ID NO: 216648 - DNA, 478 bp, Cannabis indica
cgtaggaatggtgaaggtgcaaaattctggtgtcgatggggaagagctttcattcctattccataaggtttcacgatcagatggggaggtgtgtcaaacgtatgtggacagagcctctcggagtgccccattaagccgcaaataaaacagaaagttggaacactttcataacgaaatgtagcgtaaaacgagtcgccatctcgcttacgaaacttcattcttcgtttcagaggaagatcaagagaaagtgttacccgaacccgaagatattctcgccataccccagtaaagttatccgggtctgattcgatgaaagtccccgcatagttcgcagcatccttagccaccttcatggtcatgaatccattttgcagatcatggatttgtaaccatatatcaagagtgttaagattaacagtacgagggttgtcaccatcattgagacgagttataatcaattgtttgcgatcatatgtcc

SEQ ID NO: 216649 - DNA, 529 bp, Cannabis indica
ttattatgtttttgtaaactaccgaagtaaattactattatacccaaaattcggctatatactagaagctgacacgtgtcctacagaaggaatgtgaatcaactctgataatataataatgatgtatcattaaatgtaaattaaaataactcacccctattaaatataagtttgatagataatgttctaactcatgggctgctcagtaggggtgttcatcaaactgcccgtaccacaaagaaaatacagtttgaaattttttgcagtcggtcgcggttttgaattttcttaaatcgcgcagtgcagtgcagtttgcggttttgaattattaatatgcggtttaaaccgcaccgcacatcataaaaaaaatttatatttatttaggtctaatatgggaatgtccaacccaaaccctactaattattgtattattgaaacttaaatttttagttcatatttattttcaagccttatggtatttttgaaaagttttgctcaagctttgtttgtatttatgatagtttaatta

SEQ ID NO: 216650 - DNA, 670 bp, Cannabis indica
attttaattaaatacatatattcagatgtgacctgaggataatcagtgatgcaaatcagttccttattgagaagatattggaacatcatgatttattgggatgcttttcacaaatcgacacaaaccggacagttatagatgaagagaaaagacttagaattttcccttatcacgacttgagctcaccccatgattgcaatctgtgcccattaaatatgtgcaaggtattagttaacacataaatgtgactttctaatgtctgcttagagtgcattattagtgttaagttattgtgtataacattatatcatatatgtggcttaactaaatagaattggtatgataacattctcactcattgtacttttcattgtcttgattgcttgatggcttcctttggggtgatttgaacttcttattagataagactagtcatgtagagggcaattcatggtagactatttttgctggttcagttccactcccatcatctttcgaactggaatagtataagaagtaagcaaagtaaattgatacaggtgtggatttctccttgccgcacataaaaactttccagaaataaacattgctaacaaaatgtaccaaatacaggggctgttattgagatcataggtgacatttgtatcctggtgatattgaaaatgctcaa

SEQ ID NO: 216651 - DNA, 502 bp, Cannabis indica
atgaagaaaaaaatattgaattggatcggatacccacctctaataaaaagtatttttcttggtattatattgggtgaaggggtagagtacatgtgggtagcatgtgtattttctgaagtctccatcttaagtagtgtttctgatttgtcttctttatttaaacccttcttcttctttttttttttgtagcatttcttcctctctaccattttttgactagctagggtccactctgccttggatttagatgtaggatctttttcatcatccaattcaagtatattgtatgattatgcttatgcttgtgcttgtgtctttatttaaatttccttgacataaaccttaataaattcaacaaatgcacacacaattaaatattaaggcaattgcaatttggctacgtacaaatcaaatatacaatgagtttgaacacaaatgacatctctaataattgattcatgctcatattattgtgtccatcttgttccagcttgtgtctgct

SEQ ID NO: 216652 - DNA, 597 bp, Cannabis indica
ggcgtggttgtgtgaggcggctgagattgggcgaagaggaacgagagagattttgagtggaagagagagaaaaggattggggctattttgggggtttttaaaaattggtcctattttaaaaattacctacactaaatgttcttcaaactaattatgtattaaaaaaagcataataatttaaatttccctttatttatgggtaattttttttttttgacaattatttatgggtaaattttgtactctgtgttttgcaaaagttatcaattacattttttattttattaaatgataaaatggatcattaattttttaaaatggtaaaagtaagaccctaaattcaattttcaacaattttattttttaatataaccaaaacaatttctaacacgaacagatacagcaaatgtaatcaattttgtcataatgactctagatcagattttattaacttttattttgacaaaaaatcaattcatagtcctatttgtacaattttagaaaatacatgatacatattgtcatttaacaaaacaaatagtccaataggtaacttttacaaaaacacgggatacaaaatgttatttaccctttatt

SEQ ID NO: 216653 - DNA, 633 bp, Cannabis indica
taccttcccataagtagaagcttagtttttagaattcactatcgtttaacagtttcagacagaaaaatctagagaaatgctcgaagcggtcagtattagtttacttcttttcttagttaattttttacgggtttttaagttcccttattattaaggcggacgatgaaacctagtgtatttatttaagtatttatttttattttgattctcagtacaatatatgcttatgattttacttctaaaaatattttctttcatctttaatatcatgtatttttgatagttagaaattattaatgcttggttttacattttattaaaaataatattctttgatttttttctattgttattaaattgtttttcatttaattcttagagttaaaatttttaaagcgaaggaaaatctttttttaatagaacataattggtttgattactaattaaattatgagaatcaatataaacataaatattttcatatacacttaagtggattctgaatccttaataatatccctaaatatcactgaaaatatctattattatcatttttaccatttaaatactttattttattttgttacgaaaaacctcactattttcagagctaggttagagttttaattgctt

SEQ ID NO: 216654 - DNA, 766 bp, Cannabis indica
caataagtagatttaaaatttaagaaataagtttagcgaccaattttccacaataatttagatactaaaaacaaaaatagacacaaactgttcatcattagagagccataaggcatggaaatacaaacaccaatcaatataagaaacgaagctggactatattatttatttatatagatatatagatagatataagtacatagttatgtactttcatacatgcagcccagtcttgatatatatagatagatatatagtttcttatatatatatatatgtcacacactacttaattaataattgatgagagaggatgatgagtagtttcatcatcattcttcttaggaaataaggcgtttaagacttgatttcttgggacacaataaccagagcccatagcattgcatagataagggtaacaacactcgtttgacataatgttgcacttagaaccggctggtaaacatcccggaataggcacacattttcgactcgcaccgattatgggaccttcacattgtagtcctttacaacaaatcttcatttccgcgatgtgacagtattccccggccaccatgcaacgatctgcgccgtagctaccctgcaccatcatcatcatcataaacaaaaaaacattattattgttccaataaacttcttcatccttgatttttttagatatattatatatgttatatattttatgtgtaaatatatataatgatgatgatgattatgaatgcctcttttcctttgcttttctatt

SEQ ID NO: 216655 - DNA, 744 bp, Cannabis indica
attatatccttagagactgattactcataatttttacaacttcccctatttgcaaatagatagatcccaatccttcctaattaaacattaggccatcacatctattatcatttaaatctttaatcctcttaaataatacctaaatttttttaaacattttcataaatcataccttgaacacaatgagtcacagttattactatttaatctttaaaccccctaaataatactagattcacttacatttttccttaaatcatacatttacaaaagtcagcccttttagaaccaattagtaaaatctttgcaaacacttttaactttaaatttcataatattttatatttcatgatatcttaatattttaacctaattaccctaaataattaggggccagccatatattaggctcaaaaaccttgaaaggcaccaaagccataaacaatggcccaactcattcatcaaattgatactttcattcctgaaaaaaaacaaaacaaaacaaaataaaagcattcaaactaacagaaaagaccaactaaccatcatatcaacttaaaaactaaaattgcaaaagctcaaaatgatctagaatcaaaaaactataattaccatcaaaatctccccttcaaaactaaaccaacatccaagcaagaagactaaataaccaagaaaccttcttacaaactcaagataaaccagaaaaaaactacacccaaatcaactgcaagataaagttattaa

SEQ ID NO: 216656 - DNA, 538 bp, Cannabis indica
tgatgatctaacggtgaaaataagcttcaggagatgatagccaattttgagtgcccgacaggtcccgctgctagttacccgaagcttatttttgtaactcccttagcatgaattttgatgataatagcttaaattgtgactagagtgtgagacatgacatgatagagcatttaaatagcttcaaaacacaagttaaatcgcgtcaaacggataaaaaaggagtgagttatggttgttttactgaaggcagtctaggtcccaatggctacgttgacattcagcgcccaggttgacatttgacatcaacctggagactggataagtgaagaaacgtccaagggatgtcctttaagattcctaagtgatagtttgacatcacctagtctatttataggttcaggtgaaattagtcaccggttctcggagatgttgctgtcttgtggaaattggagactcgaaactctccattctgggtgtgctagaaatgagaaataaaaagttgtgaatttgattcatatgacttcatagatcattgtaa

SEQ ID NO: 216657 - DNA, 523 bp, Cannabis indica
gcaaatagtgaaaaacaaagaacagaatctaccgaatcttgtctccatattcctcattcaatcccacgccctttcattttttctcttcatctcacgctctaatagcccaccccacccaccaaccttcccactcttttatttaaatttatatttgtttctatttttagtgaaatgaatatgaatattattaataataataatatataaatttattaataaattataaataaatttaaatataatattaattattataatcctaaaattaaaactattgaaatatgaaaatatatacagtaatttatttctagtgtgtaatataaaattttaaatatttataaataaacatgatattaaatattattcaaaaattatataaatataattagtaattgcaaaacaaataaagtacgactttaagactgaatttaaaaaatacaagtcgacataagcaaaacatagtacgaattcgaacacgatacaaaaattatatattgttgttgtttatgtcaatcttaatgca

SEQ ID NO: 216658 - DNA, 605 bp, Cannabis indica
aagttattattcaaggtgtcaaacattaatttgtttccccatttcttgaaaaaaaaaattgcttctccaaaacatatctatgttacaagttaaatgttttaatgtaattaatatatttgggacaaattatagaaggaaaaattaaaagagaagtgtattatagattttcttattttaaaagagtaaaaaaaaatatagaagatacaattgtttagtaatttttactaaatacttaatctaaaataatatttattcaatttaattaatagtagtatattacttcattgtattactatacattactactattactttttcaaaattattattggaaacggttggtgcttagcatattaatatcttgctattggttagtcatatgaaaagaaaagtgaattgttacaaagtataattgatctctaacactattatcagtattatactgttattagtataattaagtatcgatattaatataacttaaaaaaataatttttaagtacaatatcgctaactaaatcataagaatgcacttataaaaactagttgggtcgacaactagtgcccaactgaaaatgctcaaaagaaaaaagaatacatttaca

SEQ ID NO: 216659 - DNA, 989 bp, Cannabis indica
aaaaaaaattaagtagaataaatgtaattgggtaattttatagtacactcgctaaaatggtcgtacattttttattttggcatttacgagagttttttagtttattcctttttttttttaataatcgagtatatttataattatttaggaccacttgtaaatttttaaattattaattacttaataaaaaaagtaaataacagtgtaaatacttaaagttttgagtcttgtaagtgacataaatttaataaactttttaacagcataaatactcaatatttataaaaccgtgtatttttttcagtttcgtctgtacaaactctattagtatattaaacaaggcatatgtaaagctcagattctaaatcattgagtttggatgtaaaattatatggtatcagactatcagttacttttaaattttcttttaatatattcaaaactagtgttttaagtgcgtgcgtgtcgtattggcccgacccatatttatcataatttttttaaaaattaggtcgtgttgtgtcgtttcacagaaaaatatagatcatgctgtgttgtcagggccgaccttgggttgaaatgggccatagggtaaaaaaaattaggcccttactataaaaataaatagtattttaaaaaattattaaaaaaaatatgtatatttttttaaaaggattttttatttgggcccctaaaataagtagaccctaggcgcgggcctagcccgcctatgcctagggttgaccctgcgtgttgtgccaatattgttaaaggataggcccagtacgacccgatatttttgaatcatgctcggattcctgtggtactttgctcgtgccgacccttaaataggtcagcctactttaatattcgggcttaaattcgtgctttatttttttttatatattttttacaattactaaagtatatgtatattttatagcttagttatatttatatatcttttcaacaatattttataaataatt

SEQ ID NO: 216660 - DNA, 824 bp, Cannabis indica
taatctagtttacatcctgtcagggaactagagatttttaaaacctccttctttcttcttctctttcgaatctccttcattgttcttcaaaaatttcaagcctatagtgagtgagtgcatgcccacccatagcaagtctagtacggattgtgaagaatccaagaacttgatgaagaatcggactgcacatcttgataatactcctcgacagaaaagtacaagggttagagatctgagtgggaggagttattatatcctgctataatcaatgtaaggtttctcaacgttatatatttttaaagttcgttgttttaaaaattgaaatttagggtgataataaatgtacttgttagtaaatttagattctagtaaaatatttctagcatacacaattctcatctctcgaatctcaaaattaaatcaaaaaaagtatgcaaatagtgataaagtatttagaagcatttagcataaatcatttagtgtaatatagaaaggatgaaattaataaaatatcataacaatataacatagaaattaaagtgacttcctgaaatcctagacaaaaaaattagtgcgtgaaaatcatgtgcataactattgcattcataattaaaaataagagcgtaaaagaaaataacaaaggaaaaataagaagaaaaatgaaaaataaataagtaagtttgtataaatcagtttttgagaattcaaagatctcaaaacgtactaaaaatattagaaataacatatttctataagctaaccaagttctataggaaaccacttgaggctagctcaagtagctataggtgagtctgtgtgttgga

SEQ ID NO: 216661 - DNA, 524 bp, Cannabis indica
catgaagcataagctatgactttctccgcttgcattagcacacaatccaaaccctgtctagatgcaccacaatacaccacaaatttctcttgatcagatggcaaggctaaaattggagttgtaatcagcctttgtttcaactcttggaaactcttctcatatttatctgaccataagaatcgttgattctttctagtcaactcagataatggcatttcaatcttagaaaatccttccacacaacgccgatagtaacccgctaaactgaggaaacttcaaacttcagtagttgttttcagtctaggccagctcttcactgcttcaatctttcctaggtccaccataattccatctttcccaacaatatgtcccagaaaagatacctgtgacagcctaaactcacactttttgaacttcacatagagtttatgatctctaagtcgttgcaaaaccatatgaggatgttgctcatgttcaatttccgactgagagtatatgagaatgtcgtcaataaatacaattac

SEQ ID NO: 216662 - DNA, 583 bp, Cannabis indica
taagtaatctgattatattgaaatgagttttatttagggcacaaaacccaacaacattttatatataaagatataaatataaattattgtattcttcattttaactatgactcttgtagattttaccttttgagtttttctttttattaaaaatttcttctaaacataaatcgctgcaaatattctctttcagttacattctgctcatatttaaaaaaaaaaatcacttatgtgggcataaattacaagtataaatatagtatataatagtctatttaacaacttttagttactcaaattccactttattaacattaaacatatatacaaatatttattctaagaatacatatatattctcataattcaatattaaaatattatttatgtatttatttttttgtcaaattcttaaattgagtcgtactattatgtcacattaatgttatataaataaattattttaaaaaataagcaaaataatactgaaaaagaatatttataatgatttttataattaaaaaaatgcaacaaataaaagtcttacaatttgtattagctgtaaggtgttacaccaccacac

SEQ ID NO: 216663 - DNA, 749 bp, Cannabis indica
agagagagagagagatccaccctaggtgatcatcaaccaccaaaccttataattacgttggaatgtattaattagctcgttatttttgggtatttaattagagagactattaaataaactagacaatgagcgttggtataataattatatagatatatagctatgtatgattaattaaccagacaatatatatataataagattacatttaaaaatatatatataataagatttaaaatttatgttaaatttggtaaaaaaaaataactttgtgatacatttgaaccactatttataattgtgtattaatgcacaagatgtaaaataagtaaaaaagattaattattattgatggtcatttaatatcatattgagaacatacaaaaaaatattattttatattttttattatttaaataatagtaatatagtaaataaaaaaggtaaaattttgtaaaagtcaataaatcataataatcagtgacattatagtaaataaaaaataaaatttattatgagctaaatttgacacaatattatatattgtcccaaatttgatacaatttttagcatttgacaaatttagcacattttttaaaaatactattaaaatagtaattatttgtgtgtactgaaatgaaaatgatcattttttttatattccattagaaatgctctaaggtaccagtgtgatgtctccccttgtgaatggtctctagtttttcgagtatcaaaattggattggatta

SEQ ID NO: 216664 - DNA, 550 bp, Cannabis indica
acttaagtctagcatataatataaattaagctaaggggtctaatgagaatatcatctataaaagtgggtatatcttaaagaatataaaaattgaggtaaaaattaaaataagtaaagtgggtatactatgtaataggtgtaataaaagaagtgatttttttttttttcattaatcgtgtactacacgtagtgagtaattgtttaaattttaatttcggcactataaaatatttagaattttctaaaaatttacaagtggtcctaaatagctacaatgtgtgcgatcatgaaaaagaaattgaactctgacccttatctggacattgagacgtggactccaagcacggttccaatcctagactcggatcacgatcccaaacccgaatttagatccgacttaaataaaataaaaaaataaaaataaaaattatagaacacacttttattttttgtatttaaaataaaaaataaaagtagttatagaatacatttttattttttaaaaatacaaattttactctcaacttaatgattaaaaaataaaataaaa

SEQ ID NO: 216665 - DNA, 707 bp, Cannabis indica
atgagattttatcaaattaaatttaataataatttgacctgatgacgttatgattagactagactaattacatttgtttgtatttttttcgtgttaaaaattaatttcaagttggttatattaaaaaaataagctcaacaaaacaaattaatctatgatagtttgattgttcatgaggaaaatttgggtagattacgaggtcttaactttggccgaaatggattgacagtttctcatttgtttttcacgaatgatagtctagtgttctttgaagctaatgataaggaatgtgaggtttttaaggagctactggataactactgtaagacttctggacaagtggttaattttcacaagtttgagaggtgctttgggaaaacagtgcctcaagtgagacgggataggttggctgctgtcatgggagttcgggtggtagaaaattatgggaagtatcttggccttccttcctttgttggtcgaacaaataagagctctttgctgtgattaaaaataaagtttggagcaaaattcgaggatggaaggcatctttattttctgtggctggaaaagaggtgttaattaaagctattttgtaggccattcctacttataaaatgatctgttttcgattgccgaagagtgttataaatagtcttcatcgtatggcggctagattttagtggcgttcgtcttagaaagccaataag

SEQ ID NO: 216666 - DNA, 804 bp, Cannabis indica
tttttacttaattttaacaacttaattatctttttgtattactatgttattttttttcataaaatttgtttgttataacttcatactttcaacttcttttttttttttttctttttgagttagtgatagctaaaataacaatttattttttagaaaataaatgaatagttacattaataatataaatgataaaattttataatttcaaaataggttatataacataatgggcaataaataattaaaaaaacaataaattaactagataacaatataattttaatagtaaaaattacactatatatgagaaaattgtaagagtttacttttttatggcataaataaataatgctaaggggttatgggttctcttgtttttttactatttatatagatttttttatgctatatttttgtaaaaaaaaaatagaaagcccatatttgtaaacaataataagttttgtcgaaaaaaaacgtcggaaaagtcactggtaccgggaaagtcaccggcatcagaaaagtcactggaaaagtcacaatcgctgaaaaagtcacaaaaaaactgtcataattcgtcaccggaaaagtcaccgtcacattaaatattattaccgtcaaaaattaaacttaggtacttatttataactgatagttaaacttaggtatttataccgcaaattactcataattcgttaaaaatgaagccatactttttgtaaaattttatctaaaaaactgtaaaaaaagaaacgagattatttcacaaatacacaaaaataaaaaaaaaaataacaaaaactaata

SEQ ID NO: 216667 - DNA, 1137 bp, Cannabis indica
gcacagttcattttcgggtcttcttggctaccttcgaccggagtggctttctcggccggtttatcagtataaaaaatttcaaataatatataataggaactaaatgttgggcccaagcccaataatggcctggtggggcccactttatatgaatatagttttttttttctttatttaaaagcactattttaattttttttttttttctcaaatgatttagcaataagcaatgttgttaattttctttttttttttttttgttgtattttaactcatgttatagatgttatgaacttaagactaagtgtatatttttcttttttgttgttgttgttaatttttattattataatatgtccaaaatttatttaagttttgatttgttgtgattttaaatggtgtcggtggagttggactttggtggttgttgaactaggacacatgaaacaatggagttttaaatgagatgagagtagtaaataaaaagtgattgtttattatttttcttgttttggtgttatatataaaaaattcaactgtgtacaattacaaaattattactctttactaactttgaacctaagatctctacattactattttagctcaccacacatgatcttccttttataactatatagcctcaaatcaatagctcttttcccaattgattggtgatgatatacataaaagaaaacatgtttgtcattgtaaatattatttgtgtctttggtcattgaaattttaaatgctttcattttctgtatttaatttaaatggcataaagtcagcaaattttgtggctagtgcatgtgtgttattcatatcctatagtacaggtcaaacagtgtcaaagaaagttcatagcaaaaaaaatggtggcccctcactcactgagtagaccataaatgagttagatttgggcagttcaaatataatatagggatgttttcataagagtttttttctttgacatatacattataaatatttaacatcatatataaaaaaaattaaaaaaattaatagtttataatataaaaataaaattcaaataataatttaagggttataatgcacccccttagaaggatgtatcgatgcacctttcacttgttttagcatatagaagaattt

SEQ ID NO: 216668 - DNA, 1081 bp, Cannabis indica
gagagtattttttggtttggtttctaatattacaaaaaccactacactggtttggttacaaaactatgaaaattccggaccaaaccaatccgtaaacacccctaatcccgcggacgcgactcaagctccaaaatttaacgacccacctccagaatcaatttcacctttatatcatcatcaacagttaaaatagcctaaatttattttttcacgttttttagaatattttattattattttcatttggcatccttccctataaagaagagctcctctagctcatttttcacatttaaaaagtaactcataaggtcataacatctctctctagtttctttctgtgcagacgtagcagtttttttgtgtaatcaatctcgtgagaataaaaatttagaagtagacgtagttccattattgttgcgatacagagggtggaactattataaattcttgtattagaattaggccctcgttctgagttagagtcttggttagttagagttggttaagattagttagtttcttttctattattctattagaattcagttagattatcttactattcttgagctatatatatatatagcttcatctttgtaatttctcattatcgccaataaaagagatactgttttctctctcttcttcttcttcttccgcactaatattttgtgtgtgtgctttttactttacatatagttacttataacttttatccgttggttaaatttttgtgtcaatatatatattaattttatatttaagaaaaagaaactaatttaaaatatagacaaatttatgattatattattattattattattattatagctacactgactatttataatataattaagattttatattatctaatataatatttatgttggtaatcactttattagttatgataaaaaatgtatattaagtttaagatatataaataaataaaatatttatattgaaatctaagaatctatatatttatataatgttgttgttagggtatgtgaggtggcggattgtatgagtgttgtttccattttcttattttttcaatttttcttattttttc

SEQ ID NO: 216669 - DNA, 888 bp, Cannabis indica
aaaatgactaaataaaaaaaattgaaattgaaaaaaaattatttaaattttttcctcatcatgcattggaatcggtctttccttctatttcaaaatggaattgtcatttcattaaaatagtggaaagaccattccattagagtgacattccaacactttaatatgcaaccaaacaaaagaatagaataaagcttgtttcctttctttttcattccatttcattatctccaatcaaacgccacctcaattctttcaaccacaaattatatgtgtgaacaaagtattatattatagataattttagaagaagaaaaggaaaagttttattatcattattgtgtttgtatttaaggaaaaaaatatataaaaaaagaacaaaaacatctttgcatgcttacctgaaaacatgttcaaaaagagcaagagaaaaaatgagaagatagatttttgatcagcgaagccatattataatgatttgagtcgacgataattatacgatcggtgtcttttgaattaaagcaaagagagaaatgttttgaaggagtaataggggttgtactcccttttatactaattgtatggagagtgtaagtagagtggtgaagaaaatggtgtataatagcccaataaaaattataaccatggccaccactatataagtcaaaccacactaactctctgtgccataaattataatgttacatcatcaattattttatttttgaataattacatcatggattattaagtttttaatctaaatatcatcacttttaattataattaaacttacttgttagtgtcaatttaaatataaattatgattaatttaattttaatcacaaaaattaaattttattttttgtgattaattttttattattattt

SEQ ID NO: 216670 - DNA, 592 bp, Cannabis indica
cgtatacaagccaagaagtaattacagctttaagattgatgagtccagataagagtccgggcagtgatggcatgtctgcaatgttctatcagcaatattgggatattgtgggtaatgatgtcactaaagtcgtgcttgctgtgctaaatgaaggttattctatggactctattaatcactcattgattaccttgattcctaaaatcaaattgccatctgacatgaatgcattcagaccaattagtttgtgtaatgttatctacaagctaatctcaaaagtcttggctaatagatttaaggaggtgctgccatcggttatctctgagaatcaaagtgcttttcttgctaatagactcatcactgacaacattttggttgcttttgaactaatccatcacttgaagcacaaaactcacggttctaaaggtttttcagcgctcaaactagatatgagtaaagcctttgatcgagtggaatgggtctacatttgtgaggtaatgcgaaaaatgggcttccatactacatggattgagactattcataactgtctaaactcaacaagtttctcatttatgttgaatggtgaggctgt

SEQ ID NO: 216671 - DNA, 1128 bp, Cannabis indica
ggtgaaggcaaatagaggagaaggaagtgaaggctattaggttttttttttcaatttttttttaactttttaaaaatatttaatgatttttaatttataatattattatttattttttaatatttttaatgcgaccgaggagtaattttctttttttaaaatggtctttttataatttattttaaaaataatatttggattaataaaatcgtaccacgtgtatagtatatactatgttcacgtcgactatctatcttggcagttaattattaaaaataaataaataaaaaaagacttaatattaatagaatgtaaattttaaaagttttgccattaaaatttaagttttaaaatatatattagagattataatgcaatttactcttttataagtgaatcgcgtcataatcttaatataataagaaaagctcattacaatttctttctcaattttgtgttcgaaaacacatatagaatttataattttttttgctaatttttacatcataaattacaacatcaacttgattattattattaatattattatttattagttttttgtttctattgatacaaatgttaatgatttattattacaagtgtaagtattgggagaacaaaacaaagaacaaccttgtccattcacaaacaatggataaaccgagtacaacggtggaaacacatacacacacatatacataataataataattccaaatggctaactttgatagggacccaacacttttattttctttttcatatttttaaatgaaagaaaaaagcaaagctataaagttgtggaaaaaaaaaaaaaaaaaaacaatgtgcttcttcccatgaagaattctaacttatctttagtatataaatatccttatctttggtagctaatagaagaaattaatgtttattgagatatatagagagagagatctagagaggaaattttgtttttaaaatattttgtattattatttatttattgagaattgagatggagaagaacatgttgggacttttgaggattagagttaaaaaagggcttaatcttgctgttcgtgatactctaagtagtgatccttatgtggttgttaccatgggtaatcaggtaatttcacttct

SEQ ID NO: 216672 - DNA, 552 bp, Cannabis indica
tttttatacacttaattttttttgtggtaaaatcccattgagtttacttattattacaaatttgaggcgtcagttaaatattaattgaatggccactgtgtacacttgtatatatgtgaaagtaaaattttgaagtcaatacagtaataatttaattggtatttaacggtaatatacaactaacacctcaaatttacaaaaaaaataaataaataaataaacataaaagatttttgccacaaaaaaaaataaaaatattaaataaaaaaattcaaaacataaaaaaatttcactacaaacaacccacatatatatatatattaaattaagcacaaatattacttaacactactatgtagtgatatcttgcaaagaatttacaattctttataataattattacaatttcattaatataaatccactaatcaaatagtctttaaacaagagaaaatacttttttatataaaattcgatacttaattatataaataatactataaacatataaacaccaatttctctaaccataatttacatatgtattaatta

SEQ ID NO: 216673 - DNA, 1128 bp, Cannabis indica
aaaaaaaaaaattaaatataatttctcaatatatcttttatcaatttttaaaaattttaaataattttttaaatatcttttttttttacttacgatgaatttcttaaaatatcttttaaccacttaatttattcgaatctttatttaaaataaatatcagtgtaaaaatctttatttgaataggagatagaaatccttgattcggtcataatgtgggatttatgttaattaaaaaaaactaaactaaacttaattgaaatatattatttttaaaataatataaattaaaatttaaactcattaatgtatttctctattaaaaaaaataattttatatgaatcaaaattttctattaaaaaatggtgtctcataataatatattaaatcaattaaattctcatacatcaattaatttaaacattttaagaagaggaagacgtggaccacttccatgcataacttcttaagatgtgatgaaccaatttttaatttaaaaactaattacaattttttaaaatttaaaagttaataattttcatttatatttgaattataattcacaagatttcacagttggtagataatagatatacaattgtgggaatctgttgcatgaaattgttcttttcctttcgatgttgttggtttgggatttttattttaatttttgttatatagaaaatagtagatatattaaaaaaaataataaaaaaaatagatacagtcattacatattatataattagagagaatagaggaaacatcgactttgccatcatctatagtcaaaagtgcatttagcaatactgttaaaaataatttaatcaatcctacaaattttttattttttttatttttacactttaaaattaatttttttttcttttttacattttgaccaaattctacgtaataactctattaaaactaatagagctacataaatcacaaccaaaattcataaaataacccacacaaaaactaccggagaaattactttagaatctcaaactttaaattttaaaaaaaaaaaattaaaaaattagtatatgaagtaatttcttaaaaataaaaattacactatgcacttaaaaataaatttctttttacattgacttttttattca

SEQ ID NO: 216674 - DNA, 802 bp, Cannabis indica
aaaaaaaaaatacaaaaaatcaatcgaaggaaccgaaaaatttatcatcaaatgatctcaaaaggcaataaaaaattttaagcataatttttgtgaaaatttgctctattatggatttattgaccaaatgcaaactagtatatcaagtcattctttatcttagctatccatggtaccagattcggtctttctaatatcgtgattgaaagacaatggtgttgtttgttagatcccaagattgataggatgagtggaatgtgctagagtataatagctaaaaatggtaattgagtgatggagggtggatattgagtggtgagtaaggggatagtgtgggatatgcaagaattgagtgtacactctctgcatcatggggagattaagcctctatagtgccttaggtttcctcactgtaattctatttactctgcattatcagttcatttgttcttagtgctactgttatttgttcaattgctctgttctatcgttttggttgctgaaacggtactcaaggagattggttcacatcatccttgaactgtgatttctgtgagaataacttgaagtttgaaaccttttcatataaacttatttaagcattgattgatgaatagttttcagtacgaaaccgatggagtgtacttgtaaagctgtaacatgataatatactttgagagattcaaatgggttgctgtattgcctgttctgcagggtgtgctgaaggcaataaatgtgaacaagcttacctctgctgggtgcagagtgaaaatctgggattgctgattggtttgcacagctt

SEQ ID NO: 216675 - DNA, 554 bp, Cannabis indica
tggcaaaaggagttccgacacggcacacgaacacgacacgaagtttatgggttagtgtcgagaaaattagacgcgggtccaaaacggatcgacacaacttgacacgaaataaaaacgggtcaaatacgaattgactcgcttaacacaaatgtgacacgtttgacacgatttttaaatataataaaataaaaattaataataatatataaaatatatattaatgattcaatgttaagttaaaaaattttaaaatttaatttttttaactatgaaattaaaaataatatatataacaacctatatatttaaatatatattttaactttttaaattttattatatatatatatataacaacctatatatacatgtatataagttttttaaggaagcttaaatctattatttttttttacaattccagctttaataataataaaatgagtcacagttggtcgacacgaacaccatacaattttttacgaattgggttagggttaaaataattagacacaaaatataatacgatacaaatacgtgttgccacccctata

SEQ ID NO: 216676 - DNA, 986 bp, Cannabis indica
ctaaaataactgatccccgtattattgcagattgaatttaaactgctatgcggatcagattgaatccaaattataaaattcatacttagtacagattggatgttatttgactaaaaaaatacgaattgaatcgaatgaacaaccctaatacaaataatgactaatatcattcttaatttattttattgccgaaagataataaaaagaaaaatattaagcaatattatgagaagtgacatgtattttaatagttatctacggcaaaactctcttaactatcaattcacttgcagttaactttcaaagctcaaattttggtggtaaaaccttccaaactgttgaactattagcaaatttataaggtgtcatctatttttcacagttaactgccaacatggactgtttatgtatacattcttgtacatgtggtacgtttatattagtacatgtaacattattgtctaaaaattataaaaaaaattatttcaaaatttataatatttttttattttaaattattttatttttattttaatttaattttaaataaatttgaaataaaaatattaggtgtactaatataaacatgctaacatgtataagagtgtatacataagtagtttagtggcagttaattggatgacaccttaaatttgcaagcactttgatttcatttctaaaatttgagcttggagagttaagtataagtaaaacaataatcaaaaaagatttagccgcgattaacaataacacacataataataatcaaacatgattacatgtattcctagctccccttttatctttagtgtcaacttaatgtcttatcatctctttccttagaatttagtttgtttcgatccgtcaacgttttttttgtttcgatttttttatttacttcctatttggaaatagccgatgttaggatttttatgatttctgatatattgaaaaaaaataagaaaaagtggggcagagaactcttc

SEQ ID NO: 216677 - DNA, 565 bp, Cannabis indica
ctcgcgaggggggatactttcaacacctaagaagcaatagttaagtaacatcaatttctcaagagaaggggaacccaacaagaactgaaataccacatcaacctcagcattatccgaacgtcgaacttgtcccaatgacaaagtttttagagatggaaaactaaatgaataagaactagtgtcaacctctaccccatccaacttcaaaatagtcaaatttcttgaattctgtaatacaaacttaggcaagatatagtgatgggatgaatacatgtattctacaggctgttgatctaagcaaaaatgcagttccttaaccttattctcaactgcaaaagctaaccatttgtctagaacttcagccttgcttcttctatagtaaaatccaatcatgtaaagcctaaaactagttatcataacatctttcttgagattcttcaaatagttatcgacatagttgtataactttttaacattattagaaacatcatagaaaaagattgttggaccgaataccagatgagtttccaacgctttgaaaggagacatgttcgaacgacatctt

SEQ ID NO: 216678 - DNA, 572 bp, Cannabis indica
gttggagctatgaacttgctgctttctgatatagatgaatccatatccaagctctcttacttttatatagaagagattttacaaagagcgttactaagtttctgagcacatatgagcctttacatagaaagtgtatactgtttttgttttttgcttttcttcaatgattatttttatgtataaaggtgagatttttatgaagagccttatgggcttgttgaacttcatataagaagagtttgatagctttaataatgttcaactctgtgctactgtcatttcattgatgaagactttggcatccttatatttggagtactcttgtttgtattgtctccttattataattttatagtttatatatatgtggaagttttactttaaatactacaagttgtatagtctccaatgatcatttaatttaaagtttcacacactttcacatgggacaatacaaatttcaactgtacccatgttttgtttttttttttttttttcttactttacctattgcaacccgtttttcattggtctcacaactttcactatataatatattgatgtatattttt

SEQ ID NO: 216679 - DNA, 365 bp, Cannabis indica
atgaggtctgaggtatgattcttactcttactgatttcaccaacatatcatcgacgtaaacctccatgctttcgcctttttttggctttgcgaacattttgttcactagtcgctgatatgttgccccagcgttcttcagtccaaacgacatgactttttataacaatagagtcccatgttggttacgaagcttgtatgttcttgatatgggacgtacatttttatctggttatatctagaatatgcgtccataaacaacataagctcgtgctcagcagttgcatccactaactgatcgatcttgggaagtagaaaacagtcttttgggcatgccatattcaaatcggagaattcaatacaagttc

SEQ ID NO: 216680 - DNA, 782 bp, Cannabis indica
attgtgttgtgactaaaaagtctttggctaaaagtattagtcacaaaaattacaatttgttatgactaaaactaaattagtaacaacattgtaactaaatattatgttttaatcacaaataattttttgttgtgactaaaagtagcaattttttgtaatccaacttataattagttaacaattttttataatttttattaaattaaaataggacacaatacctcgccataaatttttttgtgaagggaaaatgataaattaattaaatattaaaaataaagataattttgttaggatttgaatctttaacatctataatataatatttgtaaaataatttaactatcatctcaaagctaatgttatctttatatatattatattttacatttaattataaatattcgttataactaactaaaatacaaatattttttatttttttcaaggtcataactgcccattcacctctatgtaggttagcttataattacaatagggatttctatttagaatttcgtaaaaatataaaaaaaatatatatatattttttgaaatgtataaataaaaaaaaatacccaatatcaaaatacaccaataatacacataaaaataaaagaaaaacatgtaaacactatatatagggtttctaggcttgaggtcactcaagtaaccggaggacaaattgttgtactctacttctgtattttcatttaattaattatgacatctactgtccctacctctgtctctatcttttcaatttattttatttattatta

SEQ ID NO: 216681 - DNA, 752 bp, Cannabis indica
gccatatttatcataaccttaataatttttctcatatttttgaaaatagcccaaataaaaatgaaaggttggattggttcgatgggccattgctatgccaaatgggtccaaaggtacgtggtcaagtctgccaaaggtcggagcaatagaaactccattaatccattttttttaagatgatattaaattttatacacactttactatatttgatttaatttattagactttaatgtaaattatatactagtaaagtagagaatgaaagtagattaagcaacctactaaaaaaaaaactgaatatatttaataaaatatataaaatattttaattaatagataaaaaaataattattttccaacctatctcattttttaaagagggttttctccaatgctttttcttctacggaaattagtaatattaatatgtacaaaataccattttacctgttttaaacaattttctaatgtaacactaatatgacattaatttaatttctagttcaataatttgaaaaaaaaaaataaaataatataaaaattattttaataataaattatgataatatgtcatatatattattaaaattaatatttgtatgtttacaattaagaaactaatatcaagtaatttaaagttgtcaaatagactctcatcttacatataccggcaattcatagctacataaaaaataggcttttttttataaacgtacaacaaaaaacataattacaaaaaaaaaaataaa

SEQ ID NO: 216682 - DNA, 771 bp, Cannabis indica
tcatagctagatgatgttcaatcatgctttcatgggagaatagaagaccctgaacttcttcgatcgacaaggtgtcgcttcttgatgttatgccagaaactactaaatcgaactcagggccgagaccattcaggagctagaattaaatcttgatcatcaacaggtgctcctgcaattgccagagagtcagctatggattgcactttgtcaaagaattcagagacaggatgattgcccttatgcacatgagaaaattggcccttaagttgaagccgtctggctttagtttgagaagcaaacttctgttcaagagcacgccaaacagaataggaagtatcatagtttgcaacagatgcaagaacagtttctgacatagatgaatgtaaccaagagaggagtaactgatcctttcgtcgccattggagatatgcaggattcgggttaccattgagcagtgtagagggagggggaactcctgtaaacaagatctcatcgagatcatgtccaatcacggtgggaatgacctgagatttccaagaaaggaaattcacaagatcgagtttgacagtaagggaggaggacagagaatttaagaatggattctaagatccagtagcagcgggttgcgaggcaggtgcctgaggagcttgtgttgcaggattcatggcaggtgcctggggatcggaggtagacgacgacatagtcttgcgtcaagacttctgataccatgtagagaatgaaagcaggggagaaaaagagagagagagagag

SEQ ID NO: 216683 - DNA, 687 bp, Cannabis indica
attaagggtcacctttacttttttgccccggccttaaaagttctccacagttctattatattttttagcaattgctaagttctgttttgccttgaaaacatgtgttttttataaattatataattctgtttcattcttaaagtgacagagagagaatttgctcattgatggtcgactgcaaatttgtctcagattcgagtatatggtgtgacaggaaaatgtccccatctagcatcatttgtatcatatgaaatgactcttttcatgagatgggacgatgtactaagccatttatatcgatgatgcttagtattagtattttcaattctcagctttcttagaggaaatataatttcaattatctttgtttaaaacggatctcttgtgttaattcagctcaagatttttattcaatattattttgctccaaaaagatacggcttatatgtttttggaataaaaatttagtttaggtcgtctcatttcagctatcttaattgtaatttttaagcaggttttggccatgctgagcgattgtaatttgtattggaccatctatattctatacccttttaacacaatctggtacaagtagcatgtcgttaattggccttttttttttttttttttaatatatataatctaatgtatctttgtattatattttgtcacgcaatcatttatgtg

SEQ ID NO: 216684 - DNA, 763 bp, Cannabis indica
attaaattaaatcgtattaaattgaatatttaattttaccaataataagataatttttgggtaatattaggtacaatcggtgctttagcatttttcaacagtaaaagttaggtaaatgaatggtatccgttgatgaaaacaataataaaaaaaagtctattattaaataaacgtgggaaaaataacgtccggtcccatattgtacacttgcgtcttatatattgtcaaaacataggacgattatagtgacttgacataattgtgaagtaataaaagatattgtataattgtataattatagtgacttgtgataatgaagttataactttatcataatcactctctaaattgtaagtgactatgtattccataacaagacagaaatccatctaaaactcttaatagattcgattcggaggtgtattaataaaagagtaattaagattttttctttttcaaataaagtttcacatatattaaattatgtttttaaatttttttgacaattaaaaatttccttaaactgttaaaattgttagatttaagaagttttgtttaatttcgtttaatatttctaacatggtgataattgtccatctatcaaattatattttctaaattttaatatatatcaaattgtgccccttaagtataataattttaatagttttgaagaatttttaataatttgaacaattcaagaggcacaaattaatacatataaaagtttagaaaacaaaaattctaatttttataaaaatag

SEQ ID NO: 216685 - DNA, 721 bp, Cannabis indica
acatgaacatatctaaatcaacataataaatatatttatcgttttaaatccatattacatgaaagtaaatcattaccatggctctgaggctagttgttaggaatattttaccaggatctagatttagtaacaaatacattgaattaacatactaaatatgaatatctctaaaataatgaaattaaacacataaaagtttataaaactttacattggttgcatcagaataatatgactccttccgccgagatctctaacccttgttcctttttttcgaagagtattatcaagatctgagcttggatttcttctctccttcgggttggttaccacggtcttacccactatgattgagtacttaacttggtatgtgtgggcatgacactctaacactatagaccgaataggtaaagaacaatgaatgaggttaggcatgtcaaaaagatccatttagttggagtgggttggagctccgacccgacgaatcacctctgatcgaaaacattcggatactttttggatcttggatcagatccgctccgcctcgcctaatttttttttctggatcagatttgatctgatccgacccgattttaatttattttaaaaaaaacttaatttaagactcgtatcccttgggacttggactcagacccggacccagacccgaacccgaacccagacccggacccgagacacagacccaaaccctaaccctaaa

SEQ ID NO: 216686 - DNA, 604 bp, Cannabis indica
ctaaaaataacctaacacatcacattgaaggttgttttctactcagttgtatgtagatccaaaacgaacgatgagtctaaaatataaaacaacacaaagattattttaataaaataaatcattcatataatcatacttttagttatagaaatactaaaaaaaaaataagaaaaacaaaaaaaactaaactttaaataaaactaatattcacgtggctcgacaagtaacttccacttagtaaatatatatatacattactaatattagatgtgaaatagtatatatagaataattctatggtacatgcccttattttgttctcatagtatagaaacattttttaatcattgatgtgtatgacttttgagtatgcacattaattaatatagacttacatatacccaataaaaatattaaattattaaaatagtcttgagcctaaagaaaaaattctgacacctataatctattaaatataggtatcaaataatatatttaaaagtagtgctaaattaattaacataaaacatattgtatctttctttatatttgttattactttatttttttaatcatataaatactaattaatgtgtaattaatt

SEQ ID NO: 216687 - DNA, 479 bp, Cannabis indica
aattaatcatactttataataaatttagtaattatattattcaatttattaattatagttttaacaaattaatgaattatattatgaaaatatttaaacttatttacttaataaaattagttaaatgtatttttttataaataaatttaaaagattaatttttatatattttaaaaataattaaatttaatacaatttaatcattattttatatacctagcaaaaaaacaaaaaactaacatatataaacatagagatcctatgaagttgatcttttgaactacaaacaagcattaaataagaaaaaaaaaaaatcaaggtcttgctgttttttttttccttcatagcatacaaattcagttgattgacttatgaatctttataaaatgattcaacatagtatttttaaaattgattcacatgtgatcaacatgtagtccaaaaaaactggaaaatagttataagaatataataagatt

SEQ ID NO: 216688 - DNA, 671 bp, Cannabis indica
aaatccgttccaaaggtcaaatcagagatcctcgaaatgccctttgtatcacaaccccaaccttctatgtgcacgtcctccaccatcacctccttagtaccattaacccctttgtttttggatcgtttaagaatcacctttcttctcttagatgggccctccatcttttttaacgaagcaaaactatgatcataacttatgggaacatccattaggtttggcagtggagcaagattattgtttagcagattcggttgacagttaggagcataattactttgttgttgttgcaaatttccacccggatcaatatagctctcttccctccaagaaccatctctttttgaacttccctgttcagtattttcaatcccaaatccaattcgataccagtattcttatgtaattaggggcttccaaatcaataaagagcaagtccgacttattatctttcacaatgtccttacccttccagaatatttcaggattaatattaagggaaagagaagaactcaccaggggcacctgagtcggtttcgaattgaaaatgtgtgaagattcaccactaacacccgaactataaccagtaggccgcatcatcaaagaggcattctgtttttcaggaaatccagaggggctttagcctgagttgtattaccacacgggtcttg

SEQ ID NO: 216689 - DNA, 748 bp, Cannabis indica
acaaaatagtgcgaattagataaacacccctagtaatgagtatgtttagaaaacatagttggagatgctcttaggaaccatacggtgcctgacaccataccgatataacgcgttgcgattggttaacaatttcttatattatttattaaatcaaattgcataaaatccaatatcaatttgcaccaataaccatatgttacctcttttgatgttccccttagcatttttctttgtattgtatttgttattttttgaaattagttgatccttcttccatctcaaggaattttttctgtaacgaccgagaggtctaactcgtctttttagttttattaatatatatcctcgaattttattcaaaaaaaaattatgggcttttttttttttttttatgagtttttgtatgctatatttttgttaaaaggttcagataccacatttttattttttccttttcatcctttattatttatataaagtttaataaaaagaaaacaaagcgcacacgcaaataaattgggcctcttattttagttggccctatgttgcagagtctttgcacagtaagactatgaacaactatgttagcatcgtttaataaaaaattaaaaaaatattgtttaaagatataagaaatttatgaatttttttttataataactttaaaaaaagaaaagtataggtaatgaatttcgaatagcttgaactgctagcaaacaatctaacttcaactgcagtttttaaagaa

SEQ ID NO: 216690 - DNA, 838 bp, Cannabis indica
ctgtcgtacatcacggaatacattccgtgaaaatacatcacgggacaaaatcgtgtccctatatatatctacagtactactaaatttaattatttatttatcttaattcactattgttttgttgaaaaaattcctcgtttagaatgtgcaaattttaataaccataattttactgcaggtgtgaatggaatagttttggtattttatgcattctattgtctaaatgtacagtccccctttaaaattattattattattattataaatttttaatagcttaagtgtcacatgttatattaccatgacttctttataaaaattcacagaaaatcttggaccatttggccccattaaagatttcatgcctctaataataataataataagatatccctatctggactttcactttgggaaacaaaaataaatacaagtataaaacaagcaataataccgagtctttataattaagataattaaatattataatattttaaataatcacatatatatttatagcaagagagatgattggagagtaaatcacaccaaatatggattatattcctcctaattcaaatatccaattattatatgatgaccaagctactactacagatgagcttttcaactgatctcaagtaataatttcctttacaaacttattatatccagaaaatgagattattattaacctaagaacatcatcacgatcatgctcatgatcatgatgtactcaccaacaacctctctagaaggcgtgtgagcaagcttgctgcgtggcggcggcaagcatcaatttagctaccaaataccaagaaccaaactagatgacgat

SEQ ID NO: 216691 - DNA, 865 bp, Cannabis indica
attattgagaagtattaattataaccttttattacatacttttaattaacttttattttcgaaattacatgttggaatattattttataatttttttataatggtatttattacagttacaatatcattcttgtaaaattttaaaaaattttaaatagtttataatgccgaaaatagagttcttgatattttaatttatcacgcgcgttcaaaaaacttaaatgtatttttgacattgtattagaaattttttaaaaaaattacaaggatgatgttgtaagtataaagaatactatcatgaaaaaatattccaacaaagaattttcgggcacaaaaattgactaagaggttttaattggaagttgacagtagtactcctcttcattattttttttatgtgacaaagtgctaaattggaacgttgaacagtgatgtggtattattgtcacatatataattcaattaaaaaaaaattatatatagactaattttacattataaaatgtaaataatgtatttctttttttgtcaaggtaattaaataacgtatttcaaatcttagttttacaaaaaaatcaactttttaaaaatctattttctaattttttattttaatcgtttaattaaaataaaattttgatatcttttattatgattttatattaaaaatgaattgtcaatattaatttaataaatactttttaattgaattgtagatatgacaccaaaatattatttatcactaaaatttagtagtatttagataaaagttgtcattaattaatttttaattagagcaagtgttgtggctaatctctccctcatccttccatatcagatccaacatctctctctctctctctct

SEQ ID NO: 216692 - DNA, 1035 bp, Cannabis indica
aaaaattgttgattgtaactttctttccattaccaacatagaaaaaatgtatttgtttgttttgttttatgtcctagtgttaattgtttatttgttggtatcgtaattaccaataactacatgtattgtaacaacaacaactacatcaagtatcactatttaattagggaaatttgtatttatataacttaaaaactaaaaaaataattcttaaaccaaaccttttaaactaaaaaaattatgacattttttcttaaaaccccaaaaatacactctcatgattcaaaccctttctctctctctacctcaaactctctctgcatcatctctctctctctatctcgctatcccacaagcccacaaccacccaccctcaccaccacctccgacctccgaccctcaccaccacctccgaccacccgcaccaacaccctcgacccagccccctctctcggaccacccaaacgtcgcaccccctcagccccactctctcttcctctctctgaaatcgaaaaaaatattcaatttaaaataattgtccggattagattggacttaagttattatatggactgaattaatggaattcaaaatataaatatcacatttaatgtagataggatgacactaaatgcatatgaacaccatatgcttctttctctttttatttgagctgagtttcatttttacacacaaatctctctatcaaattatcaataatccataaataaaataaaagtaattatgctttttagtacaataaaataaaataaaataaaaggaaagtaattatttaaaccaaaaatcacgtatcgatcaatagaaataaatatatattttttgaaaaaaaaaaattaaaaatttaataaaaaatatacacaagttacaggtaactaaaaaaaaaaattaatacttaattaaaacattaaaatataaataaatttattataatatataaatcgtgccataaatcctaacagaaacttgatatcaaaataaaattatacgtatactatgtctgaaaaaaaactacgt

SEQ ID NO: 216693 - DNA, 687 bp, Cannabis indica
gctttaattagaatttctttcccagcttgtgaaaagagacccattttccatccttgaagtttggcttcaactttatctctaattttgccaaaaacttgtttttattccttcccacaaaggtaggcatacctaagtacttggtatgatttttgccaagagtgactcccaaattagatgctaaagccgtggccatagcatcactaatcttcccgccaacacacatttcggttttgtcaaagttgatacattgacccgagagtttctcatatgttgccaaaacttccttcaagctagagctttcttccatagttgcatcaagaaatatcaggctgtcatccgcaaacaggagatgggacaacctttgttccatattaccaaacctcaacccatagattttcccagctctttccgcttcaaaaatcaaacaagagagaccttcagaacataatagaaatagaaaaggggatagtgggtcaccttggcgaagtccacgtttaggaatgaagaagccttttattgaaccgttgacgaggatagagaaggagaccgaatgaacacagttcataatctttataatccactgatgatcaaagcccagagaagtcatcatagcttctaaaaagttccattagactcggtcataagccttggacatatctaacttatcgctatttttttcctatttcc

SEQ ID NO: 216694 - DNA, 745 bp, Cannabis indica
tatggtgaatgttacattacatgtacctccactctctcatcatgactacatttataatgaccatatctaaaaaaaatatatacactatatatttttctgataataatattagaaaaaatatctatgtaacgtaactgattgcgtcatcagcgaaattttagaaatatagaaatttttaattaagttatattttttttttcatatgtgctgcctattatcaattgctcaaaaatttgtttcaatataagcaatatctaaatgtcttagaccaaaaaaaaaaataaaaaaattatagataatttgtgcaacaaatattataatgtgattaaaatttgcatgtgttgtacattattgtttttgaaataattgtgattaatggcctgtctatatatcccattaaccatttgtattattctttcttggaatattttttttatagactaaggtcattcacatcatatgtttttaaaataaagttcttttaaaaaatatttaaatgaactaaattaaaaccattatatgagatatacttcaattttttttttcttattttaaatttttttataatttactatttcttgtctctacattacatttatagaatattattaattgttcacataatatatcttattaattgtttgaggttttaatttttaatattatattatatttatatatatatactatttgaaatgaataaatatattaaaaattagaaaaaaaataaagtacttaataatat

SEQ ID NO: 216695 - DNA, 686 bp, Cannabis indica
tagacgtcttatatgttttgacatgtagagagtttttttagtatatagtttttttttttataattatatatgttataattatttatgatcatttataaatatttaaaaaaatttaaatagttttacaatgtcgaaaataaaatttatatattttgtttgcacacatgactagtttttcttagtatagtaaacaattcagaatttccttaaaatatataagtaatcttaaataaattataacgtacgtaatcataaaaaaaaattaaactaaattttgtaaatagaaaaacagataaaaaaaaaaaaattctactaaaacaacattttaattttaagaggtgtactacaaaaaatttcacaattttagtgtcaataaatctagagtaatttacgacataaatacctaagtttaattcccaattacaaataaatgcctaaatttaattttttacggtaattatacctaaattataattttgaaacttttgtaagtacttgattaaataaattgtcacgtgttaatccctcattggtacaagtcactaaatttttattatttgaaaaaaaaataattcaaatataccaataaaaaaaaatgatacgtgaaaataataagttaacattagttttccaaaaatataacttaagtattattacttaaacaaattatttataaatcaatatat

SEQ ID NO: 216696 - DNA, 577 bp, Cannabis indica
cataaaataatatttattttttttgaatggaaataataactttattaaatcaccatctctgttactaaactaggtaaaaaattagttgggacaaactctaaactgaaactgcaatcaggatataatatagaggctctaacaaagttatgagccaccatattagctgatcgtctaacaaaataaataacaacattttttagatctttaaacatctccttacaagctttaacaattttgaccaaacatggaaaccatgttaattgggcttcgtaaggcttgaattactgtgaggcaattggtttcaagtattacattcatccattgtctcgccttgacccaacttagagcctcacgaattcccattgcttcggctgttacaggaagaaatggccttggaaaataatatttattttaaacatacctttacatggtattttaaacatttttattttaaaaaatattactaattatttcttgttcatacctcatacatacatgatgatgtcactatgtaatcatcactacccaaacctttttctccctatttccttttttctttttttttttccttttctaa

SEQ ID NO: 216697 - DNA, 865 bp, Cannabis indica
ttttttttttatatacatctgttcgcccagtaggccttcttttcagtcaagatgaccagccaagcagtctttaaacttggaatgtatttttcatttttcaaacaactggttgactgggcagccttaaatcctcagtttacatgctttgttatctttaatgaattttgttccttgttatgatcatcgtgcaactgtgtttgttttgttttttttttcagtgcttgttatttgtgtttaccaatgctttgtacgggtatagttgccccccaagtgaccgagtagacttttgactcttggtcacttgcatttcacaagtatgttttttttctgtttgggtctatggttacgggtaaacctttgtacgcacttaatggtaaatttataacttgctaaaaaaattaatacaatttgaatttaaataaatatctttattcatttattggtcgaaacacacttgttattgtagtaacttaaatcacagctattatactaatctaatctgatctttagcttaatttaaataaaaaaaattgcataaaatagaaattgtactttcagaagtggtcattcagcttgagtactttatcatttcatctgaacctttaggggtagtccgcccagaaggccacttacttaagagtaaatgttctttcgttttgtacttaagatggtcatccgacctggtacttttactagtagtatttcgttaaatgttccccattcaaatacgttggtatcagaacgagttgcatgtttttgtcataattacccaatttgtatgcacctgattctagaatttcaaccacttgatatggtccttccctgttctgtctcagcacatatgccgtgctgtctttggtgttca

SEQ ID NO: 216698 - DNA, 535 bp, Cannabis indica
aattgaagaaaaggagtctcaacagtattataaatgggtcaacttaacttatgttttgggttagaaaacttgtaattatcttctgcctacattatatactaacaaaaaaaaaaaaaaaacttgactttttgttctaataaaacgtgtgttacccaaactcatttatttcgtgttattttcgagttgtgtggtcttgtcgtaacccatattgcaagccctgaacctaataatttgtataatacttaattaatgttgagagaagaattattatccaaccccaaaatataagtttatataattgaggttcttgtagtcaattgttaagtcccaatcatataatagttgtaaattaagtttgatctacttgtatatatattaatatagatagttacgtacaattatggccacaaacacaactatattcggtataatagtaattttgaatattcttcttgtcttgtgttacttgacaaaagatttttttatccactgaacaaattagttaattaatcattgcacaaaatatataatttta

SEQ ID NO: 216699 - DNA, 640 bp, Cannabis indica
acgaaaagggtaaataactaacaaaaatagaatttgggtagttttgtcactaaaatattaatttagatagtgttacttgttaaaaaaatataaaatataaatgattttgcccttaatatctcttactttaatatttattgtaaggtttatatgggagaaaaaattgaactaattttcagttaatagattgaaatttgttgtcaagtaggtttttttttttatttaatttatgggcaagtagaattttaaacgacaaaaaggtcttttaagactttttatttatttatattctcacgatttgccttgtctttatagaatatatatatataatttgtttgcaatataagcaaaaccgaccttagctcagttggcagagcggaggactgtagttggctataaccaaatagatatccttaggtcactggttcgaatccggtaggtcggattttaatttttattctttatatggtgctattttttaattctccctgctcgtttttagtaattattacaattaaatttattttctcagataaacaggaaaatttcttataaagaaaatgaatagtaccaaaataatccttctccaaagtagggcctcactcacttgtactgtacaggagcatccttcttggatgca

SEQ ID NO: 216700 - DNA, 800 bp, Cannabis indica
aaataatatggctgtaggcacaaaaaaagtgagttaatgtggctcatatgcaaaatataaatggagaaaagagagaacaaaataaataataataatttaaacgttattaaatatgtacggaatgttattaaatatgtatggaagataaaaaaaaaatatcttattaaattaagaaaagtatttttaatattaaaatagaaaaaaaggtatcatatgtaaaaatctctttattaaattagtctttagtcaaaataaaaaaaaattagtcttacaaaatcacaatttcttacacgttttatccggttaattgactttgagaaatttctatgaaagctcaattatacatgtatttgagattttaacattatttaagattatctactaatattttcttacttattttgtaaacaaatcttagtcgtacttaattaaaattttaattggtcgttcttttttctctccctgcaattatttgagtggttattataatattattagaagtaaaattagataacgttccttaattgttacttgttataaaggtaaattgtggtataaatatttaaagtttttgaattttttcttttttcttttttttttttttttatttttttttgaattacaaagtttttgagttttttaattatcataaacttgtataaattttttttagcggtataaatatttaattagaggtaattgatcttattatgtttttgtaccaaactaaaataatttagaatccaggtccctacttttgttcaattttaagacactaattagattttgtacgtataaaa

SEQ ID NO: 216701 - DNA, 562 bp, Cannabis indica
ttattttttgttgtttcataatttattgagagttatcattatgttgatttcttattattttttagtttttttcactttttgttgagaaaaatagtgtattttgtagttttaaaactttaaaaacgtatgtttataaataaaaacttcatgccatacaaggtggtgacatgacactctaaaatctctctaattagtattatttgttgtcttcttaattttctcatttttttaatttttaatttttattaagtttatagttaaactctaaacctaattatttttttttttgagaaaaataatctttattcaaactaaattagccataaaaatgtcgagtagtgatgtcggagcatcactagcattaatctaacaatctgacaaagaacgagagctgcgagcaataaaatgggcaactctattcgcagatcgaaatacaaagcacaaccaacattaaaaaaggagtttaataataactgcactcatgaactagtaaaccaaatagagaaggcatttgtattaaaccattaagagcttggattgaagttagactgtccaactccac

SEQ ID NO: 216702 - DNA, 639 bp, Cannabis indica
agttttcagtcctgtagtgtgccgtaactctctctctctctctctctctacactctctgacacgccactttctctatctatagaattggtattttttccccccatctcaagtttgctagtgtctcaatgatttgagtagacactgtaatagtaagaatcgttaatcatactaaatctataagctcactcttattctaggtgttgaggctgattttgaagatctggtgtgaatcttcaacaagttcattatcattttggattggatgatagaattgacatacaaaaagaaataagggtccccgaataggcttcgagaggtaaaatctattttcatgtagttagatttaattaatgtaattgtcttgagatcttggatttatatttcatgttagatgcaacatttttttttaaaaaaaaacctatttctattttatgattccgtagatactttgatataaactataaaactagcaggtttgatcctatcaaaagtgtagagaagtctttggacctaactgtagggttatttatttccaacgccatcctttgctcgaactaaagcacacgttccaattgattgccttctccattgaacaatgtgaaggttagcatcatgaagcccttaggctttagctcttc

SEQ ID NO: 216703 - DNA, 577 bp, Cannabis indica
caaccatttcgaaagcactgtaatcattatttaatttattatattaattcggctaaaaggcttaactgaacaataaaaatgataaccttttcaaaaaaataataactaagaataactaaattcatattaaatgttacaaccttagaacacgaacaaccccaaaaaaatacgaaaaagaaaatgaaaaacctgcttgagatcttgccgagacaaatttgacaaagcaaagaacttcaaagcatcattgccagtaatgtggccatcaccatctgattaaagaaagcaacaaaaaataaatacgaatatgacaaaacccaaaccttaaagacaacaaattgagaatttaatcccatagtaggctgtttcatctcaactcaatattcaaaatgaaaaaagaagccataccgaaacaacaaaatatataatgtcagaatcacatatacctaaatcgaagaaaagtttgtaatcgcggagaagaggtgacgattcacagcgaaaatattgtgaaacaacgagaagatcaaagaaaataggtgaggcgcgaatacaggtcgatagcaatatgagtttgggtttg

SEQ ID NO: 216704 - DNA, 825 bp, Cannabis indica
tcaagcaaacttttacatatataataggaaggaaaacaagctcaaaatataactgattattacacatggtaaagcatatataacgtagtaaacacatatattatatattagctaggttggggtaggtagaacgtacgtacgaacttagtattatttttgtttattaggccattactaaagcaaccgaatcattatcatcattacggccagaagaagtagtgtcgtgatcatgtactgaggcagtcctccgcaacttaatattattggaagtttcataatttgtatgatagatgaagagagaaatgagaaagattatagtatggaccacaccgatgatagcgagcaacccaatccacatcttaaacgacgtgtcgtagatcctatttatggtatgtgcaatatgataaggagtcactatgtacatacccttgagaaaagtaagagccataaacgtcaaagtggcacacatggccatagttaagagccaaacgcaagtcttgctctttagagggagtcctccaattaacaaaagtataacgcttagcgaagctataaaagccgagctgttatatctaatgaattggagatagtgagattcccaggcatgagccagcaccgacgttccagctatacatatatttacgtcgcagtcaaagtaaacatacccatcgaacgccacgtggctgtttgaggtcgtcttgccagacgccacctcgtgggttggtggccgtttgaaacgtcatcgttgctataacggtggccaccaccatgattgatcccctcatctcttttagccattctcctttgtagtcgtccaggtcgctc

SEQ ID NO: 216705 - DNA, 945 bp, Cannabis indica
ggtggaacttactttgtaaatacgcattgatatgtttcatataacttttaatgcttttttctttttctcgaaagggatgccttctgagtttattgattgagtaggtaagcatttatttattgttctgtttttgagtacgtaactgtttacatattgtttgttataagcttaattataaagtaaataaaataagagggaatatagttgcattgcacaagcacacgcataagcttaattaattattttttgttgttgttgttgttttctttatagatgttgtgtggtataaaattgcataccgctttaaaaataataaataaaaaagtagaatgaaaaagtacttcactttcaaaaaatttaaaagtctacgctataaactaaagatgggcaatcacattcacgcggttgttgttggctgacgaactgcatacatagaattaaccctactatattgcctcatccataacattcaatttcatcaacaagaatttcacaaatacatatctattctttttgtttagactatctcaactacatatcaaaaactaaggtatatttactataaaaaataaataaataagatgtaaatatttattgaaaataggcttatttagattttttctccctaaatttggacatgtattaaattagctccttgaacttttcaggttgtcaaaaattcttttcgaactattgaaattgttagatttaaaattttttatctaattttattaagaaaagtttgaggtggatgaaaatttagagaacgcaatttgatatatgttaaagtttaggaaacatgatttaatagatattaaagttcggagccatatttagtacatgtacaatcgccacaatatcaaaattggacaaaaatccttaaatctaataattttacagttcggaaagaattttaatagcttgaaaaattcaaaaaatataatt

SEQ ID NO: 216706 - DNA, 847 bp, Cannabis indica
  modified_base (752)..(752): a, c, t, g, unknown or other
  modified_base (823)..(823): a, c, t, g, unknown or other
atcatatcccttatttggtccaaatgtgcttgcacaaaaggattcgttgttgtaagaacttggctgactggccctccttggggagactgcagccctgaatatggtaggggctggctgggcatactctaggagagtgtatggtggagttaaaccaaccgtgagcttgggtgttggccttggttggtcactcctaggtatggagattgatcttggtcgatcaagcctatgatgggtagttgctcatggtcagtcaaccctgtgctgggcagggccaggctgcccgtgaccccctagttggctggtgcagccggtgtgttgataggggtagatcacaccagttgctggagttaggtgaatctagatacttgaagtgattagactcacttctcaagttgctattttgggtgtttccacccattcccagacttggctagttgaagattggtctctatgttacttgatcccaaatgccttagggagggagttcactcccttagctagctagaggtacacctccagagggctagctggccaaaggttggctaatgggggagttactgagcttgagatccctcgccagccccccagactattggttgccgagatctggctgttctagccattagacctttgtggaaaagcctatcctccttgggtagaggaaggtctgtcctggttcatgaagaacctagttggacagcctgttggtagccctccccgatctgttgactagtcttccttggagtggaggntcctagcctcttctagtacgttcttttcattgaaccaccttatcaagtcgatggcttttctgtgtcggcgntctagctctcatggtgagattgga

SEQ ID NO: 216707 - DNA, 911 bp, Cannabis indica
gtcatgtaaatatcttaaaattgatctaacttatttttttaatattatgatatggaaaaatgaattagctaggtctcaaattttaccttagatttaaaagggttacaacccaacctaacccgcttattatgggttgggttatactttgaaagtattttgaatgagttataattttatagcccgtaataattgggttagtaattggcacattaaaataccctcaacccgcccaactcaacccatgtgcagccctagtcgctagaactagaagtttgctcaagtctcttcttccctttcctccaaaaaaaaaaaaacagaaaaaagaaagatagtctatttttccctcctcttcattttctttgatcttttttgatccgctttcttctttcctacaggttaagtgttcaggttatgtttattcttgcactagaagatctattgttttctatttactctctttgtccctcaaagtttggatcttattaagtctttgcatttcagtctttatattttgaggaaaaatggtatattttatatttaacttagatattattattagttttttttttggtggtggagcaatgactgttttgttatagattgaggatttatttctttaatatgttgatttatttgtatttttcatttcattttgcagatattgaaggattcacgagaaatgatttggggagttctccgacgtagagttgcttcggtataatctatacctgagttttttttttcttttctaattttgtcattggttttgtaatggacatcctttattttaagctagttctttctcgaagtattgtttgattatgaaacaaaatatggattgttttttctgaaagaaagtttttttaactttcaatagtctcaggtgctgggacaagcctggaaagcaaagc

SEQ ID NO: 216708 - DNA, 1227 bp, Cannabis indica
cagatgcggtttggaatagagttagtttgcctaaacatagatttatgttatggcaagctttaaactctcatttgctcactagggatcaactaattcggtttagtattcccttggagactcttctgttagttgtttgtgggctctttgatgagagtcatacccacttattttttgagtgtagcttatctacgaaagttacagatgagatctttttatcgctgggtttttctcctggccaagggactatgggagttggatcacttggctggctagcaggacatcaggaatgattgttgttgttataatagctacactggcagcttgtgtttattacatttggtctaaccgtaacaaatgtctttttgaaggctgatcaaaaaatattgttgctatagttaaaaaaataaaacaggttgttgtttacagattctaccatgtaaataatatgaagttattcttagatgaaagaaattttcttgtaaaattaaaatataatctttagttttttgttgggcaactatttttactgtgcctttgcttgtattgttttgattttttgctagtaattaatgaagtttctcttctaagataaaaaaaagtattaaagtatcgtattaatttaagttgatttcctactatcttatgttttaaaaattattaaaataaattttgtatgaaaaatttacaaccaaagatttaaaaaaaaattataaatatattaatacagaaattttttatttttatgctttgaatattttaatttacaaaaatacttattcagtataaaacaataaatcgttctttcggttgttatatagtatatttatagttgtattatagttgtcatgaggttgcttttaattattttatatgtttatagttgatttatagttatcgtaagattgattctcgttatgttttagttgtttcttattgtttgctgagaaaagtgtacctttgtaattttaaaattttacaagaatattttgtaaacaaaaactttaggtcgtaaaattatatataaatcataaaaaatggtattcttattattctacgaattggtataaattttatactctttttatttattatttctctaactggtatccaaaattcaactactaaataccatcaattatatattagtaacaactacgtgcatcaactactaatgattatacatcttaattttcttcttctaatatgcttagatttagtatatgttat

SEQ ID NO: 216709 - DNA, 1195 bp, Cannabis indica
atgaaagtcatcaattcatgctctgctattgcatctacatcggttaatcctggtagtgtaaagaaatcctaggacatgccttattcaaatatgagtaatctatacaagttctccttgtgccagtttggtttggtacgaggactggattagagatccatgagggatagaaggcttctcatataaagttattggttaatgatttatcaacctcttttttgagcacgatttttctctcgggatcaaatgaccgttgcttctaacgttttactggataattaggatcaatattgagttgatggcaaatcacattctggtttatcccgaccatgagtggctccaactaaactgatcttggtttgccttcagaatagttattaattgctattttagttctttccccaaacttttcccattataaacacactttatgggattgtctgggtctaaaagcaccttttctaactcttcaattggcttgagttggttgttatcatcttgaatcaaggatccaattcttctatttccttctcgatttcttcagccagaattaccattagtggatgactagctcttctatttttaagttccactctataacattctcaagccaataactggtcgcccctacctgttcccactccagagtgcgtaggaaattttaaggacaagtgttttatcgagcttactgccccagtccaattaaagctggacaacccatcaacacattatgtacggaagggatgttaacaaccaaaaactcttgcatttgtgtcgcagacaatggtagtttccccatagataagggaagctcgattatgcctaaactcgccaccgtcgcttgtgaagccacacaaatttaccatacaaggtcttagttttgcctcttctaatccatcttcttcaatgattccttatgaaggatgttgacagagcttccattatccaccaatgctctcttcactcttttattggcgagttaaattattatcatgagaggattcgcatgtgggtaccgcacatgtttcaaatcttcctcaaagaagacgataggaggttcatttgactttactttcttcgaaggttttaaagcgatttcacttcattactgtacctattttgtgcattgttactatttcctgcgaggtgtggccctccagaaattaacaaagatagtcctactaaccctgtacgtagg

SEQ ID NO: 216710 - DNA, 1159 bp, Cannabis indica
tacataaggtactatttaaaaattacattcttacgtttaaataatttttttatatttttacgagtttccatataaataacattaaaacaacaagaacattacgtaaaagtaacatgaaaataacatctaaataatatcaaaacaacaacaacaaaaaataacatataaataacaaaaaatcaacaacaaattaataaaaatacaacataaaagaccgtattttttgtaaataaaatcaaaaaaaccgtaaaaatatttaaaattccgtaaaaccatatttttgtaatttttttgttgtttttgtgtatttatgaaataatcccttaaaattggatatttctttaaagagttatttcagtagatctccatctattttgacattcaaaagagctttttaatttatttttgtttcataatcatatacgttatagttatttaagatcgtctgtaaatttttaaaaaattctgattagtttaaaatgtcaaaaataagatttaaacatcttactgctacacgactatttttttttatatatgcgtgataatcaactatttgaaccttattttcggcacggtaaaatattcgaaattttatgaaaattaaaaaattatcctaattaactaccacgtacgctattataaaaaaatagaataattttttttaaaatacgaaacaaattagataaaaagctttttaatactaaacttagataaaatagtgttgtcgactgggttactaagtattgaggttgagttagattgacaattattgcaaactttagtagtagaaagattttgtatggcaatagtttgtagtgatatagtttgatttgtaaaagtcttaatatgtttaagtttttattttggaactcgctctctgaatattattactcataatattactaaattagctctctcttgatgatgaagtttggcgaccgggattatggacatttatgtaagtcatttgatttatttttagcgttggtctaataataattatctttcattcaaaaaaaaataaacaaataaattagagagtttatcaaaaaaagactggtgtactacataaatttcgaacattataatacatatatttaaataataattagtcaaaacaaattgtgattaaattcaagtttacttatttttgatttag

SEQ ID NO: 216711 - DNA, 536 bp, Cannabis indica
tatgccacttacaaactttaaacgttaagaacttatgctgctgcatttttcttaataataaaatgtagatacacatagaaaaaaagacaaggagattcgaaacatgaaagtatcttaacaaatttgttctgtttaactactatatatatatatgaaagtaacatttgtatattaatatattaggtaaattgtgatataaatatttaaagttttaagtttgtaagcggtataaagtcaatatttatttttagcggcatattaacacagagactgtactaacaaaattagagaaaaaataaagtcttataagctaaaaataaacattagatttatactttttgtaaagcttaaattttaaatacttatgatactatttatcttaatatatttttaaatcttaaggtgaactttaaccttacctgaacatccctagatccacatcaatgtttataattaaaagaacaaatgatacttttgttcatgacttgctcaattattagattacagctgtgcttaatgatgtggttattgtttgg

SEQ ID NO: 216712 - DNA, 613 bp, Cannabis indica
ccatcaactcctgtcaagttataataatgtattaatatgtatacatataaggtatatatttatctatctatctataataccaaaatttgtgtaaatgaaaaagatgattaaagagtaattaatgttatacatgtggttggccataagtagttgcggcaaggaaagctaagttgtgaccgtaaatgccaatttcctgagttggacccactatattcgagaaccccattgttgcacccgatagaattttgtgaaagaaaatggccattctctgtgttacaatcatatataaatatttataaactagaatgagaataattaattaaaaaaataaataagttaaaatataagataatcagaaataatattttattatattttttactaaactatccaaaaaaagtagaattttattttgtttacattaagaaagataatcgaaaataaaatttgactaaattagcataagtatccaaagttttatgtttgtaaacggcataaatctaatgtttatttttagtggcataagtatccaatgtttgtaaaactgtaatttttctctaattttgtcagtatagactctgttattgtcttaactagagcacatataaggtct

SEQ ID NO: 216713 - DNA, 596 bp, Cannabis indica
aataaattctatgattattgtgatttattaaaactcttttaatttcattttactaatatatgcatttttatatatattaacttttgattatccttttaatttctcttcaacttttcttttagaagaattaattatcttctactctgttaataaaaagttatgattttggcggaaattcatgcttattttacggtaaaagaagttataataacaattaaagtgtgtttaatagctttaattatatctagaccactaatttttattcttttaaatcacatcattattctagatctattattcctatttttcatttatgaattaacatttacaattaacaatatttataatactttcaattggttgcccacttgccccaatgtaaattttaatattaattgttatggaatttttacagtattaattgaaaatatactacatggataattaaccctgtaaattaggggtaagcaaaaatcgatttgttcggttttttaacaaaaaaaaaaaaaaaaaattaaattcatttttcgattttcatagttataatctgaaaaccaatcgactattatacaaatgtaaaaaaaaaaactgattgt

SEQ ID NO: 216714 - DNA, 591 bp, Cannabis indica
aataataacaatcataataataaataaacaatcacacttgcgtaaagcataatgagaatggaatatatttaagtaagttgccgttaatttaaaaaatatataaataaaccataaatacggaaaatctcatacttctcgtaccatgataactccatactccctcacaatagccgttgactaaacaggagtagttgacttcatcagcattcaacggagaatggatggtgatgatgataacgtaaacgacgtcgttttctacacgtcatccagtctagccgaggtctcacatatttcacagtcaattataattagtcatttatctatatttttctctaaataaataattaaataataataaataaaaaaaacgcagacaaaaacactcactttctctttctctctcttcccccctccacctcctcctccttcttcttcttcttcttcttcctctctatcttctttcttctgtgccctttcagcttcgcatcttcaactccaccacagcagccacgacgcgtcgtccttggagctggtttttcaagcgtactcctttggggagagactcttctctccaataaaaaagaaaaaaaa

SEQ ID NO: 216715 - DNA, 525 bp, Cannabis indica
agtgtataataataatgtttccttttaacatttttaaaattttattttatttttttaattcaaacttttacattacaccattcttaacttttttattttctttctaatatataatattacacatatatataacaaagttaaaaaaaaataatattaaaatatatttagctcaataaatagttatctttatatttaattaagtcttatttattgaaactaaaaaaatatgtaaaatagttaagatttattttagttgttgaaagtttaattttataatttcttctttaaatttgaattattttagttggatgagtgcttctaagattttatcaacaaaaaaattatattcttttagctgaaacaatcatatatacctatttcaaaaaaaaaaaaaaaatcatatataccacatgcttttttatcttgtcactcgaggatataatacgacacctattctgaatgcaacgtatattaaaaggcaatcttaattatgaccacgtgtatatatgtacatccaatagttga

SEQ ID NO: 216716 - DNA, 577 bp, Cannabis indica
agcccagccaggctgcaaatgatcatgcggcaggatgaggtgtcgagaaacctcggcgggtgcagcctcatgtgcgtgccatcacgtgggcgagagcaggggacaaccttgcccttgtcccacgcgcagatgcaacttgtccaagtgctctgtgcgtgcgattgctcgaccctgtgcatcaatggaccccaattttcaaaacaccataactttctcaatttttatcgtaatcgagttccgtaaaagccaaaattgcttaatttttcacaagaaatccaaataaaatattttcatggaaaaatttcgtaattcacattcaatcatcaaataatcacataaaccaacatgaacacatccaaatcaacatacaaacaatattcatcgttttaaatccatatttcatgaaagtaaatcattaccatggctctgaggccagttgttgggaatattttaccaggatctagatttattaacaagtatgttgattaacatcctaaatatgaattctctaaaataatgaaataaacacataagggtttaagaaaaccttacattgattgcaacagaatataataac

SEQ ID NO: 216717 - DNA, 718 bp, Cannabis indica
aactccgaatacgaatcagcatcgttcgatttcttctcccctaactccttggccttcttgatcacactctccaccttatgccgacccgagaaagcctcagcaatcacttcccaccgcctcggcttccccaccggattcttcaaaagctgctttttcagaacctcaatttcctcctcaacccattccttctcttctccccccaaaactacaaccccattgtcatcattcttcttgttcttccgttctctcacagacccattaagattttcaaccaccggtactgaatcaactggcacttcctcatatcgacgaactttagacctcttctgggaacccctcttcttggtatcctcatcagattgggatgactcttctgggagatcaagaaccggaccttgaccaacgctaatgtcaccgcctgtgaaggaagcaggggcgaatgggcctaaaatgaaggagaaggagagccataagaggagagatttaaagggttcggattggaggaagaagatggagaggaggaagagaaggaatgagagtgaaactgtgaggaggaggattgggttgcatagcttattggtggggtgagtttgtggatctgtggccgaaggagcaggttgtggccgtgccttaaaagaggaacttgggcctggcatcctcgtccaagaactccattttcagtccaatggagatctctcagccccccgttttgttccta

SEQ ID NO: 216718 - DNA, 577 bp, Cannabis indica
gtttgagtgtatatttaatttagatgttacaatttttttcttaatattattaaatgaataattataaaaaaactacataataaaataaaaatttagaagaagataaagtcaccttacttatttttgtttcaagattttatgtagatataaaaatttacaataaatagataactaagaagacaacttaaaataaaataataatagaaattaattattaataattaaaaacatcaaaaaaattatttaaataattaagtttattaataacaaaagaaattttttaaagtaataatttatttagaagtcaaataattaacattaataaaaaaaatgctacataaattattttcaatatattaattatatgatgtaagttataaaaatcaaaaaacatcattaacattaatataaatgtatgtgatttgaatagttaagataataaaaatttaaagctcatgattgattaaaggagaaaatatatattaaaaattatttatttattataaaaaaatttataaaattaaaattataaacatatatagcctttgttttcttataaatatatacatgtatatat

SEQ ID NO: 216719 - DNA, 507 bp, Cannabis indica
ggattcgctttctttgtgtacaagaccgaggagggtgcgagggctgcgcttgttgacccgatcaagaacattgacgggcaccaagttgcctgtaaattggctgtagataataagaaaactaagactggtgctcaggcttctactggatataccggtgacaacgtggtaccacctcatccgtcgatgcccggctcttttcagggggcacattatggtccaccacagccaggcaatatgtatcaaggatatcccggtggagggcatcatgggcagggccctcctcaaccactgcctgctagtaattatgggccgccgtctatgggtaatcaggtgccaccttcaaatattggatataatagtaactttccaggttcgtatagcggtacaatggccggagattttagtggtcggatgcctcccagttctgcaggaccaggctacctagaccattcacagtatgggttaacttcatcttctttaccaactcagcatagccaacctccgcct

SEQ ID NO: 216720 - DNA, 622 bp, Cannabis indica
gtggcttgatttttgctggttcgtcaacaatggcaatgagtcgaagaagttgcttttttagaaatgtcgatttgagttttttttttttgaagtcgtttgagtttcttaaaaaaatattaagtttttgaaataaataatttatattacgaatttagaaaataataaattgttataaaaagtttaaacataaatttaaattttaaaaattaaaagataagaccttcaataaaatccattcacgtggacattttgacaaagttaatattgaaaaactaacggctgcacttaattattaacggggagtagtttcaccgccaaaatatttacatgagttaagtgaaacaaaacaaactacatgagtagttttgccgctattgtccctttaattaatgaaaattatttcttgataaaaaaatattatttaactattttttttattttgacgtggtgaagtaaagtcacacatgattaataatgcagcaaactataatcggcagtagaacctccttgaaccagaataactcattgtctaatcgaaaggcatgttttgtcaaattcacttcattttctctcacttaattaaatttttactaacttaaataaaataaaaaatagaagttac

SEQ ID NO: 216721 - DNA, 647 bp, Cannabis indica
ttttcagtcttcctttttttaagcaagcaagaaaatattgagagttgtcatccccaaattgaagccatgttattttactcagctgttgaataaagcttgagtagtttcgctgggctatgactaactcaccatacttttcttgctcatcttgctgcaactgagtatttgaagggttattggacagtttgtcttgagctaaattgaacttctccttagcagtgtaatagctgttagtaatatcccccatttcagctctagaaaacttttttaggacatgtttcagcctaagaagtttgctaataagacaattcagattattcttgttgttgttccagttccaacattccaaatttgaagctcttatgttgcatccagtaattgaagaaatggaaaggtttaattccaaacttatcgatttcatgaattttattaatacaatagttgttataaatagaatgtggtgtggccagctatattcactctactgtgcactaactggatatctccctaagcacttgaactttacaaaatattctgccaattagcaaaattctgctagcaacagtagggctagaatgatattcccagctggaaaaattatctttatgacttcctaaattcaatcatatctatgtttagtctcaaag

SEQ ID NO: 216722 - DNA, 1090 bp, Cannabis indica
agttttttttaaaaaaaaaagttggtttagggcggcttaaatcgaccaaactgaggttcaaagaatcaaacggtcggttttaagataggttctagattggtcggtcggttttcggattgtaccaattgagaccgaaaaccaaattttggatttttatatagaaaaaaaccgaccaaaccgactgatgctcaaccctaattgatttttatataccttcaaacaaacgaaaattaacactaatttgaattgatattcaggctttcatgctctcacggaatctttagatggagttattgaaagacagaaaatgagtagcctacttgaaaattggtatcctatttttataattatatatttgaattttttttatagaagtttcagtcataattaattatcaaaatattttaaattaattaaaaaagaaaattggataaatacaagccaaccctcataacttttagtgctagaaaattttaatgaagttaaaaaaaaatgagcccctaaaacaattacattataaaaatacaaaacacaaaaaatcaatttttatatttagaacttaaatttgggtgggccctcgagtggctaaggaaaataataatggtcattaaatattttgttcattaatctaacagtctaatattatattataggaaaatacttaggtagagtcatgaaaaacgtttgtacatacaaatatttttttttactatgtgtcaccctgatatttaatactaacatttaattaattctttttatatatttttttttaaatttggagatatcaatataaggaaagttccttttcaaaaaaaataataataaaaaaatataaggaaagttactttaaataataagaaaatttattaattaaatatatgatacccctattaactttaaaaaaaaatttaaaaaataaaataataataacggtcaaaaaataaaattaatcctaataaggagaggtattatagatatcttttataggagattttggtgtgagaatttttattaaaaataaaaaataaaaagaacttggtgatagactttgtttattcggtgacttccattgatgaagttaaaaggtttt

SEQ ID NO: 216723 - DNA, 1038 bp, Cannabis indica
ataatttttattagttaatttatcatatttcgtcattttctttaattttttttttaaaaaatgggacatttattaacttaatttttaaatttagagttattttacatctcagccctttaatttgatgggtaactctacacctttgtttcaatatttatattattttcacttgatgaatgagggatcaagtttattaattattaataagttttgtgaagttttaaaattataaaaatatatcttatttaataaaagtaagaaaataattaaaaaataacgagaaatcaatcttatgataactataaattaattataaaaccactaaaaaacaagctcataattattataaataaactataaaaacaatttattatttttactaaaaatgtattttttgtaaataaaagatttaaaagtgtcaaaattattttttttttttgacgtattttttgtaatttttttaaatttttgttatacgcaattttttaaaattattttcatagccatttttgtgaaggtgtaataggaaaagaatgactaaatcgattgttttgtggtactctccattatctaaccaccttaaactaagagatttcaactactcttaaataatcatttgatgtaaacattcctttacatataattaatatttggtacaacaagtctaatttgataatgatgtattttttcattttcttcttcttcaacaagttaaatgcagagtttggggatcatttcacacataaaataaaattactattgactaatttctatttattttaaatctaactcttataaaaaatgtgtagttgactcaaatatatacttattgtcaaaaaatgtataacgttgtgttggtataacaaggactttaaaggtacggtaggaaaataaatttgagagtatgactgatgaagattgagaggagttgcaggcgaaagcggtaagcactattcgttaagtttggctcctgaattaaagtataatgtattgaatgaaacatgttcggctgagttatggaaaaaaaattgaaaaaac

SEQ ID NO: 216724 - DNA, 815 bp, Cannabis indica
aaattaggattgctacctctgaatggagaaatttcaaaattggccagaaatcccatgtttcgcctatggtcgcgactacataaaccctagtcacaaccataggcaaattgaacaatccacgctctctgcctggtctcctagtcgcgacctaggtcgcgaccatagaaaagggtcgcgaatatgagtgagtgcagtcgcaactactgaatctaatttgacagcttcagcaaatttttctctagaatgccccgtctttacaacaattgatacaatttgaactccaatgcctcagggacctgaaacaaggaaaattaagcgtaaaacccttccaaaaggcaacattaactgagaaaacacttatgaaatcgacccagagcctaacgaaattcccccaaagtagattcttactcaccctcgagtaagactaagactcaattaactatgctgtcagatgattatagtgctgctggctcatgttccatttccttccattaattaaactagattttcaactccaaaaactctaacaattaattgggatgctcatcttatcatacaatgtgcagataaaacctaacttcacacttgaaacaatgttataatcgtttcactccatcaaaccattccacaaacaaatagccaatatgctttcatgcttacctctctccactaaagttgacaacattcttttcggaatcaataggactttttaggtaagaatttatggcttagatatttggaaaataaaagatatttttggctaacaatatcatgagcacctttagaacccataagcttctcataattttaaaatt

SEQ ID NO: 216725 - DNA, 663 bp, Cannabis indica
taactcaaatcccaattaaaattcattattttttaaaagaggtaacaaaactcaattaactaacaaataagtaataagaaaataatgatataaaataatagaactaaaatttctctaaaattattaaaatataattaaaagtaagattcaaaacttatctgtgactctttgaggtagcctccatgcgcaaacgagtcaacaacatactagccaaaaatatggtacaaaataaccaagaaaaatggctcaaactggccaaaaaattgacacaaactagctaaaaaaatgacccaaactagccaaaaataaaaataaatatatataaatatagaacataaataatcaaaacatttgactatatcgaataaaactactaaaataatacatattaatataaataagttgtgaaagtaagaatacaattcgaagtaaattataatagtgataataacatataaattaaatatgaaaggaaatccaaataatttgcacaaaaaaataacatgactagattagaaagaattaaaacctattaataacaataaatatttaaaagcaatagtaataatataaataataattattgaataataacaaaataagggatttaaaataaagggaatctaatttaacgagacattaacatatataaagagttaacaa

SEQ ID NO: 216726 - DNA, 451 bp, Cannabis indica
aacaattttaaaaatcagaattaattactaattaaattaataatttaacaatatatcactttataattaaattgcaagtacaatcatatatatatacacaatacatatatactagctagctagtgatagagagattaattaatatatatttaattacctgtagaattaaccaaatggaccagcaacaacagcttccaaagagtaatatacaacccaatatccaatgatcatcaccactacttccagatccaaatacagaattattaatgggtaactcagaattaaagagcttagggcctttgaccaatgccattgacatggccacccacccacacataacatagttcctacaatctttgctatgcttctcaaacttcgaatcttcaccttctctaatctaataattaattcacacaaatcaaaatgtaaaatattatatacatatgaattc

SEQ ID NO: 216727 - DNA, 1093 bp, Cannabis indica
tatatcaagatatgccaattgatttcattttttcattttttttttatttattttgagaaatatatcgatttaattttttttttaatttttttattgattcttttcattaagaaaaaagaagaataagaagaacaaaaaaactaaaaaaaaggaagaaaaagaccaaaaaaaaagtagtttttacatgtcttctgttgattttattgatatactagtataaatataaatatattttaaactaaatagataaagaataaagtctcattcgaacttttattttaatgttttataatttttctcaacttgaacccacaatttttttgagatatattgtaataattggtagttccttaattcgtaaggataaatattaggtaagttgtgcaatttaatattgtttgagaaaagttaactataatgattcagagactgtgtaagtatgagactataccgtagaaaatgacttaaataaattgataggtactacttatattaacagagtgtatcttattttcagagcaccgtttaagaactctaaaactaaacgtgattgacctagaataattttagtatggataacgttttgaaaaactttataaaaaatgtgtaaatagagacaaaacatactagaaacattcatgttgctcggtaaaatcagtcattattccaaaaaaaaaaaaaatataactaatgtgatgtactagttagtgggagacaacccaatgttacatatatagttggcttgtactcaataaataaatttcatttattttgatttgttaaaagaattatgaaacacatgtgtattataatatgctagtaggtgtaggtatattatatttaaacaaaagagttagtaaaaaaaattaagaagtcataataatttgactataaaagtatgagtaatattagatacacacttaaacttttaattatatggttaagattaaataaatattattatgtgtttaatttacaatgtataattaccatcttaacaatttgactatatatatacattttttttttctgtcaaaataataagagagaagttgcatttaaaaaaaaaaaaaaaaaaaaaccgaaaaagaag

SEQ ID NO: 216728 - DNA, 526 bp, Cannabis indica
agagaatttctttgttatgtgaagagcttgaatccaacaagttcttagtattttatcattgattatctatgtattgtttcttgttgaaattgtgcaggttgaacacacttgaatatcattcatcaaagcttcgagaaaatatttattcgtgagacacttttcgtgaagaatagtgcaagtgagtcactatttgggaggaagagtgcaagtgctacgatttgaagggagtctaaaatctcggcattttaaaaatctcattaggagtatagattacaatagttgcgggaaattcaaagagagagactttatttgtataagtcaatttggttttgtaatcactttgagattcttctaataaatttcatcatttaggcatggccctgtggactagtagcacatcaaaaggattgatgataccacatataatctcatgtgttctttactttatgttttattttactctctgttagctatctgtttaaacatatctctttttatgtaaatagtctccatgtttgtttaaaca

SEQ ID NO: 216729 - DNA, 964 bp, Cannabis indica
tcaaataagataaatgatttgaaaaataatattttcattatcattttaaaatagatatggttaggcaattattattttaagaataaaataataaataaataacaattatcctaattatatgtcaaaatatctcaaattaagcattattcaaatttctacaaattttttttgagttttatatatttaaaatataatttataaatgtctaataagtaaaatgaaataaaatagtaaaatattatttttcttttcaaactattaatttataaacaattaaatatttaacaaataacaaatttttgaatttgaaaaatattatggttagaatatctataaaaaatatctgggttaatttcaaatttaataattatttaatttatcatataaggtgattttaatataatatttcaaattaaaaaataaagttatcttttaatttaaaatgtgccaaatattaaaatttttaatcttataattaaataatatataaatattaaagaaattaacaaatttttaaatctgaccataatttaaaaaataaaataatcaatttttaaatttaaacctcaaaatatcaaggattaataataatatattagaaaataaatattattaatttaaaaatgatatttaagtttaaatatattaaaaaaataatattttattttaattttagggtttgaaaatttgaaaaatctagaaatttgggaaaaaaatcccacaaaaatagggtttatgtgtgctggctgcccaggagatgcacagaggctgcgtgcagcctcatctacgcgcgtaggagactgctggcagcctcttccgcgcgcgcaggggcagcgttgcagcctcaccttcggacacggggccttcggacacaggaggcatcagcttcagacaagtttttgtcccaggatgcgcgcacacgcttgtcttgtccgagatactggtgcaatcgagcacccatctc

SEQ ID NO: 216730 - DNA, 644 bp, Cannabis indica
gtggtttaatttttttctagtgtgattctttttagttataatatctcaattagaatataatttatttggtcctaaatatattcttggatgaagcttttactgtaatattattgtagtgaatgcgaaaagataccacctattattataattaattttagtgtaattaagtatcaaatatcatatattttaatttaataattattataaatatcactaactatttgacatatcactgtgtgataatgctctttgacaacatagcataagacacgttaattttagttaaagactagagtattgttaatgagcaccagtaatgcttaatgatagcatttctcttctaattaatatacatttttgatcccaattaaggtcgcatcactctatagtgggttgttgatcaattggttcttaagctataatagtaatgagaaatgctaaaagtcactagtggtgccaagcaccctcctacgtgtcaatatcgatattggtgtaatttagtatcgggtcccatataggttaatataataacttttagggcgtatcgctagccaatcgtaaggtgacacatcttaagggtactaggcaccactgatacccaataacaacgctcaatagtaatataccattgaaaacaaattctt

SEQ ID NO: 216731 - DNA, 501 bp, Cannabis indica
cttgtattggttgtctaattagtaaatcttaaaacattactagggttttttttttctatggttatattaataatcaattaaaaaagttatgctcattaatttgtgacagcaaaaatatttattgatcttaattccaaacacgattgcattgttatcaccatgaaagttgagccgacattgctacaatatatatgtatctatatattgttgatgattttatattgaaaaatgctagaagatattagtggtgtctagtattattttatattgttattggtctaattgaatatcgaatcatacatagtttaatataataacttttaagaagtattgttagtcaatcgtaaagtgacatgtttagaggtactaggtactattggtgtctaataataacgctctattatattaataataagaaaaatgttaaagaatattgttatctaatattctcttaggtattaatatctatattgatctaattaattttatataatttaatat

SEQ ID NO: 216732 - DNA, 529 bp, Cannabis indica
agttgcaagtaatttatctgataagacagtttatctatatatattcacagggacataatcaaaacaaaatttattttaatgtcaaatttactagacgttattatagaaacatatggatgtataattttactataatgacactactttcaaaagtcaaccacttttttttttttttaaaacattataattgaaaaaagttacaagattggtcatttcgttttggtatttttttgtttttttttttttttttaaaaaatatgttagtagtttctagaattgtgtctcagaattgttgatttttacttagttgggaaatcagataaactttggatagttgatgtcttgtcttttgttccagatgttggaatcagctttatcttacatgtttgaagggcgtaacatctctgaaacggctttcaactcgttgaaaatcgatgatcccaaattgcattctaagttttggggtcagttgcagatacttttgagaaatatgttggcttctgtactttcagtaggtggaaacaaaccc

SEQ ID NO: 216733 - DNA, 710 bp, Cannabis indica
aaaaaaattgaggcatccaaatctggtcctaactggttcaccgagatctcacctggtcaaccaaatttacaagttccgattacctagttcccatccagttcactggattacactagttggaaaaacttcgagttttgaaactcaatattgcctcaaccttgcaccaactcatccggaacattttaaacactcaaaacaaacatatccaacaactcagaacacacaattacacataaacctcaaatttaaagctcaagcttgagtctcaaaaaaactcaaacttgatgctttcagcggaaacagtagctactaaccttagaattactcataaccactataatttaagcttaccaaacctaacacttaccaaactatatcatacttaaaaccaagacttttccttcaaaatttaaagagaaggagtgagccaaagttaccttgatcttcttccaattcaaaatttaaattcctagttgaaatcttgacaaaaaatggtgaggaattgttcttaaatcttttgtttctcttggtttcttagggtcaaaggtgaaggaaaagggaggagagagagaaagtgattaggttatgtttatctagttttcttcttaacacttctaataaattcaacttaaaaaagtaaaattctaatatactataaaatacctctaagtgtcataatactaaaaatcaaagcttaatgagtacaataa

SEQ ID NO: 216734 - DNA, 567 bp, Cannabis indica
aaaaaaaaaaagaagaagaatcaaagacccataaagttgcatctacaaaaagctctcaaaatttgtggcttccatgactttagtccacctctttagtctttcccacaattcgtggctcacaacataattcaccttcatgtttaataattaaaataaaaacacaattcaccttcattactttttctatcatgcaccatgaaactcttctttgcgtttgaaaagtgatggtagaattgaacttgtgttaattggagataattaaataatttctttagggcgtgtttggaaagtgataatagaattgaatttaggtgtaattagaagtgattacaaaatttagcatattagtttgattagtacgtaattacacagtaacgtataattgaggagtaattacacagtataattaaagataattaagagattataattatactctccaattcacataaccaaaatgagaatatagtgtaattgttgaattactaaatgctttttttctttttctattattgaataaggtaaaagctttattaaactagataaaataaaaaagttttttttttt

SEQ ID NO: 216735 - DNA, 605 bp, Cannabis indica
taaaaacatatttatatataaaagaaacccttttaatcgagttgattgggcagattgatattatttttaactagtccaatataaaaattggacgagttatatttttattgagtttttttatttgtatttttcatcgaattatttcgatttaatttgggcgaattgtttaaatgggatggcttacaatttttttttataaaatagtatttgagaatgtgtaaaaaaacttatctatttgtttattttggtgtaaaattatgcagtttaaaattttgactcccatatttaccaccctaatagagcacatggggaaagaaaggatagaaatgtaaatgcagaaacgtgaatggagaagaggatcctgattatgatatccatcaatttttctaatctctccgctaatcattatccaagcaaagagctcgaaacctatagctattttgtcgagtagctaaaacttgtccgaaagcaatgggaccacgtcaccaaatattataattttatagaaaaacgaaaagacaaatcccacgttccatttctgtcgcgtgaaccaaaatccctcaatccatcaaatactcttcctcctctcgatgacgtggtgttag

SEQ ID NO: 216736 - DNA, 912 bp, Cannabis indica
gaaaagaacacttgaagatcaatagttgtagtctccaagtctcatttttctctccaatttcgtgcctccaaaaagcctccaatccaaagccccctttctctaaatttgaattaggttttaaaatctactaggcagaaattagcaggcgggtcgtggcatttcttatgcaatgtcacggcctgtgtcaaaaatgtaaaattttacgtcattttccttaaggcaggccgtagcatggcctatacaatgtcgcagcatgtgtgcttgattattgggcagtctcccttctaatgccacgacatggttcacaccatgccatggcccgggcataacctcaaattctcatgcttgttgatatttttttccaaatgagcgcactgaatttcaatgtcatggcgctactccaacttcttgaattctcaaacttcaaaggctttgattgcattgaaacttctcaattattccatgattttcactattttgacatgctaacaatgaacttgcattaatctttgaattgcaactatttttcttcaacttattcattttcttctttattcactaaagctgaaaacattaataaattaaagtgtaaaataaaactaaattcattaaaaacacttaaaaacaaaactcaaaaataacacaaactaatacctaacacttatgtatatttattttaaaaattataaatgtattattcgtatttttaagtgtaattaaacaaaactaattcatagtatatatatttttcaaaacttaaatattaaatgtgtacattttatatacaaaacaaatcatatataatctaaataattaaataattaaagtatctttgtacaactaatatttgtaatttgattgccaaatctcataattgaatcagaaatattccacctcacatgcaatctttat

SEQ ID NO: 216737 - DNA, 616 bp, Cannabis indica
agatggaaagcggctctcaaggccatgttcgagttttcagattctaaatacacaggtggccaactccaacaaaacaacttttctttctgattgttttagaatatttaattgagggcagaggtgattcaattgttttaggatatttaattgaggtgattgttaatatcagttgaaattcaaatatttaatttaggatatttattattattttattatagataaataatattttattattttattaaataaaaattaaaagtaacccataaaattctcaaaaaccaagaatttcagttatataggtatactttatatagaatagatacttaactatataagatatattattttttttgctacgaattatttatttttatttatttattattatatattttaattttaatttattattatatatttttatctaatttaagtttgtctttttctaaaaaggaaataaataaaatagtcgagtcgattcttaaaccaaacataggattactttcagcataatccaatcttgtccaatcaagtccaatcctgcgtaccaaacaggcccttaagttcatataagtggagggtgagagtacattagacaacctactcataaaag

SEQ ID NO: 216738 - DNA, 642 bp, Cannabis indica
aataacatgtttaagaatgaaaactcgctagagagagtttttttcgaattacaatactaaaatttacataaataaaattactttcgtttatatattacaacatgttttacttgggattcgaatccaagacttccaacactcacacacccacccagaacctccaacatgttattttattattattttagttgaaatataatatttttttaaaaatcaaataatatatatacaaaaaatttaataaaatactcatgttgtaattaaaaataaaacttaaatatatatatatatatatatttatatatgtcattggctacatacacggcaaatatgtagtctcctatagcatatgcactaaaatagtgttactttttgtgctatattggagttgtaacagacaccacatcatatactttgtgttacattggagaaacccttaggagtgatactttgcctgtaatacttcgatcctaataattattattctaagcaataataacaatgcccccagttctcgtttaggatagacacatatgaggtagagtaagagcattctgtcgataatctttttcaccaaaaattcttatgtcctccaagtcacacgatgttttaactgaaagaaattcttctgtactcatattg

SEQ ID NO: 216739 - DNA, 752 bp, Cannabis indica
ctaacattcatcacatgctctaaataataaaaccaaaatgcaaacccctaataataataataaataaataaataagtgaataaaagggaaagcccctttaataaaacaaaggaaaagtactagtactattattgagagatattattcttggttgcatggtaaataaaaacactactactacactacgtaataataatatataaatatttatttatatatataaagggtataatgaattaagaataacatattaacatatcttcaaagcaaaactactcaataagagagattcaaatacacttaattaacataagaatgtgattctcatgtgtcctaatctaacggaagatgacttcaaatgtctaccaaaataaataaaaaataaaaaataaaaaactaggtcagcttggtaataagtcaaacgtatcattccttttaatcagatcaaatttgcaccctaaaaatagtgaaaaaaaaattaattaataagatcctataattagtcaaaaatgaaataaaatcaaggatctgttaaccaatcttttgttctctgaagtattcttttactttttttttcctttgaagaaaaataactctaaaaaatattgatgggtgcatatatattcaattcacacatatatatatatgtacatgtatctataatgtatgtatagtagtagcatagcatgttcttccatgattggaaatttggaatataatgcaccgacttgtgtacaacaacaactgcagag

SEQ ID NO: 216740 - DNA, 599 bp, Cannabis indica
aaaagaggtatatcaataaagttgtcgaaatttttggcatgaaagatactatatcaggcgaaaggcttgtagctaaagaaaataagttgtctaagtcattgtcttaaaagcaaccttagaattcaagaaatatagaagattcttaatttatattggaatctaatatatgctcaagcatgtatgtatttgtacttagtatacatattaagaatgttagatagatatttaagtaaccatataaggaactttcagtatgtagtcaaataagctataagaaatttaagaagaacaaaatactatatgttcactttatcagaaatcagaaaatagaaaacagaaaattttggaggtcattaagatttctgattctaatcttataaagcttttagttgtgagatttttttgtcacatatggctgcaaaattaggaatggtattaaaagctattaaagatatatgttgtgacaacaaattaatgaggttgtattttagtaacaacatgaactctacaaggttaaaagacacattgactttggctaattgctgttaaaatgaaattcagagacataaggtgtcaatagaacatactaagaacaaact

SEQ ID NO: 216741 - DNA, 774 bp, Cannabis indica
ttttacgtcatgtgatattttgttagcataataaaataacaatcaataaataatagtaaatagtcgataaatttcattcaaaagacgacacatgaatctccacatagtcctctgtaatgtaataatgatgagcttataaacacattttgtacacataattgaacacaatcgtaaggaatattatgtaaaaaaaaaaaatacccacgtagatttggatattacattcttaatgctttgaaatatactcacatttcaaagattttacacaaataataatataattgaacatgaatccacaaaaaattgagtacagagagtcaatatttaagcaacataaatttagaatttttaatatgggtgtaatgaaaaatgaataatattaaagtgtatagataatttatggagtaataaatatctgtgcatgtgaatctaaattatgcataagcatgtgattcaaacaaatatagtaaatacagtaaaatgtatgtatatcaaacgatagagcattccgaatatgattcatcgttggagggactgaaaattctatacggaactagatttaaagaattgaatataacttattttacaaaaatactattttcatgcataatttgaaaagataaaaaaaataatttaaatacaacagtggattttaaaaaaaatcaaaatgcaacagagaaggatcattcatttgtaaaacaagatacagtaagtaaataattttaaataatgcatttccactgtgttagatttatcaactgcttaaaataaaac

SEQ ID NO: 216742 - DNA, 975 bp, Cannabis indica
agttttgctataaaattttaaataatttaagtataaaaaataaattgctaaaaaatccttatatagtaataaattacaaaaaattaattaataattataattaatttaattttaaaatataattaatcttaattaaaattttataaggaaataaacgattaggttactttcaggttacaagttatttattatttatttttatttaatttccaaattaatcacaaccatttaatagtaatccaatggcttaaaaaaaatgtaaccatgatggttacaataaaaatgtaaccattgaaacctcttccttttcataaaatattaaaattaatatatttttaatattgatatttataattaaatttatttcgtacccttttatgagtaatacccattaaaattattctatatacacatatatagtacatccacctttatacattctattgaaaaaataattcatatgcatacaccattaacataatatatttaatatgttggtacagattcacttatataccctaaagttttataacactactcacagggttccaaaatgacagattacaaaattacaactttacccatgttttcaaatacaacaaagatcaagactaaagaagataaaatcagttataactgaaatagttacaaaacagttacaaatattacacgagggctctgccctagattagaatcacagatcagatctataaaaggatactttctctcatttttgagagaacaagtgagacgaccagaagagaacaacacaaagagaacacaaggccagtttgagagagctcctccaagagtgtcgttggtgtgttcatgtaaaagaaaaaagagagttttgttagtatcaaaagagaggaaaaatagagagaaatcaaaagttgtaaattaaagattgtaacctgttgatgattaatcgattcaagctttgacggcttgacagagacgtagctggttgttttg

SEQ ID NO: 216743 - DNA, 632 bp, Cannabis indica
  modified_base (620)..(620): a, c, t, g, unknown or other
attggagccaattcaacatatttttttatgagaaattttatttataaaatttgtaagtgtatctattttaataatttttatataaatatttaattatattgttttttaattcttttatttcaactcatattttttaaaaaatgtatctataaaaaataaatatttaaaatattattacaaaaagttaaaataataaattaattgaaattttattagaaaaaataaaaaaaaaattatacacgatttcttaaaaaaacaaattatgataaaattaaaatatgtattgaatgtaacacaaaataatatgaaaaaaattcttcaaaaaatattaagaataatttttaaaaattattttcaaatttaattttttttaaaatatttgaaaggtatttaatattttgtagggataaaataaaactttcttgttttatttattgtgatttgtttaaatatcactttatttttcgacaatatattttactttacttaaacttgtttaataacttttctaaaatttcataaattttttaacatatgtataatatttataaataaactataatacctcatcttttgaaataaattcactttacaagtagtgatgggattttttttttttntttttttagtaa

SEQ ID NO: 216744 - DNA, 1016 bp, Cannabis indica
ttaactcaaatgcataaattcattcttaaattattaaaagaaaaaattgttagaaaaactaataatgacaagatactaggttgtatataatttaaaatacaataataatatataataattatgtataggaatgatttataacaattatcgtaatttgatagtacaatactatcaattaagttttccttcctaaattaaaagtaattttatacatctaattatcaaaagtatacaattgtaatgagaaaatatgcatttatagagttactaatgagagttagctacataattttagttagattgagtctactcattaaagacttctgtttcaactttatacacatagatgatgttaaacccattaactatttattaatcactaataatatggattaacacaacaaaatattatccaatcaacccaaatttaaatagagaaaattacacttactatgagatttttaaagtttttatgttaaatatgacacttttaaatttgaccaatttatataatattttttaggtctttttatagtatttgatttgtcatatatatgtaaattaggttttcaaatctcatatttaatatttttatttgtttaggtagttttatttgctactggtgcccaaaaagttgccagagtttgctattggtaccgaaaaaatcattgaagtagctgtcggtgccggaaaagttgttggagttgttgccgacgctgaaaaatttgtcagaattggcattgtcgctaaaaaataccaagaaactaatttcttgatgaagaaatgaagaaaccacttttattggtgagtttttcggtgacattaccaattctgacgacttttctgacactggcagctactctggcgacttttccggtaccgacagcaaaaattcatcgaaattagcatagtcaccgaaaaaaattaccaagaaaccagtttcttagtaatttttctggtgattttttggtaatttttccgataatttttctgacgataatgccaattgtgacgac

SEQ ID NO: 216745 - DNA, 473 bp, Cannabis indica
acatagtgaggtgattgttgttactgttacatatatttacgtcaaatatatttatagaaaaaaaaagaagaagaaaaaccatgcacgtaatttgtttttttaatcctcagtatggtcatacctattacctaacaacagaaattaactctttgacatatatataataaacaaatattaaatgtgtaaaaaaagttaaattaaaaaattagtcacgggcgatgttaatatggatataacacatcacattcacacgtctccatgattattatatggctcataatttttaaaaaaataataataataattcgattaattttgtatagaaaaatagggatttgttcatgtacttaaacatttcatttttttttttcattaatactgtaataaattggtataaattataaatatagtaaatatcctaatcacaatttcaaaccacaacttaattaaaattgcaaaatggcaactcaagt

SEQ ID NO: 216746 - DNA, 883 bp, Cannabis indica
aaccttctatttctctacctctcttctgctttttctttattagatatgcgaaaatttggtttgaggtgtagaaattttgggagcaactctatgactctactgtaaaaaataattataaacccaaatatcattctcttgtttaggattcatattcaacacacataatgaaatttggggttaaaattacatatcaaattagtgtttaaaccagctcacaattaaatagatatgttttaaatgccggttttaaatttggatgtgaaatacacgaataaacgcataaatgtgatgtaaacattataaatggggaaataataatgaatgttttaattaataagaatcgttaataattgggtgtcttcgtagtcttgtagtgttaggtatggagtctcagttaatagtgatttgaaggatagcaatcattattttaaaaaactcctctaaataataaataaaaaatatatattttatttaagagaaataatatgatcataaaaaatagggtgactctttggaactctgataattttcatgttcaaagttcagtttgaccataactctacttccaccaactttgaaccttgataggcgctctaattaggggactggtcatgttgcattttctctttcagcaaaaataaataaataaataataaaaaaaaattaattttctcgtatataatcaccctagaaatcactaggaaaattcttatttgcaaattttaaccaaagtgctaaacaaatatattcttaaattggtagaaacgctaaacaaatatattcaacaatacataacttaaatatgcttagaagaaacaataatgatatctttatatattaaaagtgcctaaacggcatttcttgatttctggtttaacagaat

SEQ ID NO: 216747 - DNA, 701 bp, Cannabis indica
ttagctctacctacgtacgaaagactttattaatttctttgtttattattattatattatgtattgttttaattaagtactctcttattataaattacatcttgaattaatgttcttaattaattaagttatagttttattccggccacagcaattaaaaactgcattgtcatagaattaatatgatcattatcaaggattttattatatattgtgttgattcttcatttcgattaattattaattaatacattgtttaattattactacgtacgctgttaattattcaatttttatctatatatatgttttttctttccttactataatattatgagaattgctaaaaaatatctttggtctttatagcacactttttaattagatatgatactgttattggtgtaaataattaaacatcaaatctcatataatttaagaaaataaattttatagaatatatagctaattaatcgtgagatgtctacgggtgcccaatagctaacgtcaatgctctaatattatcagtaagagcattattattgagtataagtatatatgttgtccagcaccctctatataagtgactttctataattagttagcaaaatattttttaaaaattattttttaaattatataatatgataatgacattgaggattgaggaaagtgctagagacaatgacttttagcaattc

SEQ ID NO: 216748 - DNA, 685 bp, Cannabis indica
agtacaagataattattgtataattcattgcattaaatcaaatatcttgatgtcaaaaaaaactttgcaaatataaaaaagtcacggaacctaataaagtcacagtaatttatgtatccaaaattttaattattgacaacaaagttaagaaatttaaaattagatgttcttctattttttttttcttattttatttaattttattgaaagattttatatatagaaatttcactaaaaaaatcattacttacatattttacttatacatatttttattattattttgaaagaatttatttaattatttatttattattacataagcaatatttttttaacatacataaataatgttcttctaatggaacatgattttttttttcctaaattttttcttttcataattaatttgttgcaactaaaatgtaagtttcttacttaataaaaaaaatccgaaacgaatcatactattagttatgaaataaattttttcttaattatgccttttttttacataattatgtctttttttcttgttaaaaaagactatagaaaaataaaaagtaaaaaaataagtgatattcataattttttctaattatacataaatattatagtaaaagataattatttgaaaaaaaaatagtagtatctacatattttattttatttttagtttttagtt

SEQ ID NO: 216749 - DNA, 566 bp, Cannabis indica
acaacgtcgaagatcaagtgaaaagggtcttgggaataaccccccaaaatggtgacattcaccccttcacgatgggtctcgggggtgtcacccttaagtattggctactacccccaaaggaggttaacggtcataccacactcttagaggggacccttatcgttagtgactaattcaaatattcaaatcctacaagaagttgaaagatggttacaaacccacgaaaaatagcaggatattatcatgagaaatagatttcaaccacctctgaaaattaaggagacggttgagatatatccacaatggtcgtgtctcctaaagtaagaagcaccgacatttttccctatataaggagtcacccatgacttgggagagggatcctaaaatttgagtacttagagaaaaaaaaaaagactctttattgttatcttttgcattcaagaacttgttcttattttgtaactctgattaataaacacaaggggagtaagctattaccgacatctggggtcgaacctctttaaattttggtgtcattatttacatttatagtttgttttttggtt

SEQ ID NO: 216750 - DNA, 543 bp, Cannabis indica
aaaattactgacatgcacttgttacgtgtatattcattgcactaagtgttgttcttgtggtagaacttctcaaagtatccatcgcactaggaagttcctcaatcttaaaaatttgcctatttaatgaaaaaaaaaatattattatattattcatacatattattctatattatcaaacacaatttacacatttttctaccattatattctccataaataaattattttgaacactttatttcaaacgtacaaataactctatttctattgtatatttttttattggaagagacttgtaattgttcttattgaaaatatttttatatgattaattctttcgtacttttatttaatttttttttacataaatatcatcataataccgttaaattgtacgacagtaaatcataaaataaaatcataaatgattcttaaaaaaaagaaaaataaaagaaaatcaagagaaattgaaagtgactcaattaaaaacgtacaacattaattcaaatgaatacgtcgaagttgatgaaacattatatgaat

SEQ ID NO: 216751 - DNA, 544 bp, Cannabis indica
atctgtgaagtaggaaaaaataataatctcccttaagcctctataaataggatcaaggaaccaggttaaggcatccccaatattatctatactaagcatatcaaatattgacattctaagtccgaagagatagtatggccttcaacaagcctttcttggtgatgttcctgttggctgttgtgactatcacaactcatgctacccttgactcttccttagaatctgagagtgtttatcagtgcgctgttggtatgcatctatatatatatatatatatatatatgaaggacccaacaaggattttcttcgagccatgattgaatattcccaataattattatcttttacgtgggccattctttcaaatataattggagttcctttctatttttatttttttttatctttttagtacactcattaattaagatataaaaaagagatatgtgaatcttgtttgtattatatattatttgattagttactttgtgttttgtaataggtcaacgaaatgtgctagctgtgattgcacagttggagagga

SEQ ID NO: 216752 - DNA, 933 bp, Cannabis indica
tcgactttaaagataaacagactagacttatagttaaggtccacctaaccaggggcttaaaaaaaattccctttattttacacgtttgttttactaattttaaaaataatacattttatttttaaataaagggttaatttttttttttaattatgattgactaaattttaaatcgatcctagacataatttattgggccctaatttattattacaaattaatattgaagaaccctttgagctatgcaaaacattgaggagagagcttgcgctattccataaaaagtgtttgtaataatgaagtcaaaccctatgttgttgtctttttagtagatagatcaacattcaattttaacaaactagaatagtgtgaccattatgaactaataatgctatatatttttgcggctcataaaaaatcttgtaattaaagtgggttttaattgcttaatttgttggattttgtttttgacttttgttttgtggtatgtgtttttttgaagaaatatataaaattggctcaactccacatatataaatttatttttggaataattatatatctttatttttgaagaaatataagtcattaattagctgtactgaattccttagaatattgcttgtaattcatgcataatcttctttgctgacaatgacccactccactccatctgaatatatatattagaatagacacaaattaaaaatgttttatttttttattccgtcttagtgttcaatattttgtaatacctaacattttataattaattaataatattttttaaaaattattttcttaaattatataaaaattaatatttaattacatcaataataatataataccgaataaaatagtatgagtataatatttttaattgcaattcttaatgatcaaataaatgaaaaaaaacgtttaaggtaactg

SEQ ID NO: 216753 - DNA, 664 bp, Cannabis indica
cttgtacttccttaggctttgtcggtgattgcatgtctattaatgccataattttcttgggattcgctttgatacccctcgcgttgactatgaatcccaaaactattctgaggagactaggactgcacattagacccaccaaacccgaaaacccgaccacccgccccgacccgctgacctaaaaaccgaaccacctaaaaacccgtgtagtcgggtcgagttaaacccgaaaaagcctccatacgggtttcgggttcgggtgtggatagtagttttttttggtcggttgtaaccgtaaccgaaccttttttttataaaataaaaattaataatacttaattacttattaatcacattcaaaaaaaaaactaattcatattctataaaaagaaatattattagtcggcttaacacttgtcaataattaatattattccatttttttaatcatattcaaaaagaaaaaagactcttcatattcgtgagagactcacgagacagtagacacgaaacacaatagacagtatacattcatatctattacattctttattacatttattaagttattaaaaaaagactctacatatctattactcttcatatcgtattaatttattcatttattacatccatatctattaagttatcaaaaaaaaagact

SEQ ID NO: 216754 - DNA, 700 bp, Cannabis indica
aatacctgtgcgcgtttcccttttcggcgggccgtactaatcgcgagtgaatcctttcgttgcccactaaactactacttcacctcgatcggcaaccctcggggattcctaggtttaaaactacaccttcatctcggtgggatcccagatcgcttgaagcttcctattcgcctttcggggggtcccccggtttactaagataggggcgtatctcaaggtagacaggactaagactactctacgacagctcttcttttcgtccgattgaaccaccagtttttttcatgcaatccgagtagcagatccaaatgcttagctacgcatccgagccagatcttaacgatcccccgtattccctattcttccggcattagaatgttccgacccttgaatggatttctcaattcaacattgagccggccccgcctttgctctttatgctgcgggtggatccggatctcgatctaagatttcatcttcaacgggtggaactaaaatgggatcagcttccttggggtaaactgatgctgggtttcgaacgggcgaggcctttgagactttctcctatgcctctgtaccgacctgctggtaaattggcatgggatctataacaggatcaaccaggggtattcaagtgtagcccttatcaatgtttaattgcctttcattgtcaggtacttcataacgagctccagcttta

SEQ ID NO: 216755 - DNA, 546 bp, Cannabis indica
gagatatagatataattcaatttcaagttaatcaagatcttttgttgaaagattgtgtttcattgtgtattaaactaatctcattgtgacacattaattaatttgagcatgaaaaaactgtatatataaatggttaattttcaaataaataaataattaattgacgtgttaaacttatattggtttaacaacacacaactttttaacaggattagaaatgtaacacaacagacataagtctcttgtatattatatatgcgaaggcatgtaaaacagaacttgtaagccttttggcccaattttatagcaacaaaagtgtaatttttcgagcccattggcccaattatttggcaatgaagagttttaaaaaaagaattttgttatttattattattattattattattttactaggagtagtaaatttgtaaaattaaaattttttgttatgctatctttaagtagttcttatttggagggtaaatgggtcttagagaaaatataaacaggccaccttataaacaagaacaaaaattgacaatccag

SEQ ID NO: 216756 - DNA, 571 bp, Cannabis indica
aaacgagtctggaatgagaacggattattaacttgttaagaagttgactggagctttagtggcaggtaattattattattattattattattattattattattattattatttgttgtagttgctatgaaatgcagtaaaatagaaccacaatgagaaacaattagaattagaagaaaccacagttttcatataagatcttactatgaaattttagtagtgcactttgtacagagtactatattttatttgttgcacaacttgtcaaatttctatcctcctgcagtaatgatccataatgaacgaattattaaagcttttaccgaaagacccaacgaatttgcaattttcatttgctgatgatcgctggcccatcagactggggctcgttttctcttaattattaaggttaaaatttaaagccagaatggtgagaaacagcctgaaggaaggaacagcaagaaagtaaaagctaagggagaaaaggaaacacaagaaatggggctgccagaggaaaagaaatcaaaaagcataaaatgagccattagcaagatattaaaaaagaaaaaag

SEQ ID NO: 216757 - DNA, 509 bp, Cannabis indica
ggaaaggtcttcccatgtgagaaacgtccctgctcccttggttcttgctatattttcttgttctgaaaccataaactaacaaccatgagccagaacttaatatgatgaaaaagtttaaaaaacaacctttctgactcaagctgctacagtagatgggggctgtttgggcatggcatggcctggcctggcattctgtaatcaccacaaattgtgacatatggaggacattgggccacttggattttcgatgatatagaagaggacataggagtccatgtggggtggcaatttggatattcaaaatgaggaatttaaagaattctcttattttgtgtcttgtctaatgtagattaacagctatggctgtaattggcttgagtcttagtcatgttatgttggtttagtaagtcaataccttttttcctccgctataagtaaggttatttatacataacgggagaacgccagtttaagacaagtgatctcttttatttatttttatttaaaaa

SEQ ID NO: 216758 - DNA, 525 bp, Cannabis indica
ttaaaaattgtaaatgatattaaggaaatagttaaatacatgttgtatagtttaaaatataagaggattatacaatctgaaaaaagtatgtttttgcggcctaattcaatagatgttgctggtgggagattgggccagttggttgtggccttagtgtggctttgttttgtctttgattaatgaaattttctctttagtcaaaaaaaaaaaaaaatagaatttgatcatttattaaatataaatatgatattgtggttataaatatagacgagcggtttcacacttttacttacaatattaataatttaataataaatattctaaatattacaatattcagattgaaaaataatattttattattgtggatttttaaaacaaaaaaaaaaaaaaaaacaaacaaaaagcactaatattcccttattattgattacgtagatctgatcaagttttcgcaattttaaattgtaggtaaaataaggtgaaagctattccattattatgccatacaaaaatttaattata

SEQ ID NO: 216759 - DNA, 614 bp, Cannabis indica
aaattcgggtgaggtaccctctatgaaggacaagtttgttaatgtggattatgaagatgataaccttccagaattgattgatgatgcagaattgattacgaagatgataaccttgcaaaattgtatcctacatatattatttttatttgataattactttttattttaaatatatttaatattatctatctctggttgtacagttcaaagatgacaagccttacaacaatcaggagataaacgaaatacaggatgaatggggtagttttgtgaagtcttatatatcgaaagaatgagtatgcgatttttttacattttgtcatgatacatgtaggatataaaacttttagctatatgattgttacttttggtgatacttagttttattgatatacttcatagttatatcaattttttattacgacatgtaggatacaatttttatgatcgttacttttgattatattagatgtactttatagttatataattttctaacttacatgaaaaatcttatcattattatattataaatattattgttagtcatataaatattgttatgaaagccaattttaatatttgaaaatacaggtggggaaaattgcaaagaa

SEQ ID NO: 216760 - DNA, 574 bp, Cannabis indica
atttgcacccccggtcgagtctaagaggatgggccgatgatcagaacccatggaagagagatgcttgacaatcgcgttaggaaacataacacgccaatccggagacgctaagcccctatcaagtctggctctttttgttgaacccccatgattattgctatttcgatccttagcccaagtataacaagggccttggaatcccaagtcaattagccccactccattaaccatcctccgaaagtcaaaagcatatcttgaagagttcccccggttggcgtagtgaaagcattcagaatctttgagagttccattcatgtctccaataagtagaacaggccgagaggattgattaaccatgtccccaatgctgatccaaaaagcttctttgtcttcacggtgaggtggcccataaattcccattaacaaccatttgaagccttttggttcaaagtcaatggcagcagagattatatattttgaggagacatcaatttcacatttaacatcgtcgctccagcacaatcccaaaccacctgatctacccaaaggagcaacataatggtatttattgaac

SEQ ID NO: 216761 - DNA, 626 bp, Cannabis indica
ttgaatgattcattatttaaagcctcttataactatacctctcctcaaagtacttatatcaaatgttttaaaataatttttttttaaaataattgaagaataaaaacgcactatattagaagctgatctgaactcatttttcattttaaattttatttcaaagttattattcatgctccttaccaccaaattttaaaatatgtgaattgtgtatatatattagtatgatatatttgaaataaataaaatatatttaaatttttttaaaaaaataaattttggtaatgtatattttgaagaatttgatgtattgaaataaaaaaatatatataattttgatgatgtattttaaaatagaaagtagagaaattagtcgaagaaatatatatatctagcgttttttctttttatatagtttttcttctattagtatagagcttgaaagaaattcaagagaatccttaaaaggaatttggggtgaactgtgaagctaagtgattacagcaattgaaaggagtctaacaatcacaaacactaagggggtgttcgttttaattattgaatgtcttagaaatttactagagtcataattaatagagggtaatgtaaaattttaatgtacaaaa

SEQ ID NO: 216762 - DNA, 578 bp, Cannabis indica
gttgctcagcccaaacggaagcccagtaccttctgtgctcaatctctcatccaccaaagccatcgctggactagacaccgttgccgccatagctgcagccattaaagaagctcccatacccatcttctgcttgctttcagatttctccattgaacacctcacttttcctccctttgccattgtgggaagtgctaaatgtacaattcaaattcaagttcggaaaaaaaatattgaaaattgaaagaaaaaaaagagtagctaactacaaaaacttataggtcttaccaagaacaggtgaggattggatccccaaggagggtttgtggagaagggatgcccggaggactgaagaggttggagcactagcggtgaagcttgccattatcgtttgatgaagcttgattttccgagaaaaatattccggggaagggaaaaaaaaaactggttttgtagtggaagattttgttattatggtgttataaaaagcctttgttttttttgcagtggattgaagagaagcaacggagcattctgattggttggaaatctgtccagactgcaccacacaaacaaagctt

SEQ ID NO: 216763 - DNA, 573 bp, Cannabis indica
gtggcttgggcacagtaccttcagaatactgcccctggggaagctgaagaaggagcatcccgaggtaatcaatgtggttggtcacccacactgcttagggttgagcgtaacactccagttacatttcgagatagttgctttaacttttatattttgcatccgctactcgtagatcacattacacataggtttgatacttagtatcccagattccatgtctaaattagttgtactgaatcgtactattgagtagccaagcactacgggactatgatggatagcgtgagtcatttatatgagagctggaatttagaaccaattaatccctatgatatattcaggatcacgggttgtagggatgttagtggatattatggtccttctaccccatcttctagtgatacctcatcttctagtgactatggtaaattccttaggtgaaaaattataccccaaactttccgtttacttgtcttcaattaatgctatcactttatcttgtctcgcagaaatgcatttcgagggtctcgcccacaggaaagggaagaaaagagtgaccacctcggaggctcc

SEQ ID NO: 216764 - DNA, 659 bp, Cannabis indica
gaccttggacctgaacaccaacatggatcctgacctcgaacaaagacccaaactcgaaccccaaacctagaccattacttggacccggacccagatcccaacctagacctcaatctcgaccctgaccctagaccctagaccccaacccagatctcgaccccatccccaaccccaaatccaaaccccagacctgaaccacaaagtctaaactcgacttaaataaaaacaaaaaataaaaaataaaatttacagaacacacttttattttttatttttaaaattaaaaaacaaaattagtaatagaacatatttttgttttttaaaaacaaaaattttatttttatttttatgattaaaaatttaaaaacaaaagtgttaccaaatcctaccttaaaaataaaaattttactttatttttgtaattaaaaaattaaaaaataaaagtagttaccaaatgtcactttaaaataaaggttaatttgcagcaaaacttcctcaactttgaagtttatcaccatcaatcccctagattggaaaaatcaaggctaaactcttcaaccttcacaattgttttgatctccactcttatgtaagtcaattattgttaagcatagatctccatgtgtatacataagtaaacatgacatattttaatttag

SEQ ID NO: 216765 - DNA, 583 bp, Cannabis indica
ttttaacggtaaaagaaatagaagaagggatatattacataattatgtaactattatattttaggagtatcaaaagttcagaggacaaaaattctaattattcttataaatattcttaaaaatataaattgtttgttttgaaaaattctacaatgcaccccaaagtgggtctagtgatgcatctatctgttttggcatctgagagaatttttttagtctaattttattaatagtcttctacgttatagttatttaaaacatcctgtaaaattttgaaagattcgaaaaaatttaacaccctgaaaatagggtataagaatatttttatctaagaaaatatatttctatttaaagaaataaatttctatttaaggaaataaataaataattgattttctgataaatgaatattttatattcattgaatctggacaaaatcaattatgtaatattctatatatggtcagatttctatattcattacctgatttgatttcctgaattaattgtcaaaatattctgtacattaatgtggcgcagatactgatggagtatctcaccctataaatatagggtcgtcggt

SEQ ID NO: 216766 - DNA, 783 bp, Cannabis indica
gagtctgcctgaaggaggagccagccagtttaggcttagctggggacacccgtgattgtggaacaaagtcatgaggcagtggttcaggagaaaatgcagcagaagaggctgagaacttgcaccagtaggagcagtgatattctgagcatctgcaggtgaaccattgaagctgaggatagtgtgatggtgggaagattgagccttcttgtactcagcaatataattgttagcaaattgccaaatttgcatagcagatttgggagtcttcgaatgagtgtcagcattccttgctttccaaatgcaccagagaatagtgatgaaaagttcaaccttatccgattgcaatagtgaagaaacatatactagaaagtctgagaaagaacaagtttttgacaaatgccaattaatgtttgattcccaattcctccagacctgtctagcccgattgcaccagaaaaaaacatgattaattgtctccaaatgcatctgacaaaggggacattggggtgtggatgatatgtggcgatgttgcaaagtagcagcagtaggtaaagcctcatggtaagcacgccaagcgaaaattcgaattttggaaggcaatttaaggccccagaaatactgccaccatgttgcagatgtgagtgagctgctggggagggaggagacaggttcttccgaagcaagtttataaccacttttaactgtgtagagaccagtagaagtatagtgccataggaggacatcatcacatggaaataaactcaaaggaattgaaagaattct

SEQ ID NO: 216767 - DNA, 928 bp, Cannabis indica
tgtatttaataccttactcaatattttattgtcacttttttttttactttaaactatttttttttagtatgtactttaaactatttaatactataaaatgcaatacaagtttgtattaattttcaacatgttatattatttagaaaaaatattacactccatcccttaaaaaaaacgtacacccctcctcaacttaaatcttgtgtgaattgccaaccatgaatgatatggggcacttggaggtagctattgaaaaatatgtataattttgaataaaaatattttatttgggtttttaggttgggtgggtcctacatgtgagcctaatctgtcttagactagatccggccatgtacgaaagttgcagaaatataatttagatattattaccatgaaaaattaaacttatgtatttatttacaacatgtaattaaatttagatatttataatacaaattactctgtataaataccattttgaaattttaattttgcaaaagttatagattagaccttctgctttattaaataacaaaattgatcttgtatattttagaatagtacaaagaagaccatgaacttaatttttgataattttttaatataactaactttaagacaatccctaacactaacatatgcagaaaatttaataagttttgtcataacacctctaggtcaaattattattaagctttactttgataaaaaaaaatcagttcactgttctattttgtactattttgaaaaatacaaaatctattttatcatttaacaaaatagaacttttggaaaatactgtatccacccacatatttatataaataaatgaagagtaaatactattttagtacactgtgtttttacaaaagttaccaatcagaccttctattttgttaaatgacaaaatagaccttgtattttctaa

SEQ ID NO: 216768 - DNA, 796 bp, Cannabis indica
gcatgtcttacacgtgtacaattacacatttaatgttataatttttccacttccaacagtattctgctctataaagcaaatccctttctaattcataagtgttcttctcttatacttcttgtatacttcataagtgttcttctcttacacttctaaatgtctagaaatgagaacaaacacaaacttctatctgccgaagagatcaaataggaaccaagcgacgaaattactcaaaaaatgcaagaatatatagatgcttttaaacgttttgaaaatgaagggtgacaaacaaatggaggttcctacgtagtcaaataaacactgagtggatgaaatatccatatccaccaccagggttctcgaagggtgttgtcgttgcagattaggttattttaaattgtaatgttatgattgttagtggtcaattttaatgtttgtttagtctttacttatgtttaaaacatttcacttgtttcctgtcaactgtttaaaagttttcagtttttttgtcttaaagtcgacaatatatcgacatattgtcaacaaacataagtcgactaaatatcaacataatatcgataaactgtcgacatgatatcatgtcgataatggtcatccctgaccttccttcacatattatcgatattgcattgatagtctatcaacaaactgtcgacaacctctagaaaacccaaattccgacagaaaaccaaatctgccagatctaccatttcagaccaaaaaacacaagttccaataaataccatagatataacgaaagaaaattacatattat

SEQ ID NO: 216769 - DNA, 563 bp, Cannabis indica
ataaaaggtatttaaaaaactggaatgacgggtactttttatccccgcttttatgaaaaaactggtataaaaagtacttttttatcccgcttttaatgaaaaactgggatataaagtacccctttatcccacttttagtagagaagtgggataaaagggtaccttttatcccactttcatgaaaaattgggataaaatgtaccattttatctcacttttatgaaaaaactgggtcaaaagggtacatttatcctacttttctaaaaagtgggataaaagtcaccttaatttgatcccattttgaaaatgtataggttttttatttttcttcgtttaattttattatatttgatttcattcattttttttcaataatataaatgtaattttattttataattgtatggagtatgtataaaaaacttaattaaaaatgaatgattaatatcatttttaataacaacaataataatttgtaaagttcaattctaaataacactttacatattatgcataaatctctaaaatactacacaatgtctaaaaaaatacaataaaagact

SEQ ID NO: 216770 - DNA, 758 bp, Cannabis indica
gttatgttaaataaaattaatttcagtagcttttcaaaaatatacaaaaaaatatatatatcttaataatttattatattatttataaacataacagataataatatatttgaatttatgtttttttttttaattttttttaaacataataagatctaaaaaaatatcgtaacaatatatgtaatttaaattttattttttaattttttttattttaattaaataataaatataataataataaatatatagaaaaattataatttaaaaactcaacacttatttattacttgtttaattagttttcatttgtatacaaaaatcataattaaggataatattattttttttaaaaaaaaatcttaagtattacttttaactacttttaaaaacatatataaatatcttatcattaataataaactaatatctatctataaataaaataattaaaaaaataataaaaatttctacttttacggatgatatataattaattttaggtgtgtacatttagtacttagatactactctgaacctaaatatatatatatatatactatatatttataaatgagagatatgagatgatgatgtgatattttaaagtctctctaaataacactattagctaaaaataagatatatatatatatatatatataaagctaaagtatgagacggtgatagactcttttattgtcttaaacattgcacatatatgtataggggtgttcgatctaattcaatatgcacta

SEQ ID NO: 216771 - DNA, 502 bp, Cannabis indica
tggtagaaaaatttgacatttttcaaatattaatatacattttttttcttctccaatatatttagtgaaaacaattgaaggtgtttagccatatttttacaaaaattaattttttaaaagctaaaaaatattaaaaatgttgttttcttattttataaatatttttttttcctcgtaacattgttttccttacattttctctcacataacttttttaatcatcataagccctagccctagggtcggggtcaagactgggtctggggccaaggctgagtccaagtaagagtttcgaggtaggggtcggatccaaggttcaagttaaggccagggccagagttcaagtccgagatcgggtcgtgtctgggtttaaggtctgggtccaggtccaaggtcagagtccaggatcttgtgtctagaccttaattaggtgtgggaccagtatcagggtcgacatccgaagtctgtgtcaggattgaggtttggattcatgtcgaggcgt

SEQ ID NO: 216772 - DNA, 911 bp, Cannabis indica
tttgagttgtcatgatacaattatttattatatatagacgaggtcataagacattttttattaataattaatgtggatcttaattatctcattactcgtacgcccagcggagccggctgccaggcgtagtatactttatgttaatttgttgacaaattagtaaccccttcttttaattaagattaaaaaaatgtacttaacgtatcatatatatgcctgcatccaaagtttaattataataataaaaataatgtgtaacgtattatttgcattgcatgcatacaatacaacgtatattaatatgtacagtataaataacatagaccataattatatgccttacaaacaaaaaacatattagaccataatatgtacgtaagagttaataatatatatggaaaatgcaatgcattttgaaatttatgatgaaaatttattgtttggctttatgacttaaaaattaaaattagaaatagtttttaaaaactaataagggttattcggcaaaattttttaaaaacagttttttaaaattgagttttaaaaaaattttaaaaataattcttttatctaacatattatattttatatttttgctttgcatactcggattctagaaccgaaactctatttgaagccgaactcggatggattcatgtcatggtatggtgttaaaatatacattttttttagtaagaaaaattttaaaaaatttatatcaaacactattaatttttaaaatgtacaaaaaatataatttattctcacttttaaaaactacaattttaaaaactcaaaaactgaaaatacaactaaacagatgcctatagttttttttaatttcaactataatttcaaagtaatcgtatgtttaatcgttgacaatttatcaagatatgtagcattattct

SEQ ID NO: 216773 - DNA, 621 bp, Cannabis indica
cttcttccctagctgaaaatgaatctcttcgcttaagagaagccggttgcatcgttgttgaagtcatcttataaaagctatatctccacaaccctttgtatacaaattacataacaaatgaatagtagcgttataagttccatgtatgacaaaataatccccaaaaacatgaataaatatagcatattttcttattttttttagtcagccaatagagcaaaaccctaataattacacacacaagaatcttgaacgaaaccagactcattttattctattttagctagagaatgaatgtaagttctttagaagaagaaggccatccataactgactgactgacagagaaagctttccattggagctctacagaacagaagcagtaatgagactgaaaacggtgtaaaagagaggaagaagacgagattgaaatgcccctccaaaacgacataaaccctagtcattgaatactctatcatatgaataaatgattaagaaaattgagtttattaacaagctttgtttcaaacacaaactcaactgtatcatccttgctcaaaaagatatgccagtgattacaagctgaattcaaaagtccaaaaatcttacctggatgacgaat

SEQ ID NO: 216774 - DNA, 121 bp, Cannabis indica
catagtcactactacaaaaacaccctttagaggcggtttttaagccctttaggcgtcggttttcgcaaaattcgctaccgacgcctatcagggcgacgctaaagggtttataaaaccgacg

SEQ ID NO: 216775 - DNA, 1112 bp, Cannabis indica
atcaaaaaaaaatgaatacaagtgatgtaatattgtcattacattacaaagagtttaaaatgatagaaataccaaatattggaattataatcataatttcattaaaatattgattacaaaaccaaacatactctactcagataactatcaaaatccttggctgcttaatttttcgtaaggtatggttgcttcgtcctttttttttttagataatgaatttattagaaaataagtagcggtactagggatgtatatttctcccataagaatgggctaccgcaagaatccacttctaatggagtgaaaattcctcatctaaatggagaacagagcgaagacggagatatttttttgttcctgaatgttaaacggagcaggaacggtaatgacatcacgacactacttaatattttgattaattttattaatttatattttataaaatgtatttgtttttttattatatattagtgtcatttttataattttttaagtttgagttttgtatagtaattagtatattaaataatatataatatattaattttatgtaattcaatattttttttatacacttaattttttttttaaaaaaaaattatttttacttttatttccccattagtagatttcccctttcgtctctaataggcagggagattaaaatcctaaatgagaagaatcaggatggagcacccctcgtcaatttttcgccacgtgtatatcccgaggctgaacactatttgacggacaaaaatctgctgtcccattttctctgtcccaagcctgtcccaaccaattaagtactgacatgtcatttaatttgacacatcatctaacgaaggttaagagtgaaaaccttgttccctcttctgttaataccaaacatttttcccgtcatttatattctttgggtatgctatgccataataatatcccttcaaaccttctttctttattgtcatctttcttatttttgaaatcagagagtttattctggagaaattaaatatattgcagagaactttttttttttttgtaaaaacagagaaaaattatttaacactaccaatattcgcaacttctctgttaattcaaatcattttatgatc

SEQ ID NO: 216776 - DNA, 539 bp, Cannabis indica
aggctgaagaacgatgatgtgctgtaggcttatttcttcattttcccattcaactagtttgagaatttaataggaattttgtatttttactcaagtgattctatttatatgagtgatgccttttgaaagaggccaaagagcaccctcaagttagtaggtagaaaccatagccataagctttgaaatgctaatgccctttttcttctcaattttgctttaatactcattcctaaattttgaacttaaatgtaccctgagattatgcttctttggcaaattggtcagcctgaggcttattatgttgattgtccagtgattgtaaacaattttatattgctttaatttctttattttgatgcctgctatgttgtataccctgttttgtcattcattttttatgctaaaatccgatgcctaaattataatcatatatggtgatgcctatattttcaacttaaaatgtctcatgcaattgcttctttagcaacttggtctgctaaagattttttaacacgatcacaaattgagttttatagctc

SEQ ID NO: 216777 - DNA, 552 bp, Cannabis indica
agaaaaaggttttgtaaccccctaatacctaggcgcgctacagtaattttctaattacataccacctttgctaataaaaaggttttctttgaaaatcatactaaattaaaaactttgattaaaattattaaacttcataaacacacatatatatatatatatatttacataattgggatcctgagtttaaacttttgccaacatttccaaaatactttaacatacatgtcgcatagccatgaaaaaatattgcccatgatgtcatgagaccgaacactccaggtcacgttgtcctgacatgtacaatccccatccaagctcagagatcactcttgtttagccttttgtttttcccttacctacacatgaaattagcaactgtgagtcaagagactcaataagaaaagcatttgacgataatatatcgatgacttgtatttatgtacccatacacctatccacaatgcttataaaatgagtacgaacgttctttacaaagaatgacactatatcacatgaactacgtatcgttactatatgaatgtggtagga

SEQ ID NO: 216778 - DNA, 833 bp, Cannabis indica
aattggattactactgtatcgatcgactttgagactaaactgttacatatacacaagtgtatacagtagtcatccagttgatatttaacactaatatttaactagcgtgttaaatttacaaagaaaaataaacataaggagattttgccacaaaataaataaataaaagagattaagtgtataaaaattaaaatataagatgtttcgccacaaactactctaataaaaaagttgttattttaatatttggccaccaatacttatatattttgtcagatattattattattttgcaagaataaaattaattatgttaaaaacatcaattattaaaaaaaattataataataaaaaaaagaatattggcggctaaactacttgaactttacggtttgtaacagttaaccacaaaaccgaaattttggcggcagtgttaatgttgttaggttattagatttttgtatttgtaattattagctattgggattttgttgggttgttcttgattgtaatttctaatatcttgtggggtattgtatcttcaatggcaatggcaattcaatttcaatccaatttattattttagtacccaattttcgagcagaagaaatagagaagaagaagaagacaaagaaaaaaaaacgaaaaagaaataaataaataaataaaataaaaaataatttatttataattgtttaatttttaaattttaaaatttattttttattaatatttaatatttaatattacgtggaccattaaaattaagccacgtgtaaaagtgtgtacacgtggacagtccaccgtggcacttaactgtgatttttggacgg

SEQ ID NO: 216779 - DNA, 844 bp, Cannabis indica
  modified_base (803)..(803): a, c, t, g, unknown or other
atgtatagattaacataaataaataagaaaaataatacttaagttataaattctttttattaattttagatccacttaagttagtattttttttcatacatttatttcaataggaaattaatacttaagtattgaaaattaattttaataattaattttatgaaatactaaagtgataattttattaaaatttttatatttgggtagaaaattaatttattaatttaggacctacctaaatttattaatttcatagaaatttattttaatttgaaaatttatactaaggttcaaaaataaatttatttattcttgaaattcttaagttagtaattttcattaatatagatcaaaatttatacttggaatgtaaaattaatttttgtaaccaaagttagtaattttaataaatatattaaaataaattgataaatagggggacaccgtttgattcttattttaattgaataaaagattgcaaaaatatgttcatttcagaagagctcactactcggtttaactatttatatctttgcatctcgcccaatacgggacattatatatcatttgatttaaaaccttaaaaaatttgaaatatattttattttagtatttttcttatatcttccatatttgattatgtgtattacaattttctaaatatgtagtaagaatttatattgaacatagcattgatttttgttattgattatgtagtatcgatttcaaatcttcattattgatcacacttagtaattattttcaaaatggacacatccctaacagatggtcatctgtttganaatttaaatagtattagctcgtgtaagataagtaattttgt

SEQ ID NO: 216780 - DNA, 482 bp, Cannabis indica
atattatacaattaatatattagagggaccacacagtttttgaggcaatggaccactttaccccatgtgatgtccagatgccaagaattaaagactatataaatacccttttaagatgattatcattatatatattttaattatacgtataaatatatatcaaagacttatcataataaattattattattattattatattggtgctataaattaaaataaaagtaaaaggcatatgtacgagtacatgcatgtctatctctattatggaatgttgcttatgtatagttcctatatttatcaaattaagtttaatttaatatgatcttattattattattattattattattattattattattattattattattattattattatgtgtttaatttgtggatattatatggatatatataaattattatatataattattagtagtatagtttcctatatatatgtacaaagtttaatt

SEQ ID NO: 216781 - DNA, 511 bp, Cannabis indica
tgcatcttcgtcatctagaaccgcccagcaactcctttaagaagtttcaggatataggcacccacaaacggcaggatctgagttcctttgacgttcgttttgtctccttcaacgacgttgatcttctttgttcagacttcgctattgttgtcgaggacaaaacgacaatgatagcggtgataaaacaagataactagaggaaaatgcttttagatctaggtttttataagactttaggatttaattttaatttattcattttgattctctatttttttttccatatgaaactctaaccttttagatatggtttttgagaaaaaaaaagagttgagagttgtattcttttattttaatttaaaatagtcattttaattaatttttttttttttacttcttcctgttgctagggctgtaacaaaaaaatttgtaaaccacctaaaccgaataatccgcccaaaccgaaccgaaaaaaccgataaaaattacaaaccgaaataacccgaaaaaa

SEQ ID NO: 216782 - DNA, 830 bp, Cannabis indica
actaattagtctgattaatatatatatatatatatatatatatatatatatatatattaaaaatgaacccgaacatgcatgaaaaagtcccataaaaccatgtacattgttatatttttttggttgttttgattctagctaaaaacaaaaaagaaaacaaaaaagtattgagatcaagtttttgcttgtgcgcgcttgtggttgcttcccaaaaagaaaaaaaaaaatagttacgggtaatagttatataattatgctaggggttttggagtgaaaagcaaacatatcatatttgtaaattgtttcctaaccaacgtcctaggatatgtataaaatgtaatatgattgttttcctttttaatttaatctagtaatattattttttttttcttttaataaacaaaataataagtctaccttttataattatactttttgtgaatagaaaattattaatatacactaaaaaaaatcacatttagtgataattttttagtcaatcaaaagaaattgtgactaaatgtgatttttagtcacaacaaaaaattatttgtgactaaatatagtatttagatacaagttgtcactaattagttttagttacaacaaatattgtgactaaaaatatatttagtcacaacaaattatgatttttgtaactaatacttttagccacggaccttttagtcacaacgtaggattgacaatttataattagtcacaacttttttacttttaatcacaaattttgttttgacttaaaattaattttttttttgtagtaatatataattatgaattaagaataaaaattataatttctattaatg

SEQ ID NO: 216783 - DNA, 587 bp, Cannabis indica
ccttaagttaaggtaccaaataaacattggtcttcttataagagctttgtctaagtttttagtgcatctatatctcatgaggaacattattttttaaagaaataaatatgctacgtactttggcttgacaatatataagcttagttgaatgaaaattttccattgatgagtacgattgtattgtcttctttttataggttattagacactactattaagagttagtcccacattgttaatgtgtagaaataaattgtaatatataagatgaatgggctattcctcccgccaattggttttgagatggaaccacattcatcttatcccaaattctaactgtcatcaatatgttaaaattaaaggtaccaataatgtgtagtacttttgtaaatgataatatcattatcagtgtagttgtatattgggtcttatatattttaatttaataaaattatagagaactactaactaattacaagacatctcctcatagctatactaggcactttagtgcctcataatgctcataatttaatatcagatagggcaatgcatagaatgagagccaaaaatagttgattaaggga

SEQ ID NO: 216784 - DNA, 929 bp, Cannabis indica
aataataataataataataataataataataataataataataatatgtaccataacaacttgctaaagtaaattaacatggacaagatatataaccattaactatagagctagaattaaaacataacggaccattatccttttcgttttttgataaagattatactaatatatgtatacaaaatatagaaatatataacaaaaatttaaatttaaattgggcaaacatgaattttttacatatacttgtaataattatttaaaaaaaggtaaatattattttaaactttgtattttgtaaaagttattgacattctattttattaaataactgatcaaatcctgtatatttcaaaatattataaaatagtaccctgaattctttcgtcaaattttttaacataaccaacataaagctaatttcttgcacaaacaaatacaaaaaatgtaatcagtctaggcacttttatgtcatattattattaagttttaatttgataaaaaatgagttttggatattgttttgtatcattataaaaaatacagcattcaacttattattcaacaaaataaagaattcaattaataatttttacaaaatacaaaattcaacacgatatttcttttttaaaatatattatgcaagaatatagaataaaaatttagggagttcacgacgcacgacattcaactatgtcattgcccaataatttgtaatttttgttttgtttaaatgatttttccaaaattagattttaggagaaaaaattaaatgtgcttccaaacatttctcaactatttcctaattagttccatagatgaggtaaaagtttctttattataaatatttcttaactatttccttagctaaatgtagctacaaatttaaaagagttttaaaaatattttattgtatttttattactttt

SEQ ID NO: 216785 - DNA, 854 bp, Cannabis indica
ggcaaaaaattgtgtatggagggcgattagtgggtgtctttctacgagagtttaattgaagactaaacatgtggatgtctctttgttgtctccaatttgtcatggagcaggtgaatcaatttggcactatttagttgcctatgattttgtgcaaaattgtggtttcttcatttgttctcatgactgggtgaggaacaaagtgttcaagcggtgatgttgtttgggcaatttggttcacacgaaatcatttcttgtgaaacggtaggaaaagtcaggtggagtttgttatccatttggctcgtatcactcttgattagtggagaaaagtttaagaaagaagtttgtttcttgcatttgatgattggtatctttcggatgaggttgagctatggtctaaaccacgttatgaaaaactcaaggtgaatattgatgttgtattgtttgacgaggagggaaggcatgattttggtggggttgttcgggatcacaagggtcgggtcatggctaagattatgggaccacaaattgattaagttcttctagagattgttgaagtcataacttttaaggaagtgttatcatggttgaagcgcaatcttttaagtgttagtattatcaaatttgattgtttggtattggtataagcagttagaagtttgaatgttttgtcatctacttttgatagtgtcattgaggatagtaaacaacttttattttttttaaggatgttcctttacgttttgtcaagcgatctgctaatcaagttgtttatcttataactagagcatcttgtttatatgctctcctaatcatatcttttcaaagtataatttttgttttgatgttgctaatat

SEQ ID NO: 216786 - DNA, 871 bp, Cannabis indica
aatcgtgaggctcaaatttggttgatgaaaatctgcgttaatagaatctataacttctataactatatagaagtgaaatgataatttcttttgagcttggcttaatagacataaatagaagaactcttatttcagtaattatattagtttactaaaatatcatttataggaaactaagtattttaaagataaaatacattgaggggtagaacggtaaatttgtccctactcaatgtaaattaataatagaggatctttgaacatttaaattgaaataatggataattcatagcatatctgttcttggtgcatagagtggtctatgtaatcaagagtacaatttcaaatctatagtggagttaggcggaattaataagataggaaatttacttggtaaattctagaactacttattgagagcttgattatataggcccatggtccccaaactagttgagatcatattgtcttgtagactcaattaattggttttaattaatcaattagaattctgtataaaactatatcttgtttgtaaattttcgctaagcaagggcttatttgagaagaaaaagacgatttaaggtttgtttattaattaagagacttttaaggtctaattaataaataagttaaatgaaaattttatttgataattaattataattattaaatagataaatttgacatttatagagttagaatttgtgaaaagaaaaagataagttttaaataaaatggtaaaattaaaatcctatagggctcacaccatgtttgcccataaagttcaattaaagccaaattttatatatatttttttataattctattttatttctaaatttaatcctagaagctatcctataaatag

SEQ ID NO: 216787 - DNA, 658 bp, Cannabis indica
tttagaaataataacattaaaacctttttaaaattcccctttataattacatttaaaatttgtaaatcatgatcaggatgttgtcacaactattttatgtcgcgactaacaacttactttattacaaaatatagaaggtcgcatctgtgattattataagttacaattttctaaataatttttcttaattatttttattttgttatttaaaaaattataaataaaccattctaaagattaaaatattatttgattctttgctgcaagaaaaatattatttaattcttttaaaaaataattatttaaaggtacacaatttaaattactttgtagagaaaataattattaatcattaatttaatatgatgttagattgaagattacaaaataatttatttttttaaagaattacaaaaatgacattattttttaaaataatagttattagttattgatattaaaaaattatttatagtaatactttttaattaatgaggtaatattactatttcaaatattttatattatttctaatactaaaatgaaataaacataaatacacacaatatatattgtctcaatttaattatacatacacataattttctttattatactgtatgattattaattaatatatatagacatggttatatag

SEQ ID NO: 216788 - DNA, 525 bp, Cannabis indica
agagagagagagagcttcatggtggtggtgggttccattgcgagtttaaagatgaaagggagagagagacgagagagagcaagatctgaatgtttgaacaaaatgaaaatttttgggtttttatatgtttaacatgttatccccgacggttcaaaacctttgggtatactattattgctaacagtttaaaactgttggctatagtatatccaacgattttaaaatgtcaaaaataccatttttaactcgtttttgaattttaaaattgtgactattttacacagtcggtgattctaaaatgattatttaaaaccgttaggaatagtggagtatttccaacgattttaaacaattacttaactttattagcgacgatcctcgaaaaaaaattaatttacgaaccaacaggaataagcttttttgtagtgttgtctacagagtggaaaataatcaagattatatgcttcaaactatttagtctcatgatttagcaaagtactggatttacagtggaaaagatatcat

SEQ ID NO: 216789 - DNA, 804 bp, Cannabis indica
cccctcaactttgacatgtaccatatcacattatgcccctcaaattttcaagtagtcaaaattcttctcgaactattgagattattagattcaagaacttctgtcaaattcaggtcaattttactaacgtaacaattgtctatttacaaaattgtatccctaaattttgacatctaccaaattatacttttgaagtttgacatgtactaaattgtgtcatttgaacttttaacaacgtcaaaactctattagtaaaattagacaaacgtcattgaatccaaccatctcaacagtttagtagaatttttaatggtatgaagagttcataagacatgatttagtattgtagaagtaaaaaccgtgattagtcctcacaatttttttgataatggccattgcaatttctttgaggttaggcccactaaatcttgcatatcaaataggaggtgggacataaaaccacatttgctgtcttatagaaatatgacaagattgttggcacataccggtggaggtaatgataggcgggtcacatgaaaatgaggtgagttttaggtacatatttagtgagactggattaggttgaacaatgggaaagtgtattgtgtattgtaatgtgttcccctccacccaccatcaaatcgtggctacaagtaatacgctgttaaaataaatgttatcataatactcaagtgctaattttttactagcaaaataaaaagtgctatttatcttaattgacttcacaaacacacaagttaaacgaaacaaattggaaaaacatgccactctaaacgtgtcttt

SEQ ID NO: 216790 - DNA, 656 bp, Cannabis indica
tcttgatcataagttagtctcctatgggatggaggctctaacccaacgggcaacattgcttcataaccataagccatggcaaatggtgtttgtccggttgctattctttctattattcagtacgaccacaatacttctggtagttcctctggctagttccctttagcttattcaagccacattttaatggtgtctttgagtatcttgttgactgcgtcgatttgccaatttggttgatggtgtgctactgcgaagaaactcttaatgattccatgtgccgtacagaaatctgtgaacatctggctatcaaattgcttgccgttatccgagacaatcttgttcagaagtccataccgacatatgatatttttttacaacaaaatctggtactttcttagatgttatggttgccagggactcaatttctaaacactttatgaagtaatcaactgcaactactacatattgtaccccacccttgcctttgggcaactgtcagattaggtctattccccatatggcgaagggccacgggctttgcatcttaattaattcattaggtggtgcacaagggatttttaaaatctctggcacttgtcacacttctttacatgggccttaaaatcttccataatggtcggccaaaaatatcattg

SEQ ID NO: 216791 - DNA, 964 bp, Cannabis indica
aaactgattactcacaagaaagatggtctgatattgtaaaggttcgtatatataaataaatatacaaaaattatattattattgcagcctagcattgttttaatttactgcatgtaaaaatattttcatacataaaaacaagttgcaacttttatttttgctacatgactaacttctatttcagcattaatttagttacatgggagtgatacttttatagatttttataatatttttaataatttaaaatgcatgtacagaacttataaattcaaaaatttacaaaaaacctacacgtataaatgctagaaataaatatatttgaaatattggtaaattatttaaaatttacttaaaatctatatatatttatgttggtaaagcatatatatactatatatacattagtttttttttaaaaaaattttaaaatcatattatatacaatacactgttatataaacagtatatgaaaaaaaaaatgttaatttatatctatactaaaatagaactaaagatatcgtggttttacacttttcttttacaaggaggagatgcaagttcagttcaccctcccccaatgttaaaatttatatatatatatataaatatatatatatatatatataactaaatttagtatatttgcacatactgatgcagtactatgaagagctgggaaacgcccacaccaaaggtggaagtaatgaaatatttaaagagtaaagagtacacagatgctaaggactacgccggagaatgtgagtcagttgtgatgatagccaaaggccaaagtacgtaccaattaattaattacatattacctttgtagtttgttaattactgtataatatatacattaattaatattggaatatatatatataaatatatataatacaggtgtacaggggacatgtaagtatggaactcgagtagattacatattgggttctccaaactc

SEQ ID NO: 216792 - DNA, 913 bp, Cannabis indica
  modified_base (860)..(860): a, c, t, g, unknown or other
aatccaatagaaaatcagttaatgcatccaatggtttgaaccgatccaatccaatacaatacatctattggatcagatcggatcggatggataacaaaatccaatatccaataaataattggattggatcggttgggtccaaatccattggacgtgattcaatgaacacccctagcttctacaatgcatcttataaaaaagatgcactgatgcatcttttatctattttgacatccacaagaatatttttttttattttttttatattcgtgtgtgttatagttttataaacatcttgtaaaattttaagaaattcggaataatttacaatatagaatgtagtattcaaataatttatttcacacacgtataaaaataaaatagtcacgtgtgcaactgactgtttgaattatattttttagctggttaaatttctcaaaattttggagaatatcttaaataactacaatttatatatgaccataaaaaaatgagcttttttttttttaaaataatgaaacaaataggaatacatagtgcatcacttttagtaggttcattgtagaatttttccatgaggcaaaaagaatttttgagattatagaaaaaaagaagaaacaaaacattgcttttttttttttcagaaaaatatatttctaattattttaaatttaataaatcatattttatcattttctaattcttgtttgtttataaaaaaaagttcttctagatggttgaatattaattttattttcttactaagtatttttttttttttttttttatttttttttttgggtagaagtttaggattgtctcttagctttttcttcaaaagtattttctataaattagtntttttttaaaaatttgaaataattttacattcattttttaaattttttgctct

SEQ ID NO: 216793 - DNA, 682 bp, Cannabis indica
gaaatataggtctgtgtccaggttgatgtttgagatccagttctgggtccaagtctaagatgcgagtatttgaaaaagaaaacgaaaaatataaatgttacacaaaaaaaatattattttgaaagttgaaaataatattttatgtttttatttatgagtttaaaaatactttaaaaattgaccgaactactattaattttaattttttttaaaaaaaaaaactagaaaattattttaaattatttctagttctgttgatgttatgtgtggtttgagaggttattttgtgagaacagttggggcctgtagcatttaagcacaatcatccatggcgttgaccatagccacttaccatcggaaagcaagaaaattaatccgttggcaatgcttccaacctgtcaggtaaagcatttcataattcaccaagtgggtcccttcctactgaatccaaaacaacatcaaatcagagaatgaggcacgtgacgtaccataaggtacatgggcggtgggtttcccacgtagcagtgttatattggatgttgatgctgtaatggttcatttataggtggacccattccaccgcccaacctttaatcagacttttaacctttgccaaccttgaaatccctacatttacctaatatgagccatctctgaatgaaacggcacatacaactgtcgt

SEQ ID NO: 216794 - DNA, 844 bp, Cannabis indica
aaggtccaaattctagatcattgggtctagataggaacatgtagtatcatttatttttaaattttcttttaataaatttaaaatgtagtctatactgacgaaactggacaaaaattatagttttacaaatattaagtacttgcactgctaaaattaaaaattaaatttataccgcttacaaacttaaaacattaattacttatgctactatttatcttaatttcattgaaacaaacatatttttttgataaataaacaaacacgaatataatttcaaatatatcaaaagaaaaaggcaaatattaacataacatatacctacctattatctaccaaccaattaagagtggtcttctctctttaagtgaatttattggtgttcataattagcttcaaattcattatatctttttttaaaaaaattatatattaaaaacaaatcatttctttctaaacccaaaaaaataaaaaaaaaaacttaaaaaaaaaaaaaaccacaacatatgtattggttactaaaattagaaaattcaaggaccattcatatactttttagagcattgtcttacatagcattaccttatatttggtagaggggagagaaaaatagagggagtgggaataaagagattgattaaatcatttagtttggtaaaagagggagaggagagatacccttgagttgaaatggatcttagtaaaacaaaaatttataaagataaataatattttaagaaattattaaaaaaaatatatgtatatttttttatttgaacatttaagataggtgagcctacgcctaatctaaatacacaagttttaatcccttcaaaagtaaaggaat

SEQ ID NO: 216795 - DNA, 618 bp, Cannabis indica
attgaatatccaatgtttggcagattggatcggtcagtacttcttaaattggatcgatttatacatactcctaatttatatatcttctaataaaggtcattttgctatacattttggaaagttttttagtcttattttttttttttttttagtttaatatttgtgtattttgtagttatttaaaacaatttataaatataacttacattttgtagtttttcagtcccttttttttttttaaatatttgtgtattttcttatacgtttggtaagtaattgtttgaaattttcgatgctaaaaactattttaaattttttgaaaaatttacaaatgatgttaaaaaaaatgcaacatgtgcgatcattaacaaaaaataaaatttttacatcaaaaatataaaatgataactttattacctaaataccactacacagtaaactaaacatttatacccttcatctttattttatttttattttaccacatgcacactcttcccatgacatgtgtgtgaccactatcaatcaatcaatcaaccattcatcatttcgctttcttttttttcttctttttccttttattttccatttctttttcagttttttttttaaaaaaaa

SEQ ID NO: 216796 - DNA, 819 bp, Cannabis indica
atattgatactgctgatgagatattttatttttacgaagctaaccatgcaggaattttattaaaccaagggtcctttgatattagttgttttcctactgggctttataagctcaccccctattttctcccattccaggaactcagtttgatgctagtggatgaggatggtaccgttgggaaaggaagtcgttattagtttagtcttattttactctttcatcttctaatgagactgattttgtatttaagctgaaatggatggtctggatgacttaaattagctatgtactagttagaaatgaggaatgatggatgctaggtattattttggtattttattgacttattaaatctatctatttggtgattacataactgtggggatattatttttcttttatattgatgagtggtcctgattttgttactaatattttcctattaatataggagttaatccattacttttaagttagtattttgtgatataaattaaaggatcatttataagctttatctttcaacaagggtcaaagtgtgacctttgaccacccaagttatggatattacatatctgccacggcctagggctcgggtcgtgacattctctctctagtttagactctctctctctctcaaccttacacttttcacttaagctaattagtttgattctctacatattacaagaattgatagttatttatagatgtacattgtttcttaaaattagctctgagaatatcgtggattatttatatcgccttaaatgatatccagcacatctccagcaataataatctacgcgtagctttgat

SEQ ID NO: 216797 - DNA, 893 bp, Cannabis indica
ttttgttatatatgcacattttatatagaatagatatatattatatacaagcatgtcagctccacctctgctgctcaccaccatgacagcagtctggcaatcacctttcttgaacaactataacatatccatgtacggaagatttggttcagtgtaggatgcacggaaggtgtatttctccgtctcgactcgacagataatagttgtttaggggcacatattaacaggggaagaaggctgggaaagtgtttaggggctgtgatggaagaggaatattcccctgttaattgttagttgagttgtctagcggccgcgatggaacacgaatatatattctctaaattagttgagtttatcgtggaattgcgatcaggatattagagatttttaatttcaaaatagagatttgttatttagtgatactttatgcgcaaaaaaataaaattctttgatttttaaagctttgaacataaatcgttaactttaacggtgggaagaacaaaataaacgttaaactaagaattgtcgttagatagtcacttttaatatataaagatatataatattgtactatttatgtaattaatttcttatgttctctgtatattattttacaatagaattgtcatttttaattttcttctattgatatgtaatatctctaattggataatttttaaagatgggatggtttttttctttgttctggtgaagcgtttcacccatatcttttggttttcttgctgcttttctttatcttttatcaatcaaaattcagatttgattaagaaacagtgtaattaattaattaagaaaccaacaaatgtaaaattttaatgataaaaacagtcactaactctattagaagagcatattaactttgtttttgaaag

SEQ ID NO: 216798 - DNA, 778 bp, Cannabis indica
atgacaactccagtgacttttttagcgacgacagtactccgtgacttttctagggacgatggcaactctaataacttcttaagtggcgatgactgctctgataattttttcggcgaaattcattcttagatctataaagttaccatactttgtggtataagttttatatccataatttattttcttgtatttttttgaattcctttaaaaaaaattgagaaatatcttaaaaagtatattaattttactattaaaatataaaaattatctaaattacaatttttaaaggttataaaaaccgcgcaaagcgcggtaacgtctcctagtatatatattaatttttttttttttgaaaatatatatataattcttttgttaacaatggtgatgccatggaattatatatgagtttcattcttaattttctattttttcaagttttctaatttatttagttttaatcattatttttattatttatttcttcattcaccttctttattaattcatatttattaaattaaattctacttatcaaataaatacaatgcaatgcaatagtaatctaatgatataataattgcataaagagaatgagaaggtcatacatacaatgaaagttaatgaaaataggtcatacgatacaatgaaagttatattaatgttagtgtaatatatgtatataaaaggtgagaataatttttttcttttattatgaccattagttgcttttagtcttgtgcaaaatgacctccctcctcatatgaaggtatgatac

SEQ ID NO: 216799 - DNA, 749 bp, Cannabis indica
tagcgacctgctatatactatattgtatttcatttttacatacctttgaaatattagatcgccagtatatagttatatatttctcttaatgtaaaattgtaaaatatttggagatataaattaaaagtacactagtaatttctttgagaagaaatttcatttaactgtatcttctatatcttttatttatatatgtatagagagcacaaatactatctggattgtatgatatatgttggaaatattgtgaatattttaacaaaatatataagtgtcttagtgtgtgtgagttggaaagagtcccacatgggatatgaaccctcattgacaagggtataaagagtgcaactttggcatttgggtttgggccccaaggggtacccagttttgtgcgaatgggtgaggacacacacacttgacccaccacacgcgcgcgcgcgccgtccgtccgatccgagccgggttgggttggttggtgtggtgtgacacaatattattttttacagaaaaattatttaataaaataattattttttatttattaatttaattaagaaacgtgtttaattaaactgattacttagtcgtatcagttaacgggacacgttcaaaggaccaactcaccccacttcagaaaacgttattcttcccgttatgtttattcaatccattcgcctatataatgcgattgaactgatgggaagaaaacatctctttttcgtatcagaaaaatacagtttttcataaaa

SEQ ID NO: 216800 - DNA, 712 bp, Cannabis indica
atttttgagctaaaatatttttttgtgtgatcgaatttcctttaaaagttataagaacgagagaaatagagaatgaaataaaataataaaataaaatatttaaaatgaatgcttcaaattaatgtatcaagcaaaaaaatgtgctgagagaacataatagaaaagaaaaaagacattttgtatagacaaatttacatagtagaccaaaatttataaaaaaaaataggttaacatggaggaaaaaaatcacttttatgctttgttttttttttacaaaaatatcttttcagttaaaataataaatctttttttggttgttttatagtttatttataattgtataattataattatcatgagattgtttcatagtttatttatagttgtcgtgaagttgattttcgctgttttcttactttttgctgagcaaatattttttgtaattttaaaaccttacaagtgtatttttataaataaaaactttatactgtaaaattataaataaaacataaaaaatatatatttttgaaaattttctattttgtatatttatgaatttaattgaggaaattatattttatactttactttacatgatttaatttctacttttatttttatatttttttaaatatacccacttttatagatgatgttctcgctatatctttaaattaatgtaaattatgtgttagacttaaacaaaagagtg

SEQ ID NO: 216801 - DNA, 618 bp, Cannabis indica
cgagcgacccactatcgccatgtgtcagtgacaatagtgaaagcattaaaatgaggagctttctcttaagggttttactaatcggtggtattgaactttcatttctttccattccttgctctggccaacattgtctaccccttgactgcttcttcaagctttataaatttgtctacctgatccaagaactcacccattgagcccccccacagaaagcctttttatgtccttccaaagctcacccgcagccagccgaccttctccaattagtcccttgaccttagttgcttctatcatgaatcgattgatatagtcttttaacggctatccaggtacttgtttcaccacaactaggtcttcaaggtgtgttcggagttttctggaggaagagaattgggtgtataatttagaagcaaaagcattccaagagtcaaactttccaggagttagcttaaagtaccactgttgggcgacctcaacgaacgttactaaaagattctacatttgacgtctcccttcacccactgcaggtctgtctatatctcaaagtatttaatatgagatagtagattgtccttcccagtgtatattttccaagccaacattttgaacttgctt

SEQ ID NO: 216802 - DNA, 771 bp, Cannabis indica
ggaaaaatttgctaatttacaaaaacagtttagcatttaaagagaataatagagcggaacctaataaaagaattaaatttctgtaaatataaaagttcaaatttttttttaagaagctgtatattttaggaagcagtaattagtactgtcgaaagtttaaagcttaaaattactaagtattactaaataaaataaacaatatggaagacttaacacaacaaataagtaaaatgaatatggctaaataagccaaatacaaaaccaatttataatgccatattctaatctataattgttaaatattatttgaagttgaactagagaactacattatgttataataattaatacacaaataatatttcactaaaatcattgcaaaattatgtcttcttgaaataaaatgctctactatagtcttgttgttacatgccatactgactttaggtggccacacgagattagttgaaaatttacaaaaattctccgaccaatctcgtatgaccacatagctcaggatattgaattcaattaaaaaatatatatttatttaacaattatatgtattattgttttatttttgttcacttttatcatggagagattcgacattcttttcttatataagtgaatctactaactctttaagaattatagataaaattaagaatcattaatatttatttatctataaatgtatacacatgacataagtttacatataatattttattttttcatttttttatttttatttctaaaaaacaaata

SEQ ID NO: 216803 - DNA, 1055 bp, Cannabis indica
ccgaagtctaaacatgtccttaaagagagataatttttcgaaaagagcattcaatattgagaattagatttagtggtactaaatattttttttataagtgacactttataaattaattaaaaatattttttaaaatttattttcttaagttatatatgatcttaacaattctctttacaaaaacacataaggccatgaaacaacaaattatatatatgctgtgaattttttcctccaaagacacactattttgtacaccattttgagtttaatgttacattgcacaataacattcgtcttttctttttttttttaattattgtttatatatatttatattattagatatatttataaaattaaaaatttattttggaaaattctacaatacatttttctaaaaatgatgtattcctatctgtttcgacgtccgactaactttttaattttatttttttatagtcgtgtatattatagttatttaagacattctgcaaatatttaagaaatttataaaaatttaacacgctgaaaacattaatgtacctatacactgatgtactcctacctatttcggcattcgagagcatatagttcaagaaaaaaataggaacttttttatttttacacttctaaactagtttttttttttttttttttttttgttatatttttacaaaattccatatagaaacctctatagcaactaacggaacaacttaaatcgtaactaaaatctacatagcaacctacatagaaattactggagtaacccaaaccgtaaatttagaaataatatacaaataattatttataaaataacaatttttttaggactcctttttcttattactacaaaattagaggcccttgttatgatgcggcagggtagaattactgggtgggtgccttaacgtaggcaacgcttaactcacacttaaccgcaccgcaggtctggttaagcgcggaggttccgaaaactgagcttggagttggaggggcccctaactgaagacgctgctcagttttcctcttgatttttttctttcttctta

SEQ ID NO: 216804 - DNA, 696 bp, Cannabis indica
gttttagctccactgtataatataggtacttagtacaaactgttcagaatgattatataattcatctctttcactctatctttgtgtttctttctcttctctttcttctctctctctctgttttttcagtttcagtgttgttaagagtcaaaactcttactctgccaaggagagacattgttaagtttgtggtaataaatcctttgaggaagaaagagaatttaataaaaataaatccatatacgattaataaattcatatacataaaaaataaaattgttctttctcatggggaattaccctatatactttttttttaattttttttttcaaattttactgtttgggtttcgtaaagtaattagtcagcgctagttgcaataggagtttatatacgattttttgttgcaatttagattgcagcgctaattgcaataagagtttctatgcagaattccgtaaaaataacaaaaaaaaaaaaaaaattaattttaaagtgtaaaaaataaaaaaaacctacaaaaattaatcataccacatagaaatagaaaaaaaaaaaaaaaactagatacatttacctatgaaaagaaaacgaaaaaaatgttaatataaaaaaataaataaattagcataaaagaagaaggtttgaaatgaaatagggcttctttctttaataaataggtgctctttttaatt

SEQ ID NO: 216805 - DNA, 707 bp, Cannabis indica
aaaataaataaattttattttactaataaataacaataatttaaaaaaataattaaaaaaattatgttaaataactaaaatttatttctaaaataatataaaagaaacctaattaaaatattttatggtcgagattacttgagtttgtgtaattttttcgacttattttagtgtcaacttaatgataattttcttttatttaaaaaataacaaaatatttagtaaaacctaaaaaaaaaacaaaaaaaaatattatttttcttccttatcttctttcgaatctcaattacctatagatgagacaagcatttacaaagtaatcaatatggatctataaatatatatatactaggtgattcttacgtgtcaagccacgtagtgttagttttatttaatattttagttttttattttaattaataattaaaataatataattatttgaacgatttgttttattaaaaaaaaaaaagtgtcagtatatttagtaagtaaaacatagttgtgttataataatgtatgttattaatagtaaaatgtacattaatcttctaattgaaaaaagttctattatctcatttcatatctaaaaatagctacacaactatatatttatagactttcacattctttgcaaattactactaagcaccaataatattttcatattctaatatttttcaaccttctcctcttggtggtaaaat

SEQ ID NO: 216806 - DNA, 608 bp, Cannabis indica
taccatgtaaattttcctatattatagacttattaaactaatatgtacgtgaaatcaaatgagataatcacaaccgactctaactaatactgtaacaagattaatatggacacacaaataatacacaaatttaacctacataattatctaatgtaaaaaaaaaaaaaaaaaaaaaaaaaaaaactaccaaaatataatccttattattatttatatatgtttaaatcttggggtattttattttcattatgcacagtaaaaatatactcttatatgtttgtcaatgtgtatgtattaattaatgagaatactgttttgcatgcaaatatataaaatattattcctatgtgaatacaatttgtacagatgcaaggaaaataatattaatataaaatacataaaattgactgtgtaataaattattattatttttttaaaaagaaaaagtatgtctacaaatgttgactggttgatttcaaaaggaaaaaaataaaaggcaagaataaatcagtccaatttaataataataataataatacgtaggcgatgatgtggtgtaagtgtacaataataaaatttagggtaatttgtggcaaaacctcttaaag

SEQ ID NO: 216807 - DNA, 458 bp, Cannabis indica
atattatatttaattaaattaatatatctacttttgtaagtgaattactcaatatacttttactctccacttaaatctaatacataatttatattaacctataggagtataatagaaacatcatctatatataaaagtaggtatatcttaaagaatatttataaaaataaatgtaagcataaaataaaatagatatacaagataattcctaggttttttcaaatcacaacacatgaatatagggcctattatatcaaattaaaattttcaatcagtttaatttttatatttttctatctatctctacgtgatgatgagcatgaaatatatatgaaaaaaaatgttatcacatggctccatgttttgccaaacaaaaaatagatttcaaaaccagtgccacatcgatccatgcttattaattattcaattaataattctgtaattatcaccaatttcac

SEQ ID NO: 216808 - DNA, 780 bp, Cannabis indica
ttttttttttcttctttgtttctctagaaccatcgactcttttttttttttttttgttaatggaaccatagactcttcatcatcttcttcttcctcctcttctcaaacctccttcttcttcttctgccaaagaacccatcttactctcacaacgctcccaaaaatcaaaatcaaatcggcggagcactctcaagaacccaaatctgatctagcttcgatggccacaactgaccattcccgtcgaaggccaccatagaacgagatccccgcaccacaaaactcagaaaaccccaaccctcgatctgtgttatttgtcactgcccactatcgatctacagatctgcgaagaagaaagaaagagagggggaatgtgtgaaaaagagataaactgagctcccatgccgtcatcatcatcgtcgccggacttgtgtctttcccatcaccacaatttctgaagatgcaaaagaaataaacactgtagttaaatatttttttaaatttagatcggtacatttttttagtttggtagatgtgataatggttgtggtcgactgtgttggtgataatggtggtgtgagtggtggtccagtggtgataatgatggtatgagtggtggtgcagtggttaattgtgtggtgaagagttttgatctttgttattaggagagaggaagaattaggggtggttaatttttaggggtatttttataagaagaagaagaaaaagaaaagaaaaagcaagaagagaaaagattaaacaaactgttttttttttttttaa

SEQ ID NO: 216809 - DNA, 774 bp, Cannabis indica
attttaagtccccaaaaagtaagttagcgtgtcactcatcagttttgcgaattatgtgatgtaggggcctataaatcgtcgagcagctgttccgctcaggttggctggcacacttgaattcagaaatgaggtaagattagtataatgatatgcatatatgtttacatgtttagcgtacatgtttattaagcctattagattacatcgatagcggtattagtatatgtagagttatactggttaccgatagatgtatgtttggctcagatactgatcgatgctgtcacatcggtgcgactagaatatgactagtgtaccaagtataggctgatattatggttgatagtattgtcgtaccaacattctagactcagtaccgcattggacacggggataggggtatggttgggtgtatgggtgcctgattataattagggttatagttattttattgattatgcttttctactgagtctgtcgactcacagatattttttgcatgtgtaggtaagggcaaggctaaggttgagcagccatgagagcgagtggatgaagattgtacatgtcgaggcaattaggcctgaagcgtacggtctgggatagctggttgtattttgtatagacgctaggcgacaacctttgtaatacgtactttgtaatagttgtaaatattttgtacccgggatcctggttatatatatatgttaccttttttacatttataagtatttaagaaaaagctttaattacccatgaattttaataaactcgttg

SEQ ID NO: 216810 - DNA, 1007 bp, Cannabis indica
tagtcaattccactgtatgcctgttttgacacttgaaatttttcaaaaatttctacgaaaatatagctaaattcatactatataaaaattaagatataatcttttaaagtgaccaaaaacaagtgatgccctatctaagtagctcccaacatttatatagtatatatagtactacttttgacttttgctttattagctttcattattttgagttttttatttctttttttttctttttattgaaaaaaaaaaaacaaggtagggattgttgaatgtggatggttactataacaacttgcttgccttgtttgataaaggagtagatgaaggcttcatagaccattcagctagacatattgtggtcatagccaatacagctgaagatctcatcaacaagatggaggtaaagaaaatacataaaaacaattcactacttcgcataataatctctattcgataatttttcgcaaaataatcttctgatacacttgatattctttcaaaaaattttgttatgccttgttaaaaactctaaaagggcatttttgcaagataaatctttttttctttttgtttctatttatctattgaatatttttctcaatatttgaattcatcatttatattaacaacaatctatcaaataaatgtccaattatatatcatatttattattttatgtctaaaaaattaaagtttattaagaatatttttatactaaatgaattcaaaaaattcaaattttgtaaaaatgaataaacaagtttatataaaacgaatgcgatagaatttcaacaagttatgttgactgaaaagaatgaatattctctatttgataaatatttttcgcaaaataatcttccaataaactcgatattctctcaaaaaaaaaactttgtcacaccttgttaaaaattctagaagggcatttttagcaaattgatattataaggtacatatttttatggaattgatatcttgagtgtatgatattgcaggagtatgca

SEQ ID NO: 216811 - DNA, 751 bp, Cannabis indica
gtattatttttattttattcttgtactaatttttttgttgtataatatgtattttattttgtttatttttgtatttgttgtttttagtttattttttaagttggttttttaaaattatttttttttttgttgttacaatttactttttagttgtttttttgattttatgtgcattttgttatggtgcatatttttattttattcgtgataattttttgttgtatgtgttttgctttgtagatgtggatacatatattttaatttacttttttgacacatttttttttaggaaaatacaatgataagttttccccttttttatcgacacattgtgtattattatatattgacaaatcatagttatttttttatttattttgaattatacattatccattatattatatacatcattttgaaattgtaaaattttattattaatgtaaccattcatttaatttctaaaaactaaatagttattttagctgttactagctcaaaaaagaaggaaaaaaaaaagagttcaaagtataaagttgtaataaataaatgttacgaaaaaaaaataatgtagtagtacagaaaataatcaagttgtcaaaactaaaatcactttgtagtacgaaaacaagcggaggagttgatattgttttgcatattgtaacgaggttgatgtcttgttatttctctattgttttgcatctgtctttttatagttttattactatttttttagttgctttagttgttt

SEQ ID NO: 216812 - DNA, 655 bp, Cannabis indica
attaattactcatgaatataggacacgcatacacaagttacctcatgggctagctaggcttcaccagataagctcaaaatcaatgtgttatttgtaaactcctcattagaaaaaacatggtaactagtatgatatctataatactataaatactcactactataaatactcactgaattattcatgcaaagggtttaaaatttttgacttatatacttgctgaggcaaaaaataaagtgctcatgcttattgtaatctcaactgtatatttagctaatctcataataatattgactcatgaattaaagctcgttaacactccaaccacataaaaattttgagtgttttctttatatatatcttttcgaattatatcttctttaactcttatattattaattagtttttttttttttttaaaaaaaaaatgggtaaataatacagtacacttcttagatatataaaaatttggtaaagtagtaaatttataattttttttctttaagatgtgaaggttttcaataatacctttcatgtatctatttaaattttttttttaaaaaaataaattaaagtgtcaaagattcaaatattgacctttgaggagtaatattgagaagaaatcttccactatgaaggatttaagcagaggaag

SEQ ID NO: 216813 - DNA, 574 bp, Cannabis indica
tgattgaatctatgtgtgagcgactgatagtggtgtatgttgaaaggttatgtcttgttccttttttttgtttttttttttttcttctaatgaattgaaaaaaatccaaaactaaaacctaatattgtaatagtagtgttacattataaggaaaattataaagactagtgttttcaaatcattacactattatatattatattgttattaaaataattaagtattatattacatattttaattcaataattattatatatattattaactatttacactatttataattttggactatgatgataaatgtgtgccactcagacttaatagtgatgcttatatattaataatgtgacataatgccatattatatacataaatatatggtataaaacaaattattacacataataaacaattgaataatgtgcctatttaatttcataggaaacatctcaatttgtaacaatggaaaagaagaagaataacagagagtttctgaaatctcaacactaagccagaacagtggtatttttgtaactcactgaactaaacttagaaaagctttatttat

SEQ ID NO: 216814 - DNA, 637 bp, Cannabis indica
tatttttcattgaagtgtaatattacatcattgcttgttgcaatcttcatgccttttctccctccaaataagatataaacaatgtcaattagataagtttcttaaatttatactttaatataagtaaacttattggaaatctgctgattatatatacataatgggtaataggtatttacagtaattaaaagaaaaaaatggtcaacttgaaaggaacatatgactcattctaatattttttgtctttcttcattaaaaaacatattaatatttattatataaagatgtcttattgtattaaatatgtaaaatatgttttgattgaattcagtgttatattaagtagtgctgtaagtacggatgggtttttttttttgatacattacgaatttgacatgagtttgaaaagcacgagtacgatttggtacaaaaaaatacaagtttgaacatgatacggtacgatgttacaaattggcacaacacagcacgagaagtacgaaaaagcacagcacgtaagcacgaatagactaatccgaaaagtacgacacacaacaagtctgaaaagcacaacacgacatattaaaaaaccttatagtttattaattataataattagatgaattcatcaattataaat

SEQ ID NO: 216815 - DNA, 535 bp, Cannabis indica
tttttttttttcccaaaaggatacacataacacatattttttttattattttaaatccttattgtatatggtttagatcatgtggtaaatacattctatccgatattttctttggtgatctcaagctccttgaaaactatgacaacatcgaacatacttttggtaagtttagtagttttttttttttttttttttttatttttttttttccaatttttgttaattttattttttgacgcggtgatcaaatcacacaagatatcaaagcagcaatccacaagattattttgtaatttttttttacattgtggctaataattatattttttctgtggcatgatcaattttagaaattttattttttttcttgtaaattttttttaataattattttactatttcttctctattttaaaataacatgtatatatatatgaagagttattaatattgtcttaaattttaattgtaatataatagcattcaaaaagttgttaataaaaacatagatgattactatatggtaaataagttg

SEQ ID NO: 216816 - DNA, 1001 bp, Cannabis indica
gagatgggagatatgaggtgcattgcgagagatagcaataccagtaagaaggccttgatcctaaaatgaatggaggatggcagaaagcccttcagagcagaggataaaaagataaggagaaaagggatctccttgcctcaaacccttggtaggaacaatctgactagaaacttcccaattaaccaaaaaagagatagtaacagtagttaaacacttcataatattggaaacaaacttgatagggaaattaaaatgatacatgatattattcatattattcatattattatttaattattcctgattactttattaatttgactcactgtcattggctaaaagcaaagtcaacactattattattataaataataatcgtaataaaaaagataacattcattgactcaaattaataaataatatttctaaaatacatgtccctcattcaataaaaaaataattttaaaattaatgcataatattcaattattcttaaaaataatatatataataaataaaaataaataaataatttattatttttaattatgtaaaagtttatgctcattcttaataataaactcatttaaaattataatgtggcaaatggtacactctaaccttctcaccagggacaatcttgttaagaaacatgttcccattgatagtgcctactgtccggtttgtgaatgggatctagagtctcatgaacacttattctttgaatgtcccttttcttggagagtgatgcaaaatatcaagaagtggttgggggaatggctttggccaaattcttttcagttgcttcttgagtggatccaaggaaaaagaccgagaagtttattaatagaaatctactatgctacactagctagtgccatatatggaatatggctcaatcggaacttgtgtgtttttgaaggaaaatgtatagccccattgtatatagatagaagcattaaaagagaatctcaaaactagattgtctcttattcaagata

SEQ ID NO: 216817 - DNA, 959 bp, Cannabis indica
taaatatcaattaattgaaaattactaagtttttttttttttaaaaaaaaaaacaaatgaacaaggggccgcgaccccatgtggtgcctactgctatagctgacaatttttaagggattttaagtgggcactacacctgtggtgccatttgttcaagcggtttgcacgatgttatttgtggtgccgggttattatattttggcacgaacctattggcacgaccaaaagggcacgataagtcgtgtcattataatgataggcactaaaaaaatgagtttgttggcactaatttaatcgtgccaataccctttttctcttgtagtagagagattgaaacatcagttgttagcgagattgacacaacatgtcttcttgatttttagacttttttaaattttagacaaatacttattttatgttctaaatttttattaatacttatttcagtttttattatttcagtttttataattttaggcttatagtttatcatgttgtaaactttaaatttattaatatgaattgtatttttaatttaaataaagtctttaatattaaaactaatttataattatttgaacaagttatataattggtcgaaaatgtaaaaattaatataaatttataattattaaaattaaaaacaattagtaaattaaattaaataaataagaaaataaaaaaaaaatagggcaaagcttaggtacttacagttattagggaataatcgaacacatagactaccctatttctttggttattcccaaataactgaagatgtagggttgatacaccccacgcaatccaagcttcgacaaagatctatatcttcagttatttgtataacctaagacataggtatcccgtactatcttcgataatttttagacccacatcttcgtctcaattgtcttccgtagcgattattttgttaatcaaagataaactaacttaaaaac

SEQ ID NO: 216818 - DNA, 757 bp, Cannabis indica
ttttttacttttaatcacaagttttgttgtgactaaaagtaagatttgttgtagtgggtgtttctacaatgcactctcaaaaagagtttaatcgatatacttttatatgttgagcatatgaaaaaaatgatcattatcttacacgtgacactcttttattctatacatgtgtaaaataaattatttaaactttattttcggtatgttaaactttttttaaatttcaaatttttgcaaaatgtcctaaaacactaatgcagacgaacataaaaaaaacttagactaaaatattttttcaattccaaaatagatataattggtacatcaataaacccctttttaaattttaatattaataataatataaatatagttcaacctaacttatataccatacacactacttttgtttgactcaaacacttacattaaatctcttctcttctccacgtacaaaaaaagtcaacaaaaaaagagtcgtagtttagcttaacatttcagcaaatttggatccatatatttcaactgtcgatcacctaccactgtactttcaagtcaagatataaaaacattttatttttatttatttttttaaaaaaacttaaattagttacatttactaagtaacattactatatattaccttacccactatagtaaatttgtttgactatataatatagatatataaaaatcattgaacaagtcaaaaaaacaaaaaaaatcaactatatatgtatatatagagctacattaa

SEQ ID NO: 216819 - DNA, 1122 bp, Cannabis indica
ctaaaatatttttatctgatcacaactaatctaacgttatagcttgttaacttattattattaatacaattgtttttttttctttttgaaattttaaggtgtccacaccacagaaggtggcatctgctaagttatttttcaatatatttataaaattaaaatgtgggaacataaataacaataacaacttataatttaaatcttaatttaaaacaattcttttaaaacagaaaatcttactttaaataaagactatttataatttttgtctttgaactatgacttatataatattatatctctaaatttttcaattgactaaaaatattttctaaactaatcacagtgttgtaaattaatccttttatcaaattttatcacatgtggcatacaaaataatgatttggttacgtcagtatcatgttaacgccacatgtataattgatataaaaaaatatatattttttttttaatttagtattacataattttttaatcattatttatttttatttttgtaaaaaaaatcatttttatattgttaaattatacatttagccttggtgacaattggttcatcgcgcagtcatgtcattattttgtttgtcatgtatgataaaacctacagaataaccaatttataatattgtcaatagttcagagacaaaaatcataaattgaaataaataaatgtaattaacattgtaacgcagattaatcaatcttatttattttccaataaaattctttccgacaatatcttattgtaatttttttttccccaatatctctagttttgcctaatatatcatcatcactaacatcatattgaatacgtaactaacataaaaactaaattaaaagaattaaaatattctgttaatttttttttaaaaaaaatagtgaaaaaagaaaaaggcaaacaaaaagaatcgaacaaaaatataatgtgaattttgttggcgtaagtttagtgaaatcattaaataataaattgttcaaaaataaattataattaataattaatagagaacaaacttttatctcaaaaaaaaaaactagagaacaaacttttgattaaaatagggtgggatctagtaaagaatgaatattaattaataa

SEQ ID NO: 216820 - DNA, 620 bp, Cannabis indica
taattgtgccttagttgcaaaggcaacccgaaacagcacgccacagaaaatggtggacttttggggggacatccaactgccacaacaatttccacaaaaaaaaaaaaaaaattaaattattgctacattagtgtgtcatttagatatgattatacatatatacgtatatttaaaattttcttaattaggtaacatatgctatattcttaaccaaaattcatataattaaatttgagtgtgtctatatataagttagattcgttaatttgatataaagggtttttattcctaaacttgatgaaaatatggtgtgtgaaacaatttaccataaaaagcaataaatttttaattacaactatttggatttaaaatataaataaataataaagttaaaataatggttaaaaatatttataatattttaaatttaaatttctttatgtacatataatttttatattaaatatatataataatattataaaattaataaaaaataattcatatccactctatatagaatacatatataataataataataaagtagttgttgattttctacataactaaattacgtgattataaacagtaacaggaatgaaaaggaacgttttttg

SEQ ID NO: 216821 - DNA, 867 bp, Cannabis indica
acaactccctggtcagcactgccatgtacatcatcaaccccaagagcgtaggcttgagcggatgactttgcttttgcctttccctttcctcgactaggatggcttgtacttgcaccagaccctccaccttgattgtaccctctttgactcccactagaagtaggagtttggaaaccttgtgagtaccccatgttgaaccctaaaccctgtggcctaaactgatgttgatactgagactgctgttgtgatttggggtgtgaaaccataggaagaagactgagactggttcgtcctgggctgtccatgaaaaggagtagactctacgtagctctctatgggtcctctgtgagatgctttgaaatatttattgtctttgtgggaaatctttcttcttatgaccttgttgaccacaactgaaacacgtgtatggtccactatgagcccttcccgatgatccactactagtgctacccccactaaacttactagtgctacccccacctaaacttgttgtccttggggtaccactgtccttgattcttcttggtcatctttcgatcatttcctcttcctctgtttgtgttcttcttctcattcccttctacatgagcctcgattcgcaaggctagtgtcacacactcagttaggttgttaaaggtcgaaggggctataggaccacgtatcgcaggccttaaacgacgcatgaactgttcaatcaccaagggtttgtcaacagcaccaggatatgcataagagaatagctctgcaaacttcatgtaaaactcattcacagtcatatccccttttcttaaaccatcgaatactcctataagagccctcctgcgagatggattaaaatattgttcc

SEQ ID NO: 216822 - DNA, 813 bp, Cannabis indica
atatatatattttttaaaagaatatcattaaataattgtaaggtgctacttttagttagtactaggtatcattaaagcataataacaatattgttatcttaatgagcattgaggtaccttaaggtgcctaagtataagtaaactagacttgtggctaaagtccacacttttaggaggcccaaaataaaaataaaaaatctcattaagtttttatttaagtaaaattaagtgtattgtaaaaactaaatattcatagcttaattaattatggtgtatgacacattatataatagtgtgggttcgagtcccataatactatttttcaatatatccccttaacattttctatcttaattaattgcacccacctttttttggtcctggtaaaaactatatatatattataatgaaaagtacagaatatgtataggtggcatcttagattgttttcatttaatttttaaaaatttgtaaaatttttctattttagtttgaaaaaaaactacacaaacaaaactatgtgctaatttttttttctttctaaaatacattaaaactaaatatctcacattgtttataaattattttggtagtatccatataggcaataaatagtatttttattatgtcatattgatttgtattttttttttattatgggtggtttattaaatttttactctataagttttttatttttcatctaatatataatttattaagagttaattttatttagggcttttttatttttacacttcaaaacaattttttgtttgcatttttacggaattctacatagaagcccctatt

SEQ ID NO: 216823 - DNA, 869 bp, Cannabis indica
agaaaatgggcagacctatttatgaaaaccgagtcagtccgagtaaagcatgacacgaaaatgtaggcttacgagatgtgttaggcttaccttttaaagtattggcacgacataatacaatacgacttatatttatgggtcaacacgatacaactatattattacagattttttaaaatatggatcagactaatacgacacacgtatttagaactataattaatgtgatgtcgtttatcatctcaatatattacttaaaatatacacaatccgaagaaagtaaaaatgaaagaattaaaacaatttaaaactcttcaatttgctttattggtcgatcgaaatcatttatctcttttcaaattgtctttttctcactctctcctccctttattctggttgttcataggcatgttacatgtccaaaattgactatgagtcaaattagagttaaaacatgttttattgatttatttatttattattttcatcaccatttttctcgttttttttattatgagttttttataactaaatttaactattttttttttcatttgcacttaacctttcaaaaattgtattttggaaataaaaatttaaattttgtaagtgaaaaattatttctaaatatgtgattggttgtagtttgatttaatatttttaagttttaaaaaattaaatatgtgattggttgaaaatctcaaaataaaaaagtaagagaataattagagagttttaaattttatgatttgaaaacataaaaaacataaaaatagtattttcatttgttagcctaatattcaaattttatttttaaaaacactcaaccaatcaagaattcttatgtttaccaccactattttaatttt

SEQ ID NO: 216824 - DNA, 416 bp, Cannabis indica
agacaaatattaaataactaaattagaataatataatattatctaaatagataagcaataaacaagtttaaaagctatgattacagtttgttgagatttcaaatcatggacttcataaatcaatattattgtaatacattttttcaaaaaaaaaaatattattgtaatatgaatcactacatgacgactcaattcgaaactataaggaggttggtaattttgtatctagcatgattaataaataaggtattctatattttgttagtggcatacgatttattattgattgtttttatgatttatgtaattattaggggtgtttattggactaaatctaatgtttttaggtctatttagattcgattcaataatatatttaatgatagattttacctgatctgatccaattaatttta

SEQ ID NO: 216825 - DNA, 1201 bp, Cannabis indica
gaaagacctaatttacaatgatggtataacccaagtgggaatccaatcagaacgaaagaacaacttttggcatatcctattctaaagagaatattctttaaacaattacaccaaacaagaaacatcgtaaatttaataaaagaaaattactttttcttttaatagagaaaataaattacatagtgaatgagtgatagtgatagaagtaactcccgtacttcaaaaactagcaagaaaatatttatttgtacacatttgaagtaatgaagtttttttttttttttgaagtaataaatagagttaatcttacaagagaaaaacttgcctaaattttagatcacttactgagatggtagtattaataaaccttatcatttatgttgctttggattcctgcactgcaacatgcaccataaaccacataatcttagtcagggaaaaagactaaatttaaattattatttttattgatttttttttaccattaaaattactttctcatatgattaggcaaagctgtcttgcagagaagaatttattaagatttttatgttttttatttttttttccccactttaaaagcatctcgaatggaagtaatgtttaaagttggtatgaaatataatattttatttttactctcattcacatcattttgatcatttcttactaaaaaaatacatcaatactaactaactctaaaaattatcatcatagtcccacgcactattaattataatattttattttaccttttcgtattttgttttaatcaataacttttatttaaaaagaaagagggaaagtgttacatatcacaattgctcagctattgtaccccaaccatttttctccaacaaagtagctaaaggaggaccggtttagaaatttagtgggtcatagaataaaattatttttgggcctttattagaaaaaaaaatattgtagttttcaaaattaataaataaatatgtaattttaaaagggaaagatttttttaggcttgtgagctaggtaagcctaaggcacagacctaacccgcttatgcccaagaccgaaccaaggtgaaaggtagcccaaaccctgacatgctttggtaagcaacgattatatatagagcattagagctatgacttttataattacattagtttgatcctcacaataaaatagtaatgtcacattggcctagttccaaaga

SEQ ID NO: 216826 - DNA, 582 bp, Cannabis indica
taaccaggttggttgataaggaggatacactagctaaaatttggaagaagccggagcaacgattttagaataattctttaaccaacaagattttcttgtaggaaataatctttggattcaagatgagtctggaacaaaacttaaatgagttcttaaggatgcacatagagttggcaaacttaggggaatttgaagctttgagtgatgagaatcaagctataattattctcaattcactgctagagtcttacaagaaagtgacgacttcaataaagtatgggagaatcgagattaatcttgaagaagtaatctgagctctgaagtctaaagatttagagatgaaggtggagaaacttaatagctttaatggagatctaaatctaagtagagggagaccaaatcagaagaaaccatggcaaaatcaaggaagaagtaaaagcagaggtccacacaagggaattaatcaaaatagaggaaaatcaaactcaataggacataaagaccctaatggaagctatcattgtggaaagcgacacactccaaaagataatgttaattctacaagagaagtagtggaaaacc

SEQ ID NO: 216827 - DNA, 507 bp, Cannabis indica
tatagctttattgtctaaatttccgggggcagttttgtcccatggggctcgctctaagattttagcggcctatggttggcaaagcatgctctgcggttagacgatgagctatcctggttcgaggaggttccagcgccgatggcggacgtggacgtcgtaaattcaagagtgattttaatcactttgtactaaaaaaaaaaaaaaaaaaaaaatacatatcattattaaaagatattagtgatgcctatattatatgtaaaatcattaatgatacaaattgagtttcatataatttaatataatatttttttatgaagaatcactaaccgattataagacgacatttctaaaaaaaaattaaacactattaatatctaataaaaatatttttttttatatatatagttatacatattatataagattaagtcccaaatactattaattccaacatttattctacatatataacacttatacgtactatatatatatatgatagtttat

SEQ ID NO: 216828 - DNA, 580 bp, Cannabis indica
ttttgattgaaggtcatagtcctggtctaagttaaggttaggagggttttagacatgaatcatggaaacacatttgcatccatagccattgtcactaccttatgaaacaaaagtaactttcacatagttttaatagaacaaatcttttttcttaattaccataattttctaaaaaaaagaaagaaatctcatatttgtaaaacaataataagtttcgccaaaaaaattagtgacactgaaaaagtcaccggaaaagttatcgtcgccggaaaagttaccaccgccggaaaaagtcaccgtcgccaaaaaaagttaccaaaaataaatgtcgcagatataaacaaaatagacctagttctattatataatgaataaaaacaaataacctaaaaaaattcaaactagttataattgaaatataactggtactgcaacataatgaataaaaacaaataacacaaaataactaaaaccagttataattaaaatagaatcaaatctataacagtgttacaatgaataaaaataaataacacgaaataactcaaaccagttataattaaaatagaaccggttatat

SEQ ID NO: 216829 - DNA, 596 bp, Cannabis indica
actctaatttattagttgatatgtaatgttattacgctacactaaaaaaataatattaagaattttttttaagaaaaaacataacacagaaaaatatattatttttacggtttgtaacttttttttttttaacaaaaatatgatcgttagaaggataaattgttcgattatttttttgagtttattttgtagtttatttatagttgtcataatgttgatttctagttgtcacgaggttgatttttagttatttcttatagttgttttttcactacttttttttgtttttaaaaaatgagaattcgtatatttgtaattataactttaaaattatatttttgaaaattaaacttgtaagactatataaaaagtcaaggttgtaaaaaattgtaattaaaacatagaaaatatatctttatgaaaaaaaatgtgctcatcaaaccacatataaaacgagggggtcattcgggcacaacctgtgctcgttgtaacagtcggtctgatgagaccattgcccatgctttatgggagtgcacggccagtaaaagcttctggcgggtgagtggtcaagctaaggagatgaagcgagtggggga

SEQ ID NO: 216830 - DNA, 653 bp, Cannabis indica
ctcacagacttttcattactttaacttctttctcaaaatagaaaaataacatctaatatgctgacaataaacatgtaatcacatatgcatattattatactaatcttaccttgagtctgaatgcaagcgtcccggtaactctgagtcggaaactactgctcaacgatttaaggccctaagtcacaatttacgtaaaactggtaagtgatccgctaaatcacttttggagacttaaacttgaaactaacgatttccctatcgataactagcgtgactaaaccctacacatcgaaaaaaaacactaaaaggaaaaataccccaaaaaaccggtaggctaattctgagcaaatgacaggccgtttttttttgggttttctgcctagaaaaatagtaggccattttaccaaaacgacttgccatttttacagtaggttttccccagaatcccaaaactacctcaaattgaatccaaaccttcccaaacttttcagaacaccaataatcacatttcaacaaataaaaagcatccacaaagctctgaattaaaaaatgccattgttgagctaagtttgagcttaaaactcaattctagctcaaaccttgccaacaacaaaaaatttccccaaaaccagctcaaacaaacataaattaat

SEQ ID NO: 216831 - DNA, 735 bp, Cannabis indica
aagtgtcaaaacctgaaattaaagaaagcgcaattctattccaaaaagtgataataaagaagaaagttaactctaaaaataacataaataataggctaaaaatatcttaaaaaattccctaaaactaaatccttactcgccctcgagtaactaacaactaaaaataacacaacctaaatgaaacaagtcaatcaactgaaatatgagcaattttaagtaaaataaataacatggttatgaacaaaatttttacctataataatctagaatttcatttcattcacattcttgatccacctcaatcttttattcagttcatgaaaccattattaacacttaactaatagttgaaacaatttatgcatgtcaattacaaccatcaatccactaagccaaaatatttcataagcttgcaatacttactattctccgctaatataaattaatgcacaaccaagtgtcaaaagatctttctaggcataggtacgtgtagacagaatggtcatttaggctcaccataagtttctcaaatcaattcacctcataactttcacaaatgaacccgatattcttttttttttttaattacatgagagattttttttaacaatattacaacaacttgatttttatttattttttactctttttttctatgaattttttcttcaaatttgacacttattgtaaattttttttctttttcaagttgcatgccaatctaattttttttta

SEQ ID NO: 216832 - DNA, 1021 bp, Cannabis indica
aaaggttctttaacaaattcagtttgattgtaaaactgacatctttgtggctttccaacaaagccagtaagtgtgttttgctttatagataaatatcagttcaaattcaaatattcaattcaaatatttaatttaggatatttattattattttattatagataaataatattttattattttattaaataaaaattaaaagtcacccataaaattctcaaaaaccaagaatttcagttatataggtatactttatataaaatagatataagttagaaaaattacataaacttctattttggtaaaaaatttattaggaaaattctacaatgcacccctttaaaatggatatattgatacacccctatctgttttagcatccgaaataattttgtacttaaattttttctcatgatcatgtacgttatagttatttaagacatcctgcaaaattttaagaaatttggaaaagtttaagacgccgaaaactatgttcaaacagtgtattgcacacatgactattttattttatacgcgtgtaaaatcgactgtttgaatattattttctatattgtaaattatttcgaatttctcaaaaatttgtaggatatcttaaatagctataacgtacatgaatatgaaaaaaaaatagactaaattttttttctgaatgccaaaataagttaagggtgcatcaatacatccttttaagggggtgcattgtagaatcaccaaaaaatttatacttttatgttcaaagtttttttctaacattcttacggtattctataaaaacataaaaaaaaaaaataatagtaataacaaaactacatgaaaataacaagaaaagaacattaaaataatatcaaaacaacaacataatatacaaataagaaaaaattaacaaaaataataaaagtacaacataaaaatacatctagactatattttatgtaaataaaattaaaaaactgtaaaatatttaaatttctacacagccgtattttataatttttttttt

SEQ ID NO: 216833 - DNA, 708 bp, Cannabis indica
aagtgatgattgcttgttagctttagaagaagtggaaaccccattaatcccccatattcaatagaatgatgactttgagccatgaaagccactacttgtttatcctcatcaaaacttttgcttgcaacataatctttttcttcgtcactatcgctccaggtggcaacaaaggcattcttctttttgagagtgttagcacactcagcctgaatgtgtccaaagccatcacattctctacattatatgctcatgctcttattgtcattgagttgctgaccatgcctgaagttcccgcaagatttctattgggaacattttctttacccctagaaaaaatcttcttctacttctttttcaataattttgcatagttcttggttaggagatctatagtttcatctgagaaaccaacaaacacatatgggacaaacttcttttattccttgtgaatgaatgcaagattgttgtcccctttttctttgttcacacccttctgctttttttctttcttccacattattaatgaaaattcataattctacaaggatccaatcagttcatcaagatctagttcctcggtgtttttcatttcttcaatggaggttactttagacataaatctcctaggcagaactccaagaactttacgaacaagcattgcatttgaataagtctctcctaaagaataagactcatttgatatgtcac

SEQ ID NO: 216834 - DNA, 1007 bp, Cannabis indica
gtctactttggtctaacttttttgggatagtttcatacaaaattttgtcgtcccctctgaattagcttactcatttatgagaaaacaattttgtctatggcctttgtgttttttattcattagatgaatgttgaacttactaatattatatttttagggaagttgacagcataaatacttaataaaaatttatctgtactttaagtatttatgtgttgcactcaaatatcttatttttttttaattttaatgatataattatttaatttttaaagcataaaattaggtgaatatcggtaattaaatatttaagtggcttaaaattattaaaaaagcaaagaataattagtattgttaatatatattagagttttttttagtctaaatcctctcaactatcactttaattacacataatttaagttcaaattttgacggcgaaacccttcaaactagtgttttacttacaaatttaaggtgtcattcatttttttacagttaattgtcaatatagactacttatatgtacacttttatacatgtgtcaaatttatattggtacacctcatattattattttaaaagtatataaattatttcaaaatttataatatatttaatttttaaaaaatattttatttaattttagaatattttttgaaaataatttttaaataatgatattaagtgtatctatataaacacgttatgtgtacaaaaatatacacataagcagcccatagtgatagttaatcgaatgacaccttaaatttgctactagttcaataatttggagggtttaccaccaaaatttgagctttaggactaaatgcaagtgaaacgataattgagaaagttttgtcgcaaaaaactcatatatttaccttttgttaaattttttttacgttaagaattaatatttttatttttaaatttcaattaatacaaaattctgcttctttttattaaaatgccaatttagtcaatttgtgtaaaaaatttaaatg

SEQ ID NO: 216835 - DNA, 639 bp, Cannabis indica
tttttatgtattaaaatacatcaatgacattgtcacacatgtaaatcctaacagatacttaatcgatataaaagttataagttttaaccattaattatattatttattatattaacaaatactttaatatatatactaataaaaatatttactttttttttttacagtttggggataagaagacatacaatgcaaaaattaaattacagcgacattggataaaataattatttacggtgattcacgaagacttgcagtgattcacgaaggcttgcagtgaattatataagaatttttcccatattttctatgtttaattagataacttgtaaatatttttccccttattttttctatgtttagttagatcataacttgtaaccacttggattaattttaaaatatttgtgtaatatatttatttagaataatgcctataaatacatttaattatatggttaatttattttttaattatatgaaattaatatttaatttaaataaattaataaaaataagcaaaaataaacaaaaatatttaattttcagctttagaaaacaccctacaacgtcagttatttgaaaatgacctacgccataaaacactatgacgtcggttatttgctaataatcgacgcc

SEQ ID NO: 216836 - DNA, 597 bp, Cannabis indica
acttttcttattcgttttaccaaattaaaatttgctcaatcgagttgacaaagactaaatcgatttaaaaaaaacaaacaatataaacagttagattaatataacatttttagacacgaaatgggcatttggtctagtggtatgattctcgcttagggtgcgagaggtcccgagttcaattctcggaatgccccttttgctaactaatttgcttattattttattaaaacataaagctaggtgacttcacctatttttttttaaagaaaaaaaaaaccaactaaaagtaagaagtaaagaatattagtaagtttcgtcctagtgcatatgtttaagaatatattattattttatttttttttaaaagaaattcaaactcattaagaaaaattcgctcttacagaataactcaagaatcgagaacaagcatctgtctaaccacaatctcctaaattagtaacagaggttgtcagtgtatgggcaacaccatttgctaatcgcaaaatggcactgcaagaaccaccaccaatagcagctaataaataatagatttctaataaaacaaactgaaaacaaattaatatgaagcttattaat

SEQ ID NO: 216837 - DNA, 679 bp, Cannabis indica
taaataaaaaaaaacagtaaaaattaagagcaaaaggcaaatgatgatgaaaaagaaaatcaaaatatgtaataattaattaacaaaaagaagcaaatattggtggaaatagctaatcgcaattggtttagtacgtattatacttcaaattgtctagtgcttccaccttaataaattaatgtcaaaaagagaaaaaaataaaaacgttgatataatattaaaattagaatatataaaaagtagctaaattaaggcttttatttaattaattattagttttgataaaaaaaaaatataagataagagcgacaatctcaactacaaaagaatgatacgtagtaatgacatgtatatggtgtaaatatatttatattatttatatttatgttattatattaaagtgtggttatataactattttttttaaatattacaatttaaatttattatacatattttttgtcttttattttattttatattagatgtggttatatttaatattacaattaaatttaaacttattacactaatttaaaaaattattttatagaataacatccaaaataaaataaattatataattaaaataaaaataataaaaatgtaagttaatataatattaacttataaattacgtcataattttttttttctaaattaattagataataattat

SEQ ID NO: 216838 - DNA, 637 bp, Cannabis indica
acatcgtactgcagcgccctatcaaaagcttgtattagataagcagatttacacgagaatcggtcattactctcctttgtctagattcatctatctgtaccatgacctgagggtttccccccctttcaagatggctgaaacggaatctttctcaaacaaataatttaatttatgaatatcccaatccccatcatctgaaaggaggtcacaaactttactatgatctgtcactccaacacctttcgctttagggtagaaatcccatccatgggatatccagggattctcctaaattctcgtatcctttccatccccgactaatttgcaagccccctttctcaaaagtcaccaaccctcgaactttgatatataccaaatcatgctcttgaatttttattcatgttagacattcattactaaaattaaacaacagtcattaaatctaacaatctcaatttaaggaaatttttaacgacattaaaaattcaaaacacataatttagtagctgtcaaagtttatggacaaaaaacctaatcggtgattctattatttaataacaattatatcgataaacgacttgttaattgcttccgaaaaaaaaaacaattatatggataaacgactcgtcgttccctc

SEQ ID NO: 216839 - DNA, 589 bp, Cannabis indica
atactatttattgttttaaacattttattaattgttttaggttttaataattatttttgtatgaggatatgtgtatatattaatattatatatttgaaatgaataaaatatattaaaaaaattagagtttcggtgatgtatgatgtaatgtaaaaatgttgtaaaatataaaaagttgaatttttatgatatattttaaagaatagagtaaataatctggtatcaatgtcttggttgtgtagctaactccacgaagtaatagcaaactagcaatcatggagggataagttgaggaatacttttttttgtatccattaataaaaaatacgttcatattatatttcattaaaatgtactgacttttgtgagtgagttgtccaatatgccctcaactttcatttaagtctagcacttaatttacattaacttaaaggctataattgagacattatctataaaagtgagtatatcttaaaaaaatataaaaataaaggtaaacattgaaatatgtaaagtaaaatgaatatacagtgtaatttcttcaatcatggaagttgaatccacaaaggtagaaactatgagtcgagac

SEQ ID NO: 216840 - DNA, 239 bp, Cannabis indica
cactcacaataagctacgatttttagaagagaggaagagagagaaggtggcggttagggtataggaagaaggctttgaatttttctctgaaggaatgagatgcatcctctttttcctgaagccatcactacctatttatagcaaaccacctagagttaggttagatttatttggcaattaaaataaacaaaaaaaataaatggtaaattgctatataagtggtcggccatgatatggat

SEQ ID NO: 216841 - DNA, 710 bp, Cannabis indica
aatgaatccttttgtcttgaatctagtcgttgacagaggtcatgctttttcaggttcagatgctctcgtagatcactctcgtcatgattgtggccggaccctgcccttcctctcaaggtttgactcacttttttcttcctacaagggtttgcacgagtttcattcttatgaggctgaatagtgggttggaaattttcgtctgatactctacgtatcccaagttgtatccctagtcttttctcagtttcctcaagttgaatcttctgagagctctcagcatatccctttgtcatatcctggccctgacttgtgagccacaaggtttgcctcgtaaacctctttcctccatgtcaggttgtttttggttacaatctcccagcgttgcctttacggcagctatttcacgctccaactcggcattacattagtttgcttcctccattcgacgcctaagatggcgattttctaattccacgatcggtatgtgtctggttaggtcgtaagcgccatcctcatcaacctgattagggagtgaccgtttgttgctcttctaaggtctgtcaagctaggggccccaatactgggttttcctagggctttcattctgttcatgcgatgatttagcagatccctgaggactcaatggttcttttccaggatgatgattgattccttctttaggactactaccggtggtgtcatccatcact

SEQ ID NO: 216842 - DNA, 808 bp, Cannabis indica
tccaaacacagtcttctggcatatgtcctactgtgaaaggagttgctatcaaatatattaaatttatacagaactcaaaaacagaaatatagacatggtaaatcctaataaacctcatgacaaagataaactgagttattgctattgctatatatacatacacaatatatatataaaagagaaatatggggatgtctgtaatgaacaccctctatgagttaattaagtagaagactatacaattcaaatcaataaacacatatgtatacacattcatatatggcacaactatgaagagcatttgatcttcagtaatgtcatgtattaaatatatttctcatttgattaaattctcctcttttacacacaatgtgtgtacaaatatatcacaaaaactaacaatgagagaaaatatgatactacatttgcttaccttttggatgggaatgaagacctacaagtaccaatcaaatgtttcatacatgaatcatcactctgaaacaaaaagaattacagaacaatagtgtaattattatcaggaaatttgttaataaatagatcatggaccaaagaaaaagcaagcataagaatttaatcataaatagaaaaaaaaactccaaacagagtataatctcttaatcaagagatccataaggactaatcatggtacacttaaagtattaaatgttaataccataaactagaactaggaaaatagatagagtaaattgaaaattatataatgatatatataaattgaaaatagaaatcagaaatttatgattagttaaacagagaaaaataagga

SEQ ID NO: 216843 - DNA, 543 bp, Cannabis indica
atactattatggagttcttctagctcagaccttttactctaattgtctcttgcttgtaagtcattgtaccccttcctttattaattttctttaaacacttacttttttaaaatcttttgaagcttttaaaaaccaactgtaaacatttttagtgccagtatatgatgcatcccatacttctctaagtttgctaccatactccttatgagacctccacatccgaaagtacttgaaaggtttcttccccgattgagaaacagcgtgcaaagtcagtaaaccaggtgagtgatcaaatgtgccctcatttgagtaaagaacctcagctgtaggataagtgtccaaccatgcctgatttgccatcatcctatcaattttaaagaatattctatcctcaccaaactgtttgttgctcaaagtgaagtagttgccagtgtatactatgtcttcaagagcacactgttcaatacaatcaatggtatttgactctttggccaactctttcttctttagccgaaatcttattaaaatcccccattatcaccc

SEQ ID NO: 216844 - DNA, 890 bp, Cannabis indica
ctagtgtagagtatatatatatatatatattatatattactactttaaaggatgttaaatgagttaattaattatttatagtatgaggaatttttcaacggtttgaattacattagcacacaattatttgaatatattttggttgttaataataactttaattgtatttattaatttgtgtctcaataaagataattaatatcatgttcatcaacaattcaaagactatatatatacgtacgtagtacgatcaccatcacacaataacgttaatttattcttctctctctctctctagctattataatttgaaattatattcactgcatttgaatttagtttatatacaaatatatattcacattttaaaaattaataataggaaattaaattaaagtactatagaattgcattataaatatgagattagaatacacaaaatagtaaaaaaaatataaaatacgttatacaaattttaatatttttatagttttttttaaaattatgttgtattttgttaatattatttgattttttattatttatatattattttctattttctcgtaaaaaatataaattataaaagtgtaaaaaaaattattaaaaatagtattttgtgtaaattaatttcaatacatatataattattaagtaatgataatgagtgacattaattaataatgtttgttgattcttcgatttaattttgactatgttagtttaaattgattgataatgttaaaaaagaattatattaatttccaataagagcatcatgatggtagttattgtagcattatggctttgtgagaaataagtatatatatatatactgacagcagtatgtatttattatatataaccagcagaaccattaatgtctcctt

SEQ ID NO: 216845 - DNA, 662 bp, Cannabis indica
gtgtataagtatagatgtgtgtatatgtatatatgtaaaagtattgctatatgtgtatatgtaattgtatgtaaaaatatattggtgtgtatatatgtatatataaaaatatataggtaaatgtatatatttgtgtgtatatatatgtatatatatgtaagagtatatatttgtgtgtatatatatctatatatatgtgtatatgtaaatgtatatattacatatacgtaatatatacacataagtttatacttttaattttatttagttaatatttatatttttggtaaataagttttgtagtattccttttttcggtgtttggcaaaaatttacttctcggcatattggaaggttagtatgcctatgttatattatttataataataaaaaaaaaaatttatttgaaaatgcatattactagagtttgaatatcttatatattcatccatagttgaagtaatcattatataacaaaaacaatatatatgactttggtaattttttttttagaccaagtttgagttgccaactaataatcctatgttcgtggattacgtcatcaaatctatgtcaaaaggattacatgactggagatcagacacgagaaggcatggaaggagaatattgaaaaatatggagaggaagaagcgaacagaaga

SEQ ID NO: 216846 - DNA, 580 bp, Cannabis indica
atattgttctttataatattttttcttagtagttgtaattgtcttgatcttttattcatcttattttattctttcactgtaatctctcatttatttctaacaatttcttgactctctaccaaacatgggatacaaaacacatactactctaaaccaatttatttctcacttcttaaactcttttcagcaacttcatattttatttttatttgctgatttcttaaactcttttcatatgtttgtaacacatcatacacacttgaatgagtatgaaaacaatatcccacagctatgtacacattgttcaaattaaaatgtacaattcgatgtttttaagacctgcttcgccttgccttagtgttatagttaggttcattctttttctattttaactaatcttgcgtaaaagttgttatgtcaacttatttggttagttgttcctaactaactcttgtatgtactgtttgtaaaactcattttataaatactagttactcatctcagttgagattgagcttgattcaatttctttctctttctctaaaattcttttcttgcaaacatcaacatggtatcatcg

SEQ ID NO: 216847 - DNA, 610 bp, Cannabis indica
ctagtttggcttctcaagttccaaggaggctttgctttcaaatctggaaacacacagaagatattcaatgtatatatatgcatttttataagattatattctaaagtaaatttcaactaattaatgttgtcttcttttatatttattggtgcagttacatcctttccttatggtggttgggcttatagttattggaggagaaggtatgcatgctaacaaccaagttatcttcatctaatttgtatgaaaattttgcggcagaaatacttaaaagtttcagcaatataagtgttattaaaattataattttcgtccaaattcattattatgaactctgttagtgtgttgaatttacaacccaaacatagttttttaaattatttaaagaagatttaaaagtaacttatattatatgttccgttcagacttaataatataaaatttgaggtacatgtgaactgttaagatgaagctagacaaaaattataaattttctaacattgaatatttatgccgctaaaaaatcttagagtttataccagttacaaactcaaaactttgaacctgcaaatatctctaattgaaaatttgtactaataaaaagacgaat

SEQ ID NO: 216848 - DNA, 929 bp, Cannabis indica
gtacataataaatgttgtgccaaaatttctatcgccataaatacacaactttattattaagttttatgttatttttattatttacttaataaaaaatgataaaattaataaaaaattattattttttatatttctaataaaatattaaattttacaattgtgtgttggaacacaatgttaaaacttaatgcaaatatatcacatgttttttttgtatcaaatatagctcaaatttaatagtctaactgtaaaccggtagcgtctaacacaacttaaaagtgacattttacgattaattagcgatatttcataaagattaatatattaaattaattgaaactcaatacttaattataacaatagtactataatacattaaaaagtgctaagcaccttaattaagtctcatacattttaatttaataaataatataaaaaattaacaaccaattataaaacacaatattagttagtgttaggcaccttaaaaaaggcaatgctcaagttacactcaccattctataagccaagtggttgaatagaatacatggattcaatattaatttactcattttctaaagaaaggaaagaaaaaaaaaactatacaattaactatggaagattaaaagtgaaacagttacttatattcagataagataattaaagtgaaataaagtaatgtgtatagttttcttttgaaccagtaaagccacaagagttactaatcaaacaaccaattaaacttcaaaatcaactgactctattcattacaaaattattatttaaagtacaaattgtcaaacaattatgagccatgaatgaagacctgagagtagtatccatcagtacaataacatatcacacagttggatggaacagaagaacaaaggaatgcaaaagtgatacaatgatagacaaaatgctttttt

SEQ ID NO: 216849 - DNA, 554 bp, Cannabis indica
aaaaaacgaagtagacaatctgctgggggggggggggaatccaaatgaacctaggtgaaaatgtaattattgcaagaaagactatgcttgtcatagtactagagtaggaacaagcagtaagtggagtcatttgaataatcaatgtaagaaatattcatttagggtatctgataagaaacaaaagttattgagttttcaaaatagtaatgagggtggtggaaatttgttggcagtggcctttaataaggagaattgtcgaaaagcactagctaagatggtagtgttaaatgaacatgcatttaaagttgtggaaagtgaaggttttaaacatctcatgaaagtagtgcaacctagatttgttgttcctggcaaaatgacagttgctacagatatataccaactttatttggatgaaaaattaaaactaaaagaggagttgatcaagatgggtcaaagagtgtgtttaacaacaaattcctcatatgtgtctaacagcacactacattgatagtaattggtgtttgtaaaacaaatcataagtttttgtcaaattc

SEQ ID NO: 216850 - DNA, 974 bp, Cannabis indica
agcaacaaaaaatcgtatagaaactcttattgcaactagcgctacaaccacttacagaaaacaaaccataaaatttgaaaaaaaaattaaaaacagcatatgaggtaattcccctttatatggagcgattgaatgatagataattattaatttacaaaattactattttatctctgtaattattttttaataataatatttattaagggcatttatgtaatttacaataattaaagatggaaagttccaatccttccattattagaaagattacaaattagagatttgagtggatttactatcctctcatctcttctttctctccttcactccttcttgtcaggatttaaactgagggaaaaaaataatgttcgagaattgaatcattgatctttattttatatgtaatctagtttaattattacaccacaactaaaattatgtctatgactatattgttctttattaaaatatatgtcgtaaccaactaaattgcatatacatttttttttcacgggacaactgccccacttcgcctacatatgggtacgcccttgctctcctctctatccctccacttctccctcctaccaaacatagtgtaaagttttgcttggatgaagtgtgactttatttatttatatttaaaaaaatcaatagaataagggaggaagttctagaagaagaaaaaaagaaagttctttcattttcatggattttttttggtttagtttttgtgtgtgtggtaatactaaagatataaacaaagacttttgtccactcaatcttcttccttaccaaaaatggcgacttcttcccttaacgacgttcctatcatcgccgaagtagacatgggtggcggcaacgactcctctgctcccacacttcgcgccaccatcgtccaggcctccaccatcttctacgacactcccgccactctaggtttttcttcctttttctaattcagcattttt

SEQ ID NO: 216851 - DNA, 585 bp, Cannabis indica
tcattaccaacatcaacatttgacaagatagctcacacgattagaatttatcgattaaaagatctccacgaatgcctaaatgagggagagttagtttacactgcactccttttctttggaccaagtttttcagtaaggtttttaatgagatagtttttatagacatccaaggaggagtgttatgaaatattatttatgtatgtccaaatcaccatattaattatcaccattaatgcatgattgtctttttctttattacattaatttggtttctcattcctttagtcaatagttttgtataaatatgggttcaccccattagaataaacaagtaagaaattctcattcagtttctctttctcttttcatcttcttcttttcttcttatctattttatattattctatattattttataacatcaatatatataaagaaatttacaagaagagtttagatgacatttaattttttttttaaatcttttttttttctattttataacacattctcttattttatttgaaaaatcccacattgtgtagaactttttaagtgttattcatgtaggttataaatagtact

SEQ ID NO: 216852 - DNA, 503 bp, Cannabis indica
aatgcaaagtgtgtttggatatgtactagctaaactttttagacgtttctctctcgactctccagtatgaacaggggttcgtcttcttccccagcatgttcacacctattttctgcaagtttccacaaggtgaaacccatgcccagctccagatcgctcgatcatggtggctccgattcttcctctactgagacacaacacagctcgacccatccaagccacgcgagccgtcttcctcagcagatacccaaccactccagtcgcatcatcatttactccgaccttctcccaaatccgtcgaatcgtactgagtttaatgagactcttacaggtattgatttcctcttacaattttccctattcactgtcaaatcgtttcagaggaaatggttttttattgaacaattcagatatactttggtttgcctattaaatctaccctgaaaattgtactttgcaagggatttggggtaatgggaaccctcccaaatctgtcgacagaa

SEQ ID NO: 216853 - DNA, 773 bp, Cannabis indica
cttatgacagcactaataccacaacctggtctacccaaaattaaggaagcatcagtattaatcatgtagacaccattgggaggaggttgccacgccgtgaccggtttgatggtaggaactaggggtgtgcagaaagtcatccaatccaattccaaccgaccgatccaatcctaaccgatccaatagaatcggatatccaatcataattggatcggatcggatgcaaattttaaaaatccaattggatcggatcggatattggatgagacatccgatccaatggataaccgatccaatccaatccaatatcatccaatgtccatccaatcatatttaatatttataattttatatatttaattattttatatattattttattatttattaggttttaaattatgttttttcatatatatatattttttaatgaaattagcctaaatagtagttaaaatggattggattcatccatgggattcattggatggatccaatccaatctaataaaaaccagttaaagcatccaatggatggaaccgatccaatccaatacatccattggatcggatcggatcggatcggatgactcaattcaattggattggatcggatggaaaaatccaatatccaataaataattggattggatcggatgggtccaaattcatcattggatgtgatccaatgaacacccctagtaggaaccgtgagcagattctggtgtgtctccaagtgagttgcaagcaggtcaagagcccaataaatccaag

SEQ ID NO: 216854 - DNA, 793 bp, Cannabis indica
ttttcctttagtgtcgatttaaaatcgagactaaaaggggtatttgcaaaaaaaaataattattaaaatagactttagtaattccaaaatacaaaatttgaaatattatataattaaaataaattatacagataaattaataaatataaaaatacattaaattttaataatgcatttaaagattattattacacaacaaattacatatcacaaaatatccattacaataaataataaatagggaaatttgcggcaaaagtccccaaaaaggtcactttgatgcagattagtcctcaacctccaaaaatagcggcaatagtcctcaaggtcacactttttatttgtccgttagtcctaattttaactgagccgttttctttttttaaattgccacgtgtcaaaatattattggtccaaattattattttaattttaaaaaataaaaaaaaaaataaataaataaattatttaaaaatgattttatttatttatttattttttatttttctttcttttcttcttcgtcttcttcttcttctcacttgccagaaacccaccccaaccctcaaccccaaccagcagacccaaacaagtccgatcgcaaaagcattatttctctccacttcattctcgtacagtcttggcgcagcctcaccacctctagcccgcgacatcatcaatgtttggagatgcttaacaagaacaggaacaactccgcaatccacaataacatttacaatttcctttgaatcacaaaatttaccagaaactcataaaccctaacctccccccc

SEQ ID NO: 216855 - DNA, 501 bp, Cannabis indica
aatagttcatggggcattttaacaacctttaaagttcatgaagcatgattttgtacatgtcaaagttcagggacaaaaatcctaattagtctattattattagacactttaaattgtcctatattatataaaagagaatttttttatttttataaatttttttggcaaaatttacaaaaatatggcttttattcaaaataaataaataaataaattgtgataagaattaaaaagaaaattaaaatatacgagaaaagtaatttatgataatcaaaacagaaaccagttctcttatgctattttttcttgacaaaatattttttttaatttttccagtattaaaatccatataatcaatgtataattttcacttatataaaatgaagttttctaaaccacttgaggctagctcaagtggccataggtgggtgtgtgagtgttggaggtcctggggttcgagtcccagggtaaaacatgttgtaatatataaacgcttaaaat

SEQ ID NO: 216856 - DNA, 576 bp, Cannabis indica
agcttttcaacatactcacgagtatgtgggtcaatgaattgcaagctcttaaacaactcattatctaccatttccacgtaactcatcctttaatgttttatgcaagcctcatacatctcagtaagtttcgagattaactcaagatattgttatcctcgctagtcactgtatatataattttatcgtttttaatttgatagccataatataaatataaatgtgagacaacacatcattgatagtagcacatcccgagataagataacttttgtatttatgtttccttaattttcgagagcaatattcacgtgtcatacccatatttatagctcaaaatatggacataacaattgccccttaaaaagttctttgtgaaactgaaaggtcttttaagtaattcttagtgggtcactttggtcttttctcgattggtaatgagtatttttctttggcagttttatttttctcgagaaagattatttgatcattaattaaatttcatttcatctaacgggctttttacctatcttttcgtattccctagacggatccttaaccgtttaatccaattttgaa

SEQ ID NO: 216857 - DNA, 667 bp, Cannabis indica
tattttgtattaaattatgtaaacaagttttttcacatatattgtaatatagtaaatatagttgtacatagatgaaaaatactattgataaattgtatctaaattttatgttttaattaaaagtaatattttactgttccaaaaaaatatattttaattacaaaaaaattatattttaattaaggtagtgtttagtaacaatttttttttttaatttcttaatcataaaaatgaaagtagatttttttttttgataaatttatttttaaaaaataaaaatgcgttcaataactttattttttttttttttttttgacctaagaaactctaattcattaagccgaaacacaaagtttggtgagtacatgaggactcacctcccagaaacgcaacaagccattacaagattgggataaacccccacctagcaagagcatgcccaaccttattaaaaatacgagaaatccaactaacaacacaatcaccattatccaacaaaacacaaagtttagagagagaaaaatgtagattccagcacgaacattttcctgcaatcaaagccttgaccatctaaacattatccgtgaagaaatctacaactccaaactgcagctccaaagccaaatcagcacaaaaaatcaaaggctccatttcaccatgaaaaacg

SEQ ID NO: 216858 - DNA, 804 bp, Cannabis indica
ttatacatatatatataagtactagaccctgaatcaatacacactaccacttttctctcatctcatctcaactctttaaatataataataaagaaaaaaacaaaaattattagagaatatggtagtagttgctattgttagaaatgttatagcattattactagtagcagaactgtgttttagttcttataataaattagtattagcaagtaataataataataataataatgaaagagaattggatggaatctggggtggtcttcctggtcaacccaaagtggaattttctcagttttctgggtatgttacagtcaaccaaaaaaatggtagagcactcttttattggcttactcaagctacttcctctcctcatcgaaaacctcttgttctttggctcaatggaggtcagtactatatatatttatatatatttgcatacatattatgtatagatataattaattatttaaaagaagcaaaacccaagtttgttttttttttaaaagcatatatataatgattagcaaaattaatcactaaattatataatttagtactgtttataacttaagaattaaactgaccttttactgtgatatatcgaatcctgtcgcacgtgttgattctcttccacacgtggtaatatctgatagaacaactatatggaattaattatgaagccattctatcttctcaaatatccttgtcttgtattgtacatgttttacagatgcgcatttttagcactgaagctctatccagctaaaaatgcgccaagatatacacacccatatttccatt

SEQ ID NO: 216859 - DNA, 698 bp, Cannabis indica
ataaaattaaataaatattatgtataacaatttttaaaagaataattagtagttttgcacctttaatttttttatattataagagatacaacttaataatgtaaaaagtcaggagtcaaaaaatattaattatttttttcaaaataaaacactatattattacgtttaaagttaaaataataaagataatcgcacaagtgaaaaaaaatgtatttttcccataagttagtttattgtctgttagtagccaatttgtcagcattaatattaaaacatagttgtagttgatatgagaaaaaaaaatgtcgaggaaaattaaataataaaattttaatatttgaaaaaataaccctaaatttgttgaagtagttcaacatcttcaatatattttaatcccacaaaaagaactattttacattaatattattatttattttttatttattttctaacaatcaactattagtacttaaaataggttaaaacaatttgtataaagaaaaactattgcaattacaacaaaatatttaaacattattttattgtaaattattcagatttttctgaaaaatatacaaataatcttaaataactataacacgatcataaaaaaaaaattaaactaaaaaattaatttaaatgtctaaataaatagaatctttagtcactaaattgtccgattcaatggctgcctgaga

SEQ ID NO: 216860 - DNA, 1060 bp, Cannabis indica
  modified_base (1030)..(1030): a, c, t, g, unknown or other
caaacatagaaaattgtgagctatgattaaagagaattgctattactatactaattaaatttctgccctttaaactttaacatatatcaaatcatacatcttaaatttttaagaccattaaaaatttccttttaaaaatctctctttagctgttgagattgtttaaattaagtaacttttattcaatttagtaaagaaaattctaatatagataaaaattcaggagatataatttagtatatgtcaaagttcgagaaacataattaaatagatattaaaatccgggggagcatgatttagtacataaacaattactgaatcagtaaaattaaataaaattagacaaaaaaatttaaaactaacaatcttaatagatcagaaaagatttttaatagttagaaaaattcagtaccatgatttagtacaaattaaagtttagagtacaaatattctaattagctagtctaatatttattaaagttaaacaagtgagactagatattaaattacactaataataatattacaccctataagagtgctctttaatatttattgtgactaaatgtacataattaagtttttttttttacttttttcgaaagtagatatttataatttaatattattaccatattataaggaatgcctagctagtgtctaacattggctgcaaaaacacatagatatacggtaagcatttcagtcaacactaaatttgacataattaactttatataatttgtatcaataagtgatgagtgtctcattaaattaaagtagtaataataataataataataataataataataataataataataataataataataataataaataaataaaaaatgaggcagagagatagtatagcaaccacatgttattattgaagtacatatttaaatagttggtgtcggctcaaaataaagatactatatatatatatagtaacatatatacatatataaatatgatattatatactcatatattattacatgctcagagcaaaactcttagntaggtcatcatcatcatcatcattatatat

SEQ ID NO: 216861 - DNA, 1389 bp, Cannabis indica
ttgggagtgggtttggagagttagagatagagagagaaacgagagagttagagggagagtgggggtttgaaatgagaagagtgttgttgggattaaaaatgtttggagggtattatttttacatttttttaagaaacatataaaaacactttatgctttttttaagtatataatatcaaatttccctagtaaaaatataaaaatgacaaaaaaaagtaattatttttgtaagattcctatattatttgtatttttttaaaaaaagaaaaggggtacaattgcaaaataggatcactacctttattttgaatggtaaagtcactgatgattatgataatgttatagctcactattttgatcatttcaggaacttcatggaagctaagagttcgactaccaaaaaattgaattctaattgtttggctcaaagaaatgaacttacattgcaacaacaacttcaactcatcaagccctttttgaaggagtttaaggatgcaatattcaataatataaaccaaataaaaagtctcgatcctgatggttttgatgctagttttttcaaggtgctttaccccaaaaccaccatgaccccgaaaactcaaagaaaccataccttaaatcaaacacaaacacatattgtttttctctacgaactttgtttttccaaattgtttattttttgcttcatattttttcataccacccgcaatattgaaatcactgtaacaaccaccaccactaccatcacaacctatttctcaaatccaaatcaacacacacgcacaattttctcaaatccaaattatcacccaaaaaaaagaataaaaaacacacacacgacaaaaaaaatccacatctaacaaatcatcacaaacctaaaatattagatttaaaccctcttctctgtgtgtgtggttctccgccacctccttcgcttgtcgacgaaggatctgatcccatgacggagatcaagtacccaaacccccaaaacctaatcccattgaagccagcactagttcgaaccttccaccttctttaaggaacatttgagacccgatgaataagatagatgcgacgctgtgatgatctacaataacgaacaagagaggtgtgacaccgttagaggacttgcgatttcatcttcttgtttgtcgatgtcaattgtctgtgtgcgtgagtgagccgaagagaaaaacataaaagggagaactagttttcaatttttttaaattatatattattattgggtgattctacaaattatacaaaaattatacaaaattattattgatgcacccctacttgtttcggtatctagaaaaaaaataagtctaatttttttacttatatctatgtacgttatagttatttaagtatatcctactaaaa

SEQ ID NO: 216862 - DNA, 602 bp, Cannabis indica
gcactcgttgaacaaggcttggaaagggtagtttgttacgagtgccagttgtttctgaggcttcgaggatcctttcaaagatgagagatggcagatcaatagaaacatgagctcctacagccattgagaaatgcactcttgacatccatttggaagagtctaatcttcataaaacatgcaatgatgagtaaatgtcttatagactctaatcaggccactggtgcaaaagtctcatcaaagtcgattccctccacctgactgtcgccttgggcaacaagcctagctttatttcgagtcattatcccaaattcatctgacttgtttaataaccaatttttttcctatcacatttgctccatcaggccgagggaccatgatccatacaccaagtcttctaaagtttcccatttcatcttgcattgcagccaaccagaattcatccaatagagcatctctgacatttttgggctcaatttaagagagatagcaagcgaatgccaacaggttctgcatttttcgtctagtgaccatggtgtcatttagatctcctaggacaactacctgaggatgagcaatctaaacccaagagggtggtccatttt

SEQ ID NO: 216863 - DNA, 627 bp, Cannabis indica
ggccagagattgaactaaagctagaatgttgagagaattaagagtttagtgttcagtgagtataatgtgtagagcgtatgatgtagaacatagaacatgtcctttaccttgagaatgatcgatctcttaaatagagttcactttcagataatgaaattgtttttgctcataagattagggacgtttgacatttgtttttggaaaagctaataaaagatattttttgaaaaaactgtaataacttattaaagaattcatggagaagctaaaaaactaaatgtgcaatccaacctttttgaaaaaaaattattttaattgaaagattctacaataaatttatttgtacataaaatatatttaattatttattatatattacaaaaaataaataatatttaaatcttcaatttttattttgtttttaaaacatatttatattttattttttatattaacaaacaacatcaacttatagagtttcttatatattttgatttttttaaaatttttttttgagttttcgagttttctaattttttttaacatgtgataaaactataatttaaaaatattataaattattttattcaaatgcttataaatttataatatgaaataaaaataact

SEQ ID NO: 216864 - DNA, 565 bp, Cannabis indica
attgaattatattaattacaataattcgtagtaaatttactctaaaaaaagtagtgtagtaattaattctgtttcatttaaatttttatgaaaataatactaattattaagtaacacatgtaatttttcctatttatatgtatattatatttttttacaaacattttatacatataaattaaaaaagttgatcaatgttttcaatattttgattaatattcaccccattaatatgatttgatgatgaatttatttttttttacacagtttacaatatgtatgcgcattttttaattgtgatatttttataagaacatgaaaagacattattgatctcattaatgaataatttgatgataaattttttttgcattaatattaatggtgataaatattaaaaaaaatgaaaagacttgattgatcccactataatgaataagttgatgattatattttttttttattaatttgatgataattttttatagatagtttacacatgtacgtgtatttttctgagaggaacaaatgtaaaaactctcgtaaaataataaaaaatagattg

SEQ ID NO: 216865 - DNA, 798 bp, Cannabis indica
atttttattgttattttttttttactttaaccatatttaaaactataaaaatataaatttttaaggataaatggcggtaaaacccccaatagttttattttacttgtaattaactcccaaaatctaaatttgggtggtaaaacccccaaaactacgataccgttagcactttacaacttccatccaaatttgattgttaactgccatggtggattgtctacgtggacacaatatacacgtgacacaattttattgacctacgtaaataattatattaaaaaattaaaattaaaaataaaaaatattttttccttaaaatcattaaataaaaaacaattttttttttaatttttttcttatttctaaaacagattagatattaaaattaaaacaaataaaaaaaacctaaatcccatctcctttacccttacttccgcctccacccttcttctttgtgtagctcatggctgctgtaaggaccgtcggacaccatctatttctccattggaatgatattgtccgcttcgggccaagccctcacggatttgttttttaggcactttcccaaaaggcctcataccaatggagatagtgttcatccttatatacccaagatccttcccatttctagccaatgtgggactttggatgtacacccaacagctgccatacaagtggctacgctaacggcgcggaccccaaaccccgttctctacccctctcgcactctatttctctcttgttgtttcaatctcttttttactatctctccctcgttctttctttctctctctctct

SEQ ID NO: 216866 - DNA, 688 bp, Cannabis indica
atggaagaaaaatgatattaaatttattcaataaaaatatagttaattagtgcttgattgattgatttaataagtcatttctgctaggatttatgtataattttctttttatttttttctctaataaaatttcgtaattttttttgttataatatttaaatataatttatttttatttaataagtatattttttttaaaaaaaaattactaatataattaaagatatatatattttatgaaacataaaaattattaaaatggaattatgtagtgtatttatagatttttatggtacaaactcctttttttcacctatgtatattatggctttggtttttttttaaataaaaatgaataaaaaaaataaaattaactactgataatatgtatatatatattaatatatttgttaattccatttttgacatctttaatgtgatagaaatatttattatttattgtttaattttggctgtggtaattaaattagtttctatattttgtatttgacttttatgttaattaatttatttttggaatgaaagttgtatatagcttttctatttatgaaaaataaggtaaaatagtaagtttggttacttaattttttctatctagctatccatgatgtgatattctgatcttgtatgagtttcctattttgtttgatcatattttttgaggtat

SEQ ID NO: 216867 - DNA, 521 bp, Cannabis indica
atatcaaatgtacatattatttaaatatacacatatcattaattttacacttatacattgatttttttttataacaaacaaatatagaaaatatactaatacagaatacagaatacagaatacagaatttaaaataatgatatttactctaacattaaccatctacctagaataataatatttttttttcttattaataacattcttcacaaactaaaattgatttttaaaaaaaatacataataatttaattaagttataacccaaataaattcactaaagatcgtcctgcagcaatgccctattttgtttctactttaaataaaagtgaaactcatttaatttctttgatcaaaatattttatatttttaataatttattatattatatatatttagtacactaaacgtatatattaatttgtttaaactttcatcagttatatgtaactaagtaattacatatgaatttaattcatataaattgaagtcgtacaattttggccatatcaaatttgaat

SEQ ID NO: 216868 - DNA, 733 bp, Cannabis indica
aaaaaaaaaaaaaaaaacgagacgaaacccagtttcagaacactgtaatgaccccttaattgaactttcttctattttgaggcaggtgggagcaaacccatcaaaggttttaacaattaaaattaaaaaaaggaaagagaatagaaaatcatttgagacatgattcaaaaccaaacgtagctatccaaacaaaaaaagaaagggaattcgaaaatcgaaaggaagaaaaaaataaagaagaaatagaaagcgtaccttgggtggggtagcaatggggaaggagaggcggttggagagagtgttagtaggtcggccattgcagattacagcaagagagggcgccacaggcatagccagcgtttgtgccattttagcgctgtaaatgactgactctgtctgtgtctctgtgtgtgtggatgaagatgacgataacgaagtggtgattggactgcttatccttctccactctcctcttttgcctatttaattttttataaaaattaaattaaaaaatagacatcttatacatcttaggtgattctataatgcacacccttaaaaatggatgtactgatgcacccttgtttttggcatctagaagaatttttttagtctaattttttttcatattcatgtacgttatagctatttaagatatcctacaaaatttagaaaaattcggaataatttacaatatagaaaacaatgttcaaacagtctatttttacacgtc

SEQ ID NO: 216869 - DNA, 879 bp, Cannabis indica
tgttattaactaaatattatttttataagagtgattgttataattttattaattaaatattatttttataggattaattcaaatattttgtataggcacggtttcaaataaaattaactaaaattatttttctgattttttaattattttttttattttatttaatatgtaaaataaaacattaaaaaaatctacatttatacacatatgtaatttttttttttttacaaatctaattaaaaatattaatttttaccaaaggacatgtgcctctattggagatatttcattgtttttttttaaaaaaaaatcaattattttaagttatatattatgattgaaataaaaaaatatatataataaatcaaatcaggattttaatttgaagtacatatattttaaaatatacagtcaaaaaatataaacaaaatcttgctttgaaaaaaaaatttatgataatgagatacggtccttaaatacaaaatattataatatataaatattttaagctaaaaattaatagaaaaaataacttaaaaagattaaaataatgtgtaaaaacttttttttttaatgttacactttaaaatcttcaaaaccactctatttatttatttttttttatttttttatcagcattttaaaattaataattgatgtgaaataaaatattaatttcaataataataacaaattaagtaattaatttaatccatcaaaatagtaaggtgagagaaataattttaaaattggttaagtttcgataataataataataataataataataataataataataataataataaagctataaactagagtaataggaagaatataatgatgattacaagtgatatacggtgatgacataca

SEQ ID NO: 216870 - DNA, 635 bp, Cannabis indica
ctttacagaggggctaggcaatgacattgggggaaatgggtcgctgagatccctgtccctaagaatcggactaggctttggcttagcaccttcgatatagcggaggaagccgccttggcctatgaccgtgccgcctacaagctcagaggtgattttgctaggcttcatttcccacacctccgccaccagggctccaccgagttcggtgatttcaagccttttcactcctccgtcgatgcaaagcttcaggccatttgtcaaaaacctggccgaaaaattattataaaaatatagtttaaattattataaattatttttatcaaatgtgtataaatttatattgtgagaaaaaaaattaaaaaatataataaaaataaaaaatttatataacataatttttatataaatttatgattataataaattagattataacattctcattattatagtagaattaaaaaaaattcagagcactttaaaatctatatttaccaaatacccaacttaactttttttacactagttttgttacagctgctttttctctacagcatagctacagctgctttttttacgctagcagagctatgccaaactgaccttaggtctctaccaatattttaaaaaaaaac

SEQ ID NO: 216871 - DNA, 893 bp, Cannabis indica
aataaaataataattaataaatactacaaattaataattagtacaaaaataataattaataaaacaatacaaattaatacaataattaataattaataataaaatattaattaaaaattaataaaaatacaataattaatcattaataataaaacaataattaattaaacaatacttaataaatcaatacaaataaaacaatacataaaacaattactaaatcattaatatttaaaaaaaaaacgaaaaaaaatcaccttgggtccgatgggtccaattggcccgatagggtacccatcggacccatcggtccaatcggacccatcggacataaccatacagaacactcccaacccagccatcggaccccctataaatgtaccgtcgaacccgagccaaaggacccatcggacccataatcggacaatcgaaccgagcatcggaccgacctttttccccatatccgagcatcgcaccgacccataatttcaccattttcacagtcgaaatcccattttcacggatccgaatccctttttcacaacaaaattcttaaatctaaccaataatatttcacaaacaatcccaaacaaaataaatctttaaaccctttctaaaaaaaacaaaaaaaaaaaccaacatacctttgacattttcggagtgggtcggggttgcgagttggtcggggttgaccgttctttggggttcagtacgacgacggagtgctcggggtcagggttgagcgttcgttggggttcggctgagatgggttttttgtgggatgggtttgttcggctgagagagacgaagagagaggaagagagaggctgattgtttcaaatgaggggggtagtttaggaaaattggtaaagtggtcatatatgaccaatttt

SEQ ID NO: 216872 - DNA, 676 bp, Cannabis indica
acgcaataaagtctgacagcacaacccccaaacagcagcgctacagtaatgatcatttaagtctagcgacggctactctgcgaagagtcacgtcaatcataagacaaaaaggacattctccataaaaaccctacagcacctagggatttgaccatgcatcacccatggtatattcatcggaaatgcccaactttatggatacttacagacacatgtgtaagaacaattctagggattaccccaccaaaacactataaataccccctcaaagctcatttaatggggtcggagaatcttggttgctaaagagcaagaagagaaaaaaactcaccaagaacattccttgtattaaagagagaaacattctcccaagtgtagaatctgtattaaagatatccattaatagcagtggctcgtggactaaggctcattaacgccccaaccacgtaaaaagtcttcatctcgctttcttacagctcattattataatcctattttactagttgccgaaaacctcggtcaacaatgctaattatataatatttaacattattattgtataagagttatttaattttaaaatatgtttgaagattagtttaatacccccatttcaaaaaagaaaagaaaagaaaagaaaaaaataataatttaatatccggcttcctatcatgat

SEQ ID NO: 216873 - DNA, 796 bp, Cannabis indica
gtattctccccttaattctctcattcttttaatattttattggataaataaatattttttttcttattttctaacaattttaaccaaataaatataaatattattttattttttattagattaaaaaatcatatacaccttaaaatctatataatacattcaaaaacatatctatatatctatataaaagaaaagtatgtaagacggtgatgtgacggactaaaattacttcaaatgctcttatgtatgttgcccttaattctctcattcttttaatattttatatatatctatataaatgaaaaatatgagacggtgacgtgactgtccaaagttacttcaaatgctcttatatattctccctttaattctctcattcttttaatatttattggataaataaatatttttttacttattttctaacattttaaccaaataaatataaatattattttattttttattagaattaaaaaaatcatatacaccttaaaatctatataatacattcaaaaacatatgatagctgcgcgggtggttactaaacattttttttttttaaaaaaaaacaaattatcatcaaactaatatgagtgcacttttaatgggtattacctatgaataggtataattagaaatatttgagtttttatgcttaatttttctttctaattaaaaaaatctactcactttaacatcatatgagctgagattattccacaggttgaaaacaaaaaaaaaaaagtttttagcaaaaaaaaaaaaagataagtaaaactttagtttcacttaa

SEQ ID NO: 216874 - DNA, 515 bp, Cannabis indica
taaaattaagactcatttttctctattctcattttgttggaccacattcaatatttttaaatttatctagatccaatcaatttatatattgaatgtttaattttaccattcgatctgattcaattaatttcagttatctaatcgatctaacatcaattaaatattagattgaatctgttctatccattcacgtttatccaatattttaaacataatacttttttttaagatcggatcgaatccattaaatattttagattcactatgtattggattggattagattatccaatttaaaaaaaaaaatagagtaaaattttaatgttaattttaatctatacattcatactttttatataataatataaaattttttatataataatataaaatttaattactcatgtaaattaaataaaaacattaattagttcaattaaatataagatgtgttaaatttttaaataccacattgaatatttaatatttgacataaattgtaattaaatcggtaa

SEQ ID NO: 216875 - DNA, 716 bp, Cannabis indica
aagttatttttctttattgaaccgagcctcccgagtcatatgatgcttttggacgagttggtatgctcggatgctcagttcaatagatattttcgtttagtataagcatctttaaaagaatatacttaatttattcgtagttatctaaactgaatgaggagtaattatttaatttaaagaattaattattaagaaaaagaatattaatttaaaaatttacaaaaaaaatatatctcctccagttgtaatattaacatatatgttaacaaattaattgtaataattattatctttttaatttatttttcgttttaattttttaaaaaaaaaacagaaaaggagaacaaatatgtgaaattacaagagagacataactagaaattacaaggtttaagcctctaatattcgttatcaaagtattttacctttttttaaaaaaaaaaaataaaacgaaaaataaattaaaaaaaacaagaaagaaaagaaaagtagcatattgttaatgtatttcttgtaattgtattaattattgtaaataccgttcatttatacattttctttttgtcagcatgttttatttgttgttatgtcactaaaaaatacttttaactaatgtcgcaagataaaaagtaaataaaataaacataacaattaacaactaaacattatctaatattttgtcaaaaaaaaataatactcaaataatgtcacgaagt

SEQ ID NO: 216876 - DNA, 546 bp, Cannabis indica
taattggttgagtacattatttagaggcctcttatttatatctcggcacgcgtaacgatatttataatagttaaaattattgttttttataaatattttaaaaaacacgtatataaatgaaaaattctctattatttatcagcaaaataagtaataaattttatttatggtaaaattgagaaatcaattttggaccttaaaatataggcccaagttaattttatttgattatattatttgataaaataatttaaattaaattaattaattattaaattaaatgtattattagataatgtatttaattaaaaagataataataaattaaaaagtttaactgacttctgttaatcaattattagattattttttttttattttaataaagaatttgaaataatttatttataatactatatatataatctatagcatcataaataaaaacaagaaataacacaacttaaaatacggtaacaagagaaaaataagaataatttttcactcttattttctctctcttgtgcgccttttctctctctctct

SEQ ID NO: 216877 - DNA, 735 bp, Cannabis indica
aaattaaaccacaatttgttagcattagaataagaaagttttaaggttcatagttaggataaaaagtaaagttcgaccaaaaatcaggcacatggtatgattatgttctcttttatacaaattacagaatttaattaaatatcatttaacataatcctaatttttctcaaatataagatttaaataatatttgtatataaatataaatataaagtgcagcaggatatactaagtgtgattattacatagacttttgaatcattcaaaacatagatctagttagaagaaacatctctatcgtcaaaccattctttttagtaaatagtaatatcataatatcattattcaatgtgcatttaatttgtaagtaaataaaagagattattatttttttatatattttattttttaaaaaaagcataatcattaaaacgtgcttggaaaagagtaaacaagagtcagcaaatttcacactaatatgcaaattatttattttcaattaataaagagcaatataaatatatattttgttttttaagattatagtaggcataaatgcaggaaaagaatggaccatataagtactataaaatcatttatgtttgtcacttcccacatatcctatttattgactcgtacagtacatcagtatctttttggatctcaattaaaaaaaaaaaaaaacaaaaaaaatacagtagcagtgggggcatgacatactactggtcagctata

SEQ ID NO: 216878 - DNA, 648 bp, Cannabis indica
attattattatcttttaaattacagctacaaaagttgatgctaaatttatctattccgtgcaatggtagttgtagattaatgaaggaaatatctatgatttttttttgagatatatatctatgaagttgaacatgaacataattgcatttattataattataattttacaaatattcattataaatatagaaaacttgtcatagaaaaatatagggttccatgagggataattacataatctactatattgttcgtaaaaaatttatatttttatatttaaagatatattttttatatttttacagtactttataaaaataacacgaaaacaataaaaaaataacataaaagtaataaaaattaatatccaaacaatatcaaaacaatagtagaaaataacataaaagtaacaaataatcaacaacaaattaacaagtatacaacgtaaaattatatcaaaagactgtattttttgtaaataaaattataaaaatcgtaaaaatatttaaaatttcattcaaccgtatttttataatttttgttatttttgtgtatttgtaaaatgatttcttaaaaaaccaatcttttgaaaaatgttttctacaagtagagagctagagcttgtggaggaaattatactctatacc

SEQ ID NO: 216879 - DNA, 380 bp, Cannabis indica
ttcatagagacttatcttgtttttttaatctaattgatgatgtttgttatcttttattagagttattattactcatgctcgtaggcaagctaatcaagctgtccatggcttagcaaagtacgcactaaaattgaatgaaaatgtatcttgaataagcgaaatattttatcttattttctctattattgtaaataactgttaatttataataatataaaaaatttctaaacaaaaaaaaaaaatagaaagtttgaaacaattgtaacaacgcaatattttacatcacaaattaccgcattcttataaaaataagtaaaattctcattttttttactcgaaagtaatttaagaaaacttcaagtataaatgtatatcaggat

SEQ ID NO: 216880 - DNA, 708 bp, Cannabis indica
caaaagcaagcataacaggtcaagtacacaattcacaaatttttcacacatactaaataatatcaaagagtttagcatgatttcatcatctaatcccatatgtcgcaagttaattttaatatagtcatccaacaataataaataaaagccttaaatctacccattaaaactaaaataataattaaaaaacattaaaatatccacccatccccaacattaaaataaatagtgtccctactgtgcaataaaatcaaagctaggagagaaaacaaaccagagcagctaggactacaggtccatagctatatcaccggccgccatcagtagcaggtagatcttcatcattacaagtattagggttggtatagtctccagagctcatcaggaaactgaggataatcagtgtacgacgagtgacatgcaaacgtagcataaaacttagcctgaaaatttttcattgtgaaccgacgatgttgtaactcctcaatgttttgcatcatcacatgtgatgagtgtacgacgaatgaggagcgaaagtgggcataaaactttagtctttttttttttttttacagtttcaatcgctaggggtgacatgtattatggggtcgacatgtttgctaactttttatttcaaattttttttcacgtatttcacaaatcttggactaaataaaataacaaaataaaaaaaaaactaaaaactta

SEQ ID NO: 216881 - DNA, 756 bp, Cannabis indica
aaggaatgtttgacaatgaggaaatttatttggtcacacccactaacaacaatttgttataacacagcaacaacatctgtatatttttagaaactcatttcatttaccacttacttgattcatttccccaacaatatattatattattaataattacttcataacccacagttttcaattaccaaaaatatttgttgggtctgaatttatgtgctcaaaatggcaatttcacaatattatatcaacacatattttttaactttctcattttgtaacttttaagttgtttttaatttttagaatttaaaaaaatgcccacagctattaataaaggaagggtgttctttgatgagttgtgtgtgctacttgaggatgtctataactttattgtttaaacttctgaagtatagttttgttccatgtaactcgaaatgcaaattctgcaacactaggtttggcaaagcatgccttttggttagacgatgaactattctagttcgaggaggtgtcaccgccgatcgtagattactgctttgttaatcatatgtgatttgatcaccaaaaaaaaaaaatgcccacttttagaagttttttataagatttattaataattaataaacatttattatatttttttaattttattttattgttatcatttattttttttattttgtagcttttatatagaaattattataagtataaacaaaagtaaaacggagatatgattcctattggcaaagcttaaaataa

SEQ ID NO: 216882 - DNA, 511 bp, Cannabis indica
caaaaaaaaacaaagaaaaaaaaaatagtaagtttaaataaaaaaaaaaaacaagtttaatttactgtaaaaaaaaataatatctatagttgagatcattttttatttattttagtatttatttttttaaaaaagaaaaaataaataaaaagaaacacaaatttaaagttttttatggcattcctcaagactttttcccatatttgaagttttttttaaaaaatgccatatttagtgtaattaagtttttatgccatatatatcaaaacttatctttattttcccatatttttgtaaatagcccataaaaaattaagggataattacgtattagaacgtacatttcaaaatatttatgatattatctttgactatttaattacttcaaatatcgctaggattctctttcataacaaaaaaaataccgccagtattcggtattaattttgacacgtgtatcgagattaaaaatgaatctcaaaagtatttattttcttcttattactttata

SEQ ID NO: 216883 - DNA, 624 bp, Cannabis indica
aaaaaaattaaataaataaaatactgacacccaactaaaataaaaagcaagttttacaaaaaaaaaaaaaaaaaaaaaactaaaataaaaagcgagacttaattgttgcttttattgcttccttaattgttccatcaccatctgcaagcacagtctttagtgtctttggtgtcacaccccattgctaagatgaaagctttttttgtccccaagtgtagtattgtttttataaatctttttatgcctatgctaaaattcttttgttatagtaaacaaagtcttcaagtggcagtaaaaaaaaaatctcaaatcactttttccaattagataacttcaaaaattagattattgttttttaatatgtatgctcatctaataatgtattagaaatataaataataatattgtgaatataaatataaaatttaataatagaataataataatatgtaaatcatttaatacaaataatcaagctaactaaaattaaataataaaataagtaattttttttataaaataaactatattttatttttacatcatatcacttatttgcatgagtagggatacttgctataagagaaatgttaaagagcacggtgcctagcacctcctatgtgt

SEQ ID NO: 216884 - DNA, 634 bp, Cannabis indica
ttgtaagtttctcttttgaatgagaattcccttgtgactgtaattgactcggtttgattaatagaaattatatttcttcataacaaaaattaataaagaaaattattcttaaaaatatataatatcccgtataaatatattattatttggtaaagtattgtacattataatattttattgttgcactaaatgggatatatatattattggtattggttaagtacaattatactttggtatttagagattttgatagttagattaaatattagttaacattaattgtattacagaataattaattattagagaacaattatatgattaaataataggattgttaaatttataatagtaatataaatatatgtacgtataggatttataatatatatatatatatactaggtgaatgtacgtgccgagccacgtattgctaatttcatttaagattttaaatatattttatttttaaagattacaaattttttcttgaaaaaattaataattatatttgaaatatcttatatttgaaaaaattaaagatagaaatggtaatttctgctaaaccatgatacttgaatcatcggggcgaattaacaccaactaataagaaagaaaaaaacaagaaaac

SEQ ID NO: 216885 - DNA, 1024 bp, Cannabis indica
caccaacagacggggctcgagaatgggctcatactaggctgacaaatccctccttgcaacattttcactcactagtttctcaatctcatccttctgcacatgagggtaacgatagggccgtatactgatcggggctacgtccgggacgaaggcagatagcatgatctcggtgccaaggtggtggcaattggtttggcatggcaaagacactagagtactgctgtaataactcagaaatagctgctggaatgtcattctcaacccccacggtggtagtgtgaccaagctccacccataaaccttcatgttcttccttaattgacttgatcatggtctttagtgaaacacgagtcttgtggagggctggattaccacgaaattccacggtttggccgcccctcttgaatctcatgaccccttccttccagttatggtaagtgtcacccaaggtctccaaccattgaactcccaaaattacatcggtacttcccaaggctaaaggtagaaaatcattaataatttctaccgcttgtagtgagaccggcactcctaaacaaattcccgctcccttaactgcttgtcccgtacccatttgaactccatatgactccgtggatgaaatgggaagcttgagtttagtcaccaagcttgtagctatgaaattgtgggtagccccactatcaatgagtaccgtcacctcctggccaagaacgctgcccaccaatttcatagtttttgaagaggttagtcccaccacagaattgagtgcacttccaccacttgtgcctctgtcaacccttcttgtctatggctgccaattcctccatttcttcacattcatcttgcaccaaaataatttgcaactcaggggacttcattgatgtccctgtccaaggtccatcacacttaaacgcaaactcctctagctctttctcttgcactctgaatctgtcagcctgcgatatcccttgccaagttcaaattctctctctcgctgttgggagtcaaagcacgatatgtgcta

SEQ ID NO: 216886 - DNA, 745 bp, Cannabis indica
gaccaaaaatagacaaaaaaatagacatcataattaggtgagagagtgagaatagattttatttgatagtaagtagagatgaaagtagattatatatattcattagtagatgataagagtattactttttattataaaaattaatgtgtactaactaataatattgtatagtacatgtactcttagtattactaatatgatgttcttatgagtgcatggtcatataaatttctaattataaataatgattgttattaggtacagtaattttcctaatattaccataaagcaaaaacttttacaaatgattaataattttttataataataattaaattaaaatatataaaattacatacttaattatattactaataatatttttttatagtatggtaaaatataataggaggagtactaaatattacaatatcttattacaaactcttaattaacttccacatttaaaataacaatattcattatatattatctctaaaaaaatttaaattgtttacaatataaaagtagagttcataagaatctaatttacgctggttaaaaaacaatgcactactttaccataaaattgtaataaaatacaccacttttttacactcttattttccaaatgtacactcactcctatagtataggcgcattttagcctaacttccaaattccattagagagagagtattatttaatatttccttttatctgtctctctctctctctctctatc

SEQ ID NO: 216887 - DNA, 515 bp, Cannabis indica
catccgtttcaattctatgatgggtagggatcaagttcttaatgggggatatatattcttcaatagaagaccagtgacattgaagccgtgggatcctaatgtgaatttcaagatagaagatgtgaagtgtgttccaatatggatccagcttgaagactttaaaccttaaatattggggacaaagatcattgttcaaaattgtggggcaactgggtaacccggttatggttgactcagttacaaaggaaagagatatgttgaactaccttagaattctaattgaagtaaggatggatcaacattttcctgacttgctagaatttgagaatgaacatgggtgtaatgtccatgttggggtaaaatatgagtggaagcctatcgtttgcaaccattgttctggtttagggcatctaacagaggattgcaagaaagatgctaaaggcaaacagagtggatgttaaggaagatcataggaagaagaagatagtagatgaagatggttgcatggaagtaac

SEQ ID NO: 216888 - DNA, 575 bp, Cannabis indica
tttttgctttttttaaccgacgcaaaaagtttttcgcttcattaataattgaagccaaaagtattgaccggcgcaaattgattttttttcttcagttatgaacggccgacaccaacaaataaaaaaatagtaaaaaaaaattgaaccagaaatctaacttgggcagccgatagatttatcaaaaatctaaaaatctagaactaacaaaaaaaaacataaactaatttatacaaaaatatacacaaatccatatatctaaccaaaaaaaaactaaatttatacaaaaatatacacaaattaatcttgatctaacaaaaaactaaatttacacaaaaatttacaccaaattagctgggtggcggtgggtctcagttggcctgtgaagagcttaatgagagagaggtgacatagagagaagagaaattgacgagaaagatagggttaaggattacttatcaacagtggctctcagggtatctcgatgggcgactagcgacggtcaggtgatgagctgtctccgagggggctagtggttgggcggcggaatgcaattacttagagagagagagagagag

SEQ ID NO: 216889 - DNA, 755 bp, Cannabis indica
atagttctaaggttcttattcattttcacttttcccactaatggggtaaatacaaataacatattgacttgggcccatttggtggactccagcccatgaggtgccagttgtatgttaatgtagatgccacatcatgttgatagttgtttcaatttgtgtcctataatcagggataattgatatacaactttcacttcaagcgtacaacattattatataaaagttttaattctaaaaagattgtccgacctacagggattaattattacatttcactaattacaatacttttttggttgtatgctttaattagataattcaaagtaaatcatgcttaagaatgaaattattaaataattgaaaagaaaacagacaaataacaattttaaacaaaaagtaaagacctagagcattgatttccctattattatctcaattttttcccaccttacgtggcatgtctacgtggccaacagtcaatgccacattgcactaaatctcgccaacgagaaagccaagtcatctctttagtactacaaccaatgaggagtccaactgctcaagccacacaatgaatgatgaaccagccacctagagggggtttgttggccacccttggccgtccctatgtccagcataggtcggccaggttctggacattttaggggcagccagcatgcatccaacagatgcatggccaaccagattttttcctcgtaggatttttgtgtacaacttcacacgtggacatcaag

SEQ ID NO: 216890 - DNA, 820 bp, Cannabis indica
tttggtttttccactttgtcgggccactaactcaccttaattcccacattagtatgatattgtccgctttgaacttaaaccctcaagattttatttttggacaccttcccaaaagacctcatactaatggaacagattttcaatacaaagttctaaaaagaaccccgattttttttggaaaatttgtcatgaaattctatctaaaaaattcttaaaagtctttaggcttttttatttttaattttctatcttatatcgtacattatattttttgtagaattacttgtaacgcattactagttatagcatatatactgtaaagaagactatttgactgtagttatttatttctttgttttttcaatcaaaaccgaagactttcgacacaggtcctaatactgatcttcatcttgtactaccgtaatcatctcatcgctcctaaatgtttggctctgatactactttttgggtccggttcttctaccttgtcaggccgctaccttactttgactcccacattagtatgatattgtccgttttgggcttaagtcctcacagttttgtttttgggcaccttctcaaaatgcttcatactaatggagtaggtagaacacttatatccaagataacttttgtctgttcttccaatgtaaaacttgagttgatacccaaataattaataattaacgattttttaataataattataaaattaaaatatgtaaaacatcactgctacccaaaattaatagctatagaaaatcgggtaaatatcattttaaaccctctattttacaaaagttaccaattggaccctgtg

SEQ ID NO: 216891 - DNA, 964 bp, Cannabis indica
actcaattagatttattattttttaaaatctaatttatattttaaatgattttttaagtttgatttttttttttagaaaataatttatttattaaattatgaaattgaaattgtgcgatttaccatatattttataattgttgcattatgttaaggatgacattgaggagaaaggaactggtaggattttttactctgaaggtatgttgtgatttaccataaattttccgttagtcttcatctaccatccacattataaactaaaagaaaaaaaaagaatttggaaagtaatcgcaaatctccaatttactattctcaaatctccaacactaaaaagagatatctatatgttgaaatatgttgaaataggtaattcaagttgaaatatgttgtttgtttatgttggctaaaatctctatatgggattttacatttttaatatcacattaagaaaaataaactagatattgcgactattctattttttggaggaggggggaaggggtggaacatagattccttagcaataaagtgagtaatgtaatttagtttgatttgttttctgttatgtaatcacaacattctatagtataatgctatgaatttgtttgatctactgatttgatgctacaagtagactcgtatcaaggagcttgaggaagaagtgaagctttcgaacatttaattttttgtattttattttttgaatttaattttaacaataatttacagttagattatcaagattttttaaacactaatatattactttcagtatttagttttaatttgtaataccattatttagattaattaaatatatgtaaaaataaatctcaaataataattaataatattttttttaatttatttattgtatcatttttaaataatatagaaaacacctagcataaaactaagtatacgtgcattgcacctagttttcttctagtatatatatata

SEQ ID NO: 216892 - DNA, 720 bp, Cannabis indica
catattcagtattttgattacttaaaaattaacaattaggaagacatgacacatacaaatccacttaataataacaatcggatttgatggaaagtaaaaaacagacaaaatttatgtacctgttgctgggttttaataaaaaagagagattgtcggcgatagagggcttcgacgacatcgggggcgttcgacgggtgctgggctgcgctgaaaggctgggcggagccaaagaccaagacggttcaagaatgaatgaattaacaacgtgatagcgaaatgagcggaatgagactagtacagtaacgaaattgtatttccaaacttcttaaaatcattttttcctttaatttatttattattcagaaaaaagtgaattaattttttataaaatcaattcttatatcattcatgaccattcatcaaaataaataaataaattcataaatactgtttttttcttattaattttgaattatgtgttatttataaatataattagtttataaattataaataatcaattatttattttgattaaataatatggtaaagtcggttttactttgaaatgacttatcatatcacaagagaagtcaattcttataccacctacctctcaagccattgtgaaagctattgtaaatattgtcaataaatggtagagtattgagtcatacataagaatatgactactccattcattatcaattagttttgaga

SEQ ID NO: 216893 - DNA, 804 bp, Cannabis indica
tggtgaagaaaccagttgcttgataattttccagtgatttttccaacgacaatatcaattctcacgatgtttttggcgccgacaacaactccgacgatttttccgacaccggcaactactgctgcgacttttctgaaaacgatagcatactcctaaaatgtcattgcaattggcattgttactggaaaattattaaaaaaatcaccaagaaactcgtttcttcctgaagaaaccaatttcttgatgaagaaactaatttcttggtgttttttcttagttatttttccagtgatttttttggcgacaatgccccttctgatgactttttcggcacgcacagcaactcaagcgactctcctggcgtcgacatctactccggcaacttttctggcgccagtagcaaactccagcgatcactgtagtttcatttgttttatttttttttaaaaaaaaaaaacgatatagggaatttaatatttttatggtaatttaatcctatgttaagtttattttattttttttaaattttacagtttggattgttttggagtttattcttgtagtttttatgtgaattgttatgtagattttgattataatttaaatttcttaatttattattatgtggaattttatgtaaattatcataaaaatatataaaacaaatattttcaaatgtaaaaaaaaaaacgtttttaatgtaaagatatctaattaatgttttacaaaacaataacgccatatattaatatattttactttgtttgcataaatttatacacatatcattcatatatacatata

SEQ ID NO: 216894 - DNA, 644 bp, Cannabis indica
atatacatagagttttcacaaaaatgtagtagtatttatcacaatttacaaacatattggatgtggtatagtgaccattttaaacatgtgttgctgcaataaaaaatgtgaaacactcaagcaaattcattttcattgaatttttggggactaagagtgtaagttgaatgagtattgcccacaaatggttgaaatctttatggaaaataggaagaaaaaattagaagctgtagcttacattgaattaaggaaaagatttggtgctctttcttctctttatgtttactgtgagctttaaaacctatgatgagcccccttttcttatttcctggtgtgtgtggcagtgtgggtgaaccttaatacaataaaaatttatccagatagccttatttatttgattattgattcctgaactttttttaaagctaagttagtcactttaattagttaactcatcaagccgagatatcatccaatgctgggatgatgcaatcttgtcaattgaattaataaaatcttcctccgcataatggagacagtgcaatcttgcttttcaaaatcttacaaactacttccttggcctacttgttccgttaatatttagcgcctatatactcttggcactcctttctaagcattacatt

SEQ ID NO: 216895 - DNA, 668 bp, Cannabis indica
aagttttgctataaatgaataaaaatctattctattgtaattaatatctcactcatttaaaaagaatttatattttcaatagcttttaattattataaataacgttatccgagatgcatctttatttttattgtattgttgttaatatttatgctaatcacaaatataaaagtggttttacataaatatattatataatttatattattcataaaaaaaagtttaaaaatattaaacttgaaattttattcgttaaacttaaaacaaattgtctttaaacaaaaattcttacactaagactacattggactgcttcaatgctcttttaaaatctcctgcaactgaactgtaaataagtctcacttccttttatcatctccaaagattttgaaatctggaagcatgagaaaatattgttagtgtcaaagaacaattcattctattatatccattaatataataggaatattgtgtaaatcaaatttatctcatcctatcatgttacaattttgtcaaaatgtttaacttattttaaagaatatttctatcttgaactagctgttcatgagtgacaccatgctagttgtgaaatgccttcaaaatatcacaaacatagataaaagtctcatatttttctccaatctcttcattgaatgaagtcatcaagc

SEQ ID NO: 216896 - DNA, 520 bp, Cannabis indica
cagatctgggtttttgatactaccattaaggttgttcttcaacctcaaagaggaaggagatggttcggaagaaaaggcatcgacggtctggttgctcgattgcgagcctagtatgtggaggctgtgaggcttagcacagattaaaaagccagagtagatgacttttcactcacttttggaatggaatattggtttgtagtttttaaggggttgctcaacaagccagagtagatgacttttcactcacttttggaatggaatattggtaaattatgtctgttagtcactaaaaactaaatttggagtgtcattaaattgacattcttttctatgtttcagatcttcgtgatgacatgggttatcttgctgatcatatgggagccaacgccataacatctgctcaggtatttatacatagcatatatatgtgtgtaagtgtgtttgtgattttacctttgaagaatgaatgaagctaactcaatcaaacgtttatgaaatagggggaggagctaaggaagca

SEQ ID NO: 216897 - DNA, 502 bp, Cannabis indica
gaatgaatgaatgtggcttaattaatttagaataataaaatatcccaagacgtactttattatattcatggattgagggcgccgcctcaatggcatatacttcactatactcactggtcaccaagaaaaatcaacattataagcttaacttcctatctatctatctatatatatgtgtacatgtccatcattatattccacaaattacaaactcttgcattaattattacacattctcttactcatttctctctaaagctctcctcatattatatccacaatgacgcagtcaggtttgtatatacatacacatttatatattagttatataattaatctatatgtacatgaatgattaacttatatagtctttggagatgattttatagaagatatgtattagttttaaaaattattaagaaaaaaatataatatttttaaaaggaaataatatatttttaaggccctgattatataaaattattcattacaggagtaatct

SEQ ID NO: 216898 - DNA, 511 bp, Cannabis indica
ggtttagaagtggaattatgattgaaaaacttagttttggttctaacatggtgaaatgaatgggcgattgaattgttgtggtttggtgctttgaatatgttgtgtttataatattatttgatctggagcagttggataggtttggaatggttttggctcgattttgaggatgaaaacttagaacttcctgcctgccagaaccggtcgacctgttggttggtctgcaggggaaattctagggttttctcctcaaatctaattttcattaggggtgttttcgagacctggtttagggtatttgggagttgtaaaacctatttttgagctagttgaagttagggtttgttcggttgcaggagttagggttattccagagtttttaatttaagctatttattgaattttattgtcgtgacataggactcgggatcgtcaagctttgtttccactcaggtcagcccgcacacctaacattgaattgaggtaacaaaagctttatgcactgctaagc

SEQ ID NO: 216899 - DNA, 598 bp, Cannabis indica
aaaaagatttttacaaattataaaaaaagagagattagataataaatagacaaaactaaataaaataataaaactttattacaaataaaaaaataaaataaataaactaaataaaaaaatagttaaacaaaaattaaaaaaaaaaaaaaagaaaataattacaaaccctaaacaagcaacatatgttaaaagagaggagagagacaacgattaagaaaaaaacatattgtttttttgaatgtattgagtatacccattatgaatttaagatggatggtattccgtatatgtctaaatttaataagatgtcatatatctgcaaataaaatacaatttacgtctttccgtgcaattaatcctaaattttatactttatagtattcaacacatttctaataaatcacatgtaagaatactgattttttattacaatttgtttggtatctttttttaattgtaaattaaggtaagggaaataaaaaattattaaagtgaactagagttgatatatattaattaaaattatttatgataattatttaaatttcacaataaaagtctattaaaaatatttaaataattaatactgatctcatat

SEQ ID NO: 216900 - DNA, 540 bp, Cannabis indica
tctttcttacaccaacagccgcaactaactagaatacctagggtttaaaaaatatttctcttctaacccgaaacaataaactcagaaattaaccactctcttgagctcaagccaagaacaccaaaaatgaacccaaaaaaccacccttctctcaacaccgaacccagaaatctcttggccgaaaaacataatttcagaatgtatattctaatttgactttagtgcatgcatcagcggaaactataggaaatctaaatttttcaggagagtgatgattgcagttataatgacaaaataaccatgggaccatctagaatgtatattctaatttcagaatgttcatggaaatttttagctagcaagacattattggcatttcattaattagataagcacaactcttcttcttagagagagtgagaggcatttaccaatgctagtactagtgaatagtgatgttcagcttcaaaagttaggaaaaaagaaaacccaaaatcaaattagttagatttttaaaaatgtgaaatcttaggaaaaatg

SEQ ID NO: 216901 - DNA, 739 bp, Cannabis indica
atgtcattttttgtaaattccacgacctcgacaggtgcatcttgttttgtcatgcatgatcttatagttgatttggctagaactatttctggaaagtacagttgtttgtgggagcaaaatgacaatactgataggcttgagaagaagacacgtcagcttggatgtgttatgggactttatattgataataagatagctagcgttcattttggagctacacgtttgcgaacctttttaacattattaggttcaagttcatctgaagtaagtctttctaaggaagtagtgcagaatctgctatccatgttaaaatgtttgagagttctatcttttcgtgatcttcatcatatggttgagttatctaattcaatcggtgagttgaaacatcttcgttatttagatctttctttcaccaaaattgtgacgctgcctgaatctataactgtattatacaatttacaaacattgaaattagaagattgtgatcatcttcaaactctgcccaaggatatgcatcatctcatcaatttgagacaccttattatcagtggatacagtctagttgagatgccaagtcaaataagtaaattgacgaatctccaaattttgacaacttttgttgtggggaaggatggtggcgctaaaatagaagagttggcagaacttcaagatctacagggagagctttccattaagaagttagaaaatgtggtcaatattacaaaagcatcgggacaag

SEQ ID NO: 216902 - DNA, 652 bp, Cannabis indica
ttcttcgtgtttatttattttttaataaatttagaaaaatgaaaattcggctatttgtcacgtgattacacgtaggatccacggtgaatgtggcgaatctctattgggttttcgagaaccgtgtgttctgtttttctgccacgttgctttgtttaattatactcgtgatgcttaatgcaattaatgattattatttttcctaggaaaaaatagattaatgattattatttgagtgaaatcatatacagtaattaattatgttggtgtattttaatattcaattttatagattttgaatacaattagttgctaattaatttttttttaataaaaatcataagatctattaattaataaattcatttaaaataatagaacgcacttcagaggaagagtctccaactgaagtacacgacctgtagagaaacaagattcttttgcgagtcaacttatttgcagatcattttcaaaaaatacaaattgtaaaggtataaaatatcgctttgaatcgcttggacacacaccaaactatctgtttccaacatgactctatcccacaaatgagttgctaattaattattagtgcatattaatgtgttattgcgatagtttaagtactatttattatctaaaaatgatttttattattttc

SEQ ID NO: 216903 - DNA, 798 bp, Cannabis indica
ttcgccagagcaaatttgaagagggttaggttgtgaacactaggcatctgattaggttttaagaattttatattttgttacgtcagttgctatctcttctatttcattttgcgtggtttttaaaacctcgctaacacaatagtcgagtgttaataacacacgcaaaatgaaaagcaattttaaaatcttttgctttattctcatcagtttattttttaccgtcattttttgaaagacgcaaataacatattattagtgtcaattttaaaaagacgggccagttatttgagtactattcacgtcggtcaacgctatgaacagtagcgctgaccgacgtgaatagtgtaatttgtagtagtgatgtctccgtttcaagcctatattgggccccttacacccacaaaataatgggtcttatacaagagtgaatcactttagctacttcctagattgacgactggccctatagaccgatccaagtatttccaacgtgctttattctaactccaacgcttcaaggggaaacttcctaaatgtagtcaccccaagtcaaggacacttaactgtggagttccttcatgaagggctaccaaaacagggtacttctttctaatataggtagtcccaaacaattcattcaagtcctcaacaccatgtagtcccatgtatacataatctcaaaatcactacatacaacctttccccatgtcatgtggattatacagctccttgtctttccttcgcggatcatggggctctaattgtcacagcttgactcatgccccctggtagtgaata

SEQ ID NO: 216904 - DNA, 518 bp, Cannabis indica
aaatattacttagcaattgtaataaatatataggtatatagctatcaacttataaaaataaataaatcataacaagaaaattgagtgatatatctttaaattgtaatccttaatgtttttaaactcttctgaagagctttaaaagtttaatgattggagttgtcccttttgccattattcacgcttaaatgccttggttttgtcaagtgtatttattttttaataattagattcaagtgtatctatctcacttatctctccctacattttgtttattttcttagtattatatgttatttcattttattaatgtgaaagagagtttttattaaaaatccaactgaaaattactttaatatttatggtctattatcgtttatgtatttgattctcatttagtgaagatatatatttgttgcatttttaaattaaattttgtattcaaaaagaaagaaagaaaaaagagaaacttaatttgaattattgtgatataatttattgtttttctattgatgata

SEQ ID NO: 216905 - DNA, 667 bp, Cannabis indica
tgataaggtgattcaagatttgtgagcaaaaatagccagcatcttaaggggggatattggagaacattgtcccacatggattaaatgtaaaagtattgagccatatataagaacatgagctactccactcattgccaattagttttcagatggaaccccatgattctaacacatctcaatgtttttgctttgaagttttaccttcatgtaaaacctgctttatttaaatcgggaaaatcgtacggttttatgaaaccatacactatagctcaaattcgtgacaattaaatccaattttttatattttcgtattcgtaatagtgagaaaagaaggcccggagatgctcttatgtccatcaacttgagaagtctctgcctccatctcattttctccacaaacttttattacccgtctcttgaaacttttatcgatgagaatttgtttattgagattaattaattaatactataaatgagaatgaatagaaaattgaaagttaaaaaaaaatacataataatgttctataggttatgtttcatttgttattattatcataaattaatagacataatgtcaccattcaaaaaaaaaaaaaaaactaagacataatagtcaaacaacctacgttattacattataactaaataacatataatagcaaacaac

SEQ ID NO: 216906 - DNA, 586 bp, Cannabis indica
atgattttaagaccaactttaatgaatggtgtatattttaggttaaatttgaccaaaacatacccatgaagctatatttggtctagttattgtatttgtgctccaaagcacaaggtacaaattagccataaaagtcaataataccattaatactcattaaaatatacaaaatatacaatggtacttttctttccaaaaaaaaatatacaaaataattattttaatatcttataaatatatataaaaaaaattattaatgaatagtattaatgagtgtcaaagaggtaattaaaaaatgtattatttattatgggctaaaatctggtccatgttaacttttttgtctaaatttagcatacattttacataggggttaagttttagcaaaatattctaaatggcaataaaccacatgtatagctctccattagagatgctctaataaaaactgataatgcttaagcttgaaatctgtttctcttgctcttcaatgtattttctgatctctaggttgtatctgtatctctccaatcatccaaaaatcgaagatataatgttctttttataggcccaaaaaaataaaaaa

SEQ ID NO: 216907 - DNA, 554 bp, Cannabis indica
aaattacgctctattagcatcagttttggaataaagcaaaaaacgtagcttcaaattataaccgaagctaattagaatatagcgtccgttacaactcgacacataatgttacgcaatttttttttttcactttttgtgtcggctataaagtgacgcattgctgtaggtaggggaaaattacagatttttttacaatcttctccacctgcatttttagatattaaaattggctttcataacaatgtttatatgactaacaataacatttataatataataatgataattaaatttttcatgtaacttaaaaaaattatatagttatgaagtacatttaatataatcaaaagtaaggatcattaaaattttatcctacatgtcataataaaaaattgatataactatgaagtattatatcaataaaattaagtatcactaaaagtaacgatcatatagctaaaatttttatatgctacatgtaccataacaaaatgtaaataatcgcatactcattattttaatatataagacttcacaaaattgccccattcatc

SEQ ID NO: 216908 - DNA, 1070 bp, Cannabis indica
ggcaaacacctgtcctcaccacccatagccaaaggcgtaacaaaaattgccccaaattgagcaaaatgatgaacagaaaaggaaagaaatctgttgaatttttttttttacgcgagaaatctgttgaatttgattcaccataggatggaattaattcaaaacagttttcgcatgaatcactacactacctgcagatgcttggtttgctgcacggttacttccaaagttctttcgatttgattcccttgcaattcttgtaccaaactatatgttccataaagcacaaagacttgttcacttgaatactcaaagagcgttaaaacaagaatatgaatagtaaaaaaggcttcaactctgttaataagtactttaaataaaaaaaaaaaaaactttgtaacacattttgttactcaatactctatacttggctaaaagaatattatataacgcaacaacttatcaagatttggtgaaaagcatgagttgatactaggaagaaaagaaaactacacctaaattatgtattcatatacgtgtggatttttttttttttttaattttaaaaaaactgatagatacatacatagctaattttcgtttggtacaccaaaacttaactaaattcattaattaattagtttttgaaaataaataaataaataattaaaatgtaatgattttataaaaattacaacatagctgctacaccaaaagtaacatgcactaatatatatattaattagaggctaccaattagtagggatatattattttgtataagtaatgatatgtcagcatagaatttatatacatgctaaccaaaaaaaacatacaatttatacagtaaaagagtaagtgtgaaaaacaaaaataaaacaaaaaattaacggcacaaaagttagatatagcttaaaacattacaatatatctacaatctacatatatgggatatatatagaaatactttttaaatggatattatccatgaatggttactacacaatttaatataaatattaatttaagaaatcaaaccatcgaattttgatctaataacgaataataaaatc

SEQ ID NO: 216909 - DNA, 1513 bp, Cannabis indica
cagtctttgcatgtagcttttagtgttttgtttttatgaagttaaaactcatttacaaatgcttacttttgtactttgcatcgtccatagatgacttcaatcaattacttgaaaaactttttaaaaaaaaattaaaatggagtgggtttgcaatatattatgtatttctagataaattccaattgatcatacacacatatatatatgctcctcaagtaattttgaagaataaaactttgtaattacttgaaaaatactacaactttataaacaataattgaaatttaaaaattacatcaaatagggagattacaacatttttctgagtttactagcagtagggttgcaaatgctcaacattctaatggttctttataagcaagccgttaagctgagctaatttattgaccccggttctaactattgcctcgattacataaggaccttcctagtttggattaaatactcctagagatgcatctctcgtgtttgcaaatactagtcttagcaccaagtcaccaacgttaaagagccttttcttcactttcttattgaaatatctcgtaactcagtgttggtatgttgcattggtaatttatgactcagtacgtttctcttcaagtagatccaagacaactttaagagttcttggttttcttcttgattataaaaatctcgcctatgggtcgcaatattaacatctactggcagcattgcctctgagccaaactgccagcgagaatagagtattttctattgtcattttctcagtccttctgcgagccgaaagtacttgttggtagttcatatacccatctaccttttgtagtgtccaacttcactttgatagtattcttgaaggttttattaacaacttctacttgcctatttgtttgaggccttgtagactgattaaaagctcttaatgatcttagttcctttcgcagaactcagtgaataactcaccatcgaattgagttccatttatcagatactaatcttgatgggtaattgtgaatctaacaaattatgttcttgacgacaaagtcgagaactttcttcgaggttacggaaaccagagggtcagcctctgtccactttgtaaagaagtcgacagccctaccactgtgtactttactcctcgtcgccgtgtggggagtgccccaatcaaatcaatcgcccatgttgccaaatgggtatgacgaggtcattattcttagttctgttggtggtactcatcatattttttgacaaatttgtgtgtgtctttatttatagttggcaagtaatatccttgtcgaattattttactttgacaaagcttttcacacctgcatggtctccacaaaagccttcgtggatctctctaattatctcacttgcttttgtggggaaacccacaaccataggagaggcattgagtaaccccttcgatataattttccttctaccatcgtgtaagtgagggactgaatcaaaaagttttcgtgcctcgttttgtctgctgaagttg

SEQ ID NO: 216910 - DNA, 614 bp, Cannabis indica
acacaaaatttatagtagtttatccatatatcccgatagtaatggggctacgtctactttgaatttttatttctcatgagatggtgattaagtatcagaaactccaaactctagagagagaagctctgaccttatgaatagttttctaaatgtgaaaaatgagttaagggagctctcctattataggtgaaggaggcccacaaaagtaggaaaaaatacaaataagtatttttccatcgttgatgatgatctaaaggtaaaaattaggttctggtggtaacagttaatttttggtgctcgactggtcccgctacgagttaccaagagcttattttgtaactcccttaagaatgaatttgacgatgataacttcagatttttgactggggtgttatacatgacttgatagagagcttaaatagcttcaaaatgtaagttgaattgcgtcaatcagttgaaaattgagtgagttatgcttattttactaaagacagttcaggtcccagcactcaggttgacatctagcgcccaagttgatatctgacgtcaacttggatgctatataagtgtaaaaaacgtccaaggaatctaaatacttagttgaatctaaatag

SEQ ID NO: 216911 - DNA, 681 bp, Cannabis indica
aaaattaaaattttaaaaaaggtcagcaaaaacaaatcagttaaacataggccaggatatgcaagcttatggaaccacatcttggatgcaacatcttccacgccaaaatgaaaaggtggaacaatcttatccttgccattcaagtaaacattgtccttgtcatggctaaaagaaacatgaaaaaaaaagactaaataaaacacatactggtctttctttgtttaccgaccttcaccaagccacaagtcaaaatcattctcgtttttatagtctacatcttttccaattttatcgtcaagaggacacaaaccagcaacgtaattaacaactccataaccagaactatctttaaaacttgaaatcgaagagtcaaactccataaaaggagacgtcaaagctattggtttcttagatttcttcttctcaacaagaggagtttggtcaatgagaatatgatgatcttccacaacttgaatattagaatcaacaaaaaaacttgttgtacccatctaagtatgtatataaaaacaaataggggaaaaaaaatataaaatcagtcattataaaacaactgttgagctactaaacaaaaacggtaaaacaaccatacgtcaacaccaagaccatgaccttccttaaactcaaaattttcagaatccctggttaccagaatcaccacca

SEQ ID NO: 216912 - DNA, 826 bp, Cannabis indica
gcatattcaccgttttcaacaaaagattgagattaaactattttcggggaccaaacagaacttctaggtggcttgaaactgcacccagcgcctagattaactaaatcagtttcttaaaaaagtattccagacatttttttcgttatcagaaataacaaaaaatacaagtaaatttaagaaaaaaactacaatcttaatagcatcaaaacttaaagtagagagatcaaccatctaattcatacttaattttttattataaccaaaatatattttctttaatttagaaaaataataattatagagagaccatatggaacaaagaatatattctttccttacctcctagtcttactagtgccccttttacatacacatcatcaccatagaatctctccacagactaattaacaccaccctcgatcgaatttatgccaaagcaaacactcacacacacacatatatatatacacacacattatataacaacacattaattccacacagaatttttaaaaataaaatagggttggtttttaagagacggaagcagttcgtcatggaaagttgggtggacagaacgaaccgttgcctcgttaagctttcctcctcttccattaatggcagtagtcggaatcgttgtcgttttactctccatttcgtcgtacgccaattacagatcacacatgcaccaaaccgttatcggtttcaagatatcctcttgtcttgcctttgctgttgatttttttggtctaagttgttaccaatacggcagcgttttggtgattggaactccaggacaaagcgtgagtattttcttcttgtcttg

SEQ ID NO: 216913 - DNA, 863 bp, Cannabis indica
ataagaggtggctatatatataatttgtagggaaaaaaaattattcaaaataacttgtttttttttatcaaattgtcaaaaaagacttgctcaaattttaataatatttttatgggttttttttttttaaacattaaagtagttttttttatatatatttttacgaaaatctacgtaacaacttaaattataactaaaatccacataacagcccacaaaaaaactaccacaccaacccaaaccataaatttgaaaaaaaaaaaattaaaaatataacatatagggtaatttccctaattttatttatttaagtatatttcaatactcttatgtatacatttctctctttctctctctctgtgtacatattctctttctctctttcttatttctctctcttctatcaaactttaaaaataattcatgatcacgttactcggatgagcatgaaaaaatatcattgcgatttattaatgtgaacattttaagatgacaaaaacatatattttttcgtgagaaaagaaactattttgttactaatatggtgattaattactattttataattttttttttaaaatcttaattaacatttattttaaaattttgttaaattgaataatattatagtatacgaagctttcaaaataaacaaaaatagtatataaaataaatcggtatataaaaattagtaacttgttatattacatggcaattcattagtttttgtaaatttttttttaaggttatcaaaatttatttcaaattataatctaccgtaatataacttaaaaatattaattagttactaagatgtatacaaataagtttttagagagtctaaccaaaatgtatcacaaatt

SEQ ID NO: 216914 - DNA, 736 bp, Cannabis indica
atatagatatatagatatatatatatatatacaaacatatattatatatatatgtaattttagagtaagatgaagttggtcatgatggggaagatgggcacatgaagaactaactcattagaacagctgcaattaccataattaattatgtttaattaatgaattataataacaagaatttatatacatatatatatattgatgaaatagaaccttgcccttttttttctttttgaaaaataaaattgaaacaaggattataaataatatataatctgtaattgaatatatagtaagaaaaataccttgattaatatatatgtatatatccaaatattttggtgtgtatgtatatatatatatatataaagaaaatatataattagaaataataattataatgatgagttagtaatgcacgtgccctgcttctccatcttgctcaacacacatcaattttcatcagatcttctttccaaaccttcataatatttatatatatatatacctaaaaccccagctccccaaaaaaattttagagagagagagagagagagagattgaatgaatgaaaaggtcttgaaatggagatttgggacatccattctggaattctttgtcttgatagggcactcatttataacaaagaagcaaatgtgggatagggtttattattattattattattattattattattatattgtatgatgatggtgatgataattgataatga

SEQ ID NO: 216915 - DNA, 797 bp, Cannabis indica
agtcgtggataaagtagcatttatccacatagtggcctggtttgccacaattggtgcatgagggacttggtttctttgatcttgtggaggattgttggaagaggagggtcgaatagatgttcctagagaggaagaatctgaggagccaagaattcgttgcctctcttcttgaaaaattatagaaaataccctcgaaagattaggattgggttcattaagaagaatttgggcacgaactgaggcataagactcattcaaaacagtgagaaattgtaacacttggttttggttgtaatatttaagaaacaatttcatggcaccacatgtgcaagtagtattaggttgaaattttgtttactcatcccaaatggatttgagtttggtaaagtatgaagtgacggactgatcacctttctgcaagcgtgttagttgtgtttgaagttgaaagatctgaggtacattgccctcattaaatctttcttgtagatcatgccacatatttgtcgcaagatcaaaatacatgatactttgtgctatctcagaagaaatggaatggataagtcaagacattaccatgttattgcaacgaatccaagaatgaaggaggggattaccagtagctggtcgaggaggagagccgtcaatgaacgcatacttgtttttttgcggtgatggccattgtaattcctcatttccaagactggtagttggcgcacaccattaaggacagtggaaaccaggactaatccaggatgatccgcgtatctaaggaaaaaaggactcgagacgtcttcatg

SEQ ID NO: 216916 - DNA, 584 bp, Cannabis indica
attttatataaaagaagaagcatgttagatttttgttatgttccttccaagtacacgtacatacagcttttatcttcttactttaataaatcaaaaataaataatatataataataaagtggtcaaatcatatgatatttccacagggaaaaaaaaaagacactcttttatttttattattgttggagggttctgggaagggagtgactgaattgactatcataatatcagactaagtcttagtcgtcttctttcactgttcattattctaaaatagttctatttaaaacgcttatcagttattacattataacttcttctggtgtggtgccaagccaaggcaatctgcctctactctattcaataggaccttatcacttcaaacacccccttcatcggtaaatatcttcccttccttctcccttctgtttttcttcccctgtattttactataaactttgtttgattgagttataatgagttgggatttatttatttttctaaaatagtttctgtaaaaatttattattataagcattcatttgtaatttcatttgagtatgtgatcaacatattattttata

SEQ ID NO: 216917 - DNA, 838 bp, Cannabis indica
agagagagagcttaggctttagaacttaagagcttagagcatgaaacttagagggtagagagcttagaactttgggagattaagtttagtttagtgctttttatataggagagcttacaagagatgataggttgatatcctttaaaatgaggagtgttacttatttatttcacattaaaataataaataaataaataacatgttaattaattctcaagaataggtaaataattgaagtttatctcctattttcatgggttattgaggcctaatttgtaactagaagtgttgttcaggctaaaagttgtagaggcacaaaaagtgcctgccaggagagaggttggttggtccttcctttgctggagactagctggctatgctggcaatagggctggccagaggggttcagccagaccccttaagttggccagttcattgtctctttgtcctgcttaagtatttggactcctcgtgaattggtatgttgtgcatgatgacttggcctttttgttgacaagctatactccacgtgccatcaatcttgcctacatggacatgccacgtcatgtgagaaaaaattaagataacatttacaccctaagtccctgtgtggacgtctgtacggatagggactttccaactttaattttgattgctggagtcttaaccgagtaagttttatataataattttagctatgaaatattttctcttttttgggtgctcacgtcccctaatagagaactgataatatttgcatggttattttgctagttgcatattattgttgaatgcttaatgcgagggacccaccagaaactatataaggttacttagc

SEQ ID NO: 216918 - DNA, 638 bp, Cannabis indica
tgaggggctagcttctgcatctgtctgagtgaacgcgaacacccttgctggagtgggcttcgcagcaatcttctattcttctttcttaaaatgggggcaatcccttttgtagtgtcctgacataccacactagaaacacccttgccctctacactctcccagatgatgcttcttacaattggggcattctgggtaagtgtatcaggtttcggagctaccctgacgattgcctcgaccatggttccctcaaaacctcttattctgtcttgagccaccaaatgcagtaggcgcctttcttttctggtcagtggtcgagccactacctcccctactaaaacccgaggtaggaggagtaggagtcccaccaacaacctaagtcccttgagactcttgggtgcactctactgcgtcctaaactcgcagtgccttacccaccatatcagcataggtggtactgtcatcagtgatgatcatcatgtcatgtcttatcttcgaattcagtccgtctaggtatttctctttcttactaaaatcagttggcacgatttctgaagccaatcttgccaagcggtcaaactgagttgtgtattcagtgacactcatattttatttcttagtcagctgagtaaattcttttc

SEQ ID NO: 216919 - DNA, 977 bp, Cannabis indica
aaagagagagttttgcttaatttctaacttagagataataccaagttttcttaattaatttatgtaatattcagcattagtcttaaaaataaactaaaaatttgactaaaagagaaccattaacaacttatagcaaaatataaattcgctcttatccttataaagtaagtttataatctaggagtgaaatggtctaaaatcataatcctaataaatttcgacattccaaatgtctaattatcttacacgactataattttaagatactcaaccgtatctaaataactctaatagcaaaatcgtcgcattttattattactgagcataagacatgaaaatcgtaaaatttcatagtatatatattacatctagaattcaaatatatatctctataaatgaaaaaaatatttttctaaatgcccatttctaataataagtattaaacctcaatttaattaattaaattcttaattattttttaattttcataatttaattacgagatactttaatacttattaaaccaaatatgttaaatcattttttattaatatgatgtcgtgcaattagaaagaaaagattatttttaattataatttctttcaaaattttaaaatattttttatataaaaaattatatgaactaatatacatatatcacgtgtacacgagtgtacatgtcagcagcagtaaaatttagggggttagttacatttcattctaattcatagttaacgaaacacgaagtcaacatttagagctcttcgtcttgcccatgtaatccctagtaccatattaggaaatgaatgaaaaaagaatttgttgtttctaatgaaatgataaaataggattgaggaggagagaaataataacaaatatctataattaatgtctaaactaatggcgaacttacctagagccaaaagggacagttaccccttctcttgaaaaagatcgagaaagaaaaatgtacatat

SEQ ID NO: 216920 - DNA, 560 bp, Cannabis indica
atatatatatatattaatcagactaattagtgagaaagtggatcattgtaacttcattttaaaatataagatttctgatcattcattatctcttcagattttgtgatttttttaattaaaagaaacaaaaaaaaaaataggtaagtactactaagaaaatatataggaaaaattaataaaattcaccaagtaaattttctaacttattaattccgtcttgcgccactatagatttggaattgaatagcactctcaattatatagaacgctctatatgtaccacgatatagatacgttatgattatccattgttacaatcctaatagtcaaagatcctctatagatgatctacactgaatagggacaaatttaccgttctacccttcaatgttattttatccttaaaacacttagctacctataaatgatacttcagtaaactaatataattactgaaatgaggtctcaatcatttatctctattcagccaagctcgaaggaaatcatcatttcacttctaaaaacctatagagttatagattccatatctatgattagta

SEQ ID NO: 216921 - DNA, 525 bp, Cannabis indica
aattaggttcttatatttaatagccaaccattcgcacgagaaactcagccccaacatcttaaactatgggttcatgatttgattatacttgacatcttgatatgatttaatataatggtgagagctcgtattcagtagttttaccatttggcaattttaaacacaaaacacgttcaaaccccagagggtggtctagtcttaaggagggaggtgtgttggaatgtgtttgttccaaggttcaaatcctaccctcaaaaactttcgggccacggtcgaagtggcagggccaaaaatttggggaaagaaaaacacaacacgttcgaatagacagatcttgacaaagtgaacggtggtggcatggccacgtacttagttgagttgtgttattagcacatggtactggtatttgttatcttttgcattgtcgtcgtgcctatttcttaatgtccctgaagcctatttccaaatatccattatcttttggtcaaggatttactgtggattctaataattaaattttgttgc

SEQ ID NO: 216922 - DNA, 601 bp, Cannabis indica
tctcagtttcatggatgcatacttaggatataatcaaatttcgatgtatgaaccagaccaggagcatacctcttttattatagatcgaggtttaaactgttataaggtaatgccatttggtttaataaacgcatgagcgacgtatcaaaggttagtgaacatgatgttcgcagatctaattggccagacaatggaagtatatgttgacgatatgctcgtaaaatctcatcatgcaaaggaccatgtcacccacctgtaagcaatgttcgagatactacgacgatagaaaatgcgactcaacctcctcaagtgtgtctttggagtcggctcaggaaaattcctcggctttatggtaaaccagcgaggaatcgaagctaatcctgcaaaaatcaaagctttggcggaattgcgatctccgaccaaaccaaaagaagtttaaagccttacaggtaaagtcgttgcttttaatcgctttatatcacgttcctctgacaaatgcaacgagttttctcaaattttgaaaggaaataaaaagttccaaatggactaaaaaatgtgaagaggctttccaggccctcaaatgcatttggggcaaccccca

SEQ ID NO: 216923 - DNA, 1247 bp, Cannabis indica
tggcgcataaaattctgattttccaagatctactcaaaggttacactaggaagaacatcttggctagatgcataataaagatagatttgagaaaggcctgtgatactattgattggttgtttgttgcagatttacttaaagggttgtgtttccctgccaggttcatcaatttgatccttgtttgtctcaaaggtacttcttacaatttgatgatgaatggtagactccagggatagtttaaaggtgaaaaaggcctgcgccaaggagatcctatctctcctctcttatttgtgcttgttatggattgtctgaccagatgcttgatctattattccagaaaagagggttttggctttcacccattgtgtaagaagcttaagcttgtccacttatgctttgcagacgatcttgtcatcttttgtaaggctaatgagaactctgtgaggttagtccatgaagcctttactctgttttgcgatactactaggctgaaggctaacatgagcaagtctgccatttactttggaggggtcaatgaggttgaaatagggctattttgaataagatgtgtatggaagatgggtcttttcctattaagtatctgggtgttaatctgaggccagccaaatagaagatctcggattgtggttgtattcttgacaaggttaataagaaccttcataattaggctactgggaacctttcttttgctaggtgtgctcaactaatccactctattctcttgggaattagaaacttttggatgaatctcttcatcctccctcaaaaggtgacgaatgcaattgacaagagttgtagagattttctctagagggttaatggaaatagaagtaaattccatcttccttcttggaaaaaatctatctcccaaaaaagtttggtggaataggtttttgagaagggaagaaatgaaaaatttctcttatggctaagaatatattggttatctctgaaaaataagataacctttgggttaaatggattaactccatctacctcaaaggctgtgatttttggcagctgccttttaaggcggacagcagttggtacttcaagaagattttgagactcagggattcaattgattgggatgctcttgatagttcaggtcaaaatggtaaatttaaagctaaatgctttttacaattctcttatatctactggcacaattgattatgctcctaagatgtggcacagttaatgttcccaagcacaggtttattgtt

SEQ ID NO: 216924 - DNA, 1430 bp, Cannabis indica
aatcatgtctctaaattttctgatcgtgatttttgtctaatttcattcaattttactaatttagtgattatttatgtactaaatcatactgctcaaacttgaacatataccaaatcatggctctcgtactttgacatatgtcaaatcatgccccctgaactttcatccatgttagattttccttactaaaattggacaaaagcccttaaattcaacaatctcaatagttctggggaatttttaacgaccagaaaactttagggggcatgatttggtacatatcaaagttcaggagaaaaaaaatcctaattagcataatatatatagattagagtacaacataaatagttaagtttaactctgaattgtaaataaatatttaagtttaatttttagcggtaataatactaagttataattctatagcttttgtaagtaagtactcactgttaagtgttaagtaaattgccatgtggcaatttctgattggtccaaatcattaaatttttatttttttaaaaaaaaaaactagtttaaatataccaataaaaaatgacacgtggatagtaactaaacatttaatagtcaggtacctacaaagtttcaaaagtataacttaaatattattactgttaaaaattaaacttaaatatttatttgtattcgggaattaagcttaggtatttataccacaaattactctataaattacttcatttcaatcggtattcaattcataagctcccaaatgtcgttgaaaaaaatttataataataataataaaaaaaggttaatttagacttttgccacttaaactttcacatgtaccaaatcatatccctgaacttttcatgtcgttaaaaactctcctcgaactattgagattattagatttaagaacttttgcctaattttactaaacaaagtttgacgtgaataaaaatttagagggcacaattttgtacttttaaaagttcagatgcatgatttagtaaatatcaaagttcgggtgcaggatttagcatatggataattgtcatattaataaaattgaatgaaattaaacataagtcattaaatctaataatttcaatagttcgggggtaattttcaagacttgaaaagttcaagaaacatgatttaatacatgttaaaattcaaaaaataaaaatcctaattagccataataaaaataatcccaaaagtgagaaaaaaaaaccgcacacatatataatgtatatttttaataataatataatacacataaaagctttattcatgcaaatttcaatttgaatactagcaataaacttgccataaatctagaagtatattaagtctctgattctcttttctactttataattctattgactatatgaattgttttataaaaaatatgtatgtataatatattaaggatataaaaa

SEQ ID NO: 216925 - DNA, 997 bp, Cannabis indica
atatgtttattaaacatttgattaatattattaatgtttataatgttattattaatctagcatgtttattatgataataaatataatttgtttgttaaaatatcataataattttaaaaatagaacacttaagtttatttatttatttatgttgaataaacactttaaataacacttatgtttattagttattgaaaaatgtgtttaaaaaaaaacaaaattgtaattaaatgtggccttatgtataaatactatatttatattattgttgataatgtttattaattattaatttaatatattttttatgataatatttgtgaagatatattgttttttgaccaagtgtgtaatgatatgttgatataatatgtattaaaatttaaatagaaatttataaataaaacatgtatgtttattatttatttttaccatatataatttgtacataaaaattaagaatatgtttctcataattaataaaatgtatgataaattgtaaataattttttatgcacatataatataattaagtactataatgtacataaaattataaattccccataagacacttgtattttgctctcttgcttcacattttgcatcgcctctaaaatattattttatttaaatatgctaagaattggcgcactgcttttattatttttattttactactttcattataatattttatttttaagtaaagatatagggtacttagatggtgtacctataaaagtatatattgatatatatatatatatatatataaatatatataagcaatttgcgatgaaattctcttatattttaatttttatacactttaacctttttatttttatttttttggttacgttaaaacccccgtttaacgttttttttttaggttaaattttgtacacaccggtttaaatacttaccattaaatatcaactgaatgaccactgcatatgtatatatgtaacagtaaaaacttcgaagtcgatag

SEQ ID NO: 216926 - DNA, 383 bp, Cannabis indica
tggcttggtttttgtggttgtatgaagcccttcatcgaagctgagatctcctattaatgatatcttctgttcgcctttctggtctgttaaacaaaaaaaaagcttattcgcccatatgaaaattagagatcactcaccataacaacaagtaggttgaatagtcaagttgacaagagatgagtgagtgcatgtttttcaactagggcttaaggctgaattatatgaattaaaaaaaaatattgggtaaaaataggtcatacaaaggaccattctctagttacaattttgttattttatttctaaccaattattcttctttcaataatacaatattttccaatgcaagcatataaatgtcaaaattatttatttaataattataa

SEQ ID NO: 216927 - DNA, 726 bp, Cannabis indica
acggtttgtctaagcatctccttcgcaagatgaaatatttgggcgacacgtgtcttgtccgaatatttattctgcaaggtgaaactttttggcaacacatgtcctgtaccatttgtggtcccttattgtctagttgcagcaacgcacgagcataaacccttcaaataggcctaatagtcagctatttttgcatgtattttacttcattagtggactttttgcaaaaatcctaggcgagtcatgggcatgtccatacccaccccatagcctataaatacccttctattttcatacgaaaaggggatcgaaaaaactacatagtcgaagctctgctaaaatactctctaagctttcatctcttcaagagaaacttaagaaacacattagggtttccttgcataagcactgtaaaaacatcgaatacgccctttgaggtgaatagactgattcgtggactgatgttaattaacacttgaaccacacaaaaaatctccatctcatttattactatcttttatcatttcttaagctcataaatatttagttttcaaaaaatctcggtaaaatattttggtactttcattgagagctgaaagaaaagacttaaaacccataaatgctactgtaaccatggtattactcaaaaaaataagttcccaaaaaaagacccctctggatgccttcgacgctgtatggaggatgtaaaaccttctctcactagagcac

SEQ ID NO: 216928 - DNA, 543 bp, Cannabis indica
taattccaaagtccatcaataatgatagctgtattaactcaagttatgcttacaaaacttcaaatcagactcagttcaaatcaattcagaaagataaatgacacgtacccacttgctcgtcagtgaactagcagatatatagaagaaggtagcttttgcctctccagctatggcttttccaatcattgttttgcctgttccctaaaacacaaacaagtgtacaaatcaatggccaaacacaaacaagcgcatctgccgctcctacttaaaaggacacttactggtgggccaaagagaagtaggccttttccaggagaacgacaacctttaaatatatcaggacgcaatagaggccatatcaccatctcagtcacacattttttggcatgatcaagaccagctgcaaacattgtcaaataaccacgttaatgagttatcttcgctgctctgcaccgccacatagaaaaacttgcgatttaagaaaaatttggaacatggtatattaccaatgtcctcccaccgaacattgggatccttgtccat

SEQ ID NO: 216929 - DNA, 725 bp, Cannabis indica
acaaagagcttgttctttttcatttggagctgtatatgatcatattttcataatataaaattcaaagattgactatttagctttctactagcttaatagctattattaaatatggtctttgcaaatttgagttttcacttcaaaatttatacttttttgcttgaaatcacacatagtgaaaattcagaactaccatagcaagaaaaaacaggtgcttaactgatttcagatgagcttctgttgtcagttccaaagtaacattttttttgttgctaaaatgttgattttgcctagttaaaaaagcttcagttttgctataaaaaatcctaaagattccgattgaaataatttccgagctgtattgttaataaattatttgataaatgtcaacttcttttttaataaatttactgccattttgtcctagtgaaaattttaagatcatcttttgagaccatattcaatgaagttattataagacatctgagatgccaggtttcttaatattataccatgaattgagtttggggtaattatattatctttggagggatccatagtgtttaacttatataccaatcccatgcaatttgaaaggaagtgttattttgctccatttttcagtttcagaagaacaaaagatatgacctttttgttgataccacatggacaatataactaccaaaactctaaagcctgttactactaatattacaaccactaca

SEQ ID NO: 216930 - DNA, 652 bp, Cannabis indica
aagtaaattaatagtattagtagtagctaggtaattaatattgaaaagtaatttatatataattatttagatatatattgtccaagtaaatataatttataataagttgctaaaacaattatatatatattctactcagccttaataacgaaattattttgaatttttgtagcaaacagataaacagtccctgaaattattggtacggtactactggatatggattcatgggcaagtaagtaagtatatatagttgcttttaagctttatttataaattatattattcttttctattgtccccttagagggagatatatcgcacattaattatatcctattatttgtttaaaatgattttttattttatttttatatctgaataaagatttttatttttaatttttttaaaaaggaagttgcgtagaatccaccatatactactgtacattaaataatttttcttactaaaaatagtaaaaagaataatgctttaaacaatgatggactatgaagtatttgaagaaaaaaatacaaactcataaaaatattattacatctattataattattattgattacttatatataattaatatttcagttatatttgcaagtatttctgtctcaataatttccatcaccacattagt

SEQ ID NO: 216931 - DNA, 788 bp, Cannabis indica
aaagaaaaagtaagctagaacaaattagacaagaagtcgcccacagcagaccagttaattgcttttcaacaatggtagattaaactgtttaagtatcatccattagtaaaataattatttatcaaagggtgataaatcattgtgaacatgcagaagtgaagagaaagtagacctaactagtaacagatgaaagggttgggataacgggagagggcatgggtttgaacccaacacctctaagttaatatgtaaattgtaataccactatggtagactaaaaaaactaagtaacaaatgaaagtggaaaattcatagataactgtttgttttttccttctaaaagatgacagtagttaaatgtctaggactgactcctcccaagtttattgagagtcctcacttttggctgaggaaaattgtggtaacatgagaacaagggataacctgctaattgtttttgtagaacaggagtccttactatcacaaacatttctttttgtagaaccagtaaaggtgtaactattactaattgtttttaaattatatcatgtacattttggaagtacaatcacaaaagtttttagcctttagtctttcagtagctgattttagttcctcactttgccctcaattttactctttggcgactcattgctttaaattttatggctaaactattgcgtatgtagttttaggtcattataataatggtctttctttagtcagatctatcatacatttttactatgtagagcgtcacaagtgtacagttgtcgaattactttctg

SEQ ID NO: 216932 - DNA, 1108 bp, Cannabis indica
aattctaaaatttctgtaagtacctagatgttaagtgttaagtaagtttccacgtgacgatttttaattggtccaagtcatcaaatttttattttttaaaaaaagtttaaatataccaataagaaaatgacacgtgaataataacttaacatttaacgggtaggtacttatagagtttcaaaaatataagttatgtattattatcaccaaaaattaaatttaggtatttatttgcaaccagtagttaaatttagatatttataccgcaaattactcaagaaaaaaaaatattatgtttatgaaaatgttgaagatttaagtaactcggtacatatacattttcattcaagaagttaaatactgaaaaaaaaaaaaaaaaaaagtttaaattgaagaaccaaagttatcataatagactacctcaaatttgaataaaactttcatattgatatgatgtttcattatttcaattggattgaaagcatattaatcgtcgagcacatgcaatgcaatgcacattatgattctctatttcgatcgaaagtctataatcacatctcgagtcaaaacattgcatcatgaccttctgttatctaaagtttttagttgatatatttggttaagataaaaaaattaattatgtgtggtgtttttaaaataaggttgagatcttattttagtgtgaaaagatttttcaaaattaaattgtattatatttgtcaaataaataggtaatttcattatttagaatatcttatcttgattttatatgtttaagaaaattaagtattaatatatattttattttgagttttttgaagtaaaatttttctatcggtcgtttcacttgtatttacatttttaagtttaaattttagcggtaaaaccttctaaattactgaactagtagcaaatttaaggtgtcattcggttaactgtcactataggttgcttatatatacactcttgcacacatgacacatttatattagtacacctaatattattatttaaaattattttaaaattaaataaaattataaaaataaaaataaaatattttaaaaaaattaaaaaatattataaattttgaaataatttaatattt

SEQ ID NO: 216933 - DNA, 825 bp, Cannabis indica
aaaaaattatatagctccttagtttagtgccattattatttatcatcatcttcttcttttctttgttccttcacacaataaataattatcataacttctcttttgaacttaaatattttagattatacttttatacaaaaataaatttaatgaagttttgtttttcttttagcattttggtaaaaatttatttaagtattgcttttatttatgcttatttaattactataataattttatatatttatataaatataaaaaatattatatataaaaatataagtgaaagattgttattttagttaatacaatgacataaatttattaattaataaatataattaacaaaaaattatgtattattgttggaattattttaccaggatctagatttactaataagtatgtttttaacatcctaaacataaacttctaaaacaatatgaattaaacacatataaagtttcagaaaccttacagtggttgcaacagaatttaatgtctccttccactcagatctctaacccttgtatcctttctgtagcagagtatcaccaagatctgagtctgaatctcctcttgaaaatggattcttcacagccttacacactatgattgtagtaccacttgatgtgtgtgggcactcactcttttcactttagggcttcggttttgaagagagaaagagagagaaaatgtttcgaatagggagagtgaaggtggctcaaaattttactgaaggaatgagctgcatcaaataatgaaaaaataaagtggcaaattgctttacaagtggccggcctggccccactttgcaattttacc

SEQ ID NO: 216934 - DNA, 1002 bp, Cannabis indica
tacatgatatgagaatatatgaatatatatgagaatatcccaatataaactctccttaactgcatttttctccttgtcaaccagtccttttttatatttttacggaattctacatagaaactcatattgtaactagcgctggaacctaaattccaacaaaaaatatcgtatagaaactcctattgcaactagcgctgcaacaattttacaaagctaaaccttaaatttgaaaaaaaaaatagtatatgaagtaatttccttctttttataatggttaaatcttttaattaaattgttatttaattattttaataaataaatatctataaccaaactcagttaatgatatttatgagagaatatctcaacaatcttaaaatatctataatcactttctttaggaaaggttggtgtttttgtcctaacaactcaaattttttcttaacaattttcaccttttccctatttaattaatttgaaaaattattcatttattacaaaaataaataattattcttttgctaattcaaaatagatttttacaaatatcattacactactttgtattcctacccttgatagtattttaaggtggcgattcggggaccatggacctataattctaaactccaataaactagattattttttgagtctcatcaaccaaataattcttgtttattaattccatgattactccactataaatattgaattgaacttatagaattatatttactgagttttactgcaatgtccattgatataatcaattccagttattagccctctatgtattggttcgtaattagtgttattctaatttttgcccacatgatgtggtatgtccacataggaaagatagatgacacgtggagtatagcctctcaacatagttgaaccaagtcatcatgcacaatttatcaattgatgaagggtctgaatgcttaagcagaacaaagatacactaaaatagccaaccaggagggtcttgacggacca

SEQ ID NO: 216935 - DNA, 541 bp, Cannabis indica
ttgtaggagatgatttttggttttaagatccaaatggagaccccatgggagtttattggttacaaggagtacacatgattcactatgcccctttaatccctctgccaatggccctagcaaaattaaaaaccagtttaaagaatggttcaaaccagttcaaatatgtgagcaattagctcacaatcttccctccaaaaagtggcaaaaccaccctagcattttaccccactttcagcaaaagacaattatgctaagattccctacagaacccatgtgcaagtgtaccccacgagcacgacaacttgctaagattccctaaattttttaactttattaaatagcaactaatagaccataccttcttttattcttgatcaactaacccaccaccaaccaaaaatatcatataaaaggggtcattattctctaagaaaaacctagaaatcaaaagtaggaggagttgagatgaacacttactgtaatcaggagctgcatcatccttgttcctcattcgaaaagccattgcaacccccttccaccc

SEQ ID NO: 216936 - DNA, 522 bp, Cannabis indica
ttgtccttactggtatagaaaagaaaaataaatgtttcttcattctaccttgttgtatagtgaagcgtttaaagaaaacaggagatgtttaaatttcaaccaggcacggttttatgattagaaattagaatgttaaatttagaatctggaatgttataaagtgtcattggctacgctttttatttaccgagattatctgttgtcagttttttggaattatgatcatgacccttgtcacatgcgagggaaaatccttagctaataaagaaagaataccaaagacaatccatcatgcgtatctgctttagaattatctttctgcagtaaagtttgtttagaagtgggctgtttgatgttctgtatacattaagatgtcattccagtttctgcctatttaagatgtttattctagtttctgctttgattatttggtttgcagatcatatcttgaagcaaatactgcctgctggagttgaggtgccttcatctttcgaaacaatagttaagtatttacgatattct

SEQ ID NO: 216937 - DNA, 582 bp, Cannabis indica
ctataaactataatcacttcactttatgcgcacagatcaattttgcttcaaattaaaccatggcagtgtttgtttttgggcaaagaattcatgagatttctacaagataatatttaatttgagaaaattttacaaaaactaaacatactattaaaatttgatattaatgtccatgtcggttcaaatagtttcactcgagacacgagttatgtataagtctggaaataagagtgtgtttgttttgtgttatttttttttcttttaattaatgttaattttaaatttttaaattatttttcttcaattcaaaagaacatcgtagttttgacattattcagaaagaaaatttggaagttagataaatgttgctgggaaggaaaaaaataagaataaaataagaatttgttagataccattctaagttttatattggaagaatatgcaacaatttttttttggatacgagtgttttatttattccattatagtattagtatgattttttttaagaaagtgtttaaagtggacaatatcataatgtgatgtgagatggcagcctaacaaggtataagaagatggatt

SEQ ID NO: 216938 - DNA, 568 bp, Cannabis indica
tttttttttttcctttttctttggttttacctttaaaaaaattctcgctctcgtcatcctctccctcttcgtgtttcatttagccttacttctacaagatgtctgtggtcaccgttttagggttcttattttggaattcaagaggaggaagaagaaaaggttctagaggattctaaggggttgtggggtgcgggttagagaagaagtaaaaaccaaagtaaaaaagaaaaaggaaaaaaaaaaagaatatatattttttataagtttttttttatttttaaactttttaaatatttaaaattattatttaataattaatattacgtgaaccactaaaagtttgctacatgtacacttgtgtacactgtaatatgtcgatcgtgacacttaacatagtcttttagacgaaagaaaaaatagctaacacaaagaaggcttgagtacgtatttttattcatggttaattgttaaaaaatttaaaatatatgtatttttgtcgctaatatctcaattaaattattttagatgtttgatatccccaatccaactcaaaagatttataaaagct

SEQ ID NO: 216939 - DNA, 529 bp, Cannabis indica
atataatttttttataataatatgagaaccttttaataaaactttaatattttaaaagtatcattaaaaaattaatatttagagtttcaactttgaagaatggaaaaatatttttcttatggatctgtcaatagggtaaggcttttccatctaaatggagaatgtgttttttttctttctcagatgttaaacggagcaacaacaaattaaacacagccttgatagaattcatttaatatattatttattttttattagtgttgtatattatattttgtatttttttttagaatattaaaattttcatattttttttattcatatatagtaaatttactattttatatctaaaaataattatttattcactatacggtgagcaaatggtaatctttataaattaaaattttatttcaatcaaatatattattatgtattgtgctcatattaaatataagcttattttatttttttgctttttcattaaaaaataatagctcatttttcatataatattgttatttttttt

SEQ ID NO: 216940 - DNA, 430 bp, Cannabis indica
agatgagtctgctgttgccccatctgcggcatcacaagatcctcatcttcgcccatcagcatctattcctagcaccttagaggctcgcgaaccagtataccttgccattttggcaaggttggagactgtggagagggagcaaattgctttgagggaagggcagaccgctttgctaagagcacaaacagcgattatggatcagttgaagaccataatgagactcttgcaagatcttggaaggccgacaccaaatacacagtcacaaccacagccacaaccacaaccgaaagaagaggctcattcaccgaaaaataaattattctcccaaatgattatagaccggatgatgatgatatgttgtcgtacacctagagaacaatgaatactcaccagcgatcggggatgcttaggattctgaggtacaggtgtt

SEQ ID NO: 216941 - DNA, 714 bp, Cannabis indica
taccaaaaacccagagagagaagctccggtggtttgtccgtaccgtctctgggtccgtcaattacaacgtatttgcatttataaagtaaaaagaaagaaaagaaaagaagaaaagaagtgtctgagttgtgaacttgtgaagaaaataaaagaaggaaagtgttgtttttttttttttttttgagaagaagaaaagtgtgttttgtttttgaaaaaagttttggtttaggtttttttttaaaaaaataaaattaataatagataatggaaaatattattataaaattttataatatattctctaaaataaggagaaaattttaatttaattttataaaattatttatgttatagttatttaaaatattttaagaatcatgtgtttaaattctgtaggttaatttttttttttttgaaatttttaaaattatataaatattttaaataataataatatatatgtctagtaatttatggtataaatatttaagtttaactctcagttataaataaatacttaactttaatttttgacggtaataatacataagttatatttctgaaactctataagcatttggctgttaaatgttaagtcattatccacgtgtcattttcttattggtatatttagactaatttttaaaaaataaaaaataaaaaattaatgacttgaattaattagaaatcgtcatgtagcaatttacataacac

SEQ ID NO: 216942 - DNA, 509 bp, Cannabis indica
taataatatttaatatatcatatcatttaaaattaatacaccgcaataataaaattatttactacaaaaaaaattataacaatactaaattaatactcaaaaaatatatatcatgctaacaaaattaaataaactactattaatatatatatataccaaaaaatttatatactactattatacataacaaaataaaaaataaatattatcaaatgataataatataccatacaataaaatagaaatatactttacaacaaaatctatataccaataacccacaacaactcataaaaaattaaaaaaacacataactttcaaataaaaaagattttaataaaactaatatagatataccataatctttagataatttacttctaattctaaaaaaataatgaaaaaaaaattaattaatttttttattatagtaaaagacaatataaataataaatagtctaagggtcatttttcttacaattttgtaaataaggatacttagtaaaata

SEQ ID NO: 216943 - DNA, 384 bp, Cannabis indica
gttactaggtttagaaattttattctaaccctagcaattcgtttctaaacaacaaacccttatgagtgcagtctctaagggtttaggatcaagggtacgggcgcgcccatgataattgcgtcgttgtgcctggattgtgagggctctaagacacatagatagttctatgtgctcattagtgcctgaccttgagatgtggatcatccaaggcacattagcatggcgtacttactccctttcgaacttgggtttgaaatcaaacttttcctaaggaggatagatgggacaattcaggtcaaacctgtcaactcacccgaactagtcaaataccaagcagtaatagttttttagaaaaaaaaaaacataacaaggagttagtattaa

SEQ ID NO: 216944 - DNA, 570 bp, Cannabis indica
ggatctatgacagcagttattgcataataatcgtagccattaggagttcgtaatgttcgtttttttttttttttaagtttagtattttgtgtaatactagtttttttaattttaattttttccatttatattttttaattattaatttttaattaaaattatagataataagcataaataaaaattaaattaaaaaagttaaataaataaacatttacattactctaagtatttaagagttatctaaacatgaaaaaaaaatattcttataaaaataggttaaagaaagcatacttcatacgaaaaagcatgcattgacttccaataaaatcacataacgtcgcttattgtacatcttctccaattatgactatgtgtgtatgagacgccataaatgaacattatactaaaatttcggtaaacaaatattattagagttacattcgaattaattaaaaaaacataaataaaatatcactaccacactgattaatgcttctgaagatatatttttaaagaaaaaccaaaataattgcttaaatgagaaattgtgtaacatctatatgaaaa

SEQ ID NO: 216945 - DNA, 939 bp, Cannabis indica
aagacaatttataaaatgaacagatatagaaaatgtattcacttttaccataatatttttagatcgatttattattaagatttattttgataaaaaatcagttcagggtcctatttgtactattttggaaaatacatggtctattttgttatttaacaaaataaaaggtctaattgataacttttgcaaaacacaaggtctaaaatacgtatttaccctaggaaagtggaccatttggcaaaaacattttgtaagcaacactattacacaattcaaatataataagtaaggatattttagcaaagcacaaatactttcccacccattttggctttatttagttacccgcctcaccaactctgcataaaacgaagaatacaccactttcgttctccatataatatacgatctttgtggcggttttcatctccattcctctctctcaatcttcgtttcgcttccatggcgcccgctaagcttacagcgtacgagcttcagaggctcgagaatatccgtcggaaggaagaaatgatggctgggctcaagcttcactccatggtcactcaactctccgcctcgtcaaagcgtgagaggttcttcttcttctttatctcttccctttatatttcttttcatttccatttttatgagaaccaatgtcgaatttctcattttaaatgttaggattggagacaaagtgaaaccacagaagaagcccaaaggtgagactcctgtcgctgagcgacgatctttaagaacgagagaaaagctggcccattccaaaagccacaatcttttccgctctagattgaggagtcgtaactctcagtctaccgaaccgtcgaagcctttagctcccatgatgaacatgggtcctctaaatatgagagaagcgttacttcatgagggttctgatcgagctctaatagagaccatttt

SEQ ID NO: 216946 - DNA, 592 bp, Cannabis indica
ataagttaccatttgtagtcgactagtctccaacttggaaagaagaactatggtaattttcatttgagtttgagagcaagctataagactcaaccttcatcaaatagtgaactggtggaatatttcttattcatcttgaagtttctaaagattattagcaaaaatgaattaattttcaaacaatatatatcatgaaattgaaattaattatatgtataatgtatatagtaataacatgaatgtaccagtagtagaatccataatgagtgtgtttgtgatgaataactagaaagtattctagctagggttttgaagaaagagatatgtgagtacgtaagaggagttgtgaaaatgaaatagtctgattatatagagatacatgcatgcatgaaaacattatcataattaattaatataaacattatctcaatattaaatattgaatccctcatcatatattttcaagatagcaatttagttaattatgttttcaaaaaaagaaaattaatatcattaattataatatttaagctaccatgtcttggaactagctatagtatccgtcgcttgaagaactatatatatatatata

SEQ ID NO: 216947 - DNA, 732 bp, Cannabis indica
atttgtatggaaagaaactacaaaaacaatttataattaattcgtatggaggagaaggaaccaaaagtaccaaaataatttattacacttgtagtccccaacccttacaaatttatcatgtaggtccaacttttaatggaaaatcttagagctggtttggctgtgtttttagttttcagtttttaaaattgtgtttttaaaagtgaaaatagaaaacagttttttgtcattttaaaaatttaatggtgtttggcataaatttttaaaaactgtttttagattttttcttacgaaaaaaaatcaatattttaacaccataccatgacattaacccattcgggtctaggttcgggtatggtttcgggtctaggatccgagtatgtgagcaaaatataaaatataatatgttagataaaaaaattatttttgaaaatttaaaacagcattttgatgtttttgttttctagttttttaaaactcaatttttaaaaacagtttttaaaaattttgtccaaacaactcctaatagttttaaaaactgttttcagttttaaaaacagaaaacaattttaaactgtgaagccaaacagcctcttatttttcatacttgaaaaccctattacaaaaagaaacccgtaattttctatatcattaattctactaattcctacacttacccaaaataccttcctcatttcaaaaatacccagaaaataaaactctctctctctc

SEQ ID NO: 216948 - DNA, 690 bp, Cannabis indica
ttatatacttattatattatttgtctttattttacttactttagagtttattccatattttgtagcttgttagctgtctaatttctgtcatactaaaaataataaatttgtctacttcttctctaactttcttatcatcattgttggcaatgaaattttaagaataagttcatttttatttcttgttgttcaaaattttcaaaatgattaaaagtttcatgaaataaatcttaggcaaactcagctaatttaagtggccttcctcgagttcataaaattgtattaaataagaaaatttgtgctaaaaaaatgcctgcacgcttaaaaatatagttgcaccgatgtacgttttttttttttttatgaaccgttataatctcattttttttttatatattatggtgcatattgaagttattcaaaacattctacttaattttgagaaatttaaaataatatattacaacacaaaatgtaaggttcaaaaaatttatttaacacgcgtataacataaaaatgacacgtgcaataaatcactatttgaatcttattttaacttttaaataactatgttgtaaactatcagataaaaagaattaagaccaaaactctgatatcgaaacataagggggatgtcgaaaactctagacagtgcaccataggatttttccatatcacttgaaagttgtt

SEQ ID NO: 216949 - DNA, 613 bp, Cannabis indica
aaaatttacaattttggttgctctagtgatttctacgtgatttgttatgtagattttgattacgatttaggttgttctattagttattatgtgagttaatatacaaatttctgtaaaaaaatataaaaaaaataatcttaaagtataaaaataaaaaatagtaataaaaataacttttatttaaacattttgaataataatagctataaaaaaaatattaaacaacattagtggctaaatacttccatgggtccttctttgcagaggttgttgaggctttgggagttaaggaagcactaagctggctcaaagacaagggttggaatgcagtagaggttgaaactgatagcttactcactatccaagcagttttcagtcaccaacagatgacttctgtttttggtttgattacttatgactgtaaaactcttttatcttctctatctaatgttagtcttcgttttgttaaatgatcagcaaacaaagttgtccactatgtggctagacgcttttgtttctattctgatcgtagcatttatgatgttaatgttctggcagattataatgccaaatttcaatgaagttgatatttcattttaaaaaaatatatatt

SEQ ID NO: 216950 - DNA, 503 bp, Cannabis indica
agattgacaaccacggactcatattccgatccaagaccaccaaggatataaagaacaagatcatcgtctgtgattggttgtccagcagcagcaaggttatctgcaaattgtctcattttcagcatgtattcttcaacagtaagagcccctttcttggttgtttgaagaagattgcgaagctgcagaagtcgagctcgagatcgtgttgcaaataattgagcgaaagtgttccaaatctccgaggatgtgcgacaacgaatcacatgtccaagcatgtgttcagacacagaattcatcagccaatgacattaaaactgatcaaaacgcatccattgttgaagagcagggttagggacattacctgcaagatagttcgagggggtggaggacgattgccaagaatgaagccatctaagtcgtaagctcgagtgcagcaagagcaagggctcgccagatggtgtaattattacgatctaatcgaagattgagagggaggtagattg

SEQ ID NO: 216951 - DNA, 523 bp, Cannabis indica
gtgagaatgagcaaggagaagctaatatgggagaggggggagagccctctacttccaatggatagattgctatgttggaatgttagggggattaacaaccataaaaaacacaatgaaatcaggaatatgatttattctaagcaagttgggtttgttagcctcctagaaactaaagttaagaataagaatatgggtgagttgtatacaagtctttttcaaggttggtgtttcacaaataataacccttggcttgataaagggagaataatagttgcttggcaaccaaatgtttactctgttgacattggtctctgcacgagtcaacttatacattgtactgttattccgaaacagagagtggggaaatttcaagttacttgtgtgtatggctttaatgatgaaaaaagaagggaagaattatggtctgaattggagggcttggccactaacattgcagatccatggctggtgtggggagattttaatgagattctctttgtgaatgagagaattggtagaagag

SEQ ID NO: 216952 - DNA, 1098 bp, Cannabis indica
ctccagccatgttattattttcacagttaggccttgggaaggaacaggtttcgggtcccatgacgttccacgaccacctccatgtaatggtacagttgggtttcttgtgctagtttaggtaaaggttggtcggttccccctccttgatggattattcatggccacatcttctctccttgtgcactccctttcttctccgtaggtagagaaggtatttcgttggtacaggggttggtccccgtgcatttgggtttgctcttggagctctctattgtggcataggctttctaccaattggacgcgcataatctcattttcctggaacacctcatgcataggtataaacctgactagtgggcgctccctagatggggatgaggaactctcacaatcttgaacttgcctctcatcttctgacataggtggcatggggtgcttttcttggcgcctagagattctctctccatgtgattgtggagggacaaaggttccttcactatgtggttgattaatttcccttgggacttgagtatcttcctcctaattgttcatcctcgtaccaaacaccattgttgtagaaaaaaaaattgatgagtttttcaaggaaaaaccaataagatttttacagcggcactctcaatgaaagtagtaaactgttgacgcggtttttcgttaagtgatctaaaaagatcgtaaaataaagagaaccacggtgaacttaaatctaagatgccaccttaaatttttttgttttttttacttttttcatatttatgtatagatttaaaaaataaaaatatctaaaaataactcacaaaaataaacgagtctatattacctaattaatatatactataccatgataatatttttacaaacaccttgaatttagtaatgaaatacgagatttccagcctaagaaagaatttaaaaaatcattcgaagactatttttctcgtcgttgaacaattataccagattttattttttaaaagggaaaaatgtacgaggttttaacctgacaggctggcattagatttcaattatttattttagtttttttttggaacaattatttattttagtttaatttctgtt

SEQ ID NO: 216953 - DNA, 648 bp, Cannabis indica
ttacaaacactttttatggaatatagcgcaagctctctccacaatgttttgcatagctcaagggttcttcaatattaatttgtaataataaattatgtcgaggtcgattttaaaatttaataaatcataataaaaaaaattgaccctatatttaaaaataaaatgtataattttcaaaattagtaaaacaaacatgtaataaagggaattgtttttaggcctatgactaagtggaccttaattatacacgtctagtctatttaggtttagagtctgacatgattatatctagaatttgaaattttattcagcaagaaaaactctcttaaaaaaaaaaaattagtcatgtttgttatgagaaattatgttttttcaaacaattctttccatagtaattaattatctttcacgttattttttgttacatttttattttcttatcaaaatccaatttaaacttagcctaactttttggtctcactttccttagttgcacttaactttgttcctagagaggcagttagtggtcaccatgacttaactaataagttggccttaattaattaagtttaaatagagaagagatttggatcaaggatgactcatatatatacataaatatatatatactcttgtatcatgcacatg

SEQ ID NO: 216954 - DNA, 733 bp, Cannabis indica
acgaaatgtatgtaaagtagaactggaaaaacttacttgtacaacccaccatcgacacccacgactgcaacaaccccaacaatggtagaagacgagtaatgtacaccacattgaagaacgaagtatgaaaagtgaagaaagtgtaaaatatgggttttatcttagctgaaacgaaaatggaaaatggaaaatgaaaatgagagctttgccctagcagaatcgaaaatggaaaaatggatagagaaaataaaaaatgaaaaacaaaaagaaagtgaagaatgaaatggaagagtggaggacagttgatgtgattgatggatgtcagtttcaactttttcaaatttaataaatttaaaattcaaaaacatagctagttgccattttttaaccctaattacccctagatcaaccccaacccttagatcaaataactaccccatccaacgactgtcgtacatcacggattacattccgtgaaagtataataacgggacaaaatcgtatcccataatatatataatgtggataggctgtgcatatgctgtcaaaagtataaaaaaaaacaatacacagtacaagaaaacacagtaaacaagtaatatttttcttacaacaataaaattgaaagaaatggaaaaaaacagtatggggtgtaaattatcctttacttttacgacaacatacttttataaattaatattaaattactttgaaccttatgttgggttttatg

SEQ ID NO: 216955 - DNA, 943 bp, Cannabis indica
  modified_base (91)..(91): a, c, t, g, unknown or other
cttcttatttttttgatattgtgtttgcagcatatatgtaaattatctaacgacttttaaaaaaatttgactcctgtaaactaatgcatangtcgagcacttagaatcatttgtagttgtaaacttgttgggtttttttcgccattgatgcttgcttttgtgaactttgataaaagtcacgcttctttttattattattattacttatatattttgttattaagttgtgaaagaagaaaaaaagagaaagtgcggattagaatattatgtgtgattacatgggaatgtccaaattgtaataggaaaaggaatacaataaataattaaagaaaactcaataagcaaaaacccaattgtatttttttggatttaatgggatttatttattgtatataaataaaaagtgacccatgaatttctcataaaccattttattttaataatgaaccatttattttaatataaataaaaagttacctatgaatttctcataaaccaagaattctgttatatagacacactttatatagaatagatatagaagccctttcaattgtatataagcttttgtgagtaaatttttaaacttttgtgtataaactttaagtatttgtacaaacttatctaagtttagttcttttgattgtatataagcttttttttttgtttttttttttttttttttttgtaaataagcttaaccctttaactttttgtacttttgtacataaactttttaagtttttatacaaatttttgtaggtctagttctttataaagcatataaatacaattaggcattggaccacatttaatgtttttatgcctattcagacccgattcaattatatattagatgttatattttaccataatattcgatccaatttattttagtgatccaatcgatctaatatcaattagatattagattggatcgatt

SEQ ID NO: 216956 - DNA, 469 bp, Cannabis indica
acatatatttagtttatttttaacacattttcttaaaatacaatgataagattttttgtttttttaatttacatgatgtgcagtaataaatattaacatattaattgtatattacctattatattatataccctattttaaaataattagattttgttatatctattattaatgtaattatttatttaactttttaaaaaataaataattattttaattatcactaactcaaaaaaaaaaaattgaaagaataaaattgtaacaacaaatattatgaaaaaaaaataaatgtaacagtacaaaaagataaatcaagttgttaaaattaagtaaaaaaattacgtaatacaaaacaatattaagaagttgatattgttttgtcttattccaattatgtcggaatattttgttattttttttttttgttatttttttgttactttatagttatctttttgttgctttgtag

SEQ ID NO: 216957 - DNA, 812 bp, Cannabis indica
ataatataaaaagcttagtaacatctaatggactgtttggtatgtggtaatgggggaagtgagaatgggaatatgaaagtttactatgtttggttagattttaatattttaatattggctaagtgaaagtggtaggctttagcttggctggcaaggaaaacctaataaaaatgtagttttcactttcaaatactattggcagacacaaacttttgcattttaaaattattttttttaatatatgaatactaatgtatataaaaatatttaaaatatgaagtaatttttccaaattaaaaaataatatataaagtactttccttatttttttatatattttattttataaaatatattatcaatttatatataaatttactctttataattatttattattattaatttttttaataaaattatatgaaaaataataaataaaaaattattttgaacacttagaaagaaaaaaaatattaaattattagtattttacaaaaaaaaataatcattattgtaaaaaaaaaagttagtcacattccattccaatgtaaacaaaacacagtaatattgctttccaaggtttattcattcccttcatacactctccaagcaatgttaaacctattcacatgaaatgaaacctgtatacaaaacggcccctaaaggtagtccggtcattttcctaaaccccgaaaactttacccgactacttccaatgcctaacaatgatgcccgcctaataatattcaaaaccatataaaacgcgactctctaatggcacaacctcgtgtaccacaactaccaagcac

SEQ ID NO: 216958 - DNA, 568 bp, Cannabis indica
ttatgttagattttatcacatatgattaacaaaatgctcagatcgtattcaacgagaaatataaaaattgtattatattttatgcaaatatttagtttgtgatatatttatattaatttttagtattgtactcaaatacacaattatagaattcgattcatgcaaatttatgttcaattaatacttctattaaaatacaaaaaaaaatattttactaattctattattatcttataattatttaaaataataaaaaaaatgtaaatagtttaatattaatataatgttatggtctatagctatatatattaataaaatattaaaaaaatagtgtatgtatagtgatataaattttagattatgttagattgtattttaaatttagtataatttttttaatgtatcgattttggcataacttttaaaatagtgttggagcaagttttttgcaagataaactatactcataatctatttgatgcatcaccaagatacacttatgcaactctttaatggatgatgtataattattatcatgtgagtgtcacgctaataaccatacgataat

SEQ ID NO: 216959 - DNA, 613 bp, Cannabis indica
gacctcgtatgctttattatctgaataggtgtagattgaaagtccactagggatactactctgatatataccatgataaaaatcatagggttccatttcaaaaccaatcaataatgaatggacactactaaaaaaagtggatttcctgaccgttttaagtagtcagctaatggattatcgtcagtctctataattgttgcctattcgatcatcgtaaaattgggtagaataggtgacgagtttttacagtcgacaaaaaacttaatcgacgatcagggccgaccctatgttaatttgggccttagacaaaaataaaaattggggcccaatgaaaaagtgaggctattgggatttgaactctcaacctctgttaaactaatcaaattaccactaggctacaacacatatttagcatttaaagtattattatttatttttattactatctatattttattttttttcgaaatggggccctgagcggtggggggcctaaggcagccgcctccttcgtcttgctcagggccagccctgtcgacgatttaaaactgtcatcaacagtgaaaactatactcgacagttttgcaaatcagatgcaaaactagaaacccta

SEQ ID NO: 216960 - DNA, 552 bp, Cannabis indica
tctggcttctattataataacagaataatttggtaaatacgagttggatcggtctgttttgtacatacattatttttcatacaaaattatatgaaaaatttgacacaatttattacttagttatcattactacaagtgagatatggtgatggggacggttttaaaatcatatgataagttttttataaatttatcaattattataacaatttgagaggtcaagcctaatatcatgttatacaggtcgtgtctggcttctattataataacaggatttggtaaatacgagtaggatcgatccgtttgtacatacttaatttttcatacaaattatatgaaaaattagattaaaatttgatacaattgattacttagttgtcattaaataaaaattatgatttattttatgtatataatttaatttttttaaatatatgtcgcgaaacacgaattatttacttattataataaaaactactcacaatgtaattataataataatgttataataaaattttaaacgttatattaatattttaaaggctaattagt

SEQ ID NO: 216961 - DNA, 667 bp, Cannabis indica
tgttcattggattttattccctagagatcggatggtttgaaatcaattgtgggacgttcctcacttttaaactgaaggactacataatgacccttttttaaattgtcacattttatctcggttatactttttgcgttggggtacaagccgacgctaattgttatttttttagcttcagacataaactaaagcaaaaaatctctcattattttttgcttcggtcaactattatggtgagacgcgttgaccgagccaaaaaatactttttgtaatagtgatgatatttttcaactagaaaatggtcaaggatcatgatctcgagtatcgaagccaaaataaatttagtgtcttcatatcttttgaattaagttctaattatataactttattgtgtatttgataatttgtttccattaaattaattgattgtgttgaaatattgtgaatcttgttgttgttgttttgaatttgcaacaatatataatttgaatagtacaccaacgggcattaaataataaatttacaaatacattcgctatttctttttttttttttaaatgtaaaagaatgtaaataatgagtgtgatgtatatcaaagttttttttacgagttttattgcctaacgaaactgtacattaggcttatgacaaaatgaaaagaggaaag

SEQ ID NO: 216962 - DNA, 582 bp, Cannabis indica
aaaaacaaaaaccggtttctaaagtgaagtgaagtgaataggaagggaacacacaaagaacctgaaaatctactaataaactcagtaatatacaaacaaagaaccttaaaatccactagtaaaattcagtaacacacaaacaaagaaccttaaaatccactaacaaaattcagtaacacaatgaatgaatgaatcatataatccactgaagaattagaaaataacaattccaagatagatttactacttaactcctcaactaagatatgcaaactcttcatatatttactatttatacaatattacaggttctttttttccttttcattgtttttatttttaaaaaaaaaaaaaaactaaaacaaaaaccaatattaggtgcattataatttatagtgttattacgtttacaattttaaattcaatttcttatgtgaaaatagaaagaatagtgaataatttaacattgaagtgaagacttgatggtttggtgatttttgatacctgtagctgtagagtgaaagtgaatccgccgccacttactgagttgatgtcgtcgaagttaggttgccgtggccgagg

SEQ ID NO: 216963 - DNA, 1261 bp, Cannabis indica
ttattagatttttatttgaaaaatagattctacacaaaattctaccaaaatttgaattatgtttcattgaaaaacgatttttgaaacttgaaatatcacaaaaaaatggtgcaacacattgcatactccccgtgcatgcaagggggctgctcggcgagaaacaggctgcattgcagccttcttggggggcatttcttggtcagttggggcttcggacagcccttgtctgagataactcgatcatgggcttgtctgaagcttggtcatgaccgagtgacacccatacccgcgcgcgtccaagtgtaatcctaggctagatatttattaatgtttaaaaaatcatgacaaattcaataaaaaccccaattaagttcaataaaagccctaattcattaatatttcatctactttctagaaaaaaaaatacttctagtacgaaactaaaaatagttctagtcaaaaatatgtaattcacaaacattcatcaaataagcacataaaccaacatgaacacatcgaaatcatcacaatcattgttttaaatccatatttcatgaaaatcattaccatggctctgaggctagttgttagaaattattttaccagaatctagatttactaacatgtatgttgattaacaccctgaacatgaattctctaaaataatagaattaaacacatataaagtttaggaaaccttatattggtgggagtaaaataatatgtctccttcgactcagatctctaaccattgttcctttttgtcgtagagtaataacaagatctgagtttcgttctccttcaggtgttggattcttcacagtcttccacattatgattgagtacttgacttgatgttggtggacatgtactctatcactatagggctcgaaatttatgaagaaaaagagaaaaggagattcaaattctataaaaggaggctctcaagtttctagttgtttgacagagttagaaaacaaggttattaggttggttggatgagaatgagagccatcttattccctatatatgatttctcctagaattagatttaaattatatggaattaaaaaagataaaaaaaaaattggctaaaaatactcttaagtggccaactatacaatgggttccactagttagaattttaccattttattcaataatttatcttttctttcactaatgtcatattttctaattttaatccttttaatgtcataactattcatttaataatcaaacttaattatcaaataaaatt

SEQ ID NO: 216964 - DNA, 641 bp, Cannabis indica
atggtgtaacttataactacattgaatcactaatctataatatattaatataaaaataatttattattttatgatatatatgaaagtaataattataaattggattatatctttattaaataatgatttttgggtatgtggtatactacatttttaaaactaaatactttttgatcatgttgtgactataaatctaaaaatgtactcttatatacgcaaagtgaaaaaaagaacaagaaaaaaaaaaattagataatatgttatagtttcttttattcaatttaattcctattttaaaaaaaagaataataataaaaaaaaaaaagaaagaaaaaaaatacatgtaactcaattctagcaattccaaattactgtcttttcaacattgtatttttttttgttaattttattgatttttatttatatttattattatattcaactctacttaattacttatatattatatataaatataattaaatatgatatttatatgtagtcatcaacaaaacataattaagttctaaactaataaaaacaataataataataataataatactaaactagaaataaaaaaatacaaaaagtacacaataaataataaatagtacttaactaagcttagagtaactaat

SEQ ID NO: 216965 - DNA, 624 bp, Cannabis indica
caaccaatggagctgtgtgaacaatgcatacttgggaaagctaccaaagtcaagtttggaactcggaagtatactaccaagggaattgtagactatttacactcagatttgtgggggccatctacgaaaaaatcaagaggatgggccaggtattttttgaatttcattaatgatttttcaagatatgtttggattttcattctaaaaaataaaaatgagtcattgagcaagtttaaagaattgagaactatgttggaaactcaaactggtaagaaggtgaagaaattgaggacagataatgggcttgagttttgtgaaaatgagttcaaggaatactgcaaacaagttgggattggcaagcatctaacagtgcccaaaaacccttaccaaaatggacttgctgagagaatgaacagaataatccttgaaagagttagatacatgttgaaccatgctggtttgccaaaatcttttgggcagaagcaactatcacagcctgctatttgatcaacagatgtccctcatctgcaattgaattcaagacacctgttgaggtgtggaaaggcaagccaacaatgtacgatcatctcagatattcgttgccttgtgtatgctcatgtcaag

SEQ ID NO: 216966 - DNA, 814 bp, Cannabis indica
tacatattcaataagtaccttagtgataaataatgtagaagctagctacctagctagggagatcttaaaatggctctccccgaaaaattgaccggcccgattccggcaatggtggttgatggaggaaagagctctctctctagtgattgaggtgtttgggaattgagagagaattaaggttttatttttaaatttttgggtttattggcttgtatgagaattgtgtgccattttatttttgaaggttttaggttgtggttggtgcctaacaccaaacccaacggccgttacatttatatatttaataaaagagaatattagttacaatggactaaacggctaacgtaagcaaaaacaaagcccataacatcaccgttagagattctagtttcaaatgaccaaaacaccccttgtgccatttttttttttggattatttcttaaatatataaaaataaccaaatttttacattttacaaattttaatatttttacggttttttatatataaaaatgtagtgttgtttttttattattttcgaaaaaatattgctttgacgttactattacaggaaagtactgtgatttatttttacaataatacaaagtgttatttttctgttgttctaaaataatattattttgatgttattgctacgagaaagtaacatgaaagtaatatttttctttgagaaaaaaaaacaagtgaaaatctgtaaaaaaaatcggccgtaaaatgtgttttttttttttcatttttaagtgtgttgtgttaatttttttttttttttttttttttttttttattttagatt

SEQ ID NO: 216967 - DNA, 540 bp, Cannabis indica
ttctccttgtacatttattaggtatagggccggtcctaaaatataatgggtcatataaaaaagaaaattttggtccttatttaaaaaaaatgtgttattttttaaaatcagtaaaaaaaaatatataattttaaaagatttttttggccattgggttaggtgggccctatgcataggcctaacctacctatacctagggccgggtataggtcacatagattaattaacagctaatatattatgcatgaatattgttgttcataacatgcattataatctatttgttcaattttttttttcttctataatgttacatatatcataataatgggtcttttttgagacatgataaattttttcaaatgcactattcgagacagtgtcaatctcctaattgaatcgaagttctacttctcattctatatctattaatgactctctaattacatatttatagactttacacaccaattttaaattactaataagcctttacactatctcatagtataacaatatatgaggtgatgcactacttga

SEQ ID NO: 216968 - DNA, 567 bp, Cannabis indica
aataagacaaacacataaatatgttttgttcatccttttcttgaagacagcaaacacaaaatatttaagcagggatcaatacatacatagatatatgcattcaaaactacatcttctaagtattaagactctatatccaaaagagttttagaaagtacttgtggaggttacaatctctttcagcctaacaattttcttgtgatcaagcttcttaagaattttaatctctctaatggttgtaatacgaaactataatttgcaaaaaataaatataaataatgtacccattctttttcattgtccaacagattctccggtctttttatctttggccatgtacacttgactgcaaaaagataaaaaaggaacctaagtaatcccaaatccttataatcaatattcgataatttgaagcttttagcagcataaagcaatcaacaacttcaataacatcatcacacagttcatagatttatgggtgaacactacacccagccaaacaaaattacaaaggggaattaaaattacaaaaatccagaagccctttactacaacaacaacaataag

SEQ ID NO: 216969 - DNA, 534 bp, Cannabis indica
actaaaaacgaaaaaacccaacacatgactaatttacaaaaatgaaataaataaaaatccttaaacaaaaaaaaaaatgaataatgaaaataattagttatcattgttgttatctttttggatttttactattttacccaaattttaagataaaataagagtattgtttgtatggtttgatgctttagtacaataaaaattgcatttaataattagatttgttttaattaaatatcagatgtaaggataactttgttttcgaaaattctaatgaaatattttataaaatattcatcaacttatatttggtctgagactagatttaggtctgcgatcatagttcaaataaccttgactctgagcgaaggcatactaagcctgtatttaggttccacccaaacccaaattcaaaaactaatatataaactttttaaacaaaagtagttttatgtattttgggtaggcccaaataaatatgcttcccacctaatattaattaaaattaaaagagtttttttaattttatttacaaaa

SEQ ID NO: 216970 - DNA, 742 bp, Cannabis indica
gattattcaggagatgaagatgacaacaatgaggatgatgagatggctggtatgttgatagatttagctaggcatggtggacacaatcaaggatcatgtggagataatcgtgggatcgggtggcgataaattgtggatcaggtggagaccagagtaccactaggaagaggaaaaccagagcagagtccagaagtgtggttgttgagaagatgcttcggaagcaaaagactgacaagttgatagtcaagtttgatcctcacacagggaagagtttggaaaagagtgggaagacattcaacaatatgattgcccaattagttagaagcacattttcaccacggtttacacgctgggaagatgtacctaaaactgatattgagacagtatattctcggctggatgtaagttttcccaatactttttatttttattcattttaatatagctaatatatcaacttactgtacacatattttaatctatatttttttatagctaaagtttgtttatccacacgacgataaaattgtcatggatgaaatcgagaggttgcaaatgaaggcttttcgagaatggaggtatgagatgaaatgtttttggaaaaagttaggaggagaggagaatgctgaagccccaaagagcactccatacaagcgaattgctcctgaagattggaacattctctgcgatttttttagttctgaggaccagaaggtaagcacatgtactatattgtaatttt

SEQ ID NO: 216971 - DNA, 742 bp, Cannabis indica
tgtgaaaaatagatgacactttacatttattaacaattgaatagtttggagggttttaccactaaaatttgaatttagagaattaagtataagtggaatgatagttgagagggtttagccccaaaaaatctcttaaatgtgcttatgtaattgctttttttaaaacattgtgattcaaatttaaatttactgtacatatctaaaaatatttaatattgtcattcaaatttaaacgaatatattattattattatttaaacgtatctctattatattatatttgtcttatattaaatgtgaatatttaacgaaaattattagtttaacgatttttttttagttaaaactaatacagttaaattaattaattaattatttctttttttaaaaaaataagactaaatttaattcatttattaaaatataatttagataattatttaaaagtatcaacaaaaatagataattattttttttatataaatcttaatttaaatttaaattagacattaattcaaataattaatcatactttatattttttttttttagttatttacttaatttattatttaataaaattaattagttagatacaattttttataaataaatttaaaattgtatgttatatatttaaaaaaaatataagaattgtattaaatttaccttttattattattatttaaattaataattaaagttagcaactctgatataattttaagcaaacatgcattac

SEQ ID NO: 216972 - DNA, 677 bp, Cannabis indica
tttaaaaaatactggtctatagtgacacactaggtgacgactaggtaagtgtgtaccccgacccacctggacacgtcactatattacaattttttttttaaaatacaactgcaaacaaaaataaaaaatatatatttagtataatgataataaaactcacgcatatctctctttctcaattaattttttatttttttaaataatctttctcaatcaattacatcatcactattttctatcagcaaagaaaataaatataaaaaaattaaataattaaatataaaataaatataattaaaaaaattaaaaggttaacatttagaaaaccctaaacaatcaaactttttatcttgtttctttctttgtcatctgaagactcaagctctctactaacaattcgtgcagtagcttcccatcaacaaagatgacatgagtccaagcttggtggacgaagaactctgctccaccgccggactctcttaggaccttgacccatagtctctctctctcaagccactctcgaatgacaacaatgggccactctcggccgttgtgttctcaaatagagaccacgcccattaacgatggtcttaaaacaatagaaatccctaaggtccaatccctctcttgacttaattgattttttttttttacattgtgattctctctctctctct

SEQ ID NO: 216973 - DNA, 603 bp, Cannabis indica
tttcttatttttttttcgtttttccgattataaaacatcaaaatgtacaattcgtatgttaattaaaagagaatggaggggtcaaagcagatcttaacattcattatctacagacatttcaatttcaaattctacacaattattcgatttgatattgtcaatcgatttccatttttcaactccacacatttttgtaaaaatatattggtacttaatgctaaaaggtcagtttcaaaaaaaaaaatatagtattttttttaatttttaaactttaaaataattattttttgtaattttacgaaattctacacagaattttttatagtaattaccggaggaatttaaattgtaaccaaaatactatatagcaacctactataaaaattaacctaaagaaactacaaaagacaaaggacatcagtggtgcctagcatattttatgtgttaatatcattattggtcaactaagtatgtggtctcatatagtttaatataataataatttagggtagaatcgctagccaatcgaaacgacacaatgtcaagaagtgctaagcaccactttgtcctaatagtaatgctaaaaaaaaataatacaaagtg

SEQ ID NO: 216974 - DNA, 945 bp, Cannabis indica
ctaattagggtttttttgctaatccatttcctaattccaaggtattacaatatcactataggtttaacctaaatgatatgatacatggtcgatacttttttctaaccagagaaaagccatagccgaccatatagcctctctctctctacttgtgtgatacacttgtagactctccctctctctcatcattacaatgtcatgagttgagtacacattggatagaaaagtaattatccttgattaatcctacaagcccaagtaagcccacacttgtcctatagtgttgatgatttatctggaagacttttgtgtaagctatttacaaatcaaaagctttggattggatgtttgtttatatacaaaaaaaattgagaataccctgatagactacaagaggtaaatctttcttatcatgtagtgcacatttaatctatgtaaatatattgaggaatcaatattatctttctcccccaacacaaccttcgccactcaaatggactgaaaaaatagaatagttcatggagctacaccaaaaccatcctcaacagtagctttctttgctgagaattatgaatgacttcaaagcagctcgcataaagttccatccggcataaggtgcaaccctaattatgttctccccgacgataccagtacaggttccatggacgcccccgccaactagtgatcacctcaaactgaatgtaaatgcagcgttgaatgcttgtcgaaacaccatttggagttggacctgtgatctgtgatgataaaggccaggtagttgtcgcccttgcaaagccgatatgctaaagcaatatttcatagtctgactttgtccttgatatgctaattgctatttctcatagcagatgctttgttaggttgccaatatgccttgaatactagccaagtactcaatttggacaaatcagtattatctttctcccc

SEQ ID NO: 216975 - DNA, 908 bp, Cannabis indica
aatgtaaattaatatatgcatttagattagttaaatacagaatgaagttatagataacatttaaatcattaacaatacgacatttttttttggaccaattagctatttcgataaaataccaattggttacttttgataaattcattaatttttttttaaaaaaaaaatgatcagaccaaatattctataatcgaatatgcctatactcatatatgtcaaataaacttattaatttattttggcatattgaaacaaaatttcattttttatttatatttttggtatagtctaccatcggatatgctaataaatttatcagtttattttagcatattgaaacattttttttttcatattgaaacaattttttttttcgtatattagatcaataattcattttatttcatatagtctactattacatatgtcaataaacttctagtttgttttcttttggtacaccatttatttttttcaatacaaagtaaattgaagtcaaacataatgatatacaccaataaatatattaatctattttcgtatgctggaacaacaatttattttttatttcaaacacaatgtgtgcccataaaataacaaattaattagtctatattttttcaggtcgagacatcaaatttggttatatgcaaagtacatgactgtaacatgtcttatagacttacatagtaaacttggataacaatatatgcacttgtcaaagttttgaatatgatgagatgtcttgctcacataaaatatcttgctcatatgttcatttggcatagatggctatactgcctatactcatacatgaaaaataaagtaaggagtttattttgatatattgaaacaaattttcattctttgtttacatggtagcctttttgtatttctatactatcgta

SEQ ID NO: 216976 - DNA, 1081 bp, Cannabis indica
tacaggggataatgccactccagaaaatctttatgctgttattcttggaaatagaactgctctgagtggaggtagtggcaaggttgtaaatagcggaccagatgactatattttcatctattataccgatcacggcggtcctggtgttgttggtaagaacaatattttctacatggtgggcacatagaatagaacatacataatattgtgtttgttttcttctaaaactatgtatagataagtttatcgttaaattacgaaataataatgtatataattatgaataatttttatatatattactattgttaattaattaaatatatgttaactttgtaataaatcacccagagatggcagctggtgaacctatatatgctaatgaccttgtgagcgtactaaacatgaaacatgctgcaaatgcttataaaagcatggtaagtcttaactataatttatatatatatatatatagatatacacatatataacctgtatatatattgctacttaaataagaagaagagcttcatgtaatctctaattatcttaaataaacattatatataatataagatgatatattattgattaatatataaagaactagttaataatataaattaacatggatattgattattgagtgtgaattaataataggtattttaccttgaagcgtgtgattctgggagtatgtttgaggggctattggcagagaatataagtatatatgcaacaacatcaacatatccaaatgaacttggttgggctacatattgccctgcccaacgtaattccacctctactggttatgatgtttgtttgggtgatgtcttcagcgtttcctggatggaagattcgtacgttactaattactatatatatatatatatatatatatatatatattcactaatatttaattagtttcattatatttatatatatatatatatattaatttcaatttgaatgtttaccgaaaactagagacaagcaggtattacgtaaagaaactttggagcaacaatttgaagtggtaatatatatgtgtgtacatatatatatatatatatac

SEQ ID NO: 216977 - DNA, 818 bp, Cannabis indica
agtcctttgaattttgatgatggctcatatttatgaaaacttatcttacaagtaggattatgcattgcataaactataagttaaattgttggctttcactttcttctttctaataatctaatgatattattagaaacgtttttatcggacaatgtcggtcatttgtggatctaaataagagttagcatataaatatttatataaaaaaaacctctaattaatttaccttgttaggagaaggtaatcaagtaagggtattattagtctattaatttaggtataacaatatcacaaatgattgtgtacccaaagtataattgtctttcctacaaaaacccctcttaataattgtatttgtattttgtttaggggtaacaattgaatttgtatttaagttaatttaagagtttttcttaaacataacttttgtgtttttctattcaataccaagtgaaacatacagaagttgcactcaatacaaaaaaaaaaaaaaagaaaaagaaaaagtaaaagtaaacatagaagttgttcatttaattgtcgatttaaaaccaaagggtaaagtaaatatatttatttgttcattggctaaagaagaagtactccatatctatctaataaaataaattgtttaagtatttgagaggacaaagtgaaatttccattagattttttggcagagttagctacaaataataacctagctagacgtaactgttaataaacaaagtcaaaatatccttttatcataaagtcaactttactactagatactaagatagatctccatagatgagatgagtactctttttaaacaa

SEQ ID NO: 216978 - DNA, 824 bp, Cannabis indica
aagctgtgttttgtacagactgatatttgcaacattgagagcttgtgtagtactcatgtaaggcttccaaatttgaggagtggtgtcataagtaatcatacaattgattgttttctcaaatatagaagaaagaagccagaaaacaagaaggttgtcttgttgttcccaatcctcgaaagcatggttaattgtgttagtacattcatcatcacgagttagaaacttaggaggaatttgagtagaatcaagaaatttatgaagacgactaccctaatggatgcatgaacttgatgtagccatggcagaaagttgtgttcatcaagctttatcgacaacgaatgtgtaaaagtaacaggataggatttaggaagagacacttgaggattttggagttgagcagtgttcaaacttgttgctgctccattgaaggattttgtaaactccatggacgatcctggagctctaataccatgtgagattagagaggaagagagaaagggagcttttgtacagagaaagacaattctattattgattgtattgaagtattacatgaggatatttatagacacagagaaagcaacaacttctaaccatttcataacaaacacaccaactgtcacaactaacatagtgtaacaaaaataacagaaatctaactaactcccttgacaattactaatcaaaataatcttaataaatgtatatacaattaggagtggacattgggcatcacttttgctctaccgtaggatatttggcattgagagattttaattttaatttaatttttttgtcatagtatatattatagttataataaa

SEQ ID NO: 216979 - DNA, 1033 bp, Cannabis indica
ttgtattctttcactaaatcatagcacacattctatttactcgactttcatttttgatattcacaacataaattttaggaaagtaataatcaatcaatttcatcttaaaccttggatccaaaatagttgttatagctaatatgccatgaatggaagcccaatactgctcaaatttatccatcatatttgatgccattatcctaatctcatcatacaaagaattaagacactccttaagcaacaactaagtttcacaaattttagagaagaattgattagcagtaggatatttagttctagaaaacatctcagtgacattgtaaaacaacttcaatttctcatacttaacttttgccaaaagtcaatctcgctcactaggttcttttttgtaattttttgcagtatgtattaggtgactgaagacatctttataaacatgaaaaattaatgcaataaactaattagaatatatatatttatatgtatacaatatatttatatattgattaaaaaagatataccaaataaatttttgttcaactattatataaattaactgtaaaaagcaactgaaaaatatagaaaatacaaaatacaaaaattaaatctacatctcatatatttccaagctatttttttactatctttttttaagttatagtattgttcacacgtatctaaagttgggtttcatcagtttatattttcatatagttttaaatttaattggaattttctttttaagaattcattgtaaaaagaattatgtaaataaaaatctatatatagttgtataagtttatacaaaagataaaacttcttaaaaatatatatatatataaatagatacagataaatttatatatacaagacaaacaaaaatttgctacaaaaaagaaaatagaatgataacaaaataaaaagaatatataagttttacaaataaaatttatatttaaatatatatatatatatactagaaatataatagaatctacctcaaagtttcttcaaatttcagagccattgtcac

SEQ ID NO: 216980 - DNA, 515 bp, Cannabis indica
tggtgttcaaagaaacaaactgtagtggctagatcaagtacagaatctgagtatcgagccattgctttggctacctcaaaaataatgtggattcaatctgtgctgtcggaaatcagtattccaaccccatctttaatttgttgcttgccactaggtccctcataactctttccacccctcaagaaaattgcttgacattgccctttttcctttacttcactagtgctaggtgaattcccttgagtacggttgcccagttgagtagtcaactgtccaatttgattttttaaagttttaatggaggctctaatttccatcatgaattgaagtaatgaatcagcttggatatttgagcctccagtaggactttgtgttgcggctgttgttagttttgttggagctgatttctctgctggcaatcatcttacgctttactcatatcaagtttcacaaccatttgcccgttttcccacatctctacttcaaatatcatgattttcaaagtcaccatgata

SEQ ID NO: 216981 - DNA, 547 bp, Cannabis indica
atcggattcaagattcggctaagtaattcgggttggctcggatcggcggtcatgggatttctgtagatgagttacggtcaatgttgtttcatggtggcgagtggaatgggaatgggaatcagaatcaggaagaggagatgttgttgtgggtttcttgttctccgtctgaatggacggaatggtttgggtgccgatggtgtcggtgaatcccgaagctcccatcgctggttgccatcgctgaagcccaagctctgtgcagttgtcggcagtttcatggtggtttaggtttgtcgtcggttgccatcgctggttgcgcacatgattagtggctgaagtggtagtccgtttttcttgagtgatggcgacttggcttctcaattattttgtaactgctttctactactactactactactactattattattattattattattactactactactactactactactactactacttaaataaaaatttttgaaaaattctttaatagacaccgcttttagaggtatattactgtgttcgatattaagaa

SEQ ID NO: 216982 - DNA, 620 bp, Cannabis indica
tggcaagaagtgcagaacttttgcactcggttagtattcgaacctcttattttcattccatctctctatcttatattttttttttttaaaaaaaaaagaaactttggtattcttttacctctcttttggcgagcttgggctttcaagcccatcaacaaaagtcaactcaccttatcttagagttaggtaaagcaaatgagcatcgggagctactagccgctcaaaggagtgatactgacaaagaggtttctcgtcttaagaaggaggttaaggcactagagaagtccgagaagggtttggaggttgatgttgaaatcttaaagaaaaacctgctaggcaactcaaagaaagccaaaaggaactagatgaggtgaaggaagctcttgaaattgacgctcacgagagggtcaacaaaatggctacacattcactctatagaacttgggttgtcaataggagcatggacctcagtttcttaggtgaaaatgccaagaagatgctcgcttatttcaaacaaattgaacagtttgtgtgagtagggtctgaggaggaggaggaggaggaggagggagttgaagcaaccgagggagaagaagatgaagtcccctctaggtctccca

SEQ ID NO: 216983 - DNA, 911 bp, Cannabis indica
attagtgatcaacactattgatttaatcaaatatagtctaatttggttactaacatataaatatctagtttctgtacacgtatttacccttaaatcatgtttttgcagaaaatggccattaaattctcctgattgcttctttattccttcgtttttttcctcccaattttctgattttgggttttgaattatttaaacgatgactttgttcgatttaatcagaaaaataagaaaatttaccaaaatgtggtgtggcccaaaagcttttgaagtaagcgagaacgtggcgaataaataagctgcaaaagtcttaaaaaaaagaaaaaaagaaaaaaagttagatcctttggggtgtttttgggtttgagtagtagtagttctgcggaatcgaacacttggtttttttttcctaaataataataaaataaaactatgtgaagtttatattgtggttagtgagcacatgtattgacaaccgaagccattatttatttattttttttgtgagaaaaaagaagccattattctcaccgagctattaattcctcccccctccaaaaaaaaaaaaaacaagaggtcattattctctttaattatgatagtttttttttataattttttctttcaatttattttttaaaaaaatatatctatcatataaaataacatgtgaacttttattagaagaaaataaaaaaattatacatgattttaaaaaaaaattgtaaaaataaaattaaaatgaatattaaaattaagacaaaataatatgataaaaatttaaaaatatattaaaattaatttcaaaattatttaggtttaatttttttaaatattagtgtgtaattattttgtgggatacaaataaaatttcccataatataaatgcctcaaaagtaaaaaggaaattg

SEQ ID NO: 216984 - DNA, 1332 bp, Cannabis indica
  modified_base (1225)..(1225): a, c, t, g, unknown or other
  modified_base (1287)..(1287): a, c, t, g, unknown or other
agggttttattattattaagtcaaaatcattactaccacttctttttttctttcctcttaacaaaaaaaggccttagactccaacatgacaagggggtgaacattggttattagtaggaagagttcgacaaaatgaaggataattatttggtggaagaggtaatatgatgtgatgatgatcattagttgaggttgctaatttggttctttgatcagaatacttcttcctcttcttggcatctggaatgtgttctggctttttaaggtcttctaagcattgaacatctgccatgcatgtaaatgaccttgattttcctgaatagtaccttgacaatcctctcttgctactcatcatcatcaacacaaacacaaatacaaacaaaacattattattattattgttataaatatatgcatggacacatattacgagatagggtacaaattctgattattcgtcaataattatgattagaatttgtaccccatctgtaagtattattagtacgtatactctatcgtactattatattatttagagtatacttaccaataaaatatataaatttcgatcatttatcaaggatcagaatgatcataaatttataatttaattggaagtatacttatcgtaattttaaatttacgattcatcacagtacaaacaaaacattattattagaaattacctatcgatgcatatacagattctaaatcattgattaggagagttatatatatatatatatatgagtgattttcctttttgttatgatgaagattgtgtatatatatatatatgatgtgtatataattatagatggggtagaaatgaaagttggagttgaggatgatgaatagtttttagtggtaaggtaaccatcaaatataaattagaagataagagcataccacacacgtcatatatatcaagtttttttttggatgttggaccattaaaagtggattcccttttaaggctcttaaaaactccccatatatttatttatattccccaattaatactaacatatataataaattatacattttttttctttaaaaaattaaaaaaattaaaaatttggggtgtataaggatatacatgccaacctcatcaccacaatttctcaaaataataataatcaaaataaacttaccaccacaaatataaatttatgcgtaaaatctgcaatgcactattttaaaatggttgtttttaaanaattttttttttatttaattttagttacgcataggagaatttttttaaggtttttttttttnttttttatttttttttatttttttaattttacgttttagtacgta

SEQ ID NO: 216985 - DNA, 506 bp, Cannabis indica
cgtgactcggcacgtaacttttatctagtctttatatatatataaattaaaagaataataatttctgcaaccatccaaaactttctaccagtatccaaaaacatgctcctacatatcaaagaatttttcatacaagatatgggctatataaagttgtatttgtgggatttgaaaaggaagagagagtttttgtctttgtgtaatggcagaaggcataattttgctttggaagcatatgctgcacttttataacatgtcaaacactctttgccaaacaagatcaatacccttatcttcttcatttcttttcccttttgttacacattcatgacatacacgtgaaaattatatacaacatatatgcaagatttttttaatgattaatgtttcttcatataaaatatcgtatagttaatttaaaattgatatatttattatttttttttaaaaaaaaaaaattatgtattctttgtgaaagaagatattatcttgtgtcataattttta

SEQ ID NO: 216986 - DNA, 857 bp, Cannabis indica
attgctaaaagacattattggtgtttaacactctcttcggtgtcatactgcaattagtgtaattaagtatggggtcttatataattttaaaaaataatttttaagcaatatcgctaactaatcgtagagagtcacctatagaaggtgctggacaccactatagtaatgctcgaaaaaaaaaatagtatacggtaacttgttacttaaaatggtaattggttacttgaagaggtaactggttactcttcttgttgccttaaggtaactaattatcttgaaccggttttcttgtattttttttgaatttttctcctaaaataatttttttttttcaagaaaaaaccacatttttataaactttgccaaaaaagtaaaattacttaaaaaaaaaaaaaaaagaaatttacatgacaaaacttttaacttttaatgtcaaatttttaggtaagtagtttcaatcaacataccagcaactgtatctttgtacttgaatgtggatccgagtgacaacccaaatgagctttcggatactcatttcgcgggtcgccccgaatccatctccagcaagtccagagcatgtgacatggttaagagctgtctcctgcataattttgctattatttaacacttaataatttgactaataagtgtcaaaaaatgaaaaaataaaaaagataccaacctgaagtaaattcatgagtgtttccatagtggcagttttatcaggaccagtttcatatgatcggataatgaaagtttgtctataaacaaacctgtcctcaacaaatttaccaagtaaataagcatgaagaggagaattatctacacttacatctgtcaaaatctcacttttttta

SEQ ID NO: 216987 - DNA, 964 bp, Cannabis indica
tttttttttactattttgacggaattctacatacctctattgcaactagcgctgcaacctaaattgcaacaaaaaaatcgtacagaaacatctattgcaattagcgctgcaaacactttagaaacccaaactgtaaatttgaaaaaaaaaaattaaaaaaataagtatatggagtaattcccttaaaattaataattttattctaaattgtaatatatgtataaatattatatttattcaaaaataattttattatgatatagtattaaattctaaaataaaaaaaaaatactcattttttcacaataaaaaaaatgattgaaagtgctttgaatgcaactaccaaatgatatcaccttctaagtgtttcggttagactcttattgattttgtacatctattaagagtttttttagtttaatttttttatataattcatgtacgttgtagttatttaaggagtcatctataaattccagaaaatatcaagtaaaataaaaattcaaatatttattactcacataactatttttttttatacaagtaataagtaatgatccaaattgtaaactattcaaaaaaaaaattaaaaaaattaacaagtgatcataactcattaagataaatgtagagtctaccgaaataccgatttattaaaaaaaaaaaaattactatattcaatcccctaggttttaagacccataccatagccattggtggacactaatttcatttcctttgtaccaataaaaaataagaaaaataaattctacatctaactatacataaaaatcaaagtaataaatgattggtcctacattcatatcaaatcatatcatttcattcatacaactcttctaacatatctacctataaaatgataacacctccattattaatcccccaaaataaaaaaaaaaccaagaaagttaagaaaaagcaaaagaaaatggtctcattgaag

SEQ ID NO: 216988 - DNA, 665 bp, Cannabis indica
atatatatctgattttgctcaatgttggccttactgaatcatttttttttaaaggaacttaagagttcattactcaaacaaaaggatgggtagcacagggggatgccctccccatggtaaacactaacgggaagggtagagtttctaatacttttagtcatgttgagtcttcactcgaatgccacacaaccagtaaccagttacaatgccaatgaatcaatcaaaactgtatcatttattaatgtgtgtcaatgaatacaatgaatgatgttaagtgtgttagtttcaagtaattaaacagggactttatatacaatagtcctataggcttgacacttgaaactaacagcacctaactaacagaattaaccgactcttaactaactaactaactgtctttaactatactaacggtcacaactaactacaatttccaccttgatcgatagtatagtaggaatcaacaaaaaacagagacagttaatcagtaacaatacaatcaaaaacaacaaatacatttgataccataggacagtgactatcctaagattccaagtattttcaagcaatgcttgaattttgctgcagtaacagccttagtcagcatgtctgaggggttttctgctgtagcaatcttgtccaatctgatctttccatctgcaatt

SEQ ID NO: 216989 - DNA, 524 bp, Cannabis indica
gtttatgtatatattatgttaatgttacggtccaatatacgtatatttaattatattattagtttgagtatttttttttttaatttatattaaacttgatacttaattacaccaataccagtatgacacactattatatgatacactattagacagcttaattataattttattttaactttaatatttttcattttttataaataaaaaataatatatattttttttgataaccccaataaataatgtcataatagtaattaatccttaagaaatatttttttttattttattatttaaaaaatataatagaaatatatttttatagatacatgaattgagtaaaacaataatattttattatttaaaaagaaataataataaaatatattttataatacatgaattgagaaaaaaaataataaaaatatattttttaaattaatatacacgtataataaatttaaatttaaattgtaaatattaaaaaaacacaatttatattatacaaccttattatatat

SEQ ID NO: 216990 - DNA, 640 bp, Cannabis indica
cacttctcgaagactggttagctcactctctagagaatcaattctctccttcaaagtagtcacctagtcttctttagcaacgacacgatcttctacagcattgagcttcttaggaagcttaactactttcttgtgttcgttgtccatgttgtaagcatacccaacataagcttgaaataaaagaacaatgtcaggtgatgttaaaagaaaaaaattgtcaagttagaaggagagaagaaaaatagttatctaaaagatgtcaaggaagcatctttgagcaataacatgcggaggttcagagctaactaacttctgcaacgaaatgttttcagccttagaaccaattaaggcatcaccatgagcaaaaagccaggagccctgcgtacgcagttgctccactaaatttgaacccgagttcagaaaataattgtcagcctcattcggagggatatcaatgggatatccctcatcagcaccaatagtactgaacttctccctactagagttttgggcaagaggagcagcatcaataggtctactcctctttctaactttcttctttgaagcaacaaaagcagtaaggataccctaaataacttccttgattggaggttcagattccttcggtagcaaaattttt

SEQ ID NO: 216991 - DNA, 829 bp, Cannabis indica
cgtgactccacagtcaactggtgctagctgtctgttgatagggggtagatcacactaattgttggagtttggtggatctagatgcttgaagtgattgttttcacttctagaatcatctttttgggtgtttccacccactctcagtccttctcagttaaacattgacctctatacagcttgctccccttaggcaggaaattttgtactctggccggccatgggtattgctactagtggctggtcgaccagtggctgcacaacgagtggtgttgttgagccagagatccctagccggccccccatgtcgttggttgctgagatctggctgttctcgaggtttgacctttgaggaaaggtctgtcctccctctggcaggggataatttgtcctagttcttgaggaacttggtggcagaatcccttggagtggacctttaaggagatcctagcctcttatatcggttctctaattgaaccgtcttattagatcactggcctcccagttgcggcaatctaattctgcttggtgagatcgaaggatgtactcttggtcatccatccatcttttccgtctctacgaagcaaaaaacactacaattagtagcgcattctgttaggcctgcacgacctacaacttccttaagtctggcaaactcaagatcttctcctaggtcttggtaaggctcgccaacgctcaggcctatctctcctgcatagaactggagttgagatccaattgttgtttcagggggttgtcgcctctaggtccttcattcagtgggaggcgccaatggttggtctgctcttggaggcacaggcctgccacttgg

SEQ ID NO: 216992 - DNA, 1302 bp, Cannabis indica
gttttagaattcatattaggatgttaatgaaacatacatggtagtaaatctagatcccggtaaaacatttccaacagctgcttcccctccctttttactaaggccacactgacgccatatcttgacacacccaagtaaagggacaatgtttctcctttctctggttttgccaacatctgtggctttcccaggtgctctttgaatttttagaaagcctcctcttagtcctcacccaaggcaaattgcttatttcctcttagcacattaaagaacgatagacatttgtctatcgactgtgagataaatctattgagggctgccaccctccttgttaagcactacaactccttctgatttttcggtgattccctatctatcagtgcttgtatcttctctggattggcctctatccccctttcattaaccatgaagcctaggaacttgcttgacaacaccccaaagatgcacttagcgaggttaagcttcatctgatacttcctcaaggtagtgaacgtttcagttaggtctttgatcaaatctccagctttcctagtcttcaccaacatgtcgtcaacatacacttctatattacgctcaatttggttggcaaatattttgttgatgaatctctgatatgtggcctcggcattttttgagtctaaatggcataacctgatagtagtaaagccctctgtctgtgataaaggatgtgtgttcctcgttagcagggttcatggggatctaattttatcttgagtaaacatccataaagcacagtacctcattctcggtcgtggcatccaccatctgatttatgcaggggagcaggaagctatatttcgggcatgctttattcaagttggtgaagtctacgcaaaccctccacttcccattcggctttgggaccaagacggggttcgacacccagatagggtaaaaggcttcccgtatgaattgaaacaagttgagttattctacttcttccttcaatgccgtgagtcgaatcgagtcaaaggctcaccttttctgcctcacaggtctcgcctgtgggtcaacgttcaagtggtgagacataactctggcaatatgttagaagctttcaacaaaggcaacattggtcgggttcaaccagagattgcaaaaaattgttggcatcaaagaagctcttagttggattgatcgccataggcggacaaatgtgattttgaaaacagatagcttagtttgttttcaggctatttctagttctgtttctatgccgtctcaatttggcatgattgtttttatttgtaaaaaactctt

SEQ ID NO: 216993 - DNA, 748 bp, Cannabis indica
atatattaataatatatatatttgggtaacaagtgcttctagacatgatatatatgttgtattctagactactgttggtaattacatattctttcttatttaagtgttcttttttttagtcgtacgtgaacaagctaatgtatatacttgtattaaagtttattatattttaatgcgaaaaagtcaacttcgttttcttaaatttggcaaaatcataccaatatagcgcattatgagtccctagcaatttcggaactgatattatatcaccttcatagtagtatacccaaaattttatttattgggaccagagtttaaaaatatatacataataaacataaagttgaagagaaattcaatttttcatacttataattggccaataatttacttaaaaaaaaaaaaccaagttgaaaactataaaaaattacgttcattttcccttaatctcaaaaatacccctgtcatataaaaagtctcattctctctaactcaatttccctctttccttctcgttttcccatccaagagaaacccaactcccactgtcaaccttgtcgcagtcctcgccactggaggtacaattttggaagttggagaagaaacacaattttcgttacattttagttcatggtgaaaaacattaatcggtaagtgattttatttaattgttattattattagtcattttgatgatttaaaatattgcttagaaaatatttgatctgaagtttctttgtgtgttttg

SEQ ID NO: 216994 - DNA, 836 bp, Cannabis indica
atttcagttgtcatgtatgataaaacttaatagaagaaccactttataatactttgagttgataattacctaatcagtctctttattattccattcatttcagttgtcatgataaaacttaatagaaaaaccactttataatactttgagttgttctgagtactatttttaacaagttaagaaaaatccaagaacacaataatatattagtcataattcatgttattttttaagttaccaaaacttattattttctacttaaaaagtaaatattatatacacatttcacaaatcacatgtattaaatatatcttcatataaatatattttttgttagatactaattaaattgacattaaacaattatattatatcaaatacataaatatttttttttatatttaataataaggataatgacattataaaatagttacaaaaatcttaaaattgaagtcgtgaataagaagtactttatatatatatactagatgaaagttacgtggcgagccacgtaaatattaattttattaaagttctagtaatttttgattaaggattcagtaattaattgtaaatcattttttaaacgatttgttttataaaagtaaacttgttaagaatgtcgtatataaacatatgatatacacattgttttcaataataaacagtaagtttatctcaatatatttatactcatatagtaattattcttaatgtaaataaagtaatttatgtgttccaatcgattggctggactactttatatcgtactttttttctttggtttgctcgtcttcttctatattaataggtgtctttcctcgttttttcgt

SEQ ID NO: 216995 - DNA, 929 bp, Cannabis indica
tcgatcatgctaacatctagtgtgtaattttgttatcctacagttacctaccccactccaatttctacttcgtaactttacaattcgtaattaatttaattaagatgttacaaattaatctattttattattatgacgttacactacttacgagagatctcccttgattggttactgcaattacgtagcttgcatatacatatacaatatataataatatatatagttctacttctaccatgcatcttcacatatatatgtcccatagttatacatatatatgtacattcatgcacgtaaatatatatacatatatggactctgaattcatgcggattaatgtatacaaaaagcagtacattaagctgtatatatatatatatatatttacactactattgttgtaacgatattataatttaattaatttatattagcattaactgcatgtgacattaattattcatttgtagttgtagactcttccatcaatattgaaatcacaaagaatgtgtaggttttctcaatatttttctataaataaatccatgttattgtttaataattagtacaattaactattttagtatctcatcaacccgataccccaccacaaagaaaataattattaatataattattgtttaattagttccaatgattctcattaaaataaaagttttcttttaatataattattagtcatcagattattaataaaatgtttgataaaattgggatacataaataaaattatattagaaagagtttttggcggttaaaccctcttaattgttgttttacttgtatttaatcttctaagcttaaattttaacggtaaaattctctaaactattgaactaatagcaaatttaaagtgtcattcggttaattgttactgtgagttgtttatattggtacacttaata

SEQ ID NO: 216996 - DNA, 690 bp, Cannabis indica
accaactcatattagatagaaaacgttatagataataaaagtgaaaagaaaaaaacacactcaaagagaagagaaaatgatcaaaagatgtttgatgaatttggcaattggtctgcaactagaatgtaaaatagccccataactccagtatgtgcttggctgctactgtatttagactcaagaaccaatgtctcaccatcaactatcttgattgagcctggttgcggataacaagtggacattcctacaatgtaaccggcctcgttccctgcttccttcccttttccgtagattggattcgacgaacatatcactcttccatcctaaaaaccaagatttgttaaagagttccacattagtatatttataagaacataaactactccactcgttaatgttacctctccatataatgttgaaccagctcccccggtatgctggtgagcagcaccatacacaacatatccaccttttggtatgcggacccttgtgcttttggtgtcaatgcatctgtctctagtcacactagtgcctttacatgactccacaacttcgtattcgatctaaaagcacaacaaatttttggttaaatgtaaaatctactactagtcgagataaagcttaagataatttcagtaatccagtgtgtataaaattcagatagttaaaaaggaggaaagattcacttac

SEQ ID NO: 216997 - DNA, 505 bp, Cannabis indica
aaacaataacattgttatatcttaaattcagtttctaaagatatctcttctagtcttttatatgatgaatcagcagctgccatttgggatgatctaaaggttagatttcatcagaaaaatggccctaacgtatacaacttcaggaaaaatctaatgaatcttaaacaagaaagtcagtcggtcagcatatacttttctaggcttaagactgtttggaaacaactttcaaattacagacccaattgtgtttgtaatggatgtacatgtggtggtgtcaaaaagattcaagaacactaccacatggagtacataatgtctttcctaatggggcttttggattctttctcccaagttcgaagcaacatattaatcatggatcccttgccagaaatcaacagggtttttcatcttgtcacccgagaagaaaaccagaaagggaattctaaccctactacagaaccaaattcaggaatggcctttggcttccagggagataaaggcacca

SEQ ID NO: 216998 - DNA, 683 bp, Cannabis indica
atttttttttaaataaataataaagcattgattatttattttaataatatcaaaaattcatttaaaaaaatgaaataaaaattacgaacaaatttttttttttttaagaacaaaattatgttatgtgctctaatttaaccaaatttacggtttgggaattaactatgtaaaatttgaaattataatatctaaattatactatcaataaaagtcaaactcaccttaaaaggaaacctttcttttcgtttttttttttattttttttttatttttttatatatatatctaaattatactatcaatttgtatcgcgtataattttgattttcttaaatttaaatataaatactgataattaaaaacatatgatgttattgaaattaagttaaaataaaaaaatatactaacactcttataatgcattttacagtgctatagcatatgttgaacttgatgacaatacaaagagcctatctgctatcagtgtagtttttaaaaaattaaatagttttacatgcctttcataagttgattttttaattaaataaattatgcacatcatgactaatcatcttaaatgaaaatacatcactgtttgcaggaacaccgccgctttgtcgacactaccataatcaatttatcaaagaaaaaatggataatccagatatatgcggacccggcta

SEQ ID NO: 216999 - DNA, 799 bp, Cannabis indica
gtattgatcaaagaagcccaacatagtattctttaatgcaattgcaatataattttttttaatatgtgggcaattagagtttgaaataaggctaaaacgtatttaaatttataaattttgataataacatactgtcagcttttttttattaatgtatgattaatttatttagaattttagttggaaatcttataataattattatcaatctatataaaacaatattttgcaaaaaaaaaaaaataaataaataaatttgaacaatattcattataaatatacatatgtattgacaggttactaatgcaaacacttctcactgaagaccatttacaaaggtttcatgttcagcttgatagcactctctgcacgtttgtgaggcagtaaaagaagactgaaattaaatttcacttacagacacctttaattagtttttttaaataagtatatatacaagtatattaatttcactctcttatgtatattaattgcaaacttatatgttatatttaagaccaaatattaaaagcaataaatgttgattaaagattttaatgcaatacaaatattaaaagtattttgggttactacattgatttagtttctcattcttttagttatatttttgtataaatatgggttcaccttattgaaataataactaagaaattctcatttagtttttttttatgtgttcatcatctcttcttttcttcttatacattttatacaaataatattattaaaaacatataccattactaatcaaattatctactacgtttatatatataaaatg

SEQ ID NO: 217000 - DNA, 611 bp, Cannabis indica
gcgcgcctaacttcccattcccatccattgtcaatatggctatattatcataattaattaattaagttgcctcaactacattaatttttgttgtacgtagtaaatatttgttattagttaatttgttttttaaatttcttgtcgttttgcctaatatacatatatatatataccacatacattatgaaattaatctaggtcatgatctccattggaaaatggaggtgggagatctgtataaagctggaaacagcttgagaagtagtaagggttcatcagtgtggagaggcaataataataataaagatgagtttttctcaaagtctagaagagaagatgatatagatgatgaagaagctcttacttgggctgcactagaaaagcttccaacttatgatcgtttaagaaaagggattttgactacttctaaaggaaagccaacagaggttgatgtaatcaatcttggttctaaagaaagaaaagatttgcttcgtagattggttaatgttgctgacgaagataatgaatcttttttgttggaagctcaaacaacgcatccaaacgtcgtaacctacctatattaattataacaataataataatgtatatta

SEQ ID NO: 217001 - DNA, 863 bp, Cannabis indica
gttttttttattgtttataatatatcatttatttaagattatattaaatttttattttattatatataaattttttagtatgtatacatattttaatagtagtacatctaattttgttaacatgatatacatacacatttttagagtaatattaatttagtattattataatttttttatggtatataattttattactgtggtatattaacttttggggaattacttcatatattatttttttaacttttttttttctttaaatttacggtttgggtttctaaagtggttgcagtgctagttgtaatatgggtttttatgtagaatttcgtaaaaatacaaaaaaaactagttttgaagtgtaaaaatgaaaaaaccccttaatttttagtgatacgatatatcaaatattgttgcatatatttaatgatttaatatatttttttcatttttgttataatataataatatacaatactagaaaaattatataacttaaattaattattatatatgttttaaaaaacaataatatgtagtaaatatattttataatgtttattaactaatttattatatttgacaattttcgtaatttttttttaaaaaatagtataattattaacttaatttttagggtcattttcctagccaaaataataataataatgtaatttcttaaaagtaattgacattggtccattaacattatataatctcccaatttatgaaatgataatagattcaacttgtatctgtgtgaatcaaaaggtaaatacattagtgggcaatggacttataatgtcaagcagtaagaattataaaataggacatgttaattgtttatgcattgtaatttggcc

SEQ ID NO: 217002 - DNA, 788 bp, Cannabis indica
aaaggaaaatttgtggcaaaagtttttaaaaagatcgttttgatgcagattaaattttaattttcaaaaatagcggcaatagtccttagggtcatggtttttatttgtccattagtcctaattttaactgagtcgtttacttttttaaaattacttacgtgtcgaaatattataagtttaaattatcattttaattttaaaaaataaaaaaaaataaattatttaaaattaatttattttttctttttctttttctttcttttcttcttcttcttctcactactagaaacaaccaaccaccaacccccaaccccaaacctagcaccaccaccacgcctgaatagccacgaccctttctcttcttcttctaaagactttctcagtcctaccatttctcttatctctccccttcgtcttcttccttctacgcctgaacctccatatccaccgtggtcagaaactgctcatctcatccaccagccacctccccctctctctttgttcctccctctcggtgcaagcggaaggcaggcggacgatttagaccctatcttctcttctctctcgctctcaaacccctcctctctctcgttctcgcgcgacccatccctctctgccccgcttggtgacccagatcggcaacccaaactcagatctgttaacctcctcttcctcagccaccattaaagctcaaataacctcgactgattcatactctggtagatgcatgtttgggactcgtcttcaagcttgagagaaaaaaaaactggatagagtgaaatcgggag

SEQ ID NO: 217003 - DNA, 758 bp, Cannabis indica
ttatatgcttcaaattattaagtatcacgatttatcagtatactggatttacattgacgtgataaatcagcgataaggtttattcaacttgaataagtggaatgtcttttattgggcattagtacactagtatcaatgtatcgactatacatcggtatggactgatattgacaatagaaaagatatcataaacttgccattatatcttttttaagtcaatgacacttagttgattataaatcatttgatctcaatcttgcgatggttaagctctaacttaaatgtattgcacgagttctttgacttgttcgttacagattacatgtaggcataatacttacatcttgggaacttgataatacaattgagtgggagtattaatcatagatatggacattctataactatttagaagtaaaatgatggtttcttagagcttggtttaacgcgataaatgatagaatgctcatttcggtaattatattagtttctcgatatatcatttacaagtggctaagtgtttaaaggataaaatacattgaaaggtaaaacagtaattttgtccttactcaatgtaaaccgtcgatagaggatcaataattattgtgatttaaacaatggataatttatagcataattatatttggtatatagagtgttttatgtaatcaagagtacaattccgaatatatagtggagtgaggaagaattaataagttaggaatttactgtataaatttcaagatctgcttattagg

SEQ ID NO: 217004 - DNA, 616 bp, Cannabis indica
gatgacgtatgttctaaaataccaaagacttaaggggggcctatgtcttcggttattatgtaataaccgaagagataggtagtaggtaccttttctcttcggttttatatattaaccgaagagaaaggtacctatctcttcaattattatataaaaaccgaaaacgtaagatcttccagttttcaatatgctccaattacgtcattaaatttttatttaatgattaattatatattttattatcctattacttatagctatgtatattattcaaatgatcttaattatttaattagtatgaacttatgcatgcagatatatttgtacaagttcaaaagatgagaatggaaactttaaagaatgtttggggagtgacatcatcagtttgcttagcttatacgaggcctcacatttgagctgtgttggagaaaatgttctagatgaagccctatctttcactccacacacctactaattttggcaaatataaaaaagacatcccgatgatgatccattatcgaaagtaaatatcccaagccctagagaggcccttagaaagccctaagtgaatctcatgcaaggcatttcatttcaatatatgaaaaagatgcttcac

SEQ ID NO: 217005 - DNA, 648 bp, Cannabis indica
aaatataatcagtcttgtcgtaatacctatagatcaaattattattgagtttttcttgtcaaaaaatcagccaatcagaatatatatatactatattttatactattttgaaaaatgcataatccaatttataatttaacaaaatagagattttaatcaataacttaagcaaaaggcaaaatttaaaatggtatgagtttctaaattaatttgagttgaaattaatatttgttgttgaaataattgcaggatagtgacagacattccaggaacaactgatgtgtcatttggtaattattatatagtaaatatgtatatgtttttaattttttaatcaattatgagaataattaatgtttaaatgaattaatatattataggagaagagatagtgagctatgaaatgccacgaccaaacataggaatacataggtttgtgttcttaatgtttaaacagaagagaagacaaacagtggtaatgccaccttcatcgagagagcgtttcaacacgcgcctctttgctacccaaaatgaccttggtcctcctgttgctgctctttcttcaacgctcaaagagaaactgcatgcagaaaacgataatacatacatatatatatatatatatatgcatgcagtggatgcatatgc

SEQ ID NO: 217006 - DNA, 516 bp, Cannabis indica
tttgtattttgatcattggatccctaatgtacaatgcaatttgatcctattgaagccagactggattgtgttgggaaaattgttacccacgagagtaacaaggctaaacatgttgtgatggagggagttaagaagcaatttggaatgaccaaaatcaaagttcttccatcagcatccacaactttaccagtacgtagtccatcaaggtctcctcgagacccccaatttagcaaagcgaaggccaggtctgacaacatgtggactggaaagagcaagtctcccaaaacccgtcattctaaaaggctggcatcaagtaacaagtagtgaaacactgttgtagcatattcagtacaactgttacaaaagttaggttttaaggtgataaattatatttagttatgttatatatttgcatcttactactgtactgttagcgttaagtgatatggaattgcactaatagtggtgatttttagcatttagtatatagggtaagacttgtgatagtttttggaa

SEQ ID NO: 217007 - DNA, 581 bp, Cannabis indica
agtcatcctatttaagtaccaaactaattgcattctatgttttataacacctatgcgaattaatattaccggtaatcacctctcccaatatttaaaaaaaaaaaaactgaaaaaaaagaaaacaaaagactggttgggtgtatatttcaagtttcaagttttaaaattgtgtttttaaaagtgagaatagaaaacaattttttgtcattttaaaaatttaatggtgttcggtacaagttttttaaaactatttttaatttttttcttactagaaaaattaatattttaacatcatattataatatgaacccattcgggtttgagtctaggattcgagtatgtgagcaaaaatataaaatgtaatatgttagacaaaaaaaattatttttgaaaattaaaaacaacattttgatattttttattttttaattttttaaaaacttttaaaaaactattttttaaaaattttgccaaacaattcctcttagtttttaaaaattgttttctatttttaaaaacttaaaacaatttttaagtatataagccaaacagccccttatattcataccattctggctctt

SEQ ID NO: 217008 - DNA, 620 bp, Cannabis indica
ggcgagtgtgtattgatttcacgtacctcaacaaggcatgctccaaatactatttttcactcccaagaatcgatcagctcgtggatgcaacaacaaggaatgaaatattagcttcaaggatgcttactcggggtacaatcaaatcaaaatgcatccaccaaaccaagaacatacaagtttccgaacagatatgggtctatattactataaagtcatgccatttggtctaaaaaatgctagagccacataccaaagattggtaaacaaaatgttcaaagaccagatcggacgaaatacgaaagtatatgtggatgacatgttcgtcaaatccaggaaggctggggggcacatagatgacctggacgaatgcttcaaagtcctcaggaagtataacatgaaaataaatcccttaaagtgatccttcagagtcacctcgagaaagtttttgggcttcattgtcaatgcctgaggaatcgaagccaatccagagaagattcaagccctcctcgatatgaagtcgccaacaagaaccaaggaagtgcaaagtttgattggtcggatcgccgcactcattaaatttatttcaaaatcaacagtcaagtgtgtcccattcttcaaca

SEQ ID NO: 217009 - DNA, 947 bp, Cannabis indica
gtttacataactaggaaagataatcggaatgctttaatttgataaaattgccattattagaacatgtaattattttctgttcatagatttttaaggggtatatttgtcttttttatttttaattaataaaattaaaatcaaaataaattaaataaggaaaggggaatgcattattagaacatgtaattattttctgtttatagatttttaaggggtatatttgtcttttttatttttaattaataaaattataatcaaaataaattaaataaggaaagggcaatgcattatgggagagaacctttccttttgttttcttcttaatttgtgtgggtcccactagttttcccctttctaaaagttttccctttccaaaatttagtaaacaattgtatgggaatcaatatcataccattcattcccattctctttaagtaaacatgccatgtattgattcttatttctcaaaaaaaaaaaaaattaaatttttggtatggaacgaacaaaaaagaaagtaattggtaataaaattattaaaatgacttagcttgcataagaagttagaatgaaatatagacaaaataagaatgactcttaaaatatcttttcaatcattttagttataatttatttaaaaaaaaaacaactggagttgctttataacattagacatctagctattaacattcataacttctaatgaaaattctaatttttctaaattgttcagatttttaccaatatattgtacgattatttcatgtaaatatccatgtatatgtagaaacacaaaactaaataggaggcgaaaagtttaattaataattaatgagaataaacaaggaattatatatataataaactccaatattacataccggaaagaccactgactgtacatgggagcgtcgatctcatacatgatttaagaaaagaaaaagaaaaaa

SEQ ID NO: 217010 - DNA, 705 bp, Cannabis indica
gtagtatttagctttatacacctgactagcaagagacgatggtgaacaaagaagtctccaaccttgcttagccaacatggcaatgttgaaatcatggagatgtcgaaaatccataccccagagtctttaggtgtagccatacgatcccaagacatccagatgattccttgtccattggaactttttattttccaccaaaagtttgccataattttctcaatgtcttggcaaatacccaacggaatgaggaatacactcatagcataagttgaaagggattggatgacagttttaagcaagatttctttcccagcacgaaaaagtgggatttttagtagacatctctgacgattttaaattgtcagggataaccattatatataaaacacaattttcatctcattttatttcgggtctcttaagatataaaccttgccctccaaaaaaaaatagatctcattttttcaatattactctcgctctgtccttctcctcctctctctctcctctgtcaccaaaattagcgccaaaggccaagttaccaactcgctttctcctctcaccaaaatagtccagaggtatatataaagatatatatatatatatgttggagatcaaagcatgttgatcttgttcaacttcagctcgaaaccaaagacaacacacatatgcaccagaacacaaactcaagagagagagagagag

SEQ ID NO: 217011 - DNA, 646 bp, Cannabis indica
atggggctcaactttgttgcgaattttctgagtgacaatggggactaggatctcaaaaacttcgctattgtttgaccaagataccaatgaagccattttaaaggggggaaaaccttcgggagtggcaatgattcttcggtttggacaaagaaagcaatgccaagttcttgtgtatgtcggcttacttaattcaagcccttcatcgggctactctcaatgaggtttcgccttccctatgtaataagctctagaacagtaaaatcttggagcgtcacaagatcttgtggtggagtatcctctctggtgcgctcccagttcgatcaatcctcagcaagagaattcctattgacaatcccctttgtcctatatgtggaaatgaggatgatactagggaacatgtttttctttactgcaacttggcttttcatttatggcagttctcctcgtggggtatcttccctatgttagatagtggtatttgtatgtgggactgggttaagtccataagagtttaaaagacaaggctattgatgtgaatgaagtctttttgtatgcgcccattgcggtatatactatctggcgggctcaaaatgataaggttcacaataataacctgggtagtattaaattttatattgactccatc

SEQ ID NO: 217012 - DNA, 623 bp, Cannabis indica
ttactatacttaaatatttattttttatttaaaaatttaaaaattgaataggaactagtttaaaatctaaataaaaattaaaaataattaaaaaacaattataaaaataatttataatattaaaactgacctaatatacacatcacacaatttaaattggagatatacttatcatttgaattgtataccatgtgttttttttcttcttttttttttttattgctgtgcgatgtgtttgttgtcaatcatttacatcaaatatctcaaattctttctttttcttatgaaagagacccatcccaaattcattcataaatcactcacgtctaccacgttagccagtatttaccacgtctcccaacctttctctcaaataaattattggagtgctaattaaattggcactattttatttatattgaaattgattttaatttaatttgtacaaaacctcaaatataatcggcaatagtgcggaatggttcaattattaaacttttttagtattaaattatttaatatgaaaataaaataaattcttcatattttatatctctagcactatattaaaataaagggtaatttgtaatttttacccctcaactttgacatgtagtaaatcg

SEQ ID NO: 217013 - DNA, 1148 bp, Cannabis indica
agatatatatgtcatgtaaatttgattatgattagttttttaataaaaaagtttaagaatataagataatcattatagaataaaaaaaatatcaataaaaatttaaaaactcatataaattttacttttatataattaaactaattgtttgatagaaagttaattcttgatgaaattatcatagattagaataaaaaatttatatataaaattttatttttatataatcaaaacaaatttttgatcaaaaacaaaaatatgattagtttattgatgaaaaactggattttggaatatgatacatttgatttttttccgtttatgctttacacaaatagaaataaactttaaaatattaaatatgagatttaaaaagacatttacaataatatgacaaatctaagctcataaaaaaattaaaataaataaaataaaataccataaaaatagaaaaggcctgttaaaaatcaaatagaggtgacacttcaattttatttttattttaataacaatattatgatgtatttgtaacaattaggagtggatatccaatttaatttaattggagttattggatgttaaccctaaaatttaattaaattaaaatgattcaatctaattatatttatatatattaaaaattattatttatatttatttatataataaaaattattaaaaaataaaaatcatatatatatattaatattgaaaatgactttgtttttaaaattttgattctcaattaaaaaataaaaatagttttataaaatatatttttaaaaaatattttcacttttttaattttaaagatacaaaattgattaaaaatatgttattaaacactatctaaattagttattagattggataggattttaaagtttaattgaattggatatgaagataatttttctaaatagattggatgttagggaattgtttttagattagatcttaatgagaactaagaagtatgaaaagaatcatgttagtcaaatatgagggaagaaaaattactttaaaatttactttccctatttcttatttttcgaaggtatttttctaaatataataataatttaggaaaattctacaatgcacactcttaaaatggatatattgatgcatctttatctgttttagca

SEQ ID NO: 217014 - DNA, 519 bp, Cannabis indica
tttataatctgtcatcacttaaattaaggaagagaattaataatttacattaacaattgtgtaattaaaacaacatgattcatattcctaaccattcattcatagtcaattataatttgtattgttattttactgtctttttttttttttggtactgcgatgttgtcccagtacaacatgatttgataaatatttattatacaaatgtatgttcatatctattttcaatttaataaaaaaatttacatatatttaaaatatatatgagattaaattattatcattttattcaaaaataaaaaatactgtgttagttgcgtgttattggttagtagttactctcagctttgtaaaaaatttagtcgagctggtgtgtgtttggtaagaggtaatgccccacttttatgttgttagtattaattaaatgaagtttctttcttgataaaaaaaataaattgtttgaaaaaagtactagtattttgaataattagataggtaatagttaaattaatagtagaa

SEQ ID NO: 217015 - DNA, 1041 bp, Cannabis indica
gagtgtgtatgcatggtgagtgcacactctgtttggtgcaccttagagcaggggagcctaacacctacaactggcaaagtcgttattgtgcaatcattattgagagaatattctctctttttgattttgcttgtatatcccacttaacactattgtattggctctcaatgtattagatttgactatttaatggaaagttgtacctcagtttcatttgagctgagaaattcatttgctgtatttttttaagaattaactgttgaattagagattaatagtttaggactcattaacatataattttagtaacatgtatgtaatgatgtaataaattcaaaaaaaaatcataaaggtggacagatgaggggatatataattattaagacattatattaataattattgaattttagatgttgtaataaaaagatttgtgtgatactccttaataatgtattgtcatcataaatttaagtctaattatattactcatctttagttaaaaaaaaaaaaacttaaataacatttcttctattcaaacattgaactttataatgtgcatgcatggatttttttgattaattttcttgattaaaatgaatagtgaccttcccaacaatattattatcattatttgcaatggaagtataggttagctcaaacacaattaaggttggagttgaggtaaggcaaattaggagcttagctagttcagaggcccaaaaaaatattgcttttttaaaaatatatatttttttttagtaattttcaaaaatatcatatatattttaactaaaaggctcaataattttatttcttaaggcccgatattttattttcctaaagcgaacaaatttcagggccgaccttgaacacaactaacctactctactactcaaagtgagtttatataatggggatttttttttttggaaaacttgttaattgggttgagaaaaagtttcttagtaaaataattaggaaggaatcaaattggtatcctcacataacatgaacacataaaaatgccaaagtagtagt

SEQ ID NO: 217016 - DNA, 721 bp, Cannabis indica
caaattattaacctatttttttctcatgaataatgtatattaatttgcatttacttatcacacatgtatataaattcaatttgagaagcttcagaatgtttttttttctttgaattcgagatctatgtttgagcatcatttttagtttcttatttaaaagaattttggtgggtttaagtgcctaactttttgaattcgttgatttttggttttgatgaagttgctagtcgtttgtttgttgtcgatttcactgttttgctccattctgttgtaattaatggttatttttgagtattttcgtgtttttgttgtgattctattcgtgggtttggaagatgaaaacatcgtaattaaatttctgtgtgtacagtataaaaaacggccaaagaagtatttttgtaaattttgtcgtgtaacaatatttttgtaatacttacccaaaatccaatatttatgtaaaactcccattaatttttctaattggattacattaatgttcggtgtataattgatgctttccacctttattaacacttcatgtaccaagccaattttaagtcaagctctagccctctttatgaacacaaattagaagatagtagtcatttaattaagataatttaacaaatgatctgaagcatataccatgaaaaaaaaaaaaaaaaaaaaagaatagtgcatgcatgcacggatgcctatgcatgtgactttgaagtgaaat

SEQ ID NO: 217017 - DNA, 1382 bp, Cannabis indica
taagagtatatggatgcatcattttgaagagattatttataagaagttgcattgtataatttatataaatacgctcacctctggtagtgttaattcatggatatatttacaagtctaatattctttacacgtacacacaatataataatgtattatttgataaatattaattaattatatcctcaaactatattggatgtttaaatttggatatttatatatgtttgattttcgattgtgaagttttaaccaaccttgcaaagtcactatataatttttcgaacattcagtctttcttttgattccatgttttttttctttattaaagacttattctttcttttctttttttcctttcaaacttttggcttattttatttctcttaattttttgttccatattttgatttatttatcttctctttgatttcatacatacatatatatatttcaaactttattctacttaattattctactttggtttagtcttaattagtactatattgactatagctaattccctggctccataattactagctaattaaatattactagcaaattaatcattaatatattttcatgtgattaaaaccatgtatgtatactcaaagtccaaaatatagtagttactcttattaaaattgtacttcttctctacatgacaataattttttacgttatacccacgactgacccaagtggttcgagagtcttaagcaaaaaattaaaattgggccttttattaaaaaaaaaataatatcaattaatattacataaattcagttttgaaaaaaaaatatatttcataaattttaaactaggtaaaattttaaaattatgtgtattgggaccacaaagttttatcagtttttttaagtgcatatttattgttatgaacatttattacatgtatactatacattattaaaaaaaatattcattatattatatataaaagggatgataaaaaaatgagactttttaatataaggggccttatacaagggctgaaatcgtcatataccttacattatttttggggagttctatttacaccccacaaaatgataagtacaccccattattaaaaaaaaaataaacttaaataatttttaaaaattactcttaatattttttttaaaaaaatttactcacattattttatgttaatttcaatacttattttgattttattttctataattttttctaactcatgtatatatttttttaattttttcttaagaaaatttcatataattttttattttaaattttttcttctataatatttaaaatataatttatttttgtttgtataggtatattttttaagtaatatgaattgacaaaaaaaagttaaaaaaattaagtac

SEQ ID NO: 217018 - DNA, 992 bp, Cannabis indica
ttttggcttactaggtttgtttgttggtttactatatgaatttgttttctttaacaacaataataacaaaagcttttggttttcttaaaaagataaaaacttttggttcacaattaatgattataacttaaaatggtgcaaatgactatttacactatttagggaaaagggtaggggcattgagatgaggttggtctaccttaagctaactatacataagaaaatgagggcatgccaaaactactagaaaagtggtgcatgaacttaaaaagatcattaagaaaaaatttaaaaaaactacttaattagagtgccaatactataacattatctagttaaattaaaatatataaaatctactactacaatttcatcaataatatatatcgtgttttttaggcactttatgacactctttagtattttatttttatatctaccttctaaaattaatcgtgtaattatctcatagaagaaagaaaataaaaaaaacaaatatgtcatttaaaaatatataaataaaaaaatgattatatattttaacagtgataattttatcaaattaaagtattatgattatcttttctagttatataaataaaataaaaatgattacgatttccttaccggtcagtttagtagacaatataataaaatatttttttcaattattttatattttaaaccgattcatttttttcgttgattattctaattcaaaatacaatttaataaacatgttaccaaggataaagaaagtagggagttatggattgacatagaaccatgttgtggattttaataaatattatgaattttataatttatattttaatatagaggagtgctacttacaaccttttattacaatctctcagtcaacatctacgtctgaaatcacatatcaaaatatttttattttttttttctactagcgatattcgttataattacagtatcatctctgtaaattttttgaaaaattttttgaa

SEQ ID NO: 217019 - DNA, 617 bp, Cannabis indica
ctcttactcttactctagtgtgagattcctataaaattataaatatttgggttaagttgatgtttaaggattttgtatttttaaatgttaaaacttggcataattatttttttaacactatttcttttgttaattggctagtctttcttttacaagttgtgcttagttaaattgccaccctaaaaaaaaaaaatattatactgccattggcccatgccctttaattatctcatgccacatggcaaggcaaggtaggtcacctatcattatctcttatcaaatgactaggtgaaatagaactatagaagagattttgtttttttccaaaacaaatagaataagatatttatacatgccaatatttaatcttttcaaataataataataataaataaagaagccaatatttaattgtcttcacctatagagtgagtcacttatttgagtaaaaactatcctatttattatttttattttgaaggaatatctcatttataatagtagaatgaggttgatatttatgttattttaagcttttaaattagtcagaataattaagctgtaatctgtcaaattacttgtgtcatcaatcaaaacaactacaccaaaactcaaat

SEQ ID NO: 217020 - DNA, 796 bp, Cannabis indica
ggaattttcaagacatatatccccaaactttgacatatgtattttatattgtgctttccaaactttcctttatatgtcaaataattactaaattagtgaaaacttttaatcacactaaattgtgatttattttattaatatatatttttagtcaacaatatatataagaatattaatttataaataggagaatttaaaaaaaatacttttcttttatacgtttgtaaagttttaaaattacaaaaatacattttatttagcaaaaagtaactaaaaaataacaagaaattaatctgaaccaaaaaataacctcataacaattaaaatacaactataattataaataaaaaagttcaaagaataaaaataaaaaaaaaaattgtaaagtaaacatttttttggtaatttttttgcaaacgttaattagtctattatgtaaatttttttataaatagtgttacaagtttttactttttttttttttaaggaaaggtttttacttttaatcataacgaatttgtaattaaaagtaagattttgtgtactgtactcattggtaaatctcaatggattaagtattacaatcttaaaacattctgaaaaattaaagataatattagtagttggtatatgtcaaaattcaccggaggtaacctaatttagcctataatttaagtgacagaacattttccgtaatgaaattaatcttgggaagaaaaaaagcaatctttttatataatttagcaacagtgtactacataagtaaatatagtacgtgatatcatatgcatgcata

SEQ ID NO: 217021 - DNA, 835 bp, Cannabis indica
ttgcatctaccgctcaaaaggcacaacactaaaaattgttgcagcagactcattcaacctcgtagtttgagcattcaactattgtgtaaggtacataactacattactaacaacccctttaatcgcaaagaatttgttattcccaattactaacaatgatttgatggcgagtcatcgaagaacaaacaacgaaacaaaacaaaattatatgctagacttaagtagagagtgagggtatatttggcaacccacttaaaaaataggtatattttaataaaaaataatatgagggtatttttaattaatagatacaaaaaaagagatatttttcaacttatcctttgtttaactggtttcaatttctcagtttaagtttgttatttaattcaaagaaaaaacaatggaaaagaaataaaagttaaaaaaataaaataaaattatattaaatttttttaatattttttaaacatttaaataattatttatataataaataaaattaatgacatggaccaatgaacaaaggacacgtagatactaacctggcacttaacggtcaggtacttacggaagttccacactagtgacgaaagatatttttaccaccaaaatacaatttaggtacttatttgctactcgacataaaacataaaacttaagtatttatactgcaaattactcatcttaaaatctaaaacaaaagctatatcagatacgacaaatgaaagcaaagtgtcttggctaatttcagtatggagatcgagtacagctaattagcttctcttttgacaaaaattggtagggtattgtgggtaaaaaaaactccaattctatt

SEQ ID NO: 217022 - DNA, 713 bp, Cannabis indica
tttcgccttcaaattcattcacagagccaaaaaatttcacaaaagaaatattaaacaaccaacagacaatcacagaagaatgtgaatacttacgaattcgaggtcgaagtgaggtggatgccactgtcaggcagcgacggtagtattgtgcttgacaacgtcaaaggaaaagtatgaggaagtctggtttccttaagaaattttccaatttggggctttgaagagaagggataaaaagtaaagtgtgagagatgataaagcaagcaatatttagagccattaactcacaatcatggctttttgatgaacctacggttcccttcaaattccaagaaacacacaataatctcacggttatgggaaagtgtaaataaacacattcatgaggggacgtttggaatactcgagtatccgactgacaccctatatttatggcttatctgggaatttaattttaagaaagtgaatcggcatcatcaaaacaggagcaaaaagcaagctgacgtgcaagtcgttcactatagggcgtgtcgcatgtccatacaaataggcgtgctctgcacaggcatgacatcacattacaaaccctctagaggtaatgaaagagtcggaatcatcgcaagtccaaactcacaaaattgtgaattgggacttggaggcaaatgttatccatatttcttaccaatatacatggcaagtggagaataggccac

SEQ ID NO: 217023 - DNA, 716 bp, Cannabis indica
tgctcttttgagacgccacttataaaaaaaattaattaattcggtttgatattattttttctgccaaaaaaattgagtttaagagaaacaagttggtacggttccaattaaagagcatataaaatcattcaagcgatccgatatcagaagaatttttgaaaataaatatctatataaaaataatttaaattaattttagaaaataataataataataattaaaaaataaaaattaataattttttaattattaatattattttattttttaaaataaatatattattaaaatattattataatatgtataaagttttaattgtatacaagcagtcctatagtaagagtatataccttacttcataataaccacaagatctaaaatcaacggttagaaaaaaagttccctaccggtagggaacttttgctaggtcctaccatagtattacccaaagaggagtgctaagaacaccctctatcacactctcttttgcgctctctatctaatttgatgacaaatgtcatcttttaattaatgtttagttttacttaataattagtcataatattatacttttattacaataataccattctaactaacttactcaaataacttttatttatttaagagaaaaaaatatttagacaaaaagccataataaaaaaataaaaaaaaaataagctaagttataaaatgttacatttatttagaa

SEQ ID NO: 217024 - DNA, 567 bp, Cannabis indica
tggggttcttagatctaaggacaaagatgatggcccgattggcccaatatcggcctaatgctagttcgatggtcaacttagacctaagggcaagagtcgatgggcctgatatctgcctgatgctagtctgatggtcatcgtggacctatggtcagggatgatgggctcgatagtaggcccgatggagtctgatgcttggcagatttatagctttctgagaatttttttttatcacttttctgttagatttttgttctaattttaattgtgtttttttaatgtctgtgacaggttcaactatttttgcattcgctatgtataatagtgtgtttcagaacttgaggatagagaatgggtttataactgagccaaaaatttaacattcgagattaatacgaatgtaacttactcatgtgttggttgatcttttgtacgaagaactcgatgttgacaaagtgtagtatgacttgaaattagaagtgaattacaagtacatgaaatgatgaaaggcataatgtatcaccctgaaattattggaaatgataagcgtgtaaggttatttttgtc

SEQ ID NO: 217025 - DNA, 1516 bp, Cannabis indica
gattttaggccgaggctgtgctgttttagtgaggttattttgagattcccataaaacataaaattgtgtggtattattttgaaatttccatgcatactgtgttatgtgatctcttcattatgggaagcaatttgatgaatactaattttttttatgcaagttcattaagttgcttgcatggctggctatttcttatgatttatgagttctgatgatacatttatataaagttacttcaggtttgacctaaaagatagcagatatatactatgttaatgcgtgtgacacaaatatatttccaccattgaatcatgcttgtgatttgatatatatgaataagaaatggtatctaatttatcagtacaaatgaaatacacagctcgtgacaaagatactcattataatttatattatatgacttgtgacttgtgagtccttccaaagcgaaatgaatatataacttacataactctagtaaccagttaccgattcaaaagctatcccaattactgtgtcatgcttttatatttgacaaattggtaattcattaccactaaaaaaaatctaaaatccagttactttgttatgttttcagaaataattggaaaaattaataacttgttattgttattgtgttttcaaatttgggcgaacgaataacaattattactctcaaacttcttatatctagttactatgtatgtttcttcagattttgggtaactagtaatgtttaccactgtgaaaattgtaaacactagtaacttgttactacattgttattattctttttcccaaattttatactaccactttgggaaaaaaaaattatttacaccacatattgaaatttcaaattttttacgaggtagaatttttttaaaaaatactgtgtttttttaaaaaaaaaatactgtgtaagttttatattatctgttgtgttaagtttttactgttattttacggttatgtctttagttgttctattgttgttttcagttgatctgtttgtgttccactgtaatttataaaatatagtattttagaaaaaatattgtgtgacagtattttagtaaaaacttaacccaaattctaatattttgtaagtttactaaaaaaagactcgtagcaggtccaacatatagaaagagcccaatatggtagtcagcttggcaccaacttttgatttgagatgtgtagaggatggaaatttattgggagtgattagtcaaaatgaaaggtatcaaagatgttagagactaaagatcatcatcctagtgtgttcaacatctagtaccgttatttttataaatattaataaaagtattcgtctaaattaaattcttactatctttgtatagtgcatctcatttatattaagtgcgaattttatatttttaatcaaatttaattctgtataataattcaaatttaatacaatacaatttagaatagtgcaaaaataaattaaattatttttaagattattactattttcacatactaaaaaaaaata

SEQ ID NO: 217026 - DNA, 692 bp, Cannabis indica
taaataagaaataattaagtcgatttagattgtgaattgtgattatattagttaattttaaataatttatattgactataaatattatttttactataaatagataaataaaataatatagttttattgtataaattataaatgtgagtcatcatcagtgggagataggagacattaataatgaattgaaattttttgatttaatcatataagatgctaaaataaatagacaataaaacttaataagtatgagttttattatatttcattgtaattaaaaataataatatgaataactatatatagtattaggaaagcattaagatatacatcactattttcttcttacatctatctatcttaataatactagtagtatattataatttatataatatacagtcaactctaatagagtcaaataatagtgtttatcatgttggtaatgtcaatcaagaaagcttagatttttctaaggttgtttttggaagatctttatcaaacaagagagtcaacttctatgaatgatataatagaaatggattaagtagtaatttcattatacatatatgatagggtttaggttcattactttttactaaaatttattttagatgatatggtcttagtaagggatagtgactttacgaaggttatgaggtagagtgttataattcagttgctactagcca

SEQ ID NO: 217027 - DNA, 913 bp, Cannabis indica
gtgcttctatcaaattttatttacttgctcacatataatttcgattatataaagaaaaccgaagctaaaaagaaaaaaatatatatatccttgagcactttaggcttcgattatttcaaaataaccgaagcctaagaattttcaaaattctaaatgaatttcagaccataataaaaccttaaagaaaccctaatatatactcagccgcctcactcataataaaacctaataaccctaaaattctctctctgactatctttctcgatgtcatgctcagtctaaccaccatcgaccctagcactcaccccaaccccgaaaaacctaacaccaccgatgccctaacccttttttttcgtgatctcactatttttctttttatgtttgcaggctttttgttttttgttttaataacacagttgtgtgtgttaatgttattctagactattattttttggtcaaaccaactcactttctctatttttttttatctatacatatatagttggaaaatttacatgtgcagccgttttttatatcttattatcaataatattgtacaacatttaattaataattttaccgtttgttttataccgtttttattttaattgatatactaagctgatacctttttctttctttctttctttcttttatatattttttttttcttttttcctttttgttttactttattttattttgttactagcattgtggaattaagtcatagatagatccagtttatccttaccatcttcccctctctttatctttttctctttctctctttctctctcttatcttaattttaaaagaatttatggtcatgttgttactcattgagcctaaaaaaaatattattgtaatctacgcttcaatataagcattttaaaatgcggtaaaatatata

SEQ ID NO: 217028 - DNA, 573 bp, Cannabis indica
caattcgattatagtatttagatgtaaagatataaagttaaagtaatataaacacagtcgaatttattgaaaataaattctagttgagtattgtttgggcaaacaaaagtaacttaattataatttgcaagtttacaacaatcagatcgtacaaattgcaaatttccttacaataagcaattataccccgtgcctagtggggaaaaaaaaggaggtaaaaaggatgccctacactaaaaaaatcaaataaaatatttataaataagtaattttatatttggaacgttgattgtgatctcattcatgcctgctattttctttgtaagttaattataaaaaaaatatattgtatatatatatatatatatatatatttgtcacttttgagttcaaacatatatatgatctttcaaaaaaaaaaagttgaaagcatgttattatacaaaatcaatataaagataaaagaaaactatagcttatatataatatatataaactacaaatggtttttgatcaaccaaaatgcttacctatatacagcaatatatttaaaaatattagagtatctgtaaa

SEQ ID NO: 217029 - DNA, 883 bp, Cannabis indica
gtagttttaaaacgaaagaagtttaaaaaggtaaaaaaaaaaaggtaagaaatgaaatcatacaaaatgtgaaatgaaaaagttatagtgtttaatttctttttatatttacgcttttacgtacaaggtcttatttagaaacgtacgagtagtatttattttgtacacaaacatggggtcaagaatgttttcccaagggaccctttgacacatggtgaagtacttttttaggtatacaccagcgaaaatcaagcagtttactttccaagtaactgtccttaaatttatatacttttagtttgaaatgattaagagggtcaatgatagcttatcaagtatgcatttgagcatgacacatggaaaaatcacttttaattctactgatcttccttcccacttttgactaacataactgaaataaattctgcccataatgtgtaagaaaaagcaactttaaacccccaacaaacacggttcttattactttattttatagctacaaatgtgaaagagtttcaacatagagcatcatcatctatcatctggacaccacttactatctctctttgtcaaagaagcattaataaagcttcaccacctccactatcagtctatcactatgccattagctattttgatataaatatatatttatcatcaaaacatagcaaaagtatgatcaccccattaatcaaaacaacaaaaggtataaaaattatttgttcaaattagaaaaacttaccacaaggaccccatgttgaatcaacactggctgcttcttcatgccaccaccaaccccagttctaccttctgaaattctttgcatatttagaatatagccatcttgggttgtcacctataaaaccaaaataaataaatatat

SEQ ID NO: 217030 - DNA, 686 bp, Cannabis indica
aaacagactcagcattgagttgccaagattttggaatgaaattttcagtggagaagaacccacagcgggcaacatcgccggagaagaaggtggtgttgaagatggtgccgaacgaggaggagatgacgaagatgctgtcagcgatagcgttggaggaggaagacccgctggtggtgtcgtttgggtgggtttcatcgctggtgccgaggtcgatcacgttgctggcggtgacggagccgaaccgaccgtggaagtcgtcgccggagacgaagaagagggagacgtggtcgctggaagagtcgcctaaggttcagccattgaagacaccatctcgaagagaagagctgcgaaatggggatcttcttttgaagaagacgatgatggggaggggcttcaatttactaaaacttaaacccaattatttaaggctcaagccctaccacaatcagcccagtccatttaattgggctctatatccggcccaccttctaagaaattctaaacccatctcttttccttttaattggattccatatgtcactcatataatatcacacgtgggcccaatttttcactcagcaaaggcatttaccatttgggatccacgccttagaccaaaagcaaattgttatgcacttccacttcttagcatcctcggcatttatggaagcgtcacaggcggtgat

SEQ ID NO: 217031 - DNA, 726 bp, Cannabis indica
caccaataatattttttagtaatgctcttttataaaatagcttgcctgaaatactaagttgtaaataattactaaagagaaaataattttttaaaataagatgaaagaaaaaaatcatataaataaaattccttatatataaatttataaatatatatatttatataacgcttctcaaattatatatgtgtttacttttgaattgaatttcagagacttggaaggtggaatgcagctacaaaccaccctcccaattcaaggacgtaccaaatcagtgttgtgtctctttatcctctgctcatggggtcaacacttcttgcccaatttgttcatgcagctgcccaaatcagaatcattcatgctctacgtacgtaatagccttattattttcaacttcttccattatagatatattgtatatttttataatgattcacttctttttttttattctttctaacaacatagaaaaaggcatgatagattagtgtcgaaaatagagtgtacgaaacacatgtgccctgtaaacatcaactggcaagtgataaatcatcaaagaaaggttcgagtgaccatatccaatctaaactacgccaaaagctatcaagattggatcatgttggctgagcatccagcttttgataactctacaacactccttcatgctaatcataagttcttatcccctaagtcttacagtaagtactttatatatatatatatata

SEQ ID NO: 217032 - DNA, 533 bp, Cannabis indica
cctaataatggtcacacacggtttctgtctccagccaatgcctaccttccaaaatcttactgtctctttccttcttaacacaatattgtagggaaatgttaaagggtacaaggagtacttactctccgtgtaaatatcgctattagtcaaactaagtattaaattttatatagtttaatataatagctttgagagagtatcgctaatcgcaacgcagaatgtcaaaaaggtgctaagcactactagtacctaatatcaatactctaatataatattattgtaagagaattactataaagtactactatacctagtatcctttttgatataatattgttattagtataacttaaaaaaataacttttaaagaatatcgataatcaattataagaagttaactataaaaggtattgtacactattagtatttaaaaaaaaaaaaaattaactattaggtactagcagtgcctaatatctttttatgtgtcgttatgtataattaagtattatgatttatataatttaatataata

SEQ ID NO: 217033 - DNA, 553 bp, Cannabis indica
aaatatataaaactaatgaaactacagtaatcgtcggagttgtcaccggtactggaataggcatcagagtttgctgacggtaccggaaaaagtcgacgaagtagctgtcggtgctgggaaagtcgcaggagttgctgctagtgccggaaaagtcatcagaattggtattgtcgccagaaaaatcaccaagaaattggtttcttcatcaagaaattagtttcttcatcaagtaaccagtttcttagtaattttgccaacaatttttccggtaacaaagccaatttcgacgatttttctggagtttgctgtcggtgctgaaaaagttactagagtagctgtcagtgtcggtaaagttgtcagagttgctactagcaccagaaaagtcgtcggaattggcattattgtttgaaaaatcattagaaaaatcatcaagaaattggtttcttcatcaagaaactagtttcttgatatttttttcgacgactatgccaattccgacaacttttccgaagtttgctgtcagtttcttgatattattttatatttttaataa

SEQ ID NO: 217034 - DNA, 672 bp, Cannabis indica
taatcaaatcaacggaataaaaaaaattgttttattgattctgaaatttttccatattaacttaattatcctgatattcctttgggtatgcatgcttcaagtctcagctactttgaataagagcatgatctttttttttttgaatgaagcatgatctaattcctgtcgcaccatgacttcattgaacttcttttttaggatctctagtccataggtagagttaggggtgtgcagaaagtcatccgttccaattccaatccaatccaatccaataaaatcggatatccaatcataactggatcggatcggatcggatgcaaattttaaaaatccaattggatcggatcggatgttggatgagacatccgatccaatggataaccgaaccaatccaatccaatatcatccaatgtccatccaataatatttaatatttataattttatatatttaattattttatttttaaaaaatatattaattatttataaattttactgtgcacctgcacacatataggagctgtttaactcctaaagctgtacaagcacttatatgtactcaaaattggattccacaaacagcaaaaattgatgttgatgatctcaaaattgaagaagtggaagcattagaagctggtaatatgcatctacattttaactttattttatt

SEQ ID NO: 217035 - DNA, 800 bp, Cannabis indica
aagtgactactgtgcggttagacttctctgatttcttctgtggcgaggctgatgcttattgtttggctctaaatttgtgactaagggatgcaaatttgtaattgtagagaacgactctagagtggttatcaactctctcaatggattgaagttaggtgggagattaagaattactctaatcattgtaaaagaactttcttttttgttggttgtttattttcaagtactgtcatgatatgtaattttttgacttataatgtgataaagtgggcattttcccacgatcaatatgcttggttgaatgtttcttctatacctgtaaacatcttttgtaataaccgtgaggtctaatttcatgtaaaaaaaattatttaaaaaaaaatataaagttccaaaaaaaaaaaaaagtttttgttaaaaaaaaaagaccaagtttaatatcaaaatatctaatttttttaacaaaaggcaaaacattttttgtaatgaccattttatgtaatgacagatcgtttaatgtaaactttttattgagggctctttttaatttttacacctaaaaatagtttttttttttgtttttatacggaattctacataaaaattcttattgcaagtaatagagcaaaatccgcaactcacataaaaatcacttgagaaacgaacttagaaacctaaagaggaaatttaaaaaaaaaataaaaaaaataatatatagggtatttaaaatgaaaaagaaaaaaaaagtttttgttaaaaaaaaaaaaaaagaaaagtttaatggccaaaatacctaatat

SEQ ID NO: 217036 - DNA, 525 bp, Cannabis indica
ttttattttatacgcatgtaaaataaattatttgaatccgcttttattatattgtaaattattccgaatttctcaaaattttgtaggatatcttaaataactataacgtaaataaatataaaaaaattaaaataatttcttttttctaaatgccggataagtaagaatacatcaattagtgcgctcctttttaagagagtgtattataaaatcactttattataattagaattttttttttagttttttttttacagtgccttatttcttagacaatttatgactacgagtctatgtgcattttggagtgtagggatgagaaaattaatggaaattggtaaatggctttaaagtcccactcatttttcacaacctcctattgtaccattaactgagatagatgagtcccataattctttttagagccattgatttcactattgatctaattactacgtactataatttatatattgttgttttttataaactggtacgatcgataaaccattattgttattttgg

SEQ ID NO: 217037 - DNA, 1164 bp, Cannabis indica
caataaaagaaaaaaagaaaaaaaattcaaaaaaattcaaaaaattaaaaaaaaacagtaatatgttcagtatatccatttgtaaatagataggcagaccggttttaaaccgtcgcttataagggttcaattaaaaaattacattttataaaaaaaacgtcgcctatttgtttactacaattttaaaccgttgggaatactaaatttttcccgacgattttaaatagttacttaatttttttagcgacggtcccgaaaaaaattgttttaggaccatcgcgaattctgatatttgtagtagtgttatgactaactaaatttttttatgaaattaaaatgggaattaaaataaaaaagcttttttaattaataaatatattactgagtaacaaagtaatacttaaaaaagttatatttattatgagctaaaatttggctcatactatcttttgtgctaaatttaacacaacttttaacatacactaaatttagcacacattttacacaattattagagcttacttttatcaaaatattctaaaaataataatacactacaataccattaaaaaataaactttattttaatagaaatgtttaaaaatatgtcaactaaaacattaaatattactgaagtatataaaaaactataaggtaaatctacatctataaagggggtgttttggtaaactttctatctctttcggcatatagtagagtttttaagtcaacatatttttcataatcgtgtatgttacagttatataggactatttgtaaatttttaaatttttttgtgtaatttacaatgccaaaatttcttctttaaatatgagattgttttacaatacatagaaacaacaaaaaaattacaaaaatacggttgtacggaatgttaaatatttttatgatttttataattttgtttataaaaaatatggtcttctgatgtacttttatgttgtacttttgttaatttattgttatttgtatgctatttttttgttattttgatgttatttaaatgttattttctattatttttatgtagtttttttgttgtttttatagaacactattaaaatattaaaaaatcattgaaatgtaaaaatgtaaatttttttttaccaaaaagtaatagtttatgtaattattcctttaaat

SEQ ID NO: 217038 - DNA, 1212 bp, Cannabis indica
cagctttttttatttttggcagacaaaatgtgagctgaccaatcatatcatcgttattcaaattgttttcttttattatgtatagaaattattaccctttttttattcgaaaagaattattaccatttattactttcgtattactattattattattaatactaaatgtatcactttgaattttctttgttagaagaaaaaaaaaaaaaaaaaagagaaggaagagtgatcacccaaaaactaccgaacatcttgactaattaatggtttcatgtgattcaattacaaccgacccaaattttaaaaatctaattagaacatatcgttgttggttgttggaagacacatctaatttaataaataattaaattaaataatttaattattatctaattatatttataaatttttaaaatatatatttatttatttattttattaaaaaaatattaattaattttatttaaagaattactttatatactatttttaattttttttttctatttttatagtgtgaattgggttgttatgtaaatttgagttgccatttaatttacttaattaatttataatgtgtaaataaaaaaaaagctcattttatttttaatatgcacctacactgctacacatgtgataaaaaaataataaataaaccatcaatataaaatatcacatattacatatttattaattttatgtatttgtatcttattattataataatgagaattatgttttaaattatatttatatacattttttctttttagtgaaattcatccaaaatgatagaccaaaaagattgagtgtattaaatctagttcaatagaaaaactagttaatgcatttaatagtcgaaaccgatacaatctaatgtatccatcgaatcagttgacaaaatttaatatccaataaatacttgtgctaaataattaaattggatcgattaaattggatccaaatctattagatgtgatctaatgaatacattatttttatttttttaattgaaataaataattataaaagaattattttgttttttaatcaatacttttattatttgttttgaaaatttatgtaatagaccccctaaatggtagttcgagtagaccatttatctgtttcggcatttataagagctttttagtctaattttcttttcataatcatatatgttatagctatttaagactacttgtaaattta

SEQ ID NO: 217039 - DNA, 732 bp, Cannabis indica
atgtataaaattttaattgtattcaagcagtcctagagtaagagtatataccttacatcataataaccacaagttctaaaatcaatggtaaaaaaaaaaagttccccaccggtaagaaacttttgttaggtgctactataccattacctttagattatactttttaaaattaataacattcaaattcttatttaattatagttattttttaaaaaattctaattagtgagtaatacctatttaaaaataatttatatatataaatatatagaacacttctcattgatacttattaaataaatttaactataaatattaattttaaaaatattaaaacattagatttttatccaatagcgaataataaaaataaatttaaatttcgatggttaatttgactatttaattaaaaaactatcaaaaaaatatcaaaaaaaatatttatttttacactataaaaaatatgtttatataaaaaaaatgtataagtgaaactcaactttttcttattttttttttatttttggcaaattttttcattaaaattatcttttcagctgattgaacaacttaaatttatataatgtcgaaatgagaaaattttctaattagataaaaaaattaaaaataacaattttaaatactactcattcgagagtgcatatatataaatttatgtatatattatgatagggcactaatttttttttgggaaattactccatatactat

SEQ ID NO: 217040 - DNA, 596 bp, Cannabis indica
tcaatttttgcttccacattgtatttgggtaacttagatttataggtgttttgggattttttaactacaggggatgtagacttagagtgtgtgacagccatgaaaaagaaaactaaaatggaaatttataggagaaaatgcacaacggttagaaggaaattttttttagagagaaactgggtttcaaacaaaaaatgaaaattgatcaacagcccacaactaaaaaagatgctcaaaaccaaccacactcaaacagatttaaatttcaaaaactaaaaaatgaatgaagaaaaagaagagaatatcaatggcgattacaaataataatatgaagagttttttatttatttgatattatttttttaaaaaaataaaataaaaactatcataaactgaccatcaacttcaaatcagcactttctctataagaaaataattaataaaaaaaataataaaaaaaaaccatgcaacaacacacatgatgatatggggcaaataaaaagattcatacggtttataaaacacactataaaaacggtataataccgtatattataaaagtaaaatttactgtatgacagtataaaagtaaaaaa

SEQ ID NO: 217041 - DNA, 1045 bp, Cannabis indica
actatttctaggaaatgtatatattttgatgagttttaagtaatcatatatatctttcaagtttcaaactcatttacttctacgcgtttagttatatagatgtcaagtaatgatgagattaatttctagaaaggatataaattaataaaaaataatacaccaatctttatatgtgaagcataattagcacattaatatgtatagtgagaaatatatatataattagaaaattcaaataagaattatatattataaattatacgtatattaaaacctatgaattggtaaaccaaaatacagaatattattttaagaaaaccgtattcgatttgtatgttaataagtttataatttaatttaaaatattctaaagtaaaaaaggttatataatatacgtaagaaataacgtatataatttcaaaataaattattaccataatgatcctatacgtaaaaaaacatgggaattaatataaactaataattaaagcctagctagttaaatatataaaagaataccatcatagctcatccatgtaaagaatagttctccaattcaataagaaaaatgttaaaggagtatcttatactagaacgcattacaagagatgatatattgttattagtataaattaatatagagttctgtataatttgatttaataaataacataagaaattgctaaccaatcataacgcgccacgtcgttatggtgtgttggacaccatatggtgcctagagaaattatgtgtcaatatactcagtttaactaagtatcatgtcctatataattaaagagaaatgctaaaggacaccagtggtgcctgcaccttcctatgtgtcaatatcgctattggtacaactaagtatcgggtcccatataatttaatgtaatagtttttagggagtatcgctagccaatcgcaacgcgacatgtcgcaaagggtgcgaggcaccactgggtgcctaatagcaatgctcataattaaatgtaatatatttagaagtatcgtctagccaatcttaaggcgactgtatcgtaga

SEQ ID NO: 217042 - DNA, 1120 bp, Cannabis indica
ataacaaaatagaaaaacaccctaacaacaacaacctgattccaataagctactaatatagtcaagtattaaagaagtatgaagtatactaattaaactttgaaacctattcaactatcaataattatgagttaatgatcttctaaaaaaatttaaacataaattaatttttttatatgataaaatatactatattattttaattattttggaatatttgtttattttattttacaagtatagttaattatatttttgacagcataaattatatttaaaatataattttctaactcttatgccataaatatataaatgtttgtcttgttctatacatataaatacatatatatatttttttaaaaaatatacttcttattaattattaatatttttttaataaaaataaaaatatcttattaatgattattaatgttttattttattttattttttttgtgaataattttataattttttttattccttttactgaaaagaaaaagagatcatgtggtgcaaatctcttcccaacccttatgatcattttttacaatctcgggaaccacgtgtcagctataggagccttatatatacatcaacctactttaattgggtcatcgatagtcactttaagggttcacatcacacagatggcaccatctccagtaaagaccgagcctagcttgaatccctttaatcccttacaagaggggggctggagtggatttcgaacctttaatccaagcaaggaaatatgtcaataaaggaaattcctaccactacaccacacaacacgtactaataatcttataattattaatgttgactagctaatagatatacaactaatgcatcgtttaagaaaaataaaattgttattgaatacttcttagagttagtactctatgattaattaacaatattctcaaaaattatcttacattatataaaatttaatgggatatgattttatcccgtgatgtactttcatggaatatattccgtggtacattagatgggtctcagggtacattaaatgagtgttagagtacgtttctactttttaaccctaattatccataaatcaatctcagccgtcagatcaaataactctctc

SEQ ID NO: 217043 - DNA, 677 bp, Cannabis indica
ttaccacacgtattaagaaaaaataattacttgttcaataaaatattttaaacttaatttttacattgtaaattatttgaatttttttaaaaatttacaagtaactgtatataatttcaacatatataattataaaaaataattaaacttaataacttgggtaaatgctcaaagtttagtgaaatacctttttaaaatggtatactataaatttattttttttaatcttcaatctattttttaaagtgatatttcagttaatcaaagaaaagaaataaaaaataataaaaaaatgtactatagatttatgtattttttttaatttattttgtgaaatgatatattatttaatcaaagaaaagaaaaaagaaaaataatactcgtcattagtgtaaaatttctctaaaaataaaaaaatcattagggtaaaaaagaattattttttttgaaatgaaatataaaattattaaaaatatttaaataaatgattgctacaatatttatcttttagaaggaataattgtttaaatatatattattgataaaaaaattgtttatttataatagcccaataaatatcgaggaattaaaaagactagaaagaaaggggtaattactgataagaattaaacttaaaaagttgatttttttttcttctaaaaacataaaaagagatt

SEQ ID NO: 217044 - DNA, 860 bp, Cannabis indica
  modified_base (830)..(830): a, c, t, g, unknown or other
actatttcaatgattgtttatgtaccaaaccatgttccctagactttgatatctaccaaatcttgccattcgaactttgacatgtactaaattatgttccctgaactttcatccaggttagactttttttactaaaattagaaaaaagtccttaaatccaacaatctcaatagttcagggggcactttcaatgacctaaaaagttcaaggggcaaaaatcctaatacttgtatttttgagcaaaaagtttttatgattttttatgtgaataatttgattagagttgctcttaaaacgagattattacttgttgataagaggaatctcttttagatggactaacggatttttaattttgtttgtagcatgcaagtctgttttttgtgttttgtggatgttgatcttcgtaatatttattctgttttgattaataaattttctttttgattttttttttaaatgtaatagtttctaataccattatgaaattattagccgttaataatttttagtatgatattttattttagtgctaggttatataggtttcctttagtattcctttaaaagtattaaacattattattaaacactatattcaaaactgtattaggtaacatttaatgaataatttttttattgttttttagtttttccttagtaaagtgtttttgtaattttaaatattacaagttatatttttgtaattaaaaattttaagttcataaaatatatataaaaaaaatatttttaataatttcccatctattattgtgggtatgcaataaatgtgtgcatgtaaaacgtaaatattttatatacacatgatntaatgaatgtatttccattaaatatatatt

SEQ ID NO: 217045 - DNA, 686 bp, Cannabis indica
cagagtaacggatccgtttacccggtttaaccgggtcgggttcgggtttgagttttccttattggagaatcggaaactgtcggcgtcgagaccagccatgagttcccaggagttgattacttccgggtcggtccgcattgggctcgggtcggcccagagtgatttgggctctggcggaagtgggctggggtgggttgtggaacccattttgaaacggagtggtggggtggtcggagtagaggaatgatgacgtggcggtggttgttgtggtgggtccagagtgagaagaccgtaagttgaggaagtgagtgagacgatgtggtgactgagtgcagagcttccgagttgagtgaactcgtcttcatggtttaacagattcgaagaaacacaacccattttttcgatttttgaaactctgaaaaaaaaaaatacacagaaaatgaatcagtttttgagtttgagtttgaaaaagagagagagaaagaagagagagagagtgagattcaaataaagtaaggacaaaaaggggtttattaattacaatgagaagaacttttttttaaaaaaaaaaaattgaaacacattatttcaatattactttaattcttggatttattaaaattaattattttatttatttggaagtgtaagaaagaagaattggataagatattattaagtcataa

SEQ ID NO: 217046 - DNA, 526 bp, Cannabis indica
ttattatgaccctgcatgagtcccagcgtgtcacagagatttcgtaatttagtggcatctccgatagtcgtctgggcgttggttccaggcgaaatagttatgttatgaatgccctggttgggtgcggaactgttattcccagtctcttgcatatcaggcgcaatttcatctataggaattgtttcaccattccccacgttccccggctctctaggattaacagcaggcggaaccctcgtgtttcttgggttctgcgatgcaggatccagcgtctgtgaattttctagatcagtcaggcctctacgagtttgcaccatcgtattggcgataggatgttaaataaagagcgattcctgatccttctctcaattaaagcaccaaaatgttgacctcgcttttagccagcgacaacgagtctattttataagcgataaatgatttataataacaaatatatgataaagcaataaaaagacagaggaattttatagaggttctgctctgagtagttcggtaataacctaat

SEQ ID NO: 217047 - DNA, 1068 bp, Cannabis indica
ttcatccgcctccatcttacagtttccaatggcaaaatagaaggtgaaaagatagtttttaatgcaaaaatggcagaaacttaatgagaaatgactgtcggagaagatgagaaggaagaaatgataccaaatgcaataaatgttccagataaaacaaatgggattggagagggaaacacccagagactcagagaaattaatacccatattaattactaagagacacctaatcaacagacattgagaaggaaagccaccacatgaacaatatgggtggaccaaaatccccatatcagggaccaaaaacacgatcaaaagagaagagggttctcatacctaccagagtgttccagagagaaaaagtctgaaattcatatacatacatgtattctgggattgcactctctactattatcaacttataaattaacttttttttaaaatatattaatatgtatagaacaatttaaaatttattgatagagatgatattaattaacaatttttgactattttctatcaaaagaaatataatttaattaaaaaaaatatgttaatttattattatatatgtaaccaatgcgaaattaatttataaaaatataaaactaaattaacatataaattaaaattttatattgtatactttatttaaaattaaaactgttttcaaattcaattatattaattacgtattctgatactgttatattttcaaattctataccaatcacagatttaatatcttaaaattcaaaaacaatttacagaatcaatcacatttttaaaaacatgttttcaatcacaaaattcaaattttcatttctgaattacaatttttgaaaacacagttttcaaatcacaaaccaatcagcccctatattctttattttctctttcgatatgtaattaatttgactgccgctatttatgtaattgttgtcatatgtaagtgcataactgtaactatcccttagaggaaattacacttattatggaattttaaaagttcttttgataaatatggcacatttaagtttgaccaatttatatggtatttttttgttt

SEQ ID NO: 217048 - DNA, 760 bp, Cannabis indica
atcggtactaccttagtttttttttctttttatgttttagcaacttaaaaagatgaaaatttgagagggtattttgaattttagataaagtggtcatatattttacaataatgatatgtattagtttagaaataaaatattaggtatatgtaagtatagaaaatcaaatttcccttgagaaatttaatggcaatgtaacattgttttgtggtggtacaaaattttacaaggcctgtaaatacaaaaaaaaaacgaacattttgtgaattatatattaaaatttaataaacacataaatataaatatagtgtttatacataaggccagatttagttacagtttcattttttaaaaatggataaatactattttggatcctgtattttgcaaaaattatcaattagactctctgttttgttaaatgataaaatgaaccctgtattttccaaaatggtataaataggaccttgaacaaatttttttatcaaaataaaatttaataataatctgatctaaatgtgttatgacaaaactgtttacattttctatatctgttcgtattaagaattatcttcaagttggttatattaaaaaaaattgttgaaaattaagctcagtgtcctatttttaccattttggaatatacaatattcattttttcatttaacaaaatagaatgtctaatttataacttttacaaaatataggatccaaaatagtatttaccttttaaaaatacatttctgaataacttataaac

SEQ ID NO: 217049 - DNA, 526 bp, Cannabis indica
agtaagccttataaaaaaatagtaacagaattagaaaaagagtttgaaattaaaaaagtaagaaacgaaaagttgatgaagcattcactaattaattagcattattggtacgattcctaatatacacgcagtactgataagctccaagggttagcccactgttctgtttgggacaattcaaaaccacttttggaataaactcacaacactgatcgctaattactgggcaatctttgtttttataactcgacatctctgcataacatgatgtaaagttacaattattaaagccattttgaggaacatcagtacttggaatacaacgcgaattatcatgtggtggtggtggtggtggtggtggtggttgcgaaggccgagatgagctgggtggcgctggtgttggaagagcccgagaaggcggtggagttgaattttgaacacaagaatttttgctttgcatgaacaacccatatggtagtggaggagggcaaccgctattagccaaatgaagaatcttgttgcaaca

SEQ ID NO: 217050 - DNA, 726 bp, Cannabis indica
ttggaggagggagatttgaacttgtgacttcttctttgtgaagagtgtctatgcctatgatcacatttttttagaaaaccaattgaatataatgagtatgttaaaattgtaaaaaattatgtttgtttctatgtaatgtcaacatggtggttatttataaaaaattataaaattgtaccgtagttattttttttacactatttttttttttttttttaaatttagtagatttacttttctatagtgaaaattgctttttgattatgtataataaacattagaattgaggaaaaggtggacaaacctattgtgaagataaacattctcagctattaataagtaaaataaaataaaataaagattctacgcattctctttttaacattttcattctagagcatttaattttcttcatactcaaattactatgttcacatgtgacttatacataaaaataatactataaaataatttaaaagtaataatattttgtaaatacaattaattcttattgaagtgagaagattatatgatagctttctgtattgtaaagttacgaataagaaagtgtcttacattattaaacttttggagagctttgctaatgcatcagggcagcgggtgaactttgagaagtccactgttttctacagcaataacactactcaaacaatgaggcatgctatttgtcaaaggttgggtattcatgaagcggatgagcgtagc

SEQ ID NO: 217051 - DNA, 727 bp, Cannabis indica
ctgtatgttaggcttcttttggttgtaataaagtgtgaggagggagcaggaaagaggtaatgggaattattttgatgtgtttgggagacaccaggctctctaattcctggtagggctctatcttgctaattgtagtttctttttactgaattaatacaattactcttgctggagataacttgaactccagtagagatttctcttcacctctctgttactgttttattgagttgtgaattcaaatggaattttcaaactctagggatcaataatacacataatttggtattatacacaaaagtttaaagtagctaacgcctaacctgaaaagctgaaacactttttatggtttagaaaccgaaaaaaaaaaactaatgttcaaaaacccaaggaaacatttctgatagtttaaggacaaatacggctactaaacaaagtaacccaatgaaaacagaagtttctatatcgagaagaatgaaaaaccaataaaactagttaagaaatttatggggccttaatatcagaacaagaaataagagaaacataagagaatgttattatcatacagttaagcctattttcatgattgtcttatgtgtcagcgtattggaaaacttactgtaacatttgcacctatatctcgttgattaatgtaatttccggccattcaatctatcatggcttcctccaagataaggtatcaatcgcttcacgtcactcatgcttt

SEQ ID NO: 217052 - DNA, 792 bp, Cannabis indica
aattggttggttgtgttgtgccttcatttattttatataactttcatggaagggcatacacaaagtgacttgtacaaaaatatactacacattagtatagcactcgtaaatattaaattttacacaatttaatttaataattattataaaatattgataactatttattataaggtgctatttttatcatgatgtcaaacactattagtgcctaataatttttttaaaaaaatatgttaattaagcatattgctccttcgttaagttttatgggaaaactccataaaatattcccatacacttaatatgatgatgccacattatgacaggccgacccaagtattgagcagtttagaccattgtacaaagttttagttttttttttttttaaaaaaaaaaattaattttatttctatcatacatacataaataaaaagtttattttatttataactgaaagcttaaaatggatctttaaaaaaaagttggtaataaaattgtaatgcacatttaatttttttttaaaaaaaattgtaatgcacacaaattaaaaatatgtttttaagaaaaaaaaaaaaaaaggtttaagaacgtatcttaaaaaggttggtaatgtgcacgaattttgttttttttttttttaattaaatgttttatttttaaattgttgctgaagacccccaaaatatttgggccactcttgtaacaacttgttaattctatttgaacttattttttgtcttgtgcaatggggtaaattttttgtttttaatttttctaaaaaattaaaag

SEQ ID NO: 217053 - DNA, 565 bp, Cannabis indica
gattggggagcttgtcttgatactcgaagatccatttcaggatattctatctttctcgacccatccctcatttcatggaaatccaaaaaacaaactactgtctctcgttccttagctgaggcagaataatagggccatggccaatgcaacctgtgagttaacttggttacaatccatcatcaaagacttcaacatccaacaccaacttccctccactttattctgtgacaatacagccgccatccacatagcagagaatccagtttatcatgagcgaaccaaacatgttgaaatagactgccacattgtaagagagaagatcaccaaaggctgcatcaaaaatgaatcatgtctcttcttcagcaaacttagccgacatcctaactaagccacttttcccgcatcaattcaagaccattgtgtccaagatgggtctacaaaacttgtacactccatcttgaaggggcctatcaagaattagttatagaaacagttagtctctattgtcggttatgttagttagaatgtgtcagtcctgttagttggttctgttatctacctacat

SEQ ID NO: 217054 - DNA, 797 bp, Cannabis indica
aaaataacttaaaaagatagaccactctaccaatagaccaaaaaaaaaatgaggttgcattaaatttattatttgagtatgtatttgtaatcttttttgctgattcatatcacgagtttatttagtgattagacatgaaaattaataatatattattcatatacctaatgcagattagattggttttatgccccaaaaatatgcaatatggatccgcccaacctaatactcgttaaataatacaaaactacaaacataaaaaatgagaggggtttttttatttttaaattttaaaacagtttttttttttagtttttttttatatttttacagagttttacataataaattcatgtagcaactcacataaaaattataggaaaaattcaaaccttaaattataaaaacatattaaaaataatatataagttaatttctcaaaaaaaagtgctaattacaacctcgaaattacatgataaaatactacattaatataaacaaaaaaaaaaaaaaaatcaaccatatcacgaaaagtgggttacttttaaagatcaacaataaatcgttaaaatttaagatgaagtgttaatgggtgactcaattttcacacactttgatatggataaaataaaaagtatgataatgaagcactacaaaataccgattccaacccactcaccataacaaaattccaaactgtctacgcgtgcatgtgcttagaagaatatagatcaattatcacaccttttattcttctataaaataaacaagtattatcaattttaaagtatattaat

SEQ ID NO: 217055 - DNA, 404 bp, Cannabis indica
atataatccctttttaacaatatttttactttagctctttagttgagattgctcttaaattaattacaattaaattttcaaaaaaaatctgttttcttttttgtgttctctctctttcttactcattttcaccaatattataggacgtacacttttaaattaaattaaaattaaattcccaaaaagaacaatttttttacttcttgcttactctcttttaaccaatattgtaggacctatctataccccatcaaaaaaaaaaagtaaggaagattaagtgacaagctgcacattaggagtggagccagagctaaagagttggggggggcaatatcagacagtgcaatatacaataaatttaaatttaggtgactttaataccttttaaggatgtgtgtcaatta

SEQ ID NO: 217056 - DNA, 516 bp, Cannabis indica
gattatacttctatattttttcaactatcgtttatttatttcttattttaagtttatagtcgtggctttagtccttccttgtaaatttcattattgtgatactgaggctggttggctgcctgtttagaggtcacttttggatttttgaagctctaaaagcattttaatgcttggttagccaagaattatagattttagcttcaacatatgcgcctttatatgaagctagctttgagagattcaattacttagtaaagggtaaattccggcaataatacccaatatttaaagaatgtaatagataaaaatttaggtggcgtttggttggaagtagtgaaatagaatggaataaaaaaaagggaaatttgattttttatgcttacatttggttaaaattttttttctaaacaaataataactaatatttgtaaaatatgacaatttttatgatatccctaaaatacccccatttacatcaccccatttacaccatcggaccgcccatcgggccaccca

SEQ ID NO: 217057 - DNA, 603 bp, Cannabis indica
agcacattttagtagaaaataatggaaactgacgagcttagttttacaaggcaaaaacttaattgcaaatttttacgactttggaagttgaacatgaaagttttagattttgttcacagattttcagaacttcttgaattgtccaattttcgagttgtattaaaaaagttaatgggcaaagcactaatctgaacacgtgacagaaatttttcagcagcaaatgatggctgttgcgagcctcgaccttcgccgcgacgagagcatgatttttaaattttttctaagttttttttttaaattcataggatttttaaggggtgtttataggacttttaggattttatttatagggacttttcgactacgttttagagagaaagacgaagaagaagaagaagaatgagaagaagaaaatgaagaagaagatcacgtcatcaattgttcatcactattgtttctctttcttctcctaaatctcttactttttattatgatttttattataatgactagtttggagtagtatctttttagttaagagttatttcaacccgaaaacataaattattgatttgtgataatgaatgttattcttgatttctc

SEQ ID NO: 217058 - DNA, 715 bp, Cannabis indica
tgagaaatagctaaaaagagacatcattagtgcctagacaacatccaaaagtgtaatatacattattagtacaactaactatggagtctcatataacttatagtaataaatttaaaaaaatattgaaatttaactaacaccaataacacgaagtttttacactacatattgaaattttctaacttttttatttatttactttggaattagaatttttttttaaaaatactatgtaagttttatattgtgtactgtgttaagtttttacagttattttttagcttgttttattgttattttaattgttttgtttgttattttataaaaaaaaaattgtgtgacaataaaatttgtaaacttttacctaaaatctaatatttttataaaaacctcaaataagaatggtgttagatgaatatttatacacaacagtagatgcttagctggatctcacaattgtctaacttgactgtgtatgcatgctttcttatcttaacataatctaagcttaatgggaaaattttcaaacattttgatgtgtttacttttaattatttcaacttatatatcaaaacgtctagacaaacaaaaatcaattaaaataacaatttagtgaaacttaaacatcaaaaacagcacaccccatattccaataatagatatatacaaatattaatattattgttatgcgtttctatagtgaatgcattatttc

SEQ ID NO: 217059 - DNA, 517 bp, Cannabis indica
gacctagacacggacacgggactgggatccggacacgggaccgagacccaagacccgagaccaggactcgaacttgggacctgagacccagatccggactcgagacccagacctgacccatctaaccccgatattttaaatatcacaaatgattttcccactaaaataaaggttctaaaccaaccccgtgtgactctaatggtcaaactgtcgtattttctatcgttaccgagcaaaaatcacaaaaatattatatttcacttatgtcatatataatacacttagagtttaatgaaatcttcgaaattaaaaaattaatcctaatgcatatttcttgaaaataggacataccatgtaaattaatcacatacaatcataaaatataaataattaatgttaattgtctctctaatccatattcttagtacgcggtcagtacactttccttcatcctgatccagcgctcctctttctccccttacaattgagttgatatcattagagatgggattcgatt

SEQ ID NO: 217060 - DNA, 795 bp, Cannabis indica
tcgtcccgagactgaaatctccaagtcacaccatcttgacatgttttagttttgattttaggtccccaagaaggattttagcaagttatttacccatttatatattataagtcattgatacatacaagttcatccaagcgtaaaaataattatatttttagtgtaagattatatgctcaaataaagggcaacactgaaagtgtatcttaatcacgaagtaaaataacttttcagatctaatgtaatataaataatgatcctaatatttcaagctatacttatttatttatatagtaacatcatcaataattgaagactaataccaatttttataatttatttctctgaaaaagattaaatatattgaaagtatttttaataaattgtcaactaagtgttggatactacaaatttttgttgatcaaaagaagatgaaagactcaaagatcgatataagaatttaatatatattctattgaagaaacaaaacaagaagaaattgctaaatttttatcttaaattataaattacatataattaatatttaaaaattataataaaaaacttattctatgtaatattttttaaatgggtaaacatcttatcttctaattttttcaataaaatttaaataatatttctattattaaattaaatattttagataaaaaaataaaaaaaaaaaaaaaactaaaaagaaaatacaacgtgcctttgcacgtagttgccgcctagtataatcataaaaatatttaaaattttgtactgatgtatttttatatttttttaatatta

SEQ ID NO: 217061 - DNA, 567 bp, Cannabis indica
atttctaattgaagaaaagaaagaatatgctaatgttatgcaccactaggatgaatgaattattatgagtggtagtattgttgtttcaccaccatgaatggtcactttttttattttttttttctaattaaatatgcttattggttcatacactataaaatttttttataatgttttacaaataatttaattgttattgtgtatacttgtatacatatattagtaaaacctcaaagcgaataaaaatatatcacacataagtgtacaaattagttatctagttgatatttaatagtgagattttaactatcactttaaatttaaaaaaaaaaaaaaaatgaaagttaaaaaaaattttgtcacatacaggcactaaaaaaaaatctcaaattaatagtataaaattaaaacaataaatagattttgctgtgactcttttatttttaatttcttttttctttttcctccaaaaggataatttcaaaacgtattgccgtgttggcaaagataaaacctctagaacaaatgaacgtgaggtgtttatttcatattgtcatcaattatgca

SEQ ID NO: 217062 - DNA, 559 bp, Cannabis indica
  modified_base (535)..(535): a, c, t, g, unknown or other
tatatgattacttcctaagatcccactcgatcacattgtatttatacatgaatgaggtggtatttttttttcatcgaatatcgacctttatcttcttcccatatacctaactcattgttgtaattatatataatatctcttctccaatttgtttatactatttttattaatgtaataaattaatattgcatgtttaaaagatgacacgtagttaagaaattaaaaagagtgtattaattatctctaaaataatagtactttattgctatattttagtaattttgagaaaaataattctctaacaatatatgtattatgtactaaattttgtgttaaagttgataaaataaaaattattattttaaatttagcacacaattataaatatagttaatttttaaaattataaatctgtaattaattattaatgaatgatttgaatacacttttttttttaattaatttgcaatattttattattactttttttattttatttttaaaatttaatttatattttaaaatattattatanacttgggcatcagatcaatgatac

SEQ ID NO: 217063 - DNA, 509 bp, Cannabis indica
aatcatagtgtggaagattgtgaagaatccagattcaacagaaggacaatcgggctcagatcttggtgatactctgcgacataaaaaatacaagggttagagatctgagtggaaggagaaaatatattccacttcaaccactctaaggtttctcatactttatatgtgtttatttcatatcattttagaagttcatatttcagatgttaaataacatacttgttagtaaatctaagattgtggtaaaataaatccaacaaataatatattatatgttatgtgcttttcttactgagtctgttgacccacaaatactgctttcaggtgtaggtaaagggaaggccaaaactgaacaacagtgagtccagtgctcagggattatttttaaagagttcgatctcgggacgacttgagcttcattttgtagtcactgtgcgacatgtctgaaaaattattttgattatgaatataaagttttaaaatgggatctaagtttctgaatgaaagtg

SEQ ID NO: 217064 - DNA, 644 bp, Cannabis indica
gccaaatagttaaaaataaataatcttatgactttaaaaataaaacaaaactaattaccctttaaatattacatttagatatatgattatctaaattataattaaatattattatggtaaaaacgtaatataattaaatattaatatttaataataatgatcaaaatatatagttagtgtgatttttcttaagacgatttaattcttttttttaattattgtatgttgcaaattgaattaaaaatttgtactatttttaaaacaaaaaaaaatattataatttttataattgtaatatgatttaaaatatgaaatgtgacatttttaaaataaatatataattatttatgactaatttaattttggcaactaaaaaaatagtgaagtgattagttaaaatggcataagtataataaaatgtcaaaagagtttttttaattcatttttaatttttttaaaagaaaaatgattgtttaatttattatgtaatttaaaaaaaaataagtgttttttttccatcaatcaaagataatattaaataagtgggactcatactaaaagttaattacaatctcctacaatacaccacattttagtgctcataaacctccctatatatccataaggctaattaaaatttttgc

SEQ ID NO: 217065 - DNA, 705 bp, Cannabis indica
tttttctcaagaaaaaaaaatatatttcaaatattataaatattatgataaaaaattaaaataaaaaattatgtaaaattttctttgaaaaaaacataatttaaaaaaatatataaaaataaaattaaaataaatattaaaattaacataaaataatataaaagaattttttttaaaaaaaaatatttaagtgtaatttttaaaaattatttaaattttttttaataataatgtttaattattattttctagggtataaataaaagtctccaagaaaaataatttatgtttggcgccaaattgaatggattgaaagaaatactctcatgaatttacacatattttataagagcatctttaataagagacaatatctagttgttaaaaaagtaacacatcatcctaaaatatatttttttattttatctatcatccatataatatttgatacttttattttttacaaaagttactaatagttaataattctaaaaagttgtcaacttatagtcccacatattaaatttaaaatattaaattaatgtagtttcttgataaaaataatttttttttctaaaaaaaaaaaaatgacatggctattgtcccctttttagcaacactaagcatctatattctcaaaatttattttgaaaatgaaccacattgtatatgtggtatgctcactataatagttaacctgatttt

SEQ ID NO: 217066 - DNA, 650 bp, Cannabis indica
gtagaagaagaagaggaaatgtaatttactttcacaattttcccaatctgtagagtacttatttcttgaccctatattgttgttgtatccaccatttcaacaccaaaaggatgagtcttacatatatatagttaattgatttgtaaatatttggtatgccccttttaggatctaaaacacgatacaactgtattcatggagaaatccatcaagctaattgagtattcaggttttatatgcgtttgatttctcatggtgaaaatttgctgtcttgcttcgagacgttaactatttttacaagcatacatcatgggtaacttttccagttttcctttttaaagaaaaatatataaatactacatatgtttttggaaaaagaaaatacttaattattataattttttttggtggaaataattttttatagatataaagaagtgaggagaaaaaaaatgatatttgaactctattcttataaatagtgtatttataaattttttgtaaaatattttacctttagttaatgttgacggtttatcaactaagttagggattgaatatcaaagtaaataatagaacatgaactagtctctattaatgtagaaatattgaatgttgtattgcttcgagtgtcgatgattttctaacct

SEQ ID NO: 217067 - DNA, 1004 bp, Cannabis indica
actttgaaatttataatttaccacactcagcttagtttttttctacaattcttctgcaactgttttttctcacagcatccctacagatatttttcccacattgcagctgtgccagaataaaaactactatatatatgattaaaaatatattttagtggtcataagcttagtctaataattttatatttctttttaataaaaaagaggtcccaataataaaaaaaaaagcatattaagtataattgcaagatttgtttaataaatgtgtatttcattatatattagtgatttgtgaagtggaaagtaatatgatatgtatcattttctattaaaataattaaattgataaaatcttaaaattataatcaaacctatacaatattataaataaaataactgaggttacttcaaaaaaaatcaaataattaaagaaattgctttgaactatagatatatattttcacaagtttattgttaaaaatgtttatttttcttccttttagtgtaattgtgtattttttattaatagtgtctagaacaacatcatcacaaaaatatcgaagaattgatttttttttttattttttatttttattttttagttgatcagatatatataagtagaaaagaatatagtttgaatatggtcccactgatatatagtcatttggtttgacttgtttatagcttgtatttttttagacaaagaatcaaattattactttgtgtgtgtgattgatatcatgacttatataaataaatatatatagtggtttttacaatttgacgtgattccaatattgaataataataattacacacttcaattattgatcatatatattggttattatataaatatatataattttttttatgacgttgatcactatatatgtacatggatcaattggtggacatgattaatatattttaaatgaaattatttttcctttttgattcaaattaatatatataaaatatatatatatatatatatactg

SEQ ID NO: 217068 - DNA, 947 bp, Cannabis indica
tttgaattgatcatgatgaaaatgaaatgttcgcctgcatatagaaaatatatatatacatatatatttgattgaacatatcaacccaaataaacgcaaaatttccgatggacaaaccaaatttaaaatcaatttgctctgcaatatatataacaaatttaataatgctactaattaaatagagagacaaatctccatttccaaggatatatataaattttataatatatacaaaactttctcactgttgggactctctacatattataaatatatacatacgaacaacatgtatgaggtttggatgatgtattctttgatattcttatttgtataaaaacaagaaattgattagagtcatataacgtcagttttagtaatttatgtttaaagtgttacagtgtctgttttacacagcatgtctaacgcgtgatttgaaacgaaacgcttaagtgggaaaataataataaatcacccttatctcatgtccagtggtagtgagggttgactttcaaaggtttgaccaaggagctgattggctgagtttgtgaaaagggtgttcaatgtgcttatgatggacgtgagcccatatagtaattatcccatctcagaataatgccaaattagtgagaggagcaaaaaaatcatgactcactaaaactaattccaacttcgaaacgcatatatatatatatgtatatgtacgtgtatatatatcatatataaatgtgtggaaaagtgaaggtagaaaaaagttagaaagaaaagatagaagaagaaaatatgccagaatccggagtagtagcagcaccattgaaggcacactttgttttggtccatggtataagtggagggagttggtgttggtacaaaatccggtgcctaatggaaaattctggctataaagtctcctgtattgacctcaaatccgccggtatagacaagtc

SEQ ID NO: 217069 - DNA, 586 bp, Cannabis indica
aatctggcgagcctcccaaagtacattttcttgtgtctgtctccaagattccatttccttcctcgatgcagatatattttcctgctctctcatagaagtctttaaagtcatccaattcccttttcaacatattcccccataatctactcccagcgcatattctagcacctatggagaacttatgttcatcgttgaacatttttcctaccttggcagcttcggcaataaagcattggatttccccccttaagccttctttctccctattatcccaaattttgtccacctaacgtggtatgtcgacgtaagccaagatagagtacatgtggaatagtgacaagaccagccccgaagaacaacaaccgaacgtcgtccctaaaactatgcaggagagacaagaccagggattggcgaggctaccaatttcgagccccatgtagatttaggagaagatctcaagttagccagacttagagaggtcgtttgtcaagtcagctaaactgaagaaccacgcgttgttggttgtgatacactcacaaaacaaagacgtgaatttatgagagggatagatgaccaagagtacatc

SEQ ID NO: 217070 - DNA, 665 bp, Cannabis indica
atgagtggaccactaatatgttggcatgtgtcaacttaatctcttttaataggatttaacaaacttaatggcacattaactgtagttagaatctattaaacaaagtgggtgaaatgaaaggaaataaagtattaaacaaacggaattaatattttattatgttgtttactaaattgacttgaaaatgaatcaaaattattttattttgcttacaaaattaggaaagataatcagaatagtttagataaactaaattacactccacagaaaatatttatttattttatttctttattttaaaattaaatcataaaaatataaaactaaatttataaataattagatggtactctatatatgtcttaattttttcatataaaaaaattaaaaaaaatatatatatattttttacccgtaatgtcattacttgaccaattgggtggtgaagttctctcttatttttctccttaatttaggtaggagccaccaagttttattattactaagtgaaaaataaataattcaaatgaaaaaataatctcttacacctcattccttttctaacaaagtaaacatggcatacgtatttaatttgtcaaaatatatatatatatatatatatatatgtgatatatagtagtataaaattagtaaaaaattaggta

SEQ ID NO: 217071 - DNA, 743 bp, Cannabis indica
tttaaaagaaattttcaaattaaaaaaaaagtttaaaatatttgctatagcaaatttttagtacggattaaaattcacttaaaaattagcgttacataatatattaaactaatctaattctaatacattaattaatttaagtattttaactaaaaaaaatgctgtatagatgattaatggagtctaaaaaaaaatttaataatataaaatttaattagttgaattgtcatacttaaattttggtattgggtttaatagaatgccaccaatttttttagaaatgatcttaattccagtctcttaaatagtgataatagttatgctaaaaattctaattatgtttttttttttctctaatctataattccatttaaaaaacaatttttttaaatactaaaaaagttattttattcatattattttcccgaaaccatgtcttaaatttgagtgaatttttcgttattctttttgttgggtcttttgggccttagaaaagcttatccattttagtagcaaaagaaagaacagctgagcattcgtctatgctgagagatgagcagagcaatggcagccagcatagtaccctctttctcattctccttcattaacaccaaagccgcagcactacttccggcaaaacgagtcgtttcttggttatcccctccgttatttcgaccatgccagcttcctcatccaaaaatgcccatttttgctgttgtagatggagaagcagtggcggtaga

SEQ ID NO: 217072 - DNA, 550 bp, Cannabis indica
ttattttaaattatatatataaattaatcatatataaaaatagaatatacatctattaagtttaaaatatatttgtattatgtattaaatttttaaattattattttttatataataaaatgttaaatgtatacataatttttttaaaattttatataaatatgtatgaattggattagatagattacttttacatatcaattaatatgcaatctatacaagtgtgaatttttaaatatttcaatctaattcaatgactattaatgaacactcctatttttttttaatctttttttaattattttatttaataagttatttaaagatatcatatttaaattatgcaaaataaattataaagaaatgtaaaatattaggtaaaagtgtttggtaaaacagaataaaaaaattagtaagatattaaaaaaaaaaaaataagaatagaatattgagatgtcctgacatctttttcattttatttggcacaaaactcttacacaaactattgttagaaaaaaaaaaaagggaattatttacaaattaacaaaaa

SEQ ID NO: 217073 - DNA, 818 bp, Cannabis indica
atattattcatgctcttaaaaataaaacgctacaatacttcttagttcttacttagggtatcattgttagagaaatattattatcatctaatgatttttttgacattaccatgcatcattctcctagaataactaatgaggtgttgttcattatttatattattaggattggaagatgataatcttgtctagggatcaagtataattttttgtgctgaaattcttgtgttggcaattgccattattcaataatgtttatgacactttttttcttcgttcattttttttgttaaaattttcttcattggttttgttcttatagattttggtaagctcaagtattttttaaaaaataaaaacagataaatgattagcatcaaatatcagttcaaatattaatgagatttgttttatttttattttattatatataaataatattttattattttattaaatataaataaaaagtcacccatgaatttctcataaaccaagaattcagttatataggcacactttatatagaatagatactttaaattctttaagaaaactttcttaaattattcgttgcttccataaatgattgatttataatatattcttgattaaaataagaattgggtgatttatatcaatatttacccaaaactaattataatattaggaattacagtctaaggtgttagttttgttatcctaatttttgttgtaataattagttagttacatttagatatatattgttataatcttaataaaataaaaaataaggagaattttgattagctaacaaaaataaagcgttacataac

SEQ ID NO: 217074 - DNA, 682 bp, Cannabis indica
gttagtagagcttcaacggggtacaagctatttgtactcttgttaagaatgtttgagacttgtacacgttggatgcgtgataattactctatattggtgttggggataattttatcaggatctagatttactaccatgtatggtgtttaacatcctaaatatagatttctaaaacaataaaatttaaacacatataaagttcaagaaatcttacattggtttccagcagaactaaatgactctttctattgagatctctaacccttgttcctttctgtcgcagagtcttatcaagatctgagctcgattctccttcaggtgttggattcttcacagtcttacacactatgattgagtatttacttgctatgtgtgggcatgtactctatcactataaggggacaaaaaattttatagagaaaagagagagagagaaggactcaaaaagagagagagaagagagaaggctcaaatttcactaaaggcttaagttgcatcaactgtcagttttgagtctatcactatctatttataggaatccttctagttttaggtttgaatgatatggtattaaaaaattgatatataaatggtaaaataccttaagtggccggccattaggatgtgggcccaccatttataatttcaccattttactaaattatttatcctattctttcac

SEQ ID NO: 217075 - DNA, 586 bp, Cannabis indica
gtgggtccgcccctgaatatatgtatatatgcagttactatttaattcagtttgcatattcccagaagtgaatatataacttactaatatttgttagtgatctaatataatcaaagtgataaagaatcacaaaatgattatttgaaaagcttcctgaagaagtcttatatacaattgctacttggagtacactactacaaaaacatgtttttgcgtcggtcaacgctactgttcatagcgttgaccgacgtgaatagtaacccaacaattgacccgtctctttaaaaatgacattaataatatactatttgcgtcttttaataaatgacggtaaaaagtaaactgacgagaataagcaaaaattaaaaaaattacttttcattttacgtctgttattaacactcgtgtattgtgttaacgaggttttaaaaatgacgcaaaaaactattagtgagagatagaaactgtcacaacaaaatggaaaacccctaaaagctaattagatgtgcctattgttcactatgacctaaccctcatatcttcaaacttgctcaggcgaaacagcggctcctccgtcctcttcgaa

SEQ ID NO: 217076 - DNA, 609 bp, Cannabis indica
tcattacctgctaatgaaggggttcgaacctctataataatccttctgttctttacttttgagctctaattgtgtaacacgtggtaagcattatttaataggactccactgtcggttggctaatttctaaggtcaacaagttactaatgagtaactagttagtaattaaatatatgaatatgaaaattagtaaatagttaagtagtagtaacaaaagtattagtttaaaatattatatatacatatacaatacataaaaaatatattatataattataatatttttacacatacaatacctatacaatataattacaaaatacatatctaatacaatacaaaatacatacatatatactactaatgtttagccttttattttattaccaaacttcagccacaactactgaccaagatctagccaccatccacaaccacatgagcacaatcttaacaatctagaaaaacgttcaaaaaaattaatacaataaaaaaaaaaagacaatttatacataaataaaattaattagaggttagatttatacgttaatggacattgagattcaatgattttcctctaaaactggcgactggagctacaaccacccc

SEQ ID NO: 217077 - DNA, 543 bp, Cannabis indica
ttttctttttattgttttgtttgccttttttagaatttttgatttttgcaaatcttagaaagggcacaagactcctctttagaacttgcacaatcctagtaaccttttttcatttacttttattttctttactttctaaactatatgtatagatatatatatttcattccaaaattgcccaaaacattttcagcattatcaataatgtaattaatttttcctcctatattttgtggtttaattgaaatattaaacttaaataataatttcagcttactttcctccaaactacaaaaaaccatacattttcctccaatttcatggaaaagctataggagaaaaaaactattataaataataactataaagtcaatcatggtcttatcatataagtacataaaccccatatatatatatatacaataaagaaccttgtgtcacactcacattcaaaaaagagtagtcataataataaaagtgcttatagaactttgcagcatggaatttgggtcaccacaccacctctagtgcctaatgttcctt

SEQ ID NO: 217078 - DNA, 587 bp, Cannabis indica
aggcagaaagcaacctcattatataacatttacgcatcatgttaccacaatctattcaggtacaatgaattatgttttgcaaagtaatttcaaatgaagagtatctcatcacaatgaagcggtatttatgtagtcgctattaaagaatgaacaatgaaagtccagagattactttggtaatatgacctccaccaaatgaccctttctctgtaatgcacgagataagcctgttatgtaagacgccatagatccaactgagatcaatggtgccatttcagtacatatgtggacaatgtaaaatccattcctggattaagaaatttatgttaaaacaggggaaagaaaaaggagaggaggcaagagaatagatagagtggaaagacgaaacataataattaaacaacagacaatagaggaaacaaatatattaacaactttaaaggagcaaaatatcttaaaaatcttgaaaaaaacataacaaacacgaatgatagatacaagaagctttgattatatgttgcagtacaaagaacattctaaattgcatgtatgcttatgagatttttatatttatttcaggtcaataa

SEQ ID NO: 217079 - DNA, 524 bp, Cannabis indica
actataagtcatgctctcgactttgatatctaccaaatcatgcacctcgaactttgacatgtactaaatcatgtcctatgaactttcatccatgttagaatttttttactaaaattggacaaaagtccttaaattcaacaattttaatagttcaggggtatttttaacgaccttaaagattcaaagagcataatttagtacatatttaaatttggagaaaaaaatctaaattagcctataataattgttaatatgttcatactagagaggactgtatttattgataattttgtttttgtttgacaaaatatatattaaattaatacaaaaaaaataagaaataatagatgctcatatataatataggggaattattttatatactgttttttttaatttttttttaaatttaaggtttgagtttctaaagtggtttctccaatgatttctatgtgggttttcatacgattttttgttgttatttagtttgctccgctagtagcaatagaggtttctatatagaa

SEQ ID NO: 217080 - DNA, 543 bp, Cannabis indica
agacttttctcaatctatatggattttctttttttgtattgttgctttacataaggttgatgtcgttgtttttcttttctcttttttatctgtcaaatgtatgtatttcagtacaccatataacatgcacattttagaagaaagggcaaatggtatcataggcatgacattgtatatgtcatacactttaatcaattaaactatgaatatttgtagtttacaatacacttaattttacttaaataaaacttaataattttttttattttttatattgagcccttaaaagtgtgggcactaagtacgggcttaacccgcggcctatgtctagggccggtcctgaggctgtgtaatgtaaccatgtatattttgaatattgttgaaaacataagtcacatatattgaatattataatatcctcccatataaggaaaaatcatattaaaaactaagcttttttttttttttactttgtctttctttttctaacaatcaaagaaagaaagaaagaatttcccttcttgcattgtatataatcattag

SEQ ID NO: 217081 - DNA, 706 bp, Cannabis indica
ttatatatatagagttcataagtttttttaagattattttttatgtcaaataaataatttagtagtaaaaaaattgttttatgtatgaaaataatattaggaaatattaagaaatattataaaactaaaaaagatattaatttttaaaaattaaacatgatgtttcaaaattatttgtaaaaactaaaataagaaataaaatatatattttatatacatgcattttagagtaggtaattaattatacatatattagatatacatctatatttatttatatatttgtaagcttacttttaaggtagtatcctattattttaggattctattttctctatttttcttattcattctcttttaagtgaagttagatatacaataaaaaaaatattatgtacaacaatagcatattaataatgatggaatatattccaaatataaatttatagaataggtaaataatttctcaagagtaattgataataatatctaataataactaaaaaaataataaagaaaaattaggtaatataataagaattaaaaattatagcaatgtgaccataggcatagcctagtggttctacatttctcatctcaaagagaaagtctcaagttcgaattcccctctccaatataaaaaaaagattatcaattgttgttaaaaaaaaataaaggctaaattagtattttttttccccttgaa

SEQ ID NO: 217082 - DNA, 764 bp, Cannabis indica
caaataatttatattaaattagtataaaataaataagtcacctgtagaataaattatttgagttctattgtgagcatattaattttttgttttaaattttttaaaatttatctctttcctacaaaaaaaaaaaaaaaataaaatattttaaataatcataatatacacgatcataacaacaaaaatattaaactaaagtattttcttaaacaccaaaacataggtacattgcaccccttttaagaggttgcataaatgaaatcaaaaatacaataatacaataaatttacaattacaatattgtttttttgtatggaacaattacaaaattgttagaagatagaggacaaaaaaaaacaatatttcttcattccattcactatttgtcacctctcacctctcacaatgaattttttaaatatatttagtcataacaataaaaaaaaaccaaaaaaaaataaataaaattcataattattttatcctataatgtatatatttttataaataacatttacttatacatcgaattctctatctttttcactctctagttgagtttaaaattaatttttttttttaaaaaaaaaaaaaaaaaaaaacctacggacgcaggaaacgataggagggcataataaagagagggtaataaaggacgcgtggttccccgtgactcgtccttttttattatttatttttatataataattaaattattattattattattcttttttatttatttctttatatatataataata

SEQ ID NO: 217083 - DNA, 573 bp, Cannabis indica
gtgttcttcttaactttagtagttaaaaggtttagattagtatcgatcaccattaatctcacccatatttcatattctaagcttacattcactaattataaagtatttcagacctaatcaacgatccaatcaccacccgagatgttctaagatcaattattacattaatcgataatactcttattgacttttctagtcaaaaggcttagattggtatcgatcactattcatatcacacaaatattgtagtttatgtttactttgactatctacaaggtatttcaaccctaatcaacgacccgatcacaattcagaatgttgaaattaaagaaaatattttaattaagtgcaaattcaaaatatataatataatatataatatttaaaaaatttaaattatttataacaaattctataaaaaaaataattattattttaatgaactaaatcttaaataaactctatctaatcatggcgtgtgtgtttgtatgtaataaaaaattctataattaatcgtaggcttgggacatttaattctttagcataatcgctgagtttttatacctcacgaca

SEQ ID NO: 217084 - DNA, 1318 bp, Cannabis indica
atagatgtgtataattattttgagatagtttaaaagaccaattatgttcttgcatgtcaataaattacatatatgtgctatttacaaacacactaaactatttgaaaatatataattcagataattgactgactctactatacttgactcacatgatggaaaacactaacaataataataatatatagtgatatattttgcatgcattttataactatcactattaaagatatattaatagcttttacaattaattgtgaagattgtcttcaatcatttgaggggagagagagagagatcaatagaatcatatctctgtatatacacacaagaaaatacataaaagggcatacatattaattaataagggtttaattagagtggatcaagggatatgttaggctgtttcgaaacacacacatggaaacaataatataatagagaataataatagtaatagtaaatataatatgatttgttggccatatatatatagggggctcgatctatcattgccatactgtttaaattggaattaactgtatacatttatatatatgtgatgtttattgttgtgattatttaatttttttatttttttttattaacatgtcatactcaaattattcatataaattgcatggtacctaaataaagcaaaaaccagggttggagaagattgaacgtggcattacatgacaaacaatatgaagtgtcactatatatgtgcagtgtatacatataacatatacatatatatatttaaattatatttatatgaatgaaaacaaaaaggaagctgcagtaatgttccacttttctctgttcaattttccaatctcaacaggatcagaaagaaagctcgtgaaaataagagagacaattaatactaattaacattataccatacaacttgccttaccatgaaataatacaaaatccaaattccaccacatcacatgatatgatatctattacgtatacatatataatattagttaatatatattatctatcttaacaaaatattagtatcaacaaaagatacgttgattgcaaaccatatatttgttgttgatactaaaattcctacctgggtctacttttattcaaattaaattaagtaatggacttcaaacttttatttttattttttatatataaatatatatatatatatatatatttaagaacactcaatttctctagctttattttttataatacattattattttgtttatatatatatcaattttaattttattcaacaatataataataatgatattgaataaaaaacagcaaagtattttta

SEQ ID NO: 217085 - DNA, 685 bp, Cannabis indica
ttatgtaatgaccgcgaggtctaactgttatcttttttaatatatatattgctttgcttttactaaaaaaaaaaaaaaattaatatgaacatttatgatttggctttgcaatatgttaaacaatactcaaaattcaaataaaacttttacttttaattatataattaataaattttagaatattaaataaatttttaaactaacaagattattaataattattaataatgaatgtgtgagtaagctaaaaatgttttgcttaattaaatattaaatgaatgtatgatatacgtggtcgttatttgttattattaaatgatatcatgatgatgataagtagatgaaaatgatgtgcctaactcagtgtgaattattgactgatccacgaacgtatacataataattagctaatatatatgtatatataatgccatgtcacactacacaaatgcatgagatgatgaacagagagatgctggccagtgaaggtacgtagatactagcaggctagcagcttctgatttttttctatttttttttgttattctatttaaagtttttcgtagtaagttaaactaagaaatatatttataaaattttgaataattacaatgaaaatgaggtttttcttagtgaatcatatgattgctcaacaaaaatatatagtattgataataaaaatctt

SEQ ID NO: 217086 - DNA, 714 bp, Cannabis indica
tgcgctggtaaaatagaatttatatgatgtgttggaaaaaggggttgacaaatcaacgttggtattagaacttttgccagcacaaaatgaaaagcgctgcaaaaatgactttttctagcgcgtaaatgcgttggttaaagttaaattttagccactacaaatgtgcgctggtaaaactttgacatttttgccaacgcagtttgcgaaatgtgctggtaatttttaccagcgcaataacaaactgtgctggtaataatatttcttgtaatgaatatgtatattgaaatatatttcataaagtttcaaatactttacggcactgaaaatttgacttcaaataaatgaatttcataacaatttatgtttgcaacactaaaaattatttgaaattataaaaaaaaaatggaggttctagtataatatatgctatcttatatatctatatataaaataagaatgtataagatatcatgaccacacactaaaaaaaataaattttagtcacaataaaatttataactaaaagtaaaatagttctgacttataattataaatcaacatttgtgactaaaaaatttgtggttaaatgtattagtcataaaaatcacaatttattgtaaataaatgtatttctagtcacaatacttattgtggttaaaactaaattagtaacaattaataacaagttgtatctaaatagtatattttagtcat

SEQ ID NO: 217087 - DNA, 1230 bp, Cannabis indica
aataataaaaaaaatctcacctgcatgggattatttatcccaccctgctggatgggataaataatcccagacagatgaggttaactagattagttatccagacttgtaacatgcccaaacactggattggacaaattagtctgtctaattcaatccagtcctgcgtaccaaacgggcccttaaagtgaaatggtctgaagatttcgtactaatttaaattatatataaatgcatattatgtaacttcatatataataaaaaaacactttctcaaaaaaaaaatatattattaaaaaacaataaaaattaaatctatctagcacagccaaggtacacattgtcaacaagggtgtagtaatttataataaatcatatatttttattatatatctatataaaataaattaaaagttaattatagccagaatataaatagttgtttgcacgatcttaataaaataaattttgtctttaataaaatggaatgcacgttgtaattaactatgaaaactacctaattattaacaacattaatacattaattaacctctctaaatatatatttgcttttccaactgtcaaccaattacgttcccatcacaaaataatccaacaaccaaaattaaccacgttatacaatataataataacaatatattatatacatatattgataataaaatcttgtaattctatatacacgaaaaaaaactagagagaaattataacattgaattttactaaaaaaaaaaaaaaaaaactggagagaaattaattaaatcgggtgaatttgtagttttttcatttattataatacaccattaaataaagaggtacatatactaattaattataattaatacaaatgcaatcctttgatgttatgttaaaagtcataaatttaatttttgaattatgtatattaatatataaacgtttaaataaaaataaaataaataaaaactatcagaagtactaaaagatacttgaggtctgttaaacattcacccaaacaatttgagactttgtgtaaaaatttaaaattagagactctttaagggctcgtttggaatgtcgtattaggccgtattgtattgtattgtattatattaaattagattatatatcatatttttatataatactatgttaaactttaatttatactaaaacattatatatttaagtgtccgtaaaagttaataccacatataattttacataaaaata

SEQ ID NO: 217088 - DNA, 882 bp, Cannabis indica
tctgccttcgagatatagtcgcgaccacacttatctagccgcgaccagaaatgcgtcacgcctcaaattggtgtttttcttggccccgctcgtcttttactgtacttttgcatcccgagacctctgttattcctaagaacctgaaaacatagaaatcaagtgtaattccgtcctaaaaaagtgaaaagcgaacataaattcgatccaaaatataggctaaaaatagcctaacagtagtttgggggttcaacctcttcctcctcctccgcctcggagggactgccaggacgcacatcctccagctcctcaatctcttggacctcagtgtccccttcacgatcctcctccatctagacggccggatcctattcagcactgggcaaagtggtaagccgagccacttgaggatcagttgcgtcagccagaggcgtggttttctttgtacgagccatcattctatggcagggtacagggctagatgaatgtccttcgttagaggaaggaggactggaacgaagacgaggttgatcctcgtgtagaagttgaagcagatcatggtcgatccgatgtccgagttcctaagactcacttgagttcatcaacaaaagacaacacacgagatgagtgtttggccgaaatatcgaataataaacaagaaaatatgtcgaccaggagtactcaacagattaaagaacgactatgttcaaagaaaagtcaaaactcaagaagttgaaaattttcttgagttagggcaaaaaatttcatgaagcttagaataagcaagatgaaagacggacgttatgcagttcagaaacaagcattaaggctgcaaaactacatgaagacatgatggaaaaaaaatcgcagaggtttctaagccta

SEQ ID NO: 217089 - DNA, 520 bp, Cannabis indica
gtaaaaatctcttattttttatcatgttatttattcccttatttctttcttaagcttcaaaaatattaagttgctgaaaatcttggtaaacacatacagagtaggttaaagccaacctagctccacatagagaacaaacattgccaaaaggtacttgacactttttagggtgatttgtgttggaacaatcctaaagtagccaactatgtctctgaaatatgtgtgcaaagacagcactacctcttgttggatgtggccctccaaccatgccatccggtttaaggccacacggtgtgctcgctgatcctttaaaggcacctcacattggatgcctctcactagtccactctctagtatcctatcaaaaacctcggtagtgattcagatggatagagacccaccggtctccctgtgacccgacattaagaacttgaggctctaaaaactataccaagacacggtctgaacgtaccatcgagggctgatcaagcccgtttaatggctgcctgtgatcatcata

SEQ ID NO: 217090 - DNA, 739 bp, Cannabis indica
gaaatgaatctaaattaatcagttggtaggaattctgttatttcagtggttcaagtactagacatgtgtcttctcctcactgtcgtgtcaataatgtttaattcgagattgattgatagtcgttaaaatgaaatgatgattttattgtgtatattgaaccttttttttctgctttaccttctttgctagttgtaactgagcctctcatgctcttgtgtgtaatggccttagtgccttatgcctataaatggaaaatgcatcactcaacatcaattgagctgagactgaccaaatcaattatttctaaaatttaatttggtatcagagcaaattttcaagatgtcgacactcacaaaatcctggaaaccatgcaaacaccgcccctgctccaccctcagccacagttgcagcatcaacagtacttggtgctagctcaagtaatgcttagctccaaactccagttgctcatcattgcaacaccttaaatcaatatttctctttgaaacttgacaggcacaactacagcctatgaaagataatggtctcaatcacagtatgaggtcatcggttagatggtttcttgactgactctaacatttgtacctctcaatttgttgactatcaaggagagcattgatactggagaatctcacattatcaatccaatttatgaaaatgatatcataatgatcaattgttaatgggggtagttatacagtttaatgactgaaactataac

SEQ ID NO: 217091 - DNA, 664 bp, Cannabis indica
gttttttcattaacatcggacattgtctacatatatgtatttaatttcatttagttatttattttacttcaaagtattatctcaaattttgtccacctgatgtggcatgtccacatagtcaaaaggtaagagacgtggagaatagctcatcactaacttgtcaggttagtgtgtatagcgtacaacctgccaggtcagtgcctacagcctttcaacgtgtcgggttagtgcctacagcccttcaacctaccaaattagcgcatacaacctttgacttgtcatgttagtgcatgcagcccttcaacctgccaggttagtgcatgcagcccttcaacctaccaagttagtgcgtgcagccttcaactagctaaattagtgtgtacaacctttaacctgctaggttagtacttgtagcctttcaacttgccaagttactgcctacagccttcaacctgccaagttagtgcgtacaaccttcaactagctaaattagtgtgtacagccttgaacctgccaggttagtacttgtagcctttaaacttgccaagttactgcctacaaccttcaacctgccaggttagtgcgttcaactttcaacctgcaagatcccatggttgcacattggacacaagcaaacacagatccacatacctaccagtaaagt

SEQ ID NO: 217092 - DNA, 569 bp, Cannabis indica
tatttgatttattttatatacatggcaaatacagtgataaaaataactttaaatataagcattgacggacccagaatttttactttgtgggggcttatttatcataaaaaaatatttataactacattataatcactcttattaaatttatctaattttatgggaactattctactattttggtttataattattaaattgaaaaatttacatttaattttaatatttttgttagtgggggctatagcccccacattataatattgtaaatgggtccgtccctgaatataagtaatcactacaaaggagatacaatgatgataacggttttaaattatcaacttagttttatatttttatatataaaaatatgttatatatataaatttatatatattttttttgatcaaatataaatttatgtattataaaaaaaaaataagtgatgttaagtcaatctttttcttggaaaaatcaaactaacttaattttttttttgttccactctataatcattcctaatagccatatttattctctctttaattatcttattttttattttttaa

SEQ ID NO: 217093 - DNA, 954 bp, Cannabis indica
cttccttttttattatcattggggtccatttttcattttatttgtttctttctttgtttctgaaattaatgaaaaatttggggtcgactgcagactacactaatcaaggattcaactattattataataatcacattttcccctttcactatatatgtaatcgtaatgattaattatgaccgtcagattggcggggatcttaagttttttttttgtgtgcaatacctaacataaataataaatataagcaaaagtatttatttattagaatgagaataatgaagctctcttaataaaagtgagttttctgactaacttttccatttttcatatctatgattacatctttaatgttaaattaacattttcattatgtgtaatgattttttatttttacttttagttggaatttttgttgtaagcttatgactgttttctagttccatatatatatatatttaacccaccaaataaattaacaaattttttacctgcatcatgaattttcttttttagtgttttttagttggaattttattagtactcacttagttttagcacacaatttccattttcatgcaatcttaccaaatcaatgatcctcctcttcatgtatttgacactaatataatctcatacatgcttattgagagcttgacctactagttttgagcaaactttcatgattaaaaataaccaatttttttaaaggtaatcttttcaatttaatgataatcaacagttggagattattccacagtttttttatactttttattatatttagaaaagaaagaaaaaaaagaaataatcatactatttttaaatgaaaataatagcacttaataaacattgagtgtcttttaaatatagaggagaagaatggatattttttctttttttcttctccttggtaattcatgcacatgtcctttactcttaataaatagtcat

SEQ ID NO: 217094 - DNA, 1093 bp, Cannabis indica
  modified_base (290)..(290): a, c, t, g, unknown or other
accgtgaacaacaatgaaaacttaacacagtatacagtataaaacttacacagtatttttgaaaaaaaaaatacagtatttttgaaaaaaattccaccccacagtaaaaaaaaaagttaaaaaattttaagtatatggtataaaaattcctaagagatttcactctcatcatcatgggtgtatgtatttttaactttaatgaaaataatgaaaattgcagtattgccctttaaagtcatattttagtagaactcttatttatttggtatttacaaaaaaaaaaaaaaaanaaaaaaaaaaagaaaagattaatatttttttaatcgcgtatattgtagttatgtaggatcactcgtaaatttttagtaaaactccaagtagtttacagtttaaaaaatatggttttaacagttacttaccacgcgtataaaaaaataaatttacatataacaaaatatttaaactttatttttagcattgtaaattacttaaaattttctaaaaatttattaaaaaattaaactaaaaaactacataaatatcgaagtagataaaagtctaatgaaacaccatgaattcactgtagtctaacccatgaataattaatttcaattaaaaacaaaaaaaaaaaactattttcttcttttgaaaataaatatatttgacagcaaaacaccatatagccgcaatttgcagcccctattgaaaaattggccatcggaacaatgacagcagcccataaaacattactttcataattaactcaattgggccctctcctattctgcaaaaaaaaaattaaataaataattgggccctctccctctctccaaaacaaaacaaaaaaacgttttcgtaactttacttctttcgcgtttaataatacagtccttaccaactttcaaaaaaaaaaatacagtccttacgaaaaaaaaaaggtttaataaatatagttagatctgggtccatatagtttgaatgtataaactagtgttaccatcttaataataaaagcttatttataatatgtggtatgcagctgtatttccaatggcctgcctttttattttatttttctaacttctctgatcac

SEQ ID NO: 217095 - DNA, 630 bp, Cannabis indica
ctttcattcataattcatatataatatatttatatatgtgatgaatatgatatatatagtggaagtggaaccattaagaggctgctttcattagccccatcaccacatgttttatctctaaaaacacaaagcaaagcaaaagaaaaagccaagccaatgatgtttcctttcccattgtaatcaaattcattataaagggcatgtttttatgtcccttaccatttaatttaacaaccaagaaaaaataaaataaaaaaagggttaactctcctaattcaagggctaaattcaataataataataagagaaaaagagaaataactctctttctaatttcaaaagctcttgcttttcttttctttgttggaagattgtaatgttcttctcttagaaaatttcaaacaacttggtggtagggtcatgtagttgttagtgacccactaaaattaaaattgtacaaaaacacttcatttttgtttttctttcttagtattctaatccaatggctgagatttgaaggctcatctcatctaataatctttcaccatacattttctttaacttaacttaaaaagtaacaactaacaacaaatctaaaacataaagactccaaatgaagttttcccaaaa

SEQ ID NO: 217096 - DNA, 635 bp, Cannabis indica
cacgggtaaagcttctatttccaagttgattaaactgacctgaattgttgctggtttgtgagtttcccctaccaaattgctgtctgaaccttttccatgccaggtttgcctccatcagagagtctgaatcattcgacaccagattaacactgagatccatctctttcccggacttttctattctggattctgaggctaataacaaagcctcgatctctccgaccgtgtattcctcagttcgagtattagtggatatgacaaaggtgtcatattcacttggaagtcccttgaagattgctgctacatgatctctatcgctcaagacttcccctacagatgcaagaaggtccactgtctgcttcaccttcaagagatagtcattgagactcaaatttcccttccttaagctctgcaactttgtgcgaaattcaaggatcttcgaagacacttggagagtgaagtgtttttcgagcgtggaccagatctgttgagctgagttgcaaccaaccatccgagtgagaagactttctgtcatggacgacagtaaccaagaaaccaagagctgatcttggacttcccaatccacaaacgcttgatttactctgtttagggtacgatcttcagcagtaagaaat

SEQ ID NO: 217097 - DNA, 670 bp, Cannabis indica
ttgacaccatactttccttatctggctagtctttaatgatgagattaaagaagttcataaggctatcttaactcatgtgaaagtaaactagtctctggcctttgtttccaaaagcgaccaaatacttttaacaattgatgaatggatagccaatccatatcgaatgcagtgtcatgattcctcatttccagctctatcaagtcattcgtcagttgtgtattattgcgttccatatatcccaatatgggtgctacaatcctaggtcgttccttcctttccaatggattagatcctccttcaaatgtctgtggttttttttattctttcatatggtggctcaaagcagtctgttggctgttgaactgaatttctcgtgctttaccgcttattgcaatgcaacttttcatcctgaggttggagttgttccctaagcttcgcattctctttcaccaactactcacgaaatgagcgtcctctcaactcagcctatgcattgttatgtacttacgtgggtgccacttccataatagtgcaacttgttgtccttatcctccaccatgactaacttagcctcgtagttcatctccttcttaaacttcttgtggtgttgaagctctccttcttgattgtttcttttgagtcgacttgatcgtctaagcagcactatctc

SEQ ID NO: 217098 - DNA, 899 bp, Cannabis indica
ccctacacgtgtggccatattctaagattcaaaattaatttctcatttttaccacaaattaataattgattagttatcattattatccgcgtttctgaaaggtatgacacgtggcattcaatgaggaacattgatttaatccttccttaattaaagtcattgatactactctatcacgaaaggcttcctagaattgggatatatcctagatggaaggatacacggaaggctactcatactcgccttaacttctcggacgcaaaaaaaaaaaaaacttctcccggacccaaaggggtctgagaagggaagctcactaaggacacacccgaatgtgtgcttgaaaggtttaacgcaaacacttaccatcttgagatgtcgaccttttatacatgccaggtcaccaaagtggcgactatgccttttctgacaaagatcacatcttgtctccaacatccgagcatggtagtgcgtgtaccactaccaccttttttccatacggatattacagactcctactcgtaaaggaacaagctttgagtgacacgtggcccctacttttaaaggttgaacctttgtgtgacacgtgtttgagtggtacaaaatggtccccattatccagttgttgcaagcacaatgtttcccacggaatcatttggttagctctaacattgcatgtaatttaccccaataatgggattttagtagataccttaggcaggtcatgggcctatccatacccgccacttagcctataaatacccctcaattctcatacaaagggggtatcacaacttacatagctaaaacactgcccataataactctaggttttctccttcttcttcaaagagaaaatttaggctaaagagttagggtttcctgcaaatatattgtaaaca

SEQ ID NO: 217099 - DNA, 674 bp, Cannabis indica
agttagaaaaaaatctctctttatataatgattaatgtattgtcttaccctcagcgatcaaatttttttttatatttaaaaaaaaaaattgctcaataaaatacaaaaatatggaaataaatatcctatctttaattaaaattaaaaggagtaattacataaggtaccattttttgtaaaatatttatatttttacgttcaaagaatgtttttttttttacatttttatggttttttaaaaaataacacgaaaataatataaaatcaacaagaaaacaacataaaagtaacacgaaaataaaattaaaataacaacaacaaaaaaaaaaaaataacatacatataacaaaaaattaacaagaacaaaatttcaacataaaaataccgtatttatataaataaaattaaaaaaattgtaaaaaaatgtttaaaaattccgtaaaaaccgtatttttgttatttttttattgtttttgttgtatttgtgaaattaacccaaattaaaatctgaagaataccagatttgtgtattttgggcctaaatgtagagcccacagtttatgaaaaaaaaattatagagcccacagtccactaaccaaggcctgacgtggttttcgatcacattcacaagagagaagaaagtcaagtttagtttttgtttaggtgggtaaatt

SEQ ID NO: 217100 - DNA, 561 bp, Cannabis indica
tggactaatataattaagtgttgcttgatttatgttaatgataattatataatcggtaatatatagcagtactattaagttataatgtgatagacataatatactaatatatttagggcttagaacacgctctaaaatgtatttgctgggccaaaataactaattccctcacgttgagtatgtaggtccaattagctcataatttcttataaaaagggttgggctctttattggtatttttaaagtaaaatgtatatggatatgttgtacagagaaaaatagagaaataagtgttcattacacctaaggacagacacactaaatgtaaaaaaaaattagtattaaaagaattaaataattcattatttaattaaataaattatactaccaaaatagtaaaaaaataacaaataccataatttttatgtaaataatataaatattttataacaattaagacttcaatagatcaaaaatacatagagtcccttattaactcacttactactaaacttttttttactttctatacggtagagtcaaaagagtgtaatatgttag

SEQ ID NO: 217101 - DNA, 731 bp, Cannabis indica
taaaagttagaaaatctaataaacgtaaaagcttgcagcagattcaaatcttcaattaagaaaagaaatactcactatgccttataactttaattccaatagccttttcaagtgcattagcttttgaaccatcatggacatactcatacaaccctaacaaaaaaataaaaaataaaaaatataactttatattgaagaaaaatagcagcatgaacatgaaaccttttaacaaatttagaaaggaaattaccagcagaattgctgaacactgcaatattgggtctgaagactgctttacactcgtccaacgaggaggcaagaggagcccaaagattcaattgataagggacagtgattgtattatctttatcaaacacaacatccttgaatttccttttgcgaagttcaaaccaatcaatgtaccttatatcgggcacaaaaacatgagggagagccaaatatcggtctttaaggaccactcttgccgaacaaacaatggcaccaaagttaaaccagagctctacaaacctgcaaaagcaaagaggacagctgaattggaattttatatgattggaattgtcaatcgcacaacaacaaaggggagttggtgagaaaatctagggttttgtttgggaaagctgatgtgagttgtggaagatgaatatttataaataaaatcccggtacagtgagaaaagagaattcacttatgtatttttgggatttatttta

SEQ ID NO: 217102 - DNA, 1060 bp, Cannabis indica
cctgcaatacaatgactcactcacttgtgctaattttactgaccataattgtcttgcttaccaaaaccttattcaagctccttgttcatgaagctagacatctctgggttttacattcaataaaacaaagcaaaaaatctgtgctttatccaatgatttaatgaaggggtggcaagaaaaattatgcaaatataaatttgaaaagttcatgtgacaatgacactaaaaacatttttttaacacgagaacttcccaggtcacttatcctagtattactctcgcccaaacacgtttaactgcagagttctgatggaatccggtgcattaatgctggtatgatcgcacccacaatgacactaaaaacattaatttaccttataacacgctaatacaatatgaacacgatacgagattttgtaagtttgacactgaatcagaattttatgcaaactgtgttggtgttcatgttttataaatttttcgtgtcaagattcatgtttgtgttgaaaaattttcaactcgacacgccaacacgaattgcgaaaaaataatttggttaggaaaagccaaaaatgtttgattactgagctgtctctctttttttttttttttgtttagacaaatttttgaaggttcgaacctcaacgtggtgatcatctcctacaggttccgaattcgctatctcaattcgacaattatcgactcccatggcttccaaagccgaaagcaagtgttcgatggttgaaattctataaccatctttgcatagcgtggtgcacagaggcgattccatggcgtaatcgatcgtagcaggaattacatttgatcggaaatcgaaatatctcccttctccggcgaacccggccatattttcactgtcgaaactttaccggagtgtagagctttccccgttctttctatataacctgccagagtttgctgaaatctaccggtctgtactcaaatcaatcacaaaattaaaccacttacatgtatacacacgcatatatatatatatatatatagagagagagagagagagagagagagagagacgtac

SEQ ID NO: 217103 - DNA, 562 bp, Cannabis indica
gcgtccttgacccatttggaccagtgcttgattctgtttcttgagaatcttctcgtgtaggtctttctctttggagtcaatttgatacacgacgtaaagtaggtatgcattctatctctttcatttcggtctggcctctgtgattgtctcgatggacgtcctaacccaggatgtccccttggagccctcgcatcatgctttgtgaacccttgatcaccaggtcatgtttgtctggcttctacattcatacgagatgattctatattgttaggctgtatattcccacaattcatgttaccgcatgatgatcctggatcactaggtcgagttttcttattgttagtgtttctcagatttttgggacctcctgtgtccactgagatatcccttatactccttagttgatcattctggggattcatgggatttccatggttaccttctcaaggagtttcctcatttctcttggttctcgatcctctagttcttccttgaggtcgcccagtggatgtgtttggttggttaggcagtgcgtcactgtatgctgcccttgtaatcacat

SEQ ID NO: 217104 - DNA, 394 bp, Cannabis indica
atatatatatatacaaaataaagaaaaatacaagcatatatacctaattcttcaagttgttttgtcttctttttccttctccaaatatagatgtacattacacatgaatatgttccatatagttatactattttgtactttttggcaattaatattaaagtatcagactaaaaaaaaaaataggacttttttcaaaatgtaataattatagtcatgtcatctcttagagaattatttatagaatgatatgcaatatctatataaatatatatatatatatatatatgttagttcccgttcacactattagatcgatcaaaataattaacaaagaaaattatatgtcttaaaatttggaatgtactatatattttagtattttatagttagttaa

SEQ ID NO: 217105 - DNA, 669 bp, Cannabis indica
tttttgttttcaaaattttgatgttagcacaatgtaaatctgaatttagccctaattaattcatgagaatgaaacaataaattagaaattagcggtagtgtactggagtccatagaatcgacccttgaatggtataatcttccaatttttcgcataaaaaatttttctctctggaacctaagtttcttgatgatggggatttaagaatgaaagatacgatatgaagcgatacaaaaaactaaagaccagtaccagtttattaatgactaaaaaaacagtaattaatcatttttgactatttttaattcggtccctcatcaaattaaaaattgtctttatggtatccacatattaaaatcatgacacatcatgcccttaagttataaactttattctaaaatagaccacataaatttgacttatttatttgatgacccaatacatattttatatatacaattgtaaccccaataaatttctaacaatctcccattaggccacatatgtatacatataaatatgttaattttatttgagctcatatatttatcatcacaaccataggcatgtgcaatctcgtccattaactatatcaacataggatcaaagcagtttttgttgtatcaatcacactaataaaccccatcaatggtcacatatatcggcatg

SEQ ID NO: 217106 - DNA, 836 bp, Cannabis indica
ttaaacacaaaatcaaactacatgatatgaatgaaggggtacatcatatgtatgtggaagtggaaattaatagcaactgcatcctccaaactgatagtagctacaccttttctggtcctgatttcttctgaaattattacaaaaatacaattaaaaataaaggataattatataaaatattatttttaataaaatttttacatttttacggccaaatattttttttatatatattttcacggtgttctataaaaacaacacgaaaataataagaaaactacataaaagtaataggaaaataacatttaaacagcataaaaaaacatagaaataacaaaaaaaaacacaagtgtataacataaaaatatatcaaaaatccgtatttttttataaataaaattaataaaaatatttaaaattccaaagccggcctgtttttgttatttttggtagtatttaaaaattaatccccaaaattaatacccaaactcaaatcgtttcaccaaaatttgtacaaaaaccgagttgcacaagggataacttcgacacactacaaaaaattttacatttagtgatcacaacaaaacttgtgactaaaagtaaaatatttataagtaattataaaacatcatttttatgttgtaactaaaaagtctgtggctaaagatattagtcacaaaaattacaatttgttctgactaaatgtgctttgagtcacaatacttgttgtgactaaagtaaattagtgacaacttatatctaaaaactatgtttttagttactaagttaattttttggtgtgactaaaaagtcacatttagtcaacaaaaaattta

SEQ ID NO: 217107 - DNA, 741 bp, Cannabis indica
gcaaaaatatatgtccaaattagtatttagcatatcataaattttattttatgtacttttaatttgggtatctaggttctatatatatttcattatgtttaatttgatgtatttttttatttgagtaggtaggttgtatatatatttgatcatgtagtttctaataataataattaattataacaaatcttagtttagattactaatcgttaagatcaatctaaacatcagctaacaattatagacataaataaaattaatacatgcatcatctcctagtacaaattaaattcacctaaaatatatagatatgatattcctcatttaatttggctaacttaaaataataaatagactatatcatacaacaaaatattgtataattgtaataattcatgcctatataatcttacaaaaaaaaaaaaaaatcatgactatataaatgagcagttatatattatttatgagatgaattttttacaccttgagatttttttgaaatacttagattaatgcaacactataaggattatagttatattattttgtatattaatggtggtattgcattgggaagataatggagcagtaaatataggccatgcgtgaatgtagcaacagcaaccatataaccatatatatatatatatatatgagtaatattgctattaaaaacattagtggtatttaacactttcttgacattttacgttacgaatgactagcgatactctctcaaaa

SEQ ID NO: 217108 - DNA, 629 bp, Cannabis indica
atggagtgggcctctcggaggagagcataagacacatctttactctccgggaggctagagccatgctaaggcatttctgggaggtaaggagattacttgaacaatcacttcgcatttaacgctgcatgggggaaaacgtattggaacctccataaaagatatgacagatggcgtaagccctttttacggcgattacacaacaatcgataagtctagtgacggctacatcatgaggaatcacatcagtccagagaggataaaagtttatatccacataacccctaagatacgtacggtataggtcatgtatttccttttttgtatctgctaggaatatgtgcccctaagaagctaacacacaaagacaagtgatcccttcctagggatctccctagaaaaacactataaataccccacaaacagactgaaaaggggtcgatcaatttcaattaaggaatcaaatagagaaaagaggagagagatccaaacactctcataaataacaaaagactatggacttaggctcattaatgccccaaccacgtaaaaatctcctgcattaaactttctacaacactttcattatattatttgattggttgtcgtaaacctcggtcaacattttggtg

SEQ ID NO: 217109 - DNA, 1431 bp, Cannabis indica
ttctttctttctttttttcgaaatcgcgagttaaatttaacaatagactcaaaccgaacaagtaaacaatattcaaaacctcaattttttttatttttgtcatggtaataatattactaaatgtagagatgtgtatactttgtttttgtaggtttatggaaccattagtgtatggtcattatccaaagagcatgattaggaaggtaaagaatagattaccaaaattcacattgaaacaaaagaaattggtgcaaggatcttttgatttcattggcataaattattacacatcaagatttgccaaaagtaaacctccaagcttcccaactcgctttactacagatgctttagccacagaagaaagtaattaattaacctttttcttttacctttttagtgctttaattacttttttggtaaagtggtgattgaagctttgtatgaaatggtctaattgtcattgaatgatctttgcaggccataaaattaatggaagtctcattggtcctaaggtaagtaaaagatttgtaattgagtaatgttattaagtatattaaggtgtttaataacataagaggtaatgttttataaatgattaatagtttcttgtattacaccaatagcgatcagggtcggtcttgagtttattaggtcttagaaaaaataagttttttgggctcttattaaaaaatagatggtattttttaaatattcataaaaattatccaggcccttagactggatggatcataggcgcatgcttagctcgccttagtctaggaccagtctaataacgatataatgcctacttgtgatgttgggttgagcaccttaaaatgcacttcaacatttttttttgtgatttaaagaagtttttgttttgaattttttttccctaatgatttaaacttcatattgcaggcgaaaggaagtacattcatcttcatttatccggaaggattgagaaaacttctgtgtttcatgaaagacaagtaccaaaatcctaaaatcattataactgagaatggtaaatgttaatatagattaatttgaacaaattattttatttaaagtgacttgccacaaaagtgtgtgttatatttgtatgtaatcattactttacataaaaagaacttccaaaacatacaatagaaccacgttatcataaaaaaaactataatttttaataatgttttaattttagagttagactacaataaaactttcagaagtttcacctcactagtaattaactttctaaacccattttttggcgtataaaatcgtctaaatccatattctgttaatagttcatcactttcatccaattttagctgcgtaaggtataatgtctatttctcgaactaaaccgatcaaaaacttggtctacaagcacacataatagctatttcattaatgttaatatttttg

SEQ ID NO: 217110 - DNA, 587 bp, Cannabis indica
agttgtcgtaatttcctctggggcactaagggggaataggagcaagcttcatctcccttcgtgggagaaagtttgcctccccaaaaagctaggtggagttggttttcatgaaggcaataaatgaatatagcgttgatggcaaagtatatgtttgggtgatctcaagtaaacaagactgtctactagggttagatggattaattctatctaccttaaggatcataatatttggagcattccaaacaatcagggaatgagctggtattttaaaaagttgttgaaacttagacaaatttctagtgaagcgtctttgaggcttgctgttaaaggaggtaaattttgggttaaatatttctacacctctcttgttgatgctcagaaagtagcttatgctgaaactgtttggaacaagcttcttgtgcccaaatatagattcatctattaataggcatttaactcaaacctgctcactagagatcatttgagccgattcttgcctatccctttagctctttgtcctgtttgtgagacggattctgaaacgcattgtcacctcttcttgaatgcatattctcaaggaaagtata

SEQ ID NO: 217111 - DNA, 515 bp, Cannabis indica
gattttcagggggaacttcattttcctcaggttgtttttcatgagcagtttcctgtcttctggttcgtgagccacgaggtctgcctcatggtcttctcattctagggtcaagttgattttgagtgttattcccctatgtcgccctagctgcggctgcatcacgctttaattcagtgttctgctggtttgcctcctccaggtggcacctaagatgtcagttttccatttctacgataagtatgtatcttgtagggtcataagttccctcatccgtgggctgagcacccccaaaattaggtccttcatctctcattccaggattctggccattcccatgctgagttctcttcaaacgtgtttgtccgtgtgttgggactgccctcaggttgattcctcctggaacgagtggtctgagtgctagggccacccccatgttgggtcctcctggagaaagtggaatgtgtgctagggctacctccaggttgggtcctcttggagcgagtggtccatgtgct

SEQ ID NO: 217112 - DNA, 797 bp, Cannabis indica
attaatacatatatattattataaattagttttcaaaatactatattgttatgttttgaatatttttaattttttataatcatttactctaagagatattttcaaacattataatgaaaaaatattagaaattaaataatacatgtccttacatagagatctaaaaaaagataattgagaaatttatagaaactcatcgtatgacttcaaaatcgttgttatcattatatttcactcgtagtcatcactatatcattctcaataccctatatatagcatagttataataatgaaatagagatgaagagtgagtatgtgtgaatggatataatttgatgataattgaattttttgaaattaaaatgaaaatttgacatgaaagaaaaaaaaagataaaatggagcaaataaaaaaataatatttacaaaatagacatgtatatgattatattggtgagatggagatgcatagagagactctaaataaatagaaagaaaaaaataaagtcaaatatatataccataagtacgagagagagatcgaatgaatagagcggctaagtgatattaaggttcttaaattgcatttcaagatttttttttctaagaaagtaattatttatgaatttttcttaatattagataatatatattgtaagtaaccaatattttctgtagtgacaaattatgaccaagttgcgtctggagttcgtggtattttgtttggagtttatactgttagtgataatccacgccggtaaaaatattttgggttttaattattcagatggtaacaac

SEQ ID NO: 217113 - DNA, 588 bp, Cannabis indica
tggtaaagactgtatacttgtcaatgattacatcttgcaaaatgtgtgagatttcccaaacaatgatgggatacatgtattatctaggaaaataactctactggaactaagttagttgtacaacttccacagttagatgatgttgactatgtccatcatgatgttgacccaattgaagttcaaaacatccaatgtgttaatcctcaaactcaaggtttagattatttcattgtcgatgacgaagaagaggaatttccaagagaaaaatgatgagtgcttaaaattagaaagtgatagtgatgataatgttgtatcaatagctgatgatgattatgaattgtaattataataatgttcaaatattaaataataattcacaaatattttgttatataatatgtggtgaatatgattattaaatttaaaatttaaaaataaagttcgttaatttataatatgtctataacaggtggaagatctgaataaaagaaaggggtaagaggtaaatataaaggtaaaaatagttaaggaagaaattttacgaaaggaccttgagccaaacattacattacacttcatgaggagacg

SEQ ID NO: 217114 - DNA, 694 bp, Cannabis indica
ttgttttctacttattttagatttaaatggtaaactttataatatgaattgaaaatgggaagaaaaatattaaatgggatgaaaataaagaatttaccatggaatttagagttctaagattaaatgggtgagaaaattttaattttggatgctcaacacgctctgtttgggatcgaaaatcaatctaaaacttcaagctaatttttaaggggttttttcattaatgtacaacaaaaattaatatattacaaaaaatgtgcaaaaaaacttaattataaaaactcatacattttaataacatatttactaatatttagatcattagatataaattcatatggattatggattatggattatggatcattagatataaatatttactaatatttagatcattttcttgtcctgtgatgtggcaatgcatttatggcgttcttcaccatggggcatatatcctatatgcaatgcggggattcgagtttgggactaggtcaaattcatatggaatcttaatactacggggattcgagtggatgaagttttcttgtatgcttcgattgtttgttgaaactatctggagacttcgtaatgagattattcatatcaactctcctctggatgtcttgaaatgtattgatttgatttgtacttcctatgcagacttcatgatgttttcttgccttctccaacc

SEQ ID NO: 217115 - DNA, 578 bp, Cannabis indica
tttattgccctcaaacaccctttcacagctcgcacagttgcagaagccttccttcatcaggtggtcaagttgcatggggttcctcggaccatagtctcggatcgtgaccgcgtgtttctcagtcatttttgggctgagatgttccgcctccagggcactgaactccgccatagcaccgcctaccacccgcaaactgatggccaatccgaggtggtaaatcgttgccttgagacttatcttcgttgtttggcttctgatcggcctaaggcatgggccaagtggttgtcttgggcagagtactggtacaatactactttccactcctccttgggttgtactccattcaaggtgttatatgggcgtgaaccaccagcattaatccggtatttggagggatccacttcggtcttagcccttgagcagtatctggaagaacgagatgggttcctagatgacctcaaaatgcacttgttgcatgctcaacacaagatgaaggcagcagctgattcttcacgtcgacatgtggagtttgcggttggcgaccgagtctttcttaagctacgtccttaccgacagaa

SEQ ID NO: 217116 - DNA, 593 bp, Cannabis indica
attattattattatataatactaattacctgaggtctgagcttctttaacaacaacattaacaacatctctagacccagtagcctcatgataatctttaccaatacgagaattacgagagagcttagaccctttgtcttttttaataaaggcagaccttattctctgtctttccatgtcgtttaagggttttcctccataactccttgtacccattacacgtgggtcttcaaactcctcctctgtttcatcatccaaacacccagagctctcaattccaagactcttggcatgtctcaacccggcggtagcagttgaggcttcttcttcttcttcgtcgtagtcgtcgttaatcataaatggtggcctcatatcttgttcatgctcctcttggtctaacaccattctcttctaagtcgttttgacacaacaaagatttgagagagagagatataagaccagaggagaaggaaaggaaggagattgaagaacaagtttgccttaacttttccaaatggttatgtttttttattattattagtgagttttgagaaaatatttggagaggtcattgagtaatgttttttttttttt

SEQ ID NO: 217117 - DNA, 774 bp, Cannabis indica
ctaggattggatcttaaatacttacattttgattagaataatagttatttttcagctattttggtgttactctggtagtttaaaccgtaggtattgaaaatgaaggcttcttatctgttttggagtgtgtacagtgtaaaaaaaattaaggttataaggaccgtaatttgtaaaaatttctgtgacagtattaatgtattcctaaaatatagtattatagtatttttataagtttccttttaaatgtaattaaatatatataatgtaattttaaattaagaaaaataagatgtgaaaagaggaggaggatctgctgtcacatgtatatatattgtttattataaattaatttcccaaaaaatatatttattattgatatgcatgtgtttataggtaggaaaaatacacgaggataatgtggtcatgagtaatattgatattattttactacaaactagaacatggatccaattaattgataagatcatgttattatatatatatacagatttaattaattaattatgtaattaggtcataggcttgcaattataactgcaagatccctggcttaaggatatgctaagaaatttgagagacatcaaatatataatagtatatatttaataatatattgtaaattaataagaacttcttaaacgagtcttaattatataatttaattaattaatatgcttctacatgctagctgtcactttcttataaattactgattgagatatgatatttttcgaggtaattgtattatattga

SEQ ID NO: 217118 - DNA, 551 bp, Cannabis indica
tactaatatctgttactttcaatgtttaagctctaactttatctcgtcatttagtatgattaactcatgtaataatttttgttttagtgcattaggaggattttttacacaaaagatgaaatcagtgatgtacgcaatatgatgacatcaatgaagtatgcaaagaattaacataatatatcactgagttgatgaaatttacatagcagctctattcacttttgataaccaattaaatataggatgtttatttatttttgctcttgaaattatatgtatatagttacaatgcttacgaaatatgattcactttacatgacttaatataaacttattatatttataattggattaaagttaagtatttagatgattgtaatatctactctgattttttgttttggaaaaatataagcaaatatgaaaaaaaaaatggaaacaccataggtcagttgtgcgggaatcgacttgcaatgcaaaacctcataggtcggttaaataaccggcctcccatgttgtacgttataggtctcccatgttgcacatcaaaa

SEQ ID NO: 217119 - DNA, 574 bp, Cannabis indica
acacgtttggagtgcacacaggcggcgtgcagcctcattcgcgtacgcaggaggctgcactgtagcgttcgtgtgcgagaaacatgggcagcgtgtctgaatgggggtttcatgcggcattcagacaggagtttgtccctgtcacgcgcgcgcgtggggccttcttgtcggagatgttggtgcgattggcaccatctcgacactcacatgcattcgattttcaaaacaccataacttcttcgtttttcatcggaattgagttccgtacaaaccaaaattgcttaatttttcacaaggaatccaaataaaatatttttagaaagaaaatataattattttcatggaaaaatttcgtaattcacatacattcatcaattaacaaaaaaacaacatgaacacatccaaatcaacacacaaacaatattcatcgttttaaatccacatttcttgaaggtaaatcattaccatggctctgaggccagttgttggaaatattttaccaggatctagatttactaacaagtatgttgattaacatcctaaatatgaattctctaaaacaatgaaaataaac

SEQ ID NO: 217120 - DNA, 1423 bp, Cannabis indica
aaagcaattctaaattcgagaagcctcttaaccaaaggactatgtcgcaagatcaacaatggaaacgctacgtcgatttggttccatccatgggttcccaatggtgttctccaacctcatccctgtttggatgctacggaaggtgtgagcttagttagttactttattcgaaagaatcagtggcaagaagacctgatcaaaagatggtttaatcatgatgacgccaagagaattctcaatattactcttcctagtatcccctccgcggactcttggatgtggctccctgatcacagtggccacttctctataaagtcagcatatcgggtggttaaaaatgtcgatgcattggattccaacaatgcaaaatggagaattatttggggatctcacatccacaatagactaaagatgctctggtggaaaattctctccaataacctcctcactaggagtaaattgctctccatgttctacattcgggacactgaatgtcctatgtgctccctggtggttgaggattccctgcatctcttctggaattgtcactttgctagagcactgtggtttggctgcgtatagcatttgagaaccgatagcccaagtatctatgattgggactcttggctagcttggtttaaggtggacacaaactatccaagtgggataaatttcaatgtcttcctggagggggccgcgattatcttcgaaaagatttggagggagcgtaataacaaaatccacaatgttgtggagtcccctctgtctgttattctcttccatgtcaatagaaggataatggagaaggatgaccttcgctccccggagagtacgataaatcctaatattcagcaacctcctccttgctggacaatctgcaatattgatattgcaattggagacatgatgtctatgggaggtgctgtctttaaaaatgaggaaggtaaaatctttcacatagccactaaacagtttacttactctgaatctctaccaggtgaagtggctgctatggtgtggggtgctgaagccgctcttactcagggcatccgcaatgttattttcctgagtgactcggcggatgcagttaagtcggttctttgcaagcagttgcagggctagcctaccactctgcatcataatgtgcaggacttgattaataggttccataacaatgttaatcggcttggtctatgggaagcttcttggattcctagaagcatcaatggtgtggctcactctgtagccaaatgggcactcgatacaaaccagtttgggagtattgacctgtccaattttgacagttcccttctcaattgttgagtagatggctgtttaagttctttctttgttcatttgttttagttcgttctctgttcctttagttctagttttgtttgttagttcttgtcctcttgctttg

SEQ ID NO: 217121 - DNA, 993 bp, Cannabis indica
taaacaaatttataaaaagtcgatctaaatgtaaaataatttagaaagaaagatataaataagaaatttatttgtaagtagttagctaaaacactcaccaacagtaacatgagccgatggcatcattagacgtctgtcgaatatatggcgcccagagccctgaagcatccagtataacaatatatcttactaactatttgtaattttattattataaatattgaaaaattctgtactctattgttgtccttatatctttgaatttagtactttaaaatataataatttattttttttatataattatgtaaattatagttatagtagatatcggttgttatgacaataatttacagaatgttcaaatattaattacatacatatatatttttggcaattgactattttaaactcttattatagaatcatagattattcagaattcagaaccaggtaagatggttattattctaatacataatatgtatacagtaatacaaaaagaattaaattatacaattttccaaataccaaacataaatatagctatcctataaaaacaaaactattactctgtaattacctactatgtacgaaatattatgtagttaactctaaatgtataatcattgtaccaaatgttcaaaataatgtatcaactaatacatatgtttaatcatattggtatagttgtgtaaatccaacagaagatcatcctgtcagttatacatcgtttatatatttatatacatttgatatagttactacacaaaattcttatacaatcatagaaataccaatttaaccaattgggctcccaagtggttaaatttgcagttagggtgtgtgtggggatcctggaattgaatttcaggttatgtaacctaaggttaaggtataaaaggctcttttttcaactaaaaacaatgctactaatttgggaaaatcaaaaagaaacaaatataagcaaagaactacttactgcacactgtt

SEQ ID NO: 217122 - DNA, 691 bp, Cannabis indica
tagcgactatccaaccccaaaaaataaaccgatacgaagtagagccgaaaaaaaaagagccaccaaaaatctaaaaaaaaaaattgatccaagagccaaagtcaaaaaaagccacttgtgattcggggatatagtgagccaaaaataaaaaagagccaccaaaaatccaaaaataccgatccgaaaagtagagcaaaaagagccacttgtgatcagggatagtgagctaaaaaagagccgcttatgatcgagttgtccaagatggtgagcaagtaaaatagctaccatcttgagggggatattagagagtcccacattgccaatgtgtggaaagataatagaatatataagaagaatgggctactcctcccattgtcaattggttttgagatggaaccccatgattctcaactataccatgttagaatttgggaaataaggtgaatggggttccatctcaaaactaattggcaatgtgggactctctaacagagtccgagagggggttcgattgtgtaattgggagtgatgtagattcaggatataaaccacataccacacatatacaagaaatatcacttttgccaacatatttttgtgctggcaaaaatttactattgcgctggtaaaataaaatttacttttgatgtgttgacaaaagggattgactaatcaatgttggtattagaac

SEQ ID NO: 217123 - DNA, 559 bp, Cannabis indica
gtattctttaagagggactactgatccatcttttatgtgttcgaggctccaagcgcctattctagatggctcgctagtactataactttcttctcgaatcacacgttcaggaggaaaacaactgaattctcttagagcgacagacctaactcggcatcctcactcatacttgataccacacgacttcatacctccccaacataagctcctatggatctaactttagactcaatgagctctgccttgaaggtaatagtggggtcttaaggggtcttggatttttgagctttcgaggccacgatttcaaaatctaagtcacctggtgaaaaagtaatagtgactggaggtacaaacaaaggtctcgctaaaggaatattagttaaattttggggttcaggcaagtgcttctcaccaaaaatgacatttaccctcagttatttcttgcaaaaattacctataacttccaaaaatatcgtcttgattggttttaataagatgttccctaatttttgcatcatttatcttaagaaaggttgtaggtatatgtgttttgggtttg

SEQ ID NO: 217124 - DNA, 837 bp, Cannabis indica
caaatagtttttaagtgaagaacaaaaccaaagagcatggcttgtggttttcattattttggaaaacataaaagggcacacatcagaagtcttcataccatgccttgcgagattagcataacaaggcacaaaattattgctagctttccaaataaacttcctaaccttgggcaggatggtgagagatcataaatacttccaacaacacttgtccccattccaattttgaaacagaactccaatactcactattaactatatacataccagtttcaacaaagttccaaatcaaagcaattatgtctaccaaatgtcgaaactagaatagacaaaatagccttagattcaataccatcaaagagctccttaactaagggtacgttctaatgccagacactagcttaaggtcactcaagccgtaattgaaacccccatggaatgaatatgttctccatacatgatctttaagtatacaagtatcagttcaaatacgaatagactctacattacccacaggccacctagtctcttctttccaaagatctcgatcccataaaatacttttctaagtattttttgatttttagttttgttttttcgctaaataaaagtaaaatatttttttccatgtaatttatttgcatatagagaataaaaaattgtatttttatttcatgagattttgattttggtttttcaatttttgggtaaaacatatacatattgggtgtttaaaaaaatttacaaactgctcaaatcaaaccgacaaaaaacaaaacttgaagaacttaacgaaaaatctatattgctcaataaatatattgggcaggttgaata

SEQ ID NO: 217125 - DNA, 525 bp, Cannabis indica
atgcctttaactatgatttaagagcaagaaagaaaaaaaaaagtctaaacacaaaatgttattgcgtagagtcacattaggaaacacaaattcatagcttggttcacatggcaacagcttcgctgccaaactgaaggggtcaaaaaagcagtttggtgaaccaggaaagatggctccacagagaagccaagaccacaagtgatccaaacatgcacataggtaccccaattattgttacttgtgaaggaaaatattccataatttttaccttcattatttattctgtacccaattagttccaataggagtttcaaatttacattaattgtaagggagagcattatttttagcaggttgatcatcagattagtaaatcgaaatggacttcaaagtaagtaatatattattgatataatatattggtgctttcattgtcatgtaaaacacaacttctaattaaatatccacaagctgttccatttaaagtttcacatgttacaccaagatgtctttccggaagtcaac

SEQ ID NO: 217126 - DNA, 557 bp, Cannabis indica
gaaaaaaccaattacatgaaacatggggaagatgcttaagcttatgtatatgtatgcatatggatatggtggtcctcacactcatgtacttaattaatttgtatacatatacatatacatatatatttatactttgacgcatgcccatctttgatttttgggttggatgtattgaagatataatatcatgtggtgcagaatgtaactatatattccaagccatctccatacccatataatggttgtcatgattatttgagtgttgtttttctcaaaacctagatgtgtacgtgtacatatataaatatatattatatatatagtttttcattaaaattttactgttaaagctatgttattttggtacctacgtatatatatatatatatatatatatgtatatcggtattggcataatcatgtgaaatactaacactttatttggtaagttggatggaatattgaatttgggtgtgtatctcaaatttgtttggtgtaataatagaaggaaagaaatatataactagtttttattatttaaataacacaataataaa

SEQ ID NO: 217127 - DNA, 559 bp, Cannabis indica
aacgtgttactgcatttagtcttgatgtgaaggttcaacagcgccaacgagaacagatggctattataagttttcttgcaggactctcatctaaatttgactctgcaaaatcataggttctttctggttttgatgtctcctctttgcaagatgtgtttactcgtgttcttcgcacaaaaactacctcttcagctcctcttaatagtgccttgataagtcgaaacaactctgcaccatgacaaatcgctactctaagtgaatacaaaggaggtaattcacaaggacctgataatcgaacatcagattctgggagcattatgtacaactattttaaaaaaccaggccacaccaagtttgagtgtaggaaattacagttcaaaaattagcaaaaacactgctaatattgcaagtactattgatgcattttaaaaatcgatctttatttctgctgatgaatttaccgagttctcgaggtgtcagaaaacacttaagtcttcatctccttctgtcattgtgattgttaattcaagtaactataatgcatgccttcttttcaaat

SEQ ID NO: 217128 - DNA, 524 bp, Cannabis indica
aatgctcacactaccgaagatatctgtatatgacatatacagtccaccgttgagggggggctattaagatactgcatgtttcttttgtgctctgttaaaggcttatttcccttcttgtgttatagttagagtttgtccctattcctactaactattttacctaatctgtaactaccttaacggtttctttactacagttagtagtactctttgtatcctggttcagttaagtttagttaaggccggtttgggttagttagtgagggtgttcaaactattagtataagctctgtttcgagctttattctgtaactgagcattattcacattaatgaaatttctctcttctttctattccgcaatatgatgatccactatccctcattatatgtgttcgaacagggtcctaatgctgccttggttcacctagaaaacttccaatagcattaattcttttgttggtccttcatacaaaatagaacaagtatctagatgccccacaagtatggaataattacagcaat

SEQ ID NO: 217129 - DNA, 1302 bp, Cannabis indica
gtcaataagcaacaaattagaaacattaatgaacacaaatgagtgagaaaactaaaaaccctttattcaatctcgatcaacatatacatggaagaggaattgaatccaaactgtacatattaattgcaaaatagagaaatagaaaattacaataaacctcacatgagctctctcaatcaaacacatgagagtagctttaacatccctcaaatcacacaagtttctttctagaattacaactcaattctatacaaaacgaatccaaaaaaccaaattcaaattaagtggaagggctgctctttatatagttgttggttggagctgtccaaggcttaattccacactagctaaattaactaactttgtaccacataagattacgttgtgacgcatgtggaagggaataagtgagctaaatccaccacaggtttggtataaaaatgtattttacttataattacataattacacacacttttcctatctcatgtctctctatctaattcccaatacacccttctcattctcaccacactacatattcacactcacacttttctttttacaatccactcttaagaacgttataaaatatatgatttcaccctaaaccgacattatatataacgtacgtttcaaaatatatgatttcattttattagtatataatatcaagatcactgtagaagtgtacgtatcaaatgtatattactgttctcattatagattgtacatatattgtatatatatttacgtattctcaccttacaacaatttcgtgtaactatatctattattgtacgtaaaaaatagtgtagtctaacattactctatatctatgtatagttatatatatatatatatatatatactagatgtgagccacgtaaatattagttttatataagttttagtggtttttgttaaagaattcagtaactaagcaacgacaacaactaatggtaaatagatctatttaagttttctatatttgtaaagatttataaatttaaacttttaattttcttgtattggagtattttgaatttgttctgaatttatttgtttattgaatttattgaaatacttgaacttacttgttttgtaaatcgtttttgttctgattatatcaaaaattatatcatgtatatataattataattatacatataacttatatgaacttacttgtcttgaaattcgtttggggagtgtatatatatatcatgtaatatttatttgtaacttaacttgttcttagtaaatcgtttttgtttctgttttatatttcaagtaaattat

SEQ ID NO: 217130 - DNA, 690 bp, Cannabis indica
ctatcaaaacttgtttcttttgaaatgagatagtcataagcttgcctaatcgtaaagctgccattagtttcagctttcatgatagcttcacaagtgaatgaatctcttaatctcaaaattttcatttaataccaactaacatccacttagcccaagagaccacacctcttaatcttttatgtacaagttgttcacccattttacccaaagtacatctttctttgtagtaattaatagcccataaatactttgccaaagctgctttgttctatttaggaccttctcgaaatcctaaacctcgaagttctctcgatagacacaccaagttcctaggggccatatgaagcctactccgattatcctttttcccccaaaaaaagtttctacacattcaatcaatctctttggctattttttgaggtaattgaaatatgctcatccaataacttctaattccaattaagacaatgtttatataagagctctacctgcagaggataggtgatgacttgcccaagaatgaattttagctttagttctttaagagatgatatcacaattctcatacttccacttagttggcctcaaagatacccccagatatttcaaagaaaatgtactgtcgtgaaagaaaacccctgttgaatgaaagttaccgtatcatctagtatacctgcaaagtagatgtta

SEQ ID NO: 217131 - DNA, 795 bp, Cannabis indica
atgaatatttatttaaagtaaaaataaacaatgatgatgaatcgggtattaattgggtatttctatttttttaatatttgaaattagaaaataaattacaaaaactaatccctatcacaataagagcatttttgtaattttatagatcatcgtaagcttcaaaattaattaaaataattttatttaattacattaaatgaacttttattttaatataccttttaaacccttttaattaattaaaaataatttaattaattaatttttttaaataaaccctccatttaaagttttgtcttaaataaaaacatttattatttattttagattaagataatttttgtgcaatcccataaatactagatctaaaatattaaatggattcgatctgatccaaaaaaaatattagttctaaaatattagataaactcgaattaaaaaaatagatgtacatgaaatatatcccatatctgatggatgttgaattggttggataactacaaataaatttgatcagaccagatggtaaaatctaacatcccatctataattagatcgaatttgaatagacttaaaaatactggaagtggtccaataaaaactcctacccgaacctagaatcctaaccgtggacccggacctagacttcaagccattttctttcaccttactttctcagccctcacataaaaaaaacgtaataaaaaataaaacaaaaataaaaaataagacaagaaattaacaaaaaaaaactaaatttttaaatttttattttttaaaattttaaaaaaaaaa

SEQ ID NO: 217132 - DNA, 580 bp, Cannabis indica
atatagggactcacgttgaagagtataaatgtgagctcccatggatgaaatgcaccctctttaggacccgaaaagttacaaaaatcgaacgacggaagagggtcgtggtggtggtcggtgatgaaggtgttgacggaattccctggctgcttacaaaactacgacagtgatgctacgattcctcgggtcttcggtttgtctccttaaacttccccaacgcttccctcaaactatttgatgccctgcttgtacacaacaagttcggttccccctcaaggccttctgttctcctcaagacgattgatctcctctctctttgtacctcccaaaaccttatccctaacttctattacctctgactctgacatccccgaaacgtctccctcccaagcacttctttgtattgatgatactgataaatccaaaagacaattacgacattgataatattgatttttctatcttttcctttcttccattaggtttacgtagttttaaggtaatttgtagacgcaaaaggtgatgataagaccaatttatatgctaattgagttagagatttaatttaacgttgagagtt

SEQ ID NO: 217133 - DNA, 425 bp, Cannabis indica
attctccaatatgttgtggaacgtgtataggttaaattctcgttttgtttatatattatatgtttattgagtatattatgagaattttaagtttaaagttttagggattatcaatatctcattatcaattatttttgaatattcttgcatgatttatttcgtatttcggccgagattgatatcacacttaatattttgatgttcttcaaattttcagatttcttttgctattagatcttcttttttagccattaatacccaaaattagtagtgtagatcgactagaaatcaagtcacgaacaaaacccttccttttcccgttcttttcgtcagttttttggccggttttgctctcagactcgactggtctgcaatcgcgtcgcgtgactcgcctccaacccagctagaggaagaagaagacctgc

SEQ ID NO: 217134 - DNA, 720 bp, Cannabis indica
cacgcttacaccataacattgtgtgaaactgaacaaccctgtctcagttacagtgttacatgagttgagtatacactgtaatacctaaattaatctatccaaataagatataataactcactctattcctgagtgttgaggttggcttggaagattaaagtgtgaaattcttcaacaaaagtttttggattagatgatcgttaattgtactaaaagatagcaagaatacccttataggcttcaagaggtattattttcttttcattactctagatttaatctatatacattatgatgagatccttgggcttatggttcatattaaaaaaaattatttttatcaaatctgctttcgcttttctaactctgatatggaccataaaaactaacagccatctcctccatttctgtgattttctctggcttcctctcggccagtaacttttcatctccgagtacctttgccaccttctggagcatgagtatacccttcaaactctctcgtcatagtgcaaaattagttgaaccatcaatcttctctagttcgaacctagccattgaaatcttccttcaatttgtgctcttgaaaaattccttgatgaattcttaatgagttcttagtgcggaagcaagtgatcttgaagttcccttggtgattaaagaacctagctctaatttgtaggaattaatatctgtgattctagcttcaagatcacactt

SEQ ID NO: 217135 - DNA, 1043 bp, Cannabis indica
ataattttagcggttcttgtaatttattatatttatttaatttttaaaatatattaaataaataatttataaaagttgatatatgatgtaatataaatgttagtaattttttatatgattatttataaaatattattcaaaagttatataaatataactaaagctttacaatatacatataatttagtaattagtaaaaaaaataattaaaaaataaagccaaatttaaaatgggatttgaaaatggtttgacctatttaagaaatacgggccaacacgagtaaaatatgccacggattcgaccacgacacaaaaatattgggcctactctttaaaaaatttttgcacaacaatgcacgatctatattttttttgtagcatggcataatacgaactttttttaaagaaaaaatacgaataaatgtgggttggatcaacacgtcacacacaaacttacatcacaaaagagagaaatgaaaagtgagagaatactaaatctactcaaatccccaatttagaattcctccaattagggttgtacaaaaaaattcgtaaaccgccaaaaccgaataacacacccaaactaaactgaaaaaaccgataaaaattacaaatcgaaataacttgaaaaaattacaaaccgcccaatctgttaattgggctggttgaaaataagtacaacccacccaattaaccaaataacccgaccaacccaactttaaatttttttttacttttagtttttattatatataatatataataatataaagttatatacttaattgttagttttaaagtcatatgtattgtgttgtgttttggtagaatttgatatttttaatttatctttttaaattttattgactttgactttgaaaaaaaaaagtttgcctagtttggacgggttaacccgaccaaaccgtacaaactgttggtcggtttacaatttatttatttattttttaaattgagcaggttgcacttaaattttagcaatccgaactttagatttggttggaaaatatataagataaaccgcc

SEQ ID NO: 217136 - DNA, 893 bp, Cannabis indica
cttgaggcttttttgtttcatgttattatgtataatattttattattgtaattaaagtaaatactttcatatgtgcaagttttagtttatgtagactcattattaaatgtcaaactaaccaactgaaagtaggaaacacgtactatgtaagacatgaattaattcctatgattcctttctttattttacttaatgaaacaaagatttttttaaaaaagaaatactttggttattgctcaatctgattctagcaataattatttgaaaatacacaataatactattattacatgcatggaatctaataattagttttgttgttttatgtaattggttttaagtttttcgttttttaatttggttatttaatatgtgttagttttaaattttgattattttacgtaattgatttccttatgtctaatttgtaattgtttatttagtataattagtttttgtgatttaatcaccactacaaaatgctcaatttgcgctcgttaacatgtcttactaaaatagttaactaaggttaaaaataaacagagattttatgctttagagtgtaactgaagcttaaaaaatatcaatttgcgccagctgatactccgacgctaaaagaagaatggaaaaaaaaagtgaaaattttaaaaattgtcttttacattttgcttcggtgaaaaactgatgccaattgttttttcttcggttaaaaatagaggttaaaccatttagcgtggttatccactgaagcaaaaagattaaaattttgtaaaaaagccccattttcacaaaaaaaaaaatatttcatttcgtctcttcccccccccccccaaacttaaaaccttaacgcagatagtcgcgcgcgagaggttacccgttccttcctcgggagt

SEQ ID NO: 217137 - DNA, 575 bp, Cannabis indica
ggttcactcaactatggtaattttgtattgtatctctctcatttttattttgaaacaagtagagcatttaacactcattgaggtggatccttagcctccaaccttgtgtttcatgctcgaaccaaacacattgaggtggaccttcattttgttcgagacaagattattgccaaaagcaacttgcataagatatgtggagacagagaattaaatatcagacatattcactaaacttcttctagcaatgccatttggcccatttcaattttttctcagcaagttaacacttggttttcaccaatgtcacttgagggggttgttagaatagaaaatggttaaacattttgttattgctattgctggtttttattttgctttgttgtaacaattctcgagtaagttaggagttgttagaagttagttaaaggagttagttaaagtctttgtttagcttcattgtattgacactcaatatataaatgacaagcaaggccaactggcttttcagttgagcaatatttccgtacttcttcttcttcttcttcttcttcttcttcttcctctctctctctctc

SEQ ID NO: 217138 - DNA, 523 bp, Cannabis indica
gatatactcttatctattttagtgttcgaaagaatattttaatctaatttttttatagttatttaagatacatggtaaaattttgagacattcaaagaaatttaacacgctaaacagtctattgcacgcgtgattcttttattttatatgcgtgtgaaatagattgtttgaacattgttttctatattataaattattctgagaattagggctgcatgcagccttcgtgggagtgaaatctcggttaggggctcgttcacatagcctcgtgctcgagaaatcttagacaatgcttatctgaagctgtgtcatgaccgagtgatgtccttgtctccgcgagcgtacgggtgaaaccctagtccctgattttaatattttttactattttttacaattataaatgttattaataagaagtttaggtagtcaaaaactaaagaggtttcattttggttgactctattataaaaacactctctccattgtaatagtattggtacaatttgtgacaatgtaacaagtt

SEQ ID NO: 217139 - DNA, 876 bp, Cannabis indica
ttcccccctcatagtccaaaccaaagtaggaagtggctacctccgaagatcggggaaacacaagctttaatgtggatgcactgcttcaaccaggaaagaaaagtcgagtgttaacgctttggttcgaaactctttaagacaagtcgtggctgctttggctaagagtcgtcaaggaaagatcgccccaaagacagctgaaggttgggaattattacaagcacaacgctattgtcgatagggaaacattgaaattcaccaggtagataacacttggctttggaattgcaatcgacccctaccttgtttttactgtaattttgggacatatacaactaaaaaaatacaagtacaattagacttgtgaaattacttattacacccttctatccttgttcaaatcttaatttttaaataccaaaaaatatagtccagtagctgaaagggctatagcaagtaaacttatctattataaaattatattatgatgagcacctgcctcctatagcctattaaactaccaaaaaaaagtataaaatttatttaaaacttatgtcagctgacacataaatcaacactcatttatgtaaaattgaaggcgtaactcattctgccaaagtacacaacgagcttaaatcgggtgcctctatatatattaagagaaccactaattcatcatggaatacttttaagatttctattttctaataaaaaatagagagaaatttgcgggcaaacccccttatgttttatttgtttaacacttaaaccccttttcttttattttggtgggaaaactcccttttgttttgttctgttagcaaattcactattccgttcatctctctcgtttacgccttacgtgtcagcctccagatc

SEQ ID NO: 217140 - DNA, 605 bp, Cannabis indica
gagagagagagagtgagaaatgaaaatgaaacgaaatgaaccttatatatgttctgaagtgcttttcccccaaaacttaatgagtggttattttttccataaaataatcatgcaggggaaaagaacaccaaatgttccaaaatgagaaagtgtgcagccgttacacaaatccccataatgattgttaataaagtcattttttgtcataaagacaagtcacctgaagagtcaattacatcattaggaaaagctgtccgataaaggcttttacagtcaagactggagctaaaaagtccttatctgtacagatgtctgcatagagacttgggggaaagtgttatcccaattttttcccacctagtgtggcatatccacatagatagaactgaaaccacgtgggattcggtctctcaataagtggacagagttaccatgcatggctcattaattgtcaagactttgagattgtcaagtaggaataaatgaggggaaaatggtgagccacggagaccttggccggaccatacctagtcggcaaatagagcttcatgtgcgagccaggccctaaaaaaagggcaggccagccaacacgttcaaacatcatc

SEQ ID NO: 217141 - DNA, 255 bp, Cannabis indica
aacgtcgaacaagatttggtaagaagtttgtatgacttcttttataatattatgtttcaatcaaaacaacagaatttaatctagtttttatatatagaaaaaacaactcggtgttgacaatgttgagagataccaactctggatgagagcacagacaaagaacaatactttgatcgcagaatatgataaggaaattaagtagaaaatagtaagtattgttggaattattttactaggatcttagatttactaaca

SEQ ID NO: 217142 - DNA, 517 bp, Cannabis indica
atatacaaacctacaactaatagcagtatactgccgaattaaaaaaaaaaacagtaaaaacgtaaatgtaagcgtgtcacaatatttttgtaataaatgaagaaaagttagtacataatgtaaatttcccatataatatgggtgtgtgtttctcaaggaaaggatgttattacatcgaatccaatatattagtcacactaacttccttttctcttccactgcaatctttttcattttccgtgtatgtctgttttaagcatgtttacttggattggatgagaaatgtgcaatactaatggggagacaaaggcagggcccaccaaggagatgatcatcaaaggctcaggcccatgtgattttggtacacaccattgcccatcaccacttcatctgaaaacgattgcaggtccactactcttatctctctctacactcattaacgcatatgattttatttttctttttttcttaaaaaaaaaaaacttttacatcaaataatatatctttttatatatat

SEQ ID NO: 217143 - DNA, 504 bp, Cannabis indica
  modified_base (443)..(443): a, c, t, g, unknown or other
aagcttttggtgtatactcatatttatattattgaaaaattcgaaagaaagaagtgtactgatgcatctatatttgttttaatatctgaaataatttttttgtcaaattttttgttgcaaaattttaaaaaatttgaaaaaaattgacatggcaaaaataggattcaaacactgtgttgtatgcgtgactattttatttatacgtgtgtaaaataaattgtttgaaaactactttctttctatattagaaattatttagaattttttaaaattttgttaagatatcctaaataattataacttatacaaaaattaaaaaaaaaaacttaaagaactatttttttttaaatttagtccgaaataagtaagaggatgtaatcaatgtattattttaaagacatacattatagaacacctatattattagtatgatgatatgtaanaagtttttttttttttttaaactttaactttctaacattttttactttgttgttgcagtgg

SEQ ID NO: 217144 - DNA, 792 bp, Cannabis indica
ttaacaaaatataactacaaagcagtaagaaaaataataaaatattaacttaattgtaataaataaataatatcaactcgtttatatatctttgtattacgatttttttttcatagactttatcgttaacaaattaaaaaaaaattgagaattaggaaaaaaaataaataaataaataaaacagcgaaatatagagagaagagagaaagaaagaaaaaaaagtgaacgatgactgaaaagaaaggtcagtttaaactgaattaaaaaatataaagaacagaaatttttttttttttgaagctttaataagtgaaaaaataataaaaagaaaaaaattaagtaaagaaagtataaatgtaaaaatttacttgttaaaatataaatgtaaagtttagaaaaaaaaaataagtattttgtaaaaattccccaataataaatacatctttttacactatatcaaaaataggtttatatacaaaatatttaatgtcaaatttatttttttttacgaaaaatatttttttcttaattttcaactgatggaacaattgcaactaatataatgtaaaaatgagaaatttttgtaattatattaaaaaattaagcatataaaaactcaaatttttctaataatacttatttataagtagtacctattaaaagtgcactcatatatatttggctcagaaaggagatctaattcaaagacaaacaaaactaaaaaagtgttaaactctcataaagaaagaaaacaagtaaagttagacacaagtaaatgactaggtaaatact

SEQ ID NO: 217145 - DNA, 544 bp, Cannabis indica
gttgatatattttaagttgaaatttattagaattttataagtgtgtggttaaagtacattgagttttcatttcaaaactaatttacaatgaactgtattattttttcacatattaactgtttctaatgaatttataggaaatataattcttacgtaaaacccatcatatccatctttcgagatacattttagaagtgaattatcataataaatttccattataaaatctgtgcttttccaaactctaaacacagaagaaattttgagattgagttttggaaaaaatactgtatttttgtaagataatacacactagctaataatggaatgctaatctttaaattctattccttggtgtttccaaactctaaacagtaaacacatatgaactggcacatatatatgtaattttgttttgaaaaacaaaaacaattgaaaaaaattaaatggactcaaaatatggactttggagtttggcccaaatgggtccaactgtagatgcccactttaaaaaaaattacgccactatgacctaatctggact

SEQ ID NO: 217146 - DNA, 719 bp, Cannabis indica
aaaaaaaatagtatttttttaaatctataaatagtattttataatattatatataagtctatataatataaatatatactatatatatattcataatacacataatatatgtgataattatttattgggatctttaaatttatagttagattttttaattaattaattaatatttataaatttaattaaaaaattaaaaaaaaattagaaaaattaaggagagaatagatagagtagaataaagtctatttagaatgacatgccatcactttatactttaactttatagatgtatatactagattaactttatgtgcaatgcacgtatagttagttgttttttttttaattagattcaattagatgatgttgagtataatacatgtatgtttattttttaaaaaaaaattaggtaatgtatttttaaaagttttgaaatgagatttgggattttgatttttgaggattttttttagctattgtcgctaccttggtgtgccatttggatgtgatgatatatgtacaataaaagccaagtgagatatcatggtgaatcattatgtgcctgattgagcagaattgtctattaatatctacataattatttttatttaattcaatgttaaaccataaagttaaaaatatgattaaaaatatctcaaatattttaaatgtaaattcttcttaaaaatacaaagtaaatacaaaatattcaatat

SEQ ID NO: 217147 - DNA, 1079 bp, Cannabis indica
gtgctaggtgtcgctcgtgtctttcaacgttaatctaattgatttttgagcaatataatttttttatttatcaaaaaatatattattattgatacaatttaatattatatatattttatttattttaatttaattaatatcataaaaaataaataataatttatatcacactttggatttttatagaaaattactattttattaaaacaaaaagatcataatatagtaattattagaggagatgggaaattctcaaaccaagtacaatcgatgtccatcgaaaaaacatgcttagctaataaatgagtagcattattaaccggtctatagacatgagaaatttaaactttaagaaaatgggacactaaaaaagaaataacagacaataaaaatcaaaaacattaatttgattagtttgtaattaatgatttcaccactacagtttcgtaatactgcaccaaaaccagtggtatgtgtcgtaataatgcttaaaaaaaaatataaatttattgacagagacaaaattattctgtaaagtgatttgatcgaattaacttgtaattatttacaataaaaacattttgtaggtagttatatttttcctttccataaatgtaaataatttactaatatatatatcttgatatagacaagttaataaaatatattatctttgttcttgacttcattgttgcattgattttcttcttatagttattattagtatattattatctgacaaaaacgtgaatcctgcaatatattaattattgttataagtacgttaggtacatattatgtttggatctattcaataatattaaattatattttaaattttataataaaaaattaaataaaaaatacgtaaaattttattagaaaaaaattatgaaaaaaaattaaaatcagtattaaaatcaacacaaaataatattagaagaaaaaaaataacaaaaaaattaagagtgatttaaaaagaagagcttttcatttttactacttcaaaataatttttttttgttatttttacggtaattctacatagaaacccctattacaacttaacactacaacct

SEQ ID NO: 217148 - DNA, 911 bp, Cannabis indica
aacaaaaatacaaaaattgttacttgatccatatcttagattttattgagagagtatatagtaagtatattaactaattgagaaagaaatatcccaaccaatttttttggccaaatgtggttgggaagctctatttactatttttgtattttaaatagtaatattaggtagtttgccatatttatccatatatgatatgattaattgaattaaattaagaaaatatcctaacccatttttcattttcttaaaaataaataaaggattttttattttcaaaaaaattaattcatatatccacgtatcaattatataccccaaaattaaaggatttttaattaaaaaaaattagattagattatacacacacacaacaattataccaaaaaaaaaagaatttttatatataaaaaaaataaattatatatttacatatcattacatccaaaaataaaggatttttttacataaatttttattttccacactttaaattcgttttttttacaaaaattcacataattactcacgtagcaattaaaaatataaattgcaattaaaatttacataaaaactattagagcaagagcaacctaaactgaaaattttaaaaaaataatatatgtgaaaaaaaaaattatttattttttttaaaaaaagtagtatttcatacaaatgggcatgcaaccatgatttattgaaactaactatcaaaccttcaatgtgaagattttttatcttttaagaaaaaaaagaaaaagaaaagttttcttagatattaagacttgctcaatagttatagagaaaaaagtatattcatcatgtgtatgcatgattttttttcaccaattttcttactcatcatgagaaagtattcacagccagagaaaatatattaaagagaaacataa

SEQ ID NO: 217149 - DNA, 889 bp, Cannabis indica
gttattttattaagtacttaattatattaattataatttataaccatcttcaattggaaatttcaaccctttaaaattagtatgtcgatctgcatgcatttttaatattgtttttatttttatatatgtacaaaatatatttaatgaatagacaagaaaatgaacttcttgtacacaaaagcaaatgctaattaattaatttgaagtccaaaaccatatttataacttttgaaggcaatatatatgaataatatgactagtagttaaaaaaaaaattacaacaaaaaacaattccaactcaaacttcgatcactagaattggctttgccgttgatcttccatggaatctgattctatggaaaattttcggtattgacaaggccgattctagttagtgattgaagtttaaatttgtagtcactttcgtagctgagaaatttttgttaaataacttcttcatttttttgtaagaataatcgattttgtagtaatccaattttaaagactacatatatacttaaatatttttatatgaatatattatatggtaagtgacaaattaattataggtgataattatgattaattaatatatatacaatttttatattataatatataaccgatgatcatgcatgcagacattttttttctttctttaattttccaaaaagttattcagtctcaataattgtcttaaatgtacttaggagaaaatgatataggttaattaaaaaaatatatacatttatattttttaaaattcaattctatatttataaattttctgtttttgtttaaattggattatggtttaaagaaggtaggtttaaaatttagtgggttaatggaaaaaaaatacatatttagagaaaaaaatgaatattcg

SEQ ID NO: 217150 - DNA, 579 bp, Cannabis indica
tatatatatatatctttttaaaaataaggttaatattggagtggggtattttatgttaatcggcaacaatattattgtaaataagttagtaaaataggtagtttcctaattattttagactctaataattataaaattgtataattctcccaataaaaattgtgatactaaaataatattgttcaaaataataccattttcttcaattttattatatcatatttacttacatttcaataaaatagaattttaaaataaaaatatttttaatactcattttaaaataaaaatcatgcatgacataataaaaaataataagctcatgtcaaaaaaaaaaatatatgtaataataataaaagcttcaaatgtagactaacttttgaagaaaatacatatgatattaatgtatttaacatatatatttattaattatgttgaattttttttttttttggttgattgcaattatgttgaaaagttaagtctgaaagggaggtgatatatatgcactttgccgtgagctaatccaccagtatatatatatatatatatatgtatatacatagttgtgtgtttgtg

SEQ ID NO: 217151 - DNA, 509 bp, Cannabis indica
tccatacaattgtttggactgtagccctcaaatgttcttgatagagagagagagagagagaccagtagacagagaagacacggaggtttcgaaaaatcacttcggcgaaggatatgatgtacaaagaagataatagtgtgattctgattctctgagattgggcttgtaaatatagtttctattgcatctagtgtttgaggttgtgcagaagatggttagtttattttaattattttttatttattttagtgttgttttacagttatttgacatcatttatttatttgacatcaatttcactgttcttgctccatctcgccaaaattaatggttattttctaggagttctcgtgtttctgtagtggttctgtccgtgggtgtggaagatggggctataaattcatttcttcttcattctctttggctatttttgtggttggttctcctataaatacatttgacgagctcactgacgaaagagttttaaggtgtatggttcttttatattt

SEQ ID NO: 217152 - DNA, 706 bp, Cannabis indica
gagttgtatatatcttggtttatcttccattgtaataatatctctaacatatatatatatatatatatatactagataaatgctacgtgccaagtcacgtatgttaattttatttttagtttttaggttttttaatatcataattttaaaattaataatattcaattgtagtgataatcattgaaatttgaaagcataatagtgatttaaataaaaacaaaaattactattatactaagtaattaaaaaaaattattattcgtcctaaatttatcttcggaattaatgaaaatgctcatctggttaaagaatttgttattttatttagtgataattaaattataaaccattaaattttatattttaatattttaaatgtgatatagtttaatataatttcttaataataatatgaataactattctactaaatttttattttttattcttaataatataagaaaaataaattaatattatagagtcttaatttttctaattattttaaattcaataaataataatttatttatttatttattatatatatatatatcattatacggttagtttttaaaactactgtcatcaccgtactcacttatagtctacaactatattcagaactgttgtcataattttgtctcacttgtagtcatcactatcatttataatatatttgttgtatacataaaataaatcaaac

SEQ ID NO: 217153 - DNA, 857 bp, Cannabis indica
aaactaaagaacaagtcattaactcgagtaacaacattggatcacagtcttcatgactaaattaaataagactgcataaaaaaaatctgaacttacactagacaattcatctctaaatattaatatattagatataatgtacaaattattatttttatttaataaaggaaggagacattaatggttctgctggttatatataataaatacatactgctgtcagtatatatatatatacttatttctcacaaagccataatgctacaataactaccatcatgatgctcttattggaaattaatataattcttttttaacattatcaatcaatttaaactaacatagtcaaaattaaatcgaagaatcaacaaacattattaattaatgtcactcattatcattacttaataattatatatgtattgaaattaatttacacaaaatactatttttaataattttttttacacttttataatttatattttttacgtagaaaatagaaaataatatataaataataaaaaataaaaataatattaacaaaaatacaacataattttaaaaaaaaactaataaaaaatatttaaaattttgtataaacgtatttttatatttttttttactatttttgtgtatttctaatctcatatttataatgcaattctatagtactttaatttaattcccattattaatttttaaaatgtgaatatatatttgtatataaaactaaaatcaaaatgcagtgaatataatttcaaattataatagctagagagagagagagagaataaaatacgtattgtgtgatggtgatcgtactacgtacgtatatatatagtctttgaattttg

SEQ ID NO: 217154 - DNA, 624 bp, Cannabis indica
agtaaatcgtatgcattaatataagtaaacgatatataatattaagtaaatgtgcctaaacagtgacggacccaaaatttttaatcagtgggggcttaattattataaaaatatttattattcactttacattaaaattataattattttatgagggttttttactattttgttgtataattatttaattaaataaaagatatttaaatttttttaacactattttttttttagtgggagccactttctttactgcgtctgtccctgtgcctaaataacttacataaaataaagtaaataattttttaaataagacacacaaaaattattatgttaaaataagttaaacaacaaattttattaagtaaacaacgtgcctaaaatacaataaacgacatattttattaagtaaacaatatattttattataagaatatataaaacagtttaattataaaataggatatattttaattaaatttattttacagctatttttaatgaatgaataaaaagaaataactctcaatttccaaaaaaaaaaaatcgagttcaaattctacttaatgagggtgtgcttacccaacttgaaatgaaatattgaagttatttatttatttattt

SEQ ID NO: 217155 - DNA, 755 bp, Cannabis indica
aagttcaatttttaacggtaatagtacttacgttataatttttataagtatctgaatattaagtgttaagtaaattgacttgtgataattttgattagtctaggttattaaatttttatttttaaaaaaaaatagtttaaatataccaataagaaataattttcattccattcctttatttggttgcatgttaaattattgaaatatcatttcaatggaatgatctttctactattttggtggaatgaccattctattttaaaattgaaggaaaaaccattgcaagatttgaaaaaaattaataattttttttatcaatttttttatgaattttaaattttattccatttctattccaatttctatttccattcttatttctatattttcattgataattttgattggtctaggttattaaatttttattttttaaaaaaattagtttaattataccaataagaaatatttttcattccattcctttatttggttgcatgtaaaattattgaaatatcatttcaatggaatgatctttccactattttggtgaaatgactattctattttaaaatggaatgaaagaccattgcaagatttgaaaaaaattaataattttttttattaatttttttattgcattttaaattttattccattttcattttcattttcatttcctattccaatttctatttctatctaagtgttatataaattggcttgtgataatcctgattggtccaggtcattaa

SEQ ID NO: 217156 - DNA, 1199 bp, Cannabis indica
gaataaaattgagaaaaaaaaaattgaacaaatagactttatttttttcaatagcatgtaattttataaaaatacaaataaaaaattgagactaatgaataaattatgaataatttaaaagttatcgagtgtagttgtgtacatcaaaaaaatatattataaaatataaaaagaaaaaaatactaatagaaaatcaagatttttgatgttgttcattaatgttattgttaatgctgaagtagtctaaagagagagttagcctcaactccctatactcacattacaaaaatacaaatcaatacaaaaattaatatgcataaaaacaatcaattgtgaatattaatgtgtaaataaaacacaaaattattactaataaaagtaacttcgtggaaaacaattttcgtatacacagaaaactcgaaaaagaaaagaaaataattgatagcaagaaaataggatgacaaaaaataattggatatgttgttattagaacataattaagtgattcatatgaccattgtgagaaaagggatgatgtatatttgtatatgaatatttgagttatggttagctttctaacaaggtttatcgtagctacacccactccgatagaatttttttatatatctcgctaatttgagttgttatttgcaatttcacgatttcaatcaccatttttgactcgaacttaggtgcactgtccataaaccaattaagcattgattcaagccacaaattatcaaaatcaaatatttgtgcaatcaaagatgtggttattacgaagagataccattttaaatgtatcggtttcgactacatgtttaccgtcaattaaaccttaagttttatcatctacaactattttgattgcattcgcattcccccgtctccaaatctgtaaatgttggagaagattattgttgctgtgcgaattcatgggtatgatatttgtatgtgcacttgtttatttaagattggttctttattcttttcatttgaaattttttctcactgatcattctattatttttttgcgtttattcagaacatgcaagttgctcttgcattttaggtccctgatggctagcgtcaagaaaagcaagctatccttttgactgcttttcatgtgtgcattttaatattggaatctgttaagactatgtttcttaattttgtatcatttttctatgtatatatgc

SEQ ID NO: 217157 - DNA, 537 bp, Cannabis indica
tactaatgcctttctctgaacaaaaatatctacgaatcttttctttttccagaagaaatggcctcatctttaatatatagctttttgtctaatattaatcttaacacttaattttctctatccaaagataatattaaatgaaattattgtattcctattaattaaacatgcgcaataatattgttgagcataagataaaattaaatttaaagtttaaaatgtggttatgtatagttttagtggtttttgctactttttttttttttttttactacaaaaagaaagtcttaaattcgaatctttcctcctcaaaattgaaaaaaaattagggttcaataatattttctataaatacacttaatatttttcttaccttataatcatttctttcaaaggttaataattagaagaaaaaaaattaaagtttttattcagtaaaattgatacgcaagtatactaaatcgaatcaaataatataatgataaagtaaagtatcgtttccacgagaattaattatcaaatattaattaattaatt

SEQ ID NO: 217158 - DNA, 558 bp, Cannabis indica
tgaaaaaacacttaagaaactcgattttttaagaaaaaatatttttaaaaaaaaaacaacaaagtaatgtgaatattttaagaagtattgtgtgttttaagatggttattgtgtattgcatgatatcagggtataagaaatggacaaaactatgtttcacaataaaaaacaacgtttatattataaaattattaaattgtccaatataaccttaataataaatgacaaacccccagaacaggtcctttgtgatgccacaaactaccttcaccaatactcgagctgcaatcagaaggccatcatctctccacaagtccatgaagatcaaccgttacccactgcttgccgcacagctgctccaaccttcaactttcggctttatgttgatgctgcccaagattcagagcttctcaaaatggggtatggcatgactattcattccaaaacaggagatgttcttctcaatttggcatcacctaaaagtggcataacaacccctttattaatggaagcacaagctcttcatttggctctttcttggtgccatgtattagaata

SEQ ID NO: 217159 - DNA, 885 bp, Cannabis indica
ggaaattacactctatatcctttttatattgtcctcttttatttttaccctctttttaaagtctattatttttacctctttttttaaacattgtaccaattttgcccctgtcacttcaagatactctccatgtgactctcttatgtcagggtattttgggtacaatacatataaaaagaggtatgtttcaaataaatataaaattagaggtaaatttgattaattgattaataaaaggagcatttttcaacttaccccataattcatatataacataattttgaataaattttttatatttttacgtttaaatatatatatatatatattttaatatttttaccgtattttataaaaataacaaaaaaattatataaaaataacatgaaaataatatctaaacaatatcaaaataacaaaaacctaacaataaattaacaagaataaaacataaaaatacatatattttctataaataaaattataaaaatcataaaaatatttaaaattactgtagaaccaaatttttatatatttgtgaaatattctcttattttatatatttaaaaaatattatattcaaaaatatcacaacatacaatttaattatcactaaaattaaaaagatttatatgctcacatggtttgtctacctctgacaatgctagaagtttccccatgatgatatgtaagagtctgtattagctggtaataattcattaaattaataacattaattagttgtgaagatataatatataatgatatatatacacaaatatttataattaattatatgtacctgttccatttccatatgaaagatctaacactttgagtttttgctcttaacatttgtatgttcaccatgagtaagccaaaaaa

SEQ ID NO: 217160 - DNA, 539 bp, Cannabis indica
aaatacataattttaaaaggaaaaaaatgggccttgggctaagtgggccctaggcacaggcctagcccgcctatgcccagggaggcctgtgcctagggccgggcctagtcgtttggcaaagtttttaaaaattgagttttaaaaaactaaaaacaaaaacatcaaaatgttgttttctatttttcaaaaaaaaaaaaattaatgtaacatattttattttatatttttgctcacatactctaagtcggatcctatacccaaaaccaaactcgaacctgaactcggatagattcatgtcatagtatggtgttaaaatattaattatttttttagtaagaaaaaatctaaaaatttgtgccaagcaccttcaaatttttaaaatgacaaaaaactgtattctattttcacttttaaaaacacaattttaaaacttgaaaactgaatacacgaccaaacaaactcttaatcaataatttttgcaaacctaaggtataaaataatatttatttattcaaaaatataggtaaaggggattggtt

SEQ ID NO: 217161 - DNA, 759 bp, Cannabis indica
gtgagcactcaataataagtccagtatcatcctatcaaatttaattgaactgaaattaattttttttattttttaaaagaaaatgttgattgaaaattataaaattagacctcacagttattacacaggatagtgttaggtatagcagagggttctacaatacccaagatattctgagcataagcccatctagcgacattatgagccgcaaagttacaacttctaggaataaaagaaaattacaagataaaaattcttagagagttgattacaaacagacaaatagttaacaatcttccaattggaatggacacctttaatagcatttataactacttctgaatcactctcaataaggataaaatcatacttcctaacagtagcagtttccaaagcaagctgacacaccgccacatcgccgatcaaaggatctgtgaagttgaggaagttggtcgcaccccacaaaaccgtccccacatgatctctagccaaagcaactatgcacatggactcaccaccaaccttcacatcacaattaattttgatccagtcttcaggaggggtcgaccagccatgaggaagcacctctactgtcggaaaaagcaagcaagtagcataatctgtaaaacaattagagatagagtcaatataaaaaattagattataattataaattaaatattggatttaatattaaaaattagatcataattaaattaaatttgatcagttatagatcaatctcaaaattcaaataaa

SEQ ID NO: 217162 - DNA, 709 bp, Cannabis indica
aagaaaaataaaagactaaaattgaattatcaagtgaatttttcgaaataagatggttcttcattaaaaaatgcaatgacaactcaacacactcaagttactaaaaattgtagtcataacacaaaacattcatacatattcaaaagtgaaagtactaggttactttcaaaagctaaataaaagtctaaaattagactaccaggtgaatttttaaagatatgatgatttttttttttgtttaaaaattgcagttaaaattcaacacactcaaccatatttagtgaaagtaattttcataagcaaaataaaaatctaaaattgaactaccaagtgactttttgaagatatgatgattttttggttgaaaattggagtcacaactcacgcacttagccatattcaaaagtgaaagtaccaagttactttcagaagcaaaataaaaacttaaaattgaactactaggtgacttttttcaagatatgaaattttttttgtttaaaaattgcaggcatagctcaacacacttaagcatattcaaaagtgaaagtgctaggttatttttagaagcaaaataaaagcttaaaattaaactatcaggtgacttttcaagatatgagagttttttttgttataaattgcagtcaaaattcaagtcactcagctgaaggtactagatagtagataatcatgagaaccaaaataaaaactt

SEQ ID NO: 217163 - DNA, 1054 bp, Cannabis indica
ttcatagtggtaaaaagccagatcaaagatcaaacgtagctaatttggttttggagatttaatatgtaccaaatcgattaaatagtaaaactactatactcaatcaccaagaagaaactccataattactcagtattttacaaaaagacaaaaaaaaaaaaaaaaaaaatacaaactaacttacaattacgatataggggccttattctagagaattctccaataacatatgaacaaatctttttactcatttcataaaatagatttaaatttaaaattgtaatacatcatataggaatattaatagcaatactacatgaaatattatacatttgttacaattaactccacaaattaattttttagataaaaccttccaaacaaaccatatgaattatctgatttgtgacactgagagcatgtcaaggtggactacctgctctcaaggtggactacctaattataaagaaatataaacatgtcaaatttctaatggtccgcactaatattaattaggaatattggtagtaaatcataaggactgatttgtaacacttacaatgatattatttaaatttgtcaaatataaattaattttacaaaataataaaaaaataatagtaattatgattacactaaaacacaccaaacccactataaatatacttagtatgactattatcttatttccccaactttctgcctttctttcttcgggttattcgttaataaataaagaataaaatatataattgaatacgtgacaatatattgtgtcttgctatatgcgtacatactaaatctaaatacaacacaaagcagtacacacatacaccaaaaatatccattaatatctatcaaactcgagtaaactaacatactacataaatatactgtcacgtggcagttgacaggcactacataaagagagagaataattaaaaagaattatatatatatgaagaacgatataattattatggtgaatgatttaaaagaataattatatgaagaaggatataattatattatggtgaatgaattggagtgagag

SEQ ID NO: 217164 - DNA, 707 bp, Cannabis indica
ttgatgaaactgatttttaaagtttatattatctttagattataattttttatattgttttttcttcaggatgatgttgatgaaactggttttttttttttttctgttgcttttaatgaaataattagtttttaacaaaaaaacaaagaaaaaaaatagtagtttaaataaaaaaaaaacaagtttaatttctgtaaaaaaaaaataatatctatagttgagatcattttttatttattttagtattttatttttttaaaaaagaaaaaataaataaaaagaaacacaaattttaagttttttatggcattactcaagactttttcccatatttgtaagttttttaaaaaaatgccatatttagtgtaattaagtttttatgccatatatatcaaaacttatctttattttcccatatttttgtaaatagcccttatctcaatagtatatgggctagattatgatgagatatatagcccaatcgctaagattacaaccgaacgggtcctgctagcactcgtagctagtaaagattggaagactatggtagatggatgtggagaatgtatttttacatggagcaacctagaggattcgaggatagatctcatccaagcttatgttttgcaaaactataaaaagtgttctatggattgaagcaagctccgagctgagttttttagagagagcaatcatgccatggtgca

SEQ ID NO: 217165 - DNA, 715 bp, Cannabis indica
tatatatacatatatatatctatatattgtaagtacaataacataatatatgttcaatacatataattcattttttcatagaagaagtattgggtatgtgttatattggtagctgagacataccacgtatattacttgcacttcgttaatgcacccgtaacaaattatccagtcattctaaaatcaataaagaaagcatatgatacatacttaataagaaagagcgtgaagattctaaaaaatttaagtattaaggagctcgtagtaagtatatgtaaatttcaataataatttaaggttttaataaattattaatctaattatttaaataataaattattgtagtgtcctcatcaaccaagtaatgcagagtgtggctactatgttatgagcaatcttttaatcaacgtgactttattaagaaataggtacataaatatttataaactacttatcaatataaatttatgttttatttacatttattatttatttaatttattattctttatattttgtagctaatagataaaaagtcatatccaaaagttatgattgacgagacaagggaagagtgggcgactgatatgcttccatacttgcggacttctcacattgtgggtcattattaagttattgtttttttaaaaaatattattttttataaatatttagctaacaatactagttaaatatatattcttttcctctaata

SEQ ID NO: 217166 - DNA, 703 bp, Cannabis indica
tttttgaaaaaatgactgagacttattgaaaaatatttaagtgtgctcatgataggtgggaggaacgaatgtgtgcttttcataccaataaaggataaaatatgcacaaaattacatgattatcaagtaaaacttttctggcaaggggtaaggaggctttagtaaaagttgttatcctagaaatgtcaacttaccaaatgtcatgttttaaaattccaaaggaaattggtgaagaatttattggtggggatcaatccataacaaacaaatagtttattgaagtgcttggcataagatgtgtcaacctcagactaatgagagtttagctttagacgatttagtcaatataatcaagtttttttggccaaacaagcattgcaaattttaatgaatccctcgctaatagtggcttaagtaatgaaagcaagatattttagataagggatcatacccatcatcaacttggcaagtaatcttatggggaagagatttattgtcgaaagggtagtttggaaatgctagaaatacaaggacgtttagagacccttagttgctaagaccaccttcttttctcccaaacttgcatcctatgtatgatgtggcaagagtgttggatcttattggcccgtatgggatatggaattctacagtaatgtttactgagattttttggtaaactaaatatttaagatcttaagaataa

SEQ ID NO: 217167 - DNA, 606 bp, Cannabis indica
tgcctataacttggttgcgacaggtcttatgcatgtctaagtacaaatttggagccatgtttactaagacggacccgaaaactgaaatcctacttaggaatgtgagcctgggcgctgggtgaaaagcctaggcgtctgggtttacttctgatgtgatgtttcatttcttttcaatttccaggtctcggacttggattctttttgtcttcttggttcaaaatacttaaagatagtgagttgaaaaaaatttggcgggatccaaacacccatactggagttctctgagtcaaccttgacgcggggctagggacccctaccaggttaactactacgattcgggactacttaactactccgagatgtttttttcttgccatgtgttaaacattgatgtccacatcactagggtcagtttccaggtaaacacctagctttcgattgactggaaaatcttgtatcaaggctctccaagcaatgaggaggtatgtactaagcaaaaaggccaagaactatctcagacattgatgatcagagccagctgaggagaagatctttccttctccaagtggtgaacttggggttgatctggccattgagtaatcgttc

SEQ ID NO: 217168 - DNA, 721 bp, Cannabis indica
tttaaattaggttcaaatttatggttattataataggaggatgttgctaaactattattctatacttatttattgttttagattatattaaacgtataattaagtccatcaatttaatttaactgacagtgtatatagataatagaaataaaaaaaaaataataaaatcaacaatgcataaagtcagagatatttctttttctcctttgaactatattccacgagtagaataagtggcaagttaaggtactcaaatatttttgtcctcgtatgtatattttctctgaaaatgtctttgcatatattctcatcccattttttttaaaatcaaatactaaaaaaaaaagaatatatatatatatatccttgaattaattcctcgtttatatccaacttcgatcgttgcaattgtacattaatgtttttttgcttaagaacaagttgtattaaatgttgtactacatatatttaaagtaagatatatacatctatgtcaaaaacttacaaggtcaacgtagtgtataataaattaatagaaaggaactcaaaatttacttaagagtactatacgcaacgatctaatataactatacatatatatagttagtaaacgaatcttataaaactaatataaagttaaattaaactacatagattgacacgtgtaattttattttaacaaaacaaaaatacatttcaaaataatagatgtagtattatt

SEQ ID NO: 217169 - DNA, 588 bp, Cannabis indica
tctgacagtgaaaaatgagctaaaggtgctctccttttataggtgaaggagacccacaaaaataagaaaaaaataaaaatcaaatatttttgactgtagatgatgacaataaaaagtaacttctgatggtgatagtcatttttcgaagctcggtgggacccgctgcgggtaactcggaacttatttttgtaactcccttagggatgaaatttggtgccgatggcttcagaagtacgattaaagtgtgagacatgacttgatagagcatgaattagcttcaaaacgcaagttgaattgcgtcaattgaatcaacattgagtgagttataactattttactaaaactagttcatgacggccaacacataggttgacatatgacgtcaacctgaacactggataagtgtgaaaatgtcccagggatgcactttaagatgcctaagtaatattttgacatcacttagtttgtttttatgttttggcaaagctagtcaccaattcttaaagatgttgctgttctgcggaaatgagagactcaaaactcttcattttcgagtgactttcttatgttggaaatgagaaatgcaaa

SEQ ID NO: 217170 - DNA, 1078 bp, Cannabis indica
ggtttttgggattcgatctggatggttccgtagtgcgttttttttgaccgttttttttttttaaactaaccccttacatgtgattttttcaattttccaaaccgcacccgtaccgtaaattaaaaaccgacagaaaccgcacttcaaaagttagtgcgtctacggtgcagttttttgcgtttttttttttttcctaattttttgcagtttggacttcaccaataaataagttatcacaaatacaacaaaatttgaataacacttctcaaaatatcataatacttaaaaataaatatgaaaaaaaaattaaacttcaataatacaataattagtgggctttgggttaacattcacatatttgacttaaataaatataaaaattaatatttttataatgtgcggtgcattgcggtttgaatcgcatattaacattctttttcttgaatttgttccattcctctctaatactaaacttgaaaatattaacaaaaagtgtaaaatcacacaaaactcaactaaaactaattgaaaacacttcaaaattctcctaaaatatagtgctaataaagtcctaacaattttataatttcaatttgtcaaatataaattaattttataaaataataaaaaataatagtacttttaattgaactaatattaaaaagtttagcaaaaagtaagaagttccttaaccattctctattatagagagtcattttgtatggttggagctcatattttcaagtcacactcccttatttacctgagtgtgtttagagagcatgtttggagatactcttgaggaccataataatgtgttgtaattaactctaattgtttctctcttctagggttttctccttttctcttctcttcttctcgctagggtggtcgtcgccggcctttgctgtgcatctggtgctccttagtagagggggattcgtgtgcgattttattgaggatggtgcttttgcttttgattggaatgtagagtttggcaaggggttgagtcttctcagaggcgtctttggaagggtgctgtgagcgttgggcttcttcgtcaatacgaatgtgcctc

SEQ ID NO: 217171 - DNA, 906 bp, Cannabis indica
ataaagattagagtttgtagaatgtgggagtctcttaaaactaagaagaatggagaattgataagtctatgatttttattgatgaggagaggattattattttattcatattttccctctattgtttttttttaatcatttatcaattattaaatactcaatatgtttaccatttatcttataggaaaatctaatgcatgtaacaataataaaaaaaaaaaaattaagtttctaagttaagaagctattaaatttatttttaggtttttattaatcttttagacttctatttagtttatttagagatatttcttatattagtgctttgttaaattttttttttttaaaaaaaaaagtgatagctaagtgctatataatagatttggagttattatttaaaaaaaaataaaaattttaatcttttagacttctattaagtttatttagaggcatttcttatattagtgttttgttatgtttttttttcaaaaaccgtgatagattgttggaaaaattctcattacaagagagaataggaggattacaatcaaaatactcaaaatacaaataaaagtatttcatcaagattacaagaaatctagagaagaagaaggataacacacaaaaagcttgaccaaggctcaaggacctttgtcctaaaagtcatttcctccctcatatggacacttagggaaactctagaaatgctcttaaggatttatcaagcctcatatgctcagcctagtgtctaaggatgagcatatcctcacaaggttctaaccacaacaaatggtttcaaccacttcttatgcaagtgaacaatatggcctttatttatagagttttcactctcatatgaacatgaatgatcaccataaagcccttggatgttaccaatcataaatt

SEQ ID NO: 217172 - DNA, 586 bp, Cannabis indica
tacctggagtgggagaagaagatggaattggtgtttgattgtcacaactattttgaaacgaaaaaggtaaaacttgctgccattgaatttactgactatgctattgtttggtgggatcagttgtgcatcaacaggaggaggaatggagaacgagatattgactcttgggaggctatgaagagggtaatgaggcggcgttttgtaccatctcactattatcgagacttgtacctcaagttgcaaggtcttcgtcaaggctacaagagtgttgatgagtattacaaggagatggagatggctatgattagagccaatgtggaagaggatcgggaggctacaatggcaaggtttttaatggattgaatcgagagattgctaataccattgaactacaccattatgtggaattggaagatttgatggacatggcaaaagacaaatcaagaagggtagtttgagctcaaagccaaggccaagtccacacaatccaaataaaacaccttagaggtcaaacttcccaaagaaagaggaatcaacctagttcaatcctctgcacccaaaccagccactgcaactacaaccccgc

SEQ ID NO: 217173 - DNA, 799 bp, Cannabis indica
gagagagagagagagagagagagagagagagagagagagagagagagagagagagagaagagatgatgcagagagagaatgggtttgaattgtgaggggggtatttttgggattttgaaaaaaatgtcataatttttttaaggggtttagagttttcggtttaataataaaattttttaattttacaagtatataaaaatacaaaaattactccaaaaagaatcgatgataacaatatcaacattaaatttaatcagacccacgaaatgagacattatcaatcggtaaaagcatttaaattatcaatttctattatttttgttgatacccactttaactactctattaattgtctcaaaaatgctaccaaatataaaatattagatagtaaaatcaacccacataaaaaaaaattaaagtgtaacataaaaaatgtatatattgtaaatgggtaaatttgatagtatatttattatttaattatttattattacttaaaaaagggtcttacaaaaatatataatttttacattcttactggtaaactttttttttaatatttttactgtgttaagtttttaaaaatattgtgttaaagttttaaaattataaaaataatgtattttagtaaataaaaaaaaattctaaaataatttaacaaatagcaagaaaacaattataaaataacaaaaagataattacaaagcaacgaaaaataataaaataattacctaattgcaatatgcaaaacaatatgaactcctcaaaatgtttttacattacgattttttttacttag

SEQ ID NO: 217174 - DNA, 815 bp, Cannabis indica
gagatttggctacttgattcatatattgtaatcttaagagagcaactttagattctacaacccttgtgatttgagtggtattatctctagtattaatacaactaaaagaggagtaggttattacccactaagggggccaaacctctataaaaaaaattctctttttatttcttattcttattatttacacgtggtaaacatccgtaatacgacttcgctattggttggccaaatttgaggtcaacagtttggtgctttcattgagagtcttgtcaatttatttgatcaaacaccatagttaacacaaggagaactctggctacaacttctgtttcaatgggtcttcctcatgaccctatgactactgatcatgatgttcatgttctagccacaaccggaatatcaacaaatccaacagatcgtagccaacactgccaaactaggcaggtacaacaaacttgaccaccacaacttgttaggttgacactaccaatccggttggtctcaaagaccaacctttgctgcccaggaaggaccctccactggcgccttgtactaaaggtatggccaacatgaagcagcccccgggcataacaattggatttggtccccaatattatgctagagagacagaactagccctcgacgagcctcatgtaacttgggagaagatctcgagttggctagacttagagaggatgtctaccaagtcagccaaactaaagaaccacatgctgttggctgcaatgcattcgaaggtttgttcgtttttcttttctttctgtaagtttttatatataacttatatatataaa

SEQ ID NO: 217175 - DNA, 795 bp, Cannabis indica
gaattctaagtgtgatcacctaaacattatttgaaggagctctttggtgctcatttgagaaaaatcaagttttctatcaagaaaacactatgctaaataacactaaagggcttgataatttccaaaactattttcatgtgagttcccttagtgcgtagagatagggaaaataagctttttgacaaaggtgtaatactttgttcaagtcatggtgattctcactaatctacactcaaggttgtgaatgagtgtatacatatatattattttcttgttatatatatacatatattatattacatgtgttgtatcttcttctacctttcatatatatatatgcgatatatatagtgtatatatgtgtgtattataacatgtatttaatcaatcttttttattgtccttgtattatttttacaattgaattgtatatatcttgatttatcttcaattgtaataaaatatctaacaatcaaaagcttatttcttttcaatagaagaagtgataaatcaagattttaagaatacaaggagattttgtatgaaacacattcaaaagtgagcatggtgatgtatattatatgcatgtgatgtactattttatatgatactaatatataggatatatagatatatgatatatacatgtgtgagttatatttatgtggcatatatgtaattatgtatttatatcatataatatatataatgatatataatatgatatttgtatttatatcatgttattatatgtatatatgtgagatatataatatatagcatgtatatatgagt

SEQ ID NO: 217176 - DNA, 633 bp, Cannabis indica
atttgcatctatccctatcgtacctgaattcgatcgacaactacttttgggatctttaataattttacaaaattaatttcactattacagccgagataaaccgatcacttcactacacgtgtacttgtaagcgaacatattgtactggtccatatatgttattatgtaaattatataattaaggccccctaataattaaagaaagcatgactaatattatgtgccaccaattaggcattagtttattaaattttgcaatgaatttaatgtccaatcagttgataaaacaacttgatacgttagtaccaacgcaactaatatccaatattataataattaataactaatacctgcttgaaatgtaatatatatactacttctacctttccttcttacagatcgcatcaacatatatgcattccatttattgtagatatattaatataataatttttttagagagtattactatagctaatcgcaaaacgataatttaaaggtgataagtactactaatgctcaataataatgttgataattttatagtaagtttaatcatacatttaatacaatctaaaacaataaaagataagttaaatttaagtagaacgatagtttaacaacattttttta

SEQ ID NO: 217177 - DNA, 1095 bp, Cannabis indica
actgactatagcagctttccataatgtatggaagcaaaaaatattgatagattgaattacttacattatataaactttcctctcaggcatggatattatacaaagaaggaaaaagtttggaacttgttattgatagattgcatgaggagtcatgtaacataccccaagtattgagatcaattcaggtggctttgttatgtgttcaaaataatccacaagataggccaaatatgtcatatgtggttttgatgctgagtagtgacattccattggaagaaccgaaagagcctggtttcttcactaatagggatctaattgattcagattctatgtcgactattcgtgaaaaatctactacactcaacagactaactattacaatgctagaagctcgataaaaaaagatttagttcaagtcattggaattgttgattgtaaattttattctacagcttacataaatcgaaagatgaattattgattgataaaaaattttacatgttgcaccgttctttttcatcttggctcaaattatttacaaaaattaggttatttattacactttattcaaattaatattaataattatgtatatggctttcaaaagaaaaaaaattaaaataaaatttttgcttccgaactttttaccctaccaaattttggcactcacttatgtttaattttgcttatatggcagtattattttaaataaaaaattatgtggcaagacatgtcaatattaattttgagtgatgtggatatttcaatgtaacctaaattaattttttttttttttttttacattaatgaattaaaacaacaaataaaataaaattattataaaaagataactgtaaacaattaaaccttagctatcctttcctattttctctttcttgttcatgcacggttgtgttcttcacgcctggtgaattttttttttttacaagtaaaaaaaaaattgggtaaataaaatctgggcttcacgcacgacgatcttcacgcttgtgtcattaacctatgagtatcaataaacagtaaaagcgaaatcaatataacaatcttgatgattcggagaaacagcaaggtggagga

SEQ ID NO: 217178 - DNA, 788 bp, Cannabis indica
agagtaaattatttcaaactccttaaatgattaagtttaagattctcttaatttcaacccctcttaactaaaatttactaaataaaattcttacaccaaacacctcatagtggtacacaaaactaaattgaattgcactagattggataagattgaattatgctggtgtagattattttatttatttctttttatataatgataaataaataaaaatgaataatttgtaataaaaaataaaataaaataaaataatatattatatattaattaaatatatataataaatatataataaaataatttatcatatttttatatttaatgaataattaaaatattaaaataaaaatacttgaataatataaaattatttataataaatactaatttaacataaacataaactttttaaaatattaatataaattttctaatgatttgaaaagaatatataattttattgttatattgtttctcttaaaatcaatttaagtaactattgtttaattaatattattttaaattttgaaagcttatgtattataatttgaaattacatattttcactcattttaatgaataagcttttcataaaaaacaaaatattaaataaatttgtaatatttttttcatataaattcttattaattaaaatatattaacaaaatcaaaattaaaaaaaaatatatatatcacctatatgagattatttatttcaccctgctggattagctggatgggataaataacctcagacagataagattagctagattagttatcca

SEQ ID NO: 217179 - DNA, 716 bp, Cannabis indica
tacatatgattttgcatgcaattcatgttaaggtacttacgagtgccaaaaaattgcaactgttatactcgaagttcggtaagcccatcagaggagaacacgtgtcgatcgagatgggaagaactcaaacacacaaacgacaagtacgcttagcatggaacaactcgttagaaatataattcgcaaggtaggtttataactcggctggctaaatagccttatgcgagacagtatcatacgaactgctaatttatgtattgaagagaaaccatgtgtgcatgcgttcatgacgaggcctcaacctcgctgcatgaaagagaaagcgataacactaaaaatacttagtgtatattatacgatatacaaactgagtatagatagtatgacgtgctaagataacagacagcgaggaatttatctcgctaagagatgttttacatgcgagaaagatcttctcgaccccagagaatataaccatcacgattaagacaatattagtctcgaaaagctaaaatgacaagcttctgctcgctatcaaagtgatcttggctccatcctcggcaaggcatccctatgagatacgactaactcaaaaaaacccattttccccgactagtttttagtcattaaactcattaatagtcaccaaatttttatgactatattttagtcgccatttagtcactgaaagtcggtcgtagaaaagatttagtgac

SEQ ID NO: 217180 - DNA, 868 bp, Cannabis indica
agaaagcttcaattaactgaaagcaagttatctcaatatgaccagctcaatgtgatactgcttaggaaaatgacgaggatggaagtcgtgatgacagtcctgaccaaaaggaaccctgctgtgcaaacagctccaacaactgatgctctcagaagagttgatcctaaagatcctagaacttataatcctcacaaggataaaaggaaaagggtaataggtgaaactttgaagaaggatcattcatctaaacaacaaaagaagtctaaaactgtcagccaaccttcacagaaaaagaaaggaaaccatgcttcaaggcagggtaaccaaactaattttggaggcagagctacgcagaatgataagactaatgccagagacaagaagtctacttcccagaaggacaagcatcgttgcaatgactctaataatcaaagtgatgatgttgatgaggcatatctggtcttagacggcaacagtcgaagtctctccacaaatgatcttcgaagaagattaaatgaaagaagagaaagctagaacggaaaagacagacccgtgggacgatttgacaatcatatcaatgatcgtgtttgcaaaagagactcttcaagtgataaaactcaacgcttagaacgcaaagacaaggagttgatgaagctcacgaagaagatttccagaaagcaaaatggaactgtgtaccttaaagaaaaaaaaaaaaagacagaaccatgtgtgaaaagaattatagatgcaccacgaccagagggcttacaaaattccccaaatggatttgtacaaagataggatagaccccaaggacaacttgtccaagtacaactacatgatgcaagttgctaaggatagtgatgat

SEQ ID NO: 217181 - DNA, 615 bp, Cannabis indica
ccaattatgtgcattagaaactctaattttaataagttatgtgaggttatatttggtaatctgattataaaaaggagtatatatcaattaaaattattttagagttatatttagttaatgtgtaataaaaatgggtaatttttaacttataccatattttttttatagttacaattggatttttttttaagcaaagatgcttttaatccgagataaaaatattaaaaccttatcctataattacatataatattataatactcatggtaaaatctaaaaggaagacaaaaaaagataaaagatagaattgaaaaaatcataataaataaaaaaaattaacgaataagacaaacaatatcaacttgtcaattcattattctatagttactaggtgtggaggacgtgacacatgcacgtaacccctattaaaattttggaggttataatcatatatcttactttaattaattatgtttaaataattgttaaaaaatattatgtttaaacaagaatatagtgtggtatagattcatttattgaagctaagattatcagtgggtctgtctaaatgtaagtacatataatttactctactattatatactaattagcaaa

SEQ ID NO: 217182 - DNA, 525 bp, Cannabis indica
tttaaaatatagggaactagtcttttacggtaatattttttaatattttaattgaattattgatataatacaaaattagaactatgatacttcaaaaaaaaaattattttgctagatgtgaaaaaaaaaaaattaaaaaaaattaatctaatactatcgttaaaataaatagtctcttaaaatacttatctgaaaatctttttaattagaaaatagatcaaacacaggataaaaaaaaagtaattttgagaataataaaaggaacaacagaataaaaattattttttatatatgtgagatattttcaaaaataaatttttattaggacaaaatatgaaattttacaatttttttaaataaaatgaagaacaatagaaatttttatctaaattcactttaactttcttttataaactatagaatatatattaataaaataatacacattattatagactgtagtattattttttaagcccccaatttacattcgattagttagtctttaactaacttaatagcttt

SEQ ID NO: 217183 - DNA, 615 bp, Cannabis indica
cctttaaagagttgccctcagagattagtatatcagcacttgaatttcttatccaatgtggctttgagtgatagaaatagtagaagggtttaacatgaaaagagtagcagagcttgataattacgttgcagtttcggggttggaaaatatcagtaatgcagcagaagcttcacaggctatgttgaaggataagaagaatctttcgaaactaactttgaggtggaatgtgaatgtgaatggtggtgtggctgatcctgatcattgtttgcaaaaggaaaaagaaatacttgatgcacttcgaccacatacaaatttggaacatcttgagattgaaaattatagaggtacaacattctcggattggattggagattctgcattttctaatttagtatcaatcagattactctattgtagaaattgttgtgttttaccaccacttggatatctaccctttcttaaagatcttgtaattgaaggatgtgaaagtttgtactctataggtagtggtgatgatgatgatgagataattcatgacaagggtcctctgttcagttctctagaacagctaacaattacaagtatgttggagttgaaagagtggtcatttagatt

SEQ ID NO: 217184 - DNA, 507 bp, Cannabis indica
ctgtaataattgctatttcgagtgcgtcttcctcacatttatagagcaagtcccacaaatatgccatgcatctaacactaaaaaccataaaacagatctaacaaaaaaaaaaaaaaaagcaggagaattaatactttttaaaactttattgataacttagtataattacaaagtagggattacaaattaaactctggtagagctgtcactttaagcttatttcttttgcctaagtggttggtttacaacttgcatatgtagttcataatttaagctttagtaatagatttcttttgcggattggttgactgagcaaagagagagtggtagagggttttagaataggctgagattatgtgttgatgtacatttgcaattcccagacaacactttggtttcctcaatgctttaaagaaaagtttatttgggctggctgcatgctctaaatatatttcgtgatgtgtctggtttgaaagtaaacattgagaaaagcagtgttgtgaaaat

SEQ ID NO: 217185 - DNA, 710 bp, Cannabis indica
aaatacagaacaaaaacatatcagaatcaccctagcgacacttgataattgacttataagccacactaggggaaaagaaaccattagttgcatctttccacaccagcatatcatcctaagaactaggccgccgcttaataagattcaaagagcttacgacacttgggacaaaccacctgttaattaaactgggtatccactcaccatctgaaccaatcaatgttgaaaccttaaccgaattttgctctatcaatggattaaaggcatctctagacatattccaatcaagccatgtgatccaaggggagtgccacaaatctgccctccttccattcactgtaagccagcaagcttcgttcctgatcaaatctcttgtagccatgattccttttgcgccaacggaggccttttttggaactttaacaaaccaaaaggattgatcctctttacccagtatttaactttgaagactttacaccacaaggagtcatcctctattgcaagtttccacccaagcttggaaatatagcgaggttatatcctcaaacttcttgaagtttagcccacccctatcgagaggcaagcacaagagctccaatcgagaagagctagaaacctatctttatccacatttcctgtctaccaaaacttgcggacaacttgatccatttcattcaaaagtgtcttagggataaggaaggttgccatgg

SEQ ID NO: 217186 - DNA, 608 bp, Cannabis indica
atcatttaaccaatttaatttttttttctataaattatataaattaataaacgcatgagcagttgttgtaataattgaaagataaaatttaatttatgattattttaattatttatgtataatttttaaaaatttacacaacacacctaaaataagactttacttttgatatttctataattttttttatatatttttacggactttatttttcttttatttacagttttaaggatttttgtttttttttttttactagaaaataacgtgaaaataatgttgttctaaaaataacgttgttttgaaacaacagattaattacactctgtattgatgtaaaaaaatcacgttaattttccatagcagtaatgtcaaaactaacattgtttcaaacataaacaaaaaaaaaaaaacaacactctatatttttatgaaaaaaagccataaaaatgtaaagttgtcatttttttatatttatgaaataagccctctatttttagggtgtgaattttatatttaagtaattgttaatattttttactaaataagtaacatataattataaatcttgattgttagcaattttataattattttttaataacaat

SEQ ID NO: 217187 - DNA, 708 bp, Cannabis indica
acggatgaaactgcagcctaagatgctcaacgtcttccccactagctttgcaacaaacacaccaaccaggtgcaatggatagataaggcatcctcttttgcatcttatcatgaacgttcactttatctaaagacacgagccacccaaaaactttgacttttgaaggaacacaacttttccataaaggccttgtccagtagactccactaccattcaagttagagtaaaccaaggaaggctgacttacaagaaaaaattcccgacgggtccagtttccataggcggctatcatttgagatattgagcactctaacatgtttcaccttttgcactctaacatgtttaaattttgacattttattcatctttagatgctctaaaaaaacacctttttcttgcgtaattttaaacattggtccatgaatatgattctcaatttctccggagtctggtgattggcgctagtatatatatataaacgtctcaatattacaacccaaaaaaacaaaaaaagcaagtcaaggactcaagacaataaaatcatgaataatatatgccaagagcagagcagtaaggaatacataccgcacctctctgaacggaggtaactgcatcattgagtttgtgggccttccaacaaaccatcactctcctcaggaatatagaatattcttaatttatgcaccaacaattagtgagtaacgatgg

SEQ ID NO: 217188 - DNA, 781 bp, Cannabis indica
gcttaaagtatactattgttcagtgattagttaaaagtttagtgattattttagtaatgtttactactttttcaaagttttttagaatacaaaaaatatactataattatttaaaaaaaaatacattgaatcaaacaaaatattataaacttaaaaatatatcaaattaattctataaaaatattttatgaaggaaaatatataatactatttcacttaattagtattttctattttagagtgataatcacaaattttaactaagttataactagttcctaataattaaattggcaaagctttcagtttggtggtaaatgcatacgatcttatattattatatgctaaaataaaccgaaaaaggcaaataaataaaaaaaagtcattttatatacatcctatgatacacaatttgtactatcatgtcaagacgtttatggtaaatataagaacggtataattattagtcgtgtcaagattaagtgagttatgactctttataaagactgtttaatatagcgcttaaattaaccaccagcctttaaaaatgacatcccgcacccaggttaatatctgacgtcaatctggacgctatatgagtatagaattatatttttgatacctaagtgattttttgacatcactagtcaatgtcttagttatggtaaagtaatttcatcagttttcaaagatgttgttttgcaaaatttagagatttgaaactacctaatttgcgactagtttgatatctcaccttgctcaaaatatgaaatgtcaatgt

SEQ ID NO: 217189 - DNA, 985 bp, Cannabis indica
gtatttatataaaatatacggtgcaacttaaattgcaccttaattcaaatcgtaatttacatcgcaacccatgtagtaactcagatcgcaattcttggaagaatctaaattgtaagaacaaaaaaaataaagttttattaaaaatatatgaagtgatttcctaatttattaccattttttagagaaaagattgataattagaaatttaaatgaaaagaaatatgaaaatattatattatatttctgatgattaaagtttcatctaaaaaggcctattttggagcattatatacatctataaaaagtttatgtacaaatagcaatggattacccttttgcctttttgactataatttttaaatattttttcaacaataagaaacacttttatatgtaaggatattgcatttttagtaaaacaattaattaataaattaaaaagaaaaaaaaagtaataatactctaaaaaattaataaatttaaattgatcttatttcactaattaaaattgttgacctatagctaactaatttatatatatatttataagaaaattcgggcattatttttgttcttattataggaatgccttttttttttctaatataaggagaaattataacttgattaattatttttagtagatgttctattatttttaaaaaaaaattaaataatttatcgtgctaaaattagcgttgaaacagctactcgtgtcaaatttttataaattacaattattttatgcatcgtcatataaaaaaaattaacacactaaaaataaaacactaacaaaaataacattatgtagtagcttagcttcacgctaaatttatattattattttttttggtttcaactaaccctatatttatatatatttatatatatatatatattaaataaattgcttacacactctagctatattatatctaatatattaaagtcacaaattagcttctttagttgtaagtagacacta

SEQ ID NO: 217190 - DNA, 1023 bp, Cannabis indica
agtcgaggctcagccagagatggattcaagggactgagattctgatgtaaaatccaagctggaggaggtttgttccaaagtgaggaggagtaggtataagacatgttcaatcctccctaactggtcccttgggcaattatgatgcctgaggtaatccattgaatgaactcgatgagccttcagaactaggactggcccatgtccaaaagtagtctcttgagctggagataccaatgccaaaccacctaaagttggttggatttttcttgcgtctgttctcaccaatgaggtctttggtaagatccttactagctgtttaatagggaatgtccattgtgaaactccccttagaaagtctagagcgcacaggccctcttcgaactggttggcatggtctgggcgccacattgaacatggggcattgttgctccttcactagtattttctagatgtcgctggttactttgagatgtgcccaacacatctcatgcgaaagagcataaagtatttcttagcaatgtttgtcttgtatagggagctaggctggcctcggcgtaccccttatgcgatcatgtactattttgattagaagtctgtgccaaagtagagcaagactggtatttttatttcagccagatttgtcaccaatggctaggtgacattaactgcacaaccatgtcaaaggttggcgagtatgccaaaaaatattttattccacaaggtctttgtaggatcaagcaccacaaatttcagtatgtgccactcttaagacgttccatctctaccttgaaataagtgatagagcaaatcacatcctttctgtatctgctgggcagagaaacattatgcggttgaccagtgtggaaaattttcagatgtatggcttgtattctcttgctcctagagctgcaagagtgccaactgtagatgaggcctattgtagagatgggcaaggccctggcttggattatgatgacgtacctttgtctcacattgcattaaatttggagaggagagataagg

SEQ ID NO: 217191 - DNA, 793 bp, Cannabis indica
agccatgacatagcccccacatcagtcataaattgagtaagacccataaggcccgaacccagattggcgtggcattcaagtcaaacagaaatgccatctaccatcgtcaggtatcaagaaaacaagcatggatccatcacaaggagaccaaggagccaacctgagaatagcacgagcttcattagctttctgaagttgaaacacaaagaatttttgacttcatatcacttcttgtaagagccaagccttggacgaattctgcatcccagaaagcattctcctcagagtaccattagagaccttctgtttagcaaagaaataacccaagatggacttgactatcgtgttattcataattagttcgtccagttcaatctagaggttaagtcatcttgcaaaacatctcaatctcctccatagtttcttcaaccaaggtagcatcattagaagttcttgaaagattctctattgaagcaaataaaaaaaaatagagagaaaactcaaatgagtacctaacaccaccaagcaaaaaactttcacaaaagagttcagggcatgcacaatctaaaaagtaaaatgttaaatctgaaaatattgcaaagccaaatatgcaattcatcattgcaagagtgaaggtgaaaacactcaggacaccacaaagggtttgcaccaccactgtgatctaccaccatcaaggtcgtactctgacattggtacggggcaaaaaaatccatccccattacttgtacggagagaaattataaaatttggggtgttaataaaataattcttt

SEQ ID NO: 217192 - DNA, 499 bp, Cannabis indica
tttaacttttgtttcttttcactactttgtgaatttaagataataataagagagagagaaagagaaagtagtaaaattaaggtaattagtaatttttttttcccgaactttgatatgtatcaaatcacgttctttgaacttttttgaccattaaaaattcttttgaattattgagattgttgaatttgaggacttttgtctaattttagttaaaaaaattctaacatggatgaaagttcaaggggtatgatttagtacatatcaaaatttgaaggaatgatttggtagatatcatagtccgggagcatggtttagtacataaataatcactgaaatagtaaaattgaatgaaattaaacaaaaatctttaaatataacaatctcaataatttaagggaatttttaacagccaaaaaagttcagaagcattatttaatacatgtgaaaatttagagagagaaattactagttcgctgtaaaattattgtaacttataaca

SEQ ID NO: 217193 - DNA, 769 bp, Cannabis indica
tgggcgtttgccaacaacgttacgagcatggtagagatatctactatacctcttaatatcttttgtaatgaccatgaggtctaacttcaattttatttataaaagcatttttcaaaaaaaaatcattatttttttaaaataaatttttagacataatatataaaatatattttgaaagtaattaattctctaatcaaactcaattttgttaaaatatttttaatataatcttatatatagaaatattaatataaaatacgtataacaattaaattcattcttttatatatataatcacatctaaaaagtacatctgcaaaagttaaaaaaaaaatctcaaaaattaaaatctcaaatcttattctaaaaattaaaaaaatatatattacacgtatttattttaaaaattaaaaaaaaaattaaatatatattacacttaacattacttaattaaaaaaaattaattataggtacgtaacataaaccttagtgtatatatatgcacaacaactgtcttgtttgattgaaagtctaaagtaagaaataaaaatatgttgatgtcacctaactactaactagcgacaacctttgtataatgtatagaatttcatcgtcaatgttttctcgccattaatattgttctcttaatgaaagtttcatgttgatatttttcttaaaaaaacaaaatagcgtgagcaatgtttatttttaaaaaagtaactgtgcgatgaatgtcgacctttttcagataaaaaagaaaagaaaaaaa

SEQ ID NO: 217194 - DNA, 499 bp, Cannabis indica
attactttcagcataatctaatattattgagctaatccactctaggtcaatcatgcgtaccaaacagaccttacaagtattaataatgaaaaaagtgattttaacatttatgatttgtttagagtttgagacggtatttaagaagaatatcactgtattgtacagcaaatacaataataaataattaattaataaataaaaaaaagttgtaagttaatggggcccatacgaagtttcttggaaaattcctattattataattattattttttaaattaatttaaataaaaaaaaaagctgtatgcctcgttgtttttgaagaacaaaaaaaaaaaagagaagagatcatccaattcattttcgccgtgagtttctccttttattactctttaaacaatcaatttttattatttatttaattaaaaaacacttattattaatttatttttaatatttagtaatatgaaggtagaacgagaagttgtaactgctactacta

SEQ ID NO: 217195 - DNA, 841 bp, Cannabis indica
tagttgactcatataaataataatttttagagcaaagacatgtacaaatcatatcgatgaggagaataatataatataaatatagaataatttgtgttataaatacttaaatttaactctcagttatggtgactttctctggctggttagataacttgttgcatatttttgatggagagaagcaatgcacaattgcaatgacatgttgggctttatggaagacaagaaatgaagtggtttggataaaaagcaacctacggtggcaggggtctctattttggctccattttactcggagcagtaggttggggcacaagacaggaaccaagttccccgtgcttcactcttgactgatgcgaatgcaagtgttcgatggcaaaaactgcaacaggtggtctgaaagtgaatgtcgatgcaaccttttttccaacttcaaatgtgtacagctttgtctgtgttgcaggggattcgaataggggtcttccttgaagctatttcttgctgtaggctagatcaagttagtcctgaattggctgaggtctttggggtaagagaagctttaagttggataaaaaggaaatcttggcaaggggtgattgtagaaaccgacagtctcattgtggtacaagcattgcgtagtcctttatctatgtcatcttattttgggactgttattactgagtgcaaaactttgttagaaggtttgattgatgtgtctgttctttttattaggcggtttgcgaatagtgttgctcattacttggctagagcttcctattctgttgctgatcgtgttatcagaagtaatgatgtttttttttgagtttcataatgtaatctt

SEQ ID NO: 217196 - DNA, 711 bp, Cannabis indica
aattatcaacaaaagaacaactagactagatataacaaatatgacgaaaactaagtttccaacttgaatgaacatcaatgattatcaatcaaagaactcccagcaaataatataacaaccttatgattcaaacaagattaaaaaaaatcataacacgaccaagtaaagaatgaacctaatgaaagatcgaatcccatgaaatagggctgttacgaaaattaattatgctacgcacgtgcatatcaagtagtactcacacaaatgaaatcgaacccacataaattgaaattgattatgactagactagatatttatgattctatttggttgaaaaataattttgaaagagaaccatataaattgatagaaatttaaagaaaacaataaaagttctttaactatggatgtgaattgaggatatgaatccagttgcttcaatattactcaattgttaatgctacttaattaatcttcttcctttttagtgataacaaattataatataataacctagctcttttcagatcataaatgttttaaattatatgccattaatgcatttttgaaataaaataacatataatttggttggtgtttgaataaaatttatattttggctctaaaacatacatcatattgtagagctcatcgtaagcttcaaaacggtaatacaagaaacgtccaaatacggataccgaaaatgaaaaagtt

SEQ ID NO: 217197 - DNA, 750 bp, Cannabis indica
ccttaaattcatcaccacaaaggttatatctaaaaattattaataataataaaaaaagttagaatagttgtcctctatactttgatatatatcaaattattgttttttaagtttttttattgttaaaaattcttttgtctaatttaattgagattgttagatttcagtacttttgtcttatttattcaatcttactaattcgatgattatatatatgtactaaattatactccaaaattttaatatttatcaaatcattctctgaatttttatctattttagactttctaaattaaaattggacaaatttttaaatccaacaattttaatagtttaagaaatataatttaatacatgttaaaatttaagtgacaaaaatcttaattagcaattaaaaaaaaaagaaacataaaaagttttccctctagaaaactccacattcattgaattttttttttgtaaaaaaatccacgttttatgataattttggaaccactagcttcgccttaaatcagaagaataaaataatcatcactatttgagtaaatgtcacaaataatgatgcacttgttttttttttttttggaaaataatgatacactcgtttacatatttagtatagtaattaattcactatcacttacattacctaatatattcacacacattaactgtcacatggtatacttcattattatttacagagcccatttaaactccaaatgttaagtttgaattacttttcttttt

SEQ ID NO: 217198 - DNA, 610 bp, Cannabis indica
tcgagtttagaatttgcatgcatttaaggttattaattaaggtatttaagttgaaaaagaaaagaaaagaatctatatatgtttttattattatttaatttttaattttataattatcttttttataatattttaataatttaaattatgtggaccactaaaaatgtactatgtgtgtacatgtagacaatttactgtgacacttaattggaatttttagacaaaagggtaaatacaaaaatggaattgagattaattaagttttaccgtcaaaaaatgagtttatagagttaattgttataaattataaagtttaggtgattttgtcgaaaaaagaaggtacacaaaatataaaagtaacctttaaaattttacatttcacacattatttttttgtatttaattgtcaaaattggcttgatcaagtatcaataacatttttatttatttgagtatgttttactacccttatttatacattttttctctatttttattcctttttctcttctcttatgcttctctctttctaatttttctgttttctttcaaactttaaaaataatttctgttcacgttgttattcggatgaacctaaaaaaataatatt

SEQ ID NO: 217199 - DNA, 499 bp, Cannabis indica
aaaaaaaaaataaataaaaactctaaaattatttctctaatactaaatgttatactataggcaatatatgactacttttgctttatccccataatacccctcacatttgaaccaaagcaaatctaaacttgtctctctctctcggccaaaacacctccacaaaccacgagtcacctccaccacctccaacgacgacgacgaggaccacccagccccctctgtcggacccgaagcctcaacccacccaaccccctctctcggacccgaagcctcaacccagccccctctctcggtcgcgaagcctcaaccccgagaacccgaagcctcaaccctgaagcctcaaccgacagtgacggcgcacggcgcagcggcccccatagccctcctctctccgtgcaccagcccctctctctcttcgtctctctcaaaccaaaaaaaaccagggatccgatggtcggaccatggggaccgggagatttaattttaccaatctattata

SEQ ID NO: 217200 - DNA, 1171 bp, Cannabis indica
tatagagtatattcttatttataactggcccaaattgggactttatttttttataacaattaggggtattcttgaatagagtatcttaaatagaggttctactgtataatgtttggtttgttttaaaataaaggtaaattctataatgtattttttaaaagagatataccgatacatctctatctattttagtatctgaaattattttttagtcaaattttttctcatgatcatgtaaattatacttatttaagacattctgcaaaattttaaaaaaattagaaaaatttaacatgctaaaaattacgttcaagcagtgtgttgtacacatgactattttattttatacgcgtgtaaaataaactgtttgaacattattttctatattgtaaattattttgaattttttcaaaattttgtagaacatcttaaataactgtaacatacatgaatatgaaaaaaatagactaaaaatttttttgaatcccgaaacaaatagagggtgttttaaaggaggtgcattgtaaaacacccattaatttttattattactcttatttcatatattagtatgtattatcattacacatcattaaactaaatattatctagaatgagaatttagtaatattaacgtttatatgtttacacaacttgaaaatatatatattgagttacaaaataccattaatttaacattttttatatgtatgtcaaaaatttatagatcattatttttaaataattttataataaaatatatttttaatttacaatataaattgattcttttcaccaattattaaaaaatatatataatataaaaagtttaacttatttataattttgtagaaatattaaagagaaaattagtatattaattattttttcatattaataaaattataatttttaaataacacataaaaataaaatagcaaaaaattaacaaatttgtatttattttttattaatcaaataaaaagtgttaaaatatttaatttattaatttgataaaaaatatatatatatacatttatagaagaatattcataatattttattttaaaatatatagaatacacgataaaaattatatgctttggaaaattttaattttatttcaattaaattagagcaaaaatgacaatttataatttaaaaaaaaata

SEQ ID NO: 217201 - DNA, 561 bp, Cannabis indica
aaatactatattttagttacaagcaatcttttgttagtcatatttagttacaaaaaatttatgttgtgactaaaaaattatcactaaataaataacaattttttgtaatgatatactcaagaacatacaatacaactaaccaatcgaactacaagatctcccataaatgtctcaattaacattccgatatttctcaaacatattaacattagcgttaaagttcatattatatatatttattagagtttaatattttaatctatatttccttcaaaaaaaaatattttaatctatattatatatatttttaaaatcatatattatattacatcaaataatataacacgtattaatcaatcatatatacgaaatcaatctctttccttcttaactttcaccaaccacgcgtgatcaatatttaagctagctatgactatgaattatgtatagacgtgattaatgtttcatatatatatatactagtagaacgccacgtgcgagacacgtatattaagtttatgctaggtgtgtcttgctttatttaaaaacaatacaataaat

SEQ ID NO: 217202 - DNA, 1004 bp, Cannabis indica
aagcgtaatcgaaagccattcttcgttcgagaaatgttgtgctatgaataataagaggtgagaaacgaaacagaggacgaggtttgtgtattgctgaaattcaagttaacggtcaaatttatttttaaatagtttctttacaaggttaggtaacgtaacgattttagggatttgaaaatttttattgccacgtaagcaaaatgatgaagtaacggctagattagatatggggtttggtccacaacaatcgaatgaggacattaaatactaaatgttggtcactaaagtcttacaacaagtaataatgacattatattttttttgataaagataatgacattatatttgtcttcttcatgcagatcattgttctatctcttgggttattttaataattttgggaccgtaacttaatgtgtcttaattaagtcattggtaactatctcaaagcagggtggatcctaggctaaagagggctatattggataatattgtctcatatgaatcaaatgtaaaattattgagtcatatataagaacatgaactactccactcatcaccaattagttttgagacggaacctcatgattctcaacatggtaccaaaatcatatcgcattagggtcactcctattaggggcccaaatgggaaaaaagcttttaataaatatacatttttttaaaagaattttaaaaaatgttatttatttttaaaaaaagtaacccaaaaaaattaatttttctaggagccaattttactcaaggtcgggctgtctcaaaaggttctcattacagagatgacaccgtctacaataactaacatttgaaaaggtcaagcctttaattcctttcaagaaaaacttgtaatgagtttcgaactcttgaactaagcaaagaaagatgtaaaaaatctctaccactataccacacaacactgatatatttatcttattttcaataactaaaatattattctttaatatttatctagttattacactgtc

SEQ ID NO: 217203 - DNA, 612 bp, Cannabis indica
gttatgaaagaataatgatagtggatgtctttacctatgcatcatctactttattactaaatttattttatgtctcttataattctaattacacttaaggttatagtaattttacctatgttactcttataactctagattatttagttcttatacttaatagtcttttatcctataaataaagagactattcatcttgtaaagatatagaactaataaaaattttctctaatagatctgcgcttcgcgtggttttaataaattttttaaaattttacactaaaaaaattaacttttagttacgaataaaatctcaattcagtctaataatatttaatattttttataaataatataaaactatataatatatttatgtaaaatttcttttattagtgattagcacaaatattaattataaaacaataaaaataaaagcacatttcgaataaagttatttataataattaaaagctattaaaaatattttttttaaattgaatcaaatattataatggtataaatttttctgtaattaaaaaaataatcatttttatttatttatttattagtccaaacttaattttttagttcatatatatatatatattg

SEQ ID NO: 217204 - DNA, 592 bp, Cannabis indica
ttgatctcagaagctcttgggctgaatccgaatcacttacatgacatagattgtacagaaggattagtggttatatgcaattactatccaccatgtccggaaccagaactaactatgggaataaccaaacatgttgatattgattttcttactgtgctgcttcaagatgacattggtggtcttcaagttttgaataacaatcaatggattgaggtttctcctcatcctggagctttagttgtgaacatcggagatcttcttcaggtaaatatacttgtttggctttagcctttagaaaaaaaatcatatgtcccaaattttccagtcccaaccctgtctctccaatcaataattactatctatttttattttttttcatctcatttattaatctttccaaacaaactgctctaagtgtccgtttatttctcggtaacctcaaaagttagaacaaccttttccacatttattacctttcttattaattatttaaatatcatcacttaataataataataataataataataataataataataatataactaatgtaaatcaatctccaaaaatcttttaggaggttagttgt

SEQ ID NO: 217205 - DNA, 1178 bp, Cannabis indica
caatgttatactatttaaaaaaatcaagatttttgggtggttgataagaaaaggtgatgtgagttggtactagcgcaaacttcttaatcttaggagtgttttcacttgagacacaattctggatgcttggaaaaggggaaagatttagggtcagtaagctttacaactcttttgttacccctatgccaaagttgataattataaaatgatttggggtagattatccataccaaaacatagatttattctctggtaagcctctcataataacttataaaccagagatcacctattggcaagaggtattaccatgaattctactagctacccagtttgcgaggttggtgttgactgtcataatcatcttttctttgattgttctttttccaagcatctcatgtgtgccatccattcttggcttggccatgctatttggcctgagtcttacccgaattagcttttgtggttgaatgttaatcgtgattgcaatctgcttcatagggttgttgcgactacttgtgcggtagtaatttattttatttggtggaatcgtaatacttgtatctttgagcaaaaggttttcttagtttctcatgtgaataatttgattagagtcacacttaaagctagattactacttgttaataggaggaatctctctaagaggaactaacaaattttttattttgtttataatatgtaagtaagtttgtcttttgttattttttgggtgctggtttttgtatcatttactctgttttaattaataaaaatttctacttcaatcaaaaagatatatagttaatgttctagtatctagatccttcaccatataaatatacactaagacaaacaatatatatatatatatacttgtaggaaatttagtactgatacataagaattaatttatgtaattccagcttcaaaatcacatttaaacaaataaatgttaaattaaaacttacaaatcaagaactaaaattagcaaacacatattaaaccaaaaagataaacacagataaatctaaatagcttccaaacacaacaacacacgagaattatactaatcctaagtttaatgtgaacttggtcatactccagtttgaaagtactgtcaccaatctttattgataatgagaattagatatatcaatctcaagagctacaaggaaata

SEQ ID NO: 217206 - DNA, 508 bp, Cannabis indica
ctgctcctatttataattatatacgaggtcagttaattacaaattttgactaatattttacaacaatcatcccctgaaatcgtggaattggattacatcccacgtaaaataaatgcgcttaatatttgaaaatcacacaactgtgattagtccgcttttactaggtcaatgtcaacgtgtattaagtacgttgtaacacatattctgtgacataaaggctagtttgtggaaaaatcaaaactttaaattcaaaggctactaatatctaaaactaatttaaattaattaaaaattaataaaaattaactttattctgataattagattttatttaaaaatttaaattctaccaaaatttgaatttcttttcatcgaaaaaggattttgaaagtcaaaatatcaacaaaaaaaagtttggcccaaggagtatgcaatgcatactccttgcgcgcgcgcaagggggtggagtgtgtgtgagaaagggttgcactgcagtctacttgaccaa

SEQ ID NO: 217207 - DNA, 948 bp, Cannabis indica
taagaatactaaataatttaacataaaaacatagtttaaacatagacaaaaaactaaaaaaaaaaataaaagaaaataaagattacatattagtctacaaaaaacttaaaaacataaaagaacaccaatgtttagttccaaaaaaactacataaaaactgactaaaaattaaaaacaagcacaatctgattgaaaagcacttattatttcttcggaaggctaggagggccttagattcactttcaatgttctcaagttattttttgatgccataatgataaaatgacacagccaaacaatcgcggtgaacttccgtatcaaaatcagaggatgggatgaatttgccatcaataaaatactcaacaaaagatgttacaaataaaccacaatcactatacaacaataaacaaaaaaaaaaaaaacaaccataaaaacaccaataaaacatcagaaaatgaaaaaaatcacataacaaaacataactttacaaaataagaaaatgacattgaacatgatggacaaaacttacgatgtgacctgctcgggtaaaccatcaacaacaataatcggaaacggttccatcgtgctaaacttagattcattgcgaaggcctctaaattctaacatagagaaataatagggtaaaattacagaaaaaggcttgcacgcctctttggcagttgttatatacctgccagaacgcaatgaattgtacaaaaaaaaaaaatcagacaacaaacacaaaaaaaaaaaaaaaaataagaaaaaaaaacaaaataattgaattgaaaacaacctaaacaaacttacttagattttagtcttcttaagccatgtaccaagccaaatgtcaaactcagactccaattgggatcgaaaagttctaccaatcttagtcgttcaaggggcacgaaaccacccaccatatttaaccaccttcgtaaacag

SEQ ID NO: 217208 - DNA, 533 bp, Cannabis indica
ttaaaaaattattttttattataaatacaccaaataccaaatcttagggattataacttgatagttaccaagtttaatgtaatgaaaaacaaatacacaagttttatttttatttttattttttgaattacctcatatactgttttcttaattttcttttcaaatttacagtttgaattcataaggtagttgcagggataagtaaaaaacttttttttgtattcattaatcaaaaatactctcatgtagtttttttattaaaatatacccacttttttgagtttttttttattaaaatatacccattttttgagtagattgtctaatatacccttactctctacttaagtctagcctataatttacataacttaaaaggtctaatagggacatcatctataaaaataggtatatctaaaaaaaaatataaaaaatagaggtaaaaattaaaacaagttaagtaaagtgggtatacaatgtaattgcctcatttgggtttgcaataggggcttttgttttgaagtgtaaaaata

SEQ ID NO: 217209 - DNA, 768 bp, Cannabis indica
gaaacgagataatgataacaagtgaaagattgataaagatagaaaaattataacctggttcttgccttatatagataaaaccaatatcccctagaaatgactgttgagaaatccataatcataaccctagcattagctgaagtagccctcattagggaaagattttgatgatcttcatccgcctccatcttacggtttccaatggaaaaaatagaaggtgaaaggatagtttttaatgcaaaaatggcagaaacttaatgagaaatgactatcggagaagatgagaggaaggaaatgataccaaatgcaataaatgttccagataaaacaaatgggattggagagagaaatacccagagatgcagagaaattaatacccatattaattactagaagacacctaatcaacaaaccttgagagggaaaaccaccacatgaacagtatgggtggaccaaaatccccatatcagggaccaaaacacgatcaaacgagaagagtgttctcatacctaccagagtgttccagagagaaaaagctctattttttatgattatagtatagaattaaaactttattaattactactactagtatacgtatatggttttattctagaaggaaaatatatacgtatattgtatttgctaacaaggtattattattgataaaatgcatacgtggagttgggtggatataagatgattcggagtcaagacaactttggtttggattttgtagactgtcgtttggtaccaattccaaacttc

SEQ ID NO: 217210 - DNA, 1087 bp, Cannabis indica
gtccagattatagatgatgatgctctatgttgaaactctttcacatttgtagctataaaataaaagtaataagaaccgtgtttgttgggggtttaaagttgcttttccttacacattatgggcagaatttattttcagttatgttagtcaaaagtgggaagggagatcagtagaattaaaagtgattttttcctatgtgtcatgcttaaatgcatacttgataagctatcattgaccctcttaatcatttcaaactaaaagtatataaatttaaggacagttacttggaaagtaactgcttgattttcgtctggtgtatacctaaaaagtacttcaccatgtgtcaaagggaaaacattcttgaccccatgtttgtgtacaaatactactcgtacgtttttaaactataactttttcattcacattttgtatgattcattctttaccttttttttacctttaatcttgtttaaacataggtaccaataagttactaaggttaaaccaaagtcagtaaaaaaaaagtctaatctagaagagtcattagttgaagttgttaaagatcaacacctactctacaagtatctagaactttctatcattttggtaatattatagaattttctagaatcatagagagtaatagtcattagaagtttcaagaatattttagtaacacaattagttagaattatctagaatattatagttggtttcttttgagtagtataaataggggtcatgggtcttcaagttgtgcatccaacaagagtgttcaaagtgtgttcaaaagagtgagagtgtgttctaaagtgtccctaaaatctttcaaaagtgtgagttatacacaagtgtgtagtaaaggtgtctagtgataaaataaagagtgagtgcttggtgtgtattgtggtcaagttaaagtgttcaagtcttggtgtaattgcttttacaataataaagtaattacgtttttcacgtgttgtggtgtccaacaagtggtatcagagccggatcgagttcgttccgaaagagtcctttgttgagtttcttagagtgatcgtgtgtggtttagtactatagagtttgc

SEQ ID NO: 217211 - DNA, 538 bp, Cannabis indica
ttgttagccatgcttggttgacaagtgcccttatattagcagagtctcagtggttcacttgaatagtcgccgtgacgcttcgggtttctatagaacatgccacaactattgatcggtgtacacctttatagggtgtatctagatgtatgtccgtaggtttctagaagccaagagcaagctgtgggtcagcttctccatgagtgggtacctactttcagtgttgatcagtctcttggtgatgtattatacagggtgtttactccgccttcttctcttgtgaggacaacactcataacatgttgtgtaactgctaggtacacacctagctcttctatgtctaggggtttgggcgacacaggtggctgagccaatttttccttagctcctggaatgttgttcacattcctttgtccactcaaatttttgttgcctctgagaatgttgacgaagggtacacatttgttgtagaattagagacaaatctgcttagtgcagagatcatcctatttggctttatagtatgcagggtgttataccc

SEQ ID NO: 217212 - DNA, 676 bp, Cannabis indica
caacactaaatatttaactttatatcccaaagtgcacgactctaaaacatatgaagtgtcactaaaagttatttaattatttaattatttgtgaaaaaataattagtttgcacgtcactccacgcgtgactggtataacttttccaatcttacatagagcgacgttatacacaaagaatattaaaaaaaaatcaatttataaacattacttctctcggttaaatcaaaagttaaaataatatttttttaatttgctaaaaaaaattaaaagtaatataaataaaaggttttttttttttgagaagttaaaaggcttattgaaaccctaaaattgtgtcaaagtctattaaacaaccccttctctctcatgccaacagacggctcaagaggaatcgtcttctacacagacggtgcgcaagaggaatcgtcttctacacagacggtgagcttggccccgatttcccaacccagatggaagaacgtcatcgaccagtggacgacttatctttccaggtgggtctcgccgattttggaacgatggtcatgggtggctgattttgggttgatcggtctctccgcctcgcctagaacaccgactggctactgaagatgtgagagttctaacctagaaaccaaaggttcacctctattcttgctcatttatctatctctctct

SEQ ID NO: 217213 - DNA, 553 bp, Cannabis indica
ctacattcataatatattacatcctcacatctaacacatctctaattaattgaatatatgtgtaaatattgtataatatttagcataaaaattaatgcaaagtgatatatttaacataagtttaaattgaggctttaaaaaaaaatcataaaccttgaggtgggcaatttattgaattaacccacccaaaaaaaaaagaacaaagtgacacaaaaaaaaaatagtttggtgaaaatattttgatacaattgattaaataaatattagaaatgtgttataaaagtgtcacatatattaatttaataggaaattattatattatttaataataaaaatataaatttaaatgtgataatatattatatattattatgtaaataatatgatatatttgataaataaattatgtaatatatgatttatttaacttataaattgtagtctacactttgtaacgtggaagaatagttataagttaattacttttgtaattttttagttgattacattttagtataataaaaaagatattagacaaaaattgattatgaga

SEQ ID NO: 217214 - DNA, 732 bp, Cannabis indica
aaatgctaacaattttagatcatatacgcagatgtagtatatgataggaatatatatatgcattcattcatttactatgtgtttatgtcttttcaactttctcatttataaattgtaactcatatattacattatgtatagataacttatatgtatataatattcctattatttactcctcatgtttattttataactgaataatattaataatcatgataataattacacttggtaactgaaaatactctttttttaataataataattttttcatatatcaattaaaagacactaagaattaatgtgagagaattaatgtgagtatgaattaatagagaaaaataattagaaaaataaataaaataatgaaatattgagaaaaaagaaaaattggtttcttgaaaagttagaactccacctcacctatcctaacaacacaattatataaatatatagatgaaaacctgagaaggtgaatagtttttgaaattaacaactaataaaatactgttataaatattaataattatgtggatgtccaaaatcttttatttattaccattaattgtaatcaacattcctctttttcttagtttccctttttcttagtttcttaatatttcactcttgtatttgtataaataggggttcaccccattggaataaacaactcaaaaattctcattcactttctctttctctcttcatctttttcttctttcttcttca

SEQ ID NO: 217215 - DNA, 603 bp, Cannabis indica
ttttagcatttctcatatagttactcgagtagtatatattcttcttagtatatatcaatatatcatattgttattagtataattaaatatcagatcttacaatttaatgtattaactttaatagagtattattaacaaatagtgttaggtagtaaaagtgcttaatgtttttgattagtataagggggatataattaatgcatgtaagtgaatgaaggaggagaaatttgaacatggatgcaataaatttaagtcaaatttaaatgatcattttattagaaccccatttttaggatgactttacccaattttgtaatttgggcaacaatcccaatgttattatagtacgtatcattttcttaataaataaaattatatattatcatatgatgtattctcttttcttatataccatttatgtactttctttaaaataaatcatcttatttattatatcataaaataatcatatgtatatatatatagacttaacatattggctcccaaattaaagtagtgttgtttcatataattttagggtttctataactatgttcttaacaaaatagaaaaaagaagaagaagaagtaaataagtataagc

SEQ ID NO: 217216 - DNA, 544 bp, Cannabis indica
aagcctaattttgtagtagtgatgaacagggtatactatactagtaattaattatagtatactaaattactaactagtaatcaattatagcatactaaattactaactagtaactatcctaattctacagaaatttcgatagcataacaactataattgaacgttcccaaaaaatttaaagatattattaacaacaaaacacaattcaaaaaaatattaaaaaaaatcacaacaatatttagtaatacaaaaatttaccacctatccgactacagtacatgtattcacagaatctacttcactacggataaatatttaagatatctaaattcatctaacatgcatattattccactcatccgaccgcagtacaatatatcgcagaacttgcttcacttcgaatgaataattaagatattcaaactatgctaagcattcataattaattagtaataaaagttagtaaatatatacctcagtatagctagaaacctatcaacaccaaagaagtcgaaacctagtaaattgacatcacaacctacaa

SEQ ID NO: 217217 - DNA, 1324 bp, Cannabis indica
agtcttccataaaagttacacactattgtctttattcttccataattgtcctaaagtttataagagaatccatttcatatttactttttattattatttaaaaataataataaaaaaaaagatccaagtgattttttttcctttttcatttatagaaatcaaattatctaatctagaatcaaactctcataaaaaaaaattgcaccaaaagtttttaaaaagaaaaattaccaaaatacatcaacatggaaaaaattattttttactctttgaacgtttttatttacaaaatatatttcaataaaataataaattatcttttttgttgttttatggttgtcatgaggttattattttatagtttatttatagctgatttatagttgtcgtgagattaattttttcgttattttcttactttttgtttagaaaatgtatttttgtaattttagaactttacaagtatatttttataataaaattttaaccgtaaaattataataaatattaataaaaagtatttataaagaatttccaaataaaagtaagctcaattaatttttccacattaataaacccatttataataatcttttttttttcttggaaaatttcctttataaattttacaaataatattttttattgataataaaatgtagagaaattaattttttttttacctatttatttgtttatttttaaagatttttgcctattatctaataaatgctttaagaacttacccactaattaattaatgttaatttaaaccactttttgttgttttagtctacatcaagattgtccctttgtaattaaattaactgcaatgatatttatagaatatattctaatcttaaaaaaggttgtgtgaaaaatgtatgcacacctctttcatagtgttattatggtgtctaacaccacatggtgccctataaataattagtggttttctgtaattatttttaaaataaaataagtaaaattcattattaaattgttccaattataaatagtaatatgagattataactatttttatagaagtattgttattgggtactagtagtattcaagtattttttataggtgggtacttatgattagttatcaatattccttaaaaattatttacttaaattatatagagttaatatataattataccgaagagagtgctaagcactaactgtggtacattttagcattttctcttttttaacaatttatctttctattaggttgtgtgaaaaatattagtgatgcttaatgactattgatcaccatcataatcactaaggactaccactcattagcatac

SEQ ID NO: 217218 - DNA, 649 bp, Cannabis indica
aacaatgtcctcggtagactctttaacgagaacaccactgttgtcctcggtagaaagcaacttctaacgacgtgcctctaacgaggactttttagcgaggacaattcctcgttatatcgttttaccgaggacatgtgaagttctaacgaggacatttatagaccctattttttgtagtggcttgacattcttgtaagtttttttctctttttaaaagacccgttaattccccttaaaatatcacatgttgatattacattgtgacataagtctccaaaaattttactttgatgcagataagtcatcaaaaaatttactttgatataaataaatcccagtcacaaaaaattatctcgttagttcgtaggtacccaatttaacagctttgttttgctgttttttaaaattttcacattattattttttttcattatattttattaaagattaaaaatattataaatatataaaacttattcaccacacgtcttctcagtggtggaagcttattgtcgacaagtatcattccttcatgcaccttgcttagaccctctccttgaatctgttaattgctaattccatctccgatgggtggtgggttttggtggccgttgtttgatcttagtttttctagttcaaattttactta

SEQ ID NO: 217219 - DNA, 822 bp, Cannabis indica
atttgttatttgttagtcattgttatttgttatagatatagttttgaatttgtgatgaatctatattttactattgtaaaatattaagattgctctaagaaaacaacttcaataatgaaatgtgtcttgattttttatttatgttatttattttatgttttgtcttaaagccaattatctttccatttagcccaagtgccctagaatgcattgaatttaagttcatttttgttgaaaggattattatttaggggtaagttgaaaaataccccttttattaatcaattaatcaaatttacctctaattttatatttatttgaaacatacctctttttatatgtattgtacccaaaataccctgacataagagagtcacatggagagtatcttgaagtgacaggggcaaaattggtacaatgtttaaaaaaagaggtaaaaatgatagactttaaaaaagagggtaaaaataaaagaggacaatataaaaagggtatagagtgtaattttctctgttttatttattacattaaggaattctacacttgtttgatcattttttttttcaaatttctgaagtttagtcttggaacatgacatagattgaaaagtttaaaataatattgttattaagtcccatattgatttctccaaaagataaaaaaaaaataataataaagtctcacattgataatatgtgatgagatattccttcatcactattaagtttgagtgcttgtagtataggtcaaaattaagtgcgatgtggtggttagagaggaggctgtatgatgcttgcagtggtggctcatgatcatgaagag

SEQ ID NO: 217220 - DNA, 530 bp, Cannabis indica
gaggtatgttattctaattctcatgtaccttcgacataatcaagttgcatttccattttatcaatacaatagaagaatacatattcataagatacaaaactaaactacttgtttttatagttttgtcttttttttcttgttcctttttttttttttttatatatatcttttattgtttttaatatatattttaatgtattatttagtatattaaatgattttttatccataccaataaggtaccaaatattggttaacattttttttttggttcttttgttgttttttttattttatttttgatgaatgatcttatattatttttttatttattattgctatgtgacaccttaagatgctcaatactatatcgatgtattacaccaattaagcagttttctatatcatttattatattaaaatttctaggaactgatactgaaatgcactaataacgtggtatgctaccttttgtggtgcttgataccttaatgtgcctcttaacattttctgctgttaatatgtacata

SEQ ID NO: 217221 - DNA, 934 bp, Cannabis indica
gggatagtagcctgagtggccttgtaaatatctcaagtttttctgttaagaggatgaagcaggtgtacttctcctccttctccttctagttttatggtttatgaaaagtattgtacttctcctttttgccattgttccatcaaaaactattatttttgcacttgcctctagtattcttgccactagagttctagtcggcactattagggctggcctacgcatttggcaagtcctggggctatatagcaccctgagattgcttgttgttgacttgccctgtctgggcttgtttgacggcttcctccagctttataaagttgtctgctcgtttgaggaactcctccatgttttttgttgagatccttcagatatatttcctgaagtcactcaattgaaggatgttgccaagtatgaccgtataatgacctttggatataatccttcaaaggttcgccttgtcgttgtttgacctcaacaaggtcttctagctgcgatggtatcagacttgaagacaagaattgagtgtagaattgtcaagaaaattcattccaagaatcgaatctccttagagctagcttgaagtaccattgctgagctatttctgacaaagtttttgagaagatccaacattgtacatcactattaactttttagaggttagtctacatctcaaagtacttgatgtgtgctagaggatcttctcgcgcagtatgcatttttaatactgacatcttaaacttgggcaagggcaaggcactaatgtatgacgagaatgatgatcctccttacctatctagttcaaggcctgatgggtttgggccagccaagccctttatcatgtcttttatttgtatccatttgtgcttgcacataaggatttgatgttgcaggagcctggttgattgacctttcttgatgttgctgcaaccctaga

SEQ ID NO: 217222 - DNA, 626 bp, Cannabis indica
gaataagagaaatagataaatagataattagataatagattccactttttcacccgttttttttatttattattttttttatttttaattttatttttagtgtctactcttcccaagatacacgtagcataatttcctattctcatagcataaaggattttgattcaccacattttacactttccctctttattaggtttcaatctacatttttttggccaaattttatttgcatctatgcgtgtttataaattaatctaatttaataataactaactgattcagttataattcatcgttaaaaatttaatattttattgtgatcagattagatgttatttttaaatatctaattagattagatcatatgtcgaatgaaatgtccaaaaatctaatacatttaatatctaatcaaactgctttttatttagtttgaatgaacaatttaataaaccagaatcactgcaatagatatacatgaaatatatctaatgaataaaatcgatccaattcaacatctaatgtatgctagatcgattggatgactgaaataaatcggatcgagtctggataggcctaaaaacattagatttagttcaataaatagattttgtttatttttttat

SEQ ID NO: 217223 - DNA, 928 bp, Cannabis indica
agaaagggtttgagttatgagggagtatttttggggttttcaaaaaattggcatattttttatagtgtaaaatgtattggtttaaaaaaaaaattaaagtttaataagtatagaaaatcaaatttcccttacgtttttatgattttttttttttttgttttcttcttttgctccacaattcaaaaggacagaaagatatgcatttcaatacaatatgtatgcaacatgtttatgagttgacttgaaatgttccacttaaaaaataaaaataaaaaggactttatttcaaattaaaataaagaaaaggagcaattatgcaacagaagttcgaatagcattatattccccacaccccactattctactatagcaaaattaaaatccccactagtactaaaaaaacattggaacaaattataatactgcttccgttcttttcaattttttttttttttttcatttgtgaaaaaacagctaagatacatatcatttggttggtcccaccttaggacactagtcagatacggtatcaaattctctatccctaacaatttttttttaaaaaaaaaaaaatcaatttaataaaaaaggaaaaaaaaaaaaaaaaaaaagaaaagaaaatcagtttcttttggtatgctagtctcttcttagcaattggatcaaagtttttttttcccatttttctttcatttagagacatttcaacataattagcacgagaaagaaattctatcattaattaagtatacaaaatcatataataggtattagatacataaactatattatgtttgtagctattatacataatcctaagtaatattatctaacatgtgtgacatattattgtagttgatacaattagttttagtaaccaagaatgttcaattctaagtagtcattgtaattttattcggtactataa

SEQ ID NO: 217224 - DNA, 728 bp, Cannabis indica
gttatatcctgattgagaagtgtgaaagtatgactttcaaaactttttattataattaagaccttatcagaaagcaatttttatgttgagattttttaaaaaatattttttaccttaattataaaaaattagttagtatagtaaatattaatgttactgagttacactcaaaaattaattatatgtctttaattatactaatctctattatctaattatttgataattatttttaaccaaatagtttattcatttacattttttttatatatatttaaaatatgactattatttgtggttcattatagcccttgaaaaccaattggttaactattgaagaaaataattgattttagtacaaagtctaataattggagattattgatcgactaattataaaaagagtgatgagtacacgttattacaatataacaatcatggagaattatattttaaaaaaaaaaaacaaatgaaaaaaataaataataattagtttattattgaagaaaataattaaaattaatatataataaaagaatattatgtatagttatattatatgataattattacctacacaattttttatcaagttaatacatgttgatatattatataaatatatatatatatatataaattgtttacacattttgatacaattaatgacattgtgtaattttttttatgcatgtcctaatgttttaactttaattattttaagtagt

SEQ ID NO: 217225 - DNA, 751 bp, Cannabis indica
gatataattttaattagatctaatcaggttatgttaagtacaatacatatatgtttaatttttttttaattaagtaatgtatttattttaaaatttttgaaatgggattgaaattttgatctttaaggatttcttttagttattgcggttgtatattagtgtgccttttagatgtgattatgtataaatacgtattttatatgtacaataaaacccaagtgagatatcgtagtgaattgttgtgtgaccgattgaggttaattgtcttttattattttaattcaaagttaaaccaataaaattaaaatgtgactaaaaatatttacaatatttaaaatttttaaatttaaattttcttatataaaatatctatgtaatttttatttttaaatatatataataatattataaaattaataaagaacattctgttaagtaatagtatattctgttaaaatttaatatagaaaaactgaaaaaacaacgttaaattaataattatattacatagccacattttatatgagatttgttcatatattttgttttattaatcagtgccttctgaagaatgttgtatcactattttttagttttggctttggttgtttttggaccatgtagttatacatataaatagattattagtagagtaatttgcggtataaatacttaagtttagctctcagttacaaataaatacctaagtttaatttttgacataccttagttataattttgaaacttttgt

SEQ ID NO: 217226 - DNA, 688 bp, Cannabis indica
aattagttttaaaattttaatttttttaaccatgattttttttaagatttaaattaatcttctaagttttactaaaaaaatattgaatcttttatctcatatttattttgagggggtacaatttgatagtagtcaatgtttaggggctaaagttattaatttacaaagacacgttaacattcaaacggaataatcagtagtgttgaaagttttagggacaaagttactaattattcttaaaaaatatctttctattattattttctttttaaacataaaataaaaaatatttatgttttttaaagaattattatttggaattattacatagaaaatatatagtagcattttatttacaaaaaagccttaaattattttgatgctgtaattacctattgcagttactaaaataatatctttctattattattttcttaaagagatagaaaaaatgaatgatattttttttttaaaaaaataaaatgtattacgttcaataaaaattataattaacaataaattttgaatattattatattctttttatatatatagcacttaaattatttttttttaataaaaaagatattatttattgaataacataaaaaaattaaactaaaaaataaaataaaaaaattaagaatataactaatatattcttaatatataaatatagggcaagact

SEQ ID NO: 217227 - DNA, 438 bp, Cannabis indica
gatgatgatgatgatgagaagaacacatttttgtaatgaggagcgctaccgtcaacctgttagttaatttttactctcaatatatgtcggaatatttttttcaattttttttttttcatgagggtgttcgttatacttacaatatcatccctgtaaatttttaaaaattttcgaatagtgtacagtatcgaaaatacgtttgaagttttattttgaacgcacgtggtaaattggaatatcaagaactctgttttcggtattgtaaactatttggaatttttcaaaaatttacagaaatgatactgtaactataacaaataccgctatgaaaaaaaatatttcgacatgtgatttcagacgtgaaagttgactaagaagttgtaattagcattctcctttttataataagagatccaaagtattaaatttttttgcccc

SEQ ID NO: 217228 - DNA, 526 bp, Cannabis indica
taataataaaaaatatgttttgtcaaaatataatgtaaatttgtcacataaattgtaacaaatttaacacaatatatttgttataaattaatataaaattgtatcatcataaatgtataattttattatttatttttatgtcactttttattattttattagtatatttttttcaaaaatattagtatatatttagtcatatagcatcaattatggactatttatattttaattttattgtttgacttaataaaattaatgataaaaaattattatttttatatttttaataaaatatttaattttgaaggagttgagcagagaaagaaaagagaagaacagagtttgtcaatgcagagagaaaaatgcagaaaagttcaattctattaatgatcaactgagagtttatatacacagcaattacaacagaaaccaaactaaaaataacaagaaaaagctaaacaaacaaagtaacagaaataactaatacaatactaaccaactgtcagaacagttagttagttaa

SEQ ID NO: 217229 - DNA, 531 bp, Cannabis indica
atctttttaaaaaagtgcgtacaatactttcatgtttatgagccaaagtttcaacacaggaaagtcgaagtatatattttactcaatacaaactcttttttttcgttgcgttgcacgtgttatatgagcgagactttctaaaccatttacttttattttttttttgtttgaatatgcttctaaaattttgattggaataatagtagtagtggacaaattgcctatatatgagtattagacagtctcacccacaaattaagggaatcaagcagtatattattagtacgtgaaataaatttaaatggataattggacataataattagaagagattttttacaccacatactgaaattgctcactttttttctttttttactgtggggtagattattttttttttcaaaaatacagtgtaagtgttcactttcactattattttttagttgtaaaactgttatttttaattgttctgttttgttattttatggttattttataaaagacagtattttggtaaaaaaaaaaaat

SEQ ID NO: 217230 - DNA, 1063 bp, Cannabis indica
ttttaaaattaataatattcaatgtaatgatataattattgaaatttgaaagtataatagtaatttcatcctaaatttatcttcgtaattaatgaaaatgcggttaaactatcaaaatattcaaatttaatttaaaatttaactaattctaaatatcaaaatttaaaaatattttttaataaaaaaataaataatatgaataaatttattattaattgcaacactttaggggaattaattatatttaggtttaactaaatggatgcgtaacctttaagtgacaacatctaataatttgttatttttttatttaaaaaaaaaatcacccaataatttcttataaaccaagaattctgttatataaccacattttatataaaatagatataaatatagcgtgcttttcttatttacatacaaattgtgttatattttggaacaaaaaaaaagattttgtaatatttttgtaaatgtaaaaattatgttattattggtataaaaaataatttgtaatatatttacataagtaaaaattatattaaattttgtaaaaaataattttgtgataaacttgtatctatttttagccttacaaatttaatgttttttaaaatatataaaaaaaataatcactttacaattaattatatcattattattttacattttattatgtaaaataataataataaaaatataaatagtccatcaaactaagttataacttctttcaaaaaaaaaaaaaaagttaataactaaatatattaataaaataataaaagtgacatagaagtaagtatataatgataaaaattttacattatagcaaaaattgtattttgttataccatctccaataagaaatgtaaaagttgagctatatttaacacaaaaaatagttttgtgatatctttgaatcaactttacttttgtgctgcaatgtatagttgtaaatttcgattcaaaatttactatgcatgtaatgttcacttaataatttattaaataataataattcaagttatttaatgcaaaagtacatattaattaaaataatgtcttg

SEQ ID NO: 217231 - DNA, 815 bp, Cannabis indica
agatattttctttgagcattatatgttgagaatcttgagatatttgcttagtagcaaccaatattattatgtggtcatgtcttaaagtaaacaactccttataattattattgaattaaaatatgagactcaattttaaattatattgataatagtatgctttctcaatacttagtctagtcaataactttttaatgattattttgttctatattggtgtttttttttaaaaaatgtacttaccagaatcatcaatatattttaaattaattagtatggtttatatatgtcataaactaattagtatggtttattttgctgcacgtattaatctaggtagaagaacaaaatccttaaaaaaaaataggggtttaaaaatataggtatttgaattctaaataataacatttatatataaagttgtaatagattagagactaaatgttttcctccttagttttaaaagacctcaggctgaactctaatgaataattgtaaattgtaattaatagaaaatgaaatttagtttgtctagttaaaccaaaaaaaaaaacgtatatttactaaaacttaaaaatcacttacaaaattaatgaagaaaactatatcttagtgcaaaaaacgtctcattacagaagtaattttcttaagagataaagtaaaatatctctgtatattttttatttataaagcatcgctatgtaattttgattgtttggacaaagaaaaaaatctatagttaataaaaaataaaaatgaaacaagagataaattcaattacaatagaatctatattcaagaatataaatgagaat

SEQ ID NO: 217232 - DNA, 684 bp, Cannabis indica
tgatgtcaaaatatcacttaggcatcaaaaagtacatccccatgacatttttctactcatccagcatccagattgacgtcatatgtcaacgtgggcgctggatgtcaatgtgggcgatgggcacagaacaaccttcaataaagtagccataacttactcaatattgatatgattgatacgattcaacttgcatttcgaagcaaattcaatgctctatcaagtaatatctcacacttcaatcgcaattttgaagttatcaactctaaattttaccccaagggagttacgaaaataagctccgacttacctagagcgggtccttccgttgcaacccgagctttgaaaattgacgattaacctcggaagttaattttttatcgttagatcatcatctttattcaaaaatagctaacttgtatttttttattattttattcctatttttaaggatctccttcacttacaaaaggagagctcccttagttcatttttcatattcagagaactacccacaaggtcatagcatctctctctagaaattagagcttaaacacttagccatttttttttgtaattccatctcgtgagaaataaaaactacaaagaagacgtagctccattaccatcacgacatggggagtaaatactataaattgtgtgtgtctctctaatttttttttttac

SEQ ID NO: 217233 - DNA, 829 bp, Cannabis indica
aactagcactgtaacttaaattacaacgaaaaaatcgtatagactaaataacacgttataccctctaatgccataaaatcgaggatatacgccctacaaacaaacaaacaaaccgagatatataactatccttgcccaaacttttctattttattattttatattattatgatacacaaaacactcttctcttatatatactaaaaggtaatgaaaatagtacttttttttttatttaagcgtttatatattacaaccatgttttacctgggactcgaactcaggacctccaagacacacacactcacttatggccacttgagctagcctcaagtggttaggtaatgaaaatagactggagactataaaataattataataatttatcataaaccaacatgtaatcaacacccatatagaaattgcactcccaccacctccttattccactgttgccaccccacctgaagggtttctttggcctcattttctttcattttatgtcagttattttatagcttccatccttctagatttattttcttcttgatatgctcttttgttgatgtatttaaagatattcaaagaaataaaagatatttcttttatttttctagtctttggctctttgatcagttctataaaatggtggtgttgagatgttgtggattcccatggtgaagaattatatgaagattttgaattggaaataagcttaaggcccaacgtgacatttttatgtgtagttttttcaagcacatttacgcggttctataaagcaccttacatgacaccttaagatgctttcatttaattgtaaattagctca

SEQ ID NO: 217234 - DNA, 720 bp, Cannabis indica
ggtcccgaatgaaattttgaccccagtctcacatgcgaatactggtgtcacaaacagaataaaatacccccaaggagaggaccgccaagcatgaaaagccacatcccaggatagacataagtgttctaaagattcttcccccatcccacacaaaaggcagctcgcatcctcaatatgaaatctttttctgatcacagaccgaactgggagagcactagacaagatacaccaccaaagaaccatatgacgctccaaaattttactattccaaaatttattctagagcgacggagcaacctcacagagaggagcctttttcatagcctgggtaaggtagacagatttgcacgagaaacgactattactttcaaaagtccaaacccacttatctttaccttggctagaggggataccaccttttaagatcgtataaacaatctctctatcaaagaggctattcaacttgtggatatcccaaccaccactgatagataaaaaatcaacaactttgcttagatcagtagcaaaagattcatttgatttcgaaaaaaaatctttaatatgaaggatccaaggttccacaaatactagtacccataccatccgccaccaatttagaaacacttttcttaaaactcttaaaatgactttttaaaaaataaatgaaaatgagttataataccttaaaaactttagctcattaaatagtacatctgctaa

SEQ ID NO: 217235 - DNA, 518 bp, Cannabis indica
ctagccattttgttcagaaaactgcttcttgatttttagattctttagaaattcgagtggttttttgaaatggagcttcgagtgaagagcatgaagccatgagcttgtttcttctcataagtgctccacagatcaaatgctttcttgttttcagaaatgaatggtttagtgtcatttcaatgaaattctcggttgcatacaatacattgtattcttgaccttttatgtttgatatgttaaaacaatgaatgaaagattatagctgttgagttcaatttcgggatagagtggtttcgaaatggagcctcgagtgaagaggatgaagccttgagcttgcctcttctcatagtgctccacacatcaaaagctttcttgtttttgaaatggatgttttggtgccatttcaatgatattctttgaggcattacaatacatttttatcttccaaacttttatatttgatatgctctgatttttagttgtagagattttatgttgagaaactgaatgaacgatta

SEQ ID NO: 217236 - DNA, 768 bp, Cannabis indica
tagctaaactcctacaagataccactacattacctgagcagaaatcattgataagctccctgacctcaggcactaactccaagaaattcctaaagttaaggttgtctaactttgttctgtcaagaaaagggaaaaaaaaatttaatcagagaaaacatcaactattacaaaataaactaaaaatgaacatttagaaaataaaagcttcagcatctgtagtcctaggagaagaaaaattaaatgccttcaactctgtccggtcaaaactcgcgagtgcacaaagcccaccgtatattgcaacatcttgtggcgcaattacttcattgtagttatttcccaattcaggattcgtttccaagaattgcatagtgtcaacgggataattgaactgtgttattatatgcacctcccgttaagagaggtctagccatagctgcgtttggttgagaattggatttgataattagggatatacgtttgttagttagagagatatgtgggatgattttttttaatataaatttttttttttaattttttgggtttaattattgggtttatttgttaacggaaatcaaacctattaacatcgttaaatttaacagaaatattcggttaaaccaaaaaataccgttaaataggcacttttaatatataaagatatattaggtatagtttgttaatatacaaatgatttattttaaataaagaattctcacagaatttacacgtttaattcattacctatttttaagtctagttttatgt

SEQ ID NO: 217237 - DNA, 937 bp, Cannabis indica
cagtaaaggagtaatggagagaaaagtgatcgatggaatgatggaaatgctcaactaaataatgttgagctttggacctttatttatattgaataatggtcagagaccttacaacaagaacttaataacagaaatcaagatgttacactaaagcaagaaaatgcagttaaaacagtttttgcaaaatgtcctagctgtcataaccaacttatccaagttggttagaatatgttgaatcttgctgaggtgttggttcaataaatatattattctataaataagagaaaataaaaaaggtgatgtatagaataaaaaaatacatttttgtgatgtttttttgagaaataaagtagagaaagagatgtaagtactcttaataatacaaaatgtaataataataataataataataataataataataataataataataataataataataataatttattttaaaaagaaaatatacttaactacttggtagaattaatatatatatttaataaataatattatttattctatatttattaggataatactctttcatgtaatcaaatacactggcaagattttgtttgtttttgtttttttttttttttttttaagttaaaattcactattattataaaccataattcgtttacatcaagaaaataggattagagatctctctctcatccaacaaatgtctctatctaactctcaatcatattttattaaactatatgtacagcttaattagcatttttcctaatatgagaagtaaatagtaagaaaaaaaaaaaaaaaaacaatcaacatctaagatctaatctcaaaaacaaaataaatctatagatttagaattaagtgtaatggaaacaggcaaatcatcaatttcaatatgaataattgatatttgtaattaaaataacctaaatgaaagcat

SEQ ID NO: 217238 - DNA, 590 bp, Cannabis indica
aacactagaacacatacgacattctctacttctcttagcatcaaggccaccaagtccctcaactttgacctccatgatgattttccattcctttcgtttttacaattgactggatctctcacatattttggttgttttggtgtcccatgtgtggtacttggactggtgttggtgagcctaagttttgttcaaaggcatctttacagtatgcagtgatgcgtgctatctcttgcttagcaaatatgaaatttgaatttattcttgaagcataaaaatttaacatgtttgtgtcataagtaagagagccatacctttccatttgtgtcagatgttcttggttattggagacaccttgttcgggtggagttgatgatgttgttgccttcttagtccattgtttcaaaatgagtaagggtggcaaacgacttatgttgaagagtttcatggatgtccatatgtgcttgcaaggataaccttctgtttcgaataacaagtcaatgtcagaagttgatcttagattaagagaatctaaatcctgatatgcttaggctcaatctcaggagtgctattcttgttctttgatttattag

SEQ ID NO: 217239 - DNA, 814 bp, Cannabis indica
aaaattatatattgtgttatatagtaatattgtaatttttaattttaatattactttaaaaaaaattaaaattaaaaaaaaaaaccagatggaaattttatgtgttgacaataatgcgcccatggtttatataaagaagagaatatattgcaactaggggcctataatatatggagaagtagtcacatcacatactataattatatattttgattttcatttttatattaaaatttgcacaattaaatcgttttgagtatttattttatttgaatcgttttttagaatataaaaaacagttacttttaatgatattttttaattataatataagttttttttttttttgtaatcaattgtgatttttaattataacaaaaaaaattatttgtaactaaaatatagaattaaatataaattatcactaatttacttatagtcacaacaaggactaaaaatacatttagtcgtaataaataataatatttgtgattaattcacaacttttttacttaagttttgttgtgattaaaaataagattttttgtaatgataaaataaaaatatgaaaatgatgataaaattatttcatttcaaatttagagtttcataaaaaataaatatatatttcagaagggaaacttacaaaatattgtagaataagtcaaagtttacaaaataagacatagagttctctacatttttactctactaattttacaaaaatattgtatttaaagttttaaaattataaaaatactgtgttttataaaaataactcaaaaacaatactaaaacaacttaataaataaca

SEQ ID NO: 217240 - DNA, 1421 bp, Cannabis indica
atatggctcaatattttactgtttatttcatgtaggacattaattgtctacaatattatttatttttaggtgtaattcttatatactaatggtatttttatttggtgtgtcatgtatatatagattataaaagtattaaaaggagaccttagagatgtgaagctgaagactttgggatcagatgttttccataattgtgctaatgatcaacacacaattcaacccacattatctcttttcacattcagagatttcatacacaataaattacatgtagacgaccaaataaggcttaaaaattatttttattgggatgatgatgataatgaagatgctctcgatgaggttatcgtaattgaggagcttatcaaatattctactcttacaaaacatgactttgtggattttatctttgaagagtttgaatctagctttcagagtagtaagaagttgaaactaaaagggagtgatctagcattgaaaatggcagatgttgaaggatattccatacctttaaatttggtctctgccatgaaagacttgcttcacaaacatggagatattagtaccaactcaagatattcccaagagtttaccagcatttgcttttacttgatatgtaaagtgatgaaagagatgcatactactttggtcactgacataactaaacatcttcttcaacaatggtatcgctacatatactttttaaagaacttgattaactttgaggtgggttttgtgtgggaatgtctaaagaagatcacaggagaattttactatcaacagctaagaaagctagttgatgattcaaacattatcccaacaattctggacaagaagataggtgagctacagaggaagaaagctgagttcaaaagtttttggagtcttcttcaaaggaggaatccttgaaggagtgcttggaagaggcaattaatgccaagtggaagtatgcagccgaattggattctgaattttgaattattaattattaatatgtaactcattattaactttttcaacttgttaattttaatgactgttagattatgaatcaattagtaaagataattaacattaattattagtattttataattatgtatgattttatatttcttgtgggtcctatttttgaaaatgggcattagagttataattttacaatttcagagattttattaaactctaagggtattatttatcctataaatgaaatgtgtaatttttatgatttttcaatcggcgatgatggaaaaatgcaatggatggccgttagagtcacatggataagtttagaacatatttcttagcgggacaattaatataatagatattttgaatgtcggggttaggcagggttttagttttggactattttactcctaggcatattgattacttaaattggaagaaaggag

SEQ ID NO: 217241 - DNA, 743 bp, Cannabis indica
ctgataatgtgaccttttatttcgaggaaatgattacgtgagctaattttttctttttattactattatttttccgttttttttttttattttttttaataatattttgatctttcttattttttgagaaaacgttttgagttttaaattttgaggaaaaagtcttacaataattttagagaaaaaatatataaagatattatactcataataaagatttattacaaaaaacaaaaaatctaattttcttattagtgactctgtacttcatcttcaacctcttgatggtggttgacggaggctacggtgatgtggtgttgcggttatcttatggtaatattggcattttacagttattttatttatttttaattattaattatttatttattttaaatttcatatttttgttgcataattttttgcagttatttttaactatcctttgtagctttttaaggaagttataaatatcaattatttattttatttattttttatttttttagcacttattttataatagtttatgattttatttttttatgaattaattattgtaaattggtgtaattttgcgtcaattattttatttatcaattattttataattttttttttttttgggggattctatattttaatatttttcacaaataattttggtggttggataaaggataaaatttatttacttgcctaaaattttaatataaggttatataggatgccactatatatga

SEQ ID NO: 217242 - DNA, 741 bp, Cannabis indica
gtggtaaaacctattttggagctaatagaagctaaggtttaccagttatgggaattagggttattcccagaattattgattaaggtatttattgaatgttgttgtcgtgacataggacccgggaacgtcaagctttgtttttcacttaggccggcacgcgcgcttaatctctggactgaggtaagaaaagtattatgtacagtttatggttaacgattataattttgatagtctcgattatgattgagattccgatatttgattgttgtgactcgattatgattgagggaaatgatatgaaatgattattattgttgtgactcgattatgattgagggaaatgatatggaacgattattatcgttgtgactcgattatgatcgagtaaaagatacggttattaccgttatgagtaattactcttgaaactgcaaatagatttcttacttatcatttggtgtatagggcaacgatagtgacatacgtagcttgtggttaacgaggggtaagggtccttttaaagtaccgggactgtttgactacgatgctgtgaaattgattaagcatgttattatgtgatgagatgtaattgaatatattttgttatagtgtgactaaataaatttatacttcttaaggagttagtcacttttcttgttgagtctatgtgactcgcggaatgtatgattacgtgattatagggatgtaagattaagtgctttatttctgataattagattt

SEQ ID NO: 217243 - DNA, 654 bp, Cannabis indica
ggttttttttttatgttggacagttatgatttacttaaacaaaaaatgatatgtgtatacattatttacacacaaacataacacatatttttgtgacaagtcatttgtgataagtgagattcatcttaaataaggtcatcttcaaccgaactctaaaacactaaatatagtgtagtttcacactatatttactttaataggacactaaaaatatactcataaatgggtttatttacactgtttcaccaaatttagtggggcactgtaaagcacactattttttaaaaaaaaattaaaaaactaaataattatatatatttagtattaaaatattcttattacattaataaaatgataaagaatataaggttagaattgaaaagaaaaaatagtgtataaatagttggtttttggtgttgattttaacactaaatttagttttctccattgaagatgccctaattatgactcgtcatttaagtgtgtgtgaagttcgtgtgtgcacatattattactctttactaaaatatctacttgaagagttattaattccaataatgtgttgcttatgtctttcctttttctttttcttttttttcgttttttttctcttagtggaattcaagaattgaagcattatgcatctggtgtccc

SEQ ID NO: 217244 - DNA, 528 bp, Cannabis indica
gaagaatgatgtttgataacatgcatatatttttaacattttttttaattgatacttactattggaatgaaaaaaaaatgccaccaaaaaataacataccatagtattttttttttaaatcttctctttcgtaattttttttattattaatttatcaagaaaatttgtttatttaatgtatattaaacaataatataataatataaattttttaaaaaaaaaataatataatattattttaataatttttaaaaatacttagtattggattatttcagaacaaaaaatagttaaaaataatgtagaaaagaaataaaataaaataatatatttttaagtgatgaaaattttttatactaattaaaaaatactattattagagatgctctaatagtatttaatattttttaaatgtgtcactttaccattaactgacaatacttttttttattcttattaaaaggaattacctagtatacaataataataataataataataataataataataataataataaacata

SEQ ID NO: 217245 - DNA, 610 bp, Cannabis indica
taaagtttttgttctttaatctcttgtgctaattgtatattaaattaattaatatatatttttaactaaaatatattaaatataattggatgaccattgaatgataatttaatcagtttggtcggttatccattggaaaggatgttccatccaacaaccgatccgatccgattggattttaaaaatttacatctaatccgatccaattatgattggatatctgattctattggatcgtttagaattggatcagtcggtagtaattgaattgaataactttctgcatactcctatttgaaatcctcatcaaagaaaattccctctaattgaagaactccctacataaaaaaaaaaaactccaaaaataactcattacatagatatatagtttattaaccgccaacgttttaaaaataaaatatacataaaaaattcaactatcatattctcatgtgacatattctattttaagatgaaactacaacccttgattaaaaatcaattgcttaaataacaattttatataagaataaaaatagatgctctcacctaaggaataccttatatatatatatatataacatatatagatatgatatatattaataat

SEQ ID NO: 217246 - DNA, 1017 bp, Cannabis indica
agggagttttatttataagattaatatatgttaaattatcattagtagtgactatagtaagtggttatgcatcatcacttgtacgtgacaaagataatttttcttttcttctatttgaaatttttgaaataggtgatttttcattattattaattttgtttttggtgtacttttattctttttgatttctctatatacatgttacgcaaattataaacagttacgcaaatgtacataatttagtgtatttttatttatacaagtgaagtcgattaataaaaaaattgatatcaagtaccactaagcaaaatttatgtttctatttagtaaaaattgagaatgatgttaacaagaattaaattttaaaaaacagtaatataaaaaacaggaaaaaaaaaaaaaaatgttgtcaaatatagatgaatgcttaggactaaaaaatcttatttttattcacaacaaaacttgtgactaaaaataaaaaagttgtaactaattataaattgtcatttttacgttgtgactaaaaaatcggtggctaaagtattagtcacaaaagtcacaatttgttgtgactagatgtgtttttagtcataatacttgttgtgactaaaactaaattagtgacaacttgtgtctaaatactacgtttagtcacaagtaactttttgttgtgactaaaagtcacatttagtgacaaaaaaatatattgtgactaaaagattctcactaaaggtggtattttttgtagtgccaattattaatgtaaattattaatgttatttcctctaagtgatgacaggttataaaagtacccttaactcatctcagatcattaagatcctaactcatatgttatctacttgcatctctgaaataaattaacatgcaacttgcattaaacatagaatataattgtcacataggctatgtaaatactctcgttttacatcaaaacctatgtttgttctattagagcattcctaatattcacttctcagatttcatattaggatc

SEQ ID NO: 217247 - DNA, 547 bp, Cannabis indica
agagccaaaaagactgaaaggaaagaaaagcttaggaatgcctggggaagcagttggaggtggatgagtcagaatacattaacctattctgaattgcatatagaagatttgtggcaagggaattagaattgatttttgaatatggtatagaattgtttttgcataaaaataaaaataaaaataaaagccccaatttacttgggttcatctaaatctcaaacattgtaaatcgggagataaagaaattgatagaacaaaaatcatagaaaataaagaaaattacaaagatggagagagagaattcataacgttatagagatggagcgcgtgaaatatgagcaaaagccctagagagagaggtttagctaaagcaaagtgttatgtaaaagaattagagctgaccagcatatatagaacttctcaaatgaaccatggacaacaattttgctctgtctttttttttttacataatttttgtttttcttaactctgtttttcaaaaacaaagccaaacatgtacaaaatttcttgctccctgcatttttgt

SEQ ID NO: 217248 - DNA, 630 bp, Cannabis indica
acctaactagtagtaagtactatcgatcattaaataattgtaaaaatttgaaaatgtgtgtggaatatatgatttgtgattgggttagaaatagaatagatgggagtaatttttggcagtcacagaatgttactaattcattaattaatggtcagtgttttcttgaaccgcattgtgagttcatctaagctccaccaccaccatcattttggttatactgtgtatatgcatggctaattaggatttttgtctctgaatttttaaggtcgttaaaaatatcttatgaactattgagattgatcgatttaaatttttttttttctaattttagtaaaaaaatctaatatgaataaaaattcagggagtatgatttagtacatgtctaagttctatggacatgatttggtagatatcaaagattgggaagtatggttttagtacatacacaattattaaaatagtaaaattgaatgaaattaaataaaagtttttaaattcaacaatcctaatagttgagaggacatttttaacgatttaaaaaatttaaaaatataatttgatacatgtcaaaatttaaaagacaaaaagcctaattagctctattttaatgtctatgtatccattattgta

SEQ ID NO: 217249 - DNA, 559 bp, Cannabis indica
ttcgttttagggtatgggaaataaagaataaatatgttagaagaaataggtgggcatgtaggaaatagaaaagaagtaggtgggcacgtgggaaatgtggcgagaagtaggtaacgattttttattgggctattatacctgactgttgaaaaccgtcacctatactataggcaacagtttaaatcgtcgcctataagggccagcaaattttacgaattctaattaaaatcgtcgcctattcctgtaattattgttataaaccgtcgggaatattaatttttcccgacggttttaaacaattcatttttttagcgatggtccccccaaaaaacatttttaggaccgtcgcgaattctgacttttgtagtagtagtcacaagcgataataatcatttctcatcattacctcaatcataatcgaggcaaaaacgataataatcgtccctcatcatcacctcgatcacgatcgagtcacaacaaatacacatcattaatttcgatcttaattgaggcattagcgtttataatcggttcttatttaatcacttagcagtgcata

SEQ ID NO: 217250 - DNA, 939 bp, Cannabis indica
caaagaagatgacaaagttggatcgttgatctgatacttagaaggcactcagattgacgtaattgtccaaccgtaggggcgtagggtgcgtcggggccttagggccttgagtgctcaaaaatgaacttgctccaaatttgattctgatacctcaaatatgtccgtggtatgtctagttgatgttccaatacaagttttgacccattttgcactagtaaaaagtcttttaccagaggggttttgccaaaaacctttgccgacgcatatatgcaccggtaaaagtttgctagcgcaatatacctactttgctggagcaaaaatgctctgataaaagtggcatttcttgtagtgattagaggccaaagcaattgcgcttatgttatcacaccatattactgagatgaatgacagagaaaaattcatttctttaaataaggattcaagccaagttatctctgctgaaacatgtgccaaagtcctgtattctaattacataccactaattatttcttggatgaccattaaactaaagactctcaaaaataaatacaataaccatcaatttactttctatcatttggacaacaagctcaattagtatctgaacatccaatcaaactcaggctgtctttgtgttggatgtgtaagccatgacattgtgttcctttgcggtacttgagaattcatttagtatcattgagatgaactatttttggacacatgaggaattgacttaaattgttcacaacgaaatgttatgttaggtcttgtgtgaacatgatattggagtgctctaattaagctcttgtaatatgatgggttttcaaggacttctctattaaattaggacaatggcgtccccccagccataggagttagacatggtttaagggcagtggccttgaggaagatacatgccagtagtgtctcagtaaattt

SEQ ID NO: 217251 - DNA, 798 bp, Cannabis indica
ggttcaaaatcagaagagaattgccaaggtgatcatgaggagttcagttgagtgttgtagtttcctctctttctgttaacacatccaatctagtccaactagatagtaattgtatcattaatggtatttaatatttttatatatattttgggtattgtattgtaaagccatcttacataaaagactaatgcattgcataattattagtataatttgatagaaatatttacataaattattatttttttttttattcaattttttatactttatgtttaaagatttcttttttttacattttatattatagtgtaagtaaaaacaacacttaaataataaaaaaaatcacttaaaaataacatatcaaataacatcttaataatattaaaaatcatacaaattataaaaaaaattaaataaaataataagagtaaaacataaaaatatatcaaaaagaccctattttatataaataaattacttaaatataaagtttttaggtttgaccaatttatatgatatttttttgtttttaagtctttttatggtatttgatatgccatatatatgtaaattatgttttcaaagcccatatttaatgtttttatttgtgtttaggcagttttatttgtcactggtgctagaaaagttatcggagtttactgtcggtatcgggaaagtcgccgtagtagctgccggtgtcagaaaagttgctagagttgccgctggcactgaaaaaatcgtcagaattagcattgtcactggaaaaaccagtaaaaaactagttttttcatcaaa

SEQ ID NO: 217252 - DNA, 736 bp, Cannabis indica
  modified_base (426)..(426): a, c, t, g, unknown or other
ataatatgaaagtattttttgtttatgaatacaaaaaatagatatttctcaacttatcccttaacaggtactataagttttttgtttttgagattatttcacaaatatattaaaacaacaaaaaattaacaaaaatatctatacggaatttaaaacatttttacgattttatttattgaaaatacggtctttttatgttgtatgcttataaatttgttgttgaattttcgttatctgtatgttattttttgttgttgttttgatgttatttggatattattatcctattacttctatgcagtttccttgttgttttggtattgtttctaaagaaaacggtaagataaaaagaattcgtgaaatgtaaaagtgtaattttttatagaaaaaaaagtagtcttatttaattatctttttttttttttntttttttctctgtacagggtataagtaattttaaaaacaagtacttgtgcacactatagagtgagaccctattatgcaaattgactaaaattggatccaacaatttaaaaaaaatgagtggtgcagtaaatattttatttatttttcacataatattcaaattttcttatccaaataactactcgctacattttaaaaaaaaagaactataaatttccataaatgtcaatagataaaagtagtataaaaaactttttaaaggatatattgtagattactctatttcatttaattctaatactaatataac

SEQ ID NO: 217253 - DNA, 523 bp, Cannabis indica
gggttgcttttttttaacccgccaaatatacaaattgagcgggttatatttttgtcggtttaaattttttgtcagtttttttggtttaatttgggcgggttatattaaagataaatgtaaaataaaaattattaaaattagtgcttttataaatttttgaaatattaataatattcctcatacaaaaatttacccatcaactaattttattaatttattacgattataatctttgtctgatgtaactattgtccacaatagttttttctatattaatcttttgttaataagcaaacaaatattaatggtcaggggtttgggtttgtgttgggtctcattattaatcttgatataaatttcaaagactgtttttgggcacgtggaggcatatacttgaaaaattaatttgtgaaataatagtttaagatttactatgtgaaagatctagtaagtgaaaatgatattatccaatttttcaaatattaattccagctgcctatattttttattaaaaaagtatgga

SEQ ID NO: 217254 - DNA, 703 bp, Cannabis indica
aaaactcttaaaaacattaaccaacaatttggtatagggacccgcacacccaagggtgcccaacctagggtttatgggcccatgcgagtgttttcatcctagagacataaatcagacaagaaaaccaacaagggctttaattgtttaggccaaaaatggctaaaacttgaacataaagttaagattgcacaagaggaccatctcatagtgcatggccgacctgtgccatctttgggtacaaaaagatggcacaggtctctactctcaaaacaccaaacgacacttgtcaaaatgtgtttcctcaacatttacgagtacactataaatgaaagaaaccatttctcaccaaggaatcatcctagccgacctgtaccatctttgtgcacaaacatgcaacataggttgttatataaaaattcaacatgactctcgcatgcacgtcgtatttgtgcaagaaagatcactaggggtacggtatgtcttcaactctccttcctagattggaaggactgcttgatgtctatcctaccttccgtgatgctttccctttgatcttttcaagcgaagtctaagctacaattcttacacaactttagccttcatgcttcgaagccgaagcttgtcccataaaatttagcacgactttcgcgaacccaacagtactaaacccttaggcgtttgcaggatcaaactccatacgcac

SEQ ID NO: 217255 - DNA, 805 bp, Cannabis indica
agcagcacataatttgctacactgacccctaccgttttctttgtaattattttcggtcgtttccactaaacaaaatgtgtaccgcacaagattaaacgaatttttatgagaaacgttaaaagacataggtgaatttattttatgttttccatattttaattaaatagcattaaaaaacctaactatggtatataataaaaatatcaatatgattatcgataattgtttgtatctgtttattttgtgaaattggtaggcagttaagctattggatatataatcattaattggtgaatatatttcaaagaaagaaatacgcagtaattggtgaatatattataatttattaaatgtaaaaagagtgacatcatggaaaacggacgctagaagacaagcatggcggcacacagcgcatatagttaggaatagtgccaccaccatatacgtgccctgcaaatgcagctcccgcaagacaagtttcagtaatctttttctctatctcaagataacaatgaaaaatattattgctaagataaaatcaaaaatgtgaaaaaccaagttggaattttcttgggttttgttctttcttatccaaaagggcatcatgtctcttatttttaccaattaattcttcacacaaaagattctgataatccctttttctccttcgatgttgttataaattgagggagtttgggaagagcttttctattcacttctcatactgttttttacagatataaaactgctttcgtaacctaaatcaagttctagccatggtctgcatcttctcacgtgccttcaa

SEQ ID NO: 217256 - DNA, 905 bp, Cannabis indica
acttcaacctttatcttctcctttccaacgaaaaaacaagcttctccgcttgcatttacatggtataactatagcagcagcacaacacacattttttttacgagttttacatctcagcagcagcaaatataagggaacgctactaaacagcaacagagataacagagataatgagaaagttaaacaaataacagctacactgtttagaatggcacacataataagctctaccacctgtacctctcaagattattcctaataacacttaaatctgcaaaattcattaatgtcaagggctataaaatacattttataaataagataaatttcttaatttataacaaaaaaaaataaaataaacaaatatgattcatgattcggtgcatatagttacagataaaaataccaaattaagtacttaatacatatttcacttttttagcaaaaatcaatgacaacatacctcgcctgcaatggtatgcatatttaagctctgaagttaattggtaaatatatcacttaaattcttcccaataatgaaaagctaaaaaatcaacctacccaaatagatctaaacattgcaattaatcaaaaagtaagacaaataaaaaaaacaaaaataataataatttgccaaaagttgaaataaaaaaaaataataaatcaccaaaagttatatcttctcattagtatgaataattccaaacattacaacaattctaaatggcacaaccattcaatttatataaagaatttaaatataaaagttaataatatacacaatagtttagaacaaattaatatcaaccacacagaagtgataattttatggaaggcaaacaatccaaaggtcagttaattttatatcatgcttatgtataaaatgaagagaaattttactatat

SEQ ID NO: 217257 - DNA, 648 bp, Cannabis indica
acatctaatccaatttaaattattttatacaattatctcatataaaaaattagatatttaattataattagattaaattaaatgttgaaagttagattttaattagattgaatcggttattgaaggttaatcttaaaatttaattaatctaccattcattattacaaaaaaaaaaaaaaactctaccattcaattacatctaatatatattaaaaaaataattatatttatttatatataataataaaaaagggttttaacttttcttttgttgaatttgtaatacttagttgttttacgtatttattttcatgatgttttattcttttattagttggtagttttgttgttttaattattttaaaattttggttgtattaaatttgtaaggataatatttttatgtagtattaaacttaaatgaaggttaacatatagtttttaggtatgtttcttcatatttctaagttaatattaaaaattaggtgtgtaattggatatccaattaaaaactgatccaatccagttagtaattaaattaagagaaaattacattctatacccacttttactatttattattttaattttttacctttgttttattattctttaatttatatcaaattttataggtcatattcccat

SEQ ID NO: 217258 - DNA, 513 bp, Cannabis indica
aaactacataaaagtaacatgaaaataacaacaaaaaataaaatacatgtaacaaaaaatgaacaagattacaacataaaaagaccgtattttctgtaaataaaatcaaaaaaatcgtaaaaatgtttaaaatttcgtgaaactgtatttttgttaatttttttgtttgtttttattatttttgtgaaataatcccaaaatttaattagtaaaattcataaagtaaaatattctaataaaccctttttacttaagaaaaaacaataaaaataaaaatgattttgaaaaacaaaataaaaataataagggtgcttggtagggtttgaagtagtgcaggcccatgtacaaaagcccatcgttatataatacatgttgaagtagcatcttcgtaaaccctagaacagattaacactcatcagtagcatcagagtctcaactcaagcaattaaaaggaaattgcttgtgctcacagcctccattgcgattctcagtgtcaaccatggcgaccggaaa

SEQ ID NO: 217259 - DNA, 572 bp, Cannabis indica
  modified_base (59)..(59): a, c, t, g, unknown or other
gactgttgttttaatctatgtatgtatgttttactttgccatacttgtgcttgctttcnctttccacttatgtttttttttctaggccactcggtagattaccgtaaggttttttaagtttttattctaatggccaaaacttgatacccttagactttcctaccttgaaataatgtgttgaacctttgaagtatgcaatccgcaaattctttagatattaatccttgttgaagtatttttttgtggtgctttacagactttggcaaattaatcttacacagagggattttatgcttattacaggatcacgataggagtcacggagcttaactcccatctacgtgtttctcgattaattgccttaagcagagtaggggagacaaggctggatttgtactagcacttagaccatgcttcctctatccaaagtaatagagctggctcggcattagaccagtttttcccaaatttgtgataagagaactactacaaatgcggaggatttccaggcgtgcttccttttctaattgtttgtaggaaacctattaacatgatcaatagaccaaagcaac

SEQ ID NO: 217260 - DNA, 523 bp, Cannabis indica
tttacacaaatgagattgagaaatgtagctccagcacaagtatttggaatgggagattgaaatctaaaaggagaaaaagttgaactcctcactctcagcgacactacaagcaccgttaataattattaatgcctaccaatttgttaatgatgacattatattaaattacatgtcttttttttttgaaattatgtattatatatctgtcaaataaaaaaaattattaaaaaaaataaataataagttagtataaatgatattattttaaaacatttaaataaaaaagtttatttttttaaaaaaaagaaataaatattaattaattaacataatgtaattgttctttgtttttctttatgtatttgcatttactaaaaaaaaataccgcactccaaatttttttttttcaaaaaaattaatttttataaccaacaaaataatgtgaattttttaagaagtattgtgtgttttaaggtggttattgggtattgcctgacaccataatatcgaaaagggacaaaac

SEQ ID NO: 217261 - DNA, 604 bp, Cannabis indica
gtagctatgccaaataaataggttaatccaaaattcaaaaatactaaaaacgttttaaatgtgacacattttcttttcttttcttttcttttcttttttctttatcttatcttaaaatttattattgtaatcatattacaggtaaaatataaaataataaaaaaaaacaccaactctataaatatctcggcctcttccactttgaaaacccaaaaacaaccttagttattattttttttttattgaaaatttttcattttttttaataagcaaaaataattttagctattattattattttaaaaataaaaataagagaaattacttcatttactatttttttaactttttttttaaaaaaattagtacggtttgagtttctaaattggttgcagcgctagttgcaataggggtttctatgtagaatttcgtaaaaaatgcaaaaaaaaaaaaaaaaaaaaactaaagtttgtaaagtagtaaaaataaaaaagtaactcaaaaaataaattaagcggcaatactatttgtaacttttacgtattctgtttttcctttaaaaaaaactttaacttattagtctgtcgttgtcgattgtctgcat

SEQ ID NO: 217262 - DNA, 595 bp, Cannabis indica
agagagagtgagaaaagggcatggaatgaaacagtagtattaaacagagtcatgggacacacaatgcagaggattttagtggatggtgtaggagaaaaatgcaatcattgatatacaagtggctctctaacaatgactttaggactattatcattcaattttaggttttgggttagtaatttagggcaattagtaatttagggcaactcttgtcaactcaaatttagagttaaattagggtactattttatcactatttttttttaattccaacagtaatattaaaaattataataaaaattatatttttattataatatcattttattaatataataaaatgtttacttaataaattaattatttaattattaaaaagtaaaaaaaagaataggcgtggtccaccatgcactgttaaactgtaaattcttatcaaaataagatacgtttactgctcgattggaatattttgtagaaaaactacattatatgtaagcttttaaagtgttttggtagatagggcttaataatttttttttctttcccaagtctcctattaagagaaatgttgaaagacatttgttattgtatatca

SEQ ID NO: 217263 - DNA, 581 bp, Cannabis indica
cgcaatggatagcccaatcagagaaatcattgcgatctcactttgccttccatgctctgctccgattctccaggtgacaaaatcctctcgtcataatgttcattttcattttcctcgtggtactgttccattgattcagcagcttcctcaatctccagttcctgtacccctagcactgcgtccatggatcgagtcttgatgactctatccgaggaagatggaccagtcttctttcctttagctttccctttcccggccattttcgccctttttgccatagctccggtgagacaccgaaagggagagaagagcgagagagagttttttttgttttcctcatatcatatatattatatgtaataacatttaataatcataatgtcaataactcaagaagcaaatattctcagagggtgcattaattaatgttatcaaacattcaaattgtgatatagagatttcctttctcacagcatatatattaattatgtatttgcaacaactcttatatatataggtcatattaaacaaatagaccaactatcattaaaagtacatatactaataatatataattagaa

SEQ ID NO: 217264 - DNA, 609 bp, Cannabis indica
attaatggcgattgacagccatctatcagcctcctctcagttgggattggaatcgtcaactttgctgacgatttgggagcaggcgtgccactccattaatgcttcccttacaggtttgatcccctctctgaacaaatctcataatgatccctatttcttcttaatcatggctgtctattccagttctattaggggttatagtcttaattgctatttctacctacctggtcagtggatggatttggataatcccccgcctgatccggtattaaatgtctgtcttttattcttcctgtatcgctcgagtacatctccagatatgggagatctattagttaggtcattcattgttatatgttttgcaaagcgtcattaaggcaaattccatttcgagaaaaggtgcctgcaagatagttaccaatggtcggaatactacgatcttgggggatccctggattccgcatcgtaaaggtttttgcccaaaactaattgggaatctcaaccccacatcaatagtgtggctgacttactattagacaatggtcagtgggatgtgccaaactgcgaggctgttttgatcagaaacggtctctgacattcgttaaagga

SEQ ID NO: 217265 - DNA, 511 bp, Cannabis indica
ttaataataaccagactaaaataatagcctgtaattaatcgagatatctcttccgtgaagacacgactaggattagaattaaaaaacgagccaaataattagatgaaaaaattgcaacaactaactttaaaaacacatatttactgcttagaagatacaacagtagaaactgttgcagcgagtttattattcaatctcgtaactcgggcactcatttattgtgcatggtacgtaactatacacattaataatcctttcagtcatagagaacttgttattcccaaccaatttcagcgattgaggcaagtcatcaaagtacaaagatgagccatgacaaactaagcaaaataaaacaaaaccatgtcacataaaaagtagataaggctaaaatacttaaaaatcatgtcatacagataagatttaaaatacttaaaattatgtcacattgacaagactaacaaaaatcaaatcgaaataataaaatataatcccgactaaattgtacctatac

SEQ ID NO: 217266 - DNA, 898 bp, Cannabis indica
caaaaaagaaaggaggagttatggaagtggtggagtgtaagaagagagaaaaccatgacataagcatagggataggtatatttgtaattatgaaacttttgaaaatgtaaaattgaaaaataaaacttgtataaaagtttaaataacccagcattgacaaaaagtaaaaaaaggacaaaaaaggacaccaagtgtaaaaatctcacccaaaacccctgtcgttaaagatacagatccagaatctctaaagtcgaacacacagactcagaatcctatatgcgaatccttgtcttcatcttctttcacaatatctctcattttttgcatattttttttctagttttttttttttttgcgatattttacgatatttagtaatgtatttacaatgacgaaccaaatctgagggttagaaataaattttagcgataactagcgatatttggcaatatttttaaaatgtttagcgatgtatttagcgacatttagcgatgtatttagcaatattgtgaactagagatctttagcgatattttgtgacattgtcaaaaactaaaagaaaaaaataacatagaaaacgagcgatttgagaactccaacgatgggtagagatttcaggggttttaaggtagttgagctcatagattttggggctttagggtggagactagggctgagcaaaaaaatccaaaaaatcgaccaaaccgagtacaccaaccgaccgaacaccgaaaaaattgctttcgattaaaattacctttgcacggtcagttttagtgtgaatggcaaactaactgattaaaccgagaaccgaccgaacatatatattgtacactatacatattatatagttttttttgttacatatttaatagacaattttattaaactagtttta

SEQ ID NO: 217267 - DNA, 633 bp, Cannabis indica
ccattaatactatatgagtgtggtacccaataattgattagtaatttttttttagtttttttttttaaaattttactttttatgaataatttttgtacgtatttttgttttgtactattattgctatgtaacacgccattaattgcagttttaaattatttattaaattaaaatttatagaaattgatattgaaatgcactaataatcgtatgctattttaatattttttttattaataatatgtacaaatctttattaacttcgattagaatttattttttatacattttatctgctaatttaattatatattttatctgtttttatttaaatataattaataaaaataaaaaataatgattaaacaattaaattgtacggaaaataccttctcgaacacctagtatagataatatatgatttctgttgcttgattgttcatgcaattattggataaccaagtaagtcaatgaaaatcaatatagtgagtttttaaacaagtttaaattgacagttgaactaaaactataatacaaggcacaaaacaaatggaggttgattttgatcatcacattcgattggaggctatatggggcatatatataatgtaatatttttgtgtgtatgtggat

SEQ ID NO: 217268 - DNA, 563 bp, Cannabis indica
acagaaataaccatggtctgattaatcaatttggtacagctaaatccattatctgaggggggatagaaatatctcatagccacatctgaacacgcattgagtgcttatcatcaagatgactggattcaccccaagaaatcacctattaggtgagaagaaagaattttaatgtgtgtgcaagatatggagtttaataaatagtgggaagtccctttcgtttagagattagtatagactttatttcataagataatccaaacatgtatggaacaagttactacttaaggaggaaatgcacaaagttaatgcttgttggattttttccattattacttgctatttgttgggtaagactaattaacaatccaacaaaggtctgtgacatcaagttaatgggaggcatctgaatgttgttactacgagactaataaagccccaacgcactagatgcgactttaacaagagtatccaaataaggacattaaaatatcaaggaaaaataaaatacttgttctatactcccttgatacgatactagcatttaaccttccacgcccataatt

SEQ ID NO: 217269 - DNA, 506 bp, Cannabis indica
aaaatttaataacctgaaccaattaaggattgccaagtagtaatttaattgacacttaacagttatgtatctataaaaattttaaaattataacttaaacttaataaataagttgactttaacacacacttattccatttacaaagattattcacataccaagacaaccattcacaaaacatccattcgcacaagtcctcattcatttgcacaagtcataaatgagacaaatagacaatcataatagttctaaaaaaactttattcgataattctctgtgtgctaccaccatttcagaccaatttctttattgtttaccgaaaactgcagctgctgccgtctcctccaccgagagctggagcccaataatctgctccattgtcactcccagtgtgcatgaaacgggcaccaaacacagccccttactctttagctctttgtcactctctttctttttcatgtaattttcattcaatagctgtaaatttaatagcaatagtgttatg

SEQ ID NO: 217270 - DNA, 543 bp, Cannabis indica
gagtgagtaatataatattattaaaaattataggaaaattttagctctttctgaaatgatcattgcaatcaagaataattcaataccttttagtgatagaatattcattggtcatctcgtcattttcattacatattgagatataacacaatttagaggagagttgcaagaaaaagaacattagtgatggttaatatacaatcagataaaagaaaaaaaaaaaaaaaaaaaaaaaaaagaagccttttgaaatcccaatcagctcgaataaagaaggccttgtctctcaaggttttccatttctaccataaaaagatcaaaaccagctcaaatcggaataacagcttataccataagcgaaccatgaatccattattctctaacaaaaattttgccctcaatttttctataaacttactcattcatctccaaaagcacaatttatgctatttgaaattgtgtgggtgtggaaataatttaagtacaatactcataaagaaatgtatatttaaattaaatgttatttaaagataaatttaatta

SEQ ID NO: 217271 - DNA, 587 bp, Cannabis indica
tggtaacaccataatgtactccccagacatcgtgcactttaccaatgcactctttactgctaccgtacaagtgttggtagtgaatgaatcacaacaagcatgcatatacatttaacacatacatacatttacatatatatatatatcacatattatacgttgttcttacctcttttccaaattcaagtgagttggctgacctgaacgaaaagtctcgtgctggatggatgccctaatcacatattaaaactaggtaaatcacacgtcaaaaccctaatctgggaaacccaaacctacaacttaaggttctgtaattactaataggaactacaatatcttaggaaacagggaatgacctaaataaggcattgaaatagacacgaatcgaggaaatgagttgttcaggaaatctgccaaaatcgattaaccggttttacaggtcctggcaaatcggtcaacctgtttacaccaggtttccccaaacaattcataacctgctcaaaacatgtccaaaagctaccaaaccttccagaacacctataaagagcttatactatatatttcaagcaatagaaactaataaaaca

SEQ ID NO: 217272 - DNA, 729 bp, Cannabis indica
aatgggacaggatatatatgggggagtctatatattatatatataataataatgaaatggtaatcattgaggccccatctttacagcaattgataccaaaaatatatataattggtcaatatttttatttttattttttgaatagaaaaataatatattacctaagaagaaaaaaaaagtaaaagctgatttcaagcaagtaatgtttaactgtataaggctaagctagcttaattaatgaattaacctgtaattggtaatggagttgttttaaggttagcctttcgaaaaagtaataataatctgatatcagatcaaatcaaactgtataataaataaataaattttcaaatatttatggccaaaattgtacaagtagtgattattaggtcacctaagtaggacgccctagtttgttgaatcttatgggccacttatagtacgacacagagatgattatataacaagtgttcttcaccatacgatgtacccaaaaatattaatattaataagagaaaaatgcctgtttattacactaataattattgttctttttttttcgaacaaagcctaattattgtattgtatcactcctatatttttgtttttttaaaaaaaaaaatatatataaatatatgattaaataactattattaagttggttatacttaattaaaattagtgttgtttattatcgaagtttcactatacaaagactcagttagtgag

SEQ ID NO: 217273 - DNA, 656 bp, Cannabis indica
ctgctatcaataatcatcaacagtgttcgtccaatctatcttagtctccactcactatcggattcattacttagacattttttttaacaaattacttagacatacattgaatgaaacaaaaaaaaaactgaagaaaaagattagttctggcggttaacacttgtgaggaaattgagttagaatagttgctcagttgttagtttttgttaactaagatcacttttatagccaaatgctgaagtctcaggttaaaagaataattctaggtgcaatacctactaatcatttgaactatgttctattaaatcagtaatctttattgagaactttagaaataagtaacatatttgtttaaagaaaaaaaaatagttatagagaattaaatcacatgatattgaaaaagaaattaaaattaaaaaaaaaaaacaaaaaggcaatagtgtgaattcagaaagagaagatcagcttattttatatagagagagataatgaaaagtaaaaaaaaaaagactctagacggaattttctagtagacaacttttttattttcaaatgctaattatgaaatgaaaaggcagtacagtaacatttttggtctgtacgtatatgattgttttaggactacattagtggtacaagccgcactactgtacgaa

SEQ ID NO: 217274 - DNA, 501 bp, Cannabis indica
atatactttttacagttttaaatagttcacattgagatctagtagatcactaattatagtttttttttgagagagagagagagagagagagagaaatgtataaatgagggtatattgaaacatacttaaacaaataaaaatattattgatacttgaacaagtcatttttaacaattagatcaaaaataaggtatcaagtgcaaaattctcgtttttattatttacttagtgtatagttttttaatttagtcctttatacgctaattttaatatttatctcgttttatatgttgcaatttagtacttttttttataccaatttgataattatgccctttgaaaattttgttcttaattaatattcggcccccctaaataaaattgatgggttgacaatatgatgcatttagatgatattgaacactattagtatcttttttagtaataatatatactttgttataatatatagctatagcatatgcatatatgtataaatat

SEQ ID NO: 217275 - DNA, 1258 bp, Cannabis indica
ttaatgaattattataaaaaatatgtctatcatatataaaactattatttttttatttagaagtttttttttttccaaaataaaagaaaaatagagaaatattctttatatattatgtaatgcatgtttgttagttatattagaattattattacctaattattaatttaaataataataatcaaattaaatctaatacaattcaattattatttttaaatatataaaatttatttagaaaaaactatatctaattaattttattaaataataaaataaataaagaagtttagatattttaaataataaaactaattataaatttgttataaaatatgattaattaattaaattaaagtttaatttaaatttaaattaagatttatatataaaaaaataattatataattttattaatacttttaaattaaatttaaatatataaaattattttttcaaaaaaaataataattaattaatttaacggtattagttttaatctttaactttaatagaaaaataacaaattaattattaattactaatttccttcacgaagaaattgatattttcttgtctaacttcccatttcctcttaaaaaaaaatcgtatattattatgagaaaatttatcacaaaaaagataatttactcttaattttgtcaaaacaaaaaaaaataatttattccttttaattttgtcaaaacatttgacaatgttaacatattgtacgtatatatatatatgatgtgattttcttttttttttttcttttttttttttgtaaaagggaaaaactttattaagcaacactaggcttatctgctagtaaattagcagcagcacaaatgggtaaacaatcagtccaaatagcagacttttgagtcaaacgactccacttagctaaactattagccactttattacaatctctaggaacaaataaaaaatcaagggactgaaaatagtctctaaaatgaataatattctgcacaatttgactccactccgatttgttggacgacttcagctggatattgtggatgatagttgcattatcagaggcaacttgagcttgaagaatggaccggctgagagctaaacgaaggcctaacaggatggctgacgcttcagccaacaaaatcgaactgcagcctttcacaaattccgtttccgccaccagtaacgaaccttccgagtctctaattactgcactatactataaccagcctgtccaataatcaaagatgcatcagta

SEQ ID NO: 217276 - DNA, 559 bp, Cannabis indica
gattttaaagtagggacgttataaaatatagcgcatcatatagtactactacaatgtgctattttataagaatttaaatttaattatttataagaataatttataacttattacacaaatataaaaagtagtattatatataatgatgtgtttaattggaatgggtgagaagatggaaaaaaaaaaaaaaaaaaaaaagtaattaacattgattttttaatattaatttgtgaaatttctgaggaaaaggtttttaattgtttttttttttaaaaaaaaaaaattgaaagccacatattttcaaaatactctcaaaatgttagctcacaaaatgtgtttttttcttcatcgtattcattatagtggcataatgtttacttaaaatagaattgcatgtaatcatttgtgtgtaatgactctcatattcttatttatcccctaatggccttatttattgtttaattttgtttattatatttactctttaaataaaaataaattattccttttaaaatttaatctagttcatgttataagagtattatttttaaaaataaat

SEQ ID NO: 217277 - DNA, 873 bp, Cannabis indica
tgtcgtcgctgttccacttttgggcttacggttgaggacgagtgcggacttcaagaaagtcatctctgcgaggacaaataaaagataaatataaataaatttcaaggcactagtttataacgtgcgatatgttacctgatgttggtcgagaggttttcttggagaggcgtttgtctatccgctcttgttgtttctcagatggttccttgtacactggctctctttgaagacttgcgttctctggaatcagcttgtgttctcgcagcttggcagtcgtacacaataatcgccagtcgcgatcttgtacaggaaggctcccgagaacttcagctgtctctctgcgagtcgcgtcgagtgtaggtcgagctggtctatctgcgaaaataaaaaagagcgagttagcatgaaatctcaaaataactcaaaaaataactaagtcaggaacatgcgacatactaggtcgacggttaaagtcagtcctaatcccaggaactttgaatatataaaaccacttcgatttccaatctcccatattggaaaccatgccttctaccccattaatctcagaggtggcccacttgctgaagcaatagaaaccgttgtggaggcctacactctttatatcgtagaagtaactgaactcttctactgtgggtgccctatgtacatactccatatacatcgcatagaaggctagggctgtgcgataactgttgggagttaattgaaaaggagacacgtcgtaacgcttgagaatggccgcaatgaagggatgaaaagggatcgataccccacagcaaagaatggctattaagactaccacatcctctgttggaatgatcgcgggatcggtaaaagaaaggtgcgctctct

SEQ ID NO: 217278 - DNA, 845 bp, Cannabis indica
ctagcttaattatttaactataattgatatataagttcagttaatctgaattatatttataaaaaagaaaggtgtcaaaagtcacattcttcgactttgaagagttccatattaattattttaaacttctactttgtgtgttattgacatgcattaatgacatctcataatttggatagtagatatttatattatttattaaattaaaattaattatttagaaattttgcctcaaattataatttagcgctacgtgtaatttaatataaaaataaaacatatattttagaaaaattattaaaactaaaaatccactagcgattacataaaaagaggtaaaattaaaataaatttttttacttattttttccaaattaattacagcctatgacatgataataatctacactactacatcctcattctgttttgtgataaaacttgataaaatgactattttacaacactgaaaatattaatagtttaaatagtgcaaaggtcataaatcctaaatagtttaaatgtacaagatctaacatgaaaatataccagcaataatatagatatatataattttgaagtaaaaggataattttcattaaagagaaaagtgtgtcattacaatagcatgtaattcaggcaataaatcagaagcttgaaaaacacggcccaaagaggaacaagagctacgcgtcaaccagtgggcaacttttgtttgcatatcgttcaacaaaatataaagaaatattgttaagagtatgcacaaggctcctacagtcatgaaccaacaaactaaattttgaaagcatatgcaaattacactaaatagcttggacacaaactaa

SEQ ID NO: 217279 - DNA, 689 bp, Cannabis indica
agagcccaaggaaagggtccaatttttatttaatgtttttttttagttttctaatagggttcttttaattatatacctaatttgaaaaataattatagaaataacaaaggaaattataattatgaaatgacgtgaattatataagaagcttccaaaataatagatagagatttactattcttaagcttcacccacattcttagtcatttttttttttcagtgacacttttttttttttacctttttttgagtacattcttttttctttttgttttaatcatcaaaaacttaaatttttttttctaaagtccatttttatcatgtttttgaaaaagaattatagctacatcattaattgtttggatttaaaaaaagtactatctcaacctatattttaatataattatttcaatatgtggaaagtatatattaaagagtgcagcatcaacatttatcatgatgttattcatgtcaagtttagtccaacactcagccccatctccttcaaatttaaacgaataaagaagataaggaaatgttatcttgagccttacgccaatgatcaagagttatttgtgctgatgcaatgacttcatttcttgaggatatctttttcttccatactacttggttttgggccttccatattgcccacatagcatagctaactgtgaagcgatctcctcatc

SEQ ID NO: 217280 - DNA, 588 bp, Cannabis indica
gtcaacctaggcactaggtactcatttcaaagcttttgggatgttgttttaatacttccaaggttctagaacttgaggacgtggtctcccaccctatttttaaccattctatattcaatggttgaactatatttttcatttgagtgattgaagccagcgcaccaggtcaacctgggcactgggcccagcaccaggtcaacttgggcactgggcccagcaccaggtcaacctggggtgctaggccttatttttagggtctcgagattttggttttctccccaagtttacttgaatcttcattatttcaaatgagaaaaaattcctaaaacaaatttttgagaacttgatttgaaatagccgaggttgacaatatgtcaacctgggtgctgggcctagttccatgtgttaacctgggcgctaggcccagtgccgggtgttaacctgggcattgggctccccttttggccctttagaagttgtgtttggtccctaaaaatagttgaatcttaatctttgttgaaaatggagaagattctcaaaagagtccttagaaaacatcatcgagatcggcctaggttgacaaaatgt

SEQ ID NO: 217281 - DNA, 1189 bp, Cannabis indica
attacaaataatataacagcacatcattacataacttacatcatctttctgtgagatttattatgagaaataataaaggattacatagaatgagggacataaatgtaaaataaaattctgaaattcccactataccatgtgataaatatgtagtaactgaaggagtacacaacacaaccaaccagccaacaaaagttctgatgggaataagaataacttttcatgatgtcaaaattattgtaactgagaataataacattcctttttaccatatccactaactaggtccttgtattactgtatgtgggaaaagaagattcctatgttgttggtacagtctactccacttttttgtaccatattccttgactcatcgattcaaagaggtcattagattgtattgatacaaatgctgcagagaagccactaaaagcagtacttaaaaacttaaaagcagtaattaaagtactttaggggaaacaaaatgattagtgttagtttaaactaggcaagaaaagccctaataagtaataagtacagcttttgtatgcctttttttagtgattcaatttcaatttggccaccaaagcatttatattttgttctagaagataatgtttttcatctatgttcaaccaacaaagtaaaccaaacttttctcttggaaagaagagaacaaaagcaagaaaatataaatgtatattatgttgagaagaaataatctttcacattggctaaaacaggtcaattaacaaaaaagaaaagtatatagacaaaaaagaaaaaaccaatgtcacaaaccattgttctgtttaggctcagcaaatctcctagaagacatttgattgaacaaatttctcaaactattcttactttccttagttctactcttcttaacactactattgttattattattattatctatctcagaaaatgaggaatcaagaaccaaccctgtctctaaccttttggagacagtaacaatctcataagaatcccaaagagactgaccaaaatcccaagatggtgatgatgaagtttcattataataataattaatattattaggtgctgctgatgatgacatattattactaccattattcttgttcctcttcttcatggcttcaagcttgacctcgaagccactgcctctaaaactgtaggtcttcttgcatcaaactca

SEQ ID NO: 217282 - DNA, 652 bp, Cannabis indica
gaagaaattgaagccatgggacatagtgtagtttcttcttctcttattcttgtcccaatgttacttcttttctcgttgtttctatcaccaaccaaagccattcaaaaggtaaacaaagcataaactattttctaataattcattttcacatttcctttcctcttatctatatactcaaatgtctttaattgtctttgatgttcatgtagtcttacattgtgtacatgggagcacattcgcatggcccaaaccctacctcggttgatctagaaaccgccacatcttctcattacaccttgctcgaaacttacaaggggaggtacataattttgatacaaaaatttaattcttcctatttttttttagtttcactacaaaaaaatggtatttcttgtctgttgtgttgtgttggttcactaaaccaatgtgtaatcgtctaatgtatctgtttgggtgtttgcgtcggttatcaatagatgaaattaaataaatgcatcgattgataattgacacaagcgatgtttgtgttcgggacccactgacgcaaacataaattatttttactcaaaaaaaaaacaaaatctccgttcaattgtaaattgatgcaaatgtttagcattagtcgcctgactcacaattaactactgcatta

SEQ ID NO: 217283 - DNA, 1182 bp, Cannabis indica
gtttgcattaatccataatgagcatatggaacatgtgcagggtccataagattctcaatcatcacctcatatctaaaaacatacacaaattaaattcacataatatataaataattttacataaaatgtaatatctaattattaaaatcttaatggcttacccataatgaaattctctatttaatattgtttgaaaaaatgatggatcatccatttccgcaatgtaaggtggtttttgctttgtaataatatttttatattttggatctgtatttggccaaaaccatacaataccattttggacagtgcttgggtaaacagaaacacatgcttttttagaagtttgaacctgagttatgataaataatttaaaagttagtatttaaatatacaaaatactaaaaaatatctaaaactatctaaaattaattaccatatgtaatttaaaattgaatatacatatataactaatatcattaataatacgtcgacatataatttacacacaaatatgataataacacacttataagtggcaagtaatacaattaaaacaacacaagaacaataaaagacaaaaaattaaaattaaaacccctatcaaaaattgctgatcattctgaagaataggccggtcctataggcatagatccaatttttttaaatataccatttatttttataaataagttcatgagttaaaaaaaataccattttatatataaaatttaataaaaacaccatattttgtataaacctccaaaaatttcagtcccaacgtgctaagaagtaacctcatgttttgtcactaaccaaaagctcaaattaaaatcacatataggtagtaaaaactttctaagtattagattataatttgtcaattacaactaactttaactgaaagaatgtatgtatatatatatataaaaactatgtatagtaccggagggccatctggtggagcttgggggatgaagttgcaatttccagagccattaaagcaccaaccatggtagacacactgcaatctcccccattgatcaatccttccttctgataaaggagccaatctatgaggacaactatcatcaaacaccttccattcactctcattcttgtcccaccaaaccaccacatcaagccccatcaccttcttcccatgtggccttctcttgtccagat

SEQ ID NO: 217284 - DNA, 643 bp, Cannabis indica
aattttcataaaattacaaatcatttttatagaatgtcaaaaagcataattaaaaataagtattgtttgcaaaaagatatatttttcaacatcctaataatagttacaaaatttctgaaaaaacaattgtggaaaatctcttgaagctgcattatataccgttatagaaaataaatagagttgcaacttgaaaataataaaaatgaatacctataaataaaaattaaaatttaagtttttttttagggaattactttatatattattttttatacagtttgggttgctccagtaatttctattagaattgctatttagattttgattgcgattttgattgcttcgttagttgctacgtagatttttgtgtggatttctgtaaaattatataaaaaaattattttgaagtgtaaaaataaaaaaaaaaaatcttttttttcttttaggtcaacaaataatattagcattttcggaccagtttggaaccaagatcccggaaaagatacattgtatttctgcatgggagaacctttcaaccctaaagcagccgtagccattgtgccatgcaacatgttcgaaaatataaccaaaatatcagacaacttactgcatgcggcactaataatgcttttccatcatccaa

SEQ ID NO: 217285 - DNA, 1131 bp, Cannabis indica
gttgacatttgcataatcatcctctattttaagcataattgcacatgtgatctctattttgctaatttctaattttaagggttattttcacttttttaataatttttaaggtataagattgtaaaaatataactttttttttaaaaaaaatatatattatgtcatatttttgcatatatagtaaaaaaattcataaaatctgtaattttttctaattttaatttaataaaatggtatttattgatattgcaaatatttatatattataagtaggtgaaggtagacatagatgcaaactaaattaaaatcccaacactcatgcattttctcaaacttaatcatttcaacaaattttacccatggtgccattattattattattattattattattattattattattattattataagttttttaaatatataaataaaatttaatgaaggtggctttatatggttttgtaagcttataattcatgttaattaataatcctatgaaataatggactcttctcacgtgatagccttaaattgtagagaagactttgttattattattatttgaatgaagaaaaaaaaactttaactaaatgataatagtgtcattgtctcttgagaaccattataattttgttagattttgtgtgtagtttcttcaaataaaaagatctctaatcgagtttttaggaaagctagtagtcaccgaaaaggatttctagaagactagcttgtccatctggaagaagtcttgtaaaaagctagttgtcctctgaaaaggagttccagaaaactagttgtttcctccagaaaagattctagataatttgttccagtaggctttgtgcctattcaggacgtttttccaaattgcgcttcatcagtttgggacgtctatcttggaagcgcgatacatgtccagagagagctcgatgccaagagctgacttggagatctcatagtaaggaaccagttaagtgggttaagtcttatcagaattaactacttagttatttgaagatattgtctttggaattcatgtaatcgatctataaatacaaccattctattaatttgagacaatgcgaaatatcagaagtagagtacgcaagttctttgagagagaga

SEQ ID NO: 217286 - DNA, 1017 bp, Cannabis indica
gctaggaaagtcacgacaaagcaagttccagaccttttcggtagatttgtctaatgcacagactggttcatggttcgaatccccttcaggccgtctgaaactatactgatgctgcagttgacacaatgaatcagaaatataggttttggtgtaatcctaagaaattgtgcgagaaatatagttgctgccatgtcgattccgtttcaaggatgctttaaacttgaagttatagaagctttgacacttatgaatagtttgtaatggctccaagagcttcaactacatgttcactatattgagatagattctcttttgatagtcaaaggattgcattctacccaacatcttgtttctgattttcattgtttattaaataatatgtctcttttagtgtgtaatttttttagagctcagatctctcatgtttatagatttgctaattatgtcgttcattggctggaaaaatttgctctttcggtatatactaaatgtttatggttggaagaaatgcctctgcctctatgtctatgtattataactttcttatttaatataatagcataattatctacaaaaaaaaaaagtataaaagaaaaaattaagtaagaaaatataaatgtaaaaattttagggacttttttattttcacttcaaaactagttttttttttctttggtacgtttacgggattctacatataaatgcctattgcaattaacggcaacctaaattatattgcaactcacatagaaaccaccggagaaactactttaaaaacttataccataaaatttaaaaaaaaaaaagttaaaaaaatataatataaggtagtttctcaaaattttgataaatataaaattttaaaaaaaaaattaatatccgtgtaaatttctgaaaaaaaaatccaaattttgatttgtttgcatctgaatttgggcatacatagaatatcaatattattatggacagttattttagggagagaaatttgagcagtgttgatgttgatagattaat

SEQ ID NO: 217287 - DNA, 683 bp, Cannabis indica
atttgcaatgaaactttataaataaaatacaagtattttatatcttaccctttttgacatgcaaaggtcacaattatattatctcctgctccacgcaataggtacaagaaaaaggggttacatttgttctctattacttatataattaattattaccaattaattgtagattattattattattaatataataaaacaaaattttaagcatgcatgccataaaaattaagttaaattaattattaataaccagagaactttctagttacacgaaggaaaagagaataaaataaatagtacttaagtttactacttaatcattaattaagataatcttatatataaaatactatgagtaaaacgaagacatctcttataaatatgtatattataatatgaattttatgtatataataactaaaaataatctgaagtatgacgctggtgatgatgaaatctgcactaatattttaatcaaataaccttaaactatataatatttatctgaatgcgttggatacgtatttattttatatataaatatagctaataatataaatatagggaataaatatatacaagagtaggaatcaagaatcatttcatactattcataaattaaaaaaataatattttttatacataaaagcatgtaaaagtattcctcgtattcttggaggata

SEQ ID NO: 217288 - DNA, 848 bp, Cannabis indica
ttttatggggaatacttgaaagaataagaaaaaatagcttaagattgtaaaatggatgtcccatcttgacttttgagggaacgggctcagttcacgtcatcaagtcaactcacacaagtgtaaagttgactttaggggcaaatgttaacccataaactttctctttgtgacggggacatcaatgttagacacgtagcaagaaagattgtatcgtagttggaagagacccgagttatagcagtcaatctaggaggggtccccaattcccaaaccctggacttagttgattttgggaactccaggatggaagttcagactttaatagcctatttccaactcaatatcttttagttgtctatcccatgaagacataaagtaatcaaatcaaggccttgagagttgaaattacatgaacctgcacccctaaaattcaacctaggctcctagggtttcacctagttcccaagatgacatccctaactagggtttcagtttccaagaccgtcttagttaaaatgggccagacctttcattaggacatgaactagacataccacatacatatttgaggcattagaattagatttgaagaaagttaatttttaagcacctagtacctgggcacccatcgcccaggttgacaacttttcaaatagtgctccaaatctctcaaagaagaaattcgaaggttgcgagaaaaaacctttattagagaaactttttactttgtttgggtatccaaccctattctagtgcccaaattgaatggaaagtggagaatgtgcgtcaatttcactgaccaaaataagtcttgccctaaagaagattttttgcttcttagaattgat

SEQ ID NO: 217289 - DNA, 535 bp, Cannabis indica
ttagaaataacggcataactacggatttaaactacggatggataattgttttgaaaatgataatattattattattattattatcttcttttttaaaattcattagaaaataaatgtatatatttttaaagaagaaggatttaaatttatttccttattggaatgttaatattatataattcctaccgtatgtacgccttttaaatgtttttttttctacttttacgctttcatttttatagtttgtcttttttatttttactttaaaattaattttttgaatttatttttactgaatcacactctttgttgccattttctcaccaaacttctccttgttcatcttagtcttccatcttcttactgtaatggttgttctcttcgtcaatcatcccagcactataattttgtttgtcttccctctctcttctatgtgttctttttttgtttttgtttctgttcttcaaaatcacaaatcataacccaaatcacaaaattacaatccaaatcctttaattgcatttatatagaaacc

SEQ ID NO: 217290 - DNA, 806 bp, Cannabis indica
acaaaataacttaaatcgcaatcatagcaactatcggagcaacttaaaaagtgatatatgaggtgattcctcttaaaaataatacactgtaaaaaaatattaaaaatgcacaaaaaaaatgataaatataaaaattttgtttttttttatttttagtagtatggtaacacttttttaatcagttttctattttttaattagaaaagtaaaaatgtttttcaaaaagatgttctacgaaactgttttcactttttaatttttgattgagaattaaaatattgaaaaattttgaaaaaaaaattactttcaaaattgttttacaatttttttcttaatcaatatttgaactccgacctcaacctgaatcatggggtccgaacttcggctttagccctagtcccagacacgaaccacgaccccagccccagtggcagaaccaagctccactttaaggaggggccaagtatagagatttttttttacaaacaaaaaaaaataattgggtatgtatagcacacctatatttttgttggttctctatctgtttcgactttcaagagtgtttttcaatctaatttttttaataattatgtacattgtagttatttaggcccacaagtaaatttttagagaaatttggatagtttacaatgttaaaaataaagtttaaatattttattgcaatcatgactattttgtcttatatatgtagtaaacaactatttgaactttatattcgacaatattaaaaatttacaagcgatcccaaatatctacaatgtccacaatcataaaaaaaaataaat

SEQ ID NO: 217291 - DNA, 910 bp, Cannabis indica
acagacgccataggtgcacacgtatcaataaagtgtgcacctattgcgtcggttattttctaataaccgatggcataagtgtaataaatatactaaaaagttttcaacccccaactaactataatgggtataattaatttctagagctacagtttttaccaaaaaactagtctctaaatgtcaatttcgaacaaggcggttattatcacaccttttagcttcccttggattgaaaaaacaacctataaaggtccatattgtagtagtggaagttgcccaacgtcaacttgggtgccaaatacttggaaaatcttgccaaaattatattttttaaattctaagtgatatgattgcatcatttaattaatttcttgattctagtgaggtcgctcaccaattcttagaggttttgcttgttcgggaaatcaggtgatttgcggccacccaatttacaaatagtttgtcgatattccaccttgccaaaaatgtgaaatatcaaagtatgaatttgacttgccacaagttttacatcttattcttgatggaaaatagcttgatgctcgagacaaaactaaaattgaacatgaagaaccatgcacaccaagttgagtgtcaacctgagcgtaggagcaactttagggccttacagggtgtcattttggtacttcgatcatattttggtgtgaacatgagggctcctcccctgtttgggaccaaaatacgaagattgtctagataaaattcacatttaagtaacgaaaccacacgtgccatgttgaatgtaaatctgagtgttggagctagtgttcatgtaaacctaggcacttgctaggtcttctagctaccgaatcgtctcttttgttttccaacaacacttgtaccttcgttgttataaaaatgaagaaaattc

SEQ ID NO: 217292 - DNA, 799 bp, Cannabis indica
agtttggcacgatcaactccctagacttaaacaattagggttgaattctccaacctccataatcgttttgctctgtactcctttcatccactttactctgttaagtgccaaagtagactcatgtacacaggtgtacatgcatgtggcgaaatttcatataaataattaaaaaataaaaaaaatattgaaatttgaaataataattttaaaaaattaaaaaatatatattgaaatctgaaataataaatttaaaaaaataaaaataaaaaaataaaaaaatattgaaatctaaaataataattttaaaaaaataattaatttttttctttcactttctttatttcctttttcttttattcttcttctttcttattccttttcttttttgtgcatttccctgaaaatcaatcaaaatccactctaatccgaaaacgccaaaattgatcaatacaacaagataatcctttttttccttaacatcgttcttcttatccttcttcttcttcttctcaccaccaccacaccttatttaagctttggaataatactctaaatggctccaatcgggaaacctaatctttaaaattgagggagtaggcttctgagtccaaacgaaactccagaatctgttcgctatggttgtctctccaaaaccctagctgagactctgacagcgagatcgcataaacgaagctcaccatcccaacgattggagagagcaaactgaccgtcagatgagagaatgacgtcctgaatgaagtgggagttgcctgtcagcctatagtcggggaaatccgta

SEQ ID NO: 217293 - DNA, 903 bp, Cannabis indica
ataggtaggattggacacgggtggatttattaggtcaaaccagctactcagaccgtccgatctatgactaagactccttattatttatttagagagagagagaaagagttggtgccagctcagcatctcaatgttggactttttttttttcaatttctttttaatcattattattaataggactaaaaatttataggtatttccacaaaatactcctaaaatgtaagtatggatgtatttttatctgcattgtaattaatatatatatgttatggttatttaaaatattttataaaattttgagaaatttttaataatttataatttaaaaaataatatttaaataatttattttgtacataaaataaaaagtcatgcatgtaagaaacagtttaaattgtatttttagtgtgttaaatttttttgaagctctaaaaattttataaaatgttttaaataattataatgtaaataatcataaaaaaattaaactaaaaaaattacctcgtgtgacgaaataaataagaatacatcgatgcattataaaattttctaaatccatgctattattaattaaattcattttgagtctttctacattgtatctctctcttgccccactggtactattaattttttcctattttgactttttataataattcattaaaattatttaagctatcttcattacttgataaattcaaaatttagattaaaaacttaaaaatcattaatttgctaaaaatatttgacgggtcaccaaaacaaaactaaataaatatgagtgtatataaatgcgtttttttttaaaaaaaaaatataagaaaatttaacgatgcacttttttaaaagaatatatcgatgcacctttatctaatttgatatttaagagaacttttt

SEQ ID NO: 217294 - DNA, 524 bp, Cannabis indica
cagaccgggacccggaccccggacagggaacctggacccagacctgggacccggactcggacccagagccaaactcgggacgtggacccggacccggtacccggtacacggtacccggacccagggcgtggacccggacccagacccgagacgtggacctggacccggtacctcggacccgaacccgtagttggtgttgggatcgagtgtattaaaaatatattataactttataaaatcaattcatacaagtcaataccaaatattgtattgtattaaataatactgatacaacacaatataatctaacacaatccaacacaatacaatacaatacattacaatacgacgtaccaaacgagcccactgatggcatagatggcataaataatcccaagaagatatccaaacaaagtcagcaccaaacagatccagaattcaacatggcatcttagtggtaaggttgtaatccccaatactttttgagccgccgctcctcatgtaccgatcagcatcacacaacc

SEQ ID NO: 217295 - DNA, 596 bp, Cannabis indica
gtgaaatgcactggtaaaattacttttaccaatgagtaacaaactgtattaataaaagtgacatttcttgtagtggtattttctgccaatctctttcttttcttctctttgattttctttgattctgataattatgtctagaaacttcaacaggcagggcttcccaattttttgtatatatttatatgtatatattcatatattttaaataggtaattatacttatagtttgtaataatttttctcataaattaattttctctataaattttttttttaaagttttctccattttacaatctcttatacataaatataataattttttcatctaaaatatatttttcaatttcaattgtacataatttctcaaaaatgtgtacatcatgtaagctttaactacaatgaatattgttatttaaagaaattggagttataaatgtgtgcatattagagtgtatgtggagcgagtttaatattgtcctaatagttttttttttttttaatattgttattaggtaccagcagtatttcttactacaaataagtgaccactagtaaattataatggttagtgatatttcataaaaattatt

SEQ ID NO: 217296 - DNA, 601 bp, Cannabis indica
tttttttagagaaatgctaaaggaaattagtagtgcctagcaccctcttatgtgtcaatagtactattggtccaattaagtatcgggtctcatataatttgatttaatagtttttaaggagtatcgctagccaatcgcaacacgacatgttaagaaggtgctaggcaccactggtacctaatagaaatactcttttttttttattatttgaaaattaattaattaattccacgagctctattatgtatgactgaatttatttaactttgtggagggtaattattattttgaataactgagttatataatccaattcccaagacaatagaaaataatagtaataaggttagcaaatgatcctctaattgatcatgtggtaattaattaattaattaattaattaattttttcatgaaattttacattatgactatatattattaatttttacattatttattggctattgcctttgaaatttgaatgaagaatgtcatttcccttcaaaaattaatatataaagacgtatatatattttagtccaacataattataaatcaaagttgtggaagctttaggggaattaaatatgtatatgatt

SEQ ID NO: 217297 - DNA, 794 bp, Cannabis indica
gtatatattacatgggatacatgtatactaatagtatatatacacagggacagatccctaagattgatgtggaggctattactatagccaacaactaataaaaatattagtacttttaaaaaattaaatgtaaattttttaatttataattataagtcaaaatagtaaaaaaaaacccccacaaaaattagataaatttagtaagagtgattataatgtagctataaatatttttttttatgataaataatttgtattacaaaatgaattttttgctttttttttggtctattactctttattaagtttccaaatagattttttatattctttggtggaatattgtatggcataaacatagtaaagtctatattttttatttctttagaatgagaatttttgggatattttgtatgaataaatagaaatttttattgtgatcttgattctcttgtgataatgacatataatattatcagcaagtacacaatgttttttttaagataaaataatgaagaaatcttgtgtaaattaaagactttatgacatatcccaatactatatgaaagatttaaataataaacatgattaattagtgtaaaaaatattaaatataaattaaaattatgtccaaaaggagaattgtaagtggaaacatataatgtggtcaagttgtggagaacaaacaaaaaaatagtgttctctaaggagaagagaaaaatagctaataatattatattaggcacttctagaaattttgatgctttctctttccaaatatttgtagatatatt

SEQ ID NO: 217298 - DNA, 709 bp, Cannabis indica
aataaaaaatgataattatgattaatgcatgtattcatttttttaagctataaattaatgtaaactagcacttcattcctttatatgtagtaaaaaataagagagagtaaaatcataccaaaagcaaaagttgtgggatatataaatatataatttatttatttattttgaaaacctgtccaattgaatattatagagcttaattaaatccaaattgtttcactaaattattctattcttcttcccaatccattggagagattttgtgagttggtgtaacatgttatatagtttatataattatatatatacatatatatatatacatatttgtgtgtgttcttgtctttaacataaatcgatatatattggtccaaagtgaggggcatgcaaaattacaagagcacgtgtagctgtattaattatgtatgtgaatatcgtcaatatatgtaagactccaaatgtgtatatatacaattgtttatataattatagggttaaatataattaatataattatgtatagttattcttcaaataaaagataaaagacagctaaatgaagaccggagttggccaccttcctttggattaaaaaaataaagtatgtattaagtttcatataagagcaaatctttaattaattttctctctctccctctattattgtaaattaattctactatattatatatatgtatttatttaa

SEQ ID NO: 217299 - DNA, 530 bp, Cannabis indica
aaactcaatcacttgaacattgcatgcatatttctgaacctaaccctatcgaaactaagcttagaaaacgtgatcacttttcttgctttcaatttggtaaacttagatggttttttaattaatgtaatgtgttgatattgaatgtgatacatggacagtttgtgtccatttgctgagttgataaaggtcaagattgaccttgtgaattgtgtgtgagttgactttgtgtagggaaatttttgacaattctcaaaagtggtatcagagcaaggttcttgctaaagaaagtcaacataagaagatcaagaaagccattcaaagttggaagaacttgattcacaacaagaagattatgcactttaggattttgtggacattcctttgaatgatccaattgaaaactctctaactcaaaactttgttaattcagatttcattgctgaaatgagtaatatcaagttagatattgatagatttgatggtcctggtgattacaggatatggagaagaaaaatcagatcacttttggc

SEQ ID NO: 217300 - DNA, 855 bp, Cannabis indica
ctctgcagcaaatgcaaaatatcccaagggtgtcaaaagttggttcctacatgtatgaaagaccattggactactgtcgtttggagcagattcaattgtcccaaacatagttttattttgtggttgtcaatgctgaagaaactcaagaccaaggacagaattaaaaagtttaaactagataggttgatgcttgctatttgttctgcagcaatgatgaggagaccattaaccacttgttctttgcttgtccgtttgctcaggagtgcttgaatttgaccaaaaattggctgcaatggaggatgaatgcttcttctttgtcccgtgctgtcatctggttaggtaaagcaaaagctaagaaaatttaaaaaatttgtcttggttgctgcacttgcagctctggtctacaccatttggtgtaatcgaaacgctaaactttgggagaaaaatgatactaatggcattgcagtgtttaaacaggttcaaaatgttaccaaaagtcggataacttgtatatgtccaaaaaaagtatctagtagtgacaaagcttggtttgattcattgtaaatattatagagtctaaggtcctctcttttatttgaggatgcttgtagatttgtacaaattgagtattggagtaatgaaacatcatcttattcatcaaaaaataaaaaaaatagaagtaataagttatattgacaatttattaataattattaaaaactaacaatatataaataatgattactgtaaaattttaaaaaattaattaatatgaaaaattaatttatgtatatcatctatatttatggatatataattttctttatatttttttaggttatatatatatatata

SEQ ID NO: 217301 - DNA, 582 bp, Cannabis indica
ggatgaacaaggattttctttttcttaggctcaaaatgttattgtatagggtcaaaagaaaaacaagatgtcaatatttaagctcaaaatgggtaaaattaaggaattaacaaataaggtaggcttgaaagactcaatcgatccaaaaaaaattgtctatatcatatctcaaaatcatatgtaatttatcaattttgtctcaaatgattatcaaacaagttctagagtggttgagactttaaatcaaaagtcaaacatgcatttatctttttaaatattagcaaatatgataactcaactgatgtcaaaagttttaaaaaaatcaaacttgagcagtaattaatcatgagttaagcacacaaatcatgaaaatctatcattttcttagaattataactatcacacaatcaagaattttatcattaacaaaattatttttcacaaaaccatgcataagacatcaaattaaaaatacacatcaaacacgagtaatcattgtcaatagaatttcattcaaaccatgctcactaaaattaaagaaaaaataactaatataaaactgaaaaaaaaaaaagataaaaa

SEQ ID NO: 217302 - DNA, 630 bp, Cannabis indica
tattttttcaatcttgttttggaaaaagagaaatataattcttagaagaagctttgcaattttgtagaagatttgttttgttaattattaaatttaattaagagatttatgattaattttgtttatgcataaagttcttatgaattaaagaaaagctagtttttttttattaattttggggatgtttgattttgaataggttagtaattttaatatttttctatcttgttttggaaaagagaaatataattcttagaaaaagattatttttgttaatgattaaatttaactaagagtttatgcaatgttaatttattcataaagttcttatgaattaaagaaaagctttttttatttttgggagttgattttggggtggaaaaaaaaataggaaactaattttaatatttttctatcatattttggaaaagagatatataattcttataagtttaatgattaaatttaaccatgggggtttttttgtgcatgattattcataaagttctgatgaattaaagaaaagttttattcttttttctttctttttttttttttccactgaattttgtgagatatcgatgaagatttggtttaatttttgatttttgaaattaaaaaatttaaata

SEQ ID NO: 217303 - DNA, 604 bp, Cannabis indica
taagaaggaatgagctgtttatttttgatagaaaaatattgtttttgttatagtaaagagaaaaatgcaatattacaatgattaacacaaaaatattcccaggccaattggaaatgtccaaggtatcgcttcgtcccaatcttgcctagacagaaccgaagtttccaagtaaggtggaggatacactaacacaaaccttattttaaaactaatctttctagaaagaacaatcttggtttgtgtcttttacaatattacacacttgtaccaaatactcagcgtttattgaaagaaattttagaacctactttttttttattgtattttatgatttttttagaggacttaaattctaagagttactaaggaaaagacaaataaaattttaataaagaaataaaataataactaaatgataaatataaaacaatcacactaaacaaaaattaaagtgaagaaaaaaaaaattaaagaaagtacactttttttctaagaatttttttttgttatattttttttctaagaatcatttctaataagaagatcggaataaactgcaatcttaaagcatactttgaattacttggtaattttttctcttcac

SEQ ID NO: 217304 - DNA, 652 bp, Cannabis indica
acacgttgaacatcatatactataccaatgcactcagtaccactactgtaatagtgttggtagtatatgaatcacataacagcatgcatacaatacacatacacatatacatatatgtgttcgatgctagtcttacctcgtttttaaattcaagtgtaccagtcgacttgaatagaaaatcatgcgctgaacggaggccctatatcacaatcacatatatggggtaaataatttgttgaaaccttctcagggacctaaactcaatactagaagttgttatatcgataaatgacacgacaatactctaaatatcgagaaaacacaaaaaccaaggctctagaaactgccaaaatcagtaagccaaaatttgaaaccggtaaaccattttctaaggtcttgcttggagaaacgtttaactggttatctgtagaaaatcctaaaaaacctcgaatctcactcaatttttttttcaaactcaaccaaactttccaaaatacttgaaatatcatccaagaatagttttcaagcaaaagcagcagcaaaaatacacaaaaaccgaaaaaataatgtcaatgttgaaccaagtttgaatttaaccactcaataatccaccaaacacccctcaaaccagctctaactaacttagaattaa

SEQ ID NO: 217305 - DNA, 767 bp, Cannabis indica
gagcttaacctctctcttcatccttcttgagctttccccgctttgaagagtgggacggctcatgaattggctccgttgcaatagatggcagatggttcgtagtactcaaagcactagagtgatccagtagcaaggggtttcatagctaagattcaagtgttttaatttacaatttccagccaaaatttaacctttgaggttgagtgctttcttccaccgccgaagctctttggattgatctcttgtcaaggacaacccaaaattcccattgattgtccaacaacggaaccatagacagattgtccaacaactagtagttgagtgctccttattttcagatcttgatggagtccgagcttcccaaactctatgcgttgttggggaactctgcaagggtcttaccaccttcttgggggaagacctatatttatagttttttcttctagtcttttttctctttaaaagcagatcatattatattactaaaattcatgccacgggaaatatttactaagacaatctttcgaaaaacattatgataaaatattgggtaaataccattttggatcctctgttttacaaaagttaccaattggaccctgtgttttgttaaatgacaaaatggaccctgtatttctaaaatagtacaaataggaccctaaattgatttttgtcaaataaattaattataatccgatctaaaagtgttatgacaaaactgtttacatttttttgtatctgttcgtattaagcattgtcttcaagtt

SEQ ID NO: 217306 - DNA, 1536 bp, Cannabis indica
cttaatttaaaattaaaaaatgaagaacttattaaataagggataaaagaaagggaatacttcccccactaatttgttacggaatgtcattaagagtaaaataatatttattttattttttaataataaatatataatgacaattttgtcttttaaaatatattttacaaaataaccaccatataatatagtttaactcaaaatgatattttagtcaacttcaacattccgattatattttctgataaagtaaataagataaattattattcaattttcaaacaatattagtaaacaacatattacaaatattgatttcgattattttttatttatattattatatttctctattaatttattttaattctgaatactatttaataaacgtatatttaaattaatatttagggtgtgaaagttaaattattatatttataatacttaataaataatacttatagttactatgcttgtaattatttcgaaaccctcacactcacacatgctttaactatttgtaaaataatttaactcccatatgtttgttatgcgcttaggggtggccaagcattttaggggacttgagcggaaagttaaaagttgtatcttgtaaataaattttgtatttatcatccaagacttcatgaatctttacattcatttgctataattattattttttctttttcttttttgcatgataatattaaatattttaaaaagaagtacaatcaaaaaaatttatatatagtacaaaaagaaaaaatcaaaccttctaaaataagaagccttgtgcaatggattgtctaatgcttaagtcgaccttcatgcactattacctttaagtgacacacccactaattttttatcgtgtattataacacgtaaataaaaggtcaaaaatacttttaatgggagtatacttataagagcttatacataataggattaaatatatataaattacaaacaaatatgagaggggcacctagccagattctcttttacttcactttggtgagtattagcaagcccaacggtcctccttctgataacaaggacaatttcgttgaaagaaacattcaacaccagtggtataatatgggctaaattttttggcacgatcacacatgaaaaaaaaaaatacgagcgtaaatacgacatgactcgatgttataaattagcttgacacaacataataaatgtgaatttatgcatatgacccgatgaacctaaaaatacaatgcatgtacaatagactaatacaaaaatgcgattcaattatttttataatttaataataataaattaaaatgataatgaaactcaaatatataatataaaatattatattctataattaaaattattaaaaaatataaaaaaatcaaattatctattaattattttgtaaagcataacttaaaataaatattcaaattctaatgatatattttttaaattattgtctataaatattgttttaaaattatataaatataattaaagttataacaaatatatatagtttag

SEQ ID NO: 217307 - DNA, 1188 bp, Cannabis indica
gatgaaagtcaaagtgtgtggtacatgaatttggtaaatgtttaggtaagtgacaaatcagtcgtattgttagcttcttaattaataactttatgaaagtctttttattttgtaaagtagtctttacaactcacattaaatcagtaatattgtcttttaaatttaaaagtgtaaagcctttttatggtggtcaatgataaaatatataatagatcccgatgaagaaaaaaccacactataataaattacacatataattagtgttccattggttgattaataatatatgaaattgtattattattttctcatgaaaaggcagtctgtggtcccaaacatgtaaatttcatacaataaatatttttatatcaatataaaatatgtcttctttctttggagagagaaattaataagagagaggcaaaggggggtcagtgtcaatagctgtaagaaggccaaaacttactaataaatactgtctggttaggacattaggaagaaaggcattttcattcatttacatataattgatttaagagagagagagaatagagaagagaggatactcatctccaaagttccttcataagatgttggtttgagagattgaagctgccagcatgatctggtaacatatcaatatatacataatatatataatatatattatttatagatttataaataattaaatcataacaatttttcattcaaaagttgaacgattgggcagatctgttttagatctttataaaattcgttcgagtaatgaaaataataaatggtggtatgtttccacaccttaattttttgagtaaaatatactataaggatttatacatatttacatatatttctcaatatagataatatacataataagaatatatatatatatatatatataatggtatatggctcgtagtcgttcatacccaggtcatcttgtagcttcaatcactcagaaaccaacagtatataacagaagcagttcgtctgccttttataaaagaattgtttcacctataatgatggtcacactttgcagatcgactacacaattaatgtcatgaggtaatagttgacgcttataaatgttaattaattatttatatctgatacttaatatcacatgctcatatatattaatatgtatacacacacataatgctcatatatatatatata

SEQ ID NO: 217308 - DNA, 620 bp, Cannabis indica
atacaaatactctgatatgaagttggactgatgggcttatatttattcagtaagctttgtattctcctaactcaattgggccttttacatttcataaaattacaaattttataggattttactttatcctaaccataagtttcaaacttactcattgtcgaaaaaaaaagaaagtttcaaacttaactgtacaagttatataaagttttagtgtgaaatttgttgttttcttgttgatcgaggcttacgtattataagtaaatgctaaatttaaatctgactcatttatcaatcgtgtcaaaaattaaaacttaaacctaacccatttaaaaacgaattcactcaatttaatccgacctgattaactcgtttatattaagaatcatctttaattttggctaacatttcagcttattaatatgtataataagtttaacatacttataatttttttataacacaaagtaatttatcatatttttgtcctatttcactaaatattataatttatatgtaataaatatattaaatttaaaagtgtatactcttacataggttatcatagtgtcataattagtcatgtcaatctgaaaataacgtaaatttaaacctatttatat

SEQ ID NO: 217309 - DNA, 719 bp, Cannabis indica
aacttgccagcatttgaggcaacgtgggaagactttagcaccattcaagagcagtttcctccttttcaccttgtggacaaggtgcgtcttcggccgggcagtattgataagcctcctctcacatatgtgtactcaaggaaaacaaagaaaaatgccagcagctgattcagctgggaaaaaaaggcagcagtaagtttgttagtaattggttatttgggttcggtatttgtgtagctaaggtgaagctcttgcggtgaggcttattgtgagaataaatagtgagtggaatctatttttgcgagtacttgtaatcctgtgggagagaaccaagctctcgaagtctgggctaaatcaataccagaaactattcacccttttccatcttatatctattgcttaacctggctatcatttgagtttaatctatcacaaaccaacttatcagctagctgaacagagtacaagaagttcatccaaaggcagattagctgaatacaaacctgagcttctaaaggttgttggctgatagtgagacaaaattttctccatttaaatccagcctggatagttccatgaagtagatcacaaaattagagctgtatatacttgagttgtttgagagagtaaataaaaaattgtgaagcagataaaatctcaaaaaaaaaaataataaatgaaaacaagtcaaccaagaaaaaagagaaaactatcaaaatcgt

SEQ ID NO: 217310 - DNA, 869 bp, Cannabis indica
aggtaaaaaagttgctttaaccgtgtgtaggtttatatgtaataaagtgtgtaatttgtatttttggtgtaaaaatttcaaaaaattattataatctttttaaaacagttttttctaaaagttgggttggagtagcttgtagcttctcctaattttttttttactaaaaaaactgtttttttgattgcttaccaaacacatttttatctaattcaaaaagtaacttttagtttttctaaaagctgtgataatttataatcctttgcttttacaagaaagtgtaagtagaaaagtttatttaaaataacttgaatcgaaattctattgttttatttttattttatttttcattttgttaaggaaaatagatggaggttaattacgttacacaaaaattagagaaatttcatccatctaaaaaaaattattgtatcttaagggcatgcaaatactctaagagaattatacaataaaatcttaatatacaaaaaaaaaaaaaaaaacctacaagcatgagaattgtgacttccattctaccaataaaaacacttacaaaataataaaaataaaaaaaaaataaatcaacatcaaatatttaataaaatatgaaaattttatatacatattatcatccacaattttctgatgtaaagaataagacctcaagaatcggagcttgtggccaatttgcgtgcacaaggcaccatattgttcggtggctaaagatgttctaatcaactccaaggctaaaagcaaaccgctggggagattggtacccaccaaacctcctcataccattactcaaaaaggtttaagtgacatctttggggtaagtaaccttatcccgtttttacttatcttcttcttct

SEQ ID NO: 217311 - DNA, 632 bp, Cannabis indica
tctatttttcatgttttccataactattttaaaagatagaataacaaactgatgtaagtgctcttaaacatgtacaaaataaactaatattgtgatttaattattagagatcgatattatttgcaatttctcgaaggtgactgctttagaatgaaacagttaatcattataataaagtgtaatttcttttgtaattatgacttaattaataaaatagtatataaaatactaaaaaattaatttaaatttaattaataaaataaaaagattattatatatatatatatgagaatacttttttagtgtaattaaaattcaaggtattaagttgaagatgaaaactaaaaataaataaaaacagtgaataaatagtgtaaaaaatagtattaagcataaataaatagtgtaaaaataatgtaaaacatgaaaatagattggagatggtgtaagtttttcctttttcatttaatctgaaatggcattatattaacaaaaaaagctaattacatttgccatgtgttcgtgtctaaccaaaacaaaaaaaaaaaaaaatactagtgcaaaaagacataacccaagtcccaggcggtggtgtagatctcaagagtactaatcactagacacgcagagcc

SEQ ID NO: 217312 - DNA, 639 bp, Cannabis indica
atgtatttaaaatatatctcatatgtatatcaacttttattatgcattaaactttaaaatttgatattttttttttaatttgttcataaaagtctttaaattttgcttaataataataataaaaaaaatcactactaaaattctggtatatagtttcgaaatcataatttttttatcaataattctgcacaatattaaatatatattattgtaggaattttacttggtgaaattccaagtttacctacaccactcaagaaaacttgtcaaaacgacagggacaaatctgtcccagaaaaattcaatttaaaattcaatcaacgaccaaagaaccctggtcgtttagcctacacgacaatggaaacttgtcgttcttcactcacacgacaaatcgtttaaaccaaacgatttgtcgttctggattgaacaaaagtaagttcaatcagagctaaccctagctcatttgcaccttcgaacattcgagaatttctcaaattctctctctctttctctctgccttttctctggttctcaaaccctagaaccagagatccttctcggatctattgatcgatcttacccagaaaccttcccaaaaacaaccacaaaacacacacacacaatatcaagcatagatca

SEQ ID NO: 217313 - DNA, 450 bp, Cannabis indica
gagttaattaatagatttttttcattttaatcaaatttcttgaaatgtttattttgataacactgaagtttttttatgtggttttgcagtttactctgcatagttcacgagtctatcttattcaagatatttctggatacaaaattatagttttgcaatcagtgatctttttctctcaaagattttccgtcaatttttctgtagaatttgccactatttataggaacataggttgacagttatttacatttaaatttaaattacgtaactgctttaataaaacgtgggctttgatcacgctctattaaacacgtgtagataacaatcgataaccgcaacatgaggattggtggggttacaacctaccaagccaagctagctggaactggacatgtttggtgagactcaaagagcaaattaaaactgctttgaatggcaagctgttggtgt

SEQ ID NO: 217314 - DNA, 732 bp, Cannabis indica
aaaatatgaattctaaagctcaagtatccatagttttctttctatccctcaatttggtgttcttaccatggttagctccacttgccataatggcatttgcccaccaccaccatttgtgggtcatcatagacaccacctatcacctcctaattctaggacaatatgttcattaaaccctctaaagtttggatgttgtggacacttgataagtaatttgggggacattattattgggactccagggagctccccttgttgcaaccttctcctaggtctagttgatctggaagctgcagtatgtctttgcactgcctttaaagctaatattttgggtatcatcaatcttgatgtttcagttgcagtggagaagtttcttagcacctgtggcaaggacatgccctctagtttcaaatgtttttaataatatatattttattaatataactattacataatctaatggatatgtttagatcggttaatggctaatcttgtgtcattaacaagaatcatgataatcattactactacaaatgttcctactacaactattcttatgtatcttatatgattttttcttatttttgtctttctttaatatttttactgttgatgttggtttggaaacctaatccttttttattgttgtggtgtttgtgttatatgtactatacacagtattgtattatctacaataataaacccaatcaatgctcataatctataagatca

SEQ ID NO: 217315 - DNA, 1202 bp, Cannabis indica
cacatcggctgccaacacctctgaattttatttttggaacgaaactcccaacctcgctatgagtatccttaatagtacttaatgtggtactaggattgttacagaaattcttcttcaccaaagtcaaaaataagggattaaattaatctagcttttcacaagcataggcaaaaatgaccttacacgcttatcatttccaataacttcaggtcaatacattaaacttttcatgtacttgtaatttacttccaatttcaagtcataatggactttgtcaacatcaagttcttcgcacaaaagatcaaccaaatgtgagtagcttacattcgtagcaatctcgaatgttaaattttcaactcagttgtaaactcaatctctaccctcaagctcccaaacaccattatacataatgaatgcaaaaacagttgaacctgtcatccacagacatttaaacagaattaaaaattagaacaaaaatctaacagagtagtgataaaaaaaaatacctgaggccataaatttatcaagcatcggacacaatcggacctatatcagaccaacatcggaccacatatgataaattccaacaaaaacctatcagacccacaaaataaattctaacacaaactatcgaataaaactgtcggaccaatcggacatgacatcggatatggggtataaaaacaagattctaaatgcatcggacatattatcggaatgaccatcgacaaactataaggcatcagacccatcagactcccctatcgggcctatttacacatcatccctaaccttggagctgatctaaccatcgaaccactatcgaacacttatcggacaccatcagtccagacgaaaaaaaaaccaaaaaataaaaaaacgtaaaaaacttgaccaacaactattttcacacaaaaaacaacataaaacagtaacaactaacagatcaactattaaaacaacattataatctaaatataacaaccaacaaaaaaattaaataaagaaaaattattacccattaaattcgtctataatgttccgatcaaaaaaataactaccactaaatcaccgagcttatagtatagtttgtattaaaaatttatgttatttagtaatgaaatgagtgaagagaatgaaaattaggagaagagagagagagagagagagagagagagagagagagagagagagagagagag

SEQ ID NO: 217316 - DNA, 945 bp, Cannabis indica
aattctatggttcagtgatgcactatttcttattttccacattagttttaattataggtatatatatatatatgataatctcatatttatttatcatattctataaattttttagaaattcaaataatttaaaagcgttctagaaaataagattcaaacgatctgttttatacttgtatcttttatttatatgcttgtaaatagataatttaaactatactatttaaattgtatattattttgaatttctcaaaattttagaaagtgtcttaaataattataatatacattattacacccaaaaagaagtgcatcgcagaagcacccatatgtttttgaacttttcatttgtgtaatatttgatggaaaattttattaatatgtacctcttcaaataagtgtaccgatacactcttagtttttttttttttttgaaaataaaatagttttagttttaattttttatatgacagtgttgtgacagacacacattttaattttaagtactcatgcccaactctctatataagtgggttaagcttgcgtttggactcacctagcttaaggacaaaaaaaaatccctgtttaaaattataaattttttttactaattttaataaatattatatatattttttaaataaagtaaaaaaaaaaaaaaattaatgactcattatattttagagcccgccctagaagcgccccatatttgattgactattgtggttgtgagaataaattgttgttcatggctctctgacaggctgattatggctttttatttaatttgttttgtttatttgcctgaactcaactactacgtatattcattaaaagtgacataaaatgtggtaaaataatttagggtaattctacaatagacaccccaaaattagatatatcaatgcaccccttaaactcttaataattattggatcttatatc

SEQ ID NO: 217317 - DNA, 1165 bp, Cannabis indica
aagctgtatctttcccatgggggatcaatgtatctctattgaagccttaaagttgaatcagacaggtaacaagttggcttttactagaccaatggcgtgaaaggctcctttgaaaatgatgtttacagagcttccgttatccacgaggattctggaaactctttgttggctatttaagattctattaccaacgggtcattatgagggaaatgcacatggctggcatcgtcttttgtaaaattcatgggaaattttatcatccttggacgttggacatgtgattgcaccaagtggcaagttttacttggttcaattcattaaggtaccgcttctgtgcatttcgagtgctttcaacaatatgggatccacttgaaatagttggcacaggaccatctaaagcttgtaatgcagctccaggagggtgcaaatttctgggactgggggctacagctactgccgttgctagagcattttatgccccttgaagggcttgtgcatttggagcttgtattccaggtagctatggatggcctacttcctaaggaggatttatggctccataatgtctgagaacaaaaagctgtccatgtgcgactgcctgtcccggatagatgactgggattctcacccaattggtcaagtgtttgttccgtaccaacccttctatttcatcttttaagtaatcacactcattggtggtgtgaccaatatcaccatgatatttacactttttatttggatctcttctgtattttctgcccttgtacattgacggaggcttttttatagtgtaccatgttacaggttgccttatatacatttgcccttctttgaggattcactctgattgagaccctttgtactccttttactctttgaatgggttatattagactttgaaacttttgtttttggtttgtttgtcttagagtggcactgtatctagtatgtgtagctccaaacccataaaaaactagcatgtacagctggctgcacgaaagtacttggtccatataccgtaggactagttaaagcaattggtggaggctaatggatggagttgtcatctgcgattgttgggtatttgttatttcgctggaaggtgcagggagtactccatattcttgggtataagcgtcttctaaatttatgaatccttgggctc

SEQ ID NO: 217318 - DNA, 567 bp, Cannabis indica
gctaaatataacacaatctcatttgttgtctcaaatttagcacaaattttatagggatttctatatcatatactaaaattttctacccgtttttttttttttaattgtgggacagaattttttttcaaaaatattgtgtactgtattaaattttcactgttgttcaaggaatattttttagttgttctacttttgtttttaattgttttattttattgttttacggttattttataaaaagacagtattattataagaattttcatgtagcaataaaattgtaaatttttactcaaaatctaatatttttttataaaaatcccaatttaaaatctagtcttatatgaaaaatattaaatgcccaacactactacataaatgtgtttacaatttaatattaattaaatctcacaaaatttaatttaaaaactatactataaaaaattgcaaactactacctattaataatggtgtacatttttttcaaaaaaaaataaataaataaataatggtgtacatttatacttgtgtaagtactagcagtctatcaccattatgttatcatca

SEQ ID NO: 217319 - DNA, 723 bp, Cannabis indica
ctccataggacaaaaaaaaaatcacatcatcagcaaagacataagtgtaatataatttattttattgataggcataattttttagagtattagggcataatatctaaatttaactctcagttccaaataatatctaaatttaatttattattgtagtaatacctaagttctctttttggaactctgtaggtacctaatggttaaatatcaagtcattatccacgtgtcattttcttactggtacatttaaattaatttcttttaataaaataaaaataaatttaatgacctggatcaatcaagaattgacaataatttacttaacacttaacagtcaagtaccttcagaaatttcaaaattataatttaagtattattaccacaaaaaattaaacttagatatttatttgtaactaaaaattaaacttaagtatatatgccacaaattaaaaaaaaaaattttaaaacaaatataattaaaaatacatattttatgcaaatcaaaaattattgaagggtagatttataagtttttaagctgcaattaaaactctcgaaaatgaaaaccaaattgctataataggtttgcaccaagagtctcttttccgtaccattctaaaatttggtggatgtgagacgaatatgaatctttaacgaacaggatcaagaatgattattatttcgacacaaaaaagggttctggaaaattcttttttcttttct

SEQ ID NO: 217320 - DNA, 524 bp, Cannabis indica
aatgtcatcagcaggtccagcgttaggagtattggcttgtttttcgtacgctgaaacgagctcgccctattttaagaatataagttagaaagcattaaacatacataaaatagtattttatttagaagttatgaataaatacttacatatttttgtgcagccaattgattaacaaatgtatttgacgatttcttggtgtgaacttccttccaagactcaatgaaattacccttattcttctacaagagattaaaaaaattagaaaatgtgcaatgtaatataatttaactaaattgatattttaacttactttttcataacgcctctcagccatagatttcgttacttgtgttgtagggtactgcatttttttttttatttttcctgcatttatttagaacgagcaataaactctggactagtgaaaaattgacaaagaggaagccattgctctggagtcagttcacttggcgggtgggcaacatcattatcaaaatccatcgaacttttatagtattttttga

SEQ ID NO: 217321 - DNA, 649 bp, Cannabis indica
agtaaagttcttatttaggatgttaataaacatactgtgagtagatctaagatcctggtaaaataatttaccaacatatatttgatacactacgctacaataaaaataataactttataactaaaataaaattacaataaaataataagttgttgtagaatgttttttttttctgacaaggtaaaaaatattttccaataaaattttatactgtaaacattatagtgtactttgtatctaatttattctatagactaataagaaagttattaaagtcctctaagaaaatagtagtgttataagacacgagtaatacttagtatcatttaaaggtagcgtcttgcgatagttagcaatattttataaaaaatattatattaaattatatgatatatactatttaattatatcaataataatattacatgtttgagaatgttaggacttttaacttttcctaaaaaaatactaatttttacgaagataaaaagtagttgaaatgataagtaacataatgacaaaaccatacatttatagccaataatttaaatgaagtattggtcctgttctaaccaaaacaagataatattgtattaatttctttcatgagtactaacaatttttcaacttcatattttaacaagtaatt

SEQ ID NO: 217322 - DNA, 599 bp, Cannabis indica
gtatttgttatacttaatcaattactactagtaggtacttggtatttatatttagtagactgataacttagttaaagaagaagaaaaagagtattacccaagtaattatttattacgtagttaaaacgttttttttttaaaaaaaaatatatattgacacgcagtgtaaattcattggttacattgatcatgagttcgtgtgtgtgtacgtaaatatttgaatatataatctgtttaatttgactaatgtttttctattcttccgtactgtggaagcaaaaatttaaaaagtgggatttggttaatctatttgttttggcttttttttattagaaatatgtgttttatagtctctattcagaacacacatgcttgcatgtgttacgtaagtttcataatttgttgagtaaatatacgtaaagaaaatgcgcaagtatcatctattagatatcgttttgttatagtccgaatttttttgtttaaacatatgagttcagtctcatatcaataatataattatcatagaatcaacctcgcatggagcaacttgtgcgaccgagagacagtagtctaattgtatattatgcctggtatggtcg

SEQ ID NO: 217323 - DNA, 1259 bp, Cannabis indica
atatatagatggacacgtgtagatgatagggtactcaattatgaggataggtaccaaacttaataagttcccatattcattcccatacgtcttcttcttcttcttcttctttccattaattactttgacttatccatcaaaatttagattcaaaataattaaattattattacttaataacaaccacaaattattacttaatgtttcaaaattttcaatttttttttctgtaaaacatccaataaaatttagataaaatactttttaaaaatataaatttattaagaagaacaatgacaattataagtgatatataaaattgtaatacaaataacaattaatttgtatcctaaattttaatttttttttcgtttaaataaaatagctcacaaatacaatttatttcttaatttacaatataaaaaatacacatataaaataaatatgtaataaaacgtttactataatataaatacacatataaaatacagtatttataatttaaaaaaatttaataaaaaaataaaataaaataaataaaaaataattaaaatcaatatttataatatattatttactaaaattatttaaaaataaaataataataatgtatctcatttattttatcaaaaaatataatcaaaatacttaaattaattaaattttattttaaaattaaattataatatataataattattttataaaataaacttatcattttatatttaatattaaaaataaaataaaaattattaccataacaaaatagcaagataagtattttttagctcatatttattaaaaaaaattattatttattagtaaatatgctataaaaatattaaatttttttgaatttcaattttattgttttaaataactaactatatttttatggaaatagataaaatggatggatacacaattttatttagtatataaatataaataataaaataaatatattatatattattcattcacttcactcaaactcactcactcttatcttcttctccaatcaaaaaagaagcaatgatcctacgtggcacaatctcagcccttcattcctcctccgccacattactccgtcccaaaaccaccgtcgccgccgtcacatcccaatcccaacccttctccttcaacaagagctactccatctccgacaaagacctcaactcccgagggttcatcctccgctgtacaccgtcagatctcaacctcgacaacctcaacaaagtcttcgtcgccgtcgg

SEQ ID NO: 217324 - DNA, 559 bp, Cannabis indica
ttatatatgacctttataaaatgacaatgttgtttaacttgttttcaatatgattcattagagtcatttcatcggtataccaagttaccaacaatttccaaaagtggtatttttaaaattttaaatcaagaaatataataaactttattaaaagtcctgacaataaattatgtcagcaaatttaatatttcaatcggtagagactacatcatacataacatacaaaaaaccttggtttatacatatcgaaatactttatgaatttatagagtaaaatacttatatgaatttatacgtaaattacacacaaatataatgtattatttgtataacaagtgatactttataaatggggtcatttaaattgacaaattatttatcatataaatgtgtattgtgtaaattgtgtgtacacctatcattattcggttagtgttaactttatggtatgtatcattacaaaaataaaattctaaataatttcttggtgacaagtaatctgcaaaatctccaatttactctttgtgagatataacaaaaaactttgattggtttatgg

SEQ ID NO: 217325 - DNA, 582 bp, Cannabis indica
cttgtccatttgtaacatttggagacattaaagttggacttactaatttactatatatcaccacatttttcttatatttatatattgagcaaagacacttttaatttattttattttgtgcattgtctaataagaaaacatgcttgtcatgggcggcccaattattgaagcctttgtcttaggtttgagggttatgatgaaattagccccacaattctggcatgcatcccttaatcattaatttgttgattttttatatattattttttagattatttacaccaaattcttaatttttttactatggagcagaattttttaaaaaaatactgtgtaattctatactgtgtactatgttaaatttttactgttgttttatagttgttttttaattgttccactgttgttttttagttgttcctctattatttttagttattttgttgattttttatgtattaatttttagacctataaatagcatttatctttttttagaactgtcttagggagaatcataatttttgcccagtatgtatgaatagcttgagccctgagtttatcaatgttgtgtcgcccagc

SEQ ID NO: 217326 - DNA, 589 bp, Cannabis indica
cccagacacttctgcaagacttgtcggaggtactagactaaaggcagagccctaagaaacgtccccgtcggcggtggttgtagaaaaataagaaggttaagtcttcctcctcctgtctctctggttccggctctggtgccgactccaaagactattccagctcaccatccacgtcggattttgggtggagaactgcggtggctgcgaaccttagatttactccattccaccgtcttgtgacaataaaaagggaaccaaaaagaaaaccctagagctctcaaagccctcacttaaatcgccattgaatagaaaggggttacctaaaacagtaccgaaggggaacaaattgggctgcatttcaactccaaccgcatagatcaaatcgtgcaaagtccatttcaggtaggtatagaatcaagttggcgaagatccagcaatggagtggagtttcttcttcttcttcttgttcttctgcgaagatctagcaataagtttttttttgaaaaccctagattaaaacccaagagagagagagagagaggagatcgagagagtgagagctagagagagagagagagagtacatttcg

SEQ ID NO: 217327 - DNA, 1347 bp, Cannabis indica
gagattcatctgttatggttcaaaatgggcattttatgtttgtacaatttacttcacaaaatcttccaattagtttatgacacgttgtttgatactaataattggaacttgtcttcgtcttttgttttctcaaacatttacatgtcaaacatgatctagtcgaaatagtatttgcaggtaatgtttgtttatgatacttcgtttacctgctagatcattattggggttgggcttgtattgtgtttatatttgtgcagattcacatgttgtcaaacctaatccaacttgtacatatagagacatatcatcctaaaatcaaaattattccaaaattactttttcaatctctttctagttcttttaattttaatattttattaaagcataaatctacaaattaatattttactattattttaataatttttcataaaaaaaaaagcataaatctataatttaatattttactattattttaataatttttctataaaaatattctaaaaaatttagaaaataaaaaataaattccaccaaaaatattaaaacttaatacaaatataattaatcataaatttcgtttatatacgtgtatacaatattaatcaatatatattttaacgtttttggctttttttaaaaaaaaaataaataaattaagatataataataataataataactctaatgtgtatatttttagctttttttttaaaaaaaaaaaaattaagatataataataattataataaaaagaatcagttgtatgtgatacttgaaataatatttcaattgctttttaccacatttaaattttttattaaaaaatattaattaatttttaacaaaatcatactttacgtcttttttcgaaataataactttaatgtcaagtatcacataattataattaaatagcattgctattgagcatcagtagtgcccaacacctttcataggtggcaccctacgattggttagtgatattctctaaatcttatttttttttaaagttatatgggacctattacttaattaacttgtaaagtccttttttggcaagttagttgacaaaataattttttcttttatggtaagattcttgtgcattcataaccgatttcttaccttgtttattcggtttatagttgctctttttcttgttaggaaagttgcacttttcagttgaactttcatttgtttagaaacttcttaaaagagaagcaattctcttttggaaagttgtcttttttagggaaacttttgattattgccttttccttattgattttcgattgtatcttgatacaatcagaatatctaatctatttttggcagtaatcaaac

SEQ ID NO: 217328 - DNA, 660 bp, Cannabis indica
gaataggaaggtaagtactaaaagctactattcaattgttttacatagcattatatagatatatatgaatattaattttataaatttttatattttacgttcattggtttttattcataatttacggtatttataaaataacaagaaaacaacataaacatatgcacaattaacaaagaatcaacaacgaaataacaagaatataatacactaaaacacggtattttatgtaaataaaatttaaaaaatcgtaaaaatattgaaaattatgtatagactgtatttttgtaattttatttttattttttatttcttttgtattttttgaaactattcctttattaattttgtataaaaataattctcattgaaggtacccaatgggtgtatagctcaaattttgaaaattttgttgcaatatcgaacaaggcaagcttaaataattatgggcttcaaataatgacatatatattgtcaaattcttatgctacatgctaagaattatttagatcctcaagggtttgtttggtacgctgtattaaaccgtattgtattgtatagtattatattgaattgtattttatataatattttttatataaaactatatgggatattaacttttatgtccacctaattaaatatataatgttttagtat

SEQ ID NO: 217329 - DNA, 571 bp, Cannabis indica
gggaaaattgtaagaataaaataatttgggaagcaaattaattacaaataactaatatttttttaacctatttaatatatatttatttttctgttgggagcgctatacagttccctacttttgtaagtagctctacaatgacactagtcattaaggtataaatgttatatttatatattttaattttttgtaatattattatatttattattaaaatgattaaagtaaataatttttaagtgatatagaaaaaatataaagaaattgatttataatgtaacgtaaatgtgtaagataatataaaaataaattaattagattttttaaaaaaattaagttgagaagaaagtgctcttaataattatgtcaactagctatatatatatatacgtccaactaatgtatttttaacatttgttattggtaactagctagcttaagttatctacaaaaaaaaaaaaaaaaacctaagctagcttaagtactgcgtacatttttactacaaaaaaaaaaacgtaactgcgtaacatataatatatatatatatatatatatatatatattaaagggt

SEQ ID NO: 217330 - DNA, 618 bp, Cannabis indica
taatgtattacaagataatatatgcaagataatgtattacaagataatatataattttattattcaattattattaaataattttttatcatatactttaaaatatatcaattttaaattataattctagatatacaatttcagttttagtaatattaacaacatatttttctcttatataattcgaaaaaaattataaataaccacagcaaagcgcgggctatttcctagttttatatagaatagatataattatatatgtattttttttttaaaaaaaaaagaaaaatatcaattcaatttaaatttaatttatttaaaaattaatattatatatttgatattttttttgtaaggtttggagaaatggtgaatttgaaattaaaaggatttaatatttttaaatatcatttaaatattatattattttcattaaacataatttaactcaatttacttactatctaattattttaaaataataatttttaaaaaaatacttcacgttgaaattaaaattaggattatttacacatatactactgaaattttcatttttttttttacttttttacttgtgaggcagaactttttttaaaaaaaactgtgtattgtgtt

SEQ ID NO: 217331 - DNA, 593 bp, Cannabis indica
aaaaaactaaaaaatttatttaagaaaaagaaaaaaaattcatcaacaatataataaaaaaaattataagaagaaatacttataagaattcttaacaaatgaatcagacaactaattaaaaatctaacataaagaaaacacatgataacctctatcatcaccatcatataactaatatattttgacacacccaaaactcaacaaatatttttcttttgtttttatgaagaatgcatatacagcgggaaaaagataaaaagttagaaaaaaaagataaactattactctaaaattagtctaaaaatctagaaattacatcttaaaaaatataaaaaaattattcaagccaaaaatcaatatacaaacccaaacccataaagcatataagcattttatctattttatccattttaaccctgcaactcatcaaaatctattacacaaaactaaccaaattaaaaactaataccataaaaatgattatctgaaaatactaaatcaagaagcaatttttgtcagttatgtgaaataataacactaataactaaacataaaaaccagtttttgaaaaataaaaatatatgtattaccaa

SEQ ID NO: 217332 - DNA, 595 bp, Cannabis indica
aattaatatatatacatattttataaatgaatatattagaaaagaaatataatatatcagatttaagtactttttttttttttacattagtttgttttttggtcctagatcaattaatgttgtttcttattatttggctaaatatgcattgtcagaagttattagtaaagtttggtggtttggttatcttattgaatttacaattttattattagtgagataaattaattcaatcagcttccctttccttttcgtgcttaaaaagtggcttttgggatcttaccccaaaaaaaggaaatataatatagctgtataaatacatattatgatattataagtagtcatagtaattttgtatctatactaataaactaaaaaaaaaaaaaaaaaaacaaccttttaaaaaatcaatttaaagttgcctagttcgattttatttaattttaagaattattatgtgtaaaaattgaataaaaactctatttttctagtagtgtaatggttattgatatcaattagggggtatatttaatttttattccaagctgtaactaaataaaaatctcgagtctatatatcactaccaatagtgcta

SEQ ID NO: 217333 - DNA, 807 bp, Cannabis indica
gttcgagtccaggttcatgtcgtggttcgggtccggggcaggtttcgggtccgggtttgggtccgacttcggattcccaggtcaaggtcaagtctaggttcagttttgagtcttggatttagatctgggtttgggtttcagcgcctaggtctttggtctaggtcccccatccaagtttagttcgtaggtcctggtctggatccaggttcgggttcgagtcccgagtcttggtttagtctaggtcccggtccgtgttgaagtctaggtctatatcccagtcttcgtctgggttgaggttcgggtccttgtcagggtttggatcctggtctgggttgctggtctcaggactcggtgagggtttaagaccaggtcaggtctaggtcgcggtccaggttcaggtcctaggtctcaggtctcagtgctagtcaaggtctcggtctaggttctagtctgagtttgggttatggtttgggtttggttctggtcttaggtccgggtcctagtaacagttcaagttctaattcccggttcgggtttggttcagggtctgggtttgggaccaggttggggtcggggtccgattcttattccaagtctaggtgcgggcttttcagatctcaatctgggtccaggtcttagtcaaggcccaagtttgggtcctgggtctgggtctgagttagggttcgggtcctgatttgggtccggggcgatgtttaggtttgggtttcggtctcaggtagggtttgtggttgggtccgattccaggtttgggtccgggtgcacatctcgatccctttcaaagatctc

SEQ ID NO: 217334 - DNA, 527 bp, Cannabis indica
gtccaaagattcatcgtaacactttctgcatgcatatttacaatgttaccttaattttaccacatgtaaaatatgatcatgctatcacatcaatatatattttggttcgtatagatatattatattaattacttttttttttttttttcttattttcatgttaaagtatgtattacaatgacatatatgtatactgtggttattaacttatgaatgttatataaaatgtcaattgatctaattagttagttaaatgttatcaactatatattttttttgctgttgtattgacacttactctgcaattgatacaactgaagaagtaatagccgcttcctttccaagcataaatggatatatagatgaccgtgatagttttgaataattaatgccaagtgcctaatatatattaagggaattaaaaaacaaaacattacttaaattccatacttttaacaattaatacattaaaccataacaaaaacttattactattcctaataatctagatgtttgttatttcacaa

SEQ ID NO: 217335 - DNA, 601 bp, Cannabis indica
ttactctgttattgtaaacgaattatcttttgatttatgataatatagtatttctcctaaaaaaaaaaatcttatttttatgtttgacaaaaaaattattattaattacttagaaaataaaattatctaagagtgataatatatattgtatttacgcttttatgaagttatgagaattaataaagagagttatatagattttttaataaatttgaggatgactctgacgaaaaccaataaactgaagatttagaagctttttactaaaaaggatagaaaagccctataatatcggtatcgtttctattttgggcattgttttttttctttttctttttattttttttttttttttttattttttttttcgagagaaagcatttgttcttttttcatcatgttatttttagcaaatgtgtatgtgggtgtcatatcacttttgttgacctttttcttccagtggtacttgatacaaatcataggccaaattaaattaaaaaaaataaatgctacttatatctctcctgactatctaattttagtttctactgttttatttatttattttcgttcaagtactaagagttaaactaacaccatc

SEQ ID NO: 217336 - DNA, 534 bp, Cannabis indica
aatcatgaccttacaaagaaaaacatagacaatcatgaaagaaattgactaaaaaactctcctaggtacgaaaagagtaaagggtgtaccgaaatgttaattttaagatgtactatagacttaccctaaaataaaatataaaaattctatgttgcaccatctaaaaataggtgtctcgatgcacctcttcatattttctatatccagatagttttaatttaattttttttgtatgataatgtacattatagttaaagacatacccaatttttttaaaaaaattagaataatttaatgtaaccaaaaactaaattcaaacagtttgttgcgcgcacattcttttttttaaatttattttatacaagtgtgaaatagacttattttttttttttttgcagtagtgaaatagactatttaaatcctattttttgtatagtaaattatttcaataattctcataatattctgggatgtctcaaataactaaaaaaatacaccatcatatataaaaaaaaaattgagattataaccatt

SEQ ID NO: 217337 - DNA, 734 bp, Cannabis indica
ggttttttatcttgttgttgtttggctgctttttgagacgccacttataaaaaaaattattaattcggttagatattattttttctgccaaaaaaattagtttaggagaagcaagttggtacggttccaattaaagagcatctaaaatcattcaagcgatcctacattagaagaatttttgaaaataaatatctatataaaaataatttaaattaattttaaaaaataataataattaaaaataaaaattaataaattttttaattattaatattattttattttttaaaataaatatattattaaatattattataatatgtataaagttttaattatatacaagcagtcctatagtaagagtatataccttacatcataataaccacaagatctaaaatcaacggtaaaaaaaaaaagtttcctaccggtaggaaacttttgctaggtcctaccataatattaccctatatatatatttctaaaaaagaaaaagccatcagtactatcaatgctttcattttctccatttcttccccccctagcacaatttaatactaattcagaggctacatcccatttttctagctttttcactttattattttttggggccacatttaaaaaaaaaaaactgaagaaggaataaaagagggaagtatattcgcataagttaatttttaatttcagtatatagtaatttgcaagagagacttaattttgtatcataaatt

SEQ ID NO: 217338 - DNA, 605 bp, Cannabis indica
attacttttttctcaagtaaaaataataaaacatggaaaaaaaaagtatactaaaataaaccattaaatgctttaaaaaacaacatttttttttcttaactcctatttttatgggtcttaagttataagggcatgtttggggacaacaagaaaaagaataaactaattaaagccaagatcaaaaaacataattaagtatttttttttaatatatatatatatatatattaatgaataagggtatgaatatttatggtatttatagcaaaaggtggagatctagcattaaatagcacacaaatccatcaaaaaagaaaaagaaaaatgttaaaagggcaccgatgcctagcagcctcctatgtgtcagtatcgctattggtcctactaagtatcaggtccaacatagtttaatataatagattttagggtgtatcgttagctaatcgcaacgtcacatgtctaaaaaaatgttaagcaccactggtacataatagcaatgctaaatctttttttacaaatttgactcatttaataatcttctttcttcattgtgtttttttttttttattatatttgttatatatataattgcttttgtttttttc

SEQ ID NO: 217339 - DNA, 694 bp, Cannabis indica
aggactatattaaaaaaaaatctatatttttagaagaatactatatgcatatgcaaattgcaaatacttattacaaataataataatacatcaaatatttgctatttatatttttgaacaaggaatccatcattattttcagtcaaaaaaaaaataatctttaaaaaatacgatacaatacacatattgaaatttcatatactttactacacataataataataataaatgctatctatttgtattttttaacaagaactattcgtaaattttatttttatttttgttttcttttaatcaagtgaggatggagaaagtaaagtgagaaaaaatagattggagtgaggttagggatacagtcgattttgtgatacaatatataccatgtcatataagaaactaattttttgatagattaattactaagacaaggtgaaatcgacaatagtgtaaatgatactgcttctttactatagtcttagtgactgctaattataattgatctttgagttctacttggcatgatggttataggagaatgtcgggggctgtagagaacattgtttaagaactaataaacttgatatggcactggaagagaattaggagaagaacattgtaggtgcatcatcttttggggagaagtcattggtgggtagaattatttcttagcgagatattaatgaaaaaatta

SEQ ID NO: 217340 - DNA, 577 bp, Cannabis indica
ctattcttttctagtacaaatcatgtcttagtgcttaaacaaattcgtattgtgttccaaatattagctttatgaaaaagaaagtgactagtgttatttgaagttttgagattaaatatgattcttttttcccttttcttaatccaaatttttgtttttgtttttgcacgtgataagtgcacgtgtcaaagtttaccaattttttttttttatctttcttgcaaaatgggtaagggataaagatggtagaactttgtttacctttaaaaaaaaatatagaataagttgagtaggtaattttttttttacacattaatcaaatgctattagtaaaataattttaattgatgaatattttcttttataattaaagtattaaatataacctctaatacacataatgataatttaatctataaaattaaatataaattaaagactaataaaaaaattaaaaattaaaaataaaaaataaaaaagtgattgtgtaatttcctctaaaatattctacttgagccctttttatcatttgggccacccacttcaacattctgtaatttgacccaacatttaatct

SEQ ID NO: 217341 - DNA, 695 bp, Cannabis indica
tttaatttttatgggctgaaaaattttaattgtcctaattaaattataacacgtgtgctgacagaaatcacccagctgtcacttgtttttggatggagacatagagtatagagggtactgagtggcatccctatcaggagggggttttttggctttatttttggaggttaattggtcatcatacttgaatcaaccaaccaaggaccacataaagacatgtatttatttgtaaatattatgagtggattgatattgggtcctcacaactatcatttaaaaatagcgtcttgccattaattagtaatattttttaataattattatattaaattatataaaatttgatatttaattaattatgatataatacataaaaaggtgttaagcactactaatattatataatatttctctcattattgtggctttttttttttaattttggtagcttatttattagccttattatttctctctgaaaaaacaaaaacatacacacaaagtcacattatttttgtgctgattctactgatttctatgcattcccacataataacaccatattttctcacatgcagccatgtgctttcctttaagaagggctatcattttctctctttctttttcttcagaatttattaccttatattatgcacctggccaacttttttcaaatagagagagagagagaaaga

SEQ ID NO: 217342 - DNA, 560 bp, Cannabis indica
ggaacatggtagcatcgtgatgatttatatatatttgcaataatataatataatatatattcttataattaatttagtgtgtattcggatattataaaaaatataaaaatatgagaatattattatgagaatctgtagctagtaaagtagtgtggttttttacacaaaagcatatatagattttccaataatattcttagtacaagtatgcgatttagaaacaagattttcagaacttcattaattaagtgttagatatgtatagaagttgaatttatcagcttatggattcattaattctaatattgttagcatctttattacgatccatataattaactctggatcatatattacctgtcattatttgcccttttggggtctgcaaatatatgtttaatgaatctaattagagcaatttacttatgtatgtgtaaaaatgtgagaccatctctattagatgtgtacaattattttaacactcaaaataatgagtaaatatcacattttacaattatattttaatatattaatacaaatcaataaactgaaaaattaac

SEQ ID NO: 217343 - DNA, 821 bp, Cannabis indica
gtttttttgaacacatgtgtaggtaaattggaatatcgagattcttattttggtacttgtaaactattcaaattgtaactataacgatacgactatgaaaaaaaaatattcagatatgtgattttgggcacggagtgttacaaaaattccaacatgcaagcatacttattgttttcaagtaataaactcagaggttgatcccacaaaaactgtagctaattatcaattaattgaatctttgattctatttggctaacaacatttgaaagtttattgtaatcaaataagagaaagaaaacaaataaataagataagataatatgtaataccaacttaaatgatctgtgactaaaagtattagtcacaaaaattacaatttattgtgactaaatgagtttttagtcacaatatttgttgtggcttgtatctaaacacaaacgaacctaagggtgttgagggaggactaaagcccaccttgaaatttgaaaatatattaataaataattgttgctttcatatataggaattataaagttcaaaccaaattttaactcattataccactagaataggaggatgttgctaaactatcattccacttaaatttagcttgtcattaattgtattaaattatattaaatgtataattaagtccatcctaaaattaaatcttaggtccgccgccactgtatctaaatactatgttttagttaaaaaaattatgttgtgactaaaaagttgacattaaatgtagttttttttcttatagtgatagtatttgtattagtgtgcctaattattacaatgctctaatgaatata

SEQ ID NO: 217344 - DNA, 600 bp, Cannabis indica
caagcgtgctaaataaatacttttaacttttgagggaatagagaggttccataaagtgttccaccaagaagattgcccttagaagaagtaaaattcttttttgtacatataacaaggaaaaattcttttttgttcagtcggctttttttgttattggggaatttatttctgagggaggtgaagtgaagtgaaggcacaaaaccaacatgtaatctcgatttccctctctttactctttgttttatggtttgattctttacatcatatctctttaactctctctttttttttctcttttctttcttagtatttctctctccatgagagccttttctgctctctctctaactctagagtcgaagcaacaatgcaagttgtaaaatattctctctttctgatatggttttcttttcttttatactaattttgatggttgagaataagctattatgaagtttgttagaatcttgagagagtattgagttgtttgttgtaactgtaatcccttttgttgggagttggttgtgttgctgtgttgtagagttataatgagctgttgagcctcctctgttatttatattccttgtatttttaattgag

SEQ ID NO: 217345 - DNA, 399 bp, Cannabis indica
taaactatacattagtagagaatagaaaaataaataaataaataaaataaatattattattataaatttatactttattttcattacagttaaacaaaataagtatcaatatatagaaaattaataaaaaaatacaatagtgaaatgatttaacttatcaagtacgatcagtgtctatagtaaatttacgagcaataatttcataactctaataacttaataacttatgttatatattaaacaaataaaaatcattatgttaataacttaataacttaataacttatgttaataactctaataatttattttttatttaattttattcattatgtcatataaccggttctattttaataaaaatcgatttgaattgttttgtattatttatttttattc

SEQ ID NO: 217346 - DNA, 558 bp, Cannabis indica
ctaattgactttcaatatgcctacatattatattttcatcagtcaaagatgatcaagtcgattcaacacgcaaccatagatctcaaaacttttggtagagctaaaaagagtgattgtgtaaatcttaagttgataaataaacaaaaaaaaaaaaaaaaaaaaccaaaatcagtagacttgtttactttatttaggcacaaaattaacctaataagacatggcgtttacctaaataaaggcacgctgtttacttaattgaaggtaagaagttacttaaaaggacatgtcgtttacctaataagtcatttagctaatttaaggcacattatttacctaataatacatgttatttatctaatttaaggcatattatttacctaatttaaggcacgttgtttacctaataaagtatgttgtttatcttatttgagggtagtagtttttacttaccttttttatagaactattgtttacctgataagacatgttgtttactttattttagagtagtcatttttgtttaccttctttaagtcactataagtcatgttgtttatc

SEQ ID NO: 217347 - DNA, 753 bp, Cannabis indica
aatgagttgatgttgttttggacaatatggttaatgttttatatttttttttattgttttgtattttgtttttttttttttttttgttatatagatgttttcatgttgtttattaagtttgtttttttttaatttttattttatttttttattttaaaaaatacggtattttgataaatttgttataataaaaatataagagaaaatgtaacagtaaaaatgtaaaattgacaaaaaatatgaatatttttgtaagacttcctttattttagtctattttcaaactcttttttgaacatgtagataaagtttggttaggaggaatgaaagcaaagaattgaaatgaaataaaatttaaagttgattaaatttttatttttttttctatttacaagttagaatagtaattttaccaaaatagtagaaaaggtattttatttgaatgatattcttatactttaaaatacaattaaataaataaatgaaatgattttttttttttatttttattttgttacctctaactaaatgtagagtttttttttattattttatttcttttgagttctttttttttttttgtgaaagggtaaaaactttattaagcaacactaggcttatctgctagtaaattagcagcagcacaaatgggtaaacaatcagtccaaatagcagacttttgagtcaaacgactccacttagctaaactattagacactttattacaatctctaggaacaaataaaaaaatac

SEQ ID NO: 217348 - DNA, 609 bp, Cannabis indica
tgaatatgacttgaacgcgtatataatttcttactcaacgtctttctaattaactactttcccctccaaaacactggaggctgtttgagtgttaaattatgcaatgtaatatataaacgtttaaataaaaaaaaatattttctctccaaataaaagaaaaaagaatatcaccgtaatgtttattacatgcatctggtatttattcatttagaaagaaagcttataaatactttgtacttattggtacactaaaaaaaataacaaaataaactttagttataattttttagtaataatataattttttttaattaaatttaattttcaagtctcaataaaaaattatttgtgactaaaatatagaatattgttattgggtaccagtagtgtacaataccttctataggtatcgtcttacgattagttagtgatattgtctaaaagctattttcttaagttatattagactcgatacttaattacactaatagtggtatgacaccgagaaaaatgttaagcactagtagtgcattttaacaacttttaaaatataatattcaaatacaaattattactagcttaattttagttataacaaaaattataact

SEQ ID NO: 217349 - DNA, 817 bp, Cannabis indica
ctaatattcaagaaacctttatacttgtttgatcaaatcaatccgtgaacacctaatagtcaaatttatttataaatgatgtatatacatatcattaccattaaataaattagttaaagttcttaaatccttagttttttttttttaatcaaaaaagtttcaacttaatacttccacaattctcttacttatagctcatttaataaaaaatgtatttcaatagtatgccaaaaaaaattatgtaaatttgaaatttaataaattttgtggcaaatttaagataatatttattatgatataaaatttaaattataataaatacacttatttttaatttatatttatgttatttatactgttatattaatgtatttaactataacattaaattataaaatatttatattatttttttattttattacatattaaaataataataaaattgataataaaattattattttatattttttaataaaaacactaattagatatttaattttatatcaaaattttataattgtacaattttaaaatttaatgtaaatgtaccacaaaattttatttgtacatgggagatggtctttaacattttactttgaagaaaaagaaaaagacaagacattttattctgcacttaaaactcagtatttcagtaatgagagcgtaccatatatatggtatgtacttggacaataaatgtgaatgtgaatcaaatcaccaaaccccggcgacgtgatagtctcgtgataaatatatctcacccaacaccaccgggtgactatacaattataaaaatataattagtaaaaag

SEQ ID NO: 217350 - DNA, 624 bp, Cannabis indica
attttctttgtgaaatttgatcgttactcttatttggataccgaattttgaacttaattgggcccgggacccaaacttccatagcactcaagcgtcgaaaaaaacctagacgccccaaacctccatccatctccgtctttatctgcgagtgttctccagactgagaaggcaatctcgtctctgagcccgactagatgcccaccagattttgcgttcatctttgtatttatttattttttaattattattattggatttatgtttgtatgagaccttagatgatggtggttatggtattttctggcgaaaaatgtatttatcgataagttatcgatgatttatatttatgtaatacagttttgtcaatttgacatttatcgatagattatcaatagattattgatggaatttatcgatagtttatcaatgcaagttatcgatagtttatcgatgatttttgtttgtgtttagtcaatttgacatttattattatgttatcgatgatttatgtttgtacagtggtgcacaaataaaaaccattgataaagtatcaataaccccttgataatcaaatttcggcagaaaaaccaaactcaccaccaccatctaatgttttaaacaaat

SEQ ID NO: 217351 - DNA, 582 bp, Cannabis indica
tttagttttttttttttatatataaagtgattatttttgaaaaaattaaataacttctgtatatagaaaaatggcagatttttttttaaattaagctgctcaagaagtaagccataggcacaggcctgtccagtcttggacataattgaccttaagcacatgcaggagggccatgatgcaaaaaagaaaaaattagggtaaaatagaattttttaaaataaaagggtaaaaatataaaaaaaaatatttaaattctaagttttttttttttcaaaaaattttggagtcctcatgatagtgctataataataattaaattaagttatataaatccgatagttaattttagtaatatgacactttaaacagtgctagatagcaggtgtctttttaatatttttctaactactaatgtaaattagtaaattactatatggttctagttctacttattttcaatttaaaaataaaatatgaaaagtttgatattagtcactaacaataatatgttgtttatcctttccacaacttctgaaatgaatttgcaaaaacaacataataaaataatgcttctacttcttt

SEQ ID NO: 217352 - DNA, 637 bp, Cannabis indica
acttgggataatcaccggtctggcaagaaccatgtgaaatctgccctggataaaggcattgtgaatggagctttgcttcacctgtttccaaaaggtattctctgttccgtccaaacgagtacttcagaccatagactgttgtgtctagataggttggggggggggggggggatataggtactaaattaagagatgtttcaagtttgaagaaattggacgcgggatgttagaagcaaccttgtcgttgccaatgcgtgggattcggtgaaccatccttgggcccctgctcgcgtatttaaaaagataggagctactcgggtagctcttcttcattggaatagaacccagtttggaaaaattgatgaggtcattaaagatctggaacagaaactggatagattacaacaattgtctgctggaaccagagattggaatttggagaacgacattagacgtaacctgaatgaagctagagccagaaaagctaaatttatggaaacaaagggaaagaatttcgtggcttaaggatggtgataaatgttccaaattcttctttcttcctactgctataagaggaaggagaaatgccattgagtgcattttagaataaaaataaatgtctggattaatgatcggg

SEQ ID NO: 217353 - DNA, 815 bp, Cannabis indica
acatggtcaggtgcccatgccctacaaggggcactgatgcctttgcatcaatagttcaagaaagtggcagacttcttcggcctctgaccggcccagttcactcctacggcattaagtatatgtctgccctcttcgtcctctacgcttcccagaagtggggtatgccttctcctcacgaagtcagctggttttttgatttgaagttcacccctaagcaaggcaggtcggggtacttttatttctctcaaccagacttcaagtggttgacaggcaccgatgactcggccatcagcaaaattgggcattttgttgatgagtacttcatggaggatggcacggggattacccgtactcggttccagtagattccaacatatcaccttctccccttactcttactctccgggatagagctcaaaagcttgctcgacttctgggggaagaccgaaatatcatccagttgacctccgaggataattttgtgaagtacgggctctatccaaaggacttcaatcccaaaccagtgaaggggaggaagaggaaatctgatgctagactggctgaacgagctcacccagagaatgagctgattcaactgaagcgcgaggctaagttgaagggaggtgcaagggcgaagcagtatgctcaggagcccttgaatcctgaagatgtggctgaggaagagcaggtgactcccccgtcaaagagggaagggaagaaacttttccgggcccccgcccgaacgccctattgaacatgcaattcgcattgggagcccatctcgcccgctcggccgccttcttcatgatcggaaa

SEQ ID NO: 217354 - DNA, 1013 bp, Cannabis indica
ctagtataccatgaacatgtggataagttttgaaaaattgaagagacctttttgccttttatgttttcgaatgcagaaggttggggacctttggattacagctagcatcgtacacacaaccttaccttcttagtccgtgaatcccacacgtattgagaaagcgcgtgatgcttggaatatcgtgatgatgactaattcatgtacatacacgtatcgaggcaaatgttatgataaaagatgcctcaatcccaatgaaggacattaattactgacgttcctactccccattcgttagatcacttccgtattgttttagatgaaatatgagccattgaccgcgagacacttgaattgccaacttttgcgtgtaaataatggggaagcaagcacacttccccacttacacatttaatattttggattcaaaatagagagagagaaccaaaaccacaggttcgattatggtgaatgttcgattcctttgacgttgttctcaaccttcttctttgcattcgagtaagggaaaacccaggagcgcccccaccaactttaatagcgagtcaaccaggtctgtcggagttgttggaacttcaaggaggcatcgacaagctaattgtttgggcatataggttttaggccagacaccgccaagacttatcacccccacactcttcttctccaagtaagtatcctccttcttttgaactttcgatttctttggtctttgaaatgcatgttcaaaatctgggtaggagtacttgtttacatgggggaaataaggcatgaatgtgtaccatttaggccttttaagaattgtgaacattttgatacgaatgttgctcactgttaggacaaaacttttgagactttgatagtaattctgtttcttgcatcggtcgagctctaaattatttttgtactagaatcacccttaaactactctacatagattttagagattttagggtctttgaaattgaaatactttgtagttctgtggatacactctcgag

SEQ ID NO: 217355 - DNA, 740 bp, Cannabis indica
agttaggtcggtactagtatttggaacccaacctaaattccttaactaaactttttaaggtaagttaaaattaacgaacgtacgaaattgggttaactaccgtactttttaacctaaccccttttaaaacggttaaccttttaatttaccttaccgtttcgttttaacgaaaattccgggaccctaaagttaattacgtaaacttttacccgaattaggttttcggtcgtaccttttcgttaaccgacccttaacggtagttaagtaacccctttttaaaaaaaccgaaagttccgtaccggtaacttaaacgtacgtttaagggaaaacgtagtaaaacctaaacgtaaggaaaactacccgaccgtttcgtaagtttttaaccccggaacccaagtcctaagggaacgaactaagttaactaatttaggaaacccctttccgaaaaaactaaggaaaatttccgttggccaaattacttagtccgtaccaaaaattaagtttccaatttagtaaccctttactactttttcgtacgggtaagggaagttactacttaacccgttggttcgaaccgtaaggtaagggcccaacttcgaaaaggtaaagtccgtaaaaacgtaaccctagttaggtttaaagtcccaaagtttacgtacgttaccgggttccaagtcctaaagttaaccgaaccaaaaagggttccctaaccgaaagtcgtaacccaaaaaggttcgggt

SEQ ID NO: 217356 - DNA, 1279 bp, Cannabis indica
actaattttattggtgtaatcagtttacacatttaaataaatacaacaatacataaattctgtcatcacatgaaattatagtaagagatcctaaagatatctttttgtgctttaaataactttttattgaggcaaaaataccaacattttgtaacaactacaatcaaagatcttcttcttccataaaacaagactagctttatcactaatagtattaatctatcttaatccttttagacataaaaagaatctagttaattagccttgtaaaagggtactgtaatggacgtgggagaagaggttgatgacagagtatccttgcagtaacagatcgcagccttgattttctcttcttgctcttctaaacaacaacaacgacagtttttacaagtgtaccattccgcctcaactctttttttcttttattattctttgagaatattcttattcttcttcctgattttataacacgatcttcatcttgttctccaccatgatagatgttaatggcatccccaagcagcaggtgaagcagcatctcagtctcttccacaactttccctatccaagtatcctcggagcccaaaaaggcgccgagactcggatgaggaggtgaccacaggtgatggtgacactgtttcagccttggagtactgtctatgtgtggagatgatgtgaattggctctagaatccagcaatcattgtcggacttccactcattagtacccattattttgttctcttctaattctttcatatagtgattgtaaggtgttttggataggtgatgattttgttcattttatacagactgatgggactcaaaatttggtaagaaatctcatacgaatcaatttagtcaacacaagtttctttatttgccaaagaggtgaaattatttggcaactgggagagatttttagcattcattgattgggagttttttatagtataattcatcacaaccaccttattttcgggaacattattttgattggacttcattgagaaaaggcaaattatacgagttctgctttgtaattgactggctcctttactcaccgtattcttattaggagaaatgtctaatataaacaatcttcttgaatatgtacattttttttttcctttttcaaaaaaccgtttgagtaatggggccttaatttgcaaaagggtcactcttaaatagttgtctagactttgaaaaaaaataaaagattgaatttgtctaagcaaagtagtggtgaattgccgtgtgaaagtagtgtactgatgagg

SEQ ID NO: 217357 - DNA, 710 bp, Cannabis indica
aaccatgcaacattaaatgttatttctgatctatattaataagtaaatctgattatattgaaatgagttttatttagggcataaaacccaacaaaaagttactttaaatgacagtttacaactgtcagaaaaagtcactttaaatgatagtttataactgttgggaaaggcttccatcgggtagtaactgagggaaaacgtctctttaaatgacagtttataattgttggtaaaagtattacgtagattaaaaaaaaaacatttaaattaatttattatacatgcattattatcttattacaataatataaataaatttcaacaaaaataataatataaataaaagttaatgaaataaaaatcataacataaattcaaataattatgtttacaatatttttctgtatatataaattttacattcacaaacaataaattcttcattcacaaacaacaaattattaattcacaaacctatccaactcaaacaattacactaaataatatatccaactaaaacaattacactaaataagaaataaattatacctaaacagttacactcaaacttatatttactagacattatgagtctcgaaattcgaagctcgaagagaagcccagaatgctaggaacagcagctggccgaaatgctcactggagctcatccactggtggcggcagtttttggtcaaagtggatgcatgaag

SEQ ID NO: 217358 - DNA, 672 bp, Cannabis indica
aagtaataaaaattaatagtaaattaactatttttttttttacatttatttacttactttattaaaattaaaatatagagaacttgattaaataaagaattaaaaaaaatacttttccaccaattttttaaggaatgccatatgtaataacttttatttatttttattttattttttaatattaagtatataatgaaaattttgttcttataaaattactaccatatattatagtttaactcaaaaagataatttttaatcaatttaaacgattacgtttcctcataaagtaaataagataaatcattattattttatttccaaacaattttaataaacaacatattacaaatattgattctgattattcttcacttattccgttacactttctcttttagtttattccaatttttaaatattgtgtagtaaatagataagagaaattttgtttacactccacaaaatgataagtacaccctaatatctaaaaaaaagtaaaccttaaaaataattttaaaaaatcacttaatatattttcttaattttttttcttcagtatattgtattaatttcaatacttattttatttttattttctataatttttttctaataaaattttacattatttttttatttgtaattattttgttataatattcgaactat

SEQ ID NO: 217359 - DNA, 673 bp, Cannabis indica
agtttaattttttacaattataatacctaaattatatttctaaaaattctgtaagtaactcgctgttaagtgtcaattcattatctacgtattattttcttattaatatatttaaattaatttttaaataaaaataaaaaatttaatgatctgcattaattaaggactgtcacgtgaatattgacttgagacttgacgatcagttacctactgaagttatataaattaatataacttaagtattattaccgttaaaaattaaacttaaatatttatctgcaaattaagaattaaatttaaatatttatactgtaaataactaaaaaaataagcatttattaaaattagtgatggttacataaacctttgaatctttgttaggtatagagacatgccatttttctttttctgatgagaaaatgaaggaacatgaattgaatctagattcaaattgattatatataattatataaatatatatataagtttaaatatattaaaaagaagagccttttttggaacatgggaaaaatgatagttaatagttatattcaatttttaaaaaaaaataaaaaaataaaagatcaatgtgcaataataattatctttctaaatcattactcaagaatcaatcaagactatgttagttttttttttttttttttttattata

SEQ ID NO: 217360 - DNA, 733 bp, Cannabis indica
atccaccgaatgtcccatttattgactggatggtcacaaccttatgcatttttgaagtaatctggagcgagagaaatagacgggttcataatgaaagtgacaatgatcttcctggtatcatgagactggttagatttaaaatcaaagatcatatgctggtccccaatcacagggtacctgaagttgtgtcttgggcgccccctccaccgtcttgggtaacctgtaatactgatgttgcagtctcctcaaatggcagcatgctatcagctgtaatccgcaacgatcgaggaaagatcatctcaattaccacatgagaggtgttattctctgatccgctcattgctgaagctaatgctgtgtgtttggcagcagaggtggctcgggattcaggtatgcaacgagttctattcctttgtgataatctgtgtgtggccaattcgtttgcagcctcggctcattgcaaaggggacttcagaatccaagcggctgagattcggttcaaagattgttgttctaagttcgaggaatgggaaatcgcgcacatttctcggttgtgcaaccacatggcgcacaacattgcaaagtggacaatgatgcatcaaaaaaatcgggaaaattggaatcgaagatatccatggaagtgtgttggatgacttcaatgattgggacccgggacctgtaatctctttgtaatttgttttctggtgtttttttttactctgttctttgtttg

SEQ ID NO: 217361 - DNA, 701 bp, Cannabis indica
ccacatggtagaagggacgggacagctatctgaggcctcttttctaaaggcaccaacccctttcatcaggcctctgtcttcacggtttaaccacctgccaaagccctcatctctgataccatcatcttggggcttagatttcaacacagaaatttgccgggacacaaacattcagcccatggcggtgatgtactggatgcggaggagagtggagagatacctgaaaagcaagacagaaaattcagggactgggaagttactctgtgggtcaaaggaacgaattcagagtgggacatgttgagtttgagttttccagtatgcagttagctgtatgggcttagcaaaatgaaatttaacaatatgctattactaagttatttgttatctggagtttacatattcaacttttaaaagataagtaaatcttaacgttaaaacaattatgagaatacagattgttataaaattctcacaaggatattattccttctgaatatgaaccacttcagtaaggcctcctaccgcactggactctcccctgaataaaacctactgtcaccaagccagtactcgatcaacggttttgaaaagtaggttttactaattctcagacaatctcctgtttcacagcagaccccaaagactcccacaggctgcacaaacaataaaacgcacattttgtaacaacagccaatataaag

SEQ ID NO: 217362 - DNA, 574 bp, Cannabis indica
attttgtcttttcctagcaaagtgaaaattattttgtcttttatccattatttcaaaatttacatcaaaaattttaataatatacatttaatgtgtggaaacctaataagcatagactactcccttttattatcaattaattttataacaaaatctcatatgtcttatcatacaccaaacattcatgctttcttcacatcaaactttgcataaaaataaaaataatatatgtatatatcttactattataaatatattttattggtgtgatagttgatgacaaatttgccttcatagatttaatgttattataagtctattttttttttttactctcataagttgaagtcataagctacactaattatgacaaatttgcccttatcacaagtctatttcttttgtctttatccacttttgtttttaccctcataagttgaagtcaaaatttacactaattagtcctaaatttagtttgcttagtgttggggaaaagaaatgattcatagaaattgatgattataaattaatgatgtaaaattataatattgtgatagtttattgtcacttttac

SEQ ID NO: 217363 - DNA, 595 bp, Cannabis indica
tagtaattaaataaatactagtgtgattaaaatttattaaaaaaaaacaaaaacaaaataagattgatcgtgatgatcttccacaaaacgtgttagaaatttttgatatcctttaaaaaaaatctaggcatcttaaaaaagaaattaggacattttacaaaaaaattaaaattataagatcattaaaataattgtttgggtatgatcatgttttttttttttttaaataatattcataataataatattgtggaggagagattttcatatataagatattataaatttgaacaatatttgtatatatataaatatatatatatataaaaaatatatatgatatgaggaatgaattaatgtagttaaagattattacctcaactttgtatgatctcttcttggatttgaataattgagtgtggaatttcttagaagatgaattgtgtttataccatattctgagaatggatttgtgagttttacagaattttctaatggaggcaatgcttagaagatcaaccatgagagagaatataataaattaagaaatataaaattttataaaatttaaattattatttactatatcaacaac

SEQ ID NO: 217364 - DNA, 813 bp, Cannabis indica
gctgctttaagactttgatcatttatccacaacaatgagttgcttgttcatttcactaagtcgaatgctcttctggtcagcatcacctttggcctcctccaaggccttcttcagatcattggtgaacatgctggttttgagagttgcttacttagctagggagtaagcataagccagattcatattagactacaaaaagaaacaataaagcaagttaacctatctatatgacataatccgtataaaaaatttaaattgttgacccaaccttgttatttctttccaaactccaccaaccaagagttccactagcatatccacagcaatagagagctactcatatatctcggtcattaaacgatcttggtaaaaactacccatttccttagcctttttggttataggttgcacagcaggtggagtgacatttggcttaggaaggttgtgccattaagcgttggtcgcattagtccaaaacgagcccttaaaagatattggatcttttgcctaagatgtcagaggtagagtcttagagaacttcttagtcataagggaagagtccaggatgtttatggttataaccactaactcttcttagcatccaggcggggtgtctgcgaactcagagcaatgctaaccagagtaatatctcctaaccttggctacttaataggtaacttctggctagaactatcactgacctccctctttagcataccttttgacttgtttgacatagctgcccagaagaaaatacttggtaaatatttaaataagtaaagagtaaacaagattaattattggaaaagctac

SEQ ID NO: 217365 - DNA, 658 bp, Cannabis indica
atgcatcataaatatcatctgtgattgaggctaatgcaatgactttggttagaagttttcttgctcgagagtatttgggttcataatatacacccaatatccaaaaatacagttccacaatcctatctcttgcaaaagggaatttctttgcaaactcatgctccttccaccacctaataattaattattataagaacaatctaaattaataacaaaaagtacaaaagaatgatattcccattcatgaattactcacaaattccacgcacaattatgtgacaatttcttttaaattaattaaaatttttgccctccgaactttgacattatgctccctaaatttttaaagccgttaaaaatccccttgagactattgagattattggatttaaagatttttgtctaattttggtaaggaaagtctaacatggatgaaaatttaatagacatgatttggtacatgtcaaaattcgagggggtcattcagtagatatcaaagtttggggaacataatttagtacatggacaatcatagaattagtaaaattgaataaaattggacaaaagtccttaaatccaacaatcacaataatttaaggagaatttttaacagttaaaaaaaattcaagaaggacatataatttagtatatgtcaaag

SEQ ID NO: 217366 - DNA, 875 bp, Cannabis indica
ctactttggtcttcttattcttagtttatttaagtttaaaatattattctcaactctagtaatttaggtaagtattttttcttagaattaattacatagtttactttgcttttattttcatttagtaaagtttttggaattggcttttagtgtattttgtattatttaagtaaaaacgtccctatagagacgtaactttgattacttatcattatattacttgtttgtgattgtgtacacttgcgcaattaataaatcaatataaattttcacattagttaaaaaaaaagtaaaaattgaaatgataagtgtataactttattaaattagatagtttgagatgtatatctaaatttattttgatgtgagtgtatttgaaaataatggtatcattatagttaactctatcattttttctccatagtttatttttaaatatggttgcatttacacaaaaataaaataagtttttttttttattttatgattctggtaaaatttatttttttctttttttttaatggcaaaaatattttatcaaattataaagatcattgcaaatatttcattttactattttttttttaaaaaaataattttcatttttttttaaagatggatgaccctttttcttaatatgaaatgaaactaatgagttacaacatttaagatatgtatttgagggtacatacacatttattatataggtgtcatgtcacataaataatattgccataaaaattaaaaccaaattaattaatagagcttatgtattggataattaattccttaagtggtaatttggtattgggtatgtatgaaacattgtttagtgtgaatgtgtgatgttgtcacaatctaattaattacctttt

SEQ ID NO: 217367 - DNA, 991 bp, Cannabis indica
atacattttttttatctattttgaaaaataccatattttttctaacataagggcccaattttttttttctttccctatagcccactttgtttcagggccgaccctggataagacagaaaatatatacctttaattgaagtggtgtaaaataaaaatttactaagggcaagacaaaaaacacattgaagtggtggaatggaataaaatttaaaatacataaaaaattgataaaaagtttattaaatttttttctatcatgcattggaatggtcttttgatcttccatttcaaaatagaattcttattccaccaaaatagtgaaaaggtcattctattggaatgatattccaacactttaatatccaaccaagtaacaaaaatagaatagagattattttatttcctttctattttatttcattaccttcaatcaaacgctaataaagaaactcacccattagtttaacaatttaatttcaaaacaaattaaataaaagtaaattccgcgagtaaattatagacagagacggaagtgcgtaccttacatatatcctaaataagcatgaggtgttggggatgattacaatacaatataggtgatgcaacgtgaaaggcagatgatgaacataatataatattcaattaacaaaacttaaaattgatacactcaatagtagcatgatatactggtgagtgatgagaatttatatttcaaaatgccaaatacaattatgtccttgaagtaactaaaaaagaaggactataaaagtcaaaaacaaaagcaggaggcaattaaatttaaagctcttatttagagtgatgaaaatttatattttaaaataccaaatacagttatgtccttataaagtaactaaaacaagaggctataaaagtaaaaaaaagacaggaggcgattaagcctcttattatatataagataagataagaaaatagttaagcagataacttatatataggactatcattacac

SEQ ID NO: 217368 - DNA, 982 bp, Cannabis indica
tattccacattgtttttttctttttctttccttcatgatatactaatgaacataaagacaatatttcctagtgaaatataactatacctcaaacttaaactaatattccatattttttaatttccgtctttcgttcattatataccatagcacattaaaataatatactacaatcttaaactaatatactacctttcagttatttcaaaatatatatatactacctttcaggtttttttttaatatattattgcacataaaaacgatatactattgtgcaaaataactataccaaacacttaattattcaaggttataattgtaattttatcatcaaatttttaactaaaaggacattttgttaatttttttaaaaaagggacatttattaacttaattgttagatttagggccattttgcatcttggccctaaaatattatattttataagtataaataaatatcggtcacaatcacttataatttataatttaatataataattttttttatgtattatcattaattgctacttattacatttaatatcaatgctctatctagtttcggtcttaagtataggtgggttaggcttgtgtttaaggctcacctaactaattttaaggcccaaaaaagtatgtttttttttgggaaatttacatttacaaacgtaaattgtattttattattaataataacgtagcaatctcattcaatacattttgtaccgtaattaatattattgtgccgttttttaattgataaactgacaactactttttttgtcttttgtcttttcttttttatatgaaggtagattttataattatataaaaaaaattaaaataaaaaaaatatatatatatatatgtatatttttctcttatttccaactttaaaataaaattttaaccacattgctagttgtttggcctcaaaaataatatcattgcgacttacttttcaatgtgatcatttcaa

SEQ ID NO: 217369 - DNA, 798 bp, Cannabis indica
tatttatttgcaactgggagttagacttaggtaattataaataaacggtaaaacaactagaaaaataacttcataacaactataatacaactgtcaaaaaaaaaaaaaacaactataatacaactataaataaactaaaaaacgatttataatatttactgaaaaaatatctttgtaaataaaaaagttcaattaataaaaataatttttttttcgtgttaaagtatttttataatttttaaaatttttttattctatttagtaaatttttcattaatattttcagtagtgatgactttttgtttttcttcattttcgattcgaggcagagaataaccactttgcttctttcattaaacttggaataaccacacgctcaaaaaagaaaataattcttttctttttggttaaattatgggaacaaatatttctgaagaaaagaatgatcgatttaaccaatatatatatattaactcaattgatgataataatacttttttgaataaattaatttactatatataagcaatcattgttcccatatattaggaaacccaaacaaaaacacacaaaaataagaagaagagaaaattgagagagttattatgcctcgttattttaaacaccacactcatccccatcgtttgagacaaactcatgatataggaagagtgtacataagagctcaactctgcagcctatgtgagcttataatcgacaacaatcaaatatgctatgattgcagcaagcatacgtgtgcttattctctccatagagcatgtgctgagttgccacaat

SEQ ID NO: 217370 - DNA, 673 bp, Cannabis indica
atttgagaatatatacatatatttaggggtaattagattctaaaaaaaagggtaattaatccactaaatttctgtgtatccatattttttaaagggaaattttatttacacctcaaaaatttataaagacatcccattttaataatttttattttatgtaaaatttatatctttaattgtactaatttttttcaatttttttctttcaattcacattcttcaaaattgtactaattttttttcaatttttttctttcaattcacattcttaaaaaattgtacttatcaaataaaaatataaattatattttaaatattatgacaaaaaaaataaataaaaaaattatataaaaattttcttaaaaaaataaaaaaaaaatatacatgaattacaaaaaaataatgaaaaataaaaattaaaaataaagtattgaaaattaaacataaaataaatgtgaggaaaaaaattttaaaaaaaatattaaagagtaattttaaaaatatttaagtttatatttttttaataataggtgtatttataattttatagagtgcaaataaaactaccctttcttaaaatataggtcaacttttctatgtttcccaaaaatgatctccttatttttgttttagagagtgatatgaatcacattatgacgaacgttcagtcaac

SEQ ID NO: 217371 - DNA, 553 bp, Cannabis indica
tggagtcacaagcgactagaccctgccctttgttggtctggtcaaccatggaagcatcacgggcagccagaccctgccctttgtaggtttggtcggccattgaggagcattgggcagccaaaccctgcccaatgcaggtctggctggccaaacacaatagccaggtgtaggtctggctggccaaggctaggtcctgtacctgggaatggccgaccagggtctgtagttcaacacgggactggctgatcttcactctcccaaggtatggccagccaggccttacctctttagaatctgcagcctccccaagaagggtcagtaaactaagtccccaaagcaacaaatcctttgtgcaagcacagttggactaactcaaggacatgatcacaggcatagctggcccgaagcccacaaaccttgaacttgattagtcgtggggatcaccattctcggcatacataaatgccttgcccttaccaaagttcgaaataccggtatggatgatgtataccaatcgagaggacccactggctcacatcaagtatttcaagat

SEQ ID NO: 217372 - DNA, 826 bp, Cannabis indica
aaatttaatccaacaccctgtcccttcatcatcctcatctttctttttcttcccatttgattttcccacactccacggaccaacttgaatagcatcaggacctaatcccatcttcttaaaatcctcaaacataacaacccatcactgataaatatacatatatactattttactaaaacaaaaacactgtcatccccatttacaacaaagaaattctcaagtatactaaaagcaaagctcatcaaacagtattataagtttttttttaaaaaaaaaaacttacccaaatgcaaaaatcaaaaagaatcgtccaaatagtcaaaattctaccaaacccgccagaccctttcaaaaactgagagagctcaactcaaaacaaaattataaaataacccaaaatactcatcaaacccatgtgaaagaacagatttttaaaaggtttgaaacgttcaaaaggacaggattagattacaaacaaaacatgcaacataaaaaaaggaaaatagaacaaaaccatcaacaaccccactaaagtaatctgcagttatcacagaaagaacactcaaagttttgatctttaatccctaaactaaaaataaaaagaccccatttaagaaaaccagagactgagcattttgaagagagaaaatgtatcattgataatgaattgtgagctctcttatatagtaccaaaaaagacactcactcatcactcactaaaacacacatttgagaaaaagacagaacgagttaaaccgaaccaaagaaaaaaaaaataacgggcaatgtggttcggacagaacgctgaagaaagaagaaagaagaa

SEQ ID NO: 217373 - DNA, 601 bp, Cannabis indica
ataattttaaataaaacaattccacttgtgagctcagttattgaaacaagcagcttggttaaagttcaagccatccgcaatcatcttccaatattttttactttcggtttgatcattcatgattaccaaaaattatttttttccttaaataatgtctgtctattttttgttaaacgtatctacaaatcgagtaacatattatttggctagaagctctcgattcttttctgatcatagtatttattagaatgtaaaaatatgattttattatgtaataatcgagtatatatatacaagttgagtaaccaaagtatgttactccctgaataacagattgggtcttctctctataactaactcctaaccaacataactaactatgttaaacaatggcttctaaaacgcccccttaagatgagttgtagagattgattatactcatcttagacaaaagaaagttgtgttgagttaaaaaatagtgctttggtcatgatatctgcaatgttgtgccgagaagggacatgtatgagcttaattcaatttctaatgcttaagtctcgaaccacatggcagtcaatagctatgagcttggtgcgctcat

SEQ ID NO: 217374 - DNA, 841 bp, Cannabis indica
aggaatcactcatcacatagagaaaactgagactaaataattaaccttataaaattgtgaaatgtcgtgaaaaactagctcgattaagggcatatagtaggtgacatcacaccataatacatgtcactctttttcttttctttttctttttgaaacagtaataatacatgccagtactcttcagtcttataaaattcaagacaaacatctcaccgatttcatcgaaatttccctttcgctgtgttattggcacaagtcgaagcattttcaagtagaaccattggtttcaacggaaagccatgtatttaaatatgaagagtaagtcttgtcttgtcttgtcttccatgtgctttaaattttccaatcataaagtagggtgactcacaactaccccaactaaaaaggtgactttgtacacaaaatttatacccagccaattatatttgcttagagcatctcagacattaaactttgttacatttatcacaaaatttagttttaaaaaatatttttactttaattatgataccaaaattcatctaaaaaaaatttttttttattattttattaatttttaaataatagtggtataaatatttaaaattttaagtttgtaagtggtataaacttaaataatttttttaagttggcataagtacttaatgtttgtaaaactgtaatttttgctctactttcgtctagtacaggtctccgtttagacttaaccgatactacatatttatgtctagattaaataatttagaatttaggtcttatatatgccctatttaagataataatagagtctgtctgataaaaactgaaaaaaaaaattaacaag

SEQ ID NO: 217375 - DNA, 531 bp, Cannabis indica
tttttagtaattacactcaatttgtcatgagatttggagaatgtaattacaacctctcaattaactcaaattatacagttatagtgtaattgcatgttacacaaatattataaattgtgtaattacctctatttacacacaaatctaattatatcgtgatttggaagcatccctaagagtgtgttttgaagtaattttataattacacagactaatactaatactgtagtttaaaatacaaggtgtatttagatataaagtggtaattagtgattacatatgaatttttaacatttttttttacaaaataattagtaattacacgggaaaataatattttttattagttaatgtttacaattaaaagtttttagtaattatactcaattttgtagggagccaagagaattggacactgtaattagattcccctcaattactctcaatttacactcatatccaattacatcatgaatttccaaacacgtactaattgtgctcgaatatattaagggtaaaataaaagggaaa

SEQ ID NO: 217376 - DNA, 528 bp, Cannabis indica
aactggtgagttgagactcgtacaacctggggcagcaggttgtgtaatgtgatttaagttgctgggtgcaacatttttatttgcaccagattgtggtgctggtgcagcaagcggatgtgcaccagaaggttgttgtgcatcaggtggggttccggagggcaccattttgtgggaaaaagcaccagtatgtgtctccaaatcgactggtttatgtgtgccagcatgctgattggcagcagtggatttaaatgcatcaactggtttgttggcaccaaatgatggtgcggttatgggcacaggttgagatgtgttaacagcctgttgtattgatttatttgtaggaagtatagtgtcagggaagagtgtgttgatttcacaagaagaggttgtagaggagagaggaaaaattgtttcataaaaaacgacatcccgtgatatgtaaatttgttttgtttcaatgtcaagaagtatataggctttcatgccttggggatatccaaggaatacggaagctcgacttcttgaggt

SEQ ID NO: 217377 - DNA, 622 bp, Cannabis indica
accttacctttcactttcccttagtccttgataatcataggttccaagattataaggatcaccttttcccagtagtgttactttttggagccgtatgagtggttttgcgtgcagtggtaagtgattcgttacggtctctattctctgccattttcttgtgccttaacaaagaaaattgctcttgtaatgataatttgtctttgactattttcagcttcctggccatggtaaccataggatctgactcaattgccctcctttttcagcatcacagttagcgtgcatgtcttggttaccatccttgggcatgttttgatgatcatctccaagatcatcataatcattctctcctgattcatcatctttagccataagaacttcaaggataggtgtcttgttggtatgatccttcttgtggcaactagtcgcctcagttagatcttttgcatctttcatcttagcattgggatcaacatcaccctttttagggtaagtatagtgaagaccataatagatttaggtgagtaccataattactaaatgtaatctaggatggtatcactgctttcttcagtgaatgtactaaaatacttaccgaaatttttggaaaacgaattattta

SEQ ID NO: 217378 - DNA, 921 bp, Cannabis indica
ataagcacgaccaagacacaaatactttgattcataaattgacttgtcatgactctctagggtttgacctagttggctctatagtagaaaattagcaaaaatagaaaagaaagaaagaaagaagaaaaaatgcagcaatttcgctttaacaaaaaattatcagaaaaagaaaagtcttcaacaaaacaaactcccttgccttgcttacctccgaatttaataatattaatatatcataatactctattgtataacatcaacttgttgagactctctttacctaatttttaaaaaacttacattttaatttggccatttgatgtttattttaggagaactataattaataattattcctacaatatattttataaatgagaaaataaatttatttataaattacagtctatatttttatattagattttgattgtatacacttctttattaaatgctaatttttgaaatgataaaacatattaataaattcaataattaattataaaaaaatatgaatatctaaaattataaaaagtacaataaacaactttacaattatactattgttagactatatatatagtgtatgtaatatagcatatacaaatgatatgaaatgcggaaaataaactgtaatcatatcaataatatatgcaatgaaaggatcgatgtacctccagccattgatctttgagcttcaatccctgcgatagcttcggtattggagttcgggcttcctcgctctctcaactctctttagatggaatttgctgaatgaattcagaatgagtgaggagctcggggaccgagaccctatatttataggtgagatactccatcagtatctgcgccacattaattgtcagaatattttgacaattaattcaggaaatcaaatcaggtaatgaatatagaaatctg

SEQ ID NO: 217379 - DNA, 659 bp, Cannabis indica
ttgacgaggtcaccaataattcaacctaagattatagtatacattggtgatcgtgggccataaccagaaaagaagtcaacaatcgacaacttagagtaattctaattaaataataactacattttaatatttaaaaatattaagtttaaaattattttaatattttttatttttattttatatttaattatattaattttaatacttattttatttttttaaattatatattttattatttgctctaataaaatttcacataatttttaattttaatttttttataatatttaaaatataatttattttttaataagtatatttttaagaatataaattaaaagaaaaaattacgataattaaaaatatatattttatataaaataaaaattaataaaataaactacatttataaaattttaagatacaaataaaatttttcggaatttatatatgattgtgacttttaagtccgttgattttatttaggtttaattagttttaggattaagtcaagggagattttttttttttgtaagggggaatgatataatgatacaaattaatactattttataatagtataaaattttaaagtaaaaaagcaacaacaaaaagattgattttaatggttatagtactaaatataaattggggag

SEQ ID NO: 217380 - DNA, 1007 bp, Cannabis indica
agtttgttatttgttagttggtttcgatttgattcagattgtttataaaagcactcatgtactctgtttcgaatccaatgaataatacacagagtttttctttcttctctttcattattctgctaatatggtatcagagctagactttttgtaatatccattctcgtttcctttcttttcatcttcttcatggctcgaggtggaggagctcaaactcgaagctccactgaaaattcgaatcgatactctactttggatcctggtggctaatccttttccgatgatgctagaaatctatactttctgtcgaacagtgaccatcctggagctagtctggttcctaagatccttactggatgtgagaattatagttcgtggcgtagagccatgactgttgctttaattgcgaggaacaagctgaagttcgttaatggcaaacttccagaactcgatgaggacgatgatgactttgagctatggcatcgatgtaatagtacagtgatatcttggattctccatgtcgtgtcgaatgaaatagctaagagtattatgtatatggagatgccacaacgatatggacgaatcttgaagaacgattcaatcaaaagaatgctctcatgtttttaaagcaatctctggctcaaggaaccagtagtgtcacaaattacttcactcgtctcaaaactctatgggatctcattcaagaatatcaatgtcagccagcttgcacttgtggagctatgaaactattcaagattattaggaggaggatcgtgttcttgaatttttagttgaattgaatgagtcatataatacagcttgatctcagatcttaatgcaggatccgcttccaaatatcaatagagcttatgcttctattatttaggaggaaagatagagatctctgactaacatctcacaatctctgtcttttccttctgatgctgacaaatccacagccgattctaattctgtccagtttggtggtagtgtccagccttttaaac

SEQ ID NO: 217381 - DNA, 703 bp, Cannabis indica
aaattgggtgggacattggtctactttagttcttaattgacaacacaaagccacattttaatgcataataatatacattacgattgtatataatgtatctatcgaatttatgtttgtttgttaagacatcacttattctatgggtatccaatacatttcaaactctaatgagtttacgactatattggaattggcccatatttggtgttgataaattgtttcataaaaaactatataaaattatgtcaaaagagtaaaccgtaactttgaacattgcaatatttgttgagccattacaaacctttatgtgcttggattttattactattcatattactcgagtacttgctaatcaaaatagatacttgcatttatatgttgttaccaaatttctccaaaaatacttattaaaaacaatttaaacgtcaaataattataacaaagtttcattaaaaaaattgttatgtttctatatttactacatttaaacataaatattttcgtatattaaaaatttaaagctatttaaaatataaatgttgaggactttggtaaattagacacttacactatatttggtaggaataagacataggtggatggagagaaatggagggagaataatggtgaaatgagtggttgaatcacttgtttagcaaaagatagctagagagagaatgagaggagaaaaaaacaaaataaa

SEQ ID NO: 217382 - DNA, 515 bp, Cannabis indica
acaggaagcatggtgaatggtgatcaggatggtgtgcaagagactgggaataacagttctgcacacagctagggcatttataacacgactattccaccaggaaccaacgcccaaacgaccatcagagatgcaaccgaattgcaaaatctccgtgctgcgctcagactcatgcagggtcatagcaacactctgcatcatgatcaggatgaactgcgtgccgtagtaaatctcgcatttgacgaatagaggcgtatgttcgctgaatggagagacaaagagatggaggcattaagggctcaccctacagagatcaaagatcgtagtcgacaagctaccgtgctgatacgaagagcctaccagactgtaggccagcaaacgccgaacgtcattcccctgggagaaacagaggatgacctgacgatgaatgcctcccagacaccaatggtcagccgtccaatccccagtcacgagatccaatcgtggggcaagagctaggcgggcagaccttgtccggg

SEQ ID NO: 217383 - DNA, 944 bp, Cannabis indica
aaacaaataatgacacaaaatatagtgatttagttagattttggtctgttttagtctactgttacaaataatttctgcttagtttatttgatttggatcactcctttatatagaaagcaaagtgtccttttaattttacatgactgatctattttaaactgtttttacaataaatgatagtattaaatcagaataaacgtaaaatagtaaataaagaataatttaattcgttcttgtattaagtctagcaacgtatgtgacttatcgagagctagttgcatgtttatattctcgcataagctcgcaggctttaggtgcattctatattcgctaaacggctaatgggcctatcgcttggatatctgcgttcaccttgaaccgcattgatggacatcttgtgtgttgacaacatgggacatgcgagtctctgtcgagtcattgaacacgatttgttattcggacaaattttttatgtaaagaagcgatctttactaatcgtaggagaaaattacttatcacatatatttcgatatatgcacgacttgtataaaattctctcgatcctgcttatcttatattcttacactatgcaaggtaccatatgtgactagaccttgtcaaggttgcatcatctcgcgagttgatcatatcaagtgaggctaactcttcgagagtcattaattaacagatcatccttttcctcagaaattagatccacttgtcaattttaaaagactactctcaaattattaaaacgaaaattagcactataacaaacttaaaactatatgtatatataattaactttaagaattattattgttcttaaggatacactaatacccactataaattaaaccgaggcgcgttctatataataacacacgcaccaagtttatatcgatcaacactatactattgcaatttgcaaagaaatatatata

SEQ ID NO: 217384 - DNA, 776 bp, Cannabis indica
tgtgaaattcctctctatatgttatttttgatctttattaataagtaaatctgattatattgaaatgggttttatttatggcacaaaacccaacaggatgaccaccatttaaagtacaatttctaatttctgcaatttattttatttcatgttatgctaaaagatcagattagatcaaatagccctgatgtaagttactacggtaacaaacacatttttgatcaataaatgaataaagatgtttatttcaaaattcaaattgagttaaaattactaacatgttgctaatttaccatccagtgcgtacaaaaggtctggtcgaacccaaaactctgaacagataaaaaagcatacttgtaaaaaacaattgaccaagagtcataagtctgctcagtcacttggggggcacctatacctgtacaaatcatttggtaaggataaaacaaacacaattgcacgatgattataaatagagaatgaaattcattaaagataacaaaagcacgtaatgaaaaatgaaaaataattcaaagtttgaagaccgcttggccggtcatgatgtcttaaaaaaaaggccttatggccgaataagatatataaaagaaggataagagagtagttaacagctggattcccaggctatcggttcagatcttctgggcttgaaggagttgaggatctattgtttgaatgagaggtacattaacattttggtcagaggaagaaagcagtcgcatcggggctcacccataaagcacttgagaagcacagtactc

SEQ ID NO: 217385 - DNA, 529 bp, Cannabis indica
atttaatatgttgtctaataaaatattgatatgtgtttttaagttgacatttaaggactacaaaacgatacaactgtaacaaaattataagagaatgtacttttgccgtcactttttttttattatgatcttatgtgtaacaattataaatattatagaagttttgtcacaaatatccttataatttattaattttactaggtacactaatttctagcttagagtatcaccaattatattttctaaacatatttcttagctaaaatacggagtgaggtttaaaaaatgaacttcaatcatacaaaaaatatttctattttttgctaatttttttaatagtatttaatcaaatactattatttttggtaaataccattttggaccttctgtttactaaagttaccaattggaccatgtatttctaaatagtacaataggacctcaattgatttttgtcaaataaagttaattataatccgatctaaagtgctatatgacaaaattgtttacatttttgtatctgttcgta

SEQ ID NO: 217386 - DNA, 753 bp, Cannabis indica
attgattaatattagtttcaattggagtattgtttattatattcacttatgtagtatttattttttagttgtaattttttctttatttttaaattttataactttactttacagcccataatatggttaagtaaattacgccaataatataattagcaaggttgacccgtcaatcatcccgacgaatatataattataatgacagtaaaatctaaatttctataaacagtttttattaaaagaaaaaatatattagcttattaatactcgcatacaagtacattgacttatttattttatttttattctcttgacattgattcattatcttaattgatttttcaaattttgccaagatagatgtctgaattttttatttattttttaaaatgtttacttcatctccaacacccataattaattttacattacataatgctctatccttaaatactacaattaatgtataatatatgatattttatttatcttattaaaaaaattatttagagtcatgaataatacactccaaactaagaaatgcattgtagataactctattagttataaagtctcctttatttttatctttataaatagcctttttagactttagtatttgtatctctcattggatatgaccttaaatctcaattagagacatttacctaaaatgatcattttcactaagatgtttacttaaaatgatacacatggattattaaattcctaatatactattttgcctctaat

SEQ ID NO: 217387 - DNA, 669 bp, Cannabis indica
ataaagataagttggctgaatttcatgtctcattggctatattaaaaaaactcttaggtacaactacattttcttaaagataaagttgaagcatgtacaatatcatatttgaggaaaaagaaagaattatagaagaaatggaaagaggaacacaccttgatggatgatcattcataataatgactatatactacgtaaataattatatcaaatttaaggaattttaaagtgtttatatatatatatatatatttatatctatatatatatatatatgcatgcttctgaatgctccttgctcataattatcataaaagggagtttagtttgactttaactataatattcccaatatatatttcacttctagttagttactactaattaatcattcttgttcttatatatatttatataatattgagagagatttttggtagggagtttatttgttgccctaattgtaaaggcatttatatttatttatatatatatatatatacttagagaaattacatcctatatttttttatggaacattccaattttttttttatatataacatataattataatagatattttttttttatgaatgaggaattgtattagtcacaagaacaattgattacacccaaataagcactcaataagagcctataataaag

SEQ ID NO: 217388 - DNA, 831 bp, Cannabis indica
agggtttttagggagggagaaggatttgctgaaaaaatgagagggatatattataagtaatatatataaaaaaagataataataataaagggtatacctgacgattttaaatcgtcgggtataggggttaatttttttttaaaaaataaatcctgttttaataaaatcgtcgcctagtttttaagctattgttaaaaaactgtgagaaatactcatttttcccgacagtcttaaactgttgtttaatatttttagcaacggtacctaaaaaaaaaatcgttctcaagaccgtcgcgaatttgattatttgtagtagtgtcaacacatataaaatcatgttcaataaacaagttgagtccctacctccttaggatcgtcaagctttctccaaaaggcacgttcctaagccccccgattcttaagttcaaatagcttagacactccaaatgtcacttagtcctacattgtccaataaaataaataattatcatcattataatgtactcttcaaaccgattcccacgacatataacatgaccatatctgaaatttgaagttccaaaacctcacctaagcggtgcacattagctatcggtggcaatagagattggtgtaccagaaatattatcaaaaaatagaagtagtatatatcaaaacaattgtcttgatgcgtagatcacaaatgtacaacccgttagtcgaaacaaacaccaaaagcactgaaaattacttcaaaagggttggtagataccaaaatctcattgggtcaaaagtaatgagttgagtgagatgatttaaattggggggtcttcccctcgcgatgctgatttc

SEQ ID NO: 217389 - DNA, 652 bp, Cannabis indica
atctagacaagattaatttgcatgaatatatgtaattatatttaataatgtatgtgtttatgtatcttaataattaattagctggctttagatttatattattacatatatatataaaattttcaatagacgacatggacatgtcatccattttgtttttttttttttagtttttttttaaaaaaaattatataaaaatcttgccaattaaattgaattggatggtacaaattagtttagataattggatacgaataatgaagaatgggatgcatatgctttgggatgaataaaatataaattattaaaaagttttgttaaactataaacgaattagccatatggaaaacattctatacttagttacacctttgacatttccaccatcatcatcattactttgagttgggaaaggtaagaaaagatcttgtttccttaaaaaagcaataaagaaaatctaaggtttgtttggtgctggtatcagtatcatgtattatattaaatcagtaaattattatgttttggtcattaggtgtatggattacatagaaaactagatgtataaacccaaattgtaatatttatgagcctaggttgtattatggtaaagtttgaggttaaggtctaaggttgggactaggggccagagcct

SEQ ID NO: 217390 - DNA, 618 bp, Cannabis indica
aattaatgaataatttttcgaatgacttcataaaaatcttgttgaaagatatgataaatctttagtttggtaatatgttattttaatgattgttatcgttattgttatatcgaaatcaaaatagttaatgtaaatgtataaaaaaaaatatatatatgtacgaatgtttgaaccttatttttcgacacagtatattattttaagttttttgaaaaaaataaataatatgtataattatataaaaaaaaattgagttatcatttttttaagagcactgaaaataaagatatcctaaagtagtattcataattagagaatttttttcatttataattagttaaaaatttcatgtaaataaaatattataaattatataagttattgttaatatataaatatgtatgatgatatataggccaatgtttagattgaaaactacaatacttaggacttgttaacaagataatgattaagaaaaaatggtgcaatgattgatacatcatacatatatatatgaattaattatatatatacacgaaaatagttgtgacaataaatgttagacaaattgaattagcaaacaagtcactatcccccaactcatatatatatatatat

SEQ ID NO: 217391 - DNA, 1333 bp, Cannabis indica
cactttttatatatatttaatctagtactaaattagtgaaaagcaatttaatctaatttttatttttttccataaagaaatttcttatatagactataacaatgtaatttatgtaatatagacaaacttttataacagtatttttttgtgaaatgtttttaaatacaaatttatagttatttttagtatatatagataagttatagtatatacactacataatttatgcagttgtaggtgatttaccataattttgttattttttttaaaaaataaaattaataatttaagataatgttaaaatcttcatttaatcttattgcacgctcatttaaatatctaaaaagcatttgttcaacaagttattatttcaatattgatcacgatgtattatatttttttttaataaagaaattgtgaaaaatctcttaatacaattatattacacagtattattatttattttataagagtataaaacaattaaaacagctaatttgattcctactatatatacaatagtttatatagaattttatgaaattttacaaaaatcatgttataaataatactgtaaattttatatgagaaattgaaaaagaaaataataacaattatgtaacaacttgtaacaattttttatttgttctaaaaatattgtttacaaaattgtgacatacggttaagagcttgaaatttagttatacatgaatttcatttattacaaatttataaattttgttcacacaaaaaataaactttgtatttacgactatgccccctcaatgtttttgtactatccatatcctttatatatattttagtcaatttttttctctttccaaaatcttagacttttttttttcaaaattatacatagtacacttctttcatggtacaccataaaaataccctagatatatttatatacattaataaatgaaattgagtggggcaataatattaaacttaagggcactagctaagtcctccattatgcatgattgagctttatatatatggtgggcgattttcacttaaaaatgggcaatagatttcttgggctccatttcccactctactctctactctctacaacattattatatcaagttgaaagagatagataatgagttgtgaaatgaccaaactacccctatcaaaaataatttgtaattaaccctaacccattacaataatttgggaatctaatgtattgattcatcaaaagtagtatagctcctcatcctttatgggaagctctttgttgttaagttgtccaaacttttttcttttttttcttcttctaaagatttttgtagattggatagat

SEQ ID NO: 217392 - DNA, 632 bp, Cannabis indica
gaactctgaatgagcagtctagtcagatactccattataagcacaaagaggaggggagacatcggatccccttggcgaagacctttttcacccttgaaagagccttgaatcctctcattaataagaaggacataagaggcaccttggaggcagcttaagatccatgtaatgaacttagaaggaaagtagaggccttttaagagatccgttacaaagcaccagtcaaccgtgtcataggccttactcaaatcaattttcataagacatctcgaggaaatgttcttactagtgtagcctttaaggagatcctgcaagatcaaaacattgtgagctaaaagtctcttttgaacgaaagccccttggttctcatgaataagccaaggaagaacttccgcaagtctagtacagatcatctttgaaatacatttgtaggtcgtggtacaacaggcaattggtctgtagtcactagctccttggggattgtcaatcttggggataagggatatggatgttttcattaacttcctgagggagctggctttgattgaaagaaacccaaaacagccttggagaaatcctcaccaatgtcattccaactattcttgaaaaattcagcaccaaacccattagga

SEQ ID NO: 217393 - DNA, 570 bp, Cannabis indica
tatttctaaatattttatactattaagttgtgtcttatactacatgacttgttaataatatctcataaaatataacttttacggtaatatagtcatttcatcacattttattcaattttattgtgaaatgagtgaagtagatgataattgataaatagatgcaaattaaatacctttcacattttacattatatcttaaattaggttctttattttttctatatatcatttaaaatattatatttttcaatatattttattataaaaaccaaaaaaatttgagaaattaaatgaaaaagaatcataaaagagagaaaaattattaaaataatatttgaagaatgcagagtgacaatattcatgagttgaaattttgtgttatttatgaaacccctttttaacatcatttctttatatatatatatatatatatactaggtgaaagttacgtgcctagccacgtattgttagttttacttgaagtttggtctttttttttttttaagattttggtatatatcttttgtttaaggattacatcatttttttcgaaaaaaggaaattacattc

SEQ ID NO: 217394 - DNA, 549 bp, Cannabis indica
taaatataatatatagtatatagtataaatttatagtatatttgctctaattaaaatactaaaattatatttataaataacttcgtctataaaatcccaccaaatttagtgaggtaggtagaccacaatatttttttaaaaaaaaaattgataattaaatattacttttaagagaaaaaactaaataattatatatatttagtattaaaatatttttattatattaataaaataatagaataataaataatataaaatttggtataatttttagtgttgtgattgaaaattaaaaaaaaaaaaataagtgtgaaatagaaattttttggtgttgatttaacactaaatttaagttttaccattgaagatggcctaatagattgtatgagcttttttatttctacactttaaaacttagttttttttttttttttttgtttatttttacggaattctacatagaaactcctattgtaactaacgttgcaacctaaattgcaaacaaaaaaatcgtaataaaaaactcttattgcaattagtactgtagtc

SEQ ID NO: 217395 - DNA, 621 bp, Cannabis indica
aatatattttaaaatatttattatttagctattatagtttcccccctccctaatttttatttctggctttgcccctgcatgtgtcctatatcttttttttgtctttcccgccttcccaaataatactataaataccattataatttgtacaactttctttaaggaataaaaaataacattcaccctatccttcttttattagggtttatgtaatatgttttcttttccttttttcttatttcaatttggagttatgatatagtataagtaacgcatcaagtgggtgaaaatatgtttatccaatcgcgtctccgcaaagtttttttttattaaataataataataataataataataataataataataataataataataaaattatagaattatttttagtgaccctttatattttttgtgtcccaaatcgaaggacactaacactgaattttatagtcattttgtgcgggtcactaaaactcacttctaaccttttagttacatgcgcttttgtatgggtcactatagagtgtcactaaatggtaagtttgtagtagtgcggaaaactccgatccagaggcgaagggagggaagcatgtggggtcattcccccccccc

SEQ ID NO: 217396 - DNA, 617 bp, Cannabis indica
aaaccccagtgttctgataaatctaggaatctttattcacatagtcatgtttactttccactgtgttgacaacacaataaacaggatcaagtatgtgaaaagggtttggatgaatttataaatcaaatagacaagcaattgataagatgaaccaaaacatacaaatgaatgaaaaatacttctgtttctttattgatattgaataaaatggattacattgaaatggagttttatttagggcataaaacccaacaaggtggtccacgttttgtgaattacacagaattgacggttcctcgggaccatatctatgcaattgaagaaaagaacggagtcttcaaaaaagcgtcccctaatcaggggaaaccgcgacaagagacacccgaaaaaaaattctgtaagtaccacaaggatattggtcacactactctggaatgttggtttttgcaggatgaaatagaagaattaatcaggcgagggaaattcaacaaatataagaagaacaaggagagtcatccccaagcggatgacaaagaagaaaataacaatgcgaagtggttcgagaactcctctcaatatattgaccatcatcgacggacctcacatcgcaggagatt

SEQ ID NO: 217397 - DNA, 659 bp, Cannabis indica
cgcaatccttggccgaccgacctagttggattttggaacaattacatcaattcgacacttatgcctgaaattccttactgaggaggccggagtgggcacagtaaggggcaaccagggagaggtcagacattgttataatgtcgcaacccacttgccggtgctgatggtccgtgagaatattgagccaaagttggcagaagaagatgagttggatccctgtgtgggatccgaaaaaatagtagaacctatggaggatgtcgaggaagtgcaagtatgaaacctcgaccctaccaagatcctctgcttgggaaagagcctagagccggaggagggagagaaaatcattgaagcattaagggcggccatagatgtttttgcgtggtgccaaggaggcatgaccagcagaagttcgcatgtgattacctacattctgaacgtcaatcaagatatgccaccagtacagtagaagcggcgtcccattgacccaataaaggcggatgccatagaaaaagaagtggataagctgctagccaacaacttaatccgagaggtgtatttaccgggaatggctggccaatccagaactagggcgaaaaaaaaaaaggggacatggacgggtatgtatagacctcaccgatctgaacaaggcctgcctaaaa

SEQ ID NO: 217398 - DNA, 685 bp, Cannabis indica
caaccttaaacatttaaatatctatagttactaatctctgtgtattttgctagtccctgtgtacattcccatggttttcccaaaagtcttggggattttctttatattacaaaaacaaattccaaccgaaatcaaaagccaacggggctttaattttggcagcaaaacaactaaaaataactgaaattatttattgacattatttagcttaacaagaaatgccaatgctagtggaaagaagacttacatacagcagtaaagtaacttttctgctagagccatggtaaaaaccatttctgaaagatgcttctcagcaacctgcatttattgaaaaaagaaaagaaaaatgaaaaagatcactaacaaccaacatgattcaactatgtttaattttagggagaatggaactttgcttggttgttcttcatagtagaaaacatatcacaagatttgtgtatcacttttcgtaaatagaaaaaaaggcctagtgctgaaacctaggtaaaattttaaaaggcactgacaaacctgaatattcagacaaacaagctttggagtgtccatgaaaaacacacacgttcgataatcttctgttttggatctatagctactttgtctacttaaggaaccttcaaccatgttcttctcatcctcatatgaactcccaaagagctgtcaattatac

SEQ ID NO: 217399 - DNA, 588 bp, Cannabis indica
aaatgtgtgtataataataaattggcaagtcattttcttccacctattcattgtcccctttgtcatatttagccacgttaagatgaaaatacttgtcgatcttcctaattcatgatttgtgatcatgatatcatatctatattaagtcgcactaaatagtccaacaaaaatgagatgcctttgatataattttttttggacgtgagatgcctatgatattggtatatatacgcgtgtaaaattataaaaaatacacttgctttaatttaaacaaaaaaaaaaattaatttcacgataatatataatttaactgtaaaacaatctcataataaataaaaaaaaacaatttattattttaataaatttttttcaaatttaaaaacttctgtaagtaagaatagaataaatggaattaaattaaaatttaaaataaataaaaaaattagataaaaaaattattaatttttctcatcttaacatgcattgatttgaaaattagtttttttttttttttaaaaaaaaaactaaataaataaaatagaataatcattctaccaaaacaatagaataatcattttatttcaatat

SEQ ID NO: 217400 - DNA, 613 bp, Cannabis indica
gttaataactacaagaatatattttggaattaatcatacgtaccttataagattattgaggatgggatgatcacaaatatgagagcaaaactaatataattaatgatgatagagtagaaaaaagagcgtctgccgtttatttgctctgaggcagttattttccttttatggttttttcaatcttttactgactttctgccgaccatctcaacccataattctgctcttcacccctgttttgtcatctctgatcattctcatggatcccttaactcataaaatgaaaggtattatcaatttagaggaagatgaggagtcgatacttgcttttgatgaggaagaggttaccagtttggatgagactaaagatcattgcctccttgctcatgtactcactaagaaaccagtttatttgtcaactctgcaaaaacaaatgaaacgccattgggatggacggttccctgcaaagataactgaaaaagagactgatttgttcatggtttctttcggctgtgaaggagatatggaaaagggtcccttacccgaagagcccgtttggcattttcccaaaaacccaccacattgtacttcaaaaaccttctgctttgcaaaa

SEQ ID NO: 217401 - DNA, 788 bp, Cannabis indica
atctacatgttccttttctatattagttttacaacaaaattagtcatataatctttaattaattttagttaatattttcatgtagttttctttaatcactttaggaaacttaatttagaaaactaatttaagtcattattccaatattttatttaatggaaaatcaaactttacaaattattaacttcagtcaccaagatcggtaacaaatagttggaacaaatttcaaattaaaacgatcagaatacaaaatagaagtactaacaaaattaagagttactatattattagcttatcctttaaataaaaaagataaatttatttttttttcttttttttaaagtagaaaataatgtaatttatagtgcttgactttgtaatatatatctttttgacattacaaagcaagaaaataaggttttaattaattagatgatgatatataaatgctttattattattatattattacatatactttaattaatggtagaaattaatggagtgaaataaaataggtccatcacattaatttttattatataatatataatgaaatttaaagaatatgtttttgtttttccttgtattttgggatttcatcatagtatacatatgtatttcatttaaattttgttgttcagacattataaaatttaacttctattcaagtgctctttaatgctcattttgttagattatttcagctctcaactctaaaaaattcttatgtactaacccataaaaatttgatttttttctttctttctaaacaaatcaaaatttga

SEQ ID NO: 217402 - DNA, 605 bp, Cannabis indica
cccgtccaggtagtatgttctctgttgatcacatattctaattattgactttgctcatcttaatgctcttaattccttgatgtggattagttacataaaatcacttgattgacaaaattaaataaaaaataaacataaaacaaataaaaaaataaagaaatataaattaggccaaattctttgtcttgtcaaggggctttcactaatttattcagacaaaccaaaaaaaaaaaaaagaaaaacaatcatcgtgggacctaggattttggttaagtgtcacacaatgaatattcatttactttttacttgccataacgagttattaatttataccaatagaggaattaaaaactatggaatattcaaggccggggttatgaatttataacaagttatgaattgtttgtgttgaaatgtcaagactggatatttagggttttttttagtgttatgaatttataccatgactattgtcatcctcaaagatagtagcatcacaattaacatttatctcaccaaaacaaggtttagcccattgctcacacccggttgtattcggaccagaaactggcgaaacaactccattttccagttgagcattcttc

SEQ ID NO: 217403 - DNA, 542 bp, Cannabis indica
attagttagatatgagagtgagacactctctccctcgctttaaatttaggggtttttatcttttcttttggctaagactgtccctggctttgccgtgcaacttttttttttattttgataagcaagtaagaatattattgcacaaaaaaactttacaaacaaaaattagtgtaactaattagttacactcaatctctctaactaatcaatatcttctatacttatgttctctcttttaaaattgcgatttattctttatgacattagctttagactgttttcggcggggtctgtctcatggtgttattaagttggcatgagttgtggttattgatcttgtttttgtgagaattgtgtgatttttagttcggtttaattttttgggcttggttcctttacccttagagtgacacaaatttttttttttttacatgattaaatcattaaaggaatttacgaagctgacattcaccattgaaccaggatagcttattatctaatcaaaaaacatgtttaatcaaattcatgaactgcagaagtag

SEQ ID NO: 217404 - DNA, 1250 bp, Cannabis indica
gctaggaattgtcttcaaattggttatactaaaaactatatcaaaaattagagctcaaaattctatttatattattttaaaaaatataatgttgattttatcatttaataaaacaaatggttcaaccgataatttttataaaaacacaagatccaaaatgatagtaatcttcaattttttaattaatgtaactagcataataaagataacaacaaacaataatttcttattttaatttaggaataactatatctaagaaaaaattatataaaaagctttttggttttatatttagacaacaacataatagcttaataaaaaaaatgtagatgttgttgtctaaatataaaaccaaaaagctttttatataattttttcttagatatagctattcctaaattaaaataagaaattattgtttgttgttatctttattatgctagttacattaattaaaaaatggaagatttctatcattttggatcttgtgttttcataaaaattatcgattgaaccatttgttttattaaataataaaataaacattatattttttaaaataatataaatagaactttgagttcaatttttgatatatttttcagtataactaatttaaattttgtcatgaacagataaaaaaaataatcaattttgtcataaagcttctagatcgagttattattaaattttattttgacaaaaaactattttaaggtactatatttattaggtactatttgaaaaataaaaggtctaatttattattgaacaaaataaatgtagttcaatttacaatttttataaatacaagatttaaattaatatttatccaaaaatcaaatcaaactatagattctaaataataatattatagcaagagcacgtgcattcacgtgctaataattcccactagtatatatatataataaacactactacaaaatttactattcacgtctatttttaagtgacacttaaagaatttacgtcagttttctaaaccgacgtatataccgtagtcgcaaatagtttttattagcgtcattttcaaaacgatgcaaaaaacaattttcgacatttataaaccgacgctaaataattacttttctattttattttcagcgtcggttaaaaaatgacgctaaatgtttcatggcattttaaaactgtcacaaaaaacttattccgtcggtttaaaaatgtcatatctattacaaaaatacttttttttttacttattgcgtcac

SEQ ID NO: 217405 - DNA, 861 bp, Cannabis indica
tcacttatgtctaacactctacacacactagtatattctttcaaactatatcatttaaaatctttacttttattttttttttttttgttttttaaattttttattattatcttatatatcaatttctttattttctctacttattcaaatatacttttattattttgaatgttataatattaatttaataaaaataaatttagagtattgaataatattttctttttacacgtgaagagaaatactattcattgcttaaaaaaaaaaataaataacactaataatacttaattaatattacctaaaatatcatatagttattattatcattaagtatcaaccatacacaatctaataataactgttatataaaatatcaatcaataactatttactaaatattgccaatgctctaaaaaaattataaaatatattgatgtatgccatattttaatcattctcttttgtctattagttttcttgtatgtgaaaatagtatataaattaatgatagtggaatgttatccatattaactacttaaaatataattgtttttttagattgttagctatactttactaattaacttctaaagatcagaacacttaagttgagtttttgggtggactatataactttgactaagaaaagttctatttgtggaatattaatatggctacttaaccatgcaattagagttatatgagcatattttatatttataaatagaattgtgttcataaaaaattgatttcaatcattttaattccttacaaaaaatcattttaattaataccaataatattatctagtccaattctaaaatacaattcaatctaattacaccagtctattacacc

SEQ ID NO: 217406 - DNA, 645 bp, Cannabis indica
cacatctattcactcactcactcactcacatcaactctacctatagtcattcttattttttttgttagtacattgcttccttattttttttttcttttttctttttagttaataaattttattatgcattgtaattttgtttgtgtagacgtaaaaaacaagaagcaaacatgatcatatatgtataaatattgtattaaaataattttaattactaaatatttcaattattgatttatagaaagtctcaactatataaatataaatccatatatatttatttaatttcgtgtatatttatttaattctatattttatttattatatttatatgtgtcatctatacatataaaatttctaacatattgcacaaatttaaattagctctattctatactaatatttttctcttttattcacaatattttaaataatattaaatatttgttaatttttaaaagagaattaataagactcacgtttaaaaaagatatatcacatttataaactatcacctatcatgataattaaaaataaaaataaaagaaatatgaccatgattaaaaaaatatcacgattttaaatcctaaattaaactactacactatctccataacaaatattttttgtattttttccaacaaa

SEQ ID NO: 217407 - DNA, 927 bp, Cannabis indica
attgaaaaaagtcctaaaataaataataagaacacgaagcattattattacacgtgttttttcaaaaaataaattattacacatgtgttagcatctcaatgagccaagttacaagtttgattattaattaattattgtatattttaaggtttgagtatttaaaagactgtgcacccacgctacagaggagtgcaacccagtccaacctaagataattaaatttgtttttttattattttaaggcctgagaaagataattatttaaaatttgttggttttgaaaagagacctgaaacaattattaaatacccttttatgctttacgtgacattgtaatctaattcagaaaggcctaaccccaccacctcctccaatcacatccaactatagcttccagtggagcccacgtggctgtcagttattgggtcctaccatttttttaatttttacccaaaaaagcaaatttagttcccatgcataatattcacaggtgtcatatcacaaagttaaaaaaaaaaaaaaaaaaagggaatacttattcatgcatgttggtcgtaaggaatgtttacagttgcacattaaattttattcggcttcttcttttgtgaaaataaaaaaaaaaaattggagaatttttaaatattctattttttttatttgtatgttttatttataattttatggtttaaaatttttaattataaaaataggtttataaaatttgaaaattctaaaaatatattttactcagtagaaaataataaaatgttgatattatgacaattataaataaattataaaataattaaaaataatcataaaaataatattataacaactataaataaacttaaaaataacaacaaaaaaacagtttattatttttagtgaagagacattttgtaaacaaataaaaattcaaagagt

SEQ ID NO: 217408 - DNA, 838 bp, Cannabis indica
ttatatatatatatatatatatatatatatacacacatattattactctttttttagtatgaacaaaaatattttttttttttaaaatgacataattataaaagaaaaattcattaaatttaagagtctaataatcccaaaatcataattaacaactacttttcttttacacaatgacaattaaaaagaatattattggatacttcacactctttcaatgtttgatcgttgttagcttattagattagttgaggttgttgttagcgttttcttcattcattttgtaaatgacttgataaatatattattgtcaattctattctttgagtgatttatcaggatagacttttatttgatttgtggaaattactatttttcttaaaaaaaaaaggacaattaaaaacttatagtattcaattataatagttatagttataatatatattttttttaatttttttagaaaacattaattctcatattattgttaaaatgattttatattgaatggaattttgaacaatcgtttattgcacacttagttgatactagtaaactaatgtacttgtgtggattaatatattattattccaagtttgcaaaaaattaagatgataataaagttgtacaagtttttgtatttaatcaatacatgacttcaatgaggctataagaaggagtcatggtccttaatattaaatttaattttcatatatataatgtatttataaaaaaaaaaaaacaaataaactctattcaagattacatttaggaccaaataaattatattctaaattgagaggttataactaaatagagttatactataaaaaaatac

SEQ ID NO: 217409 - DNA, 1036 bp, Cannabis indica
agattagtaattttgttcaagagaataagttatatgacaaattgattataaaaaaatagaaaagaaatgtaagtaagtttagtggggtttcttgtctattggattgtaaatggttagtttgattaatagaaagattaaattacttcaattaaaaaaaaaaaaataaaaactaactaagccaatttgtttgaatctcttccaataaaagatgttgtacattatttatagaacaagaagaagaaataaataatgtatatttatacatgctattactatatacacatattaataatagtgagtgattgtcatgtgtctatgtattatcatattcaaagtaaattgacatttttgtctctcactttatttggtactaaattcaatttggatttttttttttaaatatcttttacaaaaactctaaaacctttcaaaaaaagattatgaaaatgttattataaattaataacattaaaaaaaaagaatatttgtctaaatcatattattattattataataataactatgctgctggcccttgttaggtagcaataaaagaccaaagtttgtccttattctcaactcctagctttgattttaccaaaccaattaaaagagtcaagagaaaagttaactagaaaataaataaatatttaataaatacccaacaaacacaaaatcacaataatgtcaagaattgttgagattagtttgataaataattgttatatatatatatatcataaagtctttgatttgattcaacaacttcaacaggtagtaacaagtttcttattaattattacttgtgattattgtttaagaacatctcctacatagatacaaatgaaataagtgataagtgatgtaaaagtgaatatggctcatttgtaaaaaaaaatttgctattattaataaatggtatatcaaaaactaatgtaaatttaacaaagtaaataattgtggcacaatgcaattctttttctttttcttttaaggtactatgatgcaaaattcgaaaaaaaaaaatcaattactc

SEQ ID NO: 217410 - DNA, 615 bp, Cannabis indica
attattattatttcagagcaagccaaatagaagtatatagatttttgggaaactttttgaccgactaaaaaaatttcaattgtaaaagttttaggtaaatctactgttcatttttagaagtgtttcagtaaatttttttatctatttggtatactaagaactttttagtcctctttttttttcatgatcatctataattatttaaagtaacttataaatttttaataaaaattaaataatttacaatactaaaaataaaatttacatattattacacggatctattttttgaaatcaaacacagaaccaaccaagtaataatattgactagtacatacgtactaattgttatttggattccatctacattcaaatttatattaatcgcaagttttgaaaaaaatataaattactattcttctaaaaagtttatagttaatgttagtcacaaaaaattacaatttattgtaactaaatgtgtcacaataattgttatcactaaaactaaattatagtaacaacttctatctaaatattatattctagttacaagtaactttttgttatgactaaaagtcatatttagtcacaaaaaatttatgttatatcaaaaag

SEQ ID NO: 217411 - DNA, 574 bp, Cannabis indica
ccgcatttttttgcggtgtggtgcggtgcgggcggtttgagcggtttgatgaacactcctatcaattaggaactccaacaaactcatccaaacctttcctaaatttcactgaccgtttgttgataatcatcccgtttatacagttcgacatgctcctaacaaataataattagtttaaagcttatgatgttttagatcaaattatgaactttttaacttacattttctatttctaattatttattattgtagttaataattagtttaattttttttttcaatttcaaacactaataaatttttttaaaaaaaattaaaagtattcataattgttacttagttattataatagcatacttcttttccaactaattcaaaagtttacaatttttaaacactttgtggttctaataattattaagtagataaaaaattgctatttaaacagttagattagaaaaatgaatgattgtttcattaaatgagatgggcctcacgtgaaaattcggccaatggctttaatttttgggccattatctttttctaattaagcccacataacctaaatccaacc

SEQ ID NO: 217412 - DNA, 733 bp, Cannabis indica
aatgatattaaagctatgaccatgagagtacgcactcttgggatttgaactttcaaccgcttagttattaaactaatcaaattaccactagactacaacacatatttagcattaaacgtattattatttattttgttactaactatattttattttatgtttttttgaaatggggtcctgagcggtgggggcctaaggcgaccgcctccttcgtcttagctcaggccgcccgtggttagcaacttggctgctctctctctgactctctttcatgattgatcgaaccaatttttttttggtattcttgaaaggcctgtaactttcattcgaaattatttatcttatacatgtaatgattaatttttactcggtataatatggttctatgctcagtcatatgcccgctattcctatcctttataattttattaccaccagctcgagttcagcaactagagctagtgtggtgaaaatgtatttgtactaactcatgattttaattgaggataaatctaagaggagtgattaaataaatagcattattatcttttaattatatttgaaactgatcttcatatttaatgttaatcttcattcttttttcttctctttcttttatgaaaattttgaattgacctttcaccgtgcatttcgaaataacacagtaattaaaattaatttttgaatcattttaaattatataattatttattgaactactcaacttaattat

SEQ ID NO: 217413 - DNA, 545 bp, Cannabis indica
ctataatacttgtcatgcagggacggaggtagagagtatatgtgaggagggctagatttcaaaaaaataataataataataataatttgagtgcggggccgttaaataaattttataattgaaaaattgaaaaaaaaaatattttggaggccaaggctatttaataaattttaatgatacatatttcattaattatagctccattcatgttgtaatgagattaatttttttattattttttgttgttttataattgttgtgaatttgatttcttgtcaaatgcttacttttatgagaaaatcatatttttgtaactgaaattttgaaattatatttttgtaatggaaaaactttgtcgtataattgtataatgtataaccaagagcataaattttgtataattgtaattaattaatctttttttaaattaaaatgcaatatttaatgtatttcctacagtactgaatatctttttctcttatttttattattatatatagactgctcgtaatattttattatatattgttaagcatatggttggt

SEQ ID NO: 217414 - DNA, 627 bp, Cannabis indica
gtttttttaacgttttttttaaaaaaatttaccgtttctaaagtggttgcagcgctagttataatagagtttttatacgattttttgttgcaatttaggttacagtgccagttacaataggagtttctatgtagaaattccgtaaaaaataacaaaaaaaaaaaaaaagtttagaaagtgtaaaaaatgaaaaaaacctcgtcattgtatcccctcacataatattaaatttatataaattaaagaattatactgcagcgccatttttataataattgagaattacatatattataagaattttatatattttttaagattttattcaattctatttttagaaaaataataataattattatatttgaggttaaaatcgtatcattattaagattgcatcaacgtaaatgtaatataaggtcatttttttccaaaaaattattatggcatttttttaatgaaaattattaaggcattcttacctatattggatagtttttttaaaagactatattggatagttttaaatatttttatattggcatactaaatatatataaaaagataaaatataaaaacaggaaaaacatttaattctgcgattgttctggtgttggatgcttggat

SEQ ID NO: 217415 - DNA, 1000 bp, Cannabis indica
ttgatggtttggtgtctttgaacttatcaagaaacatttaagtggacaaattcctacagagattggccaattggtatctctagatgctcttgatttgtcaagaaaccatttttttgggaaaattccttcaagtctttcgaaagtggaccgtcttagcacattagacttatcatggaataatttgtctggaaaaattccaacaagccctcaactccaagctcgagatgaaacctcatatattgggaatcctaaactctgtggatccccacttcttaaaaaatgtcaaccagctcctccccttcatcttggtgacgaacacaaagaaaatgaagatgagctcatcaccaaagggtttttcatcagcttagcagttggatttgtggttggattttgggggatttgtttcactttgatcttcaacaagtctttgagatacgcatctctcaagttcttgaatgatgtagaagattggatatacgtaacaacaagactgataaggagaaaatacttcaactaatcagaagctaaaaggtataacatactaatatgtctttcaattcaagcttaattaattgatacttgtattattaatcatatttaggaggtaacttatttatgaagagtatgaattttgcaggggacaggggatgtagcacttatcaacttcccttcatagaataatttgtaagcttaattaagactattttcaatatttgatcatgtaatggcttgatagaataatgtgtgttttagttctcttctagcttttaattttaatttcatgtcaacacattttagtttaaagcgctttaagatttataaaaataaattaaacagtattctctagccaacaaattaaattttgtaagttatttaagtacaatattatttttaataattatatatatgtggtgctcattgtataattattggtaaacatatgaacattcccgaggcggcgagggaagttagctagctaggcgcgtaaaaggatgaacgt

SEQ ID NO: 217416 - DNA, 714 bp, Cannabis indica
ccgaacatgcatgaatctggatacaaaagcaaagaaaagttataatgtaccacatggcatgacaagtttttgtaatttatcgatttgtctgatttaggcagtgataatgcaaatgcgatatacaatctcacctgattaggtgatgtgatatatggattccaaattacggtatgggattgcctgattaggcaacgtgatataaaagtgcacctgattaggtggtgatatatagatgtcagattatggcatgagcttacctgattaggcaatgcaatatatatgaatgcctgactatggcatgaaattgcttgagtaggcaatgtgatatgtggatactgatattcaggttgtgcctataaagtcatgactataaattgaaaccattgttatgtttcttcctgtcggtgatcctgattaggcatggggacagtgacatgtgagtgctaggctatggcacagaccgaaaccattgttaggtttcttcctgtcgacgatccatattaggcacgggtgtgacatataggtgcccggatacagtacgagctcggccagtttggggatgtgatatattggtgccaggttgtggcacaggctcgtctagttagacaaagtggtacattggtgccagatgtagcacagactcatctgattagttgatgcgtcgacatcatatatgatgccagattatgatatggaattgcctgattaggcaat

SEQ ID NO: 217417 - DNA, 690 bp, Cannabis indica
atcaattatttaaactagaatttaaatcccaacactctaacaattgatttaaatacgtactttaaaaaataatgtaaagaggaaaatttgcttcgatgtttaaaaaacatcatactaattttttctactctatccaatctttcaacaatccaatgatcaatatgcttgcatgacttatttctctccactaatgttaacaaactttgtttgtaatcacaagaactttcaagattgtaataaaatggattaaataattataggtagataaaaagtcatttatgttatattataccataagcacactataaaccaatcaagcactcgtatataaatatactatcccgaaattcaccaaagaaacttttttttaaaagattgagaatttctaacttcgaaatcaacaacactttttcacttaatttttttttaagaaaaaataactattaaaacttttttttttcttttttttaaaaatataaataacattagtgatgataaagatacttttacaattcacatactgtctcaatcacccacttgtaataataatttcacccatacacaattcatcctcccccaaacttatttctaagcttatggtatacttcaaccataaaagagaattgcaagtggattcaaagttagtctcataaagtggctaaaaacaaatgaacaggctaaactcaaaca

SEQ ID NO: 217418 - DNA, 737 bp, Cannabis indica
caagtcttgtaatgacagcatggaatgatgaagattaatattatagaggtgtttatggaatattatataaatatatatatatatattatttaaatgggcttatgaaagagaggaaataaacaaataaagtcccatctcactaccatatttattcttcaacttgtcaattttttaacaataaatggggaacaaaacaccaaattatgaataaactgaatgattcataaatgttaatacatttgcttttttttttgtttgtaattattaatctatttacaaatatcaaaatgagtacagtttagtccagctatcaattccatataaattatatattagagataatgcactattttttttttttaaaatttgtttaaacattttttttttatatttttataatgtattataaaacaacataaaaataataaaaaaattacagaaaagtaataaaaaaataacattaaaataaaaatgaaaaataatatacaaataataaaaaattaataataaattaataaaaatacaatataaaaatctatcaaaagactatatattttctgtaaataaaatcataaaattataaaatatttaaaattctatacaatagtatttttattaattttttttttgttgttgttgtgtatttgtaaaatttcccaatattatatatttttgtaagaattaattccatatattatattaataataataaaaattaagatatcatatgttaagtg

SEQ ID NO: 217419 - DNA, 1013 bp, Cannabis indica
aacccaatcttccactaatgtattatgccaaataaaaaaaaaaggtttttccttaatttctttttcataatatttgatattagcttgaagttttattagaaataacaataattttaataaaattgtttaagttttttggtgcttaattatgtaaaatatattttcataataatatttaaaaattatatttttttttattaaaggcttactttttaaaattagaacaggatcttcaaaatatttgagacggtagcataagagcgggctctttaagtcctatataatttaatgtaataatttttaaataatattattaatattataaggtgatatgtttagacgggctacgcagtaagtgtccaatatataattattaaaatatacttatatatttatatatattgggtccctggaatcagttcttgattggctgtattcgcaactaaaatatataacattattcattaaaatttgactaaaatattgaaagtacccttccttcttttttcttcatcaactaaaaaatatagcaagttctaaatgtgggtcctcctcaacatgcaagttggcaagttctacaaataagctacgttttttttttaggaaaaatgtttattatttattatatatgcatgaaattaatgggttctttcttttcgaacattattcattcatggggggttagctattaatggaagtttagcttttacaattaaggaaacgaagacattgacatgtagtattattttaataagtgttattaattaagagaatcaatggaagtttttcatgtgtgtttatagaaagggaaaaggaatacttaccatttttttctttagagaagcggctcagagcataaagtaactccaccactactaaatcatgtaatactactaatagagaagacccaaatttaattaattttcacatcgaacagactagaaagtagtatagtatatagtggtaggaggtcttatcgttgagttccaacacatcaaaagagagatgatcag

SEQ ID NO: 217420 - DNA, 1104 bp, Cannabis indica
ctctctctctctctctctctctctctctctctctcttagtttttcagatttggcagttctcaacgtgtttggtcgattcgagtttcacaggcggttcgggcttgtggttcatcggagcagtgacggctagggctcagtgtgctagattcacatattcattatttcttttagatttttttactcaatgtgaacctaattttttttaggttttctttttatctataagttttagatttgtgattgttgttcgttttttaatttttttttatcatagtgatttacactgattatgtatagaagcaaaataaattataattgtgttattggaatttattgctttgtgaactaatacttagtttttttttttttttctatttaataaaaagaattgtaattttgttatttttctaattttttttgagtgtagtaattaaaaatatatatttatacattgatgaccctcgaataatgtgagaaaaataatttcttaaaaaaagaaataataaatatagtgacgcccattgcatgttgctattatttgtagagtttagccaagtgggactctaaaaaggtatagtgaagcgtacggagagactctaaaatattttagagactcatactgaagcgtcaccatatattacttttccagtcaccaacattagtgacgcgcactaaagggtcactaaaattttttagtgtcacttatagtgtttcactgaaactcatttttgtagtagtgagtgaaagaaagatttgaaaagagacatggcatgacaggtttcgaaattatcaattttctagctaagcaatgacaatgtgaatgtgatatacaagctcaactgattatgtgatgtgatatataggtacgaggtatggcacatgcttgcctgattagacaatgtgatgtaaaatttcacctgattaagtgatgtgatatatggatgccacactatggcatgggcttgcctatttaggcaatgtgatgtatggggtactggtattcaggttgttcgtatgaggcaaccgcgataaagtatgactctaaattgaagttgttgtagggttcttcctgtcgccaatgtctgattagggcatggggcgaca

SEQ ID NO: 217421 - DNA, 523 bp, Cannabis indica
attaaatttaaattattgacatatatgacatatattgacatatataacatatttatttaaacaaaaactataactagagattttatttattaattatattattttatttaattttatctattttactttaaaattaaatgttaaattactatttattttcatagaacttcctaattaaatcaaaatttcaaaataaattaaaattattgagttcaataaatttaatttcttggatgaaataaataactcattcttattttagttgtatgttcattatcagtcctcgtaataataatgtagcttcctcatttttttttaaagtctctcatcttaaaattcttatttacaaccaaatacaattttttttgtttttatttttttttttaaaaaaataagttcgttcgtgcgtgttgtgctggctcgatctatatttattcgtattttttaaaaaaaaaaaaacagagccaagcaatgtcacaaaaaaaaaatatgaattgtgtcgtgttgtgtgaataatcttaaa

SEQ ID NO: 217422 - DNA, 743 bp, Cannabis indica
ttatgccacaaattactcttagctaaattaaataaatttattaatttgtatacattttgataattttcaagtttgtttaaataaattaaaagtagggatattggcggctaaatcacttgaactttacggtttgtaacacttaaccacaaaaactgaatttttggcggctaaactacctaaactctagttccgttttactctgcacacctccgtcgaaaaatcacagttaagtgccacggtggattgtccacgtgtacacacttgtacacgtggcattttttttagtggtccacgtaatattagttttaaaaaataattataaatatttaaaaaaaattaaaaaatcagaatgttttttaataatttatatattaagaaaataatttaaaatattttaaaaaaatagaaaaaaataataattagtattttttttcttctccttttttctttctttttctttttcattcttttttcttcttcgttttttttttcaaaaatcaaacccccaagaagggagaaaacccaaatttgattttcaaatttctggtgcatgtatatggtgcgatctttaatttatatataacactcatcatttatataaaattatttatgtgatgtactaaaatctctattcttatacataacagatctaataaaaggccctgatatctcaaatgtgaatgaacagctgatttttgattgataccgtgaatgaacagatcccttgattctacaataaatat

SEQ ID NO: 217423 - DNA, 500 bp, Cannabis indica
attgatataatatatatatatataaatataattgagtatagtcattttatacatagacccatcaaactaacttcataggcaaaacaattaaccaattattatatgtagctgttgtttgccacacttttcagcttgctggcttctcattaattgattttaatagttatattaaataataataataataataataacatgactttggttgattatttttattaagaaaatagttcaagtttatgttaaataaataatattgaacaaattttgtatattaacaaatacaaatctcttttatgtgtatgaacaagatcgatcttcgaataagagagtatttacctttcaccatatgaatttgagattattattgatatataattctcttaataataaatactttttaatgaaattataaagtactcaactatttaagtatatattatttggaattaatatataaattaatgatataatttaaggtatactaatcgtgttaaatt

SEQ ID NO: 217424 - DNA, 598 bp, Cannabis indica
ttcttcatctcattcttcttcttcttcctcctgaactccaaaaccagaaccccaaaacatgccctcactgtgctctttccttctcaccctcatcgtgccaagtggagatccatccccacaccgtgcttcttctcctcctcggtcgtggaaagaacctgaagcaattgtttctgggttggggcttcattttttgttagggttttttgggtttgggagttgatttttgggttagggtttctttggttggtgctttgatttttgggctagggttttctttgatcggggttcaatggcatttggcgtgtttcggtctacataggttcgggggtgtgggctttaagaaaaggggcgaggggagggtcggagcacggtgctcctagtttgttggcgacgctagtgccgcacaagcagagagaaagagagagattattcggaaagaaaaaaagagagatttaggattttcagaagaagaagaaagaagaaaaaaaagtaaaaaaaattaaattattttatttttatttttaaattttaaaattatttttcaataagattacgcgggcagtccactatggcaattaactgagatttttagatgaaa

SEQ ID NO: 217425 - DNA, 561 bp, Cannabis indica
agagagaaaccgaaaaagatgattcatgatttaggtgaaagcacctgaaaccaccacaagacactgtagggtggactaatttccccatgagagggaccataatctcagttgagaagaacagcatgctagaaggctccagaagaagaaagctctgaaataaatgaatcttatttttggtaacattcacatatttgaaattgacatttatatgtaatgaaaacaataacaaaagtcaaaaacaagtcttttttttcttttacaaaataataaaaacaaactttaggtcaaattatgtggacatttaatataaatatttttttctaccagataataataaaactatttataaatatttttatttcatttagaggtatttatttgcatgtaatttttgtttagacataattgataaataattttagtaaatttgaataattatattaattaaccatatattaatttttttttttaattttagatatatatatatatatatctttatatattaaaagtgcctatgtaacggcaattcctggtttaacgattcttagtttaacgatt

SEQ ID NO: 217426 - DNA, 759 bp, Cannabis indica
gccgctattgacagagctcgtaacaaagttggtattggagcaacactaagaaatgctgatggacttgtagtagctgcaatttcgaagcctctgttaggcaattacaaagcagaagagatggaagcacttggccttgcccttagtctgaattggttgatttcaaacaatctctcagttgatttcattgaaactgattcactcttagttgttcagggattattatcatctcagtcttttttatctgcttttcatgctatactaaataatattacctttcttgtatcctttttcccacgagcacagatcaatcatgtttatcgatctgctaacacttatgcccatactttggctaagtatgctcttacggtggatactgaatgtatttgggtggagacttttccttctccactaatgactcttatgtaattctcttgaattaatataattgtctttttctcaaaaaaaaaaaaaaaaatcaatctattatttattaaattaaaaatcaaaactgcctgttgatgaaaaaacatttccatgatgatgagagctttctacctttcaattactgtcttccattgggttaaatatcattgggtcaagaagaatgatacctcaaatcctcttttgaattggactgaaaactcgattctgaggtgttagttttttttttttttttttttattatatttttgaattaaatcttccattccttttagatattcatatgagttaaaatttaagaaatatcttttcaaaccc

SEQ ID NO: 217427 - DNA, 560 bp, Cannabis indica
caaaaattgtaattttgtgactaatgcttttagctacggactttttaatcgcaatataggaatgataattgataattagtcataacttttttacttttagtctacaagttttgttgtgactaaaaataagattttttttaagtgtacattacaatctcttagtcaacctccacgttcgaaatcacatgccgaaatatttttttttcaaaatttttttaatagcggtattcgttatagttacagtatgatccctataaatttttgaaaaattccgaataggttacagtaccgaaacagagttcttgacattccaattttaccatgcgcgttcaaaaaacttcaaacgtattttcctattcgagatttttcaaaaatttacagggataatgtaggtaagcataacgaatacccccgtgaaaaaaaatttggaaaaaaaaatattccgacacgtgttttcgggcgtagaaagtgactaagagattattataataggaaattaacggtagcacacctcaaacataaattattgtaaaacaatatatatatatatatatatatat

SEQ ID NO: 217428 - DNA, 631 bp, Cannabis indica
atcgattattttattaaataataaattagattttatatttttaaaatagtacaaaataattttaaacttaatttttattaataataaaataaaacttaatatttaaactaagctggtagtatctatggccaaattgattacatgatttgtattttttcgtgctagaaacgttcttcaaattttatgttaaaaaaatagatgaaaatagttcacagtactactttatattattttagaaaatataaaatttaatttgtcatttaaaaaaggattaataacattttaaatcttatattttacaaaaaatattgatcgagttttttttttttttttgttaaatgacaaattggactttgtatttttaacttttttttagtataaccaacttgaagataaattctagtacgaacagatgcagaaaatatatctagacaagtcataatacctctagattgagttattattaagttttattttaataaaaaaattagctcaaggttctattttgtattattaagaaaaatatagtgtctaatttattatttaacaaaatagagagtccaattaataatttttacagaatatatatgttattttttttttgaataaaggatttccattaaagattaac

SEQ ID NO: 217429 - DNA, 617 bp, Cannabis indica
ttcaatattttaggctaattaaatcatttacaatttaaaaaaagaaaaccgtagtagcatcttgaatcatcaaaagattgggaagatattaagttttcaacctgaataaacaactgtcaactccattttattaataatgactgtcaatcaaaaattttcttatacaaatttggtaataacacccctattattcaatataagaataaccaactatgtttatactatgccaatcccaaatttggtaatttggtaattttcttatgtttatactatcccacaacaagattgaacaccagaacaaaggatcaataaacattcgggattttcctgtaactgattgataatgatggaaatataaactctctattttgagtcaatcaacaacacaaactactacccaataaggatcaaactctactccgttcatcaaatcaataccaattattactaatttagcaagatagtgaaataacatcgttaattttaaaaaaaaaaaacaactgaaataagacacaaacaaaaactttcttagttagataaataatataaaataatttaaaaaaaaaaattagctcaaattatttgtaaaattagtatggtaatgaattatattaaaa

SEQ ID NO: 217430 - DNA, 811 bp, Cannabis indica
gtgttgattttggtaaggtaataatatataatatatataataacaataaataatatgttgtttatagtagaattatcaacactaatttaatattcaataaataaatacttataatgtaggacatatatttttattatgaaaaaaataattagataagagcactcctaatggttaatatattctgttgaaatatataactaaaattttactttttgtaatttcacacatttactttatactatagatcaactttaactaaaaaaaaaaaaaaaatctatatcatttaaataatatatttataatatacaaataatagaatagtaatcacatataaattttttatgtttgcacttattaattaaaaaacgacatcattgatcgcgtttttaaatgtaagcccatataattctctatcattatttaataaaacatcataaaaggattaatatcatatgtaaggtcatgtttaatttgatgtagtagatattgtaatggaatcaaaattaccattataatttttgatattttttttaaaaaaaaaatgatgtaatgattattacattatgtaatataatttttattacattggagaagctatgtaatgagaattacatcataactttaaataaaataaagggtaaatggcgacaaaaccctcaaaactttcattttggtttcacttaacctcgaaaacccaaatttggacagtaaaacccccaatactcgtattctgttactaatttaccttttctgtctattttatgttttaagtgctgtaatgaccgctctagtatttggattagtaaaaggc

SEQ ID NO: 217431 - DNA, 577 bp, Cannabis indica
tgtggagtggaagttttgtccagtataacggagtgacactcatagtcacggagatagaaggaggtcttgttatttctgtttgagcgccttggaactgtggtgttttcatcttgctgcagcagttggtctgtagcttcattatttccttcaggagtggcagtcaagtgagtttcggttcagcaggaaggtcattctgattagtgttgtgggaattattgtcttccttatctggtataggaaagtcttcaatgtttgtgttagtaatttcattagaaggaaaaacaatatgaaagacaggatcaatatagtgcttgttgttgtttagtttatgaaagggaaatatattctcatgaaaaataacattccttgatataaaaaattgtttattatttatatcatataacctgtacccctttaccccttgtggatatcccacgaacacacatgttctagtccttgaatcaaactttgttctgtgtgcagtgagggttgaagcaaaaactggacaaccaaaatttcttagatgctcatagttgggagccttgtcaaacagcagttcataaggagtatgattgtt

SEQ ID NO: 217432 - DNA, 505 bp, Cannabis indica
acgttttcctcattgtttgctttatctacaccatcaatttacgcttggtcggtgactttagttcagttgcatgtcgagcaatggttacaacaaatttggcaatgaaaattcccttagaagttagggatggacgaccttcaagcaaagtatcaacaacactacactagactctatatgtctaagaagcaagaaacacacctccaatatttcatcaactcccagataaagcatatataccattcttcacgtatttggtcggggtatttgtgatgttgaacctcgggctctggggacggtgtgtgtttactacttatttcttagtcctcaaagctagaatttgagagattggccctaaacgaagatgaacttgcacagaattgaggatgatctttgtatagaagttaaagtaagtcctagtcgatgtggtgtttgcctccccagaaatcaccagtgttcatctacaaaaggattttaaatctgtgtatttatttatttattaaagata

SEQ ID NO: 217433 - DNA, 903 bp, Cannabis indica
caaaattaaatacctaataatttaaaatttaaatctatatcaatattatagttagtagctataattacaaaaataattagtaaaataaggatgccacatataattttttaaattactaatatacatagaaaaaacaaaaagtgagaatgaacatcgaccaaaaaaaaaatagagaaacaaaatcaattgaaaaaaaaaaacgttaaaaaaaattataataaataaataaaatgatttctaaaaagtaataaaataataaaagatttaaacaataattaaaaatgacctttttagaaaaaaaaagatttgaaaaataattaattaatagtttaataataactttttattttcaacgaacatttagttatttactaattacaaattgtagatatttactactttaaaaatatattgcattaaattaaagttaattaaagtaaaaaaataaaatacctaaaacaaaaaagtaaaaaaaacaaacccttataaattattattgtgttgatgtcgaggataaaattgtgaaaccatcataaaaattagcatttaaagtaaaaatttgtgaatattgaaataacaaataattgtgtgcttctaccatgatcataatcatatattgatcaagaaatatttaagtgatataataaatgtcaatttttgatatataagtatacttttgtatatacttagggccagtttagcatagctgtgctatgggaaaaagcagctgtagctgtgctgtgagaaaaagcagctgtggcagaactgtggaaaaaaagctgagctgagtgtttggtaaattataatttttaaagtgctgcgacttgttaagattctattataataacgataatattttaatctaattcattataatcacaaatatataaaaaaaaaaactct

SEQ ID NO: 217434 - DNA, 523 bp, Cannabis indica
aaatctaaatcttatcaattaaaaattattaaaaagaataataaaaaaaaattagtaattgtacctcttgaatttcgacattaatattaattctgtttcttaaatatacggcttgttaagaattttcactaaacttttacatttataaaaatttagtctttttgttaggttccgtctcattatttcgtttaaatactgacgtgcccttataaattagcaactttgtctcctaaattacgacaactattaaatcgtacattctcaaaattaaaatgagaaaaatttaaaaaaaaaattagtaaatcttaaaaaaccaatttagatcttaaaaaaattattttgaatgactaagaaaattaaaatttcaaactaattaagagatttaaaaaaatatttattttttattaaaaaattcatttagatataaataaaatattaaaaatttaattttattaaattttaccagaacaagtttgaatctatttttttctccaagaatctagatttgttaaagtaaacataa

SEQ ID NO: 217435 - DNA, 1136 bp, Cannabis indica
atattaaataattatgataaaaagttataactgaaacaaattaattaaataataatattaaataattatcatatttttttttcaaataaaaattcaaaaaatccacaaattagataatttagaatattagaaggaaaacttgccatgtcattgtgctagaaattttttacacgtgttattaataatttttttgaataaatgctagaaattttaagtggtaatgaataggccaaataaatagtggtaatgaattcatttaacatttattatttatatatatatatataaatgtaataaaaaaaaagtttgtgtctattgatttccatcattaactgtattaatattattatattgaataataaaatagttaaaaataaaaaaaaaataaagaaaaattgaagaaaataagaaaaatagaaagaatgctcatataatctgccacctcacatgccctaacaacaacattatatagatatatagatagatagatattgttttttaaatttacagttttttgcttcgataatttttttaataatttttatgtgatttactatacgaattttagttataatttaaattgctccgttaattagtaatatatatataaaaaaaactgttttgaaatacaaaaataaaaaacttttttttttattaataactcattctaagattttctaataaaaacttaagacaatgcattcattttgttcttttgaaaaaatttacagagaattttagactactatcaatgaatagtgaataaaatggtatgcttttctttattttaaacaaaattattacacattttatacaaattaataaataaattactcaaggtaattgggtgctctcattgtaatagaatatcattcctcataatttagctaatatatatgaccttatcctcataatttagctaataggcagtcctcttattgaaatctctttcttccaaataacctataaataataaatatttacagcagatgccacgtatctaccgtcaaaagatatgtgtcgtcctactaatcacgagtataaatatagatttaacaatacattcattcatatataaaacataataatagtgttatatatatatatacccatactaaagaaacaaaaggggcgag

SEQ ID NO: 217436 - DNA, 1068 bp, Cannabis indica
gtcagttctataaaactgacactataggtataagtgtcagtttaacactgacactaaaatatatttgtagtaggaaaagttgtacaccaaattagtatataaactcaaaattcaacaccattaatagtataaaattagtgcataattaggtgtcataagagtgaaatagtttgaagattctataccaatttagttaaatggtgtaccaatatagaatatgctctgtacagtgttacaaaaggtatagttaaagtaatttgttgccaatatctcaaaatatctatatgtgataccaaacctacaaatataaatatatatatatgcacgtgtcaccttgtattaaaatgcacttgtttaacaccttcaagtgtgtgttaacttttctcttcgttttttttttttttttatatatataatattaataatacaatataatatatacttgattttttgttaaagaaaacaataattttaaccaaaatcatgttagagaggattgattttagcttttgatccaactgaaaaaggactaagatatatagtatattaaatatactatgtatatataatactaattgaccttaattagtactggtctgcactgcacccacctggaaactgtcttcccccttgtttttgtttgaactttcgttatttatgaaacaagagtctttagtaatcttcctttaataattttaaccttttgaattggtcaattctaattaaacgtatgcatgcattgatctcatacatacatatctgtcgctatagcgcatgcgtcacgttttaatagttatgatgacacattaaaacaatgagatatatacagagaagaagtaaaaataaaataaaaaattgtgtaaggactagtaatagtaatattaacactaccataatatatttttattattataagtataattaaatgttatattttatatatttgatttaataattattatagaaaattattaactattcacaaaatactactacctatatataatagcaatgtttttaatttaaattaattaaattttactgcatataaatattttaatttttttt

SEQ ID NO: 217437 - DNA, 594 bp, Cannabis indica
tgaaggagtggaatagtgtggccttttgccataaatggaaacaaaactgcgtgaatgtgatgatcatgattattagatgacaatgttgatgtcatattattggtgttgttacaatctgaacccatatattcacactcttatgtatgagattgtgttctagggctggagagacacaaacaatatatctcaatatagaaaggacagagagagagagaaacacacacaatttctctccaaaaagaaaatacagagagagagagagagaaaccacacaacctatatagaaggtgccaatttgtacgggatacactgcccaactaacacaatcaatgtctcagaattgacccattgccttatttatgaaatgatataaatgtaggtaaatgatgtatacgatcttgatatacacatgaggctgagctgggcttttttacaagtcacgaccttagagttacaatatgaagacacgagaaaaatattacaaattaacatcacacggcaagtaaacacgaatcaaataaactaagccaaaacataaaaagttaaaaacttcttatattaatcttaattatatatttgtatttacaaataaat

SEQ ID NO: 217438 - DNA, 719 bp, Cannabis indica
cagcatgtcgtacttaaggtgtgagtcagatcctgaaactagacggatcatgcaggaggtccatgaggggttctgtggtgaccacaccggaggtctgagtctctcaaagaaattactgagacaaggatatttttggcctacaatgaagaaggattgtgtacactacgtccttcagtgtgatccatgccaatgattcgcgaacataccaagagctccaccctatgaaattactttgatgactagcccctggcccttcccagtttggggaatagatctcattggctccttaccaatgggaaagggttaggtaaagtatgccacaatagcggtggattattacacaaagtggacagaggctgagcccatgaagaccataacgaccaagaaagccttggattttatgggaaaaaaaacatcgtgtcgatacgggctaccccacaagatagtctcaaacaatggaaagcagtttgaatgcgatgaattcacaaacttctgcaaccaacacagagtaatcaagagtttctctgcggttgcaaggccacaaacaaatggataggcagaggcgatcaataaaaatactaaaggtcaccctaaagaaaaaaattgttggcctgaaagaattggcacgaaatgttatgggcctaccggaccaccataaaggaccacaaccggaatactcctcattctcaattgtgtacgaatgtgaagccatggtacaa

SEQ ID NO: 217439 - DNA, 772 bp, Cannabis indica
atactattaacttggcataatcatatttagtttattttttctcttttgttgtttctttatatatattacaacgaatatgaaataaaaaataatttaaagaataatacaatatgaaaaaataaataaataaataaaaactgatgcaaaatttgccgaaagaaaaaagagttagtgttttttatattttatgacataaaatagtgcatatttattataaaagaaaaattaaaagaaagatgcatagtggtgcatattatttaataaaaaaaagatattaataaaatagtccaaaaaaattaaacaagtaaatgagataacacattttaattattaataaaaagtaaaaaaaagtataatggtaaatatatttaaatatattataaaaagttacacatgtcactcatttataaagagagtgtaaaagtgagtgcaatatagagtgtgcttagcattactcatggtatgctttagtcacaaataattttttgttgtaaccaaagtcacttttagtcacaaaaaaattcatattgtgactaaaattttaaaaacataaaatgtaaattggtaattggttaaaattcaaaataatataagtacactatatatatataaaataaaaaaaaactaatagcatttcgattctaatttttttaatttgattgatggaaatataatcaactaataaagttaacaaaataataattctaattttatttcattatatatcttattgaattagtaccaaagttttaaccctacttaaaactctaac

SEQ ID NO: 217440 - DNA, 854 bp, Cannabis indica
taaaaataacaacaaaaacaaataacaaacttcaagatatataattaaaagtttacatgggtaacgcagggcgaaaatgttaatcaattcaccacagagaaattacctaaagaaccaaacaaatacttatttaaaccggagtaataagaaaaaaaaaaaaaaaaaacttaaagctaatttttacctaagatgcatattcttccagagataattaccatattcctaataaatattatatatatatatgtagactgtagtactatataaacaaatgaagctgaacaagatataattgtagcgagtgtgatgcacaagaatgtaatatttgattacattatttgaataataattggcttagctttattaaatttacgatgaaggctgaaaaaacaagagagaataactggccaatagaaaagaataaacttttagaagaagaggcgaaacactatatagatagtataataattaattatatattacctggtccagaaggattcgatgatttttccaacacgctccacttcagtagtattgctatattgcatcttttatatgatcaatatccagattaaccgatatatatatatatatatatgtatatatatggtggcggccgatttagttctctccgtatcggttctttttctacaaagaaaacattggaaaataaaattaattatattaaaccttttctccctttatatgtttttatgtaatatatattgctttccagccgataaaattgacgagtgacaaaaagtccgaagataactgcaagaagaaaaacaatttcttgcatggcaatgtaaggagatgttgacgtataaatattaaaacgactatgtatcgct

SEQ ID NO: 217441 - DNA, 704 bp, Cannabis indica
ggcaccagtaaagtatcaactttctcagacacatttgatagactctccttcttagcaaaccatcgaaatcaccaactcccaagtatctacaccaatcgaattcgcatttcccaagctactcaaaactttcaccaacaacttcatatcaccttcctgacacaacccatcaacaatttttttgtctaccctcggaagaaggtatataacccttaaacaacatctcatctaagaaagttgctgcttcattaaaccttctacaattacataacccaacaaacattgttctaaaagaaacaacatctggtttgtaaccaagtcttggtaaatcttcaaacaaatcattagcttcactccattttttatccttacacaatccaccaattatgatattataagtaattatatctgctttacacccttctttcacatcatctgaaaaagaaataaaaaaaatagaagcatgttttcgttatttttatattaattaacaataaactaaacatgggaaaacttaatatatgtaaccgttcaaaattaataaagaactaaaaatgtgtgacgtaatctataatataacataattaatccatattttgcattattatatatgcctaatttcttttgagcgagatagaaatagtagttaaaaataccttttgaagaaagacttacaaaataatatatctattattattatatgatat

SEQ ID NO: 217442 - DNA, 528 bp, Cannabis indica
aatattggaatttaaattgaagaagtgggttatgtcaaaataattgtggattaatttgagtgaaacaagaataatatatatcttccactctagtagaatataatatataatctcttatatatctagcattagtgcttaataagattatattaaatgtgtgcaatttagaatttattcttgaagtgaaatatgactactatctcatcatctctaaagattaaatgttattgcaaccaaaaattaaaatctctaatcacttaaataagtatattattgttattaaaagataaattagagtattacttgcaagccttaatataattattaataaagataattaaggtggattatttctaaacaatttagcaatattgtacgtctgtgctcaatgctcatattattattgatgatgttattaatttgttagctaaatattggtgggttcgtgttatatctttttgagttttgtgaatatatagtgtaacttatctgcattagctacatatatatttgttactatatttagat

SEQ ID NO: 217443 - DNA, 504 bp, Cannabis indica
acttttcgtttttttgagttaaggatttagtttgggaagtttttattttatgattttaagtatgagtttaaaaatgacattttttttaagaaaatatggaaactcttataaaaactaaaaggttaaaaaaaatgaataaccttacttaatttttttcatatttttcaattggagtttttttttactcaaggatctacaattaaattgattctatatatgtagaatatatattggtgtcgtttatcctcaaagtaaacttagtaaaagttgttcattctatatatgaatgtcgtttggagacatttatgtcgtttcaatataatgaaggttttcttttattcggtgaggataattgtggggataagttttttttgttgaaagcaattgtggggataagttgagggagacaatttttttttgtatctgttaatcaaaaatacttttatattatatttcattaaaatgtacgttgtcaatatacattcactctccatcactacaaaa

SEQ ID NO: 217444 - DNA, 617 bp, Cannabis indica
tatttgtgaaataatcccattatgaaatgcaaaccatcttgaaaaataaaaaagaccattaaggctatcaaaaaagcacaaactagtaaagctttcttttaattaataaaaacatttttttttatgttttatttataattttatatcctaaaatttttaattacaaaatacacgttgttcagtaaaaaataaaaaataactctataaataaataaacagcaaaaaataattagaaaaaaaaattcatgaaaactgtaatataactataaaaataaattataaaatgattaaaaaaataattgaacttttataaacctaataagtgcgctccgaggccgcaccaccacctccggccatccacggtccaaatctctctctccttcgcttctagccgcggtaactccgtcagcgtccaagggcctccaatcgtaatattacagtggggttttatctttcgcttcagcccagccgcctagacgatctgccgatgacggtgcctccccatttgcagacgacggcggtgtaagctcttcccccgtttgtagacgctggcggtgcacatcaacggacgacgatctccctctcgcaaacgtcaacgacgttggtgtgaaggttcc

SEQ ID NO: 217445 - DNA, 518 bp, Cannabis indica
atggtcatacgttataactatttaagacatcttgcgaaattttaagaaatttggaaaaatttaacacgccaaaaataggaatcaaaaagtgtgttacacgcgtgactattttattttatacgcatgtgaaatagattgtttgaacactattttttatattgtaaattattttgaattttttaaaattttgtaagatttcttaaataactataacgtaaacgaatataaaaaaaatctggatgccgaaataagtaaggtggtgcatcagtaactttttaagaaggtgcattctagaatcactcaattttattatctgtcgttatttttatatagtgtaatgtttagttgtatgtttgtataaatattttgatatataaaagagaggaatgtgatggttacgtaacagtttaaattagttttattttattctagtttttttttttttttctacattaaatattaatcatctataaaggaaaaaaataagatggtgacagtctaaattaactttattctac

SEQ ID NO: 217446 - DNA, 735 bp, Cannabis indica
tccaactcagagcaaatagaaactggtattttaatggtagacatagtgtagcaaggaatactttgtaaaaccgaactgataagagtatgtctccctgctgtagataattgctttgctttccaaccttctaaacgagccaggatcttctctttcaagaaattaaagtcttcccttttcttagctgagtaaaagaaagggttccccaaatatttttctttcctatcaagctgctgaatgtttagaattccatgcaccagttctttctcatcctccttaactttgggagaaaacacaatcccacttttccgtctgtttatctgttgtccagaccatctctcgtatgtttcaaagcaggttttcaaatgttcagactcctccatgtttgctcgacagaaaaatattacatcgtcagcataaaacaaatgagatataggttgagagtctttaccaattttgattcccgaaagttgtcttctggcttcagatcgaatcatcaatttcgagagcacttcactgcacaatatgaagaggtaaggcgaaaggggatccccctgccttaggcctctccccggataaacggttgagggtgctccgtcagagaattgagaagaaaccgtcgacacacactggatgatcatttgcaaaatttgtcattgaatccgttagccttgagcactctcatcaagaacttcccattcaagtctatcgtaggccttatgcatatcagtcttatcg

SEQ ID NO: 217447 - DNA, 421 bp, Cannabis indica
agataacacatgtcatgttttatattagttcatggtatatttatttttaaaaaatagtcaaaacatttttaaaataaaaaaatattaatacaaaatatgttttatgattatagaaaaacaaaattaaactaaatgataaatcagattaattattttctattacttaaaaatatatacatatatatatatataaatcaactatcatacaaatttatcaacaattctaaacaacaagttcagatgtttgaacaaataaaatcagtccctcaatcgagactaggcgttcagatttgtctggaaaacaaaacaaaaaagaatattgacataacataaagtatttcatgcatattgatataacataaaggtagtatcttgttacataacttattcaaacccaaatcaagatagtgcaaaaagaatg

SEQ ID NO: 217448 - DNA, 570 bp, Cannabis indica
gtttggcctttattttttgaaaacagttttcagaaaacaaagttacaaaaaacaagaattttgaaaacaacaaaatgttgttttctgttttaaaaaccaattcacttttagtcaatattgtttttaaaaaacactaaccaaacatgacttgtttttaaaaacttcaaaaactattttttgttctcatttctaaaaataattttttgaaaacaaaaaacagaaaacaataccaaacatgctctaattctccagaaatattaagtttgttgatgagaatgagaaaattgggattttgatttcttaaataaaagtatataaaattgtgattccatttgttagatctggtatatatataccttctcttcgctttctttctcttcaaatctcaaatctcgtatgcatggctggcttttgttgctttttcttcatctaattcgatttacacattttcacaattttttttattgagtgtgaaatttttcaattgtgtttgctcttaatgatatatagtgggtttggatattactttcacaatagaatgtagaacctggttttgagttcaattaatta

SEQ ID NO: 217449 - DNA, 707 bp, Cannabis indica
caccattgaaatagtatttttctttaagtgaactaaaatatagtaatacactacatttttagcactccaaaaccaaatataatataaatttagggataattccataaatatgaagaaaaaaaaactagtttagataaataataagaaatcttaataggaaaaattatagcatttaaaataaaaacttaacatatatgggattgaattactatagaagatattaaaatttctttcatatattttttttttaaaaaaaataaaacaaatgaaactacaatgatcgtcggagttgtcaccccttaccggaaaaggcaccagaatttgtttttgaggccggataaattgcaagagttgctttcggcactggaaaaatcgttggagttgctgccgacgtcagaaaagtcatcaaaattgacattattgctgaaaaaattacagaaaaaattactaagaaactgtttcttgatgaagaaaccaatttctttataatttttcggcgaaaatgccaatttcgacgaattttccagaggttgctgtcggtatcgagaaagtcgacagagtagttgctggtatcagaaaagtcgtcggagttgctaccgacgccaaaaaaattgttaaaattgacattgtcgtcagaaaatcatcagaaaaatcactaaaaagtaaacctaagaaactagatttcttcatcattaatttttccggtc

SEQ ID NO: 217450 - DNA, 647 bp, Cannabis indica
aagtttgttgaagaacataaaagaccataatggtcgcatagtgtaaatccaaggtcgtttatggtcgttcagagcaaatttaagttctttaaagtttgttgaaggacataaaagaccataatagtcgcataatgtaaattcaaggttgtttatggtcgttcagagcaaatttaagttctttaaagtttgttgaagaacataaaagaccatgatggtcgcatagtatacattcaaggtcgtttatggtcgttcagagcaaatttaagttctttaaagtttgttgaagaacatgaaagaccatgatggtcgcatagtataaatttaaggtcatttatggtcgttcaaagtaaattcaagttctttaaagtttgttgaagaacataaaataccatgatggtcgcatagtataaattcaaggtcttttgcggtcgttcagagtaaattaaagtttatccacaaaattcaaaaaatcaaaaataaaaacaaggacatggttaattaaggatctgtactacccacatataattgaactgcatatgccttcctgaatgtatctatgttgtcgtcgttgagcaacattgtagctgactcgttgcacttaccagtcaatgtgcctttccactatcttaagcatgaatatacaacaa

SEQ ID NO: 217451 - DNA, 644 bp, Cannabis indica
ctttacttaaaagatatgtgatgcatagtttcaaaaattattaaaaaaatgtataatttaaaaaagaggaaaatttaagggtccttgagttgggtgagccctaccatcttagtccaatttgatcatgaaagtttattattactcaaaaaaataaattcattttttatacttagaataactctcaaaaccttgtttatatattgtccatgaacaccaaacaacatgaaagataatttattttattaatatcgcattgctaagatttaaaggccatcacttattttaaatttaaaccccacacacatgtatacaaattataaaaacatatataggaagtgttgaatgatctcacataaattgaggaaatggatcaagcctaaccacagggtaacaaaccaaaggcttggcccttggaattgacaacccaaaaccttcatccaagtccacatcggtaccattccaatcaaagcactgaaccaaagctgctactgtagctggaatcatcaaaagagccaaatttgcaccaggacaacctctcctcccactcccaaagggtaacaactcaaagttttggcctcttacatccacatccttcttctcctccgtcatgaacctctcgggtatgaaccggtttgggtcatccc

SEQ ID NO: 217452 - DNA, 559 bp, Cannabis indica
ttatttagggcacaaaccccaacgtaagaggggtattttaggaatttttcattaagatttaggtgggttggtctttgattgacagctagccatgttgttgggctttgtgccctaaataaaactctatttcaatgtaatattttcaattcaattatcaataaagaaacaaatttaatttcattacatgtttaatgtgttatttggttcatgtgatcatctatttacttatttgatttataaattcatccaaacccttatcacactgatattcttgtttattgtgttgtcaacacagtgggaagtaaacaagattgggtgattaaatgtattcctagatttatcagtacacaggggtttaactgatatgataatctacaatgtagtttacttgcaccttggatttggatgagcagtcgtgaccacatggacctcatagctagccatgatcagatgacgcaccacctccaaatgcaacacatcaattatatacatataaatacgattatgagtgatcagttggaaatgatatgtatacatatatgtatatacctcaactaca

SEQ ID NO: 217453 - DNA, 696 bp, Cannabis indica
agttgaaggatgggaaaccaaatttctctcacgtgctgggaaggaagtattgataaaaacggtggcccaaactcttccatcttatgctatgagtgtgttcttgttaccacttgacattacccgagagatggagagaataatgacaaaattttggtggcaatcttcaaacaagcctgggaagggaatccattggctttcatgggatcgtttgtgtaaccacaagaagaaaggaggaatgggtttcagacatctcagagacttcaatttgtccctacttgggaagcaagcctggcggctcatctctcaaccgaattcactggtagcaaggatttttaaggctcgatactaccctcataattcctatttggatgcttcactagggaacaatcctagctatgtttggcggagtgtttgggaagcacaacaacttgttagaaaaggtctttgttggtgtgtaggaagtggagcaagcatcaacatccttaatgaaccttggttaccttgtattgagaatccttatgtcactacctctcaccccagtttactttaggcgaaagtgaataacctcgtgactatggatggcacaggttgggacttggaaattttggaagatctttttgaagaaagagataggaagctcatagagaagatccctttgcaaccatcggttagtgatgataccttgacttggggcac

SEQ ID NO: 217454 - DNA, 567 bp, Cannabis indica
aatgtaactaactaaaacatacatatatgtggtcgaaaatgaaaattgatcaaagattgaatgtattgctcacctcaacttctggagctttgaccccagtgtgcgttgacaagtgactggagaaagcatggaattttggagtcaaagatttggccgctggtccaccatcagtaccaaagtcattgaacctatggtaacaaacaaattcatgattcaaaaccaagtatctatatgattttttttttaaaacagataacagagattaacagcaaagcaacagcaataaatataattacaactgcgaacacatccataaataaaatattaactggactccaacaaagtctaattttgttttcacacaaagaaaacgcttgtttcaaatggaaagtacacccaaattaaaggtttaccaaatacaaaaccgaaaaataggttgtcttcctaaccagattctacatttaaaattgaagaaaagtaacaattatctaagtcaaacacttaagttactcaaataattttttctcaaaacacactgctcatgcagaagtataacatgattaatta

SEQ ID NO: 217455 - DNA, 621 bp, Cannabis indica
ttgagattcttcatgagagaaagtgaatcgtattattggaagaaagagaagagatgtggagagagagaaagagatgaaaggtataagattaggagataataatggaaaatcgaatgtgaaaatggcacaatctgaggtattatagcctaaatttaaggatggagagtacacataccttaattctcctccatctcaccatcccttttgctttctcaacttgccttccttagttttctttctcttacttccttctcctatcactttataatattattattaattattttattatatatttttaggatttttctggttttttagttattcacattattaaaataaaaaaaaatataaaaaatttaggatttttcaggttttagtaatcacattattaaatatgtacttatggaatcctctatacttatttagggaaacattattaaaaaaatgttgtgcttaaaagcataattgtattctctaattagcatgaactaattataaaaaagtcacaaccacatttgaagtgaagtaacatataaaactaatcaaaaataaaacaaaatagtataaattaaaagtaacagtctgtcccagtaaagtaaagttatagtgttggagttt

SEQ ID NO: 217456 - DNA, 762 bp, Cannabis indica
ttttttaaaaaaaattacggcttgagttacttcggtatatgagttgttttgtggattttagttgtgatttaagttgctttgttgggtgttatgtgagtttttatgtaaatttccgtaaaaaaaaaaactgctataaagtataaaaatttaaaactctcatttttaagggtaatttgcagccaaaatttttgtacttttaagttcggtacgatctaatcttcatacttgaaaaattatagctaaaatcctcaacctccacaattattttggtcagcactcattccattaatttttggaagttaactgccaaatagacatgcaactgtgtacacaagtatacatgtggtgaaattttttttgaaccacgtaatattaatacttaaaaataaaaaaataatttaaaaatatggaaattaaataaaaattaaaactttccttcttcttttgaactggaaaaaaaaaaaaaaaaaacaaaaaaaaccttagctcttcataccatcccaactgcttcccttctctctttgttcccctctcgcggtgcaagcgaaagccacacccaaacccatacacgagacccacgaaccacgtcgttgctccgccatctctctctcgctctgccctcctctcttggcgagacccaaacggtcagtccctatagcacaatcattcatgcaaggtcattgaccactgccggccaccacacacggtgccagggtatgttcaagaagaaggagaagaagaagaaggaggaggaggagagga

SEQ ID NO: 217457 - DNA, 689 bp, Cannabis indica
attagactaaaattaacaaataaaaaatacatcagtaaatctcttttaaagagtgcatcgtaaaatcactgtataatttttactcataaaaacaaaaaccatttatatacatatatgtatatatatagagagagagagagagagagaagagagaagacataccaagctccttcaaacttgaaagaagaaggtcttttgataagaacaaaacccaaaacttgttcataaaatttgacagatttagccactgatttacaaacataagaaacatggttaagggataataaaggtaatttaccattattaacaccattataaccattattattactccaactaccactactctcttcttcttcttcttctattataatcaaatcatcattattaatacaatactcctcactaatctctgttcctaaactcccaattatatatatctataatctgatctcactatatatatatataattaataatcttctctctactctctgttctttaatttaaagatctctcttttattcttttaattttctttttctatagaaaaagagagagagagagagagagagagtagttgatttaattttgtagatctaagaaatgtgattgaatattgggactataatgcttctatttataatatgagtcctttattgggagagtcagtaacagagtcctctctc

SEQ ID NO: 217458 - DNA, 597 bp, Cannabis indica
gatttgaaaaatacaatagggacgactacaagtaaactacggtgatgacaagggacgagatacaatgatgataacgggtgagatacggtgatgaaaataagtgagatacaatgagacaacaagtgagatacaataataacaataggtttgaatgatcgagatatgaaaataatgcattatgggaacaccgtaatttttttctaccaacctatttagttatttttataaaaataatttcttttaacaaagcaatttaaaatactacatataataaattttaaacttcttaataaataattctaaataataattaataaaattatgcattttagttttaataaataaaattattaataataatataaaataagataatatatttataattttactatatattatttttaaataactatttattataatactaaaataattaaattaagttgcgcaaagaatgattttattgtctaattaattaatatttataaacctattaaaaaattaaaaaaacaagaaaaaataaataaatatttttaaataattttaaactataacattaccgtctcatacgtctcttttatatagatagatata

SEQ ID NO: 217459 - DNA, 1444 bp, Cannabis indica
cattttgcggattacattagattgtgtgaattaacttagatcagatactttgtgaacaatcaaagacgaacccactagtaccttaatatgggggctatagcccctactaacaaaaatattatcttttaaaaagttaaatgtaatatttttagtttcataattatagactaaaatagtagaaaaaccgaaaaaaaattaaataaatctagtaaagagtaattataatgtatatgtaaatattctttaatgaaataagccccataaagtaaaaattctggatccatcactgtgaataacccttatttataattgtattcaatttaatatcaatttcatacattttaattttaaaaaaaacttatagtacacttttaaaaaggcgtgttctattacatcatttatctatttcaatataatttttttatatatataattgtatacgttatagtactatttcaattttcaaaaaaaaaaaacttgaaatagtttacaattttaaaataaagttttaaatattttacaatacatgtaactaattttcttacaggtatactaaataactatttgacccttatctttagcagtataaatactcaaaaaaattaaaaaaatttataacatatatgattaagaaaaatagaactaaaaaattacatttgatgtcgaaagagaatgtattgtagacttagggcccacttgtttgcatcaaaattcaaaggtctagatttaaaaaaaaaataataaaaatacaactcttaccctttaatttaataagtaatatgaaagatgtgagtatttccaccactttttttgactctattctttaaaatactatataacaaaattttattttaccttttctttttacattacatcatacatcaacttttctatatttttctctacatgattaaaatattatatatttacatatatttcattaattaaaacaaaaaaaaataacaaaaagatataaaaaaataattaaaagaatgagagagagagagaaaaatgaaataatatataatatgtttacctcactaccagctagtgttctaattaagtttgtgcatgtcgtgctgactcgattcattatttttttttttaaaaaaaaaaacgggttgtgtcgtgttgtgccacagaaaaatatggatcgtgtcatgtattgcatatttttaaagggtaggcccggcacgacctgcaggcctgatatttttttgtcgtgctcagattcatgacgtacattgcttgtgtggacctatatttcttaaacaggctagtctgtttttatatcaaacttaaatttgttattttacttttccatatttttttaactaattactaaattatatatattttaaaattttagttatatacatataacttctagataatatttgatagataatcaatcaaaaaaaattattacatcattgaatttgag

SEQ ID NO: 217460 - DNA, 1020 bp, Cannabis indica
ttggttggttttttttttttttgtgtttttatagtttatttgatttatagttgttgtaaggttgactcctgttgtttttttactttttgctgaaaaaatatatattttggtaattttaaaattttacaagtgtatttttgtaattaaaaattttaagtcataaaatagtaaataaaataataaaaaatagtatttttgaaaaattctccaacaaaatatcaatattaaattaaattagaaaaggttaaagaaaaaaaaaatagaaaagtagaaattaatgtcataatgtttgaagtaaaggcattttcgtttgtaatgactatatatctagctcgtatgttttttagtttattcaatatataaacgtcttatttttttttttcaaaaaaagaaaagtataggcattttaaagcaattttcacacaacaagaggaccccatctcaataatcaattatagagggaaatttacatggtatactaacttttgccatttttttacaaaaatactgccaggcggtattttttacttttttactgtgtttttttataagtttcatactgcagtatactgtgttaagtttcactggtgttctactggtgttttactagtgttctactgttgttttgagttatactgctttgtgttttactggtgttttataaaaacacagtatttttgaaaaaaattccgtgtgacagtatttttgtaaaagttaaccaaaattccagtatttttgtaagtttcccattatagaagagggtgtgtgtagagaaagagcatgcagaagcccattaggcccaattaaaagcccagagttttctacttattttggcccgctcttcgtcgtcttccttattccgactccgagctcatggaactcccgtcgccgtcgtcatctacataccggacatcatcgtcgaaatccggtcgttgcgaaaagtttatcaacagagttatttggcctgcgattcgaggaaagtcttgccccatatgcttggaaagccttcatatccaaacc

SEQ ID NO: 217461 - DNA, 619 bp, Cannabis indica
tgttggtgagtcactatatgcaactaaaaattgtcttatgatcttttagtagaatgtgtaacttgtgtcataggtccttaatctcacaactctatctctattgttgtaaatatttatatgttagtattatctaatgtggtccattaaatgcttttagtacaagcctaagagttaattgatactttttaaatgtcttgaaaagttgtaatgaatacttatactaacaaggagtattttttttatctaatccttattttgggtgcatttgatttttatcaagtgcaatttgattagtttttaacattagattatttaatattttttacattactaataataaaataaataaattagtattgttttatgtctccaataacaattaaataataaataaaaatacaattcttaaatatttaatttgttttaaattatatttttttttatatataagattttcaaattactattttttatttaaaatattaattatatgtgtaattttttaatatataatatttatgaattgaattgtatctactagtttcacatgtgaatcaacattcaatttgcacgagtagagattttggattgtccaatctaattcaatcagcacaagtgc

SEQ ID NO: 217462 - DNA, 513 bp, Cannabis indica
tgtgtcttagcaatagcattactggagaaataatcctatattttcaggtaatagaaaagtagttaattaccttcattttttgatcaccctttcattcacatgacacatatacatattttcgttttatcttctaatgaaaccaattagaaaaaggagagttaaatttgtcaatgacgtcacagagaatggttaagcgtttacataatttgtaactcaaacccaagacctccaatacataatagcgtcacagagaatggttagattaaacaaaaaaaaaaaaaaaaaaaaagaaaaaaaaagaaaaaaagagactaaagaggcggcattaatgataatgttgtccaattcttactttcgatattattttatatatgagacaactgcctattatatatatatataaatatatatatatatactgccaaatcgagtttcaacgtactagatgaaaaaacaaagaaagcaaaaacacattaatttatgtaaacgtcagtcaaagtgttctttctttaa

SEQ ID NO: 217463 - DNA, 530 bp, Cannabis indica
agccctaaagctccctttgccatttgatgtgcatggatgttgttgccccttggagtgtaacaaacagtagcattagggaaatgtgacaagaaattcttgatgtccaaaatgacatccgccagagcagaaagctccttctttcgactaaaagttttactggtcagctgcttgcaatctgtaaaaatagtagagagtggaatccttacattgcagcaccagtttaagcccagcctaagggcccaagcttcagccaaagcatgagtgatcttggctaacagaggcacagagaaaccagcgataacctgcccattccaatccttgattactgcaccgaatccaatctaccgtttctatcatgatagctgcatctgtgtacaattggtaagatccttcctttgcttgggggactgagaagagacacgcggttggcaggctggttcaacatcaatcctcttaacctgtgctttccctgtattgagacaaataagtgctggtccattggactacatcacctgcatctggattagcat

SEQ ID NO: 217464 - DNA, 537 bp, Cannabis indica
aatttaatattatacaccataatgttctcaaaacgatatttatttttcttttttctttataatttttttttaaaaaatataaaaggtcgtgtttgaaaatcatttggtttaaaagaaagaaaaagaaaaaattgaaaccaaaatgaaaatgttccttaccaaagaaatcagctatgttgtaaccatttgtgggcctgcctgaggctgcaccaggaaaatctattccataaggtaaatagtttgttttagcactaatatcaagcttgttgttgttaccaacatcaacattagaatctccaaacacgtacaatgctggtgctaacttttgagattcagataactcaacaaagaagatgaaaacaaaagtaattattgataccaaagaggtgaccttagtcttgaccatctctcttctattgtatctaaatctaatccttttgtgtcttttgtcaattatttatatatacacttttggggatttttatgcatgttatgtatgccaacttatttccttaaaagttggtttttggcattata

SEQ ID NO: 217465 - DNA, 560 bp, Cannabis indica
agtgatgacgagttactatgcacttgaaatgttgagagtgaatcaaatcccaccaacacttataaaccatcccacacttggctatgcttttcgagtcagggacacgaattaatatttcaattagtaagtcattcgtaaaaaagtatcttcttcatagaccttgtttgcatcaccattgctatttcactaatcattaacaaatcacttactctattatctcttcgctatagctataggggagatgatttttttttaaaagaatagatataaattgatgtgtaaatgttgttgaaatattaaatatgatttaatattgttgatttttagaattttcttgttgctattaagtttctagactattcttatatttactaaagtatctagagtgttcttgtttgtttaagtactcttgtactttctagaattatttttcacttgtgttagtagagggaactatgtagaataatgtagaagttggtcatttaataatatttctagattagtccatagagttctataaatagagatgtaatccctttttgtaccaagtcacaaatcac

SEQ ID NO: 217466 - DNA, 642 bp, Cannabis indica
aaaatgttccttaccaattgaaagatgtttacaatgttgttgccaataaaggagattggagagcatggaaacagatgctgaaggggctcttggctatctagattgtgcagtaagaaaggacccagaactgttcgtggattatcaatgcgatgacgaaaatagattgtcaaatttattctaggcagatggatactctcaccgagattatgctgctttcggggaagtacttgcttttgacaccacttacaaaactaacaagtataacaagcctcttattatactaattggtgttaataatcactttggaagttgcgtatttggattaggcttactacttgacgaaagcctcgagacatattgttggatgctgacaaagttcctaaagtgtatgaataacaagaagcctttagttgtgataactgatggtgatccggccatgaaggttgcaattgacatgataattcaaggagcattccatcgttcatgtacatggcatatatgtaacaatgtattcaaacgtgttcgtgatcctcatttcaaaactaacttcaaaaggctaatgtataaatacatgtccgaagaagaatttgagatggaatggaaaaatctaatggacgaatatgatctacatggaagtgatgg

SEQ ID NO: 217467 - DNA, 613 bp, Cannabis indica
tgcttccatcgaccgttgcacgccttttcttttgagttttataatatataatggtttcatctgagatctcgcaatccaagcgaaaaggaatccacacgaacgagaaagacgaagtaggactttgccaatgatacaagccgtcgttttctggttttcccaacaatatttacgacgttatccttgacaatttgccacacaatttttgccaaaatcccataatttttcaaaaaaaaaaataaaagaaactttcaaagatataaatttttggtcctttattttattgaagaaattatactgtattcaagctttattttactacaatcttcttttaaaagaaattttactaaattgatgttacctgaaaatatacgtataattaattttttttaattaggttgtgatgttaaatgcaatacatatatgtttaatttttttaattaagtaatctaactttttatttttaaatgagatttgagattttgatctttaaaaaagctacattaatgtgttacttagatatgattataaatacgtatttttaaaatttttaaaattttcttaattagttaatgtatttgataatacaaatatggtaatttactatattcttaac

SEQ ID NO: 217468 - DNA, 1035 bp, Cannabis indica
aaataaaaaatataaattttgaaataatttttcatatttttaaaataataatattaagtgtgccaatataaatttgacacatgtacaaaaatgtctacatatgcagtctatattggcagttaactgtaaaaaatagatgaaaccttaaatttgcaagcagttcagtaatttgaagggttttaccgtcaaaaatttaagcttacaagattaagtgcaagagaattaatagttgagagagtttacccataaaaaactcaatcattaattagagaactcaaagcatctctaatagtaataattttctaaaatttttatattatctaaaatataatattttattttatatcttttccactagtattaatgctattaggtcacctctaatgattcaattttttgttctttggtgaagagaatcaaacgagacctccttgtaacgaaaagtgtgaaaccacaaaataattgttcaattagaatctttttattacctttctcttctctctcttgccacatcataaaatatgacccattagttttaagacaactatataatctcacatattattatttaatacattatttattttaagcattctccaaaaatttaattattggagatgctctcacaaaaaatgagctatattagctagaagctaaaaaaaaaaaaatagctaaaagcttaaacatgcttctgcctcttggtaaacatgctattggttcccgttgggtgtataaaatcaagaccaagtctaatgggtctattggacggtacaaggctcgattagtgactaagagcttttcacaacaagtatgatatggactttgagaaaacttttgctcatattgcaaaaataattattgttcatactctcatagcagtgacattagttcgtcaagagactatatctcaaatggatgctaagaatgcctttttgaatggtgacttacatgaggaagtctacatggttcctcctccctggtgttcctcataagcaaggcaaggtttgcaagctaaaaagggctttgtatggtctt

SEQ ID NO: 217469 - DNA, 1201 bp, Cannabis indica
cgaaagctttcaatccggcgatgttggctagtaggcttgtcggcttcttcagtctcctcactcttttgtcgccacttactcaaagcccgttactttccccatactaattttcttgattctgggaagggccatagaccttcactggtctggaccagtatctcttggggcaaagaatttctccagtcaggtcttcgcagatcagttggtgatggtaccacaatctccatcttcaatgatgcctgggttccagggtatggtaaactacattaccttagactacaatttcgacgttaacatgacagtggcaaaccttttaacatataataaggaatggaacctcacccttctccaaactatcttcccagcggatgtttgtcaagccatcctcacaattcctcttaccaacctcaacacacccgatacctactattggtcccttaccccacatggtacctacacagtcaattctggttattcatcaagcccatacgcatactgcaccaaaacgacccaacaccctaggatagtgtcgttgctcaaaacatggtggaagcaaatgtggtctcttcctttagctcccaaattgaagcactttcttttggcgagcttgccatgacattctacctaccagtcataaccttttcaaacgcaaagttttaaataccacatgttgttgtcaatgcttttatcatgatgagaccctagagcatgctcttttcagatgcacaactgtccaggaggtatggaatttaactatttttcttgagtttattgataaaaactgctttcctcaattgtatggatttactttctcttgctgccactacatatagtgctagagactatcgctactttttgtgttttctatggaaactttggaactgtaggaacaattggctgcatactgggtttgtatacatctccttcacaagtgctgcaatgggttgggaactacttagatcaataccaaagttgcaacacacgatgttctactcctagttcaacaccagatatacctttgctgtctgctgagaatgaaccacgcactcctagctatagccttcgtctttctacagatgctaacccgggatgtacgaactaataaaatgggctttggtattgactattcaatcaagtcaaggagagacactcctcactttggcaacgccttggagcggattacatcaacctttgctcatgg

SEQ ID NO: 217470 - DNA, 935 bp, Cannabis indica
aattgggcccgagaagagagtaagtctttgggctttatttgcactgatcggcccaggtaattcactagttgtttctttcaaattcataggggtccccacagtactattctgtcccaattgtgtagtagccgccacgccatttgtaccttccgtactgcatggacgttttccaaagaaagaggtgccacgtcctccccctccgtaccctgaatattccctttcgccggcgacacggccttccccctattctgcaacaccgccgatttagtgccaaaattcgtatggagggcagggcgtcccgtatcaaaacagtctctaatgggaaccgaggctttcaaccatggtccatacaatggaaccgcttggccaacgggagggtaagcaaaagctttagctctcgagcaactcctatcattatgatccaaataaccacagttaaaacataacataggtatcttacagtatttgaactgtatccattcacgccggtctctgttgatactgaggtagaaacccgccaggagttgggcatcagtacgaatgtccactctgagtttcaagaagcctcgcctggaaatcgtcttgttgtctgctctgtcggattcaatgaactccccaacttttgcacctatcaccactgagttctgagcaaccaaaaaaggggtaggaagtccatggatttggacccaaactgctgctttactcatacacacattttgccaccttccatcctctggccagtcccttatattcagaagctggttggaaatcatccatggccgtctccgaagaacctccttcttgtccagttcattatcgaagaagaaccccaaatgcctttctcaagagttttaatcttccatgatccttggaaaaaacgaccacacctctgacatggtatcatttttgattctattcctggagaagctacgatt

SEQ ID NO: 217471 - DNA, 564 bp, Cannabis indica
atgaaaaatttgattataaaaatggggtttttataaaaaatactgaattttggaaaaaaatttacaattttaatgtcataccatttatttttacaaaaatactatctttttataaaataatcataaaacaacaaaatagaacaattaaaacaacagtagaataactaaaaaacaaccgtgaaacaattgtgaaaacttaacattgtgcacaacataaaacttacacagtatttttgaataaaaaactattatttttgaaaaaaaattccgccctaccatagaaaaataaaaagttaaaaatttcagtatgtagtgtaaaaatccttataaaaatttaaaaatatttgcataataaaaaaacatatttaattagtcaaattgcgtatgtatttttttaaaaacattattgactctcttcttattttttttacctttaaatatgtaatatttcaaatattagattattttttgaataaattaataatttatatgaacatttagaaaatatatatttaaatatatatattatgggacatgattttgtcccgtgatgtactttcacgg

SEQ ID NO: 217472 - DNA, 589 bp, Cannabis indica
ttttttatctttcatttttttttaattattattattattatttttgtcaattgaaaatgtaataaagaatattttgtaaaatgcaatgataagcatgcatgtcaatatgtgtcgttggttataggataaattgcggcataaatacttaatatttccgattttatatacttaaatacttaatgttttatttttggttgacaaaaatacctaatgttataattctcttacaccgttactatcacttccgttattaactcataaatatggacacgtagatgacccaaatgcattacatttatttagtttattttaaaattatatattcttaatataaaaactaaatattacttggtttttaagaaaataagagagatgcaatattaaattaccatagctgagtgaaccagtgtagtatatggaacatgattatgaattgaagtgccaatatcatgtaaaaattgttaatgagaactaagttttttttttttttaaaaaaaaagttagcatttagtttatgatattaagaatattaagttttaaaataaaataaaaataaatgtaatacatttgaacacttcacgtgtccata

SEQ ID NO: 217473 - DNA, 451 bp, Cannabis indica
atattacaaatgtagggggtagtatttttaattattatttttgattattcatgtgaaatttaattctttttttaacaattttcaccaatttttattgtgacagagttcacgtaggtgattttatttttccaaatattactaaaatataaatatataggaaactccttaggtgagagtattattttagctctcatttataaaagcattttttttggttatttttaattggttaaataatggaagtgcatataattaaaatagattattgtacatacaaatatatatactgttagttatattagcatttttaaaattgaatttttggtttttaatcaaattatgaaaatgacttttgaaagtgtgttcggtgaattattttatataaaaaaagtatgttaggtaattgaattttattttctattttttttataatttaaaatcaaaattttga

SEQ ID NO: 217474 - DNA, 549 bp, Cannabis indica
cgtgcgtagtcggggtggtgggtagtcgtcggtggccgggcgtggtggtcgggcgctgaagccgtggtcagcgagagggagagagaggttcgggatgaggcaaccatggatggatgatttgagtttttgatttctttcaaatgggaagggtatttgtgggatattaagaatgtggtcatatatgaccaatattattaagtatccatttaggaaaaaaaatttaagattttttaagtatagaaaaacaaatttccctattaaattcaacaatttttttgaagaaaatatattactcattttttattttacaaaatttatctaaattaattttcatatgccataaacacaccgattaataatctggggagtagagaggactggagaaagatgcagcgaagtagtagaattttttttcgataaaatcacattaaatatattatttatctaattactaaacatgttataaattctttttatttcacaaatcccatcctccaaataataataataataataataataataataataataataataataataagc

SEQ ID NO: 217475 - DNA, 694 bp, Cannabis indica
gaataataattaagaagaaaaagttagaatggaattgatacttacttgtcaggtgcagagtgcagtagaaaaatttcttatgtgatgaacagtaatggaagtgagagaatgaatgaggagttgtttgtttgagtatgtaataatgtaaagacgaaacatatatatatgagtggtgtgtttacgttggaaatttacgaggaagaatccatttcttacattttactgccacgtggcagttgttattttatactttctatcttattcaattatatgtattatgtttttaagttatgtaaactaagtttaatattattttctaacactttattttgtacaagtattttgttaaataataaaaataatattttttaaaatagtataagatcttaattttaaacaattttattttaagaaatataaaaacaaaatctacaattttgaagttcaagtatccaagctactcacagtcaaatataagaaaattaaatcccattatgatatgccaattcattagggaaagcaaatcctctgtctagagagtgtgtccaattccctgtctaacatatagtattggaacatatgtcaatgtaattaatgtgctataaaacattgtttggtagaattgtttaaggaaagaaaaaagcaactcggaaaggagaaaaaaaggaactttaatactctaaaataaaaataa

SEQ ID NO: 217476 - DNA, 835 bp, Cannabis indica
ttctgatgatgcacaacagaacctattgtagctgaaattgctcacaatatctctacaaggaagagaaaggagattgttgaaagagcttctcagcttgatgttgttgtcactaacagtcttgctaggttgcgaagccaagaggatgagtagactttttccaatattttgacacaattcttgtttatgtcccaatttttgtttcatttgaccaccatttttgatcagatcaaatatttagtttttgagttatttttctctaaattgtatttaccacattcttcacaaatatataaaatgaacaatcttctgttgtgtatttttgagataaagtgttcattattgtcttattagagaaatcatgaaattaaatatgtatagacaaccctagcattgttctcccaatttcacttcagtctcattgtgttttcttccagattttctattagggtatatctatttattcgattaattttacttttgcttttgaaaaaaatgctattttaaatttgagggtttatctatgtcgagctatgtatatatcatataagttttaaagattgaattttttgaggctttaatgaagtgatgattgtaattttgtcgccccagtcttacttgcaatttttctgattgcaaggtggtgattgacattcatatctgatctgagcttactaacttttttgattttcttaactggaattgaattgtgttttgatatgaagataatctttgatgttcaatcttacttacatctttatgatgtaacatggtgtatcaatgatcgactatctgatctcttttcaagcgatttcattttgtaaaattgatttttttt

SEQ ID NO: 217477 - DNA, 1022 bp, Cannabis indica
aatatttatacagaggatttatgatactattttttaaagtttggtatttattagccacaaatttaatattttaaatatttatgtcacaaattttgaatagtaaagttaaaattttaatataattttactaagtaattattattaatcaaaatacacaatttattttttatatataatttaaaatattttatatatctgccgcgaagcgcgggatgtttactagtttattatacggaaaacaagctcccaaaacacttaaatatcataagtatatgaaataagacgtgtataatataaaatttgaactatgttctcggtttgcacaatttgaactatgttttcaatttgcaggatgttttctttttttttttttttttttttttcttttgaggaaataaatttgttatcataaattaaatggtaaagtcatttacaataacagagtttataagcgaacatttcgaccaaaaacaagcctcatccaccccaaagaaaacttagccaagtcgccagcagccatattagctgaacgtttgacgtgagaaatatttacattagggaaaaagaataaaagactagaaatattaacaattaaatattgaaaagaaaaaattgttgatgaagatttgcataaagcattaaaaacccgaagagcattcgtttcaatttgtgttacaggcaattgaagttgaagagcccagtttaggctgtgaaacattgcaattgcctccatttcatgggattcaaaacatccaacaactgctttgatagcgttgctgcaaccgtgccattagagtggcgaattaaagctccaatactatttatttttctgttcaggtgttgtcgactgctgcatcgacattcattttgagcattccaggtggtggagggggtccacagtatcggattagcagcagtagaagcgacagtgaggatatgtaggagtagtaggctgattggaggctgttgaagttggacatattttagtgagcattttttgaattctgccagtaattcatagt

SEQ ID NO: 217478 - DNA, 550 bp, Cannabis indica
acatttaaataaaataataggaccaaacgtaacagaagaactaaatttctgtaaatataaaagtttagaagattcttaacatgccatatattttaggagaaaaaattaatattatcgaaaattcagtgaatgaaattactaattattataataataatcataataataataatgaactaaaatttcttattataatctattctgtagcattaataggtttgtttaaaaagttaataattcgttgtcactttttaccccaacttttaagaatccttcttgattctcgcctaaatgggaaaccgaagtggctccagacaaaattataagattatataaaaaattataatattaaaaaaaattattttatatactatttttattttttttaaatttaaggtttggttgcttcagtaatttttaagtgagtttgctatatagatttttgattgtgatttaaattgtttcgttggtcgctaaatgaatttttgtaaaaatacaaaaaaaaaaaaaaaaaaaaaacctctaaatttaaagtataaaaattaaaaaa

SEQ ID NO: 217479 - DNA, 919 bp, Cannabis indica
gaagttgaaacagaccagcctagatgtgccctagcataagggagactgagaacaccagctccaaccatggcagtgacattgtggaaagcagagtaccaccatttttgcattccttgaagatgtgattggtagccaatcgtctatggctttctgcctccttattttttcatcatcctattattcataacactttgtttaattagttctttgacaaataatagtaaaaactaaaaactcaattgttttaattcaaaattgaatgatgctaagagacattttggtttggtgtgctagtgactttttagtttagtcaaagtgatttgatatcacatgttttgttcccaaatatgtggtggttctaagtcaatgatgtatattatgaaaatcaataacatgaaaaaaaaaatatattaaaaatatgaaatctgaacaaaattacaaaattacaaaagagcatagtataattttcttttaaaattaacgtttacaagtttgcaactaaagtctctaaattttaaattgttacaaaattattacaaactgttatcaatttaaaaaaaaaaaagtaagtctatgcactaataatttcaatgatttgggccaatcattttaagtaaatataatatcaaatgaaattccactaaatgtttcaaatccaatccaaataaaaaattggataattgagcaattatttgattaatttaaggataatttttattgctaaaagcaggaaaataataaattcttgggaaggtaataaattaatttcctaaaaagttgatcaaattaattgaaacaaaacaagaatgtctataaaaagaaaaatgtaatatatggtgaatcatgtccacatgctcatgctctgaaacattaaaacggtaatattctataataagataataaaaaactagaatggtta

SEQ ID NO: 217480 - DNA, 1076 bp, Cannabis indica
attttttcttattttatttcttaacaatttactgctttatcttttttagtaataattagtctcataaatattttcaatttacagttattggctttaccatcataaccatgagtaatgaataagttattttaacacacattgttgcttgaagataatttaatgattttatggttgtatacagcttataaatatactactatatatgtaacccatttatcatgatttataatggatttaccaaacatattgaaatcgatttcatgcatgattccaaaaaaaaaaaaaaaacacatgcatgattagcataagtggggacctataacttaacccttttgaaagtgtgcagtttcaaaacatgatgtttctaaaagtgaaaaataaagatgatgtatatgtaagatttttacaccacatactaaaatattttttcaataaaaattcctttttttctttacttttttactatagggtagaatttttttaaaaaaatattgtgttctttttcaaaagcactgtgtaaattttatattgtgttaatttttcacagttgttctacggttattttttagttgttcaattgttattttaattgttctattttattgttttacggttattttataaaaatacagtaattttgtaaaaaaaaattgtgtgacagtaaaattataagttttacccaaatctaatatttttgtaaaaacccctatatatgtgagaggggcagggctttaatgcttaataagttgaggaatacctatttttttatccattaatcaaaaatactctcatattatacttcattaaaatgtacccacttttgtgggtgggttacccaacataccctcaacttccacttaaatttagcacataatttacattaacttaaagggtataattagaacatcatctataaaagtatgtatattttaaaaaaatatggaaataaggtaaaagttaaaacatgtaaagtaaagtaagtatacaatataattttctatagaaaaaaactattatattatatgatactcataaacttttgtgtatacgtaaaatgatatttttgtaattttttt

SEQ ID NO: 217481 - DNA, 603 bp, Cannabis indica
ctccttctaagaggatttttaaatgtcatcaagctattgaggaggagtcttattctgattttgaacttgaggatgaattcattcaactagctaaagtttccaaggccagtcgtttgttttcgtgttttttagggttttttttttgtttttgtttttgtaatttgtatgttgttgtgttttgatttgtccatttataatgtaataatggtttattttatttttacattttgtatgttttgttgttttatgttgttttatacattttataacaattgtattcttctccttctttttctttatgtttttctataggagaaggaaaatcccctattatgaatattccttctgaatctggggttgaagagctttctgctgatgttgttgttgaggtttgtggactttttttatttttttaatttttgttttgttttgttggttgtttttgtgttatttttcagctgttttgaaatgtatatgcatgtttttaatccaggactggacatgtaaatataggcgatcccaacattatcattctaacgtaatcacttttagttattattcaatcattaacgatattaaaactattctaaccccaacccaatt

SEQ ID NO: 217482 - DNA, 560 bp, Cannabis indica
tttatttattttttttttttggcagaaagcttatttgtattttcaagtacccaacccaacccaacccaacttttttttttttggacaaaacatatcatacaactcgcattaattaatagataaaatttgggtaaataattaaataattaaatagctccactggccaatgccaaatggattctttatatatacaccagtttaggatttacaatttgcatattattttggatcgtccgtacattttttaaaggatatttaatttaattttttttagaaaaaaatttacatttacaatagaatttatacatttatattttttttacactttttatttttatttttatttttgtattaaaatttctataaagtttttttctttctttcttatatctctttgtatttttttcaattgacttcttttttttttcttagtcttactattatcatgaattttgtcacacttaatgcggcatgcatgtccacatggccaacatcaatgccacgtgagagtacaactcaccaacaagaaagtcaagccatctactatgcacttcaactaa

SEQ ID NO: 217483 - DNA, 776 bp, Cannabis indica
gtaacttaacaacaggattcatctccctattctctcatcttgattaatattcacttgtttctttaagtttcttgaatttctttcttcctttttcaatcataaatacttttgatttgccaaatagaattataagtatagtttagtagtaattaattcaattccctgtggttcgacctcacttgcgtgagtatactacttgattgcgtgcacttgcgtagtaattaataattttcgcaacattaggtactactagtgtctaataacaatgcttttaagattttatccagccaaaaagaatttctttgtgtattggtagctaatcctcttgctcataattttattacctcataaaaatacacgtacaatcaccattatcatgtatgtgtgaaattgaccatataaatatagagttcttatgtttttttttgttcatcctttggcgttctggagcctttgaataatctctctcttaaataaaaaaaaataaaaagtacgaatacatctttgatacactcatatcaatgtagtgtggacattgtcccacatggaataaatagtagagaagtgagtcatatataagaacatgagctacttcactcattgctaattggttttgagatggaacctcataaatctcaatatggtatcagagtcatgattttgagatagaacctcataattctcaacacaatatcacttattgagattaatagtaataacttacccaatatatacatacaaaactaaaaactaacactattctctaatattgttgc

SEQ ID NO: 217484 - DNA, 789 bp, Cannabis indica
gttaatactatttagagacagtttttagaatcagattttgatagtgttatgaagagccctctatggtatcagttatttaaaaataaccgatgccatatcatattgaaatacatgtttggtttttactatatggcattggttgttttcaaataacccatgccataggattatataaataaactttgttcaattttcttcctcaacatgaaaatacaacaaccagcaaccaccataattcacaaaaaaaaccctcgaccaaccaccttccaaaaatcatatatctccaatatttttgcactatttaagctaattttatttttaaatcttatattttcgatacctaaacctatacaccctaaaaagtacgtttttttttttttttgttattatctttttttcactataaaccgaagccatagaaacaaagtggttgttataactccggccaccaattttagtggagaaaacattgaatgtcaacgtccatcaaggtataaatatgatttctattcattttagtaatgtacattgctttattttttgttttgtaatttttttttgatttttccatattattaaaattatgttgttgtatatatgcgtggtggtcggacttttgtcgcaattgattgtcgcattgcgcttattaagtaaaatttaaaccttaatacataatatatatgtatgtattttgttttattaaatatttgtgtatataaatattttgtattgtgtgtacatatattgtgtattttatttatgaaaatattgtaattgtattgtatatat

SEQ ID NO: 217485 - DNA, 855 bp, Cannabis indica
aaaaaaataaaaataaaagatatatcactaagtaatcacgagcaccacctcaataacaatgctcctcctctcaatcacttttaaagtcagttgttgcggtgaatctcatatatttacacaccattgcaaatcgcaatagtctaaaacgccacgtgttacatctaagaaggattacgagcggtacggtgtacacatgtctattgaacagagaaaaatacacagatactcctcaatggcatagattttaaagacatcttagacatgaggttttgcacatgaatcgtattaattgagtataaatcttggcaacaaaaactaattatatatattaaaattagataagtaagaacatctaatggttaaattttaaaaaaatatttagtaagatgaatattttaaagaaataaatattattctaaaaatttgtattaatatcatattatagtattaactagtaaacaacctgcgcttcacggttgatgtttcaaaaatttaaaattatatatataaaataaattatttatttcatttaatgataattaagtaataaaattacattaaattttaatattattaatttttcatataaatttctttaaaaaaatataaaaaaattagatgtaaaatcaagttaacccaacccaactatttagaatttgagctttatatatgtgcattatttaagataataatggagtttgtagcgacaataacggagtctgttaccgtctcatactttagttttatatatacatatagacagataaataaaaattatttttaattaatagtgtatttatagagattttaaaaatgctaatgtcatcgtctcatatctcttatatatatatatat

SEQ ID NO: 217486 - DNA, 591 bp, Cannabis indica
aaactctaatcttaatataacttgaaaacttcatttactttctatcatcaaccaatctcaattattccatcactgatctctttgatcaccattatagccatcaatatacatgttttactttttaaaaaaattacactatttcaaacttcaaagctccataatattgaagtattatcctcggtcacatagtaaatgtatatatattgttgctgtattttttaatttagataatacaggtatataaatatattatattttggtatcatgtatataaaaattattatacatatatatatatatttggttttgattactattaagtactgttttttaataattttatttcatatatatatatatatatgtataacatgtacaattgggctttttgttcagttttagaattttaatttaagttttttcatttattatactttctttttaactaactaactctactgactctaatttattgtatttttattttaattcattgttaataatttcttctattattatatgtattgatttaattttattctttaattttattttatatgatacagaatatgagaatgcctattgttagta

SEQ ID NO: 217487 - DNA, 797 bp, Cannabis indica
atttgttttatgtacagagcaaagttattttgatcaatagtgacaacttaaaataagatatgatgatgacagcgactttgaatgtagtgacgactacaagtgagatacgatgatgacatcggcttttgaaacagttttgaaattgtataatgaatttttaataagtttatcatttttttagattctttattttgtgtgaggattttccaacctctatttatttttattttactataacgcttgaaaatatctcttactttctacaatatttatttattttttgtataaaattatgaaaaaatttagtagaatagttactcgtgctattaaaaaatatcaaatttaatatatttttataacttaataattaaaaaaaaaaatataaccgcacgcgaagcgcggtttgtttcctagtatgtagaataaagtgatgacatggcagtctaaaattgctttgaagacttaattctattatctccttaattctctcatttttctaatttatttaatcaactttaaattctctttttgattctttcattttttttttataattaacatatattaaaaattataaaaatcaatcaatagtcatatctaggggtgggcatccgatctaatccaacctttttttcctcatccgatccaatccaattagtaattggatttggaatatcatcatccgatccaatccaattagacctcaaaatccaatccaatccaatccaatccaattactacttggattggatcggttttttaattgggatatccaattacacagctaaagttcaata

SEQ ID NO: 217488 - DNA, 580 bp, Cannabis indica
caaatggggtaggtcaggtccgatttggcattagcccgattcgacctgagagcaatttggcccggtccggcctgacccgatagctttcttaaacagggcgggttaggaccaaccctggttaaacaggttgagcttgacccatggtaagtgggtcaggtttgacccacctcctttttttttaatatttatttatatattattatttatattatttttgaaaatgtttatgtttgggttttttttagttactatctaaatgaataaaacacgattgttatgggctagaggccgtccaatctgggcggggcctgacctggcccgtagaaaaaagcccagattgctattcctaaaatttagtattttctttaatataatgtattttgtgttattgtacaggcattactccatatgcaaatctctaccattatgatcttcctgaggcactagagaagaagtacatgggtttattaaatgaccaagtagtgtaagtaataaataccattaaaaaaaataactactttattctattgatatttatcgaaaaaacttaagatttctattgtactgttgcatgccttta

SEQ ID NO: 217489 - DNA, 531 bp, Cannabis indica
aatatattattttagagaaaatatattgattttaatccttgtgaaataagagattaatgagaataattaatcaattattatttattggcagaataaataataaatcttatttatgataaaattgataaattaattttggaccttaaaatatggcccacacgtgtagagtgacatatcaaggctcatgttaattttgtttgattattttattggttaaaatatttaaattaaattaattaattatctttaaattattaaattaaatatattattggataattaatttaattaaaaagataataataaaataaaaagatttcactaatttctgttaattagttataagatatttatacttgaatttaaattctaaattcaaatcaaattagatatatattttttttaattttaaagtcattaattaaaatgatatatttataacattatatatatgatatataatatcataaataaaatacctataaaataagcctaagatatatgggaacaagagagaagttaggaattatc

SEQ ID NO: 217490 - DNA, 606 bp, Cannabis indica
aatgacacataaaaatgtgacatgtcgttttgtaactactgtgatttttccttttatattgtaatgcccataaaggattattaattatggtgcattttgattacttttttttggaagtttttctatattacttcttcaattatattgctttttattatgggtaaatggcagcaaaattctcaaaatttttattttggtttcacttaatcccgaaaacccaaatttaggcggtaaaaccccaatactcgcattctgttagaaatttaacatttccgtccattttaagtgttaagtgtcatattagactgtccacgtgtgcatctacgtggatacagtgtacacatgacacaattctattgatccacgtaaaaaataatttaaaatattaaaaaaattaaaataaaattaatttgaaaatgaaaaaaaaatgtaaataaaaaaaattttcttttttttttactttcttttttttcgttttatgtttttttttactaatttactagttctctctctctcccctataaaccaccatcaactaatcaaaaccaccaggacctcaccaaaactaccaccacagaaaccaaatcaaagctcacctgaaacaaa

SEQ ID NO: 217491 - DNA, 612 bp, Cannabis indica
tttcatttttcttttatctttttttgttttaccaaacaatctaaaattttgattacatccattttttttcctctcaccttcattctctaccaaacataaggtaaagtttgaatattctttaagcttaagttttaacattaggatgaaatatgaagcatcatgtttgcacgttgaaaaaaaacttttgtattgagttatttggggctaaaccccttatactttacttactgtaacaactagcccactattttcttttttactaaacccgccaaactccatatttatttgcatatttaatttgtcgtccattaaattctattaacatcctatgtgcctctaacttactttgttgaggtaatttttttacttgcaatatcacctaacattgatgatgtgtcccattaaattagaaataaaaaaataattataaattttaatcttaatttatttttttttctcttttctccttcactacttccctcttttttttttttcctcattatctcatctcttcttctatctccaccaacgcaactctctgatatgaagaaggtctgggtttgaagatcttgtcgcgaatcaatatgtgcaagcacgctcttcctcgaaaga

SEQ ID NO: 217492 - DNA, 680 bp, Cannabis indica
ccttcagacaaaaattgtctgaagctcggtcacgtgccttcagtcacgcccgtgtgcacccgtcagcttttctcggctggagaccacccttccgcgcgcgtccacggctagcgtgcagccttcctaggctgcacgtgcagccctcctaggcagccacctcaaaaaaaccgatttttgtgggatttttccccaattttaatttttcccaattttcaaaccccaaaattaaaataaaatattattttttaatatatttaaatttaaatattattttttaaattaataatatttattttttttaatagattattattaatctttgatattttgaggtttaaatttaaaaattgattattttattatttaaattatggtcagatttaaaaatttgttaatttctttaatatttatatattatttatttttaaggttagatattttaatattatatatattttaaattaaagatatctttatctttttaatttgaaatattatattaaaatcatcttatatgataaattaaataattaataaatttgaaattaacctagatatttttatagatattctaaccataatattttcaaattcaaaatttgttattttgttaaatatttaattgtttataaattataagttttaaaaatgatattttactattctatatcattcattta

SEQ ID NO: 217493 - DNA, 676 bp, Cannabis indica
atgtatcagcaacaaactggcaatggtatgcctagctttagacatggcaatatttcttgtggttttttgttgatctttggttgtactcatttatatacttttgtggttgactataggtagctagcttttggtacctgttactttattgtaacaataggttatgaagttcaatttcttttctttaagtaaaaatttcatataaattatgtttagttagacactgaaattcaatatcctttcctgccatatcattaatcttttaacatagaagttattataaagttgtcaatatttactttgccggttgtaatgcttgaatgttaagtagaacataataggttggagatgatgttgaattaggtaaagttagtacatttcaattgctttacttaaactctaatagacactaagacagaattttatatttacatgggaatataggatcatccaactcttgttcttctatttgcagaggtatgctcaactcacacctcttttacgacttggggctggagcatgtgctggaattattgccatgtccgcaacttaccctatcggtacatggtacggggggagggataactgtgcaggtactttactgaagatgtaactctgtaaggataatttgctgcagatgcttctctaaaaaagttttgtacataagacgtgcaaaatc

SEQ ID NO: 217494 - DNA, 714 bp, Cannabis indica
ataatcattttcatttttctatcccacagaaagagagagagagagagtcatttgatgtttttgtgtaagaaaatagaaaaaaacagaatgaaaaatagtttaataaagggtttcgcatgatttgatgatgaaaacgcccaaaaagtaaaagaaataatagagaggaaagagaattaagataaagaggaataatgattttcattattattaattgttgtttttatgagccaccgacaccgtgcatatagggggctgcaatagatacacacaaacaactgccacttttaaggctctgttggtagggaaaacagtgagtaaaatgaagggcatatacaaaatgaaaataaaaataccttaaaaatattggataaatcattatacataaaaaaaaaaatatcataaaaatacttaaaaactttttcttaatgaaaaaatagtttttgatgaaaaaattagtttcttcataaaaaatctttggtgaattttgttctaatcaattgtcgtcgaataggtaaatacttaaaaggttgtatataaattttacttttatataatcaaaatccgttttttatgaaaaaaccatcttgatgaaagttctttggtgagtaatttatctaaagattaaatattaattttaaattttaaatttacatatacatggcatgataaataccttaaaataattggaaaaaaaaaagaaatgtcattaaaaaa

SEQ ID NO: 217495 - DNA, 525 bp, Cannabis indica
acggtaatcttaaatgttaattgtaagaaaattattagtgacaattataagataccaagaataataacttactcaacagcagtagccaattgttttgtagtagagaatggaggaataagcccaaggtttgcagcacttaatccttctggtgagggaattgtttccgcagcctaaagaaatcacatctcatttatcaatgaaactgaaaatcttaatattaaagcaaatgggcaatataattaaccatatgtggcagagaatttatacagatactcaattacagataaaaatatgtaatgaattggttgacacccacctttagttcgagatcatttttcatattaagcatgtacaaattctcatcatagaaaggaatcatggttgaattttcaggtttctcgatgtcttcgactccttttcttccaattactaatgtttctaatcctgcctcgttggattttggccttcacttcaactgcttaaattcattgaaattaaaattaagagcctaaacaataataataa

SEQ ID NO: 217496 - DNA, 559 bp, Cannabis indica
aaaatgaaattttcctttttaaaaacatgattttactatccaaacatgctttcagttttttgttttttaaaaaatattagtcaaacaccatttagtttttaaatgacaaaaaattatttttgttctcacttttgaaaactattttttgaaaattaaaactgattacacagtcaaaactttcttaaatactcttttttggtggcgtttaataacactttcgttttaattttttaattcacaaaataaaagtaaaaatttttaatttatttttttttttttgttaaaaactaaaaatagtgttctataatcactttgtttttctaattttaaaataaaaaacaaaagtagtattctgtaattgttcatttctatgttcattcgtcaattttgatttaagtcgagtcctgtagagatcgagatcgatggtgggtttaagttcgtagagtcggatccgggttcaatttccaaaatctaagttagtgtcgaaatctaaaatattaattaaaaaaaaactaagttaaaaatttaactaaatagattttttatttttttaaatttt

SEQ ID NO: 217497 - DNA, 651 bp, Cannabis indica
acatgaaaataacatctaaataacatcaaaataataacaaaaaataacatatagataacaaaaaatcaacaacaaattaacaagattacaacataaaaagaccgtattttctctaaataaaataaaaaaatcgtaaaaatgtttcgaattccatgaaatcgtattttggtaaattttttgttgtttttgtgtatttgtgaaataattcctaatttttatctcacctatttttctagtccaatattgatagatatgataattttttttttctagtccatcaatattggactagaaatcttcccaaattgttttcatgtctaatactttttttgttggacataaaaagagttatttgtagtagcgtaaggtattaaataaacagttaaaattgtattcatagtatgagatatatatgcaatacaataattgtctaattattaaaatttagagatacttgtataatgaaatttattaagtaataaatttcaaaatcatgaattaagaagaaagtctttataacataatcaaacacagtggattagtatgtggagctctctaattgagttggagtattaaatatatttttttttttgaacaaaaggaactttatattcaaaaaccaacaaataacaaacaaggcacaaggccaca

SEQ ID NO: 217498 - DNA, 638 bp, Cannabis indica
gctgttgcgtctaccatcatgtcgatgtgaggaatcggaaatgaatcctttggacatgccttgctgagattagtaaagttgatacataccctccattttccattcttcttcttgacaactactacgtttgctaaccagtcaggatagtcaacctctcttactgatcccacgtcgattagtttttatatctattcatttatcactttgttgcgattgggtgcgaatttacgtcttttttgcctaaccgttgggtaatcagggtcaacctacaacttgtgaacaataatattagaatcgatacatgtcatgtcctcatgggaccacgcaaagcagtgatggcgtttgattaggaattcgatcagcctagctcgaaactcaggtgtaagctttggtgggaaccttattacttggtggtatgtggatggcacaaatttcatggaatggatccacagtcggccagggattgcattataagctgatggagagtcaactacaagaactttgtctgtaggttgactccttctgcataaaacgtggagtatgacctcgctgactgagtgtttctgctctccactgaacccaaccaatactatggacttggggatgatggtggcctcgtcgatcctcatcgtccctga

SEQ ID NO: 217499 - DNA, 673 bp, Cannabis indica
aattgcctccctaaagttctccatagcacgaggaagtcgctgacagcctcccactttctcaaaagatgagacaatctcattaacgtctccaacacacaaccaaggtcccgaaacctcatccttgattctcctcagcagttgccaggaaaattgtctttgcgaggcctctggatgaccataaaaacttgtaaacacccatggtaaaaacccctggccagctactcccaccacaatgtgaccgtgagaactagaatcaactcgtaaattcacttcattacgccacaacaataacaacccaccactcaaacccaccctatcaacagagaaatagtgttcgaactgtaaacttctactaacctgttctgcctgacccctatttaatttactttcagaaagaaaaataatacttagactaagctccttcacatgggattgaatagcccgtaatgtctaaggattctcgattctttggacattccaattaaggattttcattgattagattagttaagtaaatatctattttttttaaaaaagtttagcaagatgacctaatgtaataaataagtaaataaaaattatgaaaatactttaacgtcatttttttttaaaaattatataagtaaaattaaattatacaaatttgctaatattgcatattaatatattataa

SEQ ID NO: 217500 - DNA, 1100 bp, Cannabis indica
caatttatgtcatctctaacaattcatcattaggcagccttaagaaaaatttgtgttacttagaaaaagcaccgaacgaggtattgtttacaaggatcatggacacacccagattgagtatttatcagttgcagattgggcttcttccaatgtggatagaagatccacttcaggttattgtgtcattgtcgaaggtaatttggtctcttggaagagtaagaagcaaaatgttgtgtccagaaatatcgggctatggtacaatctgtatgtgagacaatatggatttataagtttttgattgaatttgggtttaaaatttcagttccagcaaaaattatagtgtgataatcaagttgctcttcatagtgtctcaaatcttgtattccacaagcgaactaaacacatttagattgattgtctattttgtttgtaaaaatatttaataaagcctaatctccacagaatatgtgaagactcgagagtaattaggaaatatttctataaagactttgaatggagtgcgggttaactatctttgtaaattgtaacaagctggacgtgattaatatttagtcagtcactctaatttaattagtttcctatttactctctctaatcaatcaatatcaatcaatatatatataaaggcaagtttaaaagagagtgaagtggcatgatctaagagctttcttctattttctctgttttattattttttttcacaattatatcaatttttgttattattttattatttaaatcacttaattaatatatgtatagcatttaaaaacaaatttcaacgtgtaataatttaataataattaatcaatttataactctttgtattctagagaaattaaaagtcatacaaaattttaattaagtcattcaatattccattatgttacgtgttttcatgttaagatctttacctatatatatatatgtataaagttaagcatagaagattgcaagtgcttacaattttttattttttctaattaatcttctttgtatattttatggtaatgctcaaaaaaatagttttagtagaaatttttttaacttctatctctctctctctctctctctctctc

SEQ ID NO: 217501 - DNA, 628 bp, Cannabis indica
tgattttgaaagccctcatatacgctcccaaaaaacactcatacatatgttggcgtggagatctcgctcaaaagagagttgttattgcctaactaacttaacactctcgctttttgtagctattgactttaggatcttgattctaagtatatataaataccaccaatacttatcattttagacacaacgatcagatcgattgagtttcgagatagagagaaatatatagagaaaagagagagattggatttggattttgtatgaagaatcttctgtatgaagaagattcttgagtaagagtgtgagagttgaaacacttagagagaactaatcagagaattaatctctactgtattgtacctgttcttgctcaatcaataaagaaaattttggtggtgttccaaaacaggagtaaagccataaattacattaatttatcagacttgaacttatatatatcttagtgtttattttattattttattgctttaatcgtttctaaatttaatgctctcttcatctttgtttttcttttatttttgtcattattaattatttgattgtttaaactaattatataattttctcacagtttctatttatagtagtgattctcttgtatatatat

SEQ ID NO: 217502 - DNA, 536 bp, Cannabis indica
ttcaaacaatcaaattcaaaaatcacattttgaaaatctaataaacagcattggatgacaatattttttaaagctaaagcttctgccattttaggagagaaggcacccaatatgtgtcaagcaacagaaaccataacctcacctgtgaagtcacgaaccaccatacacaaactacatctatcagtggaagcgttgagagtagcattaacattgatcttcactgttcccttactaggcggcacccagacaaaactagaagaagcatttgtaggggacgacaagctcccaccgagtgagaagcactaggagagttgtctaatctctagtaatcagcaagaaaatcacgattccaagaaacaacaatatctggagccatcaccttattattatgaaccttcttgttcttcctaaattaaattctccacataattaccaaaatcaactcttaagagcccacggacaaaggatcaaaaaatttatgaataaaatcacaaaaatttgacaaataagaggatcccaaaataaataaaaaaata

SEQ ID NO: 217503 - DNA, 1243 bp, Cannabis indica
cacagtgtacagatcgagctgagcaacgaatgaagaggtggcagtcaaaacgactatggagtaaacagagcaaaagtgagttcagagatgatgatgagcaattgatattgaacaaggagactcaaaacagaggtcgagactttagggagcataaggcataagatatagttaagttgtattgttatttctcgagcttggattgtaatcttttggtttatgagtacatgcctaatggaaatctttgggatgcacttcataaagggtggaataataatttccatttggattggccaactaggcaccaaattgctctaggggtagctcaaggattggcttatctccaccatgatcttactcgtcccattattcatagagatattaaatcaactaatattcttcttgatgttaattatcatccaaaggttgctgattttggcatagctaaggttttgcaagctagaggaggcaaagattccaccaccactgttattgccggcacctatggttatttggctccaggtaattatttttttacataccttcaatcttttatatttatgctttgatagttacaaaaaaaataactttaataaaatattttgatgattatctaattttatgatattattatagagtgattatacatgcatgtatatattatacaaacatacaacttttaatatatagacaggtctattattagttgaagttttttgtgtatcaagtattacatatatattattaggataattataaaaaagtatctatttttttttttttaaaaaaaaattatatttttaagttttaattttttttttatatatatatttttctgatttttttataaaaacaatacgaaaacaactaaaaaaattacataaaagtaacataaaaataatatataaataacatcaaaacaacaactaaaaataacatccagataacaaaatattaacaacaaattaacaagagtaaaatataaaaatactgtattttctgtaagtaaaataaaaaaaaattataaaatatttaaaatgacgtgaaactgtatttttattaagtttttttttattattttgtgtatttgtaaaataattcttatattatatgcgtgtgcagatttttctcatattaaaacatgcaaaatcattttacatagtgaaaaaacataaaagcatgtcaatataaaattagtgctattttccaagagtcatttcacaagtttttgttttgttatgtctcg

SEQ ID NO: 217504 - DNA, 547 bp, Cannabis indica
aaaagtaacatgaaaataccatataaataacatcaaaacaataacaaaaaataacatacaaataacaaaaatcaattaataagactacaacataaaatgaccgtatcttttgtaaataaaatcaaaaaagttgtaaaaatatttaaaattctgtgaaaccatatttttgtaatttttctgttgtttttgtgtatttatttgtgacataaaccctttttaattacctccttatcacttattaatactatcactactacaaaatactctttctatgtccctttttcatgtccaataaaaatagtagtagacattatatagttatgtggagttttttatgtccaatattgttggaaaatttacattatgtccaataatattggacataaaaaataagtgagggacataatatagtaatacatataaataacaattctttttttataaaaaaataattaagcacgtccattttgatgttggacgagactagtctttaaaaaaataataagaaacatataaaccatcagattttatattttaatagtaattt

SEQ ID NO: 217505 - DNA, 569 bp, Cannabis indica
catatatctgttggtatcccggtgcaactctatgtacacctcactaatgccctgatatgttattctgacggcaactaacatgtatgctaaacatgtataaacatattcatatcattatactaatcttatctcgtttccgaatttaggtgtggcacccaaccttagtggaacaactgctcggcgaattacaggcccctaaatcacatcgttcataacatggataagtgacacgctaaatcactaccggggacttaggttttaaaccaaaagtttacctactgaaagttaacatggcaataccctaaactaagagggaattaaccaaccaaagctctaaaactaacacgaattgaaaacacgaaaagtgcacgaaactggtttttgatctgattaaccggttttacaaggcctgtaaaattggttaaccggttttacactaggtaacctaaaaatattgaaaacctaaccaattcgactccaaaccttaccaaaccctctagacctgtatattataccccaataaacatatttcaagcaaataacacaaccacacaagctcagataaaaat

SEQ ID NO: 217506 - DNA, 657 bp, Cannabis indica
ggttgaaagtggagagaggatccaaatcctaagatagttgaagtgagttaatgtttttagtaattacattatgaactggagttgcatcgagttgaggaatcttagatgaagaagaaataagaaaaggagaagagatatctaaatataatcactactgaagaatacttataaagcttcgaacggggggtgtaaggaactaaaactgtcacacatacagatatagatggactggtacttgcttttgagccatagagccagtataatattatcctattacttgataaagtctaaattctaatagccattaattgtcctggaaatgtcataccttcccttttcatgtccttaatatctctgttttttgaagtctttgttgattggcactaattatctacttatggctgcatggtaatggggattaaatctcaaattattgggtttggtttgtcttagctgaaccttagccgcttgtctcccccctctgcaacaatttaccaaagaagatccacaaggatgacaagggggctaaatgacacaggtatctttctggtttctcatggtttaaagaattccaattcagtttaatttttgtgttgaaccaacttaataaaattttccttttgctcaggccgtggtgatatttcaacttgaaagatt

SEQ ID NO: 217507 - DNA, 850 bp, Cannabis indica
attttgtaacaagctggtttcgtagtatttagcaaaagttcgtaattaaggggattcccgaattttgtggtattttgtataagaaaagtttaagttagaatttaaataaatttttctaaaaattttaattaaattacatttttttcttaaaccgttagtttattattataaactaattaataaaagcacacatatgtggcgcctttatgatttagggcgttacataggtatttgtttttttgaaccaaggtacgtatttacgtacgtgaaacagtatgcatgcatgtgcagtaaattaattaattccatgtattataaatattttaactttcttccaaatatttgggagtcaaaaagctaaaaatgatagaataatgaaaaaaatggaaattatgaatctcacaattaaaaataataaataaataaataaacactaactaaacaaataccatttgacttaaaaaaaaaactatatcttactaataactattgattgaacaaaatcttccctatataatcacttccccctgcattgcaacaaccataattataagtatataaatatatatatatatatctttttccttgtaaaacataaataaaaaataaaaaaattcaataatttatattgtccaaatatataattagtaataaccactatatcactctgaagtctaaatgatccttttttttgattaaaaaaaaaaagaaataatagagtatctactataactattcgagcaccttaaattaaaaaaactaaaaatagacttcaataactattcaaagtagttccacggtagtataaaaaataagagctactatatataactattcaaagtagttccac

SEQ ID NO: 217508 - DNA, 548 bp, Cannabis indica
cttatgaaaaaattcataatttaagttgaattagattagcatgatcataatcctactcatccctttctaattaacccattatacataataaatcttaattattcataatcaggtttctgggatattacaaatgtttttaggcctattcagattcgatctaattatacattgaatattaaattttaccatcagatcggttatatctagcaaatgtatttcatgtatatttattggtttgaattggatttatttaatattttataactagtatttattgaattagattgaatctatctaatattttagatccaatatctattagattgaattaaattcatccaatagaaaaataatgttaattttcatatatacatgtattttttacgtataacaacataaaatctaatcactcattcaaactaaatgaaaatattatttagttcgattggatgtattagatttttggacacctcatcaaaatcggatccgatccaattggatattcaaaataacatttaatccaatccgatcagaattggatgtccata

SEQ ID NO: 217509 - DNA, 160 bp, Cannabis indica
gggtataagggcctaataaattcacgaattccaattcaaatcgtcgcctattcctgtaattactgttataaacctcgggaacattaatttttctcgacggttttaaacagttacttaactttttcaggacggttcccaaaaaaaaacatttttaggaccg

SEQ ID NO: 217510 - DNA, 748 bp, Cannabis indica
gtactttgcctccatagttttgtaccagaggctgtcatcgctagttaggagcttccaagcccacttcatgagaaaagtcttatttgtagcttccgtagttcggaatcctagaccacctgagacttttggcttgcaaagagtttcccaagcaactgtgtgcaatcttctttttaactccgaatctccccaccagaagtctctcagaagtcgatcaattttatttgcaatcgtggttgggatgacatcagaggcagccacatagttggaaattgtcgatcctacggacttgataaggcaggctttaccggcactggacaggagtttggacttccaaccttgcacccttctggaaacgcggtcaaccaagtactgagtgtcattagtgcgtttcagcgatctaaacagggggaggccaaggtaggtggcctgtctagacattcttttcattcccaaacattgactaatggcttgagcgtctctgctagtgactcctttagagaagtagattgaggatttctggatgttaactgattgtcccgagcattggcagtaagtgttgagacaatctaggaattctttagcctcacccagcgaagcttgacccaataggactaaatcattagcgaacataaggtgacttaaagaaattcctcttcgacccatcttgaatcccttgatcaacctctgctgctccttgagaaggatgaggcgagagagggtttcggctgccataataaagagggatggc

SEQ ID NO: 217511 - DNA, 507 bp, Cannabis indica
gcactgatcagatttacaagggggtgaaggtgaagccaaacactttaatatcaaacctcctattcagtctagatcatgtagaacatgttacatgtgcaatctataaataagaatttgattagtgttttcaaagtttgaacttgataatggtgtaacctttgaatttcaatctgatttctgtccagaatcaagttaccaaggatgtcttgctaatgggaactccaatctcatgttttcatgttcttttaacaaaagataagagtcgtaaattcatatttcagttcaattaatgcaatttcaattttagtcaatatttcttccattatatttattcattaacttagtaagagtagaaatcataccccttctcacttcacaactgagacaaactagattttacaagatgcattaatacatacatggatatcacattgcttaaagtgtaccagatacatatactatagtttttttcgaaagaatgatgatcacaatgatccttcagtatat

SEQ ID NO: 217512 - DNA, 951 bp, Cannabis indica
aacagtacttccatataacaatatagcatcattaagagaaaatagcatatacgggacttgaacacgggaccgcaaatacagaaagacccccacaacccactcacttgccagcctcatgctcaagtgagaatgcatatcaatctgaccaaaaagcttacatacatatataaataatatatattgagagagagagaagaaaaaggaaaaaaagaaacaattctatcatttccgaagcaatttcagatgcatagtcaacactatcatcaataactcttaaatcattaagtgtatctcaagtaataagagaattgtcctatcaaacagttaatattcccaagcactaaataggtatgaagataccgctatgattagagaatatgcaaataaggatctatttggtacccaacccaccatgccaacaagcacaacaatttctattagcttttcttaaccttctaaaacaacaaataatcaaaggatccaaaataagaaacatgggatttaaccacatttacacaaacacacaaatctaaaaaaacaaacaaatatgaagaaaaaaaaaaaaaaaccccaattgacaagaataacagcaaattaaattgaccaaaataaaacaaacaaataagtaccgatatagttcccccaatcagtcgaccttcattattttttcttaatacgagaaaataaaaactgatgtcaacagaaccgatctagaaaaagtaaaacaatcatcggaaaaattgaaaggaaaataagaaataattgatgagagagagagatgggcgtacctgtgtgtgaagatgatgaaggaaatgagaaataaaaaaatcaaagccatggagttagggaagggatagtgatgtggtaggattatcttatgtgaacaaaaatctttgaaagaaggtaccaaagactaggtctgtgagtgctttcctagagagagagagagag

SEQ ID NO: 217513 - DNA, 1058 bp, Cannabis indica
tgtctcagctcaacccaactactgcgtttgcccccagaattttcctccatcgagctaatacagttcaaatcccccaccaccaaccatggtaaaccacaattgattaatctgtcttgaaaagaactccaaaacaccttcttctcgacattataaggagttctgtaagtagcaataagtctccattctttgcctgaatttggatcttgaagtaccgaatcgatgatgaagttatcaagacacaaattactaatcctcactaattcattccatatcagaacaaaaaccaccagcaatgcctcgagaagcaatacacacacaatttctaaaacccaatttcttgcacacatagccattccttcctcattaactttcatttccataagaaaaatgcaatttggtttgctatttttgaacccaggccctcaaggtcttgtcgattaccctaaaaacggccccgacaattccaagataggagcctcattgggtttgggggggggcatggtaagggccgcctcctcgcctattcgaaaattttgaatgctatcaattttaacatccactagattcaagtcgtcagataagttcctggcagtaggaacctcgccagcttctcccaacttcgaaggttttggccgcctatcaaaagaacaggatttcgtgtattgttttctttttttgttctttcttgccttgtgacaaagtcgaaggaccatccgcgtctttaaggttaaatccgaaggctttggagagaagggtggaaggactcgaacaacttaatcaaaatcatgagagttatcaggggttctttgcacataagggatgtgagaaagacctgctttcctttttcttagttgagggcaggggtggactaactcagagacgtccactggatcgttaaagagtgtgggcaagggctcatatttgtcaataggtggaggccccattaactcttcagtcaacccaatttcactagcataaatgggccaagggaaatgggtgggcacagggtgtttgtggggttgtcttgatttgcacaaatcactatgtgggctttctat

SEQ ID NO: 217514 - DNA, 681 bp, Cannabis indica
tcaattaacactcaatttacacaggtatgatttttaaattttcaatgtaatctaattcacacaagtacatatatgaattggattagattgaaacaagaaaggtacaagcttgtttgggtacgatgtcaagcaacaacattttaatcgaaggtccactaaattagaagcccgctaatatgtagcctttataacttttctccctataatattgttagggaatgtaacaccctaactagcataggcgtgttgacgtgattttaaacgtactgtgcagctcgttgctaatcaacgaggttaatgaaaatcgtgattaattaaaattttgctatttaattaaaacttataatattacatacaaaatatttcgggatcccgtttacaaaatactttacaaaagtttactattcaatacaaaatatttgtcgcctagcgactaactacaaaagcactgttgtcccgaggatcgtacgctccaggcctaaccgccccgacatgtacaatcttcatctgctcgtcctcacggttcctcagctttggccttgcccttacctacacataaacatagcactgtgagtcgacagactcagtaagaaaagcataatataataaacatactaaatcccgggttataatcaagcgcccatacacctgaccataaccctaactgaatcagggacgtcc

SEQ ID NO: 217515 - DNA, 825 bp, Cannabis indica
tgctctcatccatggaatgccctcattccacaaaaaaattggatgctctcatccatggaatgccctcattccataaatgaaattggatgccctcatccatggaatgccctcattccacaaaaattggatgccctcattccaccaaaaaattggatgctctcatccatggaatactcttattccactaaatttaaatttatggaatgccctcattccattaaatttatggatgccctcatccatggaatgccctcattcctaaatgaaaaaggatgctctcatccgagaatgtactcatccataaagttattgtcaaatttatttatggtaaaagtatattttaattgaaaaaaaaagtaaattcaccttgtttacatcttgctggtgctctaaaatcgtttttttcgcgattaaatcaaatctctggagtcgtgggtttaagggcagtttaagcgcctgaaaaaaaaaagaagataaaattgagataaaattgaattctatatatatatacatatattggtgcaagaccttaaagtttcgtgattatgtattatatatttaaaaaaaagaaaaatgaaaggaaaaaagtcaagtcgtatatggtttatgtatatatagcaaaaaattttatctcatttttgactcaagcacagatgcaattgtgcccacaccctcgtaaaatatacatatatatatatattcctcctcactaactctaaaactttgacaattggtagagacaaagtatatataataaaatatgtctatactataactatatatatgtacgaatgaggcttgataaaaaaaaaagaaaaaaaaaat

SEQ ID NO: 217516 - DNA, 801 bp, Cannabis indica
agctttgtaaatgagatatatcataagagacagagacagagagagggatgagtctttgtttttctaatctctgaatcattatcagttaagtatttcaatgaccgttatccccctctcataaaaaaaaaaaaatagctgtttttgttcccactctgaataatttcaacaaatatacaaaaataagaaaaaaaaaattacaaaaatacgaattttagagaattttaaaaaaatttaagaattttttgattttatttatagaaaatacggtctttttaagttgtattcatgttaatttgttatttgttatatgtatgttattttttattgttattttgatgttattttgatgttatttttatgttacttttatgtaattttcttgttattttcgtgttattttacggaaaaatgtaaaaaaaaattcattaaacgtaaaaatataatctttttacaaaaaattgtgtctaatgtaattattcttttttattttttaaaaatgaaaatggaaatattgataaataatgggaaatttacatagtatactcacttttgctatttttttttacaaaaatactaccacacggcaaaatttacatttttactgtgtatttttataagttttatactacttacatttattttttattttttttattttgttttagtgttattttacggttcttttccataatttatttttttaaggtatgtgattcttttatgtttttctaagtgagaataaaatatatatatatatatctgcttattgtttttctaagtggttatatttgtctattggta

SEQ ID NO: 217517 - DNA, 501 bp, Cannabis indica
aaaaaaaaaattaaataaatcaactgtccttcaacttcctattaatcccattaataaggattgcctcatttagagacacaatctttcaggcatcttcactgccagctctgcttatcatcttacaaattctaataacccttatcctggtttttctaatcctgaagcatttaagtcttggtggaagtcgatttggtcttccaatattccttctaaaataaaagactttgtttggaaagttttttaccaccttcttccttctaagctgaatctcttttgtagaaaaaaaccttgataacccatactactccatttgtttaaaccaaatcgactctaacgctcactctcttttacattgtttcaaggcaggtaagtattggaaacaatcaagcttcttcactttctttaataataaatcttgtgatattaaagaattttgttaagaggttttgaagtgttgaacaaagatgaattgattgtgttttttggtatattatgggctat

SEQ ID NO: 217518 - DNA, 655 bp, Cannabis indica
ttattattattattattattattattatttattattattttttttttaaataagcgtgcataaaaaatcttataaaaagatatattatttattcttataagctaaaattaataaataataataataataataaaaccaaaagctaaaattaataataaaaaaaaacttaagccgagccgagttataaaagtatttcattctctttatatttttctttcccttccaatttcaaattcttagctgaaatttctttcactacttatcggagctaggagatcggagatcggagagtaggaattcactcacaacaacaggtactctgcttaccatgtcctaattaggtttttttttatagataaatgtgctaattagcttaaatacaaagaaaaaaatggaaactttgtctggttgtttgagttttctcaagtgattctctctgttttgtatattgggatatgatttaattatattatctatccaattctctcttttttagtcagatttgtcgtaattagtagtagttataagatttagaaattgtttgtattgttatatgaatatgtgttaagtataggagatatctgtttctcatgtgaaatggtattgaagtactgtgtttaactttaggataattctatatgttggtgttgatgaa

SEQ ID NO: 217519 - DNA, 607 bp, Cannabis indica
gtacttacgtggatagaatcagtgtcacgtggcaatacagctcaccggtaagaataccaagttaatacctgagaaatagagaccccgacaatcaactgcccatcaaacacaagaccaacttctactgggagcatactcccattgactgaattctggaaaggtatctgaaagatctctaccaataacatgaaggagttccttgatagatcagacgactttatcaaacttgatgaagccatatgataggcccaagcagggcatgtcaacaacaatcagtcacgaggcatccagtagtctcatgacccacctgttggaatttattttaccaggatcttagatctactcacaagtatgttgtttaacaccctaaatatgaactttctaaaacgataattaaacacatataaagttaagaaaaccttacattggttgcagcggaataatgtctccttccactcagatctctaacccttgtatcatttctgtcgcagagtattatcaagatctgagcccgaatgtccttctctttgtgtgtgatccttcacagtcttccaactctatgattgaggtaccacttgctgtgtgtgggcgactactctatcactaa

SEQ ID NO: 217520 - DNA, 524 bp, Cannabis indica
attggattgtattttatgcaatatttttatgtaaaactatatgtggtattgacttgtatgggtagataaatatataatattttagtataaattaaagtttaacatagtattatctaaaagtatgatatataatccaatttaatataatacaatacaatacaatacaatacaatacaatacgacttaatacaacataccaaacgaaccctaaggaaaaaacacagcttcagaattgtggtatataatgactcgaaccaaattgtagcatgaattatcaagccaattgttggatatgtttctcctgctattgttgaagcaaaggctgatcttcttgttgtgcaatggtctcaactggttcaggtgcttgtttctactattatgactgattgtaaaaatgtagtaatgtagtagataaacttaagttttgtaattggaatgttagtatacttgatgatttacttatctgtatcaaaaactcattattctttagtcctagactttgaatagagtatgtggagcggact

SEQ ID NO: 217521 - DNA, 855 bp, Cannabis indica
ctaggtttgggtcggtattcgagttcatgtctgggtttagtccatgtcaaggttcgaaccccgttttaggtcaggggcttggtctgggtcaaggatcgagtcccgagttcgagttcgggtttaggtttgagtctcaatcctagtcttggtccgggaccatgtctgggactaggttcgagcccgagttccggggctgggttcttgtctagttttggatcccggtccaagtctaggttctggtcacggtcctagtcctattctaagattttggtcgcgttctggttcatgtttcggtttcgggtcccaggtctaggtcttggtccaggtcctagtcctgcttttggtgcttctctgagtcccaaaccaagacaccgactatgggtgttgtccaagcctgtgttgccgaatcccaggacaagatctggatctcaatcacgggtcccagtcttgtttaggttcatttccgaagtctcggtctcggtctcggtctaggttcgggactgagacatgggtgcagttctgggtcttgatcctaattctgggtcccgagtcctgtccatgttcgggtctgtgtttaagtcttggttcgagtcctgagtcccagttcgggtttggattcatgtttgggaaccaatcccaaggtgggtccatgtccgagtccggttcctggtccggttacagttttgggtctgggtctaggtcatggtcgtggtcctgttcctgggtccaaatcagcttctagtttttgttccagtttcaagtcactgggtacgggttcgggtcgagtttgggttcgggtcctgatttttttccggggcgaggtttaggcaagggtttcggtctcagttagggttc

SEQ ID NO: 217522 - DNA, 642 bp, Cannabis indica
ccacacaacgaatcaaaacatgagtcgtctatctttttttgagaataaacaatgtattataaattaaagaccagagttaccttctaacaactaaaagaaatggaattaaactaaattaattatattaattgtaagtatgcctattaaatttgaggtgacatgtgtcgatcaacacttattcataaagaaaattatagcaaatgattttaaattataacactatataatacatatatatttaaattttttattaaataatgtatttttttttataatttttaaaataaaatttcagattttaatctttaaaaaaaaacttaaactattgctacatttgtttgtcatttgaatgtgattatatatacctttttttttttaattttaaaatactcattagtttctttggatattctgtcatggactaatctttggaaatcccccaacaccttgggggtggtggaattggaggtaaacagatgcttaaaatagtcacaagccacctgtcccatacgagaattccccgtaacccaagccagatttttgtcaaacagcccattgatagtattttttgtcttcttgttataagcctttcggtgaaaaaatttggtgtttcgttctccctcttttagccataatgaccgg

SEQ ID NO: 217523 - DNA, 562 bp, Cannabis indica
taatataaaatatttacaattaagattttctgatataaaatatttacaatattttaagtatattaaatttattaaattaaaattttcttatataaagtatgtacataatttttattttttaaattatatataataatattataaaataaataacgaatattttgttaagtaataagatattttattaaagttaatataggaaatcgaaaaataactgttaaaccagaaattttattacatagccacattagatatttgaaaaaaaatgtgttataatattatttctagctaggataataaaaacttaagattaaattattaaattttcattatctaatataaaatagtaaaagaaaattataacataattataaaaaaggatacacattttctttatctttttatgaatatttttgttgagtttccttcttcaaaattatattttctttttcttttttgaaaaactactcaaattatagtaaatattgccaatgaattccttaattatattttaattatgttttatatagttttctaataatgtagaactcatttggtacca

SEQ ID NO: 217524 - DNA, 593 bp, Cannabis indica
tagcttataccgcagatacaaattaaattatataacctaatatgatatatacagttcaacacactacaacttaataactgtgtaaccaaacatattattataatagataaataaataaacaaataagattttcccttatattatgaccgtaaaaaaaaggctacaataaactataacattattagaatataatattaaattaaaaaaacttcaaaaatattaaaattaattaattgcatgttcatacataagtacaactatcacaggaatatataaatatcgatctatatacactaattttaaatcactaattgttaataattatttttcttttaatccaaatcaaaatagaaggtatagatataaagattcagtaaataaatctaattatgatttaaaaaagaccaatttgcaacaaaactctttcatagtttcatgttttactttttatacactatagccttcttatatttgtttgggtaggaaaatttttttaggtttacttttcttttctttgtgtcaattagatattactaacactatgtttggtaggaagggaagatgggtggatggagaggggtggagggagagtg

SEQ ID NO: 217525 - DNA, 601 bp, Cannabis indica
tcacactcaaagaatagtgattgcttgattcttctcttgtccacaagtagcatgtcaaatcaatggttgtgttgtattttcctatcctctcttttagcgttttaatcttccccagaacacaagccataggatgaatttatgcttaggaatgattaatctatcccaacattcttggaccagagaggcgatccctgttgtcaaaaaggagttgataggtatgctgaattttggatctctgctggacgaaaccagtagcatctgtcctttgcatcagtttattcttcacacctacaatttttctccatgaccagcaacaatctgaaggtggttcataatcccaccaactaacatttttcagatacacattatgaacccagttcacaaataaacagtctttcttacttgcaatggcccaaacataccttcccatggcagctatattccaatttctgatgtttctaaacccgagaccaccttcagtttttgtttgacagatattatcccaagcaaccaatcctggactcgagatttcatgtgtgcctttccataaaaatgatctgcaaattgcttcaatatccttcaacaacttctttggtaagat

SEQ ID NO: 217526 - DNA, 954 bp, Cannabis indica
aaagcacccaatatcattttttattatttaaatatttattttaaaaacgtaataaattattttatcatgaattaattacaaaactcaaataactagtctaatctaatctcaagtctattcactgcagttctcacccaataaccattgccggatcgatcctaaaggtatctgacacaccaatcgtttccaccacacagaaatgataggaaaaataaaatatttctctcaatagtttgagtaaaagaagagtaaaacgtttgaattaaatttagaagaaataatatttttgtgttaatattttacacttatcatataactaagaatttcttgagttcttatgaataagttctgagaattggtctatgccgcttttgtggcagcggtggtgtactggaaggttcgaaatgaaatatttttatctatctaaagtgagaatgatagatttaattgtgcataatagttgtagtaatgtaaaaaaaatagaatgtaaggtgttatgctaaaataagtgagtatagcatattgatagagagttgtttacaaaaaaaaaaattcatagaaagagagaatatttcaggcctaattaaaaaggtattactaacatgtaatgttttgtattttgaaatcttctgaattaaaaacaaagttatgtgtttttcccattaaaatttaaaaatacttactagtattatagtctctttttacaaagaaaaacttcaaaaatctatgtaattactaattattgatgtttttggtagtttcttttaatctaaatttctaattcttttaagaataattatatttttatctcataaatttttatactattaaattttacctcttatggtatatacactttgttaataatacttgtcgaaatataatttttatataatgtagttattattgcaatttattcaaaataagtgaagtattaattggtagttgataaat

SEQ ID NO: 217527 - DNA, 520 bp, Cannabis indica
gtatcacattactactagtactatactaagtaatgatgtcttatccttaaattatgtaatatgttattcagatcattatattatattgtcttaatattattatataatttaaataaaaagaatcatactatttaatacataataaatcatttgtataggtttgtattttaacagagttcaaaatgtctggggttggggactcgggctctagactcgatcttgtttcgaaccccatatccttatccaaacctgaccccagaccccaagccctgaagcccaaacttcagacctagacctggaacccagaccagttgctcggacgccggacctgaaaccaaaacctggccctagacaaggccatggacccaagaccctagatcccagatccaggcccgaactcaagcccttacactgtcccctacaccaaccccgggccctgtccccagtcccagccttggactgcagacctggcaccaaactccgactctgacccagacccaacaccggacccgatatgaac

SEQ ID NO: 217528 - DNA, 232 bp, Cannabis indica
attgtatttttcttttcttttttttttcgtttttttttttttttttttttaaaaaaaaaaattaaactaaaaactatctacttttgcaaagtttgtttttgtgtttttagataccaatcattattcattacactctcttatactaatttgacttatgcacaaatgtggagtatgtaaataaatatacacagtactatagtagaacttgatacatttgagaactaaatttgtc

SEQ ID NO: 217529 - DNA, 548 bp, Cannabis indica
atgacactcagccatcagaagttacaagcatccctcattcctctcatcagcaattacttccatccttgtcacctgatacacctgctctctttgtagatgcagccattgatcatcgtaatggcctaactggtgctggttttgtttttaaacgtggacatcagattgtgttggcttctcaataccgtcggctgcctggtgctgtctcgcctacttttgcaaagtctcaagtggtgcattgacgctcagcttacaccacaagtagttttctctgactgtctaaacttagtctcaaaagtgaatggagattggcaggacaactctgctctttctggtttagtctctcgcattcgattgctcttctcaaacttccctggtgcttctttgcagttcctgcctcggcagtttaatatggaagcccataattgtgctcgtgaagctctcaggtgtagagaagtgagctagaggaagtccctcttcttcctctttggctgcttgttgctgttgtttcttttctctctgcagccttcttttctcaaaaaaaaaaaaaa

SEQ ID NO: 217530 - DNA, 882 bp, Cannabis indica
gattgtgccaaaatattccctcacttgttccatcctgttagaaagtgctatttctcttaacaacagccagcaatcttcttcagccaatttatccatgcaaatcttgtttgtgtctccaatcattttggccacctcctcattctgcattgtcaccacaactgtacttcccagtttcaacaccaccaatcttgaaaacttcttgtagtcagtagtccacacatagtctagtaccaatagaaaccccttatccttcacagattcacaaatttcttctcatcgatcagcaactgcaactctaagctaatgacagctggggtttgacgagtgagttgtttaatagtttcattggcaatcctaccaatgtcaaatgggtctgagacacaaacccaaatcatttatcttcaaaaatggtctaatttcagcatcattgtaagcatttctggctagagtagtctttccaattcctcccattttccaacaatggggatgatttgggtttttcgtcatcttggtcactcccactttgcctcagtctatcaatcaaagtttccttataagcaacacttaatttcaattttcaacagcataatcaacacttgttctcctatgtccaaacataaggtgatttcatctagtttcgtaattagggtttggatctctttagcaatgtcaaggcgatgatgagtgactatcactttaggacttatatgtttgctacattgaaatttgaaattgaagtacaagagaagaggatatcacagaatctaacctccatcacttgagccttttttcaaaaccttctaccagtctcactttggctttcttttccattgagagatcacagcatcggccattgttggccaattacttactaaaaaccag

SEQ ID NO: 217531 - DNA, 768 bp, Cannabis indica
aataagtcaaaagaaaataaattaaaaaaaaaaattagcattatcgatgtacttttgggtattaccggcggagtggcccaccactaataagaaaattggaataagtgagaaatttattgcgttttttagtttgaaatcttattaccagcagactattagcggcaggtgttcgctggtaattgattattttattactattatatttattactagtagttcctattaatgccagtggatttttgccggtaagaaaactctatatgtataaccctcaaaaaccttatgcttcttctcactacaagaaatgttagttttgtcagtgcatttttgcaacgataaaagtactctatacttttacttatgcataatagtgctagtaaaagctgtcagcaattctcggtcggtaaaagatcttttgttggcacagttcacctttgcattggcaaaactggcttgtgccagcgataataagtgtcggtaaaaggtatatgccaaaataaacaaagcccctaatctgccaaaagttagctaaaagcacttttgtctgtgcaggttcgcacctttatgactgaatggcacgagaggttttgcaggtgcaagtttgcaccaataaaaccttttgcgctaatcaggaattcggtggtattacctttatcgacgcattaatgtgaccgacaaaggtaaataagtttagggttttaggtttttagggattgagttttgccgacactattttttgtttttattttttaaattttattattattt

SEQ ID NO: 217532 - DNA, 939 bp, Cannabis indica
ataaatgttgttcttgatttctcccatattaaattatttatatttttctatttgaatgctatgaatgttgtgaattcttgttagatgcacaattaattaaggttttacattgttctactatcatcttagaattacttcatactttaggattttaaatagagtgataacttacaattaatagtaatgtcaaatgtattattaattgtgttaaaaaatagaacatagatcaaatgaattatatgcttcattgatttattatctagattaacttatctctatagaaattaatatttttcttagaataaatagattgcatacttcgtgaatctattgcttagtaaaaagacttaattattgagaattataccttgattaattgtaatagagagattgaaaaaattaattgcttcagtattttttgcaaattagtagtttaattgagaaattagaataattcttattgttattaaacttgaatggttgttgagggtagagattgactcttaatcatttcttaatatcgcactatctaccttgatttacgtttcagtttatgttattatttttttcttgacgcgacagtttatgttatttgatctttatattaacccctttttaattcttagttctaatttttgaataataaattgataaatagtctttgtggattcgacctatatttattgttatactgaagtaactggtaacattgaataaaaaatagtaaatttattgtggtaaaggacacgcatcaaattttgagctccgttatcagggacttttttgattcaatttgttattcattttttttattactaacttgttctcctagttgtgattttaatttttcagatctttcgttaaaaaccatgaagatatactatcaacaatatagtgatccatattatattgtaacaagaattcacaatatagttttac

SEQ ID NO: 217533 - DNA, 710 bp, Cannabis indica
attatatataaataataatataacatagcatttgtcattggtgtttaagaaatatgaatttcagtttagcgattatcttaatttattctataatttgtagtttcaagaatcttaatgtaatctattagctctctacgagtgatgatagagttaacttaattaattaactatatatctctatttaatattaatcaattaagcaataatacaacaatatgattctctttaaatgaaacttatagaattaattgaatttcttaatctcacactttttctatgtcatccaattctaagtccaattttaaattatctttctcaagtgtaaaatctaaaatctctatactaattaatggaaatcaaagattaataaaatgataattaacacaaaattgcatcaataaatagcaagaatagatatggaaataatctcaaaactttaattcataatctaaaatagttccatcaacactctagaaagagtatttagttcataatcacaaatataataaccacaataatcatattcataattaaataactaagcaaaaaaaaaaaacctaaagaagaagaagaactctaataatgataattgatgatgtttgcttgaaatatcttctctcttgctctttaatctatttctaatctcaaaattggttgtttctatctctccggtccgcccaaacgtcaaattacatcattctttatgtagg

SEQ ID NO: 217534 - DNA, 563 bp, Cannabis indica
gttctattagggttggctaatcggcaatcgcaaagccccatactcacgagttaaatttgaatcccaaatctctcgatagtaaataaaattacttctacaagacttttttaatggtgaataaaaaatattaatttatgttagataatttagattttattaaattcttatttgtcaaattaatgcttgcaatgaaatctaaaattatttctatattttaattcataaaaatgattacaattttatattagtaaaattaaatagataataagcaaatatgcattattattgttaataaatatgcaacacatacataaaaaattgagtgattttaggtgagttccacataaataatagttaagcaaacatatattattagtgttttcactgagttctacacatctatataaattatgaataatctatataaattatgaataataatatgttgacatatctttatatacaaatacacatttatgtaacagtatttaattattattttattaaatagtcgctttacatatcaaagtaatttgccactatcactatgtgtgttatgttta

SEQ ID NO: 217535 - DNA, 638 bp, Cannabis indica
aaaaatcttaggatggatatcttaatgattgagataatataattaaatatatatgaccactagtgtacaatatattaaaatgtacagtagtgaagtaaattaatattttataatataatagaatgatatacaccccatcatataattaattatatatatataaaaaagaaagacaccgaaagaaaacttaaacaagtattattattgttgtgtttgtatgcatcagcaaatatatattattacactacaaatatatatacacacactaaagcaccgatctggaactgatgtcgatttatttggatatatatatatatattatatacatgtccacatgtacatatatatatacacaatatatatatatttgaatacgtactactgttactactactgttcatgaatatatactctttgagaatgcaaaataatttaattagagcaataatattatgtacactaaaaatctataataataataatgatcttttaatatcataaaacataaaataggattggttcgaaaaaaaataaataataatattttgttatatatattctcgatgaacgtatcaatattattgttaatattttaaatttaataacctagatgattttttgtaattactataattatt

SEQ ID NO: 217536 - DNA, 698 bp, Cannabis indica
atgtttatacactttgaatatttgttgtagataaatttttttgaaataataatttttttatattaaatgttcatatttatataaataatatattattatgtatatcaatttgtttataaaattttatttataaatacgatccatatatatttgtaaaacaatatgttatatatatttatttttaatatattattattttttttattcaaaaatttgtattaggcccgacattcaattgtagtgccaatagactccttttaggcacgacagtttaggcacgacatgacgtgcctaaacttatattggcaccaaaaatggaacttctaggcacgatttttgtcctgccaataaaccttttttcttgtagtgagtactactagctagcgtagcattacatgcatattattatatttatgaatgtagataattaatccacacaccaccattaaattcacataatctagtctgctgtcgatttgttattattttttataagtatttgaaaaagtactcctttctcatctcatcaaaaataaaagaaaactatcgtaataatcttaatttaaaattttatttttatttattgaatttttgttttaagttatttaagaatacatgatttatgactaagtaaattatattttaattaagagtttacaactcaaatagagttacattgactcaaaaaaaaaaaaaaa

SEQ ID NO: 217537 - DNA, 577 bp, Cannabis indica
gctgatatttattgtcgcaaaataaagatgatagaatgggaattaaaagctagataatttgggatatactgtttgttagagaaatatgtggctaagatattttttttaaatttaaaaaaagattgtttaattttttgggtttaattattgggtttatttgttaacgggagatcaaacctatcgttaaatttaacagaatattcttttatttttaaagtatattctgttaaaccagaaatgccgttagatagacacttttaatatataaagatacacatatttataggtataagataattattaagtaaatatgtaataataataataataataataataataataataataataataataataataatagtgagagttataaaaataaaagtcaccattattagaggattaattaaaaaatactaaacacaaatatttctttcattagcaaataatagcataaaaatgaaaaaaaaatcaaaataaataagaaaatagacaacataaagtacaattcatagaaaatgttatatgacctattttatgccttctcttatatatatatttatagataaat

SEQ ID NO: 217538 - DNA, 851 bp, Cannabis indica
actcaatacataattacactaattatattacatttcggaggatattaggttttagcatttttcttaacttataaaggttacattgtaataaaagtgttaaactataactaaagtgtttttatcaaaaacgaaagatacaagagcatggtgtatttgtttatattttagccattttaaaaaacaaaaatgaagctataatgatagtgtaagaggtttactaaatttagtagattaaatttggtacaaaagtgaaatttattctacaattaacgttatttttttttactcaattactattaattaatattttttgttaattaaaacctttttaatatttatttaattattttatataattttaataaaaaaaattgaagacaataatgactttggatgttaatattcaccttatgcattaaaatataattataaaattgaggccaaatataatataatcatatttttttgagttaactttgctataaaatttgacgaagatggtctaactaatgtcatagaaatggtaatgtaatccgctttaaatagtatttatcatttgtcatttgtcgatagtctaataaatcttcatttaatttccaaaactatacaataaaagttatgtattttttaacattgttattggataatagtatttcatatttttttataagtgtcacattatatttaattagcgatattctttaaaaattatttttttgaaactatacgagactcactacttaatattactagaacaataaaacttatgtggtccaatattaccattaggcaaaccattggtgcagcaccaccaaaataatatcttgccatgagttaaaaaattagtgtaa

SEQ ID NO: 217539 - DNA, 508 bp, Cannabis indica
agcataggctggtagaagaaagccccaccgattttatcaaagtagcacgaccagctttagacaaggattcaacttccacccatgcaacttcaagacaaggttatccagaatgaagttgaaatctgcaactttattacgggagccctaggtagttaatgttacccactaccgtgctgagcacaagaacctgctccatatgtcgtttcatctcatcactagtattcttgctgaagaaaatggaggttttcagtttattactatgatggcccgaccaattgcagaatttctccaaacattatcaaacgtccttagcttcctccatcgtggccctgcccaccaggattagattgtctacaaaaaaaaaaaaatgggaaagtcgagggccattctggctcaacttgattcccctaatgatactagaatcttgggcgttctcaaggatacacgagaggattgttgctgcctagataaaaagatacaggaaaaggggatcatcttgcctaatact

SEQ ID NO: 217540 - DNA, 831 bp, Cannabis indica
gacgacgaagaagaagaggttggtggttgcgggtttggatttggatttgggcgaaatggggataattgttggagaaaaatggaaatgtaaggttgaggaatgaagaactcattggagaaaaagagacacaatttgacatgcttattattgttatttatttcagaactgtgaatggccattgagttttagcaaaatcaaatcaaaaaatttgaatgttgacctctcatgtatggtggataaaatttctcataatgttgtattttctttttttattttttttaattaattttttttgctgaaatattttttaattaattgctaaagatatggtttcatatagatttgtgttttcattacagttttacattcgggacagacttttttgcatggtacgacacaccatactatgaacttaagcttaagcttagcgccacatagaaaatatggctttaaacactttacacgacaataaaagcacaacacaaaagtacaaatatacaagtacaaaagcacaaattatatttataaatataatcttttatattttaattatgtatttaattaaaaaaatatatataaatctattttttaaggatatttaaattattgttttaaaaaaatgtctaaattatttttaaatatatattgtgtgttaatttaatgttgtaacaaagttattgttaacttagtttttagttaacgatttagaattaagatttacaacaatataatgatgttattatagaataataggattaataataaacgaaacaagagatttatagaggtttaataccagttatttagtaagaatagcatactctctttttg

SEQ ID NO: 217541 - DNA, 936 bp, Cannabis indica
aaaagttgggttgactgtataaaaatgttaaaattatatcaaaagtgtattttgtgtaatacaaacgtcaactgagtgtgtactctggcaaatggagcccattgaattaagaataaattctctccgtacagaatgaatcccgtacagtatccgctataatttcgaccctgctgtggtctagggttttctgtcaaccctgtatcttttgtatactcttttgtgtgtagtttctgtgctgctttcccgagtgtcttttctgttcctagttatggcaagtaaaggcaaagaggttatggaagaatctgtcatcagtggtatcaaggatctctcgatctctctggaggctaatgaggagctgggaaaggatgtgattcagaggtcagtggtggttcggctgatcactaagaaggtcattttcctgggtttactcagggcggttttggcaagaaaatggagactggagaaggggtggaaaatcgaagaggtggcggctaatacttttatcattcggttttccaagaggcacgaagctgagcttgcagttgctaacaccccgtggagggtgtgcgatggattcatgatggtgaagcctatgcctgaggatggccattggagacaggtggatttctacatatcccaagtgtgggtgagggtttatgaactgcctccaagattttggtctaaagtctattttattttctctaacattctaaatttgtttaagtaaacataacactttttctagtttatttataactttttctaaaatagtttatatttttgctaaattttttaatattttttaaaatattgaatttataaatataaataatcttgattttttattcaaaaaattcgcttaaatcatttgttgatttcaacaattttgattttgattttgtaagtataagtgtttagtaataaaaaaaatttact

SEQ ID NO: 217542 - DNA, 1045 bp, Cannabis indica
cgaaacaaataacagaaactgatatgtacattgttcatgttggagttgttaaaaaaactattggagaaaactacaaaaatttaccaatgatttaccaagactgtgtagccaaataaataacaatcaacttttaacacaaccttgaacagtaaaaattgactaataataactcaatttggaattgatggctgtgctctttttattaaaatccacaaaactggttccaaagggctctagcagtactctacttgacataaattaggacgtaactttgattcccaaataaccactactcaagcaatattatcttccttaagtaggactcctactgctatactcaaaaatatgtagattgactttgttaatgaggctagtgcaaaggaaagacctctatgcacatcatagttgataaactacaatggctccacaagctaagcacttcaataacataggttattttcaaatacatgctgacgtgttcagtagggaaaagtgataccaaagcagagaaatggaaactgaagagaaaatgaatttgtgtattactgaaccacgctaagcaaatagatatagagcatttgaaagactcctagaacaaagctcggttacaacttagatcagtcatacccttcagagtcatgcctcttttaatacacacagaacctttcataacaaactacctgctctgtgcccaaacctgccagctaagctactaagacatcactcattagttttcttacaactagtacaagtaatacaaaatagaagggttatcagtgttcaactaatatcacgaagcactcaagttccaactttacagatcttgcattctttgagagtaagagaataattatatcagatgacatcagacacttgcattttacaaaatgcataacaagatcagaaaatactttagactcaataaaaccccttggctgtaatacaaccctacaactaaatgtatttcagtttagcacaagaaggaaaattggaatgtagaactctaagtaataactgaagtgtgaacatctcacacaaactaagt

SEQ ID NO: 217543 - DNA, 556 bp, Cannabis indica
gaattcgatttcgaactccaccttaaccgctcatattaagagaaatctctatctcactcaacttgaaaagattgaggattaaattggaagattataggtgtgtttgacaacacttttttaattaattttctgtttttgcaattagaaaagtaaaaatatcttttaaaaaaatgttttataaaactattttcacttttcaattttttaataaaaatcaaaattttaaaaaatttgaaaataaaaaatcactttcaaaatttttttaaacatatttttttttcttcacaaatatgttgaactttgatcctaacctggaccttgggatcctaattttggcctcggccctaattccaaacatggacttaaataaaaattaaaaatgaaaattatagaacacgttgttttctatttttaaaattaaaaacagaagtaattataaaacatatttttatttttcaaaagtaaaatttcaaaaacgcaaaatttacttttatttttgtattaaaaaaaattaaaaacaaaagtaaatagtaaacaaccctctatatacgcaaac

SEQ ID NO: 217544 - DNA, 714 bp, Cannabis indica
tgatcccaccacaccctcatttttctttctagatcgcatcaccttttctttctctctcgttttggatctcccctttgtgctcttcatcttttctcgctcttattctttttagtgggcaacgccgataggacagtgggcaacaccaacgaacgggatcaatggctccagtattgacaaatgtacgtaggttcgttttgaatttgagattttttttttcaatttgtgtttttttcttccatgggatttgagatgcaagtgttggattaaaatcctcaatatgggctcatatgtatattagtgtattgctatttaaagtttggcctaaaataaagtgatcattttagtaattgtgggtcattgggtattaaagtgtcatcggctaaatgtgtagatacctaagcgatatttctaattcattgagggggctaaattagaaatacttaaaattaataacctagctatgaggttataaattggcagtggtccccaagaaacaagagtcaatttctattctcatcttccccccatcaagaagaaaattagaaaaccctaagtcttgttttcttagaagatcattacctaaaatcatgacaaagattaatctctataatatggattaagatcatcactatctatgtattaaggtacgcttctactatttggcttctctttttgaattaacaaaggtattctttagtatctatggttatatat

SEQ ID NO: 217545 - DNA, 749 bp, Cannabis indica
atattagaatatgaaaatattattggtgcttattagtaatttgcaaagaatgtgaaagtctataaatatatagttgtgtagctattattaaatatgaaatgagataatagtaacttttttcaattagaagattaatgtacattttactattaataacatacattattataacacaactatgttttacttactaaatatactaacacatattttatttttaataaaacaaatcgttcaaataattatactattttaattattaattaaaataaaaactaaaatattaaataaaactaacactacgtggcttggcacgtaacaatcacctagtatatatatatatatcaatgatttgactattataatataggaaatttatgtagactacttagcatttaaaacaaatttagtttatttttatcatatatattataattatttagtatttgtaaattcttacaaaaattcgcacactaaaaataaaatttaaataattacttatcatgcttatcaggaaaaaataatcataggtataataaaatatgtaaatctaattttcggcattgtaaattatataaaatttttctaaaaatttataaataatcttaaataattataatattatttatacacgttaataaaaaaaattaaattaaatagttattaaggaaataaataagtatctaccgaaaaatttatactctagatttaccctatatattatatagaatatgattttgtctcgtgat

SEQ ID NO: 217546 - DNA, 623 bp, Cannabis indica
ggaggcagttgctctgtgaaaaaaaaaatcgagaaaaatatatatatatgtattttaattagttatatatttataataaaagatgatatttataaatataatagtagatttagtgtaatagttaagctagattatatatgttagaggtcaaaggtttaaatctcattaacaacatttttttttctttttaagtttatttttgccctcctgttttataaaaaaaaaaactaagtctccctcgcttaaaattttgaatccgccactgcatatatatagatatctataaataatttgaaatgaaattaaaatatatatcttaataagaattacaacattacaagaactaacaaaacaacatatatccttcaaaaaaaaaccaaaacaacatatagaatctagtacaaaaataatatgatagagtaacacgtctcttgtacacgttcaatttattatatagtcaattattcattattattattattattattattattattattattatttatttatttagtaagtattccaatttccaagaacatggtaagacattaaattattaattcatgttcttatcatatttatacaaaaactttgaagggataattcaatgttggtctttg

SEQ ID NO: 217547 - DNA, 999 bp, Cannabis indica
gttgttattctttttcttcttcttctctagcttttctgtattcttgattgaaatactttttatttgtatttttgagtatttttgatttgtaatcctcctatttctctcttgtaatgagaactttttccaacatgaacatcatggaaccacgtattgattctactaattttatagaatatagcattcttgttctctaaacttttttacactccttaaaatattacggctttttaaaattttcttaaaaaatataacagttacataatgatgtcccttttgttagattttgtttcttttacctttttgaaatttagtattttttaccctcttaattttgtctgatacaaaaattttcccccttttatcaaaaaaaataattttaaaattataatgttctattaattttgaaaaaaactattaaaatttattaaaaaaagtaaataaaaatattaaattaattaaaaaaaatatgaagtttacttaaaacaacctaaattatttctaaaaaattatttgtaaattttatattattaataaacacctattttaaaaaattaaaccaaaatattattgaaaatccaataagtaatttaaacaaactaaaattttttgaagaaaaaatcatgcttatttatatttatagactcatatattaaaaaaaaaataattacaaaattaataaaaatataaaattattttgaaaaaaaaagttagaaattaaactaaaaaaatgttatgtttacttaagcaaatgtaaatttttagataaaataataaattcaaaacttgttcctctaaaatttagtttttacaaatatattaaaaaaaaaatcgcttaattaattttgaaaatgtaattcttttttattttcttaattattcaaaatattttcttaagatccaaataaattttttaaagatttctaaaaaaaaaaatattagaatctttctcattcttatttttttaagggttactaattcgtatagtcatcaaagttt

SEQ ID NO: 217548 - DNA, 643 bp, Cannabis indica
ccagctctcctcctcgtggggtatctcaccttgctagttagcctcccattttcttgcccatatatttttcaagtgtattttgagaacttttctctgattagcttaaatatctcaaaatttataattagtgaattttcgagttcaacaattattgattcattcactagttaaattcttgaaaaaaaaaaaaaaagtaattgtttttttttggtccagtgctatggaaatttataagatttagaaaatctattaaacatgggtggggcaaagaccacaaagtatgtatgccaagggtaaccagatgatatacaatgttaatattacctcatgaattttatccaaaacttcatgtctcagtacagaaacagaatcaagtaattaaacttatgcatttgataatcatttcaaatacattcaatgtttataattaattgatattttctatctttagttttatagttcccctattctgatcctgacaacaataaggagacaattgacttacgggacgaataggaaggttttgtgaagtttgaagtgttagagttattagtacacagttacaacttcactttttgtgatgatatataggatataactttttttgattcgttactgttatctactttctatattacgtaaa

SEQ ID NO: 217549 - DNA, 538 bp, Cannabis indica
atggtttagttggtcttccaaatcatgtttctcaaggttctggttgccaacttgggggacaaaattgttatttagaagtaacccttggttgccatagatcagaaggtgacgggcaagggaattcaaactcaaatttcaacaagaatacatcccagcatcatgttgctgaatcttctgctttggggaaagttgatcaaaagggagttgtagataatttatcagtgtacgagaaaacatttctatatccacctgaagccgtgtttgttcctgtattgcaaaaatcatttacaagatcttctcttaaaaggtacataaacttaatctgtactatccatggccactttttctttttttgggaacaacagggtaatcgacatatttggtctcttgactttggtccttataaatttgtggaaattgattcttgaaaaaagttatattcttcattgatttggcttagagaaaatgaaaagaaaaagtgaatgttagaaatattgaggatagagaaagtaaaggatagttataattttattttttc

SEQ ID NO: 217550 - DNA, 380 bp, Cannabis indica
attacaaatagttgaactactaacatcaatgtttttttatgttaatttttttttttacatttttatggttttttataaaaataacatcaaaacaataaaataaattacataaacataataggaaaataacatcaaagcaacaataataaaaaaaataacatataaataataaaaaattaactaacaagagtgtaatattaaaatacatcaaaaaatcgtatttttctgtaaatgaaatcgtaaaaatatttaaaattccacacaactttattttttataatttttttattgtttttgtatatttgtgaaataattcctattttttcagcctacattgttattgatttaaataaacacaaataggatcctgagttcaattt

SEQ ID NO: 217551 - DNA, 601 bp, Cannabis indica
taattaataaaactataaatactcaagtcaacgagtttgagttatattttaaaaaaattgtaattattaacaatatattatgttaatatttttttaaaaaaaatcgtaaatttaatttgtttattgtttttttttaggagtttcgtatctatagactataattgattggttaaactaattatataaaatttattttcctatatattcaaacttttttttggtaaggatttccaattcaaacttggaaactaattcaactgtttacaattatatattgtttaggtatctgaacccaaagcatatggcgcaacggaacaatactcattatttctcgcgcagtgaataattatatttatattgctatgcgatattaattataaactatactacgcgcgtactttacattccgtaaatgtttttgattaatttcaagtatctggatttaattttttactgataagaaatgtatatattattacctttcttggtataaatatatgtatgtatatattctagaaatcgaaagtatcttcactaatattactggcacgaatcatcatcatatatatgatatggcacaacacatggctgaccctgtgat

SEQ ID NO: 217552 - DNA, 698 bp, Cannabis indica
tatttttcctgaattcttcatctgtaccatcaaaaaggaaacggatggtcctgccgcgtgaggtcgtattgtcaacaacttcagcaaccaacaggtcatcatctccaaaatatagtttgttgcctacccggattttacgggccggatcaaccaaaacatcccataagcgaagttccttgtttagttcccttaaaagaaatacctcaatagtagcacctgttttttctttatttccgtacaagcgggctggaaataccttggtgttgttcaggatcatcacatcctgatcatcgaaatactctaaaacatctttaaatattttatgttcaattttaccactatccttgtgtaaaaccattaaacgggcctcatctctctcttctgaaggattattggcaaccagtgattcaggtaaattaaacttaaattgagataacttcatatgtttgatgtaatattttagggcgcaaatttacgaaatataatttttaataatgtataattatttttgttgcctgccgataaattagactcttcagtaatttatgcctgaatgaggccttcttcagattttctacagaattcgattgtagttttaattatctttattgtactaaaatcttttataaacgttaaagttgtttcacatgaaaaaaatctactttactattgctgccttttttttgtttatgtgttta

SEQ ID NO: 217553 - DNA, 937 bp, Cannabis indica
gaggggcctcaacatgcatcacctcggccctaggagcctcaaaatgtcatcttggccttaagggaaaggccctcaccttagcacgtgcttctcatgactcgttggcatcgtgatcttgatatgtgtccttctccaacatgtgtttctcgtggtgaaaataggtcaatacatgtgtaatgaccgcatgttagattatggattagtaaagacaattaacattaattattgacattttataattatatatgattttatattattgtggactccatttttagaagtgggcattagagtcataattttttaattttggagattttattaaactctaagagtattatttatggtagatataaattatgtaatttttatgatttttgctcaacgacaatgaaaaatgcgatggatggccattagagtcacatgggtaagtttaaagcctaattcttaatggaaaaatatttgagatattttgaatatatcgagattaggcgagaaattaactaaaaataattaaaaaaattacttgtaatctgataataatttaattttatttcatttattcatatatttttatgtgttaggctcgataatgtgacttcactggaagatatttaacataatattaattaacatgtatatatactactttatataaggtttttagtttaactaaattataaattaaagtcatttttacatggaagaaaaaattatatatatataatgtaaaataattataacaatatgacatgatatttaacataatattaattaatatgcatatatatactactttttacaaaatcatgatttgacaaacacataaatacaacaacaataatgtgcataacacatcaattagtacaatcaagaaacaagaatgtttttttttctttctttttcggttagtgttttttaaaaagaactatatata

SEQ ID NO: 217554 - DNA, 657 bp, Cannabis indica
ctaataagttagtttaatactttttttaattaatttttaactttttaatttaaaatatattttaattaatgtttcaaaaatatatttattaaactatttttactttttaacttctaaaataagtataaaattttaaataaaaaattacttaccacaatttataatttattttatattttttttatttaatattttaaaattcagactcgaacaatagatatcaaacttcagactcgaacactaaatctcaaacccaaactctcaactcggacttgagcctaaaccaagaccctcgactcagatttgagcctggacctagatttagacttggattccaaccgagaacctagcctcggcctcggctccaaacccgaattttggttttgttttaaaaattaaaaataaaaatagttataaaaaatacaattatttttgagaaaattacattgtataactattttattttatttgttttaatttataattttattttcatattctttaatatatatactcagttttatagatgatgtctttattatattacttaagttaatgtaaattatgtgctaaaagtggaaggtaagggtaatatgagagtgattttgattaatgaatataaaaagattcctcaacttatccctttattttttgaaa

SEQ ID NO: 217555 - DNA, 569 bp, Cannabis indica
aaaaaaagaaaattgttttacaaaaacaatttggcttgtttaggccttgttttgaaaaacagttttacaaaaaaaaaaaaaagttacaaaaaacaagaattttaaaaacaacaaaatgttgtttctgttttaaaaccaattcactttagtcaatattgttttaaaaaacactaaccaacatgacttgtttttaaaaacttcaaaaactatttttgtttacatttctaaaaacaattttttgaaaacaaataatagaaaacaataccaaacatgctctcagtgtataaaatctgaaacattaggtatttatgctgcaatttacccttgtttttatatgtgttttaggtgaaagattgggagttctctgtttttgtttattttggtgtttaattttcgagtccttttatgatgaaaagggtcaattattgaaaaagagaagttcgggattcaaagtcatattcagttgcagttctcaacactaaaaaacattcaaagttcataattttcagctccaaaagttgtggttcaaagtcaagagttgaggcttcccaaaagaaaaatgaaagaat

SEQ ID NO: 217556 - DNA, 763 bp, Cannabis indica
ttttccaaagttttcccatcctaaaagagataaacagggtaagatttcagagaatcaaacacaatgacaacatgtacaacaaatgacatatcacaatcctcttcacaagaaaataaaaataaaatctggaatgtatgctcaacacagcagtgaactaagccgagtaaaatgttttatttacagtcggggataataaaccactcaacattacatgaaaaaatagagaagtccaaataacttactgcaatggtgatgacaccctccttgccaactttctccatggcttttgctattagctcaccaatttccctttccccattagctgatattgttccaaccttccataaaatttatcatacaacaatgtcagttaaaactatatttccatctcttaactaagttttaaacaaaattagagcttttaaacccacctgtgctatttcttccgatgtactgatcattcttgccctgctcttcaagtttgtcacgacagcatccactgccattgtaatcccacgccttaaatccatagcattcatccctgcagctactgacttgcagccttccttaaatattgcacgagtgagaactgttgcacacgtagtacctgcaaataattacacagacctcacatcagtaagaaagctcacaccaattaatacacataaagaatcccatcttctgataacaaccatttgaccacaatatcatccaaaaatagaagctgaatgtttataaataaaaatagataagacattacacc

SEQ ID NO: 217557 - DNA, 564 bp, Cannabis indica
aggtccatttttgtctatttaacaaaacagagggtccaattgataacttttgcaaaacacagggtccaaaatggtatttaccctttattttataattgttagtgatttatgatgcatatgtgatcatgttgcacatgctattagccgggactgtgtataaagtagaaaattaaattgaacatatatgtatggatcgaaatagtttcaatggactttttctataataggtattttaggtctaaattttatatttttagcttggtaagagaaattaaacaaaaaaaaaattaaaactttttttttcaaaaaaactgactgagcaccttcttcctccctctccatttccagtcgcttctctcctctattttccttctcaaataagacactatttcagctccaaaaaaaaatcatccaaattaatgtagtatcaagaccgcaatgtagatctcaacaacaaaacaaatctaatctcgacaaatccaaaattaaaaggtaaactagaaaaatcattaaaaagttaatctaatctcgacaaatccaaaatcaaaaggtaaactaaaaaaa

SEQ ID NO: 217558 - DNA, 769 bp, Cannabis indica
  modified_base (50)..(50): a, c, t, g, unknown or other
gttaaaaaatttaaaaatatagatttaatataatgttaaaaatttaaaanagttaaagattaatataattgagagtttgagagatccacttatatacacattatattttcacttttatctactttcatcttttatatgtaacctcatcaagatgtacatacgttattttagtttaaaaagaaaaaaaaaaaagaaaaaggaaagatagttaatcttaaaacttaaagaaaaaagaaaaagaaaaagaaaaaagaaaaaagaagtagaaacaaatcattgaaacagctcagctcacatttattttgctttatttatagtgttacaaaacatagtgctttgataaaataatataaaaattaatacaatataattattgtattaaatacacaaaatgatttgccaaattcataaaacgaattgttcacaatttatttttactcaaatacataattataactttgtcattcatttgtttatttatctatttttttttttgaataaaatgtgaatataaattaaaacaagaccttatgatcattacacaaaatctcaattgatatggaagaaggacccattatattcgaaacattcatagcaaaagctcacctagccacgttatgggctgtaaagttacataatatagagatagataaaaaattacaacttaaaaaattattagaggaatttttacattgggtaacatagttaccaatactccaactagaacaaactcctgtcaacttaagaaaaaaaagaataattacataag

SEQ ID NO: 217559 - DNA, 631 bp, Cannabis indica
tcgataaaaaatgaaaagttattttttaatttaagagtgtttttggaagaagtttaaatttgtaactttctcaaaggacttctagaaattattttaaaaattaaaataatttgtataattcttaatttactcataaaagatatttttttaatgatatccaaatgctttaaaaaacacttatacttttagctataagcagaagtggaaagtttcccaaatgatataataatcttttttacattatattttttttttaaattagcgtgcataaatatcatcaaacattgcaatcgttacaaaaaaaaattgttcggaaagaaagaaacaggcacacggtcatatcgattgtgggcaaaggccactaaatacattatgggcgataaaattacagtttttactaacaaaagaaaaattacaactagtaaaatactgagagagtctaatacaaaatgcaaagtagttaccaatcacccaacgaacctcttgtccgctgagcgagttaataactaccattgaatcactctccactataataaaactccaacctttatctttagctactttcatagccaagcagcaaattgcaacttttccacacagagcatagtaaactccatccttgtcgtatgca

SEQ ID NO: 217560 - DNA, 838 bp, Cannabis indica
ttttagctgctgctatgaacacaacaaagtatgtattcatgtctggaacctctatggcttgtccacatgtatctggggctgccactttcatcaagtctgttcaccctacatggactacttctatgatcaaatcagcacttataacaaccggtatataaatatatatatatatatatatgcccctctctctctctcgcaatatatatagtcttttaatactgggtacggtaaaactttaaattgagtaggtctttttatattatttattaaattaaatcggtaagacccatgagtagtgtagtgtgtgcaataccacgtaaaatgttactatagtttggttatatgtataatttaatatattgcgtctcacatattttcttttaatattgcaatgcataaaacctataaatttacactagctatgacctgtaatttttgtttctcatttgggcacaaccaacagcaagtgcatatgacaacacaggaaaaccaataagaaatgaactaaacctagtggcaagcccacacgaggcgggatctggagaattaaaccatatgaaagctctagacccagggctagtcttcgacacaaccacacaagactatttcaatttcctttgttactacggttataaagaggcaaaaataaaatccgtacttaagggagcaaatttattccaatgccccaaaaactcaaagccagaactgatcacagacattaattaccccatccatctctattggcaatctaaaacgacagcaatcaagtcctacagtcgtcaaaaaggactgtgaccaatgtaggagcctccatctcaacatcaactgttcgagtcaa

SEQ ID NO: 217561 - DNA, 593 bp, Cannabis indica
agggtcttgcttcaactctctcagcaatctttaatgctcatactttcaaaattttcagagccgaaattttagggagagattgtctatgatcattgtgtgcgtgtgtgaagggatgtaatgggagtatcactttttgaagtaattcccctcactgtgagatatattttgtaattgttcactatgttgatttgtattcttggacatattcaaattcaattatgtattactgactattcttattaataaagattcatgattcattcattttcgagctaagtttcattcttgcctagtttttaattaagtttagtttaattattgtgattagttttagttctattatgtattcttcaacactgttattgttgtaatagcatggttttgagggtgatctttcaccacaaatggtatcaaagctcaggatttagagttcaagaatcacactcaaccagtcaagattcatcttcaacatttcaagaattaaactcgaactttcaagaagtaaactctagcaatcaagaacctcgtttcaatggctatatcaagatctgaggtgaactagttcgcaaattccaatgattaaagcctatgga

SEQ ID NO: 217562 - DNA, 864 bp, Cannabis indica
atatattgtgggataatataatatttcacattaaataaataataaaatactgaattatatataaaaatttgagcaactccacttatcaccaattaattttaacaacatagttaataacttatttaaaactattttaatatactttatcaggccataaatgatcataaacgtgttaaacacgtaattaatatattaatagggtgacatataattaaataaaatttaattaataaataatgtgtcatgttcaggttgtcacgattaacacaaaaacgtactcgtcaataacctttaaagttataataatactttatcaagccataactgagtcagaaacgtgttaaatatgtaattactatattaatggagttacacgaccgtgtcatgttaactcgtttataaacagattgtgtttgtgtattattaaacaagtcgtgttcggatagagcatatacatataatacatagatctcaacacaacaaaaatacaacctacaaacacaaattactacaactacctttagttaaagctttcttatttaagtcccacataacaatatataaaacaaaatatagaaagaaagaaagtttgtattttcctacaaattgccatatattgtatgaaaactagtttcacataaaaacaataacgacataagttatagaaatttgtatatgatgtccttaatgactcgccattttcttttcatgtttcatattttctctcattaatcattgccaaaccagttcatttgtataatactcttgttgtgactaacagaataagagagtcctataagttaaattgttcttccccatattattatcaaagtaaaatcattatattttcatttctcaactcac

SEQ ID NO: 217563 - DNA, 514 bp, Cannabis indica
aaattaacataaaataatgcgtggaaaaaaatttacggaaaatattaagagtaatttttaaaaattatttaagtttttttttttaataatagagtgtatttatcattttatggggtgcaaatagaagtccccttatattattaaatgcaaatttcttttattatgcaaaaaaaaaagtataaattctctcgttcttttttttttttaatctggaaactttttttaaaaatttttttaattaagcaaaaaataaaaaaaatacaaattctttcattttttttaaatctaatatttttttagtattttcttttattaaatataatttttttattaagcaaaaaaaaatcttttttttttaaatctgaatttttttatactaaaaagaacatttcccaacagtttataactgttgggaatgctaagtatacccaacggatgtaaaccgttgggatactaagtattcccaaaaattataaattattggaattcactgttttcttttttttttaaaaaa

SEQ ID NO: 217564 - DNA, 918 bp, Cannabis indica
ctttaaatctctatttcttttatctcttacattatagcagcgcttggttagaggtaatgaaatagaatgtaataaaaaaaaaattctttattccattcttttatttagttacatattgaaatagaatgactttttcaattttttggtagaatgaccattccattataaaatagaaagaaagaccattacaatgtatgataatagttttttatgcattttaaattttatttcattacatttttattcttattctcattctaatttctattcttatgttttctttcctcctaactaaataccacctaattgtgtcttttttaacattacatttcaaaattaatcccatttcacacgtctaaaaaatatcttcatattaattttttatttaattcacatatttttaaaaaatatatttctattattattttttttaaaacaataaaataaaaaaattatttatattttttaacaaattattgttataacgttgttactttttgtcacgttaataaaaagagtataatatttataaagaaataaatattaaaattataattgacaataaagtttaaatattattaattttttttatatacatatcacttaaattaaatatttttttaaataaaatataattttatttattaaataatattaattaaaaaaaaattaaacttacataaccaaaataattacacctaatattaacctatttatatatataaaaaaaatacactcaatagacttgatattgatatgggaaaaaactgaggggggaatgagaccccatattatataatttttttttttacgtaaactatctgattaaatttagtaacagaaattcaaactttaagttcttctggccctagacatatccaaattttcaccactgaccaagtatccttaggtgggcag

SEQ ID NO: 217565 - DNA, 788 bp, Cannabis indica
agagagtagatggagttgaatgagagatgccaaattctgaaagtatattgaagaattagaggagtttgcatgttgtgttagccaagacctgtattcagctttttgtagaggattttgacacagtggttcgctttcttagacttccattatatgagagaaattgcctaaggaaaatagtaaaaaaatagtgataaatcaccttgtatctggacatgtaccccaatctgcaccagtaaaggcatgtaggtgaaaagcattgtcttgttgaggaataaaagagtggaagagaagaccttgtccaggtgttccttttagatattacaagatcctcatagcagccttaatgtggggttgtcgtgggtcactaagaaactgacttaaatgattaacaacatatgttatgtcaggtcgggttattgttaagtgtagaagtttgccaatgaggctcctataagaggtgagatatgaaatgggagccccaatattcttattgagagatatattggcatccattgatgtggatataacttttgtgctaagggagccagatttagttaggatttgtagagtaaaaggcctttgagacacaactatgcctgtttttgatctaacaatttccaggccaagaaaaaattgaggatagctaaggcctttcagttagaacttggagtgtaggaaaactttaaatgcaagagcatctgtgttattgttattggaaattattatgtcatcgatatacactaagagggccaagaaggcattaagatatgaccttatgaagagggaat

SEQ ID NO: 217566 - DNA, 1113 bp, Cannabis indica
cccaaaataccctaacgtaagagagtcacatgaagagtatcttgaagtgataggggcaaaattagtacaatccttaaaaaaaagaggtaaaaatgatagactttaaaaaataaggtaaaaataaaagaggacaatataaaaatggtatagagtataattttctttattttattttagctatctagttcttttatatatccatgaataaatgggctttttatatacatctaagcctaataccaaacatataggctcatacattttattttatctttcttccacattatttttgacactttttgtttaaaaataatccaattataagcatctctaaaaattatagtaaaataatattatattattatttaatatatattaaataataatttttttactttatgataaaataataaaaaaaataagaaaaagaaaatataaaggatggtatgatgtgacattactttttattctaatggtaagcatcaattaaaaaatactaaaaatgtatcaatgtcattaagcatcctttataatatctccattggagatgctcttagactgctaatttgtcaacaaatcaatgtgaacaaatattttgatcatgagcttaatctttgaatagattgacgaaaattgaacttcacaagataagcctccccaacattagagcatctccaatgaagagctataaatgtggtgtattgctattttttagaatattttgctaaaaattaactccaatggtgatgtaaaatgtgtgccaaatttggcacaaaagatagcatgtgccaaattttagcccacaataaatatcacattttttaattacttatttgtcactcattaatactattcgttaataaaaattatttttatatttataagttattaaaataatataaataaaattgtatatttaagtattaatgatattattaacttttatagctagtttacactttgtgcattagagtataaatacaaaaattaggctaaatttaatctaaaatatacaccatccattggagatagtcttataaatattttcattgccaagttggcatttgttgcttgacttctaaattattgttattattattattattattatta

SEQ ID NO: 217567 - DNA, 507 bp, Cannabis indica
ctagttggtcaggatactcggctctcacccgagagacccgggttcaagtcccggcaacggaatttttttgtttttattttatttttttaaaaaaagttcaactgtacgtctattgatgattgggtattgggaatttattaatttgttttacattgaaagataaattttagttattcttttttttattatttatttaagtaatggaattgtaaattttgaaaaagaaaaagaaaaagaaagtaagtaatagaagtttagacttagtttatctttttctaattacttgaaggcccatcttaacttaatttagggcattgagccaaaaaaattaattgagtgtttttaatatatatattgaaaaaatttaaaatatagtattataaaaatatacgtgtgtgttagaggaggcaggatcgaccctgagctaagacgaaggaggcggacgccttaagccccacaatagcatcatttcttcaatgggtctcaatttttatttttgcctaaggc

SEQ ID NO: 217568 - DNA, 632 bp, Cannabis indica
attttacactattttaaaactatatttacataaaaatattcaattaaactcaattatttttctttattttttatttttgttcaaaaatattttttttttaatttttctttttcaatccttggaacaaactcttataaatatataagaaaattttctattactcaaattttcttaattttattcattacaaatacctcatatatgttatacattaaattctaatatatatgtttgactcaaatataattaatgactaactgaaaaactgtccactatcttctgtcttccaaatattgcaatatttatttatcttctaattgttctaataaatatataaggaaaaagagcttacccgttcagattgattatgaatagcagcagctctactccttttagtggaagccgatgattttccggttcctttctttttgtcttcatcatcgcctgactccctctgttataataaccaagcatattagttaattaataaaacaatcataataactaaaatttgtgacacattcagataacataaataaaattataattatcatatatctataaattatttttaaactttaataaataactataattatatataaacatagtttataatatatatatatata

SEQ ID NO: 217569 - DNA, 1006 bp, Cannabis indica
aatttatctgttaagaaattttaaacattaattaattaagtgatgggctaattatctttcataactctcttcatctttttgacgctcttaagtcattgcttatcttagaatataattaatataagaaataaattaattaaatatattaaaagaattttttaaaaaaagttgtaatcagacgttgactagagaggcaggccatcgaaatcgacacgtggaatgatccgacggtggctcccactaaacatcatgtattttggtagctcatgctcctatataaacccccactccacaccactccattatatccattatttcttattcctctcttcttcttcgtctcttatacttattattatcatcaatagatatagttttgtgctatatatatatataagcaaattaagctctctagcagagagaccaatataactaaatggccggagggttcgccgtatcgtcctccggggcggagtttgaggccaagattacgcctattgtcattatatcatgtataatggcagccaccggaggcctcatgtttggctacgatgttggtgtttacaggtaattatattattactatgatcatatatatatatgtatattacttttcagttttagatccatataggtttggatcatcatatattattgtatttattttaatatgtttggtaggtgtcgtttggccatggtggttggaaaatttatttcaattttaaatttataaaaaataaataaaataaacaaataataagtactcacgtatatttcccatgacaattaacttttttgtgcttggaaaagataaggaaatatattccgaaaaaagaaagtgaacttttcttattgaaaagttaaattaaaaaaaaggtaacttgagattgagagatctatagggtttcatatcatgataaactaaagttctttattactttcaccaaaagttggaatctgatctgtgacttctcctctttgatataatgagaagggtattttaata

SEQ ID NO: 217570 - DNA, 826 bp, Cannabis indica
gtgttaagttttcactgttgttctactggtatttttttagttgttctactattgttttgagttattctattttgtgttctaccggtgttttataaaaacacaatattttttaaaagatttccgtgtgacaatatttttgtaaaagttaactcaaattttagtattttttgtaactttccctaaaaaaatagtaaaaaagtaaagcctaattcgagcctgtgttagaaaatgggccggcccgagtaaagtatagcatgagttcgagcacggcacaaaaatattaatacggtacgacgcgactcatatctttgtataagttcacacgacacaattcatattattttaagtttttcaaaatataggttggaccgatccggcatacatatatttaaagctatattgaacccatgcagttatacgaaaagcaaatgtatcttgtgatgaattattcgttaatttagagtaaaggttttttataattttattaaaaaaaatcaattaaaaaaatataaatagcctatcaaatagactaataacaagaattattaaaatcaatccccaacggaaataataaatgaaggtggtgacactgacaatgagtgtgaggtgccaactcatgtttttacttctgtataagatatgtaataatctcttttatatttaataggaatggtggagtcttttttttttttttttcgaaagaaaggattggtgtggagtttgaatgggttttgttcttacgaaatagaaaggatatttttagtttttagaatattattttaacatgtataatatatttcaatatatttcatcgttgtggataatt

SEQ ID NO: 217571 - DNA, 882 bp, Cannabis indica
agaatgtaagttttacacagtatgtatgaaggaattttaggtctttctacaactaacaggtttcttttcaaaatttatatcaataactgaattaactgatatatagtacataaactgaaagcgatcattcagttgataatcaatttgttgttctggaaccacacatgataaactgtcgtttatacaaatgatctttctttaataccacaaaaacaataaccataggcacctggctttcctatttattttgaaggaccgcataatattaatatgaacaaatgtcaattatctaggaccatcattgcctcacccacccatgcatactattctgctcatcaaagtcttaagcatccaccatgtttctagtccttatataatgcatgtaaacatattttgactagaccgatcatgttcctcctcactagttagcacttccacaaatcaattacagactaacctgaacaaataacagattaaatccagaagctcatattgtcaaaaagccttctttttatggttcaatatttcatctttcatcaaatgaatatttcagaatctgttgaggaaaagaagggatcagcctgatattttaataaaggcaaacttgtaaagaagggtcacttctacaattatatctataattgaaaatgtttaaagcaatgatataagaaaatatggaacttactaaggattggtcaccggagttaataatggtttgtttaagaagaaagcctccagattggcaatcataactgaagcagccttctcaaaagactctggagtaagtacagcagcatgtggagaaagaactacaattatccaattggaagagctcttcaggaacatttgaggcaatatcattttcaaacacatccaaaccag

SEQ ID NO: 217572 - DNA, 595 bp, Cannabis indica
ttttataattatatatattcttttaaaagttaattagtgttaaagtaactttttttttctaaaaaaaataaataatatcattacatgactattgctcattttagacaataatattcagaaaattaattagtttaaaatattgatcaaaatgcacgtagcaaagatcggcaaccccctattagagatgctctaagtaatcatatactataggaaaaatgctaaaaggcactagtacttaacaccatcctcagtatcatatcgttattggtgtaattatgtatcaggtttcatataatttaagctaataatttttaagaaatatcgttaaccaattgcaacacgtcatctataaaaagcgctaggtactactggtgcccaatattaatactctatactataggctatagctataaatatatttatttattttttaaaaaaaaattgtcatattgtctccaaacaaatgacaatatattttcagatttgaatcattaaatatatttttgtaattaagttggagtataatgtgactttatttggcagtttcttctctttacttttttcatttttttttttttttttgactaaagttctc

SEQ ID NO: 217573 - DNA, 628 bp, Cannabis indica
atagggcttagaattttcaaatacacgacctgatcagataaaacacaattattgtaatatttatttgtattaaatatgtggaattattagttgttttgtggttttatgttagttgactcgcaacagatataactgttgcattacaatttcatcacagttgccttaaaaattgacttcttctttcccttttgcccgtggaagttgaattttttttaggcaaagacaccttcgacttcttcttcactagatgacaaccacatttagccacgggggagcgagatttgagtcaatattacaaaaaaaaaattcaaccgaccaaataaacaaatgtacagcccaaataaaaaaaaaaaaattaaacaaatacctcttatacacacctttaacccataatccatgcttcctgagattgaaaccttcgtctgatgcaacatttggtcaaccacccagtaaccttcatctgattatgtgcgtaagtgatagtgtaagagatattttggtaattaaaagcacataaaatgtataaatgttgtttacacttattttgtaaataaagtgtcaatttgtattttttatgtaataattccaaattaaaactcataaacataaatccattgttatatttttc

SEQ ID NO: 217574 - DNA, 538 bp, Cannabis indica
gggtccggctcccaattcgggtcaaggtctaattgggagtccgagtcctggtctagttacgattttggatctaggtccaaattcagttatgatgccaagtccaagacctagttccagtctcggtcatcttcccgttttggttcaaattttgggtcagagggtaagggttcgggtccactttttggttttggattgggtttagttccgggtgtgggttcaggtccttatcaaggttcgggtccagggctgggtgccaaatccagacaccgactacgggttttgtccaagcccttggtccagatccagatcccaatcacgggtcccagtctggttccattttaggtgccggatcacgagctgggtcctaggttcaagttcgtgtctgggtcggtaactaggtcccgtcctagttctgtttcccaggtccctatcctgatttagggtcaaggtcccgtttattgtgtgggtatgggtctgggtctaggtttgggttcgagtcgtggtcctagtcctagttcggttctagttccatttgcga

SEQ ID NO: 217575 - DNA, 850 bp, Cannabis indica
gtatccttgatttatttattttcatttatattgttctttttagttttataatgttatgttatttttattttatttaatattaatattagtatttttgttattgttattgttattttgtatttttcaagatgttagtgttttaattaaatcaattattatttttgtaataaatttttatttgaggactaaaatgtaagattattttttacaagaaataaaaacaagggttagaatgcaaaaaaaaagtttaacactcaattagtgtagatttataatccaaccccattaatgatgtagaatttggtgtacgccaatttgatgaacaatttagtgtactattgaagtgaaatagtataaagatttcacactaatttaataaaatagtgcaccattagagatgctcttaagaatcttatatattaataaatattaaattttattatattttttattaattaatatttctatatattttatcactatattatttatttttatttattatgtcatttatatatataatccacataaaatttatatataattaaaaataacttaattaaaaaaattaaatctcacatattaaatatatatatagtaatattttatttataataaaatataatattaatggtatttaaatttatttattaatttaaaatattattcaaattaatataatagaaaagaattattcaatctcactattttttaagtatatcaacattatcctctaatcacctccaacaacactatgttccattcattttatgttagtaaaaattaaattctcttttaaaaatttactaatactttttatattagtctctaattactatgttatttgtta

SEQ ID NO: 217576 - DNA, 557 bp, Cannabis indica
cctcagctcaatttttaataattttactttttaatataaccaactttaagataatttctaacatgatacttaaaatgtaaccaatttcatcagattattattaagttgtattttgataaaaaataagttcaaggtcctatttgtacaattttagaaaatatagagtctattttgttatttaacaaaacagaaaatctaattgataatttttgtaaaacacagtttaaaataatattaaacctatataaatacataaaaacgaaagagttaattctattcctttaaaaatatatatttatagtttttacaaacattcattttaaaaaaatgataatgaaagaaagaacatgtcaatatatatatatatatacgtctgtttttagtggcaacatgtaatatgtatatttttatagatattttcatataggtacaaggataattttttttatatataaaataataaaatttagggataatttaaaaaaaaaaatatatatatatacaaaaactaaaacaaaacaaacaaaaaaaaaaaatataacaaaaatacaatttta

SEQ ID NO: 217577 - DNA, 668 bp, Cannabis indica
actccataatgaaccggttccttcttattattccccgtagtagcttgagctgtaatgggtttgatcgaattgggcattgcaaccactcgaatcccatttggtactccttcttcggtcttaaccttagacccctcttcaaccacaacctcagaaccatcttcatcaccacccgaagatgatgcaccaaaattaatcaaaccccacttctcaagaaaaagaaaaaccctacggagcaaattaacatcacccaccagagatttacgaacctcagtgaacgtaagccttctagatggatcttccctgtacttgttgataatgaaatccctatactctttgtaaatttttggggttcttgagaatgagcttccatcaaagaactctttcagataaattctctcagtgtcatggatttcgtcccacaaaaaccaaccttgaacagaaattgaaacaatttacttgggaatttttgaacttagctaatattaagtagtagattttcggagggttttagagaattgacttactggagtggcttggaatggtgtagaggtcgagctccggttgttcgggtcggacatggtccggttgctgttccatctcaggaacggaccaagctgaatcgttgagtcggccgatttaactctccggtggttgctgttatatatata

SEQ ID NO: 217578 - DNA, 1217 bp, Cannabis indica
aataaaagagaaaaaacaattgaaggtccgagtaataaactataattcgtggaagatgaaggtatactcaaatttcaaatcatggaagaaaataatgtactcagtaaagggtcatccaaaaatcaaggcaaaacatatatttaagccaacaaatttctcgtccaacacattgacacatttacaaagaaaactctggaagggaagtaggaattaaaacactttctccatctaggcctaatacaaataccacaataaggaacatgaatcaaaagacaatgctgcaatgctaattgatagggaacagtgcaagatttccaaccatctggcgaaagaattatttgtcattaccacaaactattgaaaggaagcattgttccttctttaacaccaaatataaagtagtacactattataataagaacatgcatacataactttttttcatgtctaatcaaggtccatgtacacatgtcaagtagaaaaggactaaggattcaagaaagaaatagtaaaaaaaaaaaagttaaacaagcaccatactagaaaacatagtaatgaaagcattcctcaactatttgaacaagatctataaaactattcggtgaaacagtttaccagaaaagctctaatatgcttttaaaataagttcaacaagcaaataacatcaagatccataaataaactagaagacaacacagagatgtatgaagtgaaccaacaacaattttttaatgattcatataatatatccaagaatttcattccctacatttcacgaaattaccacaagcatttaaagcattggctcccgagaagcttctcatacacctcaataataatgcagtaagctctgatacattccaccaggcgaacccctgggcacaggcggaggttggctatgctgagctggtaaagaagatgaagttaaaccatactgtgaatggtctaggtagcttggtcctgcagaactgggaggcatcgaaccactaaaatctccggtcattggactgctgtacgaacctggaaagttactattatatccaatatttgaaggcggcacctggttacccatagacggcgacccataattattagcaagcagtggttgaggagggctctgtccatgatgtcctccacttcaaacacactttcaaactattgccattaagtcccttttttctttctcctaatcaattttatttttcactttttaaata

SEQ ID NO: 217579 - DNA, 605 bp, Cannabis indica
aggattgaactaaacgaatgattcatattccaaaaagctaagctctttctcaagagtcgctaaccataaaaaaacaaaaaacaatataatcgcgaattcgataattaaaatgcttttacagtatttcaaaaaaaccccaaatgcaaattcaataatagagttgatcaaataacaaaaaaaaaaaaaaaaaaaaccaacaaacaaaatcattacgagtaacagtgtttcacaaccaggcaaaacccatcaaaagaattaaactaaaaaaaatttgattgaatacctgctctgagtgacatcatagatctgacccttgatagccataagcaatggtttattcgaatcggtaccatcgtactgctttaactcttcctcagacacctcaccaatttgaacaggaggagggaggggttggacctcctccaaagatctaggcctctcgtaagtatcggaaggtccaaagaagcccgaaacgacgtagtaaatagccaaaacgagagccacaactgtaaagaaagtggcaggagagagacctgtgtagactgggattgcctctttaagcgtttcccatagttgcagagccattttagtagagagagagagag

SEQ ID NO: 217580 - DNA, 1150 bp, Cannabis indica
ataaatactatgaacactaaaaaatataaagtaactattaactaaaacaccaacaggcctctattttgaaggacaaaagttttgaacaatggtttccctggaaaattgtctaatagaaaatcaagttgtatgacaaaagcacaatagaagacatagaactttttactttctagctttcaaataaaataaaatctaaaacaatgaatcaagacaaggaacatcctaatcagaagaaaaggcatatcattgagaacttgtaaaaacaataccaatggcacacaaccaaaagatggcctttaacaacgagacttggccacgggagaatttaaaaaagttgccctttgctgggtaatggaaaaaacagaaatcatcatgaataaaattatgcaattataatttctggattaaattagataaattaaaataaaaataaataaataaataaaaactatgagaaactattatatttaaacctccagactactaatttattcctataccctgcatatatgaaaataaaaatgataaatagacaaaattaaataatgcatgcttttttggaatctttaacctttctcaaagcttgtgattgaacttttatagcttgaacagaattgacagaaagatcttgcactggattaaaatgtgaataatcaccaaagagaacaaatgagtaatgttagtaagtaatagagatacaatgttaaacatacaaaacacaagctcaaagtagctctgaccattgcaattaatttgttttagctttaaagtttttacagacaaccatcaaaaacttctcttttatgtcatcaaattaaatcttttattttctaatgttagttttaatttcataaacagagatgtattttccaaaaaataatatatacacaaatatgcagttgaaccaaaatcatccaaagacagtgaattaaacagtcttacctatttgggtttctcttgaatctcttgcgtgggctgcttccctgtgatgaaaaagtgagtatctgagatagatagagtagaggtgagagaaggttaaaagcgactaggcgagatgagaaacaagcgaattaaaaaagttgcccttgactcgatttctcttaaacccacagaattttgggaatttctcaaaaatatacataaaatgcaa

SEQ ID NO: 217581 - DNA, 872 bp, Cannabis indica
agtccaacccaaccctataaaagtacgtaacactattaaatatttatattcccatatgccatatatatgcttctaattaatatatgtcttattctgatacttaagccactagcttacatggtttttctcttcttataaattatatatatatatatacacttactttgggtattaatttttatgtgtagtttaattaattaagagaacattttggtcacataataatgattgctatacatatatatactttgttaggttcagctttgtgccgtagttgttaagatgtaggcatcagactggtgaaatcatcttctcaaactgactaattaatctatacccaaaaccaaaaagttttgatgataataataataataattagaaaaacaaaaaatcacaattaaaaagaataaagaacaaaatagagcaagctaagcataaatcagcataattgcgtatgatattatattcaaatagctttatgaaaagaaaaaaagaaaggacattctccattggtgtaagaattgaatcaagacaatagaacatgcatgaacatggcacccataaacacaatttttgtcataatctactttccaaatatggtacgatgatcacataatatttcacatttaaacctttttaatttagtttaaaaaaaaagtaaagaaaagaaaagagagtaatgcatgaacttgttttgtagttcaaactgaatatatttctctttttcttcttttgtcttaaaggagaaattaattttgataatacccaattgatgaaagtcatcaattacatatataattaatgtaagtaaataaaaaaaatggcttttttattttgatacttctaaaactagttttttttttttttttttt

SEQ ID NO: 217582 - DNA, 518 bp, Cannabis indica
ttaggaccaatgcaacccattcattgcagtcagtgataatccttccttttgtacacaaaataaataaataaataaattatctctctttttcatttggacatattttcataaaaagaaaattataaagatttgaaaatttaaatatttttatggtttatagatttttattaaaaaaaaattagtcaggtttttatgttatttttgtattgtaatttatttttataaaaatcgtaaaattataattaaaaaataaatcataatttttttaaaatgtaaatatatttatctatacataaatataaataacggtagatatgtaataattttttgcgttcaaattttctaaaattatattacagtacaaatttctttaaataaatttgggtgttattcttctttcttttttcttgtctttcaaactttcagtcaccacccctatgaagcttgctgtgaaaaatggagtgagtctctttttccttcggccaccatccgtcttcgtcacttcttcattctctgcc

SEQ ID NO: 217583 - DNA, 1007 bp, Cannabis indica
cctgatggtctaattctgtcctagcaaattcactaattaaaaggctggtgtcgtcatccctagaaagctatcagagggaaggaaccaacttgaagtcatatatgaggaatgatccaagaggattggtacgggaggaccagagcccatccgggacgacccaaaaagtgacttaggttcgaaaaataatagctcttggcattgtcaccccaccgtgaatggggcattcagaacttatacagttaattataaaattctactggccttaggccaacataatctcagacagaatggacgcggtgaatagtcaaaggggacttacaaatactagaggtattggcactgggagccccagggttgggaaccagaaagggaaacttaggccggattggggtttgctccttccctgctttctcctgggaggttctccctgaagcggcatgcgctcgggcaaacgctagctcctatcccttctaaatttgtacttgttataattatcctctgaaaaagagataatatccccccggagcgccttctcagtcccaagattctgagcattggggtaaggaaccttcaacagattaaagtcatccactgattggctctcgaggataagcttggccctcctgtaattgacagttgtgaccaagtcccccacgttcaactcctcctttttgtaaccatcaaacacttgtgcgtggtttaggaagagttgagtgggagcggcgcgatgcatgggcaaaaccctgacctagtttgtaagcaggtccgggcgctcgaaggctttgaagccggaggagagaaaaactgatggctgtactccttcacattcttttgaaaattgaaaggcaccgaacctcattagctgggtgggcctaaagttgtagaaaccgtcttaaactcgtctccctttttagggaccgaaaggagttcgtaaaaagtatgaatctcaccgagactgggcgggacccagttcctggcaacataaaaagtatacaagcctgacatca

SEQ ID NO: 217584 - DNA, 865 bp, Cannabis indica
tccatgaaatgtggttggtatactctatttttttttttgaatttttaatgtaactcatagatattatttgatttcgttacaagttattttatgaactactaaaattattatataaaataaaattatttagaatatattttgtaaaatttaatgataaataaaaaaatactttttaataactaataaagttttttttttttttgtgaaaaccaaacctataaaattgattgatatattaaattttgtgtaagttcaaaaattaattacttaactaaatataaaagaaaataaatgttacttttgaatttagtcattcttcggtgatggttgaaaaacatatgcttcccacacttaaaaataatcatttaaagtgtaaatcacaattgtataactcttgataccaaataattactagttaaggcaaaagtatttcttaaagattaaaaataaagataaatataagtaacttttaatatttaaattatattatatgggtagaaaaagagaaaagaggaagatatctcatgcatggattttttgtttgaaaagagattttgattcaactctttttaattaatgaaccatataaaaaaacctgtatagaagaaatcagcacttgggagaagaaattagtatacacgtggaccaaataaattcacaaacttttgataataaaataatcatcgttatatttataataaattttaaatctacgttcacaaaggtaattttctctttaatttatatatgcgacatctaattttgataacttttccgacgacaacacaactttgttggctttttcaatgaatttttctataactttgacttttccatttacaataactttttcggtaactttttc

SEQ ID NO: 217585 - DNA, 718 bp, Cannabis indica
gatcacatatcactatttataattattaatatatatgttctatacttttgtacagagaatactcatcgattgtaccaaagaaattataagcatgatcatattagagaagcttgaaattactccttcaaaatcattttggattgcagatttaggatgttcaattggacctaatacattctatgcagtgaaaaccctaattgaatctttgaaattaaagtatcaaactaatagttccaaattactccctcaatttcaagtcttcttcaatgatcacacctcaaatgatttcaacatgcttttcaagtcccttcccgaggatcgaggctactacgcggccggtgtcccaggatcattttacggacgaatctttcccgacgcttcacttcatttagttcattcttctttcactcttcattggctatctcaagtgcctaaagaagttaatgacaaaagctctcttgcatggaataaagggagagtttattactcaaattctaaaaatgatgatcaagtgattaaggcctataaaaatcaacatgaaaaggatatggcaatgtttttgaaagctagggcacaagagattgtgtttggagggttgatgatgcttattgttcttggtattcctaatggaattcatcattctgaatctggagggaataagagctttgaacttattggatcttgcctcaatgatatggttcaaaaaggtatatttttt

SEQ ID NO: 217586 - DNA, 754 bp, Cannabis indica
ttaatttttagccgtaataatatataaattataattctgaaactctgtaagttacgtatttagccgttaattcaatcattatccatgtattattttcttattgaatatttaaaccaatcaaaaatacttaatatttaacagtcaaatacctacaaaaattacaaaattataaattaattattatcatcgctaaaaattaaacttaattatttatttataattaaaaattaaaactaaaataatatatttatacagcaaattattattttttgtttttataaagaaccccacttatgttattgaatgtctcaatcttattggtacaattttttaaaggcttttttttcttcctggaacctacctcttcctggctaccttcgctccattgtctggcactagtctctccaaccttgttatagtaaattgatccaaacgaacgaacccagatcttgatacccatttctatcaaaatggacttcgacgggttcatggtatgacccagatatgaggatctcgagattaatatgaagaggttcaataagaattcagaagacaatcacgccagcatctctgattttgatacccacagtactgtttccagggatccggataggaatttggtttcagctcgatgagggcaatggggatctttgtcgtttttttgatgatattttcggtattgttttcagtgtccgtgattctcgaaagcccgcttctgatgctgttttggaaacttcaggagctagagttctcg

SEQ ID NO: 217587 - DNA, 719 bp, Cannabis indica
agtttattaacaaaattagtatacttttatttttaatgtaagatgtttaagatgttgtgtggtttcttgtaagttatttcaaaagtctatcaaatttaatttatcaaataagtttaattagaatacaatatttatcttttaaaaaaataattacttattggttaactaaataacaaaaaattaaaatattactttttattttagtcattttttcggttacaataaagaaatatatacttctcacatattaaaatgatcactttaaagagtagattaaaatagtataattttttagactaaaccattattggtatagccaaaaaaatattttaaatttatgaaaatagaaatatatttttaatacaaaaatttagtacttgtatacctaaaaaggagagagaaaaaatgtaagaaatacaaatattagaggcttagaggaggtggagtgaggggaatttttttttttttttaacatgtatgcgcctaggacaaataaaagaaatagtcaacatattacagtacacgtatcacaaactattaagattacaccagtatttaaatagctaacagtatggctagttttgattttgtaaggctagtatggctagttttagttttgtaaggctagtatggctagtttttggttttgtaaggccagtatgactagttttaattttgtaaggtcagtatgactagttttagttttgtaaggctaacat

SEQ ID NO: 217588 - DNA, 693 bp, Cannabis indica
atgaactttcatgcacgttagtactttttttactaaattagacaaaaagttctcaaattcaacaatctcaataatttaggaggctatttttaacaactttaaaagttcaatgggtataatttgatatctatgtcaaagttcagagagtaaaatttctaattagtctatttaaatagtgctttgttaaaatatttggccaactttcaattcaagaaatattaattaatttttatttaatttaaactttaaaattagttaaataacatttttgagcaaataataatatgcaattttacagcaattttttaatatttctaaaaaatatataagcataatttagaaaatcttaaggggtatgtatataattttagaacttaatatatattaatttttttttttcctttttgagcaatgcacaaaagtgaccatttggaagaaatattttacagctgtcattactatatattattatttagaaaaaaaaaatctgaaggtgaaagtcttaaataaaaaaatctgtacagtccttataagattttattttatttttgttttttaaggtaaatttaacatttggattattaataattattttccatgtaagtcttaaggaaaaggtcaataattgtatcaataaatattttttgaaggtgatattctttcttacccatagttttttgctctatttatttt

SEQ ID NO: 217589 - DNA, 531 bp, Cannabis indica
tctacttctagaaaaaagaagagggttacaatcctcataagtgagtcccatgtaccccaaacagatagaaataacatcaacatccataggctggacattttttagtaaaaaccaaggtagatttggccacattaacaacttggttagaccacttacagtacttgactaagcaatcttaagcctgttccacttcctcactattggccctacaaaaaagtatcatccgtgtacattaaatgggagattgtcgggctttgagaacaaactttgaaaccatgaattaacccctcaactttttgcctgaaataactctcaagatagaacctcactacccaggatgaataagtagggagggagtggatcaccctatcttaatccccgagaaggagtaaatcgtttgagagatccatcattaagcaagaccgaaaagtacacaaaagacacaaaccaagcaacaaactttcgaaacatcggattatatccaaaggcctctaacacatgaatctaaataactccattccaatcactcat

SEQ ID NO: 217590 - DNA, 715 bp, Cannabis indica
cggcctcaatgaataaagagtacttttttataataatttatatttttagtttttaattcatttaaagtaaaaaaatatatatttaatttgtatttatttatcaattactatttatcgcattactcgtttaataataaaatatatgataaaagaatcactataaaagtatatatatataaatatagggatatgattttgtcccgtgatgtactttcacggaatgtattccgtggtacattaaatgggtctcagcgtacattaaatgagtgtcagggtacgtttctactttttaaccctaattacccctagatcaatctcagccgtcagatcaaataacttcctcatctgacggctgtcgtacatcacggattacaatccgtgaaagtacaataacgggacaaaatcatatccctataaatatatagcatagtaaatttgtaaaattagtaatattttataataattgttaaatgaaattttgtaggttaagatttaatacttaattaaatcaatattgatgtaaattggttggttctttttttttttttaattttctcctatttatctataaaatatgatgcacgtggatgagtatataatacaacatataataatgcagataattgcatgacatgtacgattacccttttatgcataagaaaacaattctacgggacagcaagctatctatgatgctgtcaccatgcgattaact

SEQ ID NO: 217591 - DNA, 880 bp, Cannabis indica
tatcaacaaaaatattattttttaaaaaattaaatataatttttttaatttaataattataaattaaaataataaaaaaatctttacaaaattaaataaatctaataaaagtaattataatataaatataaatatttttaataataaataattcctcataataaaataaaaattgtccatcactaattgcatgaatttgttattgctttgtattattctgagtatttggattaaatattttgttccattcaaccaagtttttgtctaaagtattagcattagaaaaatcatctatgtccggtgccgattgaattatttattactaaactgatttgatgaatgtatatgatatttattttattttattattttgtagaacttattataagaatcaattacaaaaaaagaaagaaaaaaaacaaagtaggaccttagaaatgtttacttagcatagcatctacaatgtaaagattattattaacctgaattcaacccaattaataataataataaagtatgttgtaagtaatgatttcatgccacaatagctgtagatgcatgctaatgtaggtccaattaatataatcagtctaaaaagacggtctcagtgttccatttttattctttaagattcaatcattcattttttattctttaataatattttttaaaattaaaataagagttacacattattattacagtagaattttattcgtagaatacacttaaattatattctaattgagatgttatagttacactagaaaaaaattaaaaaaacaaaaaataaatacaatattacaataataaacaataaataaatacattaatactatatcataatagaaataatttctaaagtaaataataataattc

SEQ ID NO: 217592 - DNA, 705 bp, Cannabis indica
attttctatgtaataatttcatatttctttccataattctttataattacattaaaaggatacccgttacatttatattttttcttaaaaaaataatatctcaaataaaatttaaaaaatatcataaaaaactcattaaaaaaaacaaatataagtgaaatagtgtgtataatatatgaaattaattaaaacaaaagtgacttcaaaagttggctccaaatgaaatgcaactctgcaaaataataaaaaaatttaattaccatataaataacaacttgatattgattaaattacaatacataattataataaccaaccttaatctctaatgaaaccatttcaaacttgcaacaacgctatatatcatttaggatgctcgctaggagtagtaataatctctgcaaacgaatgaaatatatatcataacaagataattttttttagcgtaacagtaataataaaatttatgtataaggagttttcaagatcaaatagtatattttaccattttcaagttgttcagaagtatttagtaattcttcttcatccatgtattccttgacaataattggttggttgctttcactataccaattcttcaaacatattagaccctccactgtctttggtagtaatgagcttcgaaatggatcaagaatacgccccccaattgaaaatgcagactctgatggcacagtggtaaca

SEQ ID NO: 217593 - DNA, 998 bp, Cannabis indica
tgatccaagtttgggtcggtattcggtttggtttgtgtccatgtctaggtcgaaatcccagtctcagtcaggggcttggtctgggtctgggatcgagtcccgagttcgtgtttgggttcgggtttgtgtctcagtcctagtcttggtctcggatcaggttcgggactgcgtccgagcttgagtttcgaggccttgttatggtcaagttcttggtgtcggtccaggtccatgtcctggtcacggtctcggtcctgttctagggtccttgtcacgttctggtcaagtttcagttttaggtcccatgtctaggtctgggcctagatcttggtccagcttcgggtccttgtccgactcccaaattgagaaacagactatgggtcttttctaagacttagttctcatatcccgagacaagatctagatcccaatcacgggtcctagtctggtttcgaatcatgtcccagatcccggactgggtcttggtctaggtcaagaaccgagactagggtgcagttccgggtctcgatccttattctaggctccgagtcctattccaggttcaggtctgagttcaggtgtggattcgtgtcccgagtcccaatttgcatttggattcaagtttgggacccaatcccagggtgggtttgtgtctgagtcccagtctaggcccggttacagttttgggtctgggtcaaggtcctggtccaaggtcccgattcgcttctagttttggttctagtttcatgtcacggggtacaggttcgggttgagtttcagtctgagtctgagttcgggccttgatctgggtccggggcgaggttcgagtctaggtttcagtctcggttagggattgaggttgtgtccggttaaatgtttagatcggagtccaggtctcgatcctgttccaatatcacagtccagttcaagtttcggtttttgttcccgagtgtgggttttggtatgggcgtgtgtttgggtcctggtttgagttcgagttt

SEQ ID NO: 217594 - DNA, 622 bp, Cannabis indica
tatttaaattaattaatgttattaatgttgttaacttaattttattaataagaaaaataacggaaataaaaaaaataagaataaatgctaacatgtaattagaaaagaaaaatagaatgacgatagaaaattttagagaaaaaatattagaaagggaaaaaaggcacatataagttgccacatgtcttatattttgaaaaaaaaatatatttttagatttttttttgttttttatttcgttatctttattgtaataatactaaaaagagttatatattttgtagaatttattaataatttatcaataaaaatctaaattgagtaaaaattcagatatgctaaataatataactttaatggcatgtttactaaactgtaattggaatcagaataatcaatgaaagaaatcaatcggtttaaaaatataaaataatcggaaataatattttattttgttgtttactaaactaaccggaaaggaaatcagaatcattttatttgtttacataatcaggataggtaatcggaatgacttaatatgactaaattgtcattgttagaacatgtagttattttttatttatatattttttgaaagggcatatttgtcttttttattttt

SEQ ID NO: 217595 - DNA, 172 bp, Cannabis indica
gaccattaatttctgaagtaaaataaaatgaaataggagtcatttcattcatggaaagctctatcataatatatgtaaaatatacaaagaaaaacaattttataatttacaattacttagcaatattcctaaatataattatattaaattatatgatatctaatatttaatt

SEQ ID NO: 217596 - DNA, 731 bp, Cannabis indica
tattacacgatgtaacatttaagatgtgtatatatgtgctctctttaggggattaaatcactttcttttcaacttatttctaattatgaaaatttgtgtcaattattgtttcaataataataataataataataataataataataataataataataataataataattgatagttataataatcataatgaacttatattgttgctataaattgtattaaaaatggggtcgaacccgcgcgaagcgcggcttagtctcctagtaatttcaataaaatggtaacatttttatgatgattatgtatagtagttaacatagacaaataattgtcgatttagtcaatcacagcttactggttcttgttagaatgtattagaatgaattatacattcattgtagaaggaagcataagcttctatgtcaaaacacgttagtgattagagttaaactatactcttgtaaatatactaaacaacattcttctcgagaaagcctaaaagaaacaattaaacaaagacatctaaaccatgtgaaaagttgacaaactagaagtattgtaggttcattttatgcgcgtataaaaccagctgatcccaaacaaattaaaaaaagaaaaagcaaatgggaaagaaaatatttgtgttagatgaagcgttatttgtggtgttgtgcaagtattttgaacttcatttatgtcgaattcagaaacaatatcatcttcttcatagg

SEQ ID NO: 217597 - DNA, 528 bp, Cannabis indica
ccaaccaatgaaagaaagttcttgttttgtgtttcaaattgggccaatagcccaaaggaccttccattcctattatgatttatactattattatgttcttatttgatttataccatttttataataaaccacacgattatattttatggttatttattaaataagttcactgggagtcaaaagtatactggtcttgcttaacagtaaatataaaattatcaaaacctttatttataaattaagttatataggtcatcactatgaacttagagttgtcaaattaaacattcctttagtattatttggccaacttgttgtagttgggcctatatggaacactagaaaatttacacggttttaatttttttttttggaataattacataaggtactattttttgtaaaatatttatattttttacgttcaaagaatattttttttacatttttacggttttttaaaaaataacacgaaaacaacataaaatcaacaaaaaaattacataaaagtaacatgaaaataacatg

SEQ ID NO: 217598 - DNA, 542 bp, Cannabis indica
tctcgcatgtgccagtaaatcttatatcaatagcctgatatgaatactcgtagcttggatatatcaatgcatatgtaagtaatctatgctcttttgctgcctttctccacaagcattacctgattctgtactctaacctctgtgctgttggacatttttcattatttatgtctcaaacataaattaaataaaatattattgttcatcagtgctagtttcacatgttaagtaagtaaatttatataactggacaatgggaatggtcttagtatttgatatttgaaaggtgataattcctacaagctacaaagtatgtattactactgaactttcaaaagacatgaagaactgggttatgaatgagaaatcctcagtatcttagctgactactaattgtttcctcttctgtttgtttgctggatgaggatctaccaattcttatttttttatatattatattattcttcagtgacctttgtgtagtggcatagaaaatgttatgaattctgtaatatctaaaagagtattgtatttgatatttt

SEQ ID NO: 217599 - DNA, 597 bp, Cannabis indica
gaaaaaaggcaaccttataaatgttagtctcacttttctgttgtgatattattgtaattcgaccaataagtagtggcattttgggattttcactgtgttttggttttggagtttatggtttacttactttactgagaatctgactcagcaccatctaatatttgctttttggatcattactgaaacttggcgcaatccaatttgctagagtcaaactttttgtgtttgatgtacctttgggaccacattttttcacgtgttaaagtccaaaacccccaaagtttggaatgaaaaatacattttaagagataataattttaaatacggagtactataatgtcaactgaacataatgtgaaaaatctacagcaaaggttgtcatgtacagttcaagctctttcactgtagtttaaatttctttttctttcgtttttttcttttctttataacttatagttttgaaatatacactttagttagaatcgacaagatatcaccaaattaactgaaagtttccatttgaatacaatacttagagcatctttcgttgtgtgctaaattagtaataaattgctaactataacttattctagaaat

SEQ ID NO: 217600 - DNA, 506 bp, Cannabis indica
agggtaatatcaggcagataaaattctggaaaccgttgagtttggttgctttaagatgcgccaggcttgctttgcaagcatggcctgattaaaatggaccaagaacgaaaaccaagtccgccatcctttttggacatgcagagctttttccagctttgccagtgggttttggggctattgttgtcattaattccccaccagaagttggccatggtagattcgagcgagcggcaagtggccaccggaatgcggaagcaagccatgctataggtaggaatggcttgaatgaccgatttaaggagaatctctttgccccctctcgaaaagactttgtttcgccaattatgaagatggccccagactttgtcatgaaggtaatgaaacagttgttttttcgttcggtcaatgtgttgaggtagacctagatatttctcaaaagagggacgaacagggatcctcatgaagtcagagattagagtttgatccctcaactccacattaggaga

SEQ ID NO: 217601 - DNA, 830 bp, Cannabis indica
atttagtagatgatattacttatcgtttatcctcttttgttagagcaaaagtatctaatattaaaagagatgctacccatgctttagttagatttgcttgatgaaaatatttagttaggagaaattccctctcgaatctactctattgttattaatagctcatttttaataataacagtttttacttaaaaaaaaaaaaatactttgatcacatcagataacaatccacgtcatcaagttcacacttttgagtgatccaatgccaatcgaccctaagcaggagaagcccgccgtctgtgtcaccggagcaaacggtttcatcggctcatggctcgtcaaaacccttctccaacacggctactcccaaatccacgccaccacatttcccggctccgatgcgtcccacctcttctctctccccggcgccgccgcagacagcctcagaatcttcccagttgatcttctagattccgatgccatctccgcagccgtgcgcggctgctcaggcgtattccacgtggcatccccttgtaccctcgaagacccacgtgaccctgatgctgatctcctcaaacccgctgtacagggcacaatcaatgtcctgcgagcggcgttggacgccaatgtgaagcgcgtggttatcacgtcttcaatatcagccatggttcctaatccatcttggccttctgagaagccctttgacgagtcttcctggaccgatctcgactactgcaagtcgcgtcaggtgtttggtttcttcaattttagcttctttcttttaatgatttattcagttattcactattttcttcttcgactcaattgttaag

SEQ ID NO: 217602 - DNA, 768 bp, Cannabis indica
atctaaactaattatttaaatactaatttttatctatttaataatataaataattattatttatattttaccttttcaacaagatggaataccggtgaattttgggagttttgagtctaccaaattttacaaaaaaagacatcttcgagaattggtgaataacttcatcaaaactaagaaattgactaagtgatgtcaacatatcacttaggcatcaaatatacaagtctgagacatttttcacttacccagcgtctaagttgacatcacaatgtcaacctagtatcaacatgagcactgagtcctgaacaacctcagtaaaacgaccataactccctcaatattgatctgattgacgcaattcaccttgcgctttaaagctctttcaagtcatgtctcacacctatatcgtcattctaagaatttaagtccaaaattcataccaaagacaagtgcatatttttcaactgatcactcgaaaataatccaacagacgagaattttcgatttttatcaagagttaattttagacaataaatcatcaccaataaccaagataagtacaaaaagattttttcatattttttgtattattttattattatttatttttaacggaccttcattctttatatatataaaaagagagctccactaatttatttcttacattcaaaaaagtctccatatggttagagcatctttctccactttctctctctagaacttgagctattcctagttaattctcttgtaattcttgtgtag

SEQ ID NO: 217603 - DNA, 785 bp, Cannabis indica
atatatatatataaatacattcttccgtttgacaatactagttttactttgataagattcatttttacacaaaaaaaaaaatgtgttattttaaaagtaaaaattctttaaactaaataagttgtaataggaatcgctaaggctaactcaatagtgagagagacgtaagaaaaaggaagaggacataagttcgaacttgttaccattaccctcaaaaatatatatatatatctattctatataaagtgtgcctatataactgaattcttggtttatgagaaattcatgcataacttttttttaaaataatttttaattcaaaaataataatttttttattaagatgtattttaataaattttaaataaattaatattacttttaaattttaatcgggtttatgagaaatttatgggtaacttttttttaaataattttctattcaaaaataataatttttttgaagatgtattttaatattaatttttaataaattaatattacttttaaattttaatcgtataaacctaaccagaaacacaatctctgaaaattctcaataaaataactaaccccaagaggatgagcaaccaatcgtgattatttaggataatcatttataattttttttctaaatctcaaaccctcaaaccctatattgctattgaattattgcctcatctattctctttgatctttcagtttctatgatgtgattcatggcctctctgttgcgattcctcactttttgttgatttgggtgtaatattcagtgttctattagc

SEQ ID NO: 217604 - DNA, 553 bp, Cannabis indica
ggtgcaagatcttgaatattgagaaaaactcttcgcatgactaaatcacttatcttaaatagtctttctcgaaccctttaattaaaatgtctttcgattctttgttggtgtgcatcattgcgtatttgagactcatcttgttttttttttttcatataatgattattgccaaaattatgagttttgtcctagttgtaaagtttgtgcgtatgggttgcaatattaacttcaattggtagcattacttctgagtcaaatgctaataaaaatagtatgtgtcctgtcgcaattttctcagttgtctgatgtgtccacaatacttgtggcgattcagcaacccccctctcccagcaggtaaacaacccatgaggttaattccccatattgcagacaagtagggggaagtcatcatgtgtaattctgtaggaagtactcgaactatacgagaaaatctctgacacttatcacacttttatttgtgtccttatttatcgtaggtcaatagtactactgtcaaattatctatttacataagctttgccaactaacatga

SEQ ID NO: 217605 - DNA, 877 bp, Cannabis indica
tgggatcattccacaactgtgtagcctttcaacttttcacatatcggatctgtcacacaacaaaatttctggccaaatttccaaatgcattgcaaaaggctcgtgattataactttttccctggcactcaaaggtactggttatttactcctgtaatactgtctgaaatgaaaatcaatcaatttttttatatgagctcgatcttatgctattcttatattggttttctctgttaagctcttattactttatctgtgctttaaattaatttttgcagcattgaggtgttgtctatgttcaagaggggtggaagagtaagccaaaataaaaagaaaatcagctcgatactatatgacaagtgaaaaatacaagtgtatttttctaactctcaacaaaatcctccattccttctttttatgtatattttgttctcctttgactgaaattcatgtataaagaataaataaaatttgaatgatatgtattggaccagagaaagtgtataacttgatcaaattttttaaagattcatggcttctctctgctcttagatctttccagatgaggaaaaagcaaacaaaaatgctgtgcgcctgcaagtcctgcctcgtccaaaatgtcaaccaccgaaaaatacatcacaaatcatcttcatgtttttgatcatattcaggttagtacatcacaatcatattcatgtttcaaatatatgctttgaatataaacaggaagaatgccatgataaatatttgattagaatgcagtgttacaagtgagtagaaaattgttatatagactcaccccgggtgcttgatactttgatacaagtcacaactggtatagtacatatacattggcatatgtgaaagtcactgac

SEQ ID NO: 217606 - DNA, 563 bp, Cannabis indica
agaaatataccatatattttttttaaattttcttcttgaattttttctttgaaatatttttattattgcatacattgtattaaaatcatgaaaaaaaatagttgatacggtatttttttttttttttttttctgaaaaaaagttaataccaatttgaatcttgtgttttataaaaattaccaattaaactctctgttctattaaataacaaattggaccctgtattttttcaaaatagcaccctgaactcaatttttcacaatttttttttacataacaaacttaacgacaatttctcacatgaacaaatacataaaatataactaatcttgctgtaacgcatctaaatcaagttaatattattaagttttagttttgacaaagaatcagctcaggatactatcttgtactattttgaaaaatacatggtttaatttatcatttaacaaaataaaagaatccaataaataaattttataaaataaatagttcaaaataatatttactttaaaaaaaatcatcaaatatgtaatgttgaagttcatggtacaattttggtaaat

SEQ ID NO: 217607 - DNA, 938 bp, Cannabis indica
gagtaatatatataatatatatgggcgcctacaaatcaacaaacatcacacatgtatgtgacaaaacctaattaataatgatatttatggtcaaatataaaagtatttaaattattattttttaattaaaaaataaaaatattttcttaaaacatattttataaaattgtttacactttttaattttaaaatttttaaatagtataaatttttttgactgttttcttattaataaaatatttttgagcctcccactcccaccctggaccttgcgatacggactttagttccgacctgtcccagactcatcagactacaaccctagccccatattggacctggacactgaacttaaacaaaatacaaaaaataaaaataaaaaataaaagttatagaatacacttttatttctagtttttaaaattaaaaaataaaagtgattataaaacacatttttattttttaagaatacaaattttgcttttatttttgtgattaaaaaattaaaaaaacaaaaattttaaccaaaaacaccattgtctttattcacccgattgtgaccatacctcactaacttatcgaaaatcacatacaataagacaagttgaacatactatataataatatagtctattatcataatatagcaaaatcttaattttatcactctcgagccataattacaagaatgcctttaactcataaattaatggaggggtaaatactattttggaccctctgtcttacaaaagttaccaattggaccctgtgttttgttaaatgacaaaattgaccctgtattttctaaaatagtacatataggaccctgaatttattttttgtcaaataaaatttaattataatccgatctaaaagtgctatgacaaaactatttacatttattgtatctgttcgtattaagcattgtcttcaagttg

SEQ ID NO: 217608 - DNA, 643 bp, Cannabis indica
tatttgtaccatacatattaatactgaaagcaattagttttttatgtatgtttcttttaacattttatttgtaactttgttgcaacatgttgggttgtgttttttatattctaaatctactgatgtccatggtttctatatatttttttaattttagtttttttttgggatactttgtgtctaacgaaaactcaaaataggaatttctcgatgtgggggtcttgtcgaagccaggaatttctcctagtcgagggttttgctggtgggagtttcaaatattaaaaattaaattttataacatttcatttatttattatttgatttttaattttttttaaaaaaaaagtattcatgtccagcttattgcattcagtgggttttttgtgatatttttcatgtctaaaattgctagacataaaaaatacccctttcatatcgctgcatatcttgtccagcaataaaagggcatgaaagagttttcatgtctagccttaatggtcgtggaatggggtttttgtattaatgatacttccttttcattgaaggtcatttcctactatcgtttttggatcttgaggctcccacttctctcgctgtttggtgctcaccttctaagttttgtcatcacctctttcagtctaga

SEQ ID NO: 217609 - DNA, 596 bp, Cannabis indica
aatattttattatttattcattagtaataagtagaatagttcgtattcttatatatgacttaatattttattatttattctatataagacaatatccacaattaaaaaaaaatgttttaataatattttgttaaaattatattatcatgcttttctaatcgttaaataagtaaacttgttttgagtgatacagataagtaacacagaacaaaaataatagcaggaactacaatttaatcttctaaatctcaactcataattaataaagaatgtcgccccccttcagtattaaggtcatattatttcataaatttctctttgaagagatttttttttctgaccaaaagtttaaagaggtagttaaccaatttttatacaaattatttttcaaatcgagtaaccaattaggtagatatgtcgtgaaattgtataaacaatttcgttttattatgtagttgaccaataagattgtgggtgttgcattctttctttgctctaaatacaatgacaaattaagcctcttgcattttgttcatcatcaaaagtctttgttcttagacgtgagggtgtatataaccaactgcttttaaggcaag

SEQ ID NO: 217610 - DNA, 577 bp, Cannabis indica
ttttcttttttttgtttgccacgcacttatatatacagagagagtcacaaacaatccaatcacatgatctctctcaaatttcgtattttctcaattctctttctccacctcctctttctagattaatcctttcatcagttgcaaatggcttctgccgctactgtcagccctgtagggaccgaaaagctctccaacctcaaatctgctgttgctggccttaaccagattaggtacttcttcactatctttcagtttccttcccaactctaatcttcaactttgtcgatccgatccatttcttaaatttgttgaacattcatattggcataagatctgacattcttcgttgttgtagtgacgatgagaaaaatggattcatcaacctcgtttctcgttacctcaggtagattcttagatttaattattttcattttcttattatgaccaagtgtggcgcatttcgttatttttgttggtcagtgatgaaaatgttaaaaactcggaaaatggtattctttgattcgttttgcttatctgtttcactcaaaaaatgtcgatttgtaatgttgatgaatcg

SEQ ID NO: 217611 - DNA, 566 bp, Cannabis indica
ttttttttgaaaaggtacaaaaattaaatttaagtactactttgtcctatattgaaaaatataaaatctgaattgtcatttaataaaattaaaaatatatttgataatttttgcaaaatataaaatttaaaataatatttaggtctaaataaaataaataaataattgtatttattacttgcttccaaattattttaatatgaagcacgagtttcatgcggtaataataatactttctctccacctaattttcacccacttttgtacaaattatatgaactgtaatacctaaaaaataaaaaagaaaaataaataaaaataaaaagtattttcaaatcaagatgccaaagtggatggttcacaaccatcagggacacaagccaagacatctctgtaatctcttgatattgtgaaagagtcatacacatttccatctctgcttttcttgtattcaaaaagcaatgaagagtgattaaaggctgtcattttgacaaatccccaatcataatctctgtatacacttccatttcggtcttacttggctgaactcagcaagtgactcccag

SEQ ID NO: 217612 - DNA, 420 bp, Cannabis indica
ataattttaactaaataattctatgtggattttatttggataaaattttaagaattttaatagttatgttttttcaaaatagatatatgatctgctttagcgtgggggttatttaaatttatactattatattatcatgctaaaagttaggtaaagagtcaaacaaaaggggtttccctttgggttttgactctattacaattatattctaaaaaaaaaattgggttttaaaattaaaagtacttatttttttaactatctcatttgcaggtttctttttcagttttccaagcagaagcagtagctttactagtagatttgcattgggctcaagttgtgggacttcccttggagagggtttttttttattcactttcattggtctcagctctggagggtcaggcattgtatttaaatgag

SEQ ID NO: 217613 - DNA, 608 bp, Cannabis indica
atttttgtaaacaactggtacatgtttgcgaagtacattttacttacattatattttaccataaaaaataatcttttcttattatgaaattgtatagacttttggcctatagttgttaagtttgcacaatttagttttttagccactccctcaattgagatttatcttgtacatgcattaattctagtactatattatgatactgtgttatatgtgtagaacttacttgattttgaaggggttgaactttctacatcaataagcttaaatgaaggtatactgtttatacgtctttctacttttcattgctcatgtagacaagccaatttgtttcagcatcagttttaacttctttaatttttgacttgaacagttgatagtgtaatgaaagcatgattttacaatagctccgcaaacctttattttcgagataatgccatcattatcagtttaggtagatcttttacttggtgaggcactgagccttctaatggttatttattaatattgaagttgtcacttctaatataataaataggaataatgtaattaaaaggtgtatgggtggtagtgaatgtgctagaatttttggtgcaaataaaaaagat

SEQ ID NO: 217614 - DNA, 837 bp, Cannabis indica
ggaacaaagccatgaagttccaggcatcccctcaaaatgctgcattttgatcatacatctaatatagcaaatgggtttggttgccttgatgggaagagtgggggtcctcctgcatcttgtagcagtgattgtgggtcatcttccgctgtggatagcattcagaattttggcaatgtaaattgggacgttgcaacccagcaacctgacaagtgtggggttgaggatgtaatatggtctagtgaagatgttggatctcatagtgctttgcattttgcccttggttatctgggcttgagggatctacttgttgttgaaaaggtatgcaaaactctgctttcgacagtgagaagtgacacccttctttggaagtgtattcacatagatcaacctttgaacgagaagattacagatgatgttcttctgcaattaactaacagggctcaaggtaatttgaaatctttgagcctggtggagtgcccccggattactgatgatggtctgagacgtgttattgaaagtaatcctaagctatctaaggttagtatagcttttatctataaattttagctattttttttacttgtgtacaaataatgattttttcatttctttttctggtctatcatattttagtataacttttaatttattgtcttaacatacgaattttcaaccttgtgctcaagctgttataaggttcctttgctaaatcctttcattttttaagctttctatttttgatccccaggaattggcaattccccaaactaaaacgtgtccatgaatttgcagactaatgtgttgaatgcctatcttgtaactttttcttctctcttg

SEQ ID NO: 217615 - DNA, 1156 bp, Cannabis indica
atgcattgggcaaaagcacttccgtaaagcattggagcttctacacaatgtctgccatcatatgtcactttcttttaattttttgcaatatgaacctttgatttagttgaccaaacttatttctttcttgtatacttcaggttgtaactgctccaatgtctactgttaacgccatagcagttgaagcgtacaaaaaatacattttggtttttctcattctccacgggcatgtatgtttcttgttttatttcattcctttatttccttgtactttgaatttagatactatgacttcacagttcatttgtcttgcaaaatatcttgtaattttcattacaaattgatagaattgtttgtttctactttcatttctggtggcagttctcgacaaatctccccaagtacacttcttcagtagctcagagaaatctaaagaatttttgttcggtaattggcacactcttttttgttctatgacattttatctgaatgagttgcggatgttttcatgaatttagaaatatgttatttagtcatatgagttagtggtctcttattttgctcgctatcttctttgatcagccctatattgaattggcaaatagctatggtactggaaaaattacagagttggaggcatatgttcaggccaacagagagaagttcgaaagtgtgagttttctaaaacatacccggttatgttcaatctagtgatattcagaaattagtggatttacttatttttcacgggcttcagccatctaacgtttctaaaaatcacttccaggacaacaatcttggactggtaaatcaggttgtatcttccatgtataagagaaatattcagagattgactcagacatacttaactctctccctccaagatatagcgaacacggttcaattaaacagtgccaaggaggctgaaatgcatgtgctgcaaatggtaatttccatctcaccgtattaaatggtatagcaaattcaaattcatatcactagctgacattttttttgggtcaatttgcagatccaagatggtgagatctttgcaacaattaaccagaaagatggaatggttagattccatgaggatcctgaacagtataaatcctgtgagatgatcgaacacattgactcatcgattcaaaggtag

SEQ ID NO: 217616 - DNA, 630 bp, Cannabis indica
tggactcccaaatactatgaaccacaataagtcagaggtgttgggcttcttaaggaaaagatgaggaagcggattgagggatgggatggtaagtttatctagagttagttaagagattttattgaagacggtggtgcaatctcctccccaactatgttatgagttgtttttcttttaacctaaaaggtgtgtgacgagatagaaaaatttgtgtttattttggtagaagaattacgggtaaaacgacagtggcattcgctggatgagttgggattggaggtgtgtccaaaggttaagggggacttggatttcaaaagctttatggattttaatattgcgttgcttgggaaacaaggttggcatcttcattcttcgtcaagattctttagttagccatgtgttcaaagctcattattatccttgtgggtcctacttgggggcgaagttgagaagaaatccaagttttatatggaaaagaatccatgaagctcaatctcttattcgaaaagagaggtgtatggttgttggatatggaatgagtattgatatccttagggaccattagcttccgaataaagagaactcatttgtggtttcaaattaccccagtttggcaaatcaaaaggtctc

SEQ ID NO: 217617 - DNA, 669 bp, Cannabis indica
atcatcaatataaaatttaaactctatataaaaaaaatcgtttataacataaaacatttgaataacaatgtgtatatgataggtttatatacacaattatgacattcttaacaattagttttataaaacatatcgtttataacataatttacaattagtcactaaattcttaaacaaaaacccctagaacttaaaataaaactaatatttacgtggctcgccacgtaactctcttctagtatataagaaacatactaaccaaaactttttattctactactaatttttttttaatttttttttacttttttacgtttttaaagtttaagtttttagtttaatttttagttttcgtaacttaaactaacgtaaggtaaagtaacttccttacttttaaagtttaaaagtaagtttacgttaacctaacgtaaaaaaaaagttaaaaaaaaaaatttaaaaacttaaaaaaacttaaaaaaattactaactaaattaaactaaaactaaaattaaaactaaaactaaaaattaaaattaactacttaaatttaaactaacttaattactactaaattaaagtaaagttaaattttttaagtttaaggtaaagtttaaatttaaattaagttttacgtttaaccaactagttacgttaacctaaactttaag

SEQ ID NO: 217618 - DNA, 558 bp, Cannabis indica
acatatgtttattatatcactctatgtgtcatgtttatttttagtaattttaagtattgatttatatttatatacattaatgtttataattttaatattgtattttattaaaaaaaatcttattaaattataataattcatactaaaatagataataaacatttatcttttaataaaaaaatatttaacttgtttatttttataagttttcaaaatgtataaatttttaaaataattttttttgcacattttttgtaattattttgtttttgttgtacatttatgaaaaaacccctaatatataagaagtcttatattgttgaatatataatgtgctccttaattaattagtatttctcttttagtaatcacatttcctcatactcgtcatctttgggggatggcctattattagcttgctaccatagatggttgagaggaactgttgaaaaaataagaaaaattgtaaacttcttcctatgattataattaagttttttgtattcatatttccaattttttaccatataagagatttgaaagtctcttgtttttgtc

SEQ ID NO: 217619 - DNA, 571 bp, Cannabis indica
ggattaatcttaactaaaatacgtagtatgattcgaaaaagattagttttttatttgaacattttaactattttaaccataatttaacaaaaaaatattcttgatcaactaagaaaacgaattatctatttgagttcattaacaaataattaatattataacaagtactaagataactcacaacagtttttctactttattttttaaaacacatcacaaaaattttactttttctattttataatacacttttacattacttcatacatcacattctttaaaatacaccactaaagcctcacttttttaaaattttatttatattttttttattttaaatatataatattaatatatacagatattctcgtataaaaataattaaaaaccacaaaacaattaataaaataaatttagagtaatgaatagtattttataaattataaatagtaaattttaaattaactttaaaaatgaaaaagaaatttagaacatttgttgtaacatatttttagtacgtattttttaaaatttttattaaaaatttacttctatttttaaaaaaaattag

SEQ ID NO: 217620 - DNA, 745 bp, Cannabis indica
attagttaattttattcttttgagcatctccgagtattttaaaaatagtataaatgcatttttttggttagtagtgtatataatataaaagttgttttaaatttgttacaaaatatagcagcagctaaactttacaccacaatattattttttatttacttgtttactcctcattaatataattagtaattttttatatttttatttagagtaattgacggtcaaatctggttatgttttaatttttatacacttaatctcttatttttgtggtaaaactttaactttgaaagtaatacagtaataatccagttgatatttaatggtaatatccagctaacacctcaaatttacaagaaaagtaaacataaagaaattttgctgaaaataactcttttatttattatatttaatatagtatttatgtactttcaaaaaaaattaaatatttttattgacttttttaatctacctattaaaataaagtttattttacttctaatatattggagtacaactgattcattagagatcgtctttttatttgaaagtttgaaaaaacttataaacatactttattctaataatttttattatatataaagtattctttaacttatgtctatttttttctttcttcttatattattaaaatgtattattaaataaaaaaaatatacttttaatatatgacaaagaaattatatgaattatatagaaaaaaataatataaaaaaaataatac

SEQ ID NO: 217621 - DNA, 595 bp, Cannabis indica
tatagctcttgctcaatctctgaaatgggttgacagccttggaatatctatagactacattgagacagattctttattggtggttcaaggtttaaaagctgctcatagttataattctgcttttcattcgattttgaaagatgtaaactatttagtatcctttttcccacgacgggtcactcatgttaggcgatctgctaatgtttatgtcgatgttttggttaagtttgtttttatggtggatactgattgttcttggttaaaagaatttccacctccaattataactgttatgtaatatctttttattaatacaatggtctttttcaaaaaaaaaaaaaattaaaaaaagtttaaatatataaattttatataaaataaaatatctttacaaataaaataaaaaaaaaaatttaccatattttattgagtaatttgcggcaaaacccccttaacctatcaatttacttgcaaaaaccatccaacctcatatttggtgggaaaaccctccaaagtactattctgtttacattttaagatgccgtctgtccagctcataattttgcccacgtggcaatgacaagtcactaaaaaa

SEQ ID NO: 217622 - DNA, 897 bp, Cannabis indica
caaaaaaacttgtaatttttaaggcacgcttaaaaactttcgggaatacatgaggagtgtttacaatcattgaaaatacccaattttcttgacggttttaagaactcacagcgatggtctctaaaaaaaagtatttttaggaccatcgagaatagtggtttttgtagtaccggcgggctccactactattgcccaccgctaatagtattagcgacagacctcgtcgttaatacccgtcgctaataaataggcaaaaaagttcctgcctgttaagttcaaaagtattagtggcgagaccctgccgcaaataatgattaaaaacataaaaaaattattatttttattatttgcacaatagcggcgggctccgttgctaataatagtatatattttctcccagcccttcttcacttttcttttcctttttcttcttttttattactaaaatccctaaagtctctctcttctctattcctccaaacccagtcgcgcccaagtgtactctaaccgggcaccacccttatccgattgaaggccacttgtcgcatctacttcattttgcgagtaaatatttttttttagagcttttaaggatatgtagatatttttaagaaagttattgtgtatatgtacgtgtgtattttatttttttattgcattttcaggttttgatttttaaagattttagagatatataaatatttttttaagagttttaatatgtatatataaattagtgtgtatatatacgtatttatatatatgtgtatatataaattaatttctatgtatatatatttatttttgtatttgtgtatatatatattaaaatctatgtatatatacatgtgtatatctaaattagtttctgtgtataaataggtggtttattgtgta

SEQ ID NO: 217623 - DNA, 967 bp, Cannabis indica
gatttgaacacattgctatatatataaccgatatagggaccagtttcatgaaattgctttgacattatatcgtcatgtatacatatatagctatacgtacgtcaaatatataattcaaaaagtaaaataatgtaagttaaaaaatatatttaatattttaaaaaatattgtaattttaccaaatatgtgtttttggatgtaaatatatacctaatgtctttgttttcaaagtaaacattttacctgctaacaaaaaaaaaaaagtaaacattaatttaccaatagtattgtaatcgtcataaaattatttgataataaagtaaaaaaaaaaaagtggaattctttcatcattcacttgacaaatcctaccctagtacacttttgtaaaagaaaaaaaaaataaaaaaaaagtgacaagatattataaatttttttacttttagtgacaacataatttaattataattaaaagtaaaaaaagtgtgacttataataaatttcattcttatgttgtaattcttatgttgtaatgattaaacttataaataaaaaaccataatttgttgtaactatataaatgtgttttagttaatacttgttgtgtttaaattaaattagtgacaaattagtatttaaatattatattttagtcacaagtaattttttgttgatactaaaagttatatttagtcacaaaaaattatattataactaaaaaattaatactaaaaatagattttttttttagtgaggcacataaacaacaaccaatatagagtgaacaacaacggcaaagtcatcccaaaaattaatggttaaaaaaaagaataattaatatttttgtcttaaattttttacacaataaatgcttattattcaggaacaaaaatacttatattattcataagaaaaaaatattacttatttttaatatatgtttttaaaaataggtatatatatagggaaa

SEQ ID NO: 217624 - DNA, 788 bp, Cannabis indica
aacaaaacaaaaaagtgacccatacatgtactaaaatgagcaaacattataaataaatatactaaattcaattcaacactgccaaaatcaaggaatatcgaaacttaacattccccacatacttgaagggatagaccgaatttatagaggaacatgtgcactaactcgaaataaattgatgataaaacttgggagtataattaggatgattaaattaggcccatttaaaattcaattttacaaggcccaatttcatagagaagcccatctattgggatatgaattaaattgagctttaaatgcctcctgactcgttcgtgaataagctggaacttatggtgtagtaaacgaagattaatacgtaattcccatgaaaatcacagacttctgtttacctctcacgacatgttggggaagtcacgttttgttttgatcaaaactgtagtcatatcaacataaacgacaagaaaattacaaagcctttaatcagctaacatacaaatgtgtttttggggagagctacaggtttggatgagctatccatagtgtttgtggtgcattgttatccacgactgccataagttcatatccatatccacaactccacaccctcaattttcagtttgagcattcgacaaaaaaaaagttttaccattttccacattagtactactatcactctcaatttcttttctctctcacactatattctgttttatctacgctgcttccttaatggcatccattctgatgaccatcaagattgctccttaataaggcgagcccag

SEQ ID NO: 217625 - DNA, 525 bp, Cannabis indica
ttaaaaaaaaaaaaagaactttgtaatacaaaaacaagccgagaggttgatcttattttgtatattgcaacgaggtcgatgtcttattattttaatagttgctttgtaactgttctttttgtttgtttttatgttgttatttatgtgttctatagtaattatttaatttatttttttttcctgttttactgatacacggtatttttgtaattttgaaattttaagataatatatttgaaaacttaagacaatacaaatgtaaaaaataaaaaataaaaaataatgacagtaaaaatgtaaaaaataacaaaaaggtatgtattttggtaagaagatcatgacattaagtgtactaatgcttattatttatgttgaatttgtgttttatcactatgagaaacaataaattgtgcctatttaatcttttctttataattttagtgaaattcagtctaaataatagttaaaaaagattgaatggatccggtccaatgtaatagataactaatttcaatggttagaatt

SEQ ID NO: 217626 - DNA, 773 bp, Cannabis indica
gttttatatgtttatttgtagttattgaaattaaatttttaagcgtcttatgcctgttcactttcttagtcggttgtgttaataactcatttttgtgttttaatattatgatttttttattattttaagaaactgatttcattgttcatattttttattagcagataaacgtaattggtttctgttagtcagattccaacgtttaaatccggtgacgattcgagcatcaaactccggagacagtgacaactttgacaaattttttggtgattttttcgatgacaatgccaactccggtaattttttcggcactgacagcaactttagcgacttttttggcaccgtcagcaattccggtgacttttctgatactatcagcgactttttcgatactaatagtaaagttcatcaacttttgtggtatcaatgacaattatagcgatcttttatttatttttttttaaaaatataaaataattttaatattctttatgataatataaataacatatggaaatttgattttttatgcttacatttggttaaataatttcccctaaacacataataactaatatttgtaggatatgacagcttttatgatatccctaaaataccccccatttacatcacccccactgtaacaccctaactatcttaggcgtattacgtgattttttaaacgtactgtgcagctcgttgctaatcaacgaggtttatggaaaaacgtgattaattaaaattttgctttttcattaaacttataaaccatt

SEQ ID NO: 217627 - DNA, 1279 bp, Cannabis indica
ctacccctttcattctcgtgctcttagggttcctcctctttccttgggtgccaccagccagatctaggctagtggcgcccgagatcttaggcgctcttgtggatgttggtcaataaatgggttcttcgcaagtgggtggcgattttgggatctggtggagtttttgaaaggcattgatttgctcctttttcctgtcttgtggtcgaagtgttgcgtgtaacaattcagaggcagggtcaccgatcatgagggtcaagggccttagttttggtgtctcttaattaagggaggtggttggcaactgcttttttccactaggtctcatggcggtggggattctcatggctgtgtgtgacggttgccaatggtatgttgccttggctgtttagaggtgttgttggtggctatggtttggaggtgggtgtatttcatgccacttttagcggctttggtattgtttccaaggaccttgtgtctctgcttcttgaggtgatggtggaggctattgctcatggctagttggctgtttgttggtcatatacattcttgttttcgaacaataataaatcacttttgtttctatgttagtgttttctaatcttagatgttctagggttacaatcaggaggggtggatgtgggtttttattccaatccgtgttattgtgactcttatgccgggtggttttcattttgtagtttgctttatttaattattatgtttagatgtttgtagatttccttgcacaagtcgggttttgttctattttaattttttttattgtttttttttggtgttttatcacccttgtcttttgcagtgtttggctttaggacattttgtaatcgactttgatttggttgttgtttggacatattcttgagagatttatgcagctttgtttctgccagacttttcgagctttgtcttgttaaactagggaaagatattcttctttacaaaaaaagaaaaaaattattataatatttgagtaagtttgcttaatttaaataattactcaaccaagatatatttgagcaattattaaaatatgtaaacaaaatataatttaagtgttgggaatcgtcaacactatttatccctacattggtatgatattatccgctttggacctaagttcttacgaattttttcttgggcatcttcccaaaaggcctcataccactgaagatattgtccatctttatacatccatgatcctttttcatatatagccaatgtgagactttagttgcacacctaacattaagtattacac

SEQ ID NO: 217628 - DNA, 1934 bp, Cannabis indica
agatatttggtttaagaaactttaagcggtcacacacactagtagaggagaaaacaaagaagggatgggcagaggattttacgtgggacccaccgaaacccatgtgattactgattagaggcaaactagaataatagcgtctccactctccactacaaacgttcgacctatttattttattcaaaaagaatattattaatttagtatttcaaatttaaaaagtaattaatgaaaacaattataaagcttagcccttgtttgccacgtagacttcccgttactcttttctatctctgggtcagctacgtgtgctttattctcggactttcttttattatgttacattaataaacaataatttaataaatagcattgggttttgcagatttcgatttacagcgatacgatgtcgtattcagttatttcttctctttcttgacccacgacgtcgtttcgtgtgggattattatttgttgacccgattatgtcataatatttctcattagttgagaaatattgagaaacaaaggaagcttaaatatctgtttcaaaaaaataaaaagcttaaatatacataaatttcgtattcgtataactcaaaaaaaaaaaaaaaaagcatagtagagcgagctgaccaaaccagtcctttcacctaaagaaaccccacagatttgtacagggagatttaaataaaataaaaaaaaagctttgtctgattttttctcagagctgaaacaaacatacttttgagagaagcaatccttagttatttaacttttattttttctttttcattttggttctaaagtttgaggtcttgttgaatgttatatagtaagtacgtatatttactttacaaatttctcggcttccgggattgctgttcttgagctcctttttggtactgaaactcagaacttgatttcatatgtaagttgctgcttttttacactatttgggttaaaacatatgagtgtgtttcctgggtttacgttttatgttttttttcccactttgtttccttttctgggtgattttccatttttgcttggagggttgctgaaattgttttctgggtataggtaaaagtaaaagtaaaattgtcgagaataatatgttcactgaaggacttgatagaagtgctcttcgttgggttagagaggttagctattctccaatctgtttctatgttttatttcttgtctatattttctttttctctaaagaaaagaggtattttaaagttttagtcatttttcctctgaaatcagaaggaggaggttcctttatccagttcaaatctgagaacccgagttgatcccatgtctaatattcgaagtggcggaagagcctttggattacctccaccctcgaaattcagaagtgggcatttgcccgctagtgccattccggtgtctagaaccattcctggtgatttggatgctagtgggtcaggctctgaaaatgatatgagtactgattcagaggaggatgtatatggaggaaactcagttgattcgtctccccagatgaataatggtggtgctgttcgtagatatggcaaccatttgaaaaaggattcccactatagcagtgactatacttattccgatgttggttcttccatggagacagtggttggacttggaaagcataggtttatggcggaaagagtagtaggagttggaggagctggtaggtaccaatctaggaatgggtttacggaagatgagtctgacgactccgctgcaagctcggagttttctactacacaagtgggaggaagcattaatggtggtatgaaacaacatagattctcggaaggatatgcttccagtgttccatcaacagttcaagtggaaagttctgctgtaaaggttcgttcttatactttagaatttatttcaattgctcttgctagctcgattgattct

SEQ ID NO: 217629 - DNA, 604 bp, Cannabis indica
aaatggactgattatttgcgtgctttaagaatattgaattgtctggtgaaactatgggccaactatttactaaaatcctgtttatatgtaaggttaatattcccagctaaaatagttaaattgttacttaaatacttaaggttttttaatttttgcagaataaaaatatataaattattaagatttaaataggtaaactttttgaggtggtatatgtagtgctggaacttgatagtcttaacgtgattaatgatctgattaaaaataaaattaaaaacacaatccctcccatggctgtgtaattttggattgttatgaagttattattaataatttatgttttatcttctttttattttttcaaacaatctgtaaataaagttgtatatgttttggggcgatatactctttctgaggctcatcgtgtttataatagggacattttgcttattattttatctatttaacaaagatgcttgatttataaaaataaaataaaaattacttaagtcttttctttcctttttttgttttttttgttttttgttttttttttttttttagttttaaaaagtaaaaattagtaatttattagttaagccaa

SEQ ID NO: 217630 - DNA, 625 bp, Cannabis indica
ttcccttgtgctttaacaaatcatttttttttaaaaaaaaattaaaaatatatatttaaaacggatcgggtgagatccgatccgtaaaaaaattaaagcggggcgggtcggatctgatgcaagatccaataactatccgaatgtttcggatcagtaatgatccgtcggatcggattactcacccgacccgaatgaatggatctttttgccatgcctacatctaatgtaccctgagacccatctaatgtaccacggaatatattccgtgaaagtacatcacggaacaaaatcgggtccctatatatttatgaccacttaaacttctttcattcactcttttttagtgttcattttttttgggtcatttcttcaatatttctagtcttgtcaaccatagcaattttgtctcaagattattaattgctttccagaagagagaaaaagagaagaagagaaattgaaagcagtgaatttagatgtgttattcatatatcccttgctaaacgaaataaatattcattcaaaataagtcaactttttctcaagattatatattaatatatatatatatatatatacggctactaagataatataaaccgacccgccccgacccgacaaggca

SEQ ID NO: 217631 - DNA, 627 bp, Cannabis indica
ctactactatcttttcttgcatgttctcctttcattgaacatatttgattgaacccatttacctttatctcttaattaacaacttagaataattagtcatacactctgtacaaatacaaaaggattcatccttgaaaagactcaagttttttatactaaataagtgctaagtaggttcatcaaaagtgtgtattatttatgatcgatgatacccttgataggatatgtagaagagatagatacatagatatatgaattgcactgaaatgaatggtgaagagactatatagaagaaaattaggtggattgtatgctatgaggcatatatatagtgcaaattgtataaaaaatttgcattagataattacatatccacaaggacacataattttcatatatatcaaaactgatacaaccagaaataatatgatttcttatctcatgatcatcccctatacttttatagacaaattaaaagatgactatagcctagaattgaaggaagataataaattaaggctgcaattatgtttatgatacaatattagaaattctttcttttctttgacaaggccaataatatttgtggctccttggcaataggagacatgtcggattattttgttg

SEQ ID NO: 217632 - DNA, 777 bp, Cannabis indica
taaagaaactaatttacatattacctagtctcagtcaaagaaaaaaaattaattaattaagcatgtaaatagtaacaattgcttttaaaaaaatcctgtacatttctccataaataatttcttttaaaaaaatgaagatgtacatattagtaagccataattcatcatacaaaaataagaatcatttacgattaaaaaagaatagcaacttttcaactaaaggttccataaatgaactggggaaattatttcatatacaatcttttaatattttttaaaaaaaatttacgatttaggttgctccaataatttatgtgggttgctatatagattttagttgcgatttaagttgtttagttagtttttataagaatttctatataaaattctataaaaatgctaacaaaaatatttaaaagtgtaaaaataaaaaaaatctcaataaattattactatatattttagagaaatacccttagagacagcccatgagtggagacctcaaagaaggttgggactaggaatcaattcataatggtgttggccaaaatatgttctatacaacttttatttttaatttaaaagtaaaaacaaaagtgaattaattaatacatttaaatttcaattttaacttttgtttaattttaagtgtagaaataagaattaaacgttatagaagtaggtgggttggagtcagataggggtatcagggtgtgggtccaagtccgggtccgtggtctggggtttgggttcgtagagtccgataatcgagggtct

SEQ ID NO: 217633 - DNA, 743 bp, Cannabis indica
acaagatgagagaaagggagtgaatgaataaggtgcggctgagaagttagagattagagttttcttcttttttttgtcagtctttgggcctatctcgtcgggcccagcttgaaccgtcgagattgggtacacgattgtacccaatctcgacagtccaagctgggctggtcaagatagggtccaaaatttataatttttttaaaaaaatatattcttgtgatcaattatggcccttttttaagagctcggcgagatagagaccaatctcggtgcacacactttcggcccaccaagattggtctaataaaaatttcccatttttcttgtagagaaccgaaaatagattataaatttttgtttcacgcatgcactgttttgtgttttgtttactatatgcacagacttactattttctgtacaattaaataatttgaatttgttaaaaacttaccagagacttactattgttttgtttttaatgaatcaggtaagaattaaaaaaaaaaaaaaaatcagtattaaacactactaaaaaaaacttagtaagtatacagaaaggtgtagtgtgtctttttcagtgaagatcgagtatacagaaaggtgtttgtgagtgttttatcctgtttctattctgttagtcagtatggctgcgagcagtagtaccatgagagatcttgagtccagttatgacaatattgtgttagatgaagaggaagatggaggactgttgtgtgatattgtgt

SEQ ID NO: 217634 - DNA, 840 bp, Cannabis indica
tacaccacttgcatgaattctcagtatgactcgtgaacgagaattacaattattaatacattacaaaaagacttttctacccttctctctcttacctctttatcaaatatagttgacaataaataaaatgaggatattttggttaatatattaattatttaattttatttttatactaaaaccaaaataaaaaaaaaaattgattacaatgtgcattacaaaataaactaaacatggtaatagtaaccccattactattaccattacattctattaccattacaattatattaaaccaaacactacctttatcttttttgttcagttttttattaatatcagaaaatatatattttttaaaaaattagcattattagctataacaatgaattaaaagaaaaacaccccaaccactttcttgagagttgagaagaatgaggtatctaaatttatgggagacttttaaaaaagacaacccaaagccaaaggtatgaagactaagatggagaagtagttatggattgaagactattatgaggtgtagagtttgaactcaatcttttattatgggaaagaagtctccaaaatctacatgatctacggttggaattaagttgacaattttgactttctaattgaattttaatttgtacctattttattatcaaatagtcaatttgagtatagatttgataaaattattttgttgtaaagaagactcgaatcactaaactattctctctttctttttttacatgtttaatccgaactaaaatattcaataaaaaaaataaagggtaaataccattttggaccctctgttttacaaaagttaccaat

SEQ ID NO: 217635 - DNA, 866 bp, Cannabis indica
ttattgtcttaaacaggacacatataagaccaaaattttaaattatttggtgaaaaatatgtagtattaattacttccaaatctttttttaataaatttaaaacggagtctgtactgatgaaattgtaaaaaaattacagttttataaacattggatacttatgccactaaaaaaaatcattgggtttatgccgcttacaaactctaaactttgggtacttatgccgctatttaccctaatttttacttaataaatataataaaaataaaaaataataattatgatgttaacgttgatttaattaaaatacatgataagaaataaaaattaataagcttaattataaataatttaatataatctaatgtaatatgttatttgatttaaaatactacattgataattttcttatatattgaattatgagattttataatttttcaatactaaaaaaaatcaattcaaatattctctcataatttgatagagaaaagttggttaaataaattccattatgatttatttaaaaatataaaataaacttcaaactatatgttgttcaaatattaataaattaaaatatttaaaaaagtgcagcttcataattaatatcagtcattttaacaaaaacttatcatgcagaatgttattattttgaaataaggctaattagtaatttttccccccgaactttgacatgtactaaatcatgcccccttaacttttttagcagttaaaaattccccctgaactattaagattgttaaatttaatgacttttatctaattttagtaaaaaaattctaacatggatgaaagttcaggggatataatttaatacatataaaagtttgaggggcatgat

SEQ ID NO: 217636 - DNA, 529 bp, Cannabis indica
ttttttttttttgaaaaattggagatatccatgtactttgtatcttttatattctttatttagaattatatttgtacggtattattaaatcaatttattattaatatatttattgatttttaattgattttgatatattaaagtaattaaatcaataaatattcaaacatcatttaatttgttattcaatttcatttctcaattaattgtagtaaaaattctcacatatttagtgtatcaatgattttagaagtcgattatcattcattttaatttgtgtttttttaggtttaatattagcagatcaaaactatcaaaattaataaccgttcatacataatttattctattaaatttcataacaatctttattgtattttttgtgcttatgtttatgtgaaaaattgttgccttaaaaaagaaaaaaaaatagcaagaaaaaaaggaaaaaaaaaagaaaaaagaaaaagaggtagaataaagaaaaaaagataagtatgaaaaaaagaagtaaggctttatgtagttg

SEQ ID NO: 217637 - DNA, 542 bp, Cannabis indica
ctctttttgattaataatgtgcaggagtttatgatagcaatgggtttttgatggtgtcagctaatgggggattgaaccaaatgcgatctggtgtaagtattagtgattataagaaactagtggagtttggagggtttttttttttttttttttgtaattctatatgttggtcgtatatgtagattgaattatattgatataaaactgttgtgcgcgctgtagatttgcgatatggtagcgattgcaaaatacatgaatgcaacgctaatagtaccagaattggataaaacctcattttggaatgatcaaaggttggtatcaattcagattacatatatgcatctagttatatgtatatattatattcgaacaaaaaaaaataaataagttataataataataataataaataatatataattggcagtaagttcgaagatgtgtttgatgtggatcatttcatcacatcattgagagacgaagtcaggatattaaaagaagcttcctcaccatcatataattcatcataatccccccttttt

SEQ ID NO: 217638 - DNA, 557 bp, Cannabis indica
gatgatttataattagtcacaacttttttacttttagtcacaactttttacttttagtcacaacttttgttgtgactaaaagtaagattttttgtagtgtaataatattaggcatttggtgtcccataatatatattttgattttttttggttaaattaagctttcaacttttatttaaaaaactaaaaaaatatccttaaaaaaaaaaaaaagctaaaatatgcgtactttttattattttagagcatctctaactatattctttaaacacattttttcagttaaaataatatagaataaaacttgaaaaaaataagttataactgtacaaaaaaaattgactctctataataataatagaaaaaaaaactttaaaactattatttttttattaatttataaaattaagctatatttaacaaatttaaattataaaatattatttaaatgattaaatataattaaattataataaaaagtttaattgaaagcaataataataaagtgtatctctattttaactttctaactattttaaaaaaaataaaaaataatc

SEQ ID NO: 217639 - DNA, 518 bp, Cannabis indica
aaaacttcgtgacatgaatgcccgattcgatcatcatttcttcgaggattggagcctgccgaaggaagattcgatgctcttcatcggtgcaaaaccccatgacccgttcgacgccaccacggttataccacgagcggtcaaagagcacgatttcgccggccgtaggcaggtgttgaatgtagcgctggaaattccattggcccagttcgcggtctgatggcttatcgagggctacgacgcggcaacgacgcggattgaggtgttcgctaaacctcttgatggccccacctttgcctgcggcgtcgcgaccttcaaagatgatgacgtgacgctcaccggtatcgtcgatcgagtactggagtttcagtagctcaatctgcagcagtctcttttgagtttcgtattcgcgacgatccatgaggttgggatacggataatcctcgtgccaggtttccacggcagagccggtcaggggcgatgagttcggggtcgtcaccatgctcgatcggagtcgcgac

SEQ ID NO: 217640 - DNA, 692 bp, Cannabis indica
ctgttcctcatctctgatttcaaacttgaagtaaaatcaccctatccaattccaaccagggaatcactgagtgaaagacccaaaccgcttccctatcccaaacgctatcccaaacattcacatcttggaaagaacctggagatagttatcaaaaaagcacttaaagaagaagatacggacaaacgcgccggttttgccaatgccatcgcttactatatgaaacttgcttataataactggcataaggaaataatgcatgatgatgccattcagagtgaactcactggcatcaccgatggtcaattaacttttaccaatacaccttatgtaaaagcattccgtccgcaggataacagggacagagacagccgcggcagttatggtcaaaaacgtggaggcaagttccagcaccgcaataacggaggtgggggcggaagacgtaatgataacagaggcggagggaactttaaaaagaaaaggtattaatattaccgctgataaaagctaaaatagcaacgcgaaaattggatataaaaattacttccgatttttcgcgttttaaatttcgatccgccgcggcgggacaatcaagacacatgaattcttttgaagtatacggtggcaaaaagctgtatggcgatatcacaccacagggagcaaagaatgaagccttgcaaatcatcagcgctgta

SEQ ID NO: 217641 - DNA, 550 bp, Cannabis indica
ttattaaattaaaatatataaaattaaatagttaatatcacaaataatattagaatagtactagacactacattttactatttttcatatttttaagacttaaagtagttgtagaatttagttttgacttatttttgaaagttactttcaatctttctcaaaaaatatataaaattaaatagttaatatcacaaataataatagaatagtactagacactacattttactatttttcatatttttaagacttaaagtagttgtagaatttagttttgacttattttcgaaagttactttcaatctttctcaaccattggatcttgttatttaatggtgttgattgttgatggaaatgtggactacaagtccacttacttcactttgatattcaatgggccccattttctcccaccttttatttttttctctttgcccctttttctctttcatttagaaaagtacacaaaatcctatgtggaatttaccattcattacaacatttgattcaagactaactaccttatatatatataaaaccttttgtcttc

SEQ ID NO: 217642 - DNA, 838 bp, Cannabis indica
atttgaaacaaaaaaaattgaaaaaaatcaaaataaataagtaaagacttacagtgtaagaacactaaaggtgacattatcacaagtgatacctctccaaacacaataatctgaagaaggtgaatcagtccaatcatacaaaacattatcaacatctctaaatgatttcttaatctccaaaagtgtttctcctacaatatttaaaaaccaacaaaaaaaagttagtaaagataacaatgtggttagttttaatgactaaaaacataatctttctgcattttcccgagaaacaaacagaccccttaacttaccatcatcagaatccactctaccaaaagggagaaaaaccagaagaagaacaaacccaactcgaaatgccataactttacaccaaatcaaacctcattcaaactaaaaaaccccttcttcttcttcttcttacagacattagaaaaaccagttatgaagaagaagaagaacaccacactactcactttctcactcaattcacttccatttcagtaaagatacatactttaatctttaaatagcagaaaacacttctgggtatcaaagcaaattttaagaactgaaaaaagattacagctttattttcctttcttctgtttgttcaatcacatcgttttttctttctttctttcttcttctgccacatatagacagaagacctctaaatacaactgtaacaactagagagagaaagcttgaagagagagagagagagaaagcttgaagagagagagagagagggagagaattatttacatagaataaagttaaaaacaatctgaccacaacctctgacaataagactctg

SEQ ID NO: 217643 - DNA, 597 bp, Cannabis indica
aatgaggcaaatgagtgtatcattaatgtcctttacctgcaacccttcattgagaattcctaagcacacttttgaaactttaggaccgatagttgaccaatatttcctttgaaatagaccaggcaacccgtcactacctggagctttttggggatgaatgtcacgcattgccttgaagacctcctccatggttaaagtctccaacaggtaagcattagtagcttgggatatgcggttcgggataattctttggaaatcttccaactcctctttagtagccggattggaagtgaataacttcatgaagtagccacacgccaccctacccatgtttctatttcccgtaacccactgtagccgatcatctagctaagccttcaatggtattctttgctttgctattactcgcctttctatggaaaaactttgtgttcttgtccccttctttcagccataaagctctactcctttgcttccaaaatttctcctctttgtcaagccaaacattttgtttccttttccgatttctccatttgttgccaatcctttaaattagtacttcgggatagcaagaagattttatcttcatattccttt

SEQ ID NO: 217644 - DNA, 568 bp, Cannabis indica
agttaaaatccctatttttatgagatctatttgattgagggaatcgtggggcttttttattcagtttcctaaatttttctcctatttttcgagacattaatcttgtattttctctataaatagtggagtcattccactgtgaaggggatccttttttgaactttctaagagttattatgctactgaaataattgtaagctttctcaaatttttttaaggaattcacctagtcggaccttgtgatcttaataattttctaagtaatacaataaaaagaggagtaggctattactattatcataggattgaatctctataaattcctagtgttcttattgctttattattattattttattggtaatttatcattcaatttaatcaccttaaagactcaatatcgatagctaaaagtgaagtcaacaagagtcatcgttgattcaagttgttctctgtgtaatcgagcttgaaaaatcaattggtcatgctatgtttagttgtaagtatgcgcattttagtttcgcgttctactggtatgatgttcgattacaatcaatcatattatatg

SEQ ID NO: 217645 - DNA, 601 bp, Cannabis indica
ataagtattatttatttttatttttttattatttttttgaaataaaattgatttttaacaaaattctgcaatttgctttgataaacaaattttagaacaataaaataacattattaagttaaaaaaaacactagggaataaattaaaaataagggcctatccattactttctgatttttatttttaaaattatattttaaaaactaagaacaaaagttaattttgaagttttcaaaatacatgacacgcgtttggttaatattttttaaaaatagtttttaattatttttttaaaaaaaaaatcaatactttaaaattccgatatgaagttgaattcaactcaggctgatcccgactccaacttcaacccatacacaaactcgaaattcaaccccaactatttttttttttaaaaaaagaaaaaaaactataaaaattactttgtgtttgttttttaatacacaatttgaaaaacagaaaaataaaaaaataataatcaaataaactacgaactctcttttttttttttctagttgaagagaaaaagcttaattaggttttagaaaaatcttataagatatggtatcttctttcatccata

SEQ ID NO: 217646 - DNA, 514 bp, Cannabis indica
atacattttaatatttttaaactgacttaagtactaattctattcaattgcataattacatttgaacataatgataatctaattagggttaagtttgactttgagtatatgtatttagaccccacagtcagcagagtttttttttatatctttctaatatcatttttcatatatacattaaatttttacattaatatacatcaatgatagatactatacattgatcagcaggttgtattagtttgacataaatatgtatattttacttaattagagtctttttttctttgaaatggatatttaaagaagttgatggaagcaaatgatcgatctggttaactttttcttacatagattctcattaatttctccatataattaagattaactcaaaatatctcaaaattaaaaaataaaccattgatttattttttgggttcattattttaattgaaaaataggtgcatatctgattaatttacatgtatttgtggtcaaagttgaatcaaactct

SEQ ID NO: 217647 - DNA, 748 bp, Cannabis indica
tataattatttttatatatataatagaaaaaatatttattattattattatttatttatttgaggtggttctcacgtggatgggaagtgggggataatgggattatatgaaacaattgagaactacttttactaaccccataccttcccttttcgcgcgtgggttttaaaattatttccattttaaattttattttttaaataattcaaatttattgttcaaaaattgtataatttattatgtccaaaaaaaaaaatttaaaatagtataatttattaataactcaacactaatagtatttaggctaattagcaatttttatattcaaattttgacatgtactaaattatatcccttgaacttttttggccgttaaaaatttccttgaactattaagattgttagatttaaagacttttatttaattttagtaaaaaaaatactaacatgatgaaagttcaggggcgatgatttagtacatatcaaagtttaaggggcatgatttgttagatataggaagcatgatttagtatataaacaattactgaaacagtaaaattgaatgaaataagagaaaactccttaaatataacaatctcaataattcagtgaaaatttttaacagcaaaaaaattcaagggacatgatttggtatatgtcaaagttcgagaaaaaaacttacttattagtctagtatttaatatgattttgaaggtaatgccttataaatatgattgttgatatttat

SEQ ID NO: 217648 - DNA, 572 bp, Cannabis indica
agtcccagtccgggtcccgagtcacggtccatgtccaagtctcggtcttgggtcccgggtcccagtccagatcgcgatcccggtcctgatcgcggtcccggtcccggtcccgctccaggtttcggtttcagttccggtccttagtcttgggtcctactcatggtccaagtcccgggtcagggtcccggttcgggttttgggtcagggtcccggtctcggtctggatctcgagttaggatcccggtccggatcccaggtcagggtcccggtccaggtctcgggttagggtcccgatccgggtcccgggtcagggtcccgatcccaagggatccgagtctggggtctgagtcttgaattaagttttctttaaataaattgaaatcgggtcgatcagattcgatccaaaaaaaaataggcgggtggagcgaatctgatccaagatacaataagtatctgaacgtttcggatcaaaggtgattcgccggatcgaaactctaacccctcaacttataaatgaatctttttgatatgcctagtctataatataatgaatacattgaaattgactaacg

SEQ ID NO: 217649 - DNA, 641 bp, Cannabis indica
atttttataaaaatgaaccaaaaagaattacatgtcctttttcactgttagggaagacaattattccaaaacatatgtcaaccaaaaaacagtcatgatgaattattacattcttcatgtgaactattagatcacaataccttcaatgaacgattaggttgatgcaaatcattgttaccttatatttactataactagaagttttatttatactataaaaatgtcactttcgtttcgtcacccagtttgttattgtactagtagaagtaatttttaaagttttaccaacacaaatttacagtgacaaaattttaacttttactagtgcatttacgtactggaaaagtcaattttgtcagcactttttattttgcactagcaaaagttctaatactagcgttgatttgctaatcccttttgccaccacatcaaaagtagatttcattttgccaacacaatattaaacttttagcaacacaaaattatgctgacaaaaataacattttttgtagtgttaagtatttactaaatgaattatattttaattttatatggcttattaatttatatatctattaaaagtgctctaagctttttttatttagcttttttttttttatatatatatacttttgttatta

SEQ ID NO: 217650 - DNA, 732 bp, Cannabis indica
caacatatttttgtaattttttgttgtttttgtattttttaaaataattcttttttttttttattatgataatcacctttattagaaaaaagaaaaagaaatcaactacgaaatagtaagaattctaccctttcaaaaatctagaaaaaatagcataaagtacctgtttactcctcgttgccataagggtacctggatacccttacctgattttttttcatatttttcaactttttcctcaattttcttataaaataactattttttttttttcaaaaaaaagctatattttttcacagaaaatataaaaaaacccataaaatttgtaattttctccataaacaaaatagtaactaaaaagatcccaaaataatgttaaaaaaataccctatttaattatacataatagttggtattcttgtaaatgggctgggctttagcaaagtagcaataaacagcccagaatcctgcgtaaagagggaaaagtccacactcggttttcaaaaacacgatctacgcgtaacaaaaagccaattaaaaatcgacacgtgttacgatattatgggcggtctcagtcatagaccggtagacttagattcatctaatcacaatcccattaattcatctaaatcttcttttgtcctttaattcgaaaagtcagttattaataactttctctttctctctctaaaccccctatgcgatggcttccggcaccgtcgccgccgacga

SEQ ID NO: 217651 - DNA, 568 bp, Cannabis indica
tcatacattgtatctcatatgttgtcatcaccgtatcttatcagttgccactctcgtacctcactcgtggtcaccactactatcttttccaaatctcaatctcaatcttagatcccattttgaattttaaatattttctttaacattttatagatataaaaaaaaaatttaatttgttctgttatttattaattataatatgattgaaatttatatgatgatataaatataaatttaatttaaatcatcaatataaaaatatggtataatttatagtaggttaattatgtattacatatctaattaaatttaaatttattaatatagaatattattcttcttaacgatcatttttatatcttgatcatttaaaattattgcaattattatatatttgtagttgtcataatatttatactgaatacaaaaacaatcatatggatgtatacaaatttaatgtaaattctatttaccattgaatgagaaaattacataataaaacttaggatacgggagaaagaatttagtatatcttattatttttttattaagttttaagttagtatta

SEQ ID NO: 217652 - DNA, 733 bp, Cannabis indica
caaagatacccccggaagaaagaagaagaaaatgaatggaataaataatttgttacctgtgatattcatcatagtcaaagtcatagccaattgcctaacaaaggtaaaaccaaagaatttttaatccatgtcctaccaaaaaataaataattgaaaattaaacaattataaattatgattaaacctaaaggataaatttgaaggcgtacccttaaaccagccattgtggtgccatagttcttgtaaagaagattacccaattgaccaattttgctcctgtctatgccaagcttctcaaccatataatctgcacgaaaaattcaatgatgaccaatttttccttttttctttatgtaaatactaaaatgaaagcagtctttaacattaaaaattgaatatttaaataattaattaccttctaatatttttgtcgacattcattggcaagacctgcacttagggggtaaaggggtggtcatctagatctgcaattgtccaattattttttagttcagcttcatattatatgtaatgacagagcttttatctattatatttttatgtcaaaaatgtataaagagagtagctttaccaaacagaagacaatcaaattttggcctttgaacttggagaaatcggtcatcaaattccatttttgtttaagagaggaaaaaaataaaaacccttctagaaccaaaagaaaacggtgtgagcaaatgactatgcaataggc

SEQ ID NO: 217653 - DNA, 515 bp, Cannabis indica
tagtcacgcgtgcaacacattgcttgaacgcaattttcagtgtgttaaacttttccgaatttcttaaaattttacagaatgtcttaaataaccataatttacatgaccatgaaaaaaaaaattgactaaaaaattatttcggatactaaaacagatagagatgtatcgatatacttcttttaagggggtacattatagaatttccctaaggtttttacccttcgtactgaaattgtcaatttttttactttttttttaattgtgggacattttttttttcaaaaatactgtgtaaattttatactgcgtactgtgttaagttatgacagttattccacggttgtttttaattattccattaatgttttaattgttctatttattgttttacggttattttataaaaagacagtattttttgtaaaaaaaattgtgtaacagtaaaattataaacttttgcctaacatttaatattttttgtaaaaaaccccgttagaatatttataagtaatttt

SEQ ID NO: 217654 - DNA, 622 bp, Cannabis indica
ttagtcataataaaacttgtgattaaaagtaaaaaaaaaattgtaactaattataaattattattcctatgttgtaactaaaaagtctgtagctaaatgtattagtcacaaaaattacaaattgtaaattttgtgactaaatataattttagtcaaaatatttgttgtgactaaactaaattagtgacaatatatatttaaatattatattttaatcacaaataattttttgttgtgactaaaaattaaatttaattacaaaaaaaattatattgtaacaaaaaaagattgctttttaaagaaccaaagcctttacttataccttattaattaattagaacctttcaccctaattgaaatgcaaagggtcatttatgtaactatagcttgactaataagagatactaaccgtcaaactaagagcactgttattaggtattggtgatacctagtactttatagacgtgtcatcttacgattggctaacgattccttaaaaattattattacatatctatatataggatccaatacaactaatagcgattaaagagtgctagacactactgatattttttagtagatttttaaaaactaactgtgattattagtaagtaattaa

SEQ ID NO: 217655 - DNA, 616 bp, Cannabis indica
attaagattttttttactaagattttcccataaatattatttttttcactaatcatgatttgtatggctctcaagtatattaattgttttcctaaaaaaaaagcatattgatttttagatttaagaattttgtctaattattatttatgtaaattatgtttctatattttgatatttactaaattatgttactggaactttgaaatgtataaaatcatgctctgaatttttatctatcttagatttttcttactaaaatttcacaaagtccttaaattcaacaatcttaatagttcagggaaatttttaatgaccttaaaaattcatgaacatgatttggtacatatcaaaattaaaagtaaaaatataaattagcttaaatactaaggtgtgtttggtattatttgttgttgtacggggaatacaattctcgtctccatctctgctacatatttatgcccccatcctcatcctcatcttatttctctctaataaccaacgaattcatgatagggaaatatctatcggttatggagaacccaacgggtattcattaaggcaaaatgaaaaaaaaatatataataatttaaaataattgaaaaaaaaaattaaattt

SEQ ID NO: 217656 - DNA, 644 bp, Cannabis indica
gatgggtttcaatccaatggagtggccaaaatcctcaatggccacaatgtcatcttgatcggtgaccaagaaatcacggtcaactgcgtcaacctgctcattatttttatcaacagtttcattagcaaattggtcggccttctttgccccagctaccttagcttcttcctcggccttcatttcctcgcacttctgcaacaaggactcacagtcgttcttctccatataattaaaatttgcttcaagattggccttctagaactcataaaagagatttgcgccgatctctaagtacatcccatggtcattagcatggcccttgatttcctcgtccaaggctttctccttggcagctacaagctctttttctttggccgcctctgaagacaggccttcaactttttgctctagattttgaatgagtatctgcagagtgaccagctcattagcccgcctagtctcgtcctccaagtcagcctcaatttggctatcttaggggcattaaaaagttgttattctaagtctttaatcttcttaaaagacatgaatagcttcttgttgacctctcccaaggtagtttcctgtcattaatttggccttgaagtttttccacttttgtcttatccaaagaggatttagacggc

SEQ ID NO: 217657 - DNA, 533 bp, Cannabis indica
gcattacaattttagtatcagaggccccaagttgtttacctaagactatcaagatatgtacaatcatcatgagagataagctcgactcactgttcagtaatttgttaatttgaaaaacataatgggaagcatgttagatgttttaatgtgttgcctaaaatccgtaaatgcggtatttagaatataatcgattgatgtctgacctacctgacttatgggttcgcaggcttagtcctataacatggatgcccatcgaaacacgagaagtcgtgatagtatggttgagagtaatggtattcggggagatcagaatcctttgaatccttgtggatgcggtagaggccatggaaggtttcgaggaggtggtcatgaaaatctaccacaagctcctcaggattgggagctaaaggtttataaaagtgcaagcccaaataactagtaagatgaggaaatcagaggctgagacaacaggatccttctgtagtgcctccacagcaagtgccagtctaccttggttccagcagtgctagcag

SEQ ID NO: 217658 - DNA, 621 bp, Cannabis indica
tcgtataagttatagttatttaggaccgctgcacatttttagaaaatttcaagtagtttacaatgcagaaaataaaatttacatattttattacacgtgcgactgttttttcttatacatatgacaagtaattgtttatacattatttcgaaaactgtaaactattcggaattttacaaaaatttccaagtggtgttaaataataaaaaaaactaggctaaaagtttttttagatgccgaaacaataaaaaatctactaaaacgaccttttatgagggtctactagagaaatttccaaagtaatttgtacataaactaatttaaaaattcaagtaactagaatatgagattattatgagagacaaagttaataagatgaagttattattatttgtgatgtaaaaaataaagtaattttgctaacaaattagtattacatatatgtcatggcagggcctaaatggggtcgttattatgttggccctattcaatttatggtttgctatggtgctgttgttggctgtctctctggaggtcatgcatgaaggtacctaagtaaaaagtctttggccccaatttgaaactcgcatctcgattcacgtgactgcacagacttggtcg

SEQ ID NO: 217659 - DNA, 506 bp, Cannabis indica
actacatagggaaaactttatgctagtggaaagccacattctgatactgtcacgccctataacaaaggcatgcagcgatgaacaagaattcttgtctatgctctatatcagtgtttacctcaaagaaaagaggttggcatatttatactcctaacgtttttgttttttttttttttgttttgaaatttattcttgcataaattattcaattaaaattgctaaaaatttaatttaattgttcgcaatattataaatatgtttgtaaaagtattttagtattttttataaaataaaacaataataataaaaaaaaatagtagtttctatatgtaaaaattatatatttattcatttagaatcaaaattatacaaaatcaaaataattgaatatatttatataagatattagatatttactttcttttaatttgtagtaaatgttcggcccatctaaaataattttctaacttcgtccacagagtattataccaactcaatatgatatc

SEQ ID NO: 217660 - DNA, 626 bp, Cannabis indica
  modified_base (493)..(493): a, c, t, g, unknown or other
atgaatgcataagcttcttaaagtgtgttgtagaagatgagtcactgctaattggctaagttgttctccttgatccatactataaattattattaataataataataataattaatatgattattagttaattaatatttgatgagtttagagaaagagaaaaggaaaaaaaataacatatatccttcttattatcacatgatatcttcacatcattcttatatatatagatacatatacaaaccttattatacatatgggcttattaagctaggtaggttgaaactatagctaggcctaccaacatggaaaacactacaatttcaattaatttaatatatttttcttttttttttttcttctctctctctcaaattaatattgtgcaatagttaattaaaaaaaaaattagtagcaatagtgatgagataaataagctaaataataataataataataattattctttttagttattttttttctatgaccngacatgattttttttccttctatttctttattttaggtcccctacacacacactctagctatttaggtttgttttgcctagtatttttactttctcttttttaactttatcggtaaagtttttagtagattta

SEQ ID NO: 217661 - DNA, 710 bp, Cannabis indica
aaaaagggtatagagtgtaattatttaacgatgatcgatgattatttcacaaatatataaaaataacaaaaaaaattacagaaatacggttgttaatttttgtgatgttacttgttgttaattttttatattatttttgtggttgttgttgttttgaagttatttttatgttacttctatgtaattttttgtattttgtgttattttataaaacaccgtaaaaatataaaaaaaaaatttaaacattaaaaacgtaaattttttacaaaaaaataatgttttatataattatccccaagttagaattttatgggtttttttttaagttttttacttaaatatatgacagatttaattttgcctatttttatgacatttgtgtttttttgaaagataacacaaagatagaaacagagagaaacaaaacctcataactatgcttagaaaacaggtttgattggtttgtgattcaaatattgtgttttttaaaaatatgttttggaaacaaaaatttaaattttgtaagtgaaaatttgtttttaaatatgtgattggttgtagtgtgatttaatatttttgagttttaaaaaattgaatatgtgattggttgggaatctcaaaataaaaaagtaagagaataattggagagtttttggattcaatgatttgaaaacacaaaaaatataaaaattgtgttttcattttttagc

SEQ ID NO: 217662 - DNA, 582 bp, Cannabis indica
cagaataaataaaaaataatacgattcaatatttgtaatatgttatttatcaaattaattagaaataaaatgatagtgtttattttgtttactttattatgaaacataatcagaatcgtttaaattgattaaattacccttttaagttaaactataatatatggtggttattttgtaagacatattttaaataataaaattatcattatattaaaagaatagaatataaataaataaaattaattacctttaatagcattttttaaaaaattagtagagggaagtctttttttttttttttctccctcatttaattaagttttattatccttaaatttaataaataaatataaagaaatgattctatttttattgattttcattatttattagtaaacatgtcattagaaatttaaatttgttcataatcaaatttgaattgagagtaacattatgtacttttcaactcaacaattaaaattatttattttttttttctcctctcacaaaaatcttcactatattaatagtatgtttactacacaatattcagaatcaaaataaagtaataaaaaaatgtaa

SEQ ID NO: 217663 - DNA, 765 bp, Cannabis indica
gtgggccctaggcacagacctaggccgcctatgcccaagacgaggcctgagtcttacataactttatgaaaatagtctttaaaaaagaatattactaattaattataaaacaacacgtataaaaaatgatagatattattggtatctaataactctacaattaattatcaaattttatataatataaaaataattttaaaaaatattactaactaattataaaatttttattgtataaaaagtgattaggtgccccataacactctccctaaaatgatattaagaaagtgtaaattaagaagaaagatagtgcaacacgtcagaatattttgactatttgagattataatttgtgagtgggatgggatttgaccaccaatactctctactctactgcctcactttgccacttgctgccttttacagataactacctataaacccacgtggaatttcaataattttatctcatcttcccattttaaaaatcttttatttttttatttttattattaatattttttaaggttaaatagtaaaattttaaattggtaagaagcataaatttaatacttatttttaaattgtaatttttttttaattttattagtacagattctatttttaatttattaaaaaaatatttagtaataattgataccatataataattagaaagattataattttataaatatttaatatttataccgttaaaattaaactttaagtactgctaaatacccattctttattttaattgaa

SEQ ID NO: 217664 - DNA, 726 bp, Cannabis indica
atccgggcctggtgctttagttcaaggaatgtcaaacacaaccttttttatctcttcatctgtgataggttgcagcaaactatctctttgttgactgaaaactgttggcccatttcttagcacacctgctatgactctctttctatttggcatgcttgtgccaagtagttgtttataataatctgaaaaaatctcagttattctgcctggatcatcaactctgttcccttgagaatctagtatagagaggattctatttttgttgtttctggctttgatgcttgcatgaaaattttttgtgttgtcatctccttctttgacccaattgattttagctttctggtggagaaatgattggtatttcttgtgagcttgaatgaaattatttctggcttcagcttcttcagtttgtacattctggtttagtggctctgaagtgagtttattttgacaagtagcaaggatctcctgtgttttaattactgttgcatgcagatctgtctacccctctcgattgattctcttgaaggcaggtttagagctttaagttagcaacaacttggtacatttgagtgccatggtatggctgcttccatatattgctcacctggtttgcatatctggatgagaattccacatcctgaaatatctaaaaggcttgttccccatctgtgtcacttaatgaaaggtgaggagggctggtgaatgatcaaacatcccccattc

SEQ ID NO: 217665 - DNA, 520 bp, Cannabis indica
actcaaactcactcaaactaacacacatatgcaaaaagcttacaaaatcaacttaaaataatctaaaaccaagctctcaaacagtttctaaacaccttaacacacagtagaaccaaaactctaaaattataactcaaaaccaaacttaactcaagaaattcaaaaagatgaagaatctagggttaccttcaattctacaaagacaaagccttggaaatccttgctgaattcttcaagaatttggtctgaatattggaaaagggatggggtttcttgggtgctcacaatcgagagagagagaaagagctaaggataaactttagtttttttttagtttctaattacaattaacaatacctattttgttttattccccatattaaatcagcctaaaaaaaccgtagaataacctagaaatttccattaaaccatcataataataacaaaaggaaaaatgaccattttaccctttcttaaccaaagaaataacctttaaagcctagggataaaatggtcaaaa

SEQ ID NO: 217666 - DNA, 1207 bp, Cannabis indica
taataatagcccacaaatttttcaggatataaattgtgggtttggtataatttaatttagtaattatttataaggggtcactttttaaagtgatgttaaatatatatttagttttatatatacaagtgtagtagtagtactatagcaccctatacattaaaaaaaaaaggaaaagaaaaaagaagaagaagaagaagagatttttaattaaaagagaaagttttgtggttgaagaatctctatcagagagagagagaagaatttgtagaagcagggcacatgggagcaggaggccatgtgggagaagattcagacccactttttttgttttaatttaatttaatttaatttttatatatttgagcaacaaggaatataacatggatccaccccctattttgtaggggtaccctcttttatgagctctaatcttgtaataaagcatgtgaaggagctttgttgtagggcagcctaaaagagtcagaaccaaatttagtaggaccctccaatcctcatcatctatttccacccacacacacatataaattgttatgagaattgggtctctcagttcccttggatacacttgctctacaaaagtgaaagcaactaatgatttctccatcaatacataaatgacaacacatataccatccttccaaatactttccttttcaatacccctctctctctctctcctcatagtataagagaaagagagagaaagctcactttagggtaaggagagggatcagaggaaggaaggatgatgccctagttgggagaaaaaaattgttcttttttagactgtttgtcagtacatgatccttcccaaccataatgttttttacccaccaactagttaaaattcctacgttaaaagttatcttaatttttctcaagtaataatcttatatatactacgtagtacatgtacacacaaacacataataattttagttctttttcgatttctaataatgaccaataattagattcctttattttcaatttctactatatgtaatatatatatccccggtgttgaaaaacattttgaaggaatttgactttaattaacaatttttttttatgttcataaagtaatgatgattagtgtgacttagttataataaaaagaaatgtcaagtaattaaaaaaagaagttattagtaattaaaagcaattaattaaatattgtataatt

SEQ ID NO: 217667 - DNA, 1021 bp, Cannabis indica
ccgtgagacgagctgatcgctgacgattattgtacatgtcgcgacgatctttagaagacaacctggcagctctgataccaaattgtaacaccctactagcttaggcatgttaacgtgatttttaacttaactatgcagctcattgccaatcaacgagtttattaaaaatcgtgaataattaaacctttatttaactaattataaataccaagataacatacttgtattaaaccgggatctcgtttacaaaagtatttacaaaagttttacagtgcataacacaaaagtttatcgcctagcgactaagcaaaataagcccttctgtcccaaagaccgtacgctccaggcctaaccgccccgacatgtacaatctccatctgctcactctcacggctgctcaaccttagccttgcccttacctacgcatgcaaataatatttatgagtcgacagactcagtaagaaaagcataatcataaacataaacatataactagactgcaaccaagtgcccatacacgtgattacaatctactaactgagtcaggaacattcccgacaaagtatgactaactgcgaatccctcctatacttagtactctaatcgtactgatgtggtagcagataactcatactatctgatagcctagcatatatctgttggcatctcagtgcaactctacgtagacctcactgatgccttgatatgctaatttgatggctatagatttgcctattctgacggcaactaacatgtacgctgaacatgtatacatatatgcaactattatactaatcttacctcgtatccaaattcaggtgtgtcgaccaacctgagtggaatagctgctcgacgtattacaggctcctaaatcacattattcgtaaaattggtgagtgacacactaaattacttttcggggacttaaacttgaaactaaaagtttcccaatcgatgaataacatggcaatactctaaatattgaaaaaatgggaaaaactagggttaccaaaaatgcccc

SEQ ID NO: 217668 - DNA, 683 bp, Cannabis indica
tataaaaaaaattatattttattacattttacgatattttataagaaacgacaaaaaaaataacaaagaaaagacatagtagaaaaaaatacaaaaataacatacaaaacaacataaaaatttatttataaagaacaaaaaattaacaataaaataattagagtataacacaaaaaaaaccataaaaatatagaaaagtctatagtacttttgttaattttttttttttgttgtttttgattttttttttttttttttttgaaatttataaataagaagaaaatagaattggtcattggggcttatttttgggtctattaagtcgcaattgctcactgattaatgcaaaacaagcttcactcactgtaatgagtcagagtcacacctgatcccaccttcactcccaataaagccaatatataaatataaggtcaatgcagtggtcaacttttttttatcaaacgatcaccaccgttgaatttatgttttgacgagtcaaagaatctaccatgtggacgctcgcaccgtatctttttctctcttccctataatttgttgtagcgccaaattttcgcggcgccttctcaaaattcgaattttcacggaaaagcatagaaagttgaaaagaaaattttaaaactaaaactaaaaacaacttcattatccctctctttttcagatct

SEQ ID NO: 217669 - DNA, 664 bp, Cannabis indica
cagcgcctactgctgcaacatcttgcagatcttcttcaagagataaggttacatggcatcctccaccgagttctggaataaaaatcaatgttgatgctgctgttaattcagtatccaaacagttgggggttggagccattgttcgtaatcataatggtcaagttcttgctgctctttccatgccaatataaggttgcttccggtcggatgaaatggaagccaaggcattattccatagcttgaactgggtgttgcagcaccaaataagcatcacccacattgaaactgatgcactcagagtcttccaggctttaacatctacatcaaaggatttatctagttttttagatttaatctctgatgttcgttgtcttttatcctttttccctgaagctatttatctctcatgttaagagaaatgctaaccatgttgctcatggttcagcgaaacatgctttagagttggatcaagacgtttccctatcctattttcactactgttgttaacgattgttgattaataatattagtgaattttctcaaaaaaaaaaaaaagttaaaagcaaaaaactaataataataaaaaagataattacataaatcactgttttttgtaatttttgtatatttttatgttttaaagattttttttttagattttcac

SEQ ID NO: 217670 - DNA, 765 bp, Cannabis indica
ttgaactattggttaaaaatcagatcattggatctgtcaacaagttaaccatagcaatttagataaaaaataaataagttttataaaataagttttataaaataagttttaataataaacattatatgtaaaatacacacatgcaacaaactcgatagatggatatagaatttatttaatttaaattaattaagtaataaaatttattttcgtaaaataaataaataaataaataattatttcgaaaataattaaataaaattaataattaaattttaaatttgaaaaattaggtttttaacaaacctaaatatctattcaaaaatgccaactaacttttcaaaatttatgctattttaaacaaaattaaatatctaatgaaataaaatgataaataaataccattttatctgattttataatttaatttaaataaaataacaaaaaattttaaagtcaacaaaatatctagatagatttttaaaattttctagattattaaaatatatcttatttaaaatatcaaataaggtcatttcataaaattaaattaaataatgaaaaatataaaatatctaaccttatatttaaaaatacgataaaataatcaaaaaaaattttaaaaaaataaccaattaagcaaaaaattagattttatatttttttaggttcaaaatctactaatatctaaaattaattaaaaaataattaattttattatgataattagattttagatttggaaaaataaaaatctaaataaaa

SEQ ID NO: 217671 - DNA, 554 bp, Cannabis indica
aataggtagcaggaaagggtgattttgggtttgccagtgaacaagtagtagagtccctcaaatgggatggttgatgcaaaatccattaggaaccatgttgacaaatacctaacaaaacaatcaacaatattattacacccattatttatttattccatttgcatcactcctctaacttctaaaggtatattcttactgtacattaattcttttcggttttaaattttcatctgtatacatcacttaccactcaaaataattaaataaacaaatgattaccttatgtctaaaaatgataaatgctaactaaaatttaaaaataatctgctaaatcagagtgcataatataataaacataatttgtacatgtatcattactcaaggatacataatactatttatttagaaggatcagaacagactctacagtactttcctgtaagattttgcaaaataaattgatttcatgtaacaaaattattattattgttatttttttgacaaatatatatactcaagaaaaatatatactagcatgttctgtttgttcttcg

SEQ ID NO: 217672 - DNA, 764 bp, Cannabis indica
cattaaaaaaaaaactaaaccaattcacaacttataattcatgtttattctaaattttaagtaattatctcttttatttactatacttttttatttttcaaagttttctttttataaatttcaatcaaactcacaatcctattacagaaactctattttatagagttatagcttagtggttatcaaactctattataacacgtaaataattttagtacataaagattgtttacaaatgtcaatatatagaaaagatattaagtacttaagcttagtttaaaccgttgtcaagaattctaaaaacgtgattgaaatcaaaccattggcaccgaatttgtttggtttgttctagattggttgaaatttggaattttcaaattgtatgaacaactctatttacagtggtatttttttttttattaaatgtataaatatatctaatttctaaccaagaagtgaccttggtgttgatggtgagaactggtcaactaacttgtggccggaaaactacttatacttcaagttcaaaaatgagatgaagaagaaaatgaaatataaactcaaaattgctatcttaaaatggagagaataataaaaaaaatttatattgttctcaatatggttttacaagtatgattttctaaaccttctcttacatatgagaatgagtatttataggctctaatggcgtggaatcaaagtggtcccaaggggacaaaacatcgctttcatgatgcataccgtcaggtgctagaggtagccct

SEQ ID NO: 217673 - DNA, 560 bp, Cannabis indica
tttttttaaaaaaaaatagatttcatttaataagagcaatcaaccataacaatagacattagagtagcaggagcatcaacctcagtaaaaacatgatccgacaaaaaataagattctcttcccatacaatgagcagccctatctacagatcatttaagaaaagacaataaaatagtatttagagatgagagcaataaacgacaatcattgaccaacaaaccaaattgaaaggcatttggacataactattaaccgcttgaaccataataagtgaatccgttcaagagccacaacaatccatcctttatgttttatccaaagtaaagtctatttgactccaattacttcagtaacatcagaatgaaccaagcccgccttcctaattgaaacaacctcaattagattccaatcacacaacatacaccaaaacacttttcatgctaaaaaaatggctccattaacatttatcttaaccttatgtatcacaggtttcctccaatgcttatcaccactaccaaaaactacattcagtaaaggaactgatttgtgtgcttgggcat

SEQ ID NO: 217674 - DNA, 592 bp, Cannabis indica
atccttatggtaaaaagaatttgagttgaaaattaaggtgctgtgttaccattaatgagtttgtatgaatttttaaacttggtctttgcagctctctactttgcagctgtggctacagtttctgctctagccaaagaaataaaggcaaatcaaatattactttaataaatacccaaatttatttgaataaccaattataatagcacaaatattcgtatgatcataccttcacacacaatctaaataagaaaaaataaaaaaaacttaaactttacctaaaactaatatttacgtgcctcggcacgtaactcctacctagtatatatatatatatgcatccatatgtttttagtttggtgtgttacttttttggttttttgtttgtttgtttgttttttttttttttttgaaagaataataggttagtttttggttaaaaaatacctacttttaagatttaattgaattcaaaattatagaactatattgtaaaactcagaggacaaaactcgttttttttttagaaaaagaaagaccccaaagaaaccatttttcaagcaagaagtttatacaaaaagaaatgggacactaa

SEQ ID NO: 217675 - DNA, 505 bp, Cannabis indica
tgaagggacgaaggataaatctgaagaggatgtcaatgatgtactgagtatcccttcacttaatctatcaaaagacaatgttgttgttccaattgagaaggttgtttctgatgagtcgtttgaagatatgaacttctggggagaagaactcccaactattgtaaaagaggaagttgagcagaccgtcaaggatgattttgatgatgctaccttcgaaagattcaaagaatctagaggaaaggtgattaggccgttcactgtgaacaagggttactcaaatcaacagtacgagttcttccgttacattttctctagcgccaatgatccgaggtaatctcatgtttgatgattattgtgtacgtagttgatattagtacatttatttcgttgttgattatttgttttgtatttcagtgaagtgttagcccattttgggaaggttgaggtcaagcggaggaatttcaaatgcatgaaaccggagtctgatatatcaaatagtgtacgt

SEQ ID NO: 217676 - DNA, 630 bp, Cannabis indica
aacatatctaaagcaataaaacaacccagaatgcacagaattgaaaaacaccatgtgagctccaagctttgagttcaaactcaaacttggctaaagctcactaacaagcctcaaaaccagcttagaacttcataaacaagcataataacactgcagaaaactaaccctaattcatgcaaacactacagccacaaatttcgaaaattctctttgaaaaccaaactttgagctaaaactttcaatctagaaatcaaagcaattaacatgcattacactagctctaatctacttaaaacaacaagattaaacctctgtaaatcaccacaaaccacagcagcaagaacaacaaaaacaagcatgcaacaacatttcattttcatcaaaatttcaagaaaacttaaaggagagctagagagaacataccaacaacaagagatcacaaaatttgactaaagagagcttgaatcaccaagggaaaaggctggtttcttgctgctcaaagaggccgaaagggagagagagactagagagaaaaatggttttcctttgaaatttttctaactttctaatttttggtaaaatgaaataaaaagcaactaatcacatgacaacttcatttcagccaataat

SEQ ID NO: 217677 - DNA, 1343 bp, Cannabis indica
aagcttttgttcatgatattttgttttgatttttagatgcatgctggtatagcagaagtagctgctgctaaggctcggatgtttgtaaacaagcctgatggaagtatgtagtttcatgtccaagctgcataatttcttaaaacaaattttgtagtatgaaaaaaatgaaatacaagtaacatagtaatttgaatgtcattttagatttaaatttagggttggatgcacaaaatagatccctgaattatgctgttttgtttagtgtcttccttgcaccatctcatccatttcacaatttaacctgtgttcaagctttctcaaacttgtattgtgaaacttgcattttataaattaccataactaaaggttcttcgggatagacttagcttgcattttgttattcatgtttctgtattcctctgccttacagtggttagggaagagagaggtccatacagtgatccccaacatccttatttttatgaggacgaagatgtgtggatggcaccaggctttataaaccaattctatgaagtaagttctgtttcggtaaatgcacacagttagctttatagtgcaggaactcgtgaacatattcgtatgtatattgggaattaggagtctgctgagttattaatgtatatattctgttgacaggtccctgattattggaaaacatatgtgcatgaagtggataaggaaagagaaatgtggttaaactccttttataaagctccattgagattgcctatgcctgctgagcttgagtactggtgggcacaaggtatatgataccatccatcctattcctatcctatatttgcattttttttttttcgttctctgtcatccaaaaacaaaagtgggtgaagattaagttaattggttttccttctcaaacacaaaatcatatcattttgctcacaaacacagtatctcgtacttatattgctcaatcatattcatctctttagctcttgctgcatattttcttgtttatacacaaggagaggacaattgacacattttgaatttttgaaaattaataaatttatctctataaatgacatattttgattttctttatttattaacactttttctttcttttgaacaaaaattgtttgctcaagcatttcatacactttaaatgacaaatcttactgtcatttaatcttctgcttcagatttgtccggttactgaagtaaaaaaatggctgtttttctaattcatgtggcatttctgtgatcagatgatactccccgaattcgtagtggttaaccccaaccccaaggatcagagtctaatcctgaagatccatccgatcttgggagaactgaag

SEQ ID NO: 217678 - DNA, 891 bp, Cannabis indica
atacatatgatatatattttaaatgaaaaattatacatacattatttgttgctctttttaaaatgtaacaggaggatgatgttatagttgaattggtgaaacaatatgggccaaagaagtggtctaccattgctaatcatttacctggacgtattggtaagcaatgtcgggaaaggtatgatcttctcttttttaatattgttgtatatttatagtttctttttggtgaagactgaatgtttaattttttcataattatttgttatgtgttatgtttcttgagcattactgcatgtaaggaagtgcatttatattttcatttaactatattgtattacctacctacaatgtatgtgtccaagttattatgtagtatctgcaagatttctgtatatatttgtagctcaatttacctcggtgactaaggccttacctctggtctatattacctttaaaataataaaaaaagtgtgttctagagtgccccttccactcatacattggtgaaactaattttaggtggcacaatcatcttaatcctgctataaataaagaggcatggacacaagaagaggagttggctttaattcgtgctcatcaggtatatggaaacaaatgggcagagctaacgaagttccttccagggaggtatgtccattggttactcgatacacagaagatatttttcttatttatgccaaagctttacttttttacttattttgctttactttaaacttcagttcttaatttcattaaccgttgttttaaatccactatttactattgcgagtctgaatatatatatatatatctgtttttatatgtttacaggacagacaattctataaaaaatcattggaacagttctgtaaaaaagaaactggattc

SEQ ID NO: 217679 - DNA, 623 bp, Cannabis indica
gttaatctcgtttcgaaaattgtatgcttaattaggtgatataatgattcaagattttttattcatttggtatactcggatgtcatcatttctgattctttcacaacttcaacttcaatatattgcagtgctcttaaatatttttatacatattctacacatacaaagaggtaataaagaaaaagcttaacacatacattactttgtgtatattaataacatcataaacaagtatacattcactcccgtaagtaaaataaaagcaaaaaggagatacataataattccgcgacctctacaagattataagttctactaaaacaaacaaagagagggaaggacaaacaagtccttaattagtcctatataacaacacatgtatgtatatataatgatcagatcacaccttgtaaacaaccttgtggtgcaattgaggattaagttggtaatgagtaacatatcctttcacttcagccacttcagtaggagcaattacggttttcacataaggccctttgtaattagctacgcaaggttgctggtgatgatgaacagtactagctttcatattataataatgtgaccctctgtaatgatcatcatcatgatctgggtaccgtttt

SEQ ID NO: 217680 - DNA, 671 bp, Cannabis indica
tcttcgcagtcaaattgcttcccgttgtctgaggctattgcaagctatatcgacacactatgtttttgataacaaagtctagtgctttcttagcagttatagtcttcattggctcggcctatgtccgttttgtgaagtattctattgctactatggcatactttacccctccctttcctattggtagcgacccaataagatctatcccccacaccgcgaagggccacgggctagtcatcagggtgatctcgctgggcgaggctcttggtatgttcgcaaatctttggcacgaatcacatttcaagacataatctatacaatcttttttcattattggccagaagtatccttgtctcaatattttttttgagagactcgggcctcctgtatgatctccgcagaacccctcatggacctctagcataatttgcttagcttcagggtccaatacacaccttaggtacgacataccgagtcctcttcggtagagaatattatccatcatcacatatcggtgcacttggtactatatccttctggatagcgccctttcttgaggcaactcgcctttggttacgtacttgatgatggggggtcatccagtttgtctctagctcaactgcagccacaatatctttaactttaattcttggttccatgaggcgttcaac

SEQ ID NO: 217681 - DNA, 768 bp, Cannabis indica
acaacatgaaaaatttgggaacctagctgctgatctagttaaccggttttataaggcctgtaaaactgattaaccggtttacaccaggtaacccaaaaaaattcaaaacctaaaccaattcgaatctaaaccataccaaaccttctagacctgcttaatataccccaaagaacataatccaagcaacagaacaagctaacatgctcaaaattaaaatccaccattaaagagccaagcttgagttcttaaactcaaagcttgctcaaacaccacaacaacccttaaatctacctcaattcaacataaataacctcgaattaacttcagaaacaagaacaaacactaacaacaactacaacacctaatctcaaagaaaaaccataagatacctaacttgaactttaagaaatcaataagaggtgagctagaacattaccttgagcttgaaatcataaagaacttgctgaaaatccttcgtgtatgcagaaaatgaccgaaccctagctaggttctattgaatttgagagacagaaagagagaaatggagagcgagtgttttcctattttttaattttttaataaattgaaaataaactggtttaatctagtaatatcagcaaaaattagattaataattcaaataaaatctcagtaaaggacgaaaaatcccaaaaggcaaaaacgaccataatgcccttgcctacaccaaaacgtcataaatcacttaggatattagtcaattctaaatactcgactaatcttgacatt

SEQ ID NO: 217682 - DNA, 756 bp, Cannabis indica
aaaaaaaaaaaaaaaaatcttatcttgtaaaaagtttactctaatagtgtggcaaaagtttatctacatttgtcacattacaaaaagtaatctaaatttaaatcacaatttgcttcacaataaatacactacagttatattacttatcactacacaaaaacaactacctttagtgacaactatttagtcacaacataaaattttttgtgatcaaatgtgacttttagtcacaacaaaaagttacttgtgactacaaagctagttgtcactaatttagttttagtcacaatactcattgtaactaaaaatacatttagtcacaacatattgtaatttttgtgactaatatttttagccacagacattttaatcacaacatatgaataatgatttataattagtcgcaactatattacttttagtcacaagttttactgtaactaaaaataaaattttctgtaaggtatatattatttttaatatttcattcttaaacttagttcttgaactttgcattgaattatacattttacatttatttttcattgttttattttttttaaaaaataataataaaaaggtaaacagtagtataagtactcaaaattttgagtttataagtgacataaatctaataatttttttagcggcataaacatccaatgtttgtaaattgcaattttttttctagttttatcagtacaaactctgttttgaatttagtaaatgatgatatttaaaagtaactgatactac

SEQ ID NO: 217683 - DNA, 674 bp, Cannabis indica
ttaagctagcctcaagtggttcatgaaaagattagttaatttcattcgattgctcgtataaatgatatgctttacttttaatttaatattaagatatagatctcatactttacacgtaggtatatatttatcaaaaagtagaataaatttatgtacagttaaataatacactaccatgcaatatatatcttatttgtattcacagatgtcacaatttagtaaatcactagtatatattataagcagtatttcattagttgatgatactttaattataaacttgactttattgacataaattgctcaattacatatatctaataaatatcgacaaagtatttatatttaaactaggtgagttttcacgtgcaattgcacctgttaaactcttcatttgatttttttattttatttttactgtataattaattgtaataaaatataaaatgtgaaattcagatttaatattttaaaataaagcaaaaagtgtaaatatatattataatattatacaataataattacaaactagttaattaatgctaaagcgttttaattaggggttttttttaatattatacctaaaattaattttatttataaaaatacttttaagaaaattatttagcacaaatatcgttgtgccacgtcagcatacataccgaaattcaaaa

SEQ ID NO: 217684 - DNA, 1080 bp, Cannabis indica
aaaaaaagataaaaatattacaaatgtaagttcttttaagttatgtttgaaagatgaatttttgtgatgaaaaaaaagtaagaaaaatgtagaaaagaatatggagaaattaaaaaaaaaaatcaaatttttgtgttaggaaaattttgttgattaagaatttttccgtacaatttttcatttcatactatctatgagaattttaatttttttttttcttatttttcttttttctatcaaaatctaacttccaaaaatagagttaatattcttacaaatttaaagtttttttttaacaaaaatatggacttattttttactttgttttcgcaacaacatcatattcatactatattatttttatatttgtactatattatttacacgttgttttcatgttgtttgtatgatgtttcgtaaaaatatagttaaaatataaatttgtaaaaaagaaatcataattagtaaaaataaaaaatgaaaaatagataaaaataatataattttaagtaatttgtataaaaatatcaataataattaattctatgtgctccattaagctatttatggaaagtattttctattctactagtctatatgtttaataaataaaaattaatatcacatatgcatttatatgcaatcttttatacaaattatgaacttctgctcattaaaatttcttttatatatatttttcccgtgaaaatactttatattgtagcatttaattaaatcattaaatttgtttttgagtaaaatacgaaagattgctaaaacttgcatttttattatccaaattgcttttttatagttcatattagattttatttatttttattaaatcctattttgtttactttaattgtcgatttttgatatgaaccctaataaccaacaaatgatatcggagccatatactagtatccatgttttattctttcaataatgatctcatctcttcattcatggcctacaaccgtttcttgaaatcaattcttgttagtgcttttttataagattcgggttctgctttgtccagccagcaacgtatgttaaaaacatatgttattatctctt

SEQ ID NO: 217685 - DNA, 1368 bp, Cannabis indica
tagttatataaatatttatattattaattgtatagcacatttaaggaagttcaaaaacgggtaattcgttaggattatgcatgatacttcttgcttactaaacacacacgtagacattttttgaaattccaaccacgttaacactactactctactacttatagtctctctctctatatatatatatacatatattactatatatatatactactacaattatatcgtctaataataacttgtcaaataatctttagatcctaacacaaaatttagccttagatcttaatgtttcatgttattaattattacatatttatacatattaatgagttttataaataatgaccatttgcaatataataaaataatacattcaaatttttagtatatgaaaaattatcactcaatttaattatagaattattgtctcctaattgtgatgtaagtattgaattgtgtccttcaaactttctatgtggctgatttttttttaactattgagtaatttattaaatttaaagatttctatttacttttttttaaatataaacgctttgacgtgaattaaaatttaggaagcataattttatatatgttaaagtttgagagattctgtttggtatatatcaaaatttggagcacaatttgttacaaacatcgttacattagtaaaattaaatagaattaaggagaaatccttgaattacaacaatgtattttttgaaatttaacatgagccttttacttaatattttttaaatataatttttgtatttaaaaaaaaaaattatactacgtatatatataaggttatttttttgtaaacataaaaattgttctcgagttttcattgtaattaaatggaactattataatttatttttttccatattaaaatccaaaatccaaataacaattaaagtgtaaatatacaaattaaatttatggagtgatgacacttactaaaaaatctattatatctaaaaaaatatcaacccaatttaagtagctagattaataaagtataattttgcacatggtaaagcattatatgaaaaattagggactaaatattgatttgaacaacaaaatcgtatttaattaacatatactaattttgatattaaggaatatatagtggatatatacaatcttcattaatattaatcaaattacaaatctacaaattaattatatcaactactctttcacacacacaaaaagaacatacataatatatacgcatcaatattaattaattaaagttagcaaaattctattataaatataataaaataataagtagcaaaatatgtggagagtgtttagttaccaccttattatttgggttttaacaatatatat

SEQ ID NO: 217686 - DNA, 954 bp, Cannabis indica
agatttttgtgtttttaccaccgtttttttttcaggtcctttgggaaacattttgatcactaaaaataggtaacactggtttctaacttatacaactctattacaatggaaaagacaacaacaacaatatcatcatcatcaaatgtaaatactcaatattttccaatttttgctcttgttcaatttttcttgatgttaatccctgattgggaacaaattatatctgattttttgccaagattgaagtctctttttgagtcaaaatcttgtcttgtaaactccaaatctcgggttgaagaaaacttcaactccgagttggatcatgatgagcctaagctcctcactctcgccgaaaagggtgatgagaaattaaacagagaagatttggagacggtgatggagagtttgggacttgtttgcagccccgagagtgaggagcttaagaactctttcggctctgatgagctttcggggttgtttgaagatgaagagcctagtttggaggaaattaaacaagcttttgatgtgtttgatcataacaaagatggtttcattgatgccatggaattgaagagagtgctctgcatattgggattgaaggaaggttctgagattgataactgcaacaaaatgattaagtcttgtgatgcaaatagagatgggaaaatagatttcaatgagttcatcaagtttatggaaaatattttttgctagatgtttcctcattgaacataatatttaataaacttttaaatccatgagttggttaattatgaactacttaaattgacatccaatgactgtacttaacttttttttattcatcaatcagttttttttattagttgattgtattattattattattattattaatattaatgcaatttatttataaattattaaccactacagtactacacatatacttctttaaatgagatttcggtagac

SEQ ID NO: 217687 - DNA, 562 bp, Cannabis indica
ccagagactaataaagaaggtaatttaactttctttgctgtttcatagacttaagagaggttaatgttgatagacttgaaattgtgtttttatgagcattttcccctatttaacaagaatgcacttagcttcatattgctacaacctgcttttcgtaatttgttctcaggggcagaagatagcgacccacctactaaacaaggtggagaggggaacttggccgataagaagttgaacatgaattccactaacttgcaaattgatgctgatttgaactctataaaagacacagaaccatcaaatgttggttcttcttctagagtttctgcaacgtgattgctctgagcttgagactgtgaataccaagttgctcactgatactactgtgaactctatatcaacagagcactaaagctatggactttaagccagagactaataaagaaggtaatttatctttctttgctatttatagacttaagacaggttaatgttgatagacttgaaattgtgttttatgagcattttctcctatttaacaagaatgctctagcttcatatt

SEQ ID NO: 217688 - DNA, 680 bp, Cannabis indica
ggcccagatagttactcaagctacttttttcaggagaattgggatatgctaagggatgatctctttggagcagtctcctcattttttcagtcaggctagctacttaaagaattaattctactgttattacacttatccccaagattaagtgtccaaacacagaagtgacttcaaacctatagcatgctgcaatgtcatctataaagtagcaacaaagttgatatgctccagactcaaatgtatactgccagatcttattgctcagatccaaggggggtttgtctcaggtagattcattgcacacaatatcatgatatgtgaagacttaattagacattttgggaggaagacaaccaaaccaggatctgtgattaagcttgacattcagaaagcgtatgatactttagattgggactattggaagaaatattatatgcttttaagttcctacacaagtttatccagctagttatgacttgtgtgagaactcctagatattctctcatgttcattaatgggacaacgcatggcaactttgaagctagtagaggactaaggcaggtggaccccatgtcccctcttctgcttgttcttggaatggaatgtctgtcacggatcttgaagaaagtaggagataaggaggaattcaagttatttgagagatgtacagatctgaaact

SEQ ID NO: 217689 - DNA, 737 bp, Cannabis indica
gtgcagtgtatggtttctcctctttttgttattttctagatagttgtgtttgttagatagtttggttgactgaagtatgttctaatcttttggtttgataaccaatttcttctcattttcattttttttagcagataaaaaatttcttaaattctaaggtttcagaacttgttaaagatgttgatttttctaaaaaaattaaagtttaaattaaaaaaaacatcaggacaatagtatgctctatgtttttttatgaaaattggtttttatgtttttatgtttgtcgacttcttaatttatggtttttgataaaacttatttttatatattttgtaaggttgataaagttgaaaatgaaaatacatctaagcttagaagcaatattaatattgatattggtggtgatgataatactaatactggattatatatatagaataattttatggtagaacattgattttgttcttatcatatagagacattttttaaaccttcgatacatgtgacttttaagtgagtattagattaaatatttaacaactactgtttaaaaattctaaaacctctttttttttagtctaaataaaaaacttacatcattaagataaggagaaaaaagaagaaaataccaacaccaacttcatggctgcaacagaggtgcaactccccaaccagtgagaaaaattggatatattaaagaaagctgctcagcagcaatcatatgagcatctcct

SEQ ID NO: 217690 - DNA, 742 bp, Cannabis indica
aaagccaagataacaaatacaattatcaaacacacaagactctgccccaccccaccccacctttaatgtttaggctaataataaaagcaaataattcctttgagcaccagaactaacaggccattacccataacacttccctagaacaagaaaacatgcaaagatagaaagatggtcaagctagcaagcataccagtcctcgagaaagtaaagctgaaagaaggaatagcaaggcacccattcgactccggaatacaggaaccattgcttcaagcttttgaagtgcatttgcttgcaatgtataagtattaactctcaacactttccgcaagtctaaagctgattcaattgaaagatcctcaagcacttttgccatgttctgcataaaccatacactaatgagtaaaattatatagaccaacaactgtgcaacaagtcattcaaattcaatcacataagttgaaaatcaacagctcaagcaaaatgtaaaatgaatgccacacagatgcctgcctaaaatagtcttacctcatccgtcaaattgccttcagattcttcaatgttatgtccaacaatactcaaagttgcaataaccgcccttttattacttccacatacgaacaatatctcacacatacttctaatcagggctctgttcaaacaatttatcagtatctatttgacatgaatagaaaagaaacatgcaaataatatacattgttacacacacacacacacacac

SEQ ID NO: 217691 - DNA, 788 bp, Cannabis indica
aattacgtagcatcctctgatgtgctcccatcttcaacggcacaccaaatcgataaacttctaagggacttttggtggggcgactcaccaaacaagagaaaactccacccgattgcctgggagactctttgccgtcctaaagtgaatgggggactaggattcaagtcaagtgaagccattaacaaggctttcctaatgaagtgggcttggaaagttttaacagataaggaaagcctttggcaccagctcatggaggctaaatatctaaaaaaccgaaactttatggatgttgaaagtaccaatgctgactctgcgctatggaaagccatccttaaggttaaagactttttgaaaaaagggttatgccgcagaattggtgatgggaactcgacctccatttggtttgacccttgggtaccggggggagatctcaaaccaaacccaagattagatgcttcggctggattgagcatggttcacaacttcatcacccaagatggttggaatgaatcgcttatctgaacgtggtttcttgaatcggatgcaaaacggattttaaacatctcgctcccaactacaccaagggaagatacctggttatggcttcccgagagcaacggtaatttttctgtcaaatcagcatataaggtgatcaagaatgtggatgttagagccaatagtgacaacaagtggagggtcatttggggttcaaaaattcatgagagactcaaaatggtttggtggagaataatggccaattgccttctcaccaaggaaaagcttagtat

SEQ ID NO: 217692 - DNA, 704 bp, Cannabis indica
ctctccactacaaaacatgtccacaaaatcttcaatactacatttgtttgtgtgaccatggtctgaaagatcgtttacataataccaatacgatacgatgacatcaagagggtttcgactaatgtagacaatacgagacttagaagaagacttgatagaatcagaaagagatgcatatggcatatgtgtggagaccaaacgagggtttgacatagtactcaagtcatagaagttgggattggaataaatggaaaactctaaagaaggcacaagatcatgagggtttgtggagagcaaggggtgttgatcatagtgttggttgcggttaagaatggaaaatagaagagaaatgagccaagtggtgcctgatttgggaaatgaagccacgattatatcttcatcttcggctttgaattgtttttgaaaggagattgttgaagtaaaccccatattaaccacactgtaaaaccagacatttacaaagagtttacaagcagtaaaatactaggtggcctctggcctctatttacctagacaggtttataagttaattaataaagtttgtttaaaactttattattaactctttttcctgtattcctctacaacatatataaaaggcaaaattacaacagatcaagattttttatcatcacaacaacagatcagtacaccagaaaaaataaaaacaacaaaaaatcaag

SEQ ID NO: 217693 - DNA, 772 bp, Cannabis indica
cctgtggatcccctggcctttgctggactttgggtaagtccttaaaaaaatatggacttagcataacctatctctaatgatcagtcaatgaaatgactctcctgaccattttgatgaaggaatggtggtgacatctcttaacctgttgccttgtggaaggctggaaggaggccgcatagcgcaggcaatgtttggaagaagtaccgccacactgctttcttttgctacgtctcttttgctcggcattggtgggctgagtggaagtgttctctgcttggcttggggtctattcgcaaccttctttcgaggtggtgaagaactacctgccaaagacgaaatcacacccttggaagatgacaggtacgcttggggattggtccttggcctcatctgtttcctaactctttttcctaatggaggaggcacattctcaagctccttcttcagtggaccctttttcaggggtgatgtgtagataaatttgatttgtacagagtatatagataagccagtgttttcaatattcaagtgtataatagtttctgtattcttttcaaaaaaaaaaaaaaaaaaataatttaactatgagatacctcatctattgtttagttttcttttgcatgtctaatttgtaaagctgaaaatgaaaaagccagttaatcttaaaataggggaaaaaaaactaactgcttatgtatatatttgcaaattaaaagcacatatatatactaaatatattggtttgtatctaaggtaatttagttggagaaaa

SEQ ID NO: 217694 - DNA, 541 bp, Cannabis indica
gtataagacttgcaagaatatgaaacaatggtggaagctcataagatagaatagccttgactctcgcctaaacgggacaacgcggattcaaatcttgatcgaataaaaggttgctagaatgttgatcattttagatgagctgacaactctattcaatgaatggtagctttgactctcgcctaaacgggacactgatatcagtttgttgaaaaccttggaaattatttaggattgtatgttttagtattttcacttgtcattcctacttgctatgtgcttcataatttctgaattgtgtatgaatttgtattgaaccatgttattttctgttattaaattgtagtttaatttcgaatcttcattgttggtctaacttggtttgtttttctaatgagataaatccctaatggattttttaccattagactaacataatagttaagtagttagttaagtacttcgtaacggaaagtaaattaaatttagtttagttaattagtcgaaccaaactacttacgtacgtcgtttcgttactactaac

SEQ ID NO: 217695 - DNA, 670 bp, Cannabis indica
ccgtgagtaactatgatccacaacagttggatcttcgtaatcaattaaactagaaaaaacctgaccttcgttaacaactcaatcaaaagacaagaggatcctatccaattgcaaattaattgagttggaagacaaattacaagaggtatcaatatggggaagtatggacaaaatcctggatatgacccgagcctttccatctagacatcatgagtgttgaattccccaagggatttaagaaccctcacgagtcgtcatacgatgggactatagatcaaggcacgcacttgaataatgttaacactatcatgcaagcgagcaatgttacgaataatttacggtgtattatattccctacctcgctagttggggtagcgagcagctggttcaacaaatttacacatcattcaatcaccttttgggaacagctgtctaaagacattaagaaacaattccaggcagcaagagacaggcgacccgaagcgtgttctctcaccaacataaagtagcagccgggtgagacacttaaggcatacttgagtcgtttcagtacagttgctgcgagggtgagaaatttgaacgatagtatccaacttactgcccttcaagtagggatcacgaccaatctctcaactgctggaggtgagctatgggacgacttgcagggttg

SEQ ID NO: 217696 - DNA, 641 bp, Cannabis indica
gaaaacaaatacctgtgcgataagatttgagccaaaaaatccaagaaggaagaagaagatgcagagtaggaaaacgaatggtaaccctagcttggtcttgaaggtggagttgggtttaaggtttttccctctcattgttggagcatccaaaatgaagattttgtccaatggcggaaggtttctcgtttaagaaaagcggttatgggaggaaaagtcaatctgaaagtcaatgaggtaggaagagacaagacaaggacaaatttatatttcacagcacaaacacaggcgggacaaattttatctacctaacctaaaatatttatttattttcctttcttcaaaactaagtggattttctttgatctcaatctcaaccataaatgtcttttacagcccaaaaaaaaaaactataaatggctatcaataagtgcattattattattattattattattattattattattattattattattatttgagaagggatcaatgagtgaatttcttttaacaattggtgtatctcttgagtggtagtgcaagaaatgctaatgcaatataaatgtttttttaaagttagtaaataaattaaagatattgaaaaattctataataaattacagtacatttatcttttt

SEQ ID NO: 217697 - DNA, 760 bp, Cannabis indica
gtcaagagtttgcagacttgaaaaccttgtcattttgctggttcattagaacacatttacaggaagagcctatgttgaattgcagccaaaactaaagcttgaattggttaacttgcaggtgtttcggaccaggtagttgccctccaaagcgagtgacatggtgtagagagctaatggacgatgaagcaggacagttccttatgcactcattcattgatccaaatgcagaaaggccttggcttgcacaaagaatggcgttgaggataccatattcggcttaaatgtttcaaccgaggatggatagaaccgacgctattgaatgaaagcttgtctttatagagtgtgaataatatgttctctcaactttgggagccctttttatacatgaaagctccctttagcacttggaacatacaaatatgttggtaatgtttaaaataatgctttcacttaaataatgattaatgaggcaactattgttgttttgttacatctgttgttacttattaaatcccagaattcattaataaaaataaagtagaattaataagaaaaaatggggtttaatcgatagtaggtaatggtttttgactttgatggtcttcaaaaatagtgcaaaaaataataaacttatatggagatgcgggggatcgaaccccgtgcctctcgcatgcaaagcgagcgctctaccatttgagctacatccccaattttggtagtcgtcacctttaaatttaaattataagtgttttgaaacatt

SEQ ID NO: 217698 - DNA, 712 bp, Cannabis indica
ttagtcacaacaaaaaaaaatttataaatgaatcttattagagttaggattctatttatagcagatagataaatccccttagaattaggattctatttataatagtattaggaaatatctcactaaaagaaaagataactcatcttttaaacaaaagatgaaaaaatcgcaactcttcttaaaaatctatcttttttagaaattttctaatgcgacaactgatagtattttggccataactctctcgatattactcagaattagacgattcaagatgctctagaaagttaagaacgagatataaaacttttatgtggaactccaagtccagttttgaatctaaggtcatccgaatttgcaattaagttccgccttgtaaaattgagctcgtcggcttccactattttctaccaaaatatgctaaaatcccttcgaaagactctaaatgcatgaatagtctttaaattaacttaacaaattaaaatcacactaatcaataattgaaagaatcaatttaagaatattaatacataaactgatcatatttataagacaaatatggactcattagctattgtgcaggttattgttagtgctaagaatgagcagtttgtgcactccaatgctaagtttgtcgggattcaaggtggctgatgtattacttttgtctatggtcactacactatagtgcaaaggaaaactttatggcagg

SEQ ID NO: 217699 - DNA, 1385 bp, Cannabis indica
ccctagccaacaaccttttgcagaccccaatcattacgaaatagcatgtttcatactgttttggaggttgttggaggaaaaaaagaacaagtatcttacctctcattttacttgttgttggtatacactctaatcaaatgcaggttttacaaaatgagcttatgaggactattgaataattgttttgatgcacatattttgaaaatgtaaacaaattaaaactgaaatattgattataaaatacaacacttgaacaagtcataataagagtatagtatatatatgtatgtatgtatacttacgttcttaaagttttctcataagtccaccatcggccagagttgagaatgagcaaatctgcttgattccaacgatttgcagtcctatccatttgatcaacttttaaagcgtacttaacattaggaggagatttcggtggaggatgacccaacaacaccagaaatggcgatctgtaatactccacagtgcagttgaaatggtcaaacttgaaaatcaagtagccagagtgcttggtaatgggattccggtttacttcatagattgaggatttgttagaaacagcactagagagtaagcagagtaaggattcccattggttccttgctatggaatcaccagcaaatacaactctcttgttccttaacttttctaacatcttctctccatcaaatctatggatcaaacaaacaaattacaaacccaaaatcacatttttatattcataatatatatgtttatatctgtttatttttttttatatgtcaaatgtaaagtgttaataaaagtcaaagggaatataatactaagaggagagtgtcaactcctgtttgaaaagaaccataaaatggagatttctgttcaaagttagattttggcattattaattcatccaaacatgactttttactatttgaaaaaacttcaaatgaatgatcatcacaaaaatcgagaaaacaggaatgaaaattagtttacaaacaaaattaagagaatttgtcgcataattagtttagttgaattgagaagaaatactcaatctcattcctttagcagtttttaaatttatcataaatatatatatatatatattatctataataacaataaacaaaaatggtggaaacctgggcaaattgcaatgtttgggttgccaacgccacttggtgtattgatgattaggcctactattctcagagcacctgaaacctccatccatgaaaggacaatctggggaattatacaaaggatatgtttcatcccaaacccaatttccatcaaaaatatcacaaccgtctccaccttcatcaagaaagctcacctccttttccaattcttcattattctcaaaactcaacgacgatgat

SEQ ID NO: 217700 - DNA, 558 bp, Cannabis indica
tgagagttgactcaataataattcatggtataacctaatttaagtttaccaatcaatgagattggtgtttctttgccctgccttgagaggctgatgattcctccctcttagatccctcaggttttcgagcccacacaggagcttgagccggtccataacggtaatcgtagaagatctcctcactagcttcgatatgatctttggcaaaaatgccaacccgatgatctccagctaccaacattacctacatagagcaacatattttgctcaccaaaactcaaactagaaatgaaagagcattggtcaatgagtggagatggaactcgaatggagataaatccttaagcatagcagttgggatttgatgaatggtttgcaatttactatcgctttcgatagcatcaaggacatactgtgacaaaaaggtggataatttcacatctcaaatattacagtatcagaatgaattcaatgcaaactggtccatcttaactcaaaaactatagtacagaacttatactgaaaaacttgtatagcatcgtataaacccccccccgt

SEQ ID NO: 217701 - DNA, 673 bp, Cannabis indica
aagacgcgacaatggatgaatgttgacattgaatccgattgcctcacagttgttcaagccttacgaagcccagttgacatgatttcaatgtttggtcaaattgttaaagcttctaaggatatgcttaaagattcaaataatgttgttatttactttgttagacgatcagctaatatggtggctcataactttgctagagcctctatattatatcctgattgcagtttcagtttggagtctgttccaactgatttgttgcctagtttggtaacagagatgatgatttaataaagctattattttcattacaaaaaaaaatgtattatgcataggtaagaaatctataaatcatctttcttgcatcttccaaatatatatattaatgaaattaaaaaaaaaagaaggaaaagaccaaaatgttcaaaatgattttttatttaaaaaaatgttaagcctaaattcacgcaacgtttaaagttgagagcacattaagaaaaatggagtgtgaaatttaaaagagcaacataatgtgtaatagtggaaacaaatgaggacatttaatcaagcttacgtggcttacctatacattacagctagagtgacaaatgtgtcgttgacactctagcccctcccgcgttgttgcttgcgtggcattttttttttttgttttagt

SEQ ID NO: 217702 - DNA, 595 bp, Cannabis indica
aattcgtacaagataaatagtgaaggcttagtaattgatgttgggctttggtcaattctcagccttaggacttcagatttgggccgacacgttgaaacaagagatgagtaattattgggcttttgtgagttgctttgatgtccaaacagagattcatttctagctaagtgactctctacaaaattataattatttctcacatctcaataattcagtcataagacagaatatttgaaaaaacaaaataaagaaaaaagatttttttttttctttttttttttttcagaatggtgcattttttcaatattgcttttccgttttcctagtaacacattaggagaaacatgttttaaatgtaggattcaacgtataaccaattgaaattaaatgtggagtaaaattttgttaatgcagaaaaaaaaaaagtttatgatgtacttaatctggatctagaagatattttaaattttggtggcgtttggttgcaggcaatgaaatataatgtaatggaaagaaaataattattattttattcttttgtttggttaaattttaaaatattggaatatcattataataaaatattttttatatt

SEQ ID NO: 217703 - DNA, 706 bp, Cannabis indica
agacggaggagaggctaaccttatagagatatgaggagcaacaactggtgtctgatagaaaacaatagctagacatggaaaggctttggtgaaaaccttttcaactagactagtcatcacattagaggcgacatgggtgcaagtggtggagggtgtatggcttctgtagaagtcgataaggagacggcattctccatgatagactaagacagaaacacttctgaaggcacaaagtgtttcgaaagctgcaaaagttagggtttcttgggagaaagatgaagtgaaaaacgattcactattttttggcttttaaatgagagaaaccctgaccatattgaccatacaaagaaaaatactatttttaaaagaatctttgcaaaattaaatgtacaagcgcaaaagaaatgtattttttaccgcaagttatggcaaatataaacaaacaaaaattattcacatgagttagtgagatcatagtcatctaatgaatgcaaatatgccaaccaattttaacaataacctagaccttaccaacagagatgtaaagaatacaagcttagagatacttattaatgatgcttatttatgacataatttaataatgaaaaaacaaaaatgataatatgataaaatctaataaaaaaatgaatcaagaagaacatataactagtgagaattaattggttctttcattttctgatcaaga

SEQ ID NO: 217704 - DNA, 553 bp, Cannabis indica
cagatcgaggagaaggacgatgtacgtcctggcagttcctccaaggcagaggaagaggcagaggttgaacccccaaactacggggagtacaatgaggcttgggagccaatcgatgctgacggagacgtcctggttgagggcgtggactacgtcagtgaggaacttgctgctgcggttcctcatagaaggcaaggtgccttgggcgccaggtgggtaagcccttcgtccaaggttactgaggcgcgccttcggactctcgaccaggacggatacctgggcgaattggattgctacattcccgcccacaacaatcgtgccacaaatcctgaaaaggggatgtgcgcctggtcgggtgcccatggtcagcaagcggcattgatgcctttgcatcaatacttcaagaatgtggcagatttcttcggcctctgcccggcccagttcactcctaagggcatcaaatatctgtctgcgctcttcgtcctctacacttcccaaaaatggggtatgctttctcctcacgaagttgcctcgttctttgatttgaagtccaccc

SEQ ID NO: 217705 - DNA, 583 bp, Cannabis indica
aggattgttaaaacttggaaaatggttgcgggaatattgtaatttagtagggacgagtacagagaaacataagttctggggtgagttaggagtaaatttgcatgagtcagcgctgcgtgtatatgaaatcattatctttaattttcaatgtttggaagtactgactcggaatccagtcattgacaagtggtatactgacatttctatatttaatgttatttttccagaaaaaatttaaatatatcaattatgataatatcatagctgtttactcggtttctattacttaaattacaatccaaaaatgagtaactttccaataaatattaataattccaatatacttattcagtaattaatggaggctctctaattttatccgtctacaaacgaaacgtgataataaaagggattattgtttttgttttcttttcttagtgttttttttgtggaacaatagttatgttatagactattaaagtatttttattgaagatgcaaataaataatagaaaattaaaatttaggtttaactaacaaaaatatatttaacacattttatattaaatttgacataatattt

SEQ ID NO: 217706 - DNA, 572 bp, Cannabis indica
aaacttaacgcagtatactgcagaataacacttataaaaaaaatataatataaaagtaaaaaataccgtctgacagtattttttgtaaaaaaaatgacaaaagttagtataccatataaattttccttttttaaaatatactttttttatttgggcccctaaaatgagtggatcctaggcacgagcctaacttgcctaaacctcgggtcggccctaatttagggcatagctttaaacaagggtaaagctaaaacaaaaattaaggtaggatatccttaaacttttaaatctttaccaaataaccttacttaacattacattattttgataagaaaaatatttgtataaggcctaaaaaattatttaaatttcagctccaaataacttaggatcgatcttaattttatgcgagacgattgtcccacttaatttatgtttaccgaaattttaagaaaccaataatatgtaatgaagcttaaaaaaaagctatagacaaataataaaattagagtttttatgtagttggggtgttaacgagccttaacactaaagtaatgagattctaacccttt

SEQ ID NO: 217707 - DNA, 712 bp, Cannabis indica
ctcgcatatatcgaattatgtgcgagtatcctccccatgtccgtgtataaaccaggagaccgactttctataaatgcgagttggtcctaagaaccctgcagccttgataaaccaatatagactcgcatgtctaggttctatcagctcgtcatgcgatgtccacaaaaggcgactatctaaggacgcagacatcctaaacataatgataaacctgcgagtttaacatcggaatatgaacagtcaactcgcagattcggaagacgcatacgttgatgaacttagtaactgccgttcatttattaatgttaacgttgtttagtttaattattgtaattcaatgtgtaaaaacggattgacaatgaatgcaatccttgtataactgatcggacacctgctttgtatataaaggggtgatccaccgtgaaatggcacctacgaaactcttgctacagtggactaagcagaccgtgatctgactgaaccactataatcctttgtctcattgttatttccagttttctgttaatcatttctcattcccagtttgagtactcgccactctaggttgaatactcgcacttgttcttcatatagatttctttctgttattaataatatcatataaaattggtgttgcgaaattcactcgacaacatttggcgccgtctgtgggaagcgaagaattaaaatattattcatttcaagtaagaat

SEQ ID NO: 217708 - DNA, 633 bp, Cannabis indica
tctatcttttgttttggtggcaaaacccttcagtttacttttctttgcaaatttaaagttttagttaaatattaccgttaaatactaaccggattactactgtatcgacttcgaggttttaccgttacatatacaaaggtgtatacagtggtcatccagttgatatttaacggtaatatttaactggcgtgtcaaatttgcaaagaaaaataaacataagggggttttgccaccaaaaaaaagataagggggttaagtgtataaaaattaaaacataagggggttttgccacaaaaaaaaagataagggggttaagtgtataaaaattaaaacataagggggttttgccaccaaaaataaagataagggggttaagtgtataaaaatcaaaacataagggggtttcgccgcaaattgctcaaaaaaattaatagaggtgacacgggatacagcagacaaaaacattcaattgaacacaagggatcgacttcatatatttatatatatatttataattatatgatatgatattctattgtaagtaatagatgatatattattgtactgtaatgtgcagtctgcgatcaatatagatgcatggcacttcgaagcccggtgtcatattatatattt

SEQ ID NO: 217709 - DNA, 1026 bp, Cannabis indica
catagagattgacaaccattcaggatgtttcacccccacttagctaaaaaggcttggttcattctcatagttagtactttcaataatataaactactatttctcattgtaactttataaattttttcttatcttatctcattctggggataagataacaagctcatacaataaaaaaatttgaacatagactccatcatatagtcataaccctatctccaaataattaaattaggaataactagacacaatccctgataaactaacatactatatattgaaagagaggaatcagccgataagccactcgttataatttatctattttatccatgacatgacggtcccaacaaaatatacaaattaatactaatcaaaattttattttctaacaatgcatacttttgtttttcaaaaaataaacatcaaaactacttaaatagtcatttttttttataaaaataaataaataaataaaactatgctttaaaaataaataaatatataaataaaacttcactttaatttttttttaaaattttggacaacataacggctataatttcaccattctaaaaatttaaaacctgtgattaacttatctgacaataattaaccaaataatttaagtagactttaaaaatgttacttatgaaattttaaaacttctaaaaccactaaaaatgagttttctgtataccccttatttgtgctctctcctaatttttttaattagtttggaagctcttatgaacaataatatattaattaacccacaattaatatacattgctacttaaacattgtttttgtgttgttaaaaaaaacattgctttagtgttaaaatagaatttaaaggttcgtttagtacgttgtattacaccgtgttgtattatatagtattatattgaattatattttatgaaatatttttatataaaattatatgtgatattaacttgtatggacacataaatatgtataatattttagtataattaattttttttttttttgagaatagtat

SEQ ID NO: 217710 - DNA, 619 bp, Cannabis indica
atcagaatcttgacccaagcaacgcaattgatcactggagcagtccatagattctgagaacaacatatgtcctggaattagcagcaaacaacgaacaagtcttagacaagaatgaagaaatcgaattacttatctaccatgtaattttatgtacctgagctttcatctaggctactacaagagaacgaggcctccagaacagatcctgggctcaaatgatcagctgtgtgagaagaccctacctgctttatttgagcctgcaaagtgcaacaaaaaaaatctcaggcagaagaactctgaaaattatctcaatgaaaaacactagatattggcataacctgcagagagaaactgtggataaaagatgttaactcaacggcaatataaaattgtgtttaaaccattgacacacgtactttagctgtgtacaaatacaggacaggaagaaaaacatttaaccatataacatacaagaaatcttttaccatcaccatttacaccatgttcctgggccagtttccttctgtattctatccactaactgataatttggtaaatttaaaattgatcgtcaaatcatatttgcatcaattttccttcatcccagtcaccatgtaat

SEQ ID NO: 217711 - DNA, 882 bp, Cannabis indica
ctctctctctctctctataactgaagatgacgatctaaccaggttccttctcatttgaggctccttctccatttataggcaataggtttgtgttagaatagtaaggtcaaaggttgagttggatggtttgttataacttcttttagtttattgttgcagctttccaatttaatttgaactgtaataattagttgatagtgctaaaaggattgcttatctaggagtttaacaataattttcacctaaattttcatatgagcagtctaggataatgatacttagttttttgagggtcttggcttgattatgttccctaattaccatcatgtatgtcaactccaagtaagttcctgcagtgcttggacttgctaaagtcacaatcttagtcaccatgtttgctaggttgtcctctgtgggaaccttttctgtctgaacccccttgtgtcactttatcccaagtaaagtgatactttatctctaaatgtttggttcggtcatggagtactgggtttctacacagatgtacacaactgtgactatcaaagtaaacctttagaatctctttaagtagcttaatttcttctagtagccctttcatccataactcactcaatattgactcgattgatatgattcaacttgcatttcaaagataattcaatgttctatcaagttatgtctcacacttcaatcgcaattataaagttatcatgaccaaattttacccctatgggagttacaaaaataagctccaggttacccacagtgggtcccactgggctccaaaaaaatagtcatcaccactagaagctaattttcacagttagatcatcatctacggtcaaaaaacatctattttgtatttttcctctttttttttat

SEQ ID NO: 217712 - DNA, 673 bp, Cannabis indica
taggatttttttttctcccgaactttgacatgtaccaaatcatgccccctgaacttttttgaccattaaaaattctccctgaactattgaaattgttagatttaaggatttttcattcaatttttctgttatagtgattgtttatgtactaaatcatactcatcgaactttgatatctaccaaatcatgcccctcaaactttgatatgtactaaatcatacccctgtactttcatccatgttagaatttttttaattaaattagacaaaattccttaaatctaacaatctcaacagttcatgggaaatttttaacaaccttaaaagttcaaggggcataatttagtacatgtcaaaattcggagaaaaaaattcttaattagcttttttttttttactattttttagttgctagaaattaacatttagtttgattacattgaagaaaagaaaaattaacgaaaaatggaattaattttctatttcatactattttaagaaatataaggttctaaattttcatctaagagtctaattaacaattttttttgttataaaaaagtacaaaatattatttactttgttctataatatcattatagttgtcaattgtagcaatttttgtgtatgaattagcaaccaaagtaaatgtataccatttttttttttttttt

SEQ ID NO: 217713 - DNA, 802 bp, Cannabis indica
gttttttcttttttgaatcatgtataatttttcttaataaaatttcatatttttttaaaaataaagtgttcttattaaattttggtgtgtaaataaaattctcctaaatacaatacaattatatttagacaatgctaatattgccattgctattggtaaaataattaaatacagggctacacatgttgtgttagtattgggcacactaatatttaatgacaatgctcttctaattatgttaccagctattgaaaaatgttggtatttttgcaaactaataagtggatatttcaaagaacctgtttttaaatgggtaagtaatgtatttagttgtaaaaaactctttagatgactcattgaaacattaatcatagtaatttgacctacttttttgtcttgtctatgtttgttaagtttctaatgaactacatttattgtaaatctatgtttcactttcatgttgagaaagttgttaataattagtaatcatttttttcattctaatttatagtgtatttaatcaaattttcattatgtttcttatatacacctaagtttctagggtgaaacaaattagcgaccaagttcttgtcttttattttgtcaaaaaaaaaaaaaagaaatccttccaagtttataattattgtttatgaaacaaagtataacaatttaccaacaagttacttatagttcaagtttatttatcgacatttccagttgtgagataaattacaagtagctaggtagagctagttacaaatatttgtaaccgtaataattgggtaatttaaagtagctagtt

SEQ ID NO: 217714 - DNA, 509 bp, Cannabis indica
aaaaaaaaaaaaacagttcaaaagaattaatgaagattggcaattggcaccaaagatgggatccatacaataatatatatcttggaaatttctataattttttattatttaaatattttcgtgggcaatctttctctccctatgtatttcaaaattgagttctataaattgatggtcatattttttaacgcattataagttacaactcataagtcagagagatcgtaagcaacccataatcgctaattcatggcaagcaaagatccagtgctttctccttcccttccatggaagactcgcatcacctgtggattactcaatttctgcactgatatctctcgtcgaaacaatggcactattaaccgccgcttactcagtctcttcgatatccagatctcccaccacaccctccgcagtgaaacggagtctcttcctccgactacaccctcgactcatcctagaaacctctggtttcgtatcttcgtccccagctcagcttccgcctcagg

SEQ ID NO: 217715 - DNA, 986 bp, Cannabis indica
ttttaaaaatatttaatgtgtagctagacacaaatgggagaccccacaaaacgcaatcacatagtgcgcccaaggttggaaacacctacttgattgtggaatcttatgaaaatgctccacgagcagcacaccaagacactggagagctacacgaccagggcagtgccctagctaaggaaaggaaaagaggaagaccctaaccctaaagagagaaggaattaataaaatgtacgcagggtttatgttactccccatatatatttccctaagaaatgttgaacaagattattattttttttgtaaggttgaacaagatcgatttgattagtaaaggatgaattttttaattgtgttccatattcataacaaaattttggtacgaaacggatgcagtacaaaaaaattcaagtttgtacttgacaggagataaaaaatataaatttaagcacgattaaaaaaattaggagactaacaataagaagagtacacgatataaactcctaatttaaatttttaaaatttcaacaaacgtattccgaacattttaataatgaatctataaatgattttaattatcatttcagcattttattaattggtcgaaaatttgtagttatattagagagctaattgtactcgatttgtttttttttctaggatctctttgttataattatcataaaaaaaaaaacgaaataatttatttattaatttaaagaaatttacataaagtctaaaaaattgcattttttttttttacatttttttttagtattttctttctttaacatttttactaaatttattgatttttttaaaaggaagtacaactattacgttgctgctagattatatatattatatttctacactgttaaattataatttttttattttttaactctaaaagttatattttttttaaactaacttaaaagtaaacaatgtatgtaagagaaaaaaagtacagtaaatgtaaaaagtat

SEQ ID NO: 217716 - DNA, 1007 bp, Cannabis indica
ttttttcagtttttggtgttatattgttattgttgtaattaagtattgaattttatataatttaagaaaataatttttagagaatatcactaatcaattgtaaaacaccacttacataaagtactgggcaacaatagtatccaatagcaatactcttattattatctatacatttaacaaaaaaaaaaacttattgttttttgactctcacacatttggaaatgttatgggtaattgcttgttttgctaaataataaatgtagattataataataaaaaaaacgaataatctacattgttgttataataagtaatttgttattctttcttaaaaaaattattgaataatttgctatattaagttaaagataaatcaatctatttttacttatgtatgtaataaactatttgtattttattttcaatattacatcattcaaaatttttccaaactaagaatagtagagagattttgtatgtgttaattgtcgctcgtaattatctggattcgattgtgtggatgattatcaacaattttctttttcaaatttctctttagtgaagatgttgcatgataaaaattgtaataactatgagttaaaattttgtgataggaaaattgactcaaaagttatcatcaatactcttagagacggtcggtcttcaaaataaaatctttattgctatatcagtagttgtcttaatctttcgaaacttttatcatgttataatatttaagattttttagttatgtaattttgaggtttataatctgactatattagtaaatattttatgcaatgattataatttctaattttttcaatctataaaacgctttaaataaaaaaaaaaattgagtacaagctagtgagattcacttttaaatgacaaaaatgccttcaaaatcaaatgtatagtgaaacatatattttagaatttccaagaagattaggttaaaactaatatttaaataaacttaaggggtgtgaaataaaacaaaatga

SEQ ID NO: 217717 - DNA, 608 bp, Cannabis indica
tttgctatctactcctttgttacttgctcctcagcctccttggcaattaaggctagctctaccactttcttgtacaaagtgtcatgagtagtggtaatcttcaagtcccgactgattgtggcattcagtcctctaacatatttcttttttttggtgaaatctgtaggcaccagatcaccagcaaatttggaccgccgatcaaactctagagtgtattcggccacagacattttcccctgagtcagtttcacaaagtcctccatatgtgaagtcctcatagcgatgttataaattttttcctcaaacaaactcttgaactcttcccaagtcatcacactaacatcacgagtcttccccactatatcccaccagatgcgtgcatgatcttgtaacatgaaagctgcacaatttactctctctattcccgtcacccgcatattatcaaagatacgggtgattgtactcatccactgctcagctttaattaagtcagtacctcccagaaaagttggaggttgcaggttcacaaaccactcaaacaccgagtctctatgcggcaacataaacccctagttacctaccacaggcacaggtgctggtggtaacac

SEQ ID NO: 217718 - DNA, 632 bp, Cannabis indica
gatgatgatgatggtagctttgctatgatgatatgtatatgaatgaatatgagtagttgggtgggactggtgtatgatgagtgtaatccttgctcaattttaggcatgacatgtacaattcttggcacttttatgtaatatatattatctcataattttcataataatgcttattatgtatttaatcatttaaattatggtttgagaatacaattataaaaaagagacaacaaagagaaaggaaaagggcaaaggaatattagtttttgtttgttgaaaaggtgggctagtatttgtaggctcaagaaaggaatattttgatgaagaaagacattgtgttttcattatgtaacttaaattaaaatattaattcatacaaaagtatatggtatagtaatgttttcttctttatatatatgagatcttataccaaacattatgggaggccaatttaatagtatttataaagttcattagtttgtgatttagacaattaatctaacactgaattatttgaccttctcctcttacctaccacaaaaagatccctaattcataggcttgtattgtcctttttctttttctttttctcttctaattagggaggataattattggacttatatatatat

SEQ ID NO: 217719 - DNA, 714 bp, Cannabis indica
acctactgaacactgttagaaccaaaactgtcagaactgaaaaccgaaaaaatcaataacggttaaactgacattgaacggttggttattttattgtaataaactgaccgaaaaaatcgaaatcgaccattatacatatatattaatttattaagtttttgttttttgctttatgtattgtagttattaataatatattattattttattaatattaaaattaaaagagtaagataattagtttttgaacaattaatttgtatgtttgtagttgtaaaatgtagaacaatgtgtttatagaataaattggattatattttaaaagaaaaaaaagaagttcggcttaggcagtttaaaccgaccaaaccgaggttcaaaacagtcggttttaatataggttctggatttgtcggtcggtttttggattgcaccaatccagactgaaaaatgaattctagattttttttatagaaaagaactggccaaaccgatcgatgctcaagcgtagtacagaccctgttattgtcttaaacatgacacatataaaatccacattctagatcattgggtttagatagaaatatgtagtatcagttacttttacatgtttttttaataaatttaaaacagaatctgtactgacgaagttggaagaaaattatagttttacaaacattgggtacctatgctgctaaaaataaacattgagtttat

SEQ ID NO: 217720 - DNA, 742 bp, Cannabis indica
gcttgaagaaagttcctcaaaaccataataatcattgaaagcggtttcctctttttgtattatatagtttttctttaatgtaaaagtctcttttacaggtttcatatgatgtgaatatcaagtatttacacaagtgaattaatgttaaaaatcccaccaaattaataaaatttatcaattataatattcaccataatttttgatattaatgagaatatttactattattatggtaattgtattcttgaccaaatttacatttattaacaattatcaatgaaccatgttttagtcataaaattttgattattattattgggtattagtggtgtcttacattttacattaaactatatgggagtcgatacttaattggactaatagcgataataacacatagaagagtattaaacaccactagtaccttttagcatttctctaaaaatttcattcacccattagcttcaaattttgattatttatcatatatttaatatgattttccaacattaataacgtcaatttaaaataatattttaagcttcttcattaattaaaataatattaaaaaaatgtaacaaaaataagaataaaataattttagtagcttcttaaactagtagctagctacattaccatccacactcaaaaacgaagctaaaatcaaaatataaacaaaatagaaaaaaaaaaaaaacaaaaaaaaaaaaaaacaaaaaaaaaaaaacaaaaaaataaacta

SEQ ID NO: 217721 - DNA, 943 bp, Cannabis indica
cgtacttatgtgtcatgcttttcgaattttatcgtgtcgtataatactaagcccctatattttttttcgtaccatgtttaagcacaattttttcgtatcgattaggcttgtgtcgatttcgtgacgtgtcaaaaagtctgacttatatttacaacagtatgattaagtgattatggattgtacgagtacaaccatctttctgagttatcatgatgtgtcattaagggtgcgtctccacttttccagtgtgtttttacttttatgttaggtcttgggagccacattaattcattttgtccttattttgttgaagaagactactccatcaagtacttcgccttggtaactaattttctcaagggattagaaaaatgcttaaaaatacccttgattatattattattagtacaatgctcttcatgaagtacttggtttaaaactattgcctaattgatagaaaaactaattatgatatcaaagattttctttaaaaatttgaaatggcattggttacttgcttggaagtggatgagtgtgcaatggactcggagccaaacactttctccaatatcacactattattagaataaaaaaatagtcagtcagtaaataaaattgttaataataatattggttgatgttattattaacatcaattacacctgtgttgtaattaatgacactaatggtgttgatttaaacaaacactattaactcaaaagtcttttttttattgaattgtttttttttataaactaagcatttcattaaaccaaaagaaatggagaaaaaaatacaaacacaaaactgtctagttcccagccaccaacagcacaaaatcagaagagaaaaaatcatgagctttagagtttgacatcctaggaatctaggaaattttacaagaattacagtccgataataccttgaacaactgcaagaaacc

SEQ ID NO: 217722 - DNA, 507 bp, Cannabis indica
tatttgaatggaatgaagagagagtacaattagtaaactcagccaaaagtctattatagctgctattggtcccccaacgccaaaagtctttcaaggaatataatgtaacaagtttggcattatttgttatggtgagaaaagagaatcttatattaattataagatgggtattttttttaagttataacaaaaagtaataatattttttaaaaaaaattggaccggccaaataaataaatatacaatccaataaaaaaaaatacacaaatcttacacaccttcaacttacacgatttaaacttcctgggatggaaatcttcatgcaatgcaatgaggatcaacaacgatgaaaaaactatggcagacgaggaagcattgttaattctagtgatgtcacccgaaaaggagaataaactcaaatcgaaagacaatcataactgacagaaaaatagtctacagaatagctggtatgaaacatcaattcaacattgatttataattcaaatt

SEQ ID NO: 217723 - DNA, 305 bp, Cannabis indica
aatttataaaaagggatatttgcggcaaaagtccccaaatagttcacgttgatgcagattaatccccaagctccaataatagcggcaatagtacctaagctggactctcgtgtttgtccgttcataccacagccgttagtatgagtaacggtacacgtgtacgcataggatttaatggctgtatttttatttatttcttttcaaaattgaaaaaataaaatgtttttccaaattaaaaatttaaataatttaattttttaactaaattacaaaataaaattaaaaactgagaccaaaaaactaaa

SEQ ID NO: 217724 - DNA, 1008 bp, Cannabis indica
ataaagtctcgtatctttattttacagaaatatagttcaagtatttcaaaataattttatttaggattagctattcaaattagcttctctactatattcttaaaaaatatctcagtaaaataaaaaaatatgatattttacttcaaatttttatattaattatttattttttttatattatattttaagaaaattatcacatatacatttttttttagttttttttttcaaatgcatcgtttaggttgttccagtaatttttttgtgggttattaagtagattttggtgttgttccgtaaatgctacgagaaattttatgaggaattccaataaaaatagtaaaaaaaaaatgtaattaaagtagtaaaaaataaaaaattaccccatatttattaaatataataaaaagctacgtgaattacttattatatttattttttaactattttttatttttaaatttagcaatttaagttcataaaatattaaaaaattaattaaagtataaaaataaaaaaaaactcaaaaaaagttaaaagtaataaaaaggaaataaaaaatgggacaaattatttgaagaagcaaaatgcttcaccccatagaaaacactatttatgatgttaattttaagctattttaacttatttgatagaggcatctattaaaatttatttttgatttttttagttcttactttttgcaactcttgaccaactgcaaatttttttactaacaattttctttatcaattttgttaaacaaatataatataaataaaaaatggttactctttttgttaaatattttttccgggttctaatttcgtaaacatgctctaagacaatttactttaaagaagaaaagtaaaagagtaagattttctttcaatttcaaaattttacttagaatggaaagatgttacccatgcagtctgtcatttcccttcaaaaaaaataaaaataataaaagacaatcttctaattataattttaaactgagggacgtgt

SEQ ID NO: 217725 - DNA, 764 bp, Cannabis indica
tttagttggaggtttggatttcctagattagggtttttgcatgtatttacccgattatgttaagtgattagggcatccatctagcatgaggttttctgttcaggtcggccaactcacttgaattcggaaactaggtaagaatagcatagaacatattgtatatatgtgaatgtatgtatgtgtgatatatacatgcatgttgtgtttatgatatatatgtttgggtgatatcatagcgacacaaccattgtgtcggttcagcagtatgggcatcgtactagttaagaatgatattcgccctagaaagtattatttggcgttatcatagcgacacaaacattgtatcggttcagcagtacaggcattatactggttaagagtgatataatggccaattatacttttggatgctattgatgctgtcatagcggcacgaacctagtgttggtcccgcagtgcaatcataatgctgatgatggctaatatcatggtcagtagcacaaattgttaagaacgttcttaaatcatctaataagccttgtgggtggctgtatgggctcctagacacaagtcgagaatatacatatgatttgttttatgcttttcttactgagtctgtcaactcacagttctacttttatgtgtaggtaagggaaaggtgaaggttgagcaggagtgagcttcgagctaggatgatgttgtacatgtcatggcagcgctgttgggttttatgccctaaatacactcatttcattataatcata

SEQ ID NO: 217726 - DNA, 571 bp, Cannabis indica
tttttttcttattattatttttaaaataagataattttgtcaaattttagtattaaatttgtggatgtcatttttttttatcaactaaataaaggataatgttacacacatttaggtatccatatgcaaaatatcttctttttagtcaaattcgaaataattaattgatactttttttatagcaaaaataattgatacttgaaacttaaatagttgctagtgacatgtgattcaattttccataaatgttataaaactaaagtgattttttggcattaattctatacacacatttttctcttctttgaaaataaactacgtataaaatgggaaaagtatttattggataaaatggttacttattttattttgcaaaatatatccaattttttagtcaaatatatgctaaggtatattcccttttgtttatttattattattttgaaataatgtattttataaatttaaatcatcataaataaatagtaatttatctatgtattattttgttttagatttttttctaaggttttttttttttttttttttttttttttatttttggtaaacg

SEQ ID NO: 217727 - DNA, 1355 bp, Cannabis indica
aaaggttccctttttagggtactcccgggaacaaatccaacggagacggggtggggcctgtagcttagaggattagagcacgtggctagccaaagtaataggaactcgacctaagacaattccaaataaaaaaacttcaatcattagttgaaatcgataacctaaactaaaatcggacaacatctgaaaggttaagttttttttattgtccaaaatgccccttccataacaaaaatacatgttctcttctcttctctcttttcttctcttttcttttacgcattctcacgccccaaactaattttctctcttcttctcaaaataaattatcaattgtacaagattttggcactaaaatcttgtaacaaagacatttatcggttgaagaaaacaaataggttgacattgtaaagaattggagggagctaagatccattttcaagaaaataacgggttagtatatttctttgattcttgttgttatttttgttgttttaataagtaagaatattatttagatgattgatttgtggtttattagtgtattttgttgtttgttttttttttttgttggaaatcgaatttaggtagaaatttgcattttttgtttttttttttattttgtccaattaattacaaccctacttataattaatattactaattaagaatacaaaaatatatttaattaagagtattttacaagttcaaaggttatacatatgatgaattatgttcttccttttatagattttgttagaaaatgtaaataaaaaattaatttgtaatagtcccatatttattataagtgattttttcacaaacttcaaaaaaatatttatatgtacatatatataattataaatcaaaaagttaatatatactaattatatagaaaattagtacaccacaaatatacaatataaacaacaaaaccataatggacaatttcaatcaaaataaaaaactataaactaaaaaaattgaatttaaaattattaaattatcatctatgattgagttaaaaaagtaggtatccatttcttttttttattattattataatataatgacttattaattcctaattaaatatctataatagttttatataattataaggctaattagaatttatgcctttcaatttttacatatactaaattatgcctctaaatttttttggcgttaaaaattctccatgaactattaagattgttaagacttttgtccaattttatttaattttactaattcggtgattgtccataaactaaatcatacctcccagactttgatatctactaaatcatgtctctcgaacattgacatgtgtcaaatcatgccccctgaac

SEQ ID NO: 217728 - DNA, 508 bp, Cannabis indica
gaaattcttccattagtggagttattaatcaaaggattacttatattgggcctggttagtccgacccgattctatgggcctataaataagaccagtatcttttagagatttcataatatcaatagaagaaaaattacaaactttattgtaatataaaatacaagaatagtattgaaattttgattctaaagctttacgtggttaactcttacagacctccattatttaaacactcaaaatcaataaaagtgactcgtaaactatgtctaaaccaagtaaaaacttaatgtattacaaattaaataagtattataataaagtggtattattgccaatatttagagaaaagtggtatttttgataaattatgttttcttatttattttttaattcattaattacctcattaatttcttagggttttgtgagcatcatgtgtcacaatgacgacatttttgtacactccatagtccatattgctataatcatttgaaaaaaaaaaaaaaaa

SEQ ID NO: 217729 - DNA, 1000 bp, Cannabis indica
ggtggttctgttggggaggcttagatggaaagctggggccattaagactgctcattacggggtttatgttaagtgtgatgttttggtgggtttcaagaaaggtgttatgggccaagttcctcttctcactgctaatgcctgtaaagttgatatttgaaccaaacttcttctctttaatttcctcaattaattgtataattttcttttctgttttgtttcttaatttacttttaattattactaagtaataagctattttttttatctgtgtaagtttaactgatagagatttacattttcatatgtttatagatttgttacgaaatgcaactaaggtttcttgctcagttctttcttttttctttcctttccttcttttttctttttggttcttgttttttttttttaattaatttgtttatgctagcatggttttttggctttgagacacgtggctttcttcatgcagactgtataagactactattaaaattaactttttgaaagctaataatgagatgaagtgttacatgttaaattacttccttcaagtatgattttacaagctatattagagatattttgtcaaactaacatgtaaaatttgcaaaagaatgataatatatactgtgcgaggttctgtactaggtgttaataagttagtgattttagtaataatagtgagaattaatcaatatgggtttggtgttgataaattggggaacaagtgttttgattctagacatgaagataaacaaatgaacatgggatgtaatggtgggttggcactgataatatctggcattggtttggtgtgctgaaccaagtttagagccatcacactcaataataatgtacactgtgtcacttggtgcttcttttctatctttttgactttcaatatgctacacttgaaaatgatttgtgtagcttaattttcttaaagttcatgattattaatcccctaattaatagcctaatcatttagttaactacttaa

SEQ ID NO: 217730 - DNA, 659 bp, Cannabis indica
tagtttaacacagtatgtgatactatttttaaactgatgatcttgattcactccttaacgttcgtacaaccttgggcctacctcaatgctaacgtgtacggttcagattcaccagtcattatcttaatattaatatgtgaattagtatttttatcttcgaattttgatatactaaatcatgaccctgaacatttaaagtcattcaaaatttatgttaaactatttagattattttattttttttttctaattttaattagtaaaaaaaatctaacatgaataaaagttcaaaaatatgagttggtaaatgttaaatctaaagaatataatttaatacataaataatcactcaattattaaaattaaattaaattaaataaaaatccttcaattaaataatctcaaattcttttaaggaatcaaaaaaaattcaaaaagataatttggtactttattatagacagaagaatatcctcccgtttatatttaatttcacaatatcctacaaatataccaaaaatatatataaaaaggtaaaaaccaaaacaaagaaaaaaaagataataaaattaaaaagaaaaaaaaaagagaaaaatgagttcgattagcagaggaatagtttgtgtgtggctctgtaaaccctctctttcttcttcctc

SEQ ID NO: 217731 - DNA, 578 bp, Cannabis indica
ttttaatatatttttttttgaatttacgatttaggttattccgatagtttttctgatagtttttatgtgggttgttatataaattttagttgcgatttagattataacttataggaatttctgtgtgggatttcataaatatatatataaaaaaattaaatgtaaacatatacacccttttattttatactaaaataagtgtaaaagattttcctaataatttagcattgcttaataatgtttattaatttttaaacgtgagagtactactaggtgtaacttttagcaattctcataataaatatataagagaaagcttaatttttcacgataaattctagctaataaattgcaagccaagcgcgcctaacttcccattcccacccattgtcaatatggctatattatcataattaattaattaagttgccccaactacattaatttttgttgtacgtagtaaatatttgttattagttaatttgttttttaaatttcttgtcgttttgccttaatatacacatatatatatacaaataccacatacattatgaaattaatctaggtcatgatctcca

SEQ ID NO: 217732 - DNA, 934 bp, Cannabis indica
atataagaagacagaagaagctgcctagtgcctatggctattttccatatagaaatggaaatcatatgccacaaatgatatctggccatctgtccaatacatgtatggacagttcagataaataaatcgtttcaaattactcattcacttatcacgaataagtaactataataagaaaataatattaagaaaaagagttacaaaatagttatgatagtctttttttttcctctttcaaaataacagtgtcggcaaacggtaaaaatgtgccatcatattcacctatatgcattagaattttgcccaactaaagtggtggtttcgcattaatgttatctcactatcatttcataatatgaaaatatgaatacgtttacatcaataaatatgtatatctagctttaatataaaggaaatttagtcataatttgggatttcagttgatatttgttaaggcgttagtgaagttttgttttcatatttccctatttatgtttgggaagttgggatagactaatattatttgtaaaaatgagtaaaaggaaaagaagacaagcaccggatatatctctatatattatagcaaaataattaattattataataccaactatatgcccttggccttgagaatgacacctaacttgcccatatttgtgataacatcaaagttaagtttaggcaaatgtaatttgttgagttgcttagactatttgtctaagtctttttttgtttttttttcaaaaccaaaaacaaaaaaaactttaaacaaaggaagaaaaaagtcagtgttaattattccttgttttgacttcaaagtcagacatgaaataaaatacgtaaaaaaaaatgctttaaaatcacatggtggggtcgtaattactttggagccttaatccaatataaatgcgtagcaatgaaggaaacttaacat

SEQ ID NO: 217733 - DNA, 622 bp, Cannabis indica
aaaattaggaaaatataaataataagggcaaaaatacataaataacataatagttatgatcgaatttattatattaaatacttgataattttaacaaatttttttctaaatattttaataaaaacttcatacttttactgtaaaaagtttgcaacagaaaagttggttctaaacatttctttaaaaaagaaaaatggggttaatatattgaaattgatggaatttaattggggtttggatggtttgagtaaaattttataaaaataaacttataaatgaaatattggatgtggtaaagtgacacataaattaaattaaagattaacatcaatggtatagtaagttgtttcatactatcatgtgtgttatgtatatttctacaactatattagttatggatgaccaaaaaatttccctcctacatttaaggtgcccattatattatttgaaataatcaataattaattatatactataccaaaacaataaatatagcttgctagctaattaagtcttgttatataaccatatcttatacaacgttaggtagagcttcataattttatatataaagtttaattaatcagtgtcgcatgcatgtacgaaagcgtccgataattaa

SEQ ID NO: 217734 - DNA, 635 bp, Cannabis indica
attaacatatgtttttcttttgaattctaatgtgtgtggtgcagagtcgattgtataaaaggctatggggaccagtgaggcggcttgaatctttgcaccctgatgctaacccaagaagatactatgctggttagatctcacgtgtttcttattggtgacatttgaaaataattcaatttatgattttttggaagcttgtgtttcaaaattcttggttacattattgtcatacaataatagtaatgctaacttacaaagtttgaagttcaagacttgttctatgagttaaaatggggtaatagtaaatttaaattttggacctttcatttttgggatcaatgtttatcccagtaagttcactggaaagttagcagtaatgggactttaattttaaattgactcactttggaggtctgcaacttcttctctccattgaacctttgaatgttttggttttgttaaaatgtaaagtaaaaaacaagtgttgacccacctcctcttagtttaagctttaaggattaataatgatataataagatggtctcaactgtttgcaatcttattcaatatgctttattgtatattgtttatgtatacttttatgttactttctaaatgctgttgttgttgttgtt

SEQ ID NO: 217735 - DNA, 564 bp, Cannabis indica
aaatgtttaatgatgacaatatcttcacgctcttaattttgtaatgaacaagttgtggagatataatgaagtaattaattagagtaaacaaagttagaaacttctattgtactcttatttcatgtttgtaattatgtgtttccactttactataaataaaattaaaataatcaagagctagctagttcgaacttggaagacaaatgcagtcaaactataccaattgcttttaattcaacatttaaataaaaataaataaaaaattgaatatatctattctatataaaatgtgcctatatttatgggtgactttttatttttatttaataaaataataaaatattatttatatataataaaataataataaaacaaatcctattaatatttgaactgatattaaatattcccttataccatcctatataactgatatttttatttacttttctttatttatttatgagtttttgtttcactaggtagcgaggacaccaataatacgtaatcctaaccaattgaatgttaccatttgaattttagcagaacttttaggagcaaaaa

SEQ ID NO: 217736 - DNA, 807 bp, Cannabis indica
gtctaataggtttacatgtgtaaagaaatataacacatcaaccaaatttcatattttcaagtattcaaattattttagaaaatattaagttactttttgatgttgcgtataggttacatgtgtaaaaaaatgtagcacatcaacaaaattttatattttaggtaccaaatttactctagaaagcaaaaataaaaagacaaaagatggaaaaatatgttactgacaaaattcaatattccgaataccaagttactttagaaaatatcgggttgctttttgatgttattaataggttagattttgtaaaaaaatatagaataacaagaaaatttaatatttcaagtaccaagttactttcaaaaatataataaaagacaaaaaaaaaatattatgttttcattaaaatcagtcaaaatgtatcacacaattaaattcaatattctaggtaccaggttactttaaaaacaaccaagtaactttttgatattgccaataagttgcatgtgtaatggtagtggtgttaaaaaaaatattatgttactttctgatgttgccaatagactacatgtgtaatggtagtggtattaaaaatatatcgggttactttgtgatgttgtctctagcatatgttaatttttatggcatttaaaagtactaggttactatttgttatgcatgtaattatttaggttactttaataatgttaaaataagtaggttccttttatcattatctttattaattgttccaggttacttttatagttacttctatagtgtccaaaaagtatcaggatattttttttt

SEQ ID NO: 217737 - DNA, 512 bp, Cannabis indica
gatgtagagcattgcacaaaacttaaactcattaaacttggtgttgttcttttccattttactgctaaatttgaaatctcttagtatattgtttcttgatcatgttgtgtgtttatttgtattgtaaactgtatcataaatcattaattgttccgtttcgcgtaacatgtagatttgctagattttttcattaagccaaaactaaaagtttggtgagcacataaaaactcaccccgttataatgccataaattctgtcttacaagagaatgggctaccttaatagaaacttgagaaatccaacaaatagaaaagttgcaaattaaaagagagctaattaacttattaaaactaaaatagagagattccaagccgacttactaacttgtttatttcttaattatttattaattaaatatagggtcttttttatttttacacttcaaacaattctttttttgtatttttacagaattctacataaaattttttattgcaactagctttgcaacc

SEQ ID NO: 217738 - DNA, 694 bp, Cannabis indica
tatatataggctacaaacaatgcactcatatatatttatttacaattataacagtcaaaatttttttaatttactttttgaaataaattaaactaaacataaaagtaaaatcttacttttgctttgaaaagtcaatttctttaataaagatatttacatttttgcttaaaagaagtataaagggcttaaaactgtttttcaggattatgttgacaaaaaagtaaacggcttttacttttggtttataaaaaaaaatttaaaaaaataaggcttttaccttagacatgttgaggtagaaaatcagcggaatgagaagaaagttgacaaaacagttctgtcaaaaataaaatcaaataaaagcacatagaatttagaaaaaacccaaacaagtcaaactctatcaaaggcttctgaccacctgtggtttcggctaacatacgcactatgcgtttaagtgacacataatattgacaaacttattaaaagaatcccaagctatatagcgcatataacgcatattttctatactaaaaaaaaagcctataattcgattgctactctgtaattatcaaacactaatacactacttaaaaaagatgcattatttcctttttaagtttccaaaacagtgtatttaattaaagatgaaggggctagagagggagattcttaagtgagcaattattaatggttt

SEQ ID NO: 217739 - DNA, 775 bp, Cannabis indica
ctggtgaatggaaaaccaaaatcatgtagcataattaatcctttgaatttgaattagtaacatctgattacacattgttaaattttgttaacaaagtttttgataattttgcccttttcaatttgtaatatattgaacttgtcatacattagcttgcatatgattgctatttttctttggaattaaataataatttattttcattattaatttgttaattcccagaaaatttaaggtatgtgattttatgtgttttgaatttagcagtcaaagtttgagtatttttcagtaaagcttctatttttaaaaaaaaaatgaaaaaagaaaattacttgtgatgtgagcaaataaaatagaaagaaaataattaaaaacaggaccagctttggtttgattccttttaactgaagtacttcattgtgagataattaaggagagctttacccaaaatcaatcatataggtaaaagtgtctttgaaaaataaaatacgttttgaaattgactttataacaaaaaaaaaaaaaaataatgtctaactagctcagtataattttcaaagaaccataatttaccataccaaaaaaaaaacaagagttgttatgggcaattaaggtacttagtacacatgatgtcttatattagttaacggtaatctattactcttattaaattaaaataagtgagattcgatattgaattgtattaatagcgatattatatattataagagtgctagacatcagggatggactcacttgtgttaatgtggggggg

SEQ ID NO: 217740 - DNA, 920 bp, Cannabis indica
actttaaataatatatcattatacaatactattacttgtatttacctgtaagtttttttttttattttatctagaaaaaggaatttcagataataaaataatttaatatattattaataaatgtgatgtctttatacatttatgggtgtaaacataattacgtacccttaaaataattaactatattttattaagaggagtggattagagggtgagttggacttttctaaaggaaaggaatggaagaaataaaagttggaaaattatgggtaattgattgagcatttgtatggaactcattggcaagtggggagatgtcaatgaacatgatggtcacaccacttggataacaaaataaataatattaattcaatttaattgttctccaattagtgattcccattttttttatttaaatattttttttgtggttaatattattgttattattgatgattattctacaattatagtcattccactttaatttaatttttaaaaaaaattagagaaccttttgtaacattttttatcatttaaaatgaaattgtgaagtttaaaatttgtcaaagggttttatctccaaaacaaaagggtcaatttatgattaagattgttataatgttagtacttgacgctgaaaagtagctagcaccagtttattagattgacgagatgaataatggatgtaaagcaaaaaaaattagagaaacacacacaatttatagtagtttattccccttgtcgtgataagtaatggagctacgtctacttcgagtttttatttctcacaagaatttacaaaaaatgctaggttttaaactctagtttctaagaaagaaaattagagaaagatgctcgcaccttgtgggtagtttgacctaatgaagctctccttttataggtgaaggagactcaac

SEQ ID NO: 217741 - DNA, 618 bp, Cannabis indica
ttattaaaaaaattaccattttctattctcattctctttcctaacttatctatggatgcaattaataccactaattcctcatatgaagcaaaaacatttatggcataaggaagtgaaaaacacacacacaccactaaagttgagacttgagggagaaagcacacaagaatgaagatacttttgtatgagtttggaaggcaaccttttgtgtatataaataaaccaataattgttaaaggataccaataacgctcaacactaccttctacatgttatataatcattatttatgttgatgaagagtatttttaacaagacactaaaatctcaaatttagtattgtttctcattaaaattaatccatctaagcactaaaagctatcatatatatacaggcccggccctgggcataggcgggctaggcctgtgcctagggcccacctagcccaagggccctattttttttcttttaaaattatacattttttttactgactttgaaaaataccatatttttttaatataagggcccaaaaataaatttttctcctgtgacccactttattttaggaccatatatataaaattatctacaatatcctattattattattatta

SEQ ID NO: 217742 - DNA, 399 bp, Cannabis indica
aaaaacccctcaaaattaaaaaaaaaaatgagatggtttactgctttttaacagtaaagagaaacaaactactgaaaaattaaatagaatttatttcaatctcaacatatatgtgatgtgtaataaaaaaatttaaaggggtttttgggagaaaaggggatgagtttttggggagagagatagagaaatatagtaagtgtttttaatgaaagagatggcctgagaagaaggagtactactatagctatattactctcactcaaagctgagaaaaaccagctttttggagtttttcttttgattaaatttaaattctttttttttttttagaataaaaataaataaattatttaaaataatggtgtgttgtgttttcttttccttcttttatcttctatt

SEQ ID NO: 217743 - DNA, 563 bp, Cannabis indica
aaaaaaagtgaaatataaaatgattctaagtttgaaaactaaattagtaaatatttaaatgactaaatataatttttttttaaataaagattgcaactttcatcaaagcaaatcagctattaaaatagcttccaaatcagtagggacaaccccccttttggaaagacgatctagacataaactagaagaacgagctaaccaattagccgcttggttctcagaccgtttaacaaactaaattgaaatgtgaaacaaagaaatagatcgtataagactaatacaatctaaaataataagaccaagtggagaaagaatttgcttattactattaatagtattaaccagcatgagacaatctgattccatcaccaccgcagaaggaacaaatccttcaaaagaggctccatctccccaggtgcttttaacctaactcaaagcctccttcaaagacattgcttcagccacaagagggtcgagatcactgctgctttttacagcagcaattgcaatacaaacaccatcatgatttcgagctatccgccccaaaccgtggctcttttccc

SEQ ID NO: 217744 - DNA, 1518 bp, Cannabis indica
aagtgatattataaagtacaatacatgtatgttctaatttttttaattaggtaatgtatttttattttttttatttttgaaataggatttgagattttaatttttgagatgttttttttttgttattgcggctacattggtgtgctatttaaatataattatatatacgtattttatatatacaataaaagaatgaatttcattgttatacgtattttatattaatctctctatatataaggattatattagaaaatattttgacaaaatttgagtttgattagagaattaattactttcaaaatatattttatatattatgtcttaatatatattttaaaaatataatgattgtaatagatacattcttaatttgtagttaggagagtgtagttataataaagtgtacaaattattagaagcatatttatataattaagtatttttaaaataaaaagttttagccgttgaaattaagatttaaatatatatattttatatatagatgtgattatatattgatgtaatttttatttttaaatatatataataaaattaattttttatataaaatatctacataatttttatttttaaatatatataataatattataaaattaataaaaaaatattatattaagtaattgagatattccgttaaagttaacgtaaaaaacataaaaaaaatatcgttaaactaagaatttagttatatagccatattttatatagaattgatactaggttattgttaaacgtatatttagtttttatttttgttatgtgtattttaaaaaatttatatatttatataattttgttgttatgcacgatataaccatctctaagaggtttgtttcactttttctattttctaatttttttatatttttagtattcttaatgacaataaaaagtgaagaagactaactttaaaatttttaactattttatactaaaaaattattaataatacgtatataaataaaatctataaaatatataaataaaatgtaaaaaattattaataatatttattgtggtgtatgtaaaatttgactcatgctatattttttttttgaaagaaaaatataattcattaagataaattcgtagttatagaagaactcaaaaatcgtgaacaaacatccgtccaaacacactcccctaaactagtaggagaggttgccaatgtatgggcaacaccattcgctgaacgaggaatggcgctgcaaaaaccactaacaacaataactaataacgcgtaaatatctaataaaatagactgaaaactaaaatttatatgaattttattaatccaaccaattaccattgtagaatcactattaataatgaagatactgaaactatattgatgcgcaagagttaggcctagacgaatggcaagcaacttcgtcacattaacagaaaaattacctaacacaccagatgaccatgccacccaaactatatccgcagtatcccgtatgtaatgaccgctctaataatttggat

SEQ ID NO: 217745 - DNA, 912 bp, Cannabis indica
ggctcaagatttgacatttaatcttacggttgcattccttactgatgtcaatggtgcagaaacttgggctaaaccagctgaaaacatcttgaagattaatgtagatgttgccattttttcaggaactgcaacttatagctttgcaagggtgattagggatgaaactggcgcattggtggaagcttttacctgctgtcggtcaggggtgttgcaacctgaaatggtggaagctttgggtgttaaggaggcactgacttgggttaaacggaaagattggaggaaggttatcattgaaactgatagtcttactgtggtgcaagcgttacgtagctctattcctatggtttcatactttgagagtattatttctgattaaaagatgttgttaaatgacttgcaagatgtgtatgtcaattttattagacattctgtaaatagtgttgctcatttcttagctcgagcattctatttagttgctgatcgtgttatcaggagtagtgatgttactccaaattttaatcatgtaatcactatggagtgtaattaataaagatgataaaaaaaaaagtaataatgcatttttctttttggtacagtatttctctagtaattaatacacgtgttttgtcaatgatattgaatgttgtagaatgtcagaaatctcaaacatataaattcactttcctgaatcctggaaaaaactgcatttactagtctacacacatttttgacaagagggttagtaaccacaagcatctttcgtcaccaatataatatgtattttcaccgttattttttggtgtcgacacgacaacgctacttttgccaatgcaaaattaagctgtcctgcaaaaattacaattaatcgtaaggctttttgctgaccaaaaatataaagttggtaaaaaaact

SEQ ID NO: 217746 - DNA, 513 bp, Cannabis indica
aaaaataaataaaataataaatttgaatgacgttaattattaatacaaatctaattaattggcttattgattaattaattaaggcttttttagcgtatagatttgatatttatcggaataataatgatatatatcaacatccaatttaaaaagggaaatttgagtttctatgcattttttatacctaaattaattatctaaactaatacttataactctttaaaaaataggactacttttacctaaaccccaaaatacccccctcattattctcaaccatttctctctcttcctcctttctctctcaaatcaaacccaccaaaacacactgccgatccacctcccttccacccaaaaccaaccatcgcagaacggcgaatgccacctccgaccgagacgccgacggagagccaaccgaacccacacctccaccacctccgaccctctctgaaatctgagaaaaaaaaaaaaaaaaaaataacttaaaacttttttttttttttttcctgcgat

SEQ ID NO: 217747 - DNA, 640 bp, Cannabis indica
gaattcgaacaataagggaattacaaagtaagttttttttttaaaaaaaaaaaatgaaaagaaaaaaaaaatgtggaatttaaagaaggttttatatgttttttatggtaagtttttttaataaatgttaactgcatatgtaacaaatgcatgcttaatatagataagagtagaggttgaaggtttcaatgctaggattgactcgtgtatgagaaattcattgtgtaccacatagtggaagtaagaacttatggtcattgaacattttctttcaagctgcttgagacaagcagacatgatgtcttcaagatatgttaatatgcaaatggtatagagttctggagtcaaaaaataaaaacaaatgaaaatcacttttaattttctcattgtggtaaaaacacagtatacgaatgactttctgcttcatttgacatctttttatgcagaagagcctcaagaaaaaaataattttaatactgtactgtactgtcaatagccagttactcacactgctgctagacccatggaccgccaaattaatttattttcatgtgacctgtgcttatctgctttcttctaatgatgtgcattttgactgtccttttcttttcttgatatgagaaccatgtttgtatatatc

SEQ ID NO: 217748 - DNA, 1126 bp, Cannabis indica
gttgactatgaaacatgcttattaaaataacatgcagatgcaattaactttaaggatattgacacatcatcataaaaaggaaaaagaaaaacaagttaaacttgaagcagagagaaactatttactccaatttgatactactcagggcaagcaagagtcgaagcagagaaaaaatattaccttgcagcttgaatgacaagactctcatgccaaggcaacagaacttgtttgtaccccttaaatagtttccagcaagagaaaacttgctggctttaagcagtcctctacaaactaaaagcaatatatgcaatcacaatcttattctttttcatggattgataccagatcacaagctaaggaaagtatcagccaaaatattcaaataaaaatctttatttctttctaaagatccctcatctatgacggcataaataacaaactaaaagcattttgtacaaaaggaatacagagctgatagaatgatagaagcctcaccacttcaatatgccactctgcaagttttagtcttctctccaagctaccatcacatattatactacctgtaaagcacatttaaaaaaaaaaaattaaacatagggataatgataaaaactcaaacacactaagacaacaccaaacacctggtggtctataataatagcaaacaatggcacacataatatgggtaatcaaattttgaaattctaattcatctgcaatcttttataattcaattttaaaaattgtttgctataacaattagaagacgaaagactaagatgaatagggagaagtttggtgaaaaaatggcaagacaaattaaatttaaagcaaaaaaataaaaaagagaaactatatatatatatatataaatgaaaatacaaaaataaaagtacgaaaaaagttttaaaagccgtatgtaatgtatatagggtggtggtaagtagagacaaaaggcagagagagaaaggtttcgtccaaaccaaagtaagccttatctctcttcttcttctccctcccaaccaaactaaaccaaacagagctatcgaagctactcactctctcccacactcctcaaatcccttatctctttcctccataccccttttcactttctccaatggag

SEQ ID NO: 217749 - DNA, 662 bp, Cannabis indica
agagagagagagagaaagaaagtgttatgaatttttgttttttatttgttaaggggtaaaattgtaagggaaaaatggtttaaatatattttgcatgatgcaaaatatcctagcatatttttagtgtaccaattatttttaagcatatattgtcaaatttccctttatgattgcatactagggttcaaaatcatatatatttttttttttgacaatgatcatatttttattgttatactaaatatttatataccttttagtatataaataaatttatataatgcattcaaaattattattacttaactacttcttggtatatatttcacccaaagctttatatactttttgtatctagtatatatatgtataactacttgttagtatataattattatattagtatataaattcaactacagactatctacttgttggtgtttatttttttctaaaataactacttttttttttaaagaacatcttgttcaattaactagaaaaatagatgggaatcacaagggaaactccctccccttgatacaaaacagcattatcactagagattctagtattttttaccactccatccgccacaaaattcaaacacctcttaataaaaaagaaaacacaatttaacagtttcttagacatgttcaaaa

SEQ ID NO: 217750 - DNA, 628 bp, Cannabis indica
tcggtctcgattcggtcttggtttgagtctagtttgtgtaaagagtcatgggtctcgagtttcgagttctcggtcaaaggtccgagttcaagtctaggtttaggtcctagtcctggtctcgatccagtttgggtttgtgtctcatttgggtcaagagtcacgagtctcgagttccgagttcttggtcaaaggtccgagttcaggtttgggtttaggtccgggtctgggttcagatcctgatcggtacccaaacccgtaccgagaccgggatcgagacctggacctcgactggaactgggactgagacccaaacaaaaacttagatcgggacttgaacttagaccgttactcgagacccaaaccaaaacctagacccggactgggacctaggacccagacctcgatgggggacctgaacccaagaacatggccccggaacccacacccaaatcaaaacccgtgactcaaacccgaacccggacctaaaccttagacctggacgaaggactcaaacctcaaacccagaactaggaccccaccccataccaaaaataaggactggaacctagacccggacacagactaggactgaactcggaccccaacctaaatttgatcccaaaataag

SEQ ID NO: 217751 - DNA, 613 bp, Cannabis indica
tcgtaatcgatttgtattctgcaaattcaacggttgggatgaatgctcaccagggctgttaaaaacgtttgagtaccttttctgacaccgattaaatgcgcctgatcattaatggacgagaagagaatcgttgcctacaaaaggaaataaatgttaatgatggctgtcataaatacagcccacgcgcttgaagcacgtgccgctaaactgaagagcctcccggaggcaccaaacaagcctcgtttattctccaccatacaaggcttggggggtaaatgttgcccttgattttgcccaaaatacgtgggcctggataaggatgacacgtggagctgagaggaccaacttttaaagtaatcaactaagtcttagacaatagaggagtgcctctgtgaaggtgtctctcggaggagacatgagaaggatctttacgctcccggaggccaaggacatactaaggcgattccgggaggtactgaactctattgaacaatcacctcacatttaatgctgcatgggggaagacgtattgaaaccaccataaacgatatgacggatggtgtaaccccccatttttctagtattacgctatgattaagaaaggcgtagtgat

SEQ ID NO: 217752 - DNA, 614 bp, Cannabis indica
agaaggcactaatattgacaaaatcaattattgtcagaaccatcgaagcgatactcattcaacaacaaaatgttgtgccttcaaaaaaaatataataattaataaagaaaaaaagaatactgtcagaaaaaaaaactaaaaaaaagctaaaaaatatatatattattaattaataatatatccccacttttctctccactaactcataactacccaccactcacctctccactatcagataacatatatagtaaaattgagtttaaaaaagggagagaaagaaatgagacaagggaggaaaaaaggaaaaaaaagacaactctgctaaaattgatagagaaatagtacgacatattcacatcttcaaagaggttgtaagtattagggttgttccctattttcttttcatctttctaaacttttttcttttcttctccagtaaatcttcttattttctctttggtccactttgatctatgctttttaagccataaaagatcttcaaaagtgagatatagccaaatgaaaaataagagaatttaatgtctctctgccgttatgctgtctaatttttcatagatttttatgcttctctttgatttcctagacttcag

SEQ ID NO: 217753 - DNA, 777 bp, Cannabis indica
ggtaataagtatacgtaccatatttgaagggtttgtgatcatgtccatcatggtgtcatagattccaaaataaaccattttagagtgggcaaagagttttgaagggtagagaggagattttgaagtttgaagttgtaagcttgggagtcaatgttttgttggtcaacgcataaacgttgtaacatgtgtgaacttggcataaagctgcctattgacatttgcaatggtaagcaccccactggtgggagacctgccaccccaaactttcttgcacctctatcatataaactctatacatgcatcaacaacaaaaacaaattaaacatatagttacatcacttttcgttctacctgaaaaacttaaagagtcaaaactagtactgttcaaatagtttcaagaccatgaacttgcgattaatatgatgtattgtactggtttagtataaaatagtatattaggctgaataaaaaattaattaattatttgctaaatataaattataaatttcttcaaatattgcatatggagagactaaactataaattattgtcacgcaaaataaggtgataattataatctagttgttaggtttttttttctttctcacttccctatcttactgaaaagaccgaccgcttgtacaaaggtttgataataactttaaaaaataaaaagaataattaagattttctccaaactttaacatgtatcaaattatcaaattatgcctttaaactaaaaaatctctgaactattgaaattgttgaatttaagga

SEQ ID NO: 217754 - DNA, 696 bp, Cannabis indica
gcggtcattacaaaatatatttcccaataaagagaagatcggaatagagccatagagagttggtgggagaaggcccacttaaccacattatgagcaacgtagttacaaacctactaacatttaaaaaagatacaacaaataaaagagggagatgacttgatacaaaatgagacatagttctcaagagcccaaatgtacatcttcccattgaacgcattgattacttgtctcgagtcactctctacaataacatacttatatcctaaagccatagccatcaaaacaaccaagcagcagaccgcaacttctctacataatgcatctgagaagtccaaccgagtcgtgttaacccgaaccactttgtccaaataatttcttgctacaacatcaatgcacatagcctctaaacctactcttacatatgtttatatatatgtttaattatgtttatttgtgaccttattaatttttttttttgagggttaaaaatagtcaaaagtaatataaaaataaaatataagatattgtattattattaatataattcgatatcaaattttatttataaataaaaaatcattaacaattgattaagatgtgatgactaatagcaatcttcaattaattttttaaaataaaattaattaatatttaagtaagtatttgttccatgacacgtaattttcattaaagaag

SEQ ID NO: 217755 - DNA, 1234 bp, Cannabis indica
gattttagtaactcagttagctatggaagaagatgcacgtattaatgcaatgggatttttgggtgctggcctcaatatctattatgtatggatcacctcttgctgccatggtatgatatgatcttatatattatatatattctctttcaaattaaataataataataataataatgatctatatataatacaggtatatatgatcagtacccctgagaattgagatatttgctatgtatttaccaattctaattttgtattttttggaaggcttgcaatctagttctttaagtttttttttttttgaaataattatgataataaaaaaactaaatcaatcttaattttttttttttaaaaaaaaaaaaatcatttaaaaacagaaaaagctgtaaaaaaggatttcgctactttatagttcaaggacttaattgctaaaaataatttctcaaaccataaaattggcaaacagagtaaaacttaaaagaagattatacaaattaagaaactttaatataatgtgaaagccttgcttaattgatggcctttctaattgtataatcaggtaagaatacgtaatgaatattttatttctggcattatttattatattaagcttctattttttttaacattacgttttggacaagtttataataattattgtaaagctatattattaattatttaaggaatagtcatcctatttttttttttttattatcgatttaagtggtcatcattataatgatattaattaactcacatgttttatgaagtattgttcaagtaggaaaatatttattttttgttttagttttttctttaaataataaaattatcggataatcttaaaattcggtccactgcttgcaataattaacaatttattaattataatgaataatttagattttagttattgattgagcaaaactaaaattgaaagcttaatatttttatggaccaaaatagtataatgaaccaaaaaaattataaagtcagaatttgatgaaacttagtttaattgcaaattaaggtctcgtttggaacgccgtattagatcgtattgtattgtattgtattatattgaattatattttatgcaatatttttatgtaaaactatatgtggtaataacttttatggacacctaaatatataatattttagtataaattaaagtttaacatagtattatataaaaatatgatatataatccaattcaatata

SEQ ID NO: 217756 - DNA, 654 bp, Cannabis indica
taatataggaatagtattcaacttgtagtagtaaagtataatgattatataaattatacatgcatgtattatatatctgtaacttagtggaagcaaagtgaagaacaagaaaaaaaaaaaaaaatacaaagtttattactcatatttatctaaatttataacaatatatattatttaacagattttataaaaatttataaaatttgtaatttcttaaaaaaaaaaaagtataatttgtaatttcttaaaaatagtgtaattactatattacaaaattacattaaaaatatggatatattaataaatttttttattaaaaaattaataaacaattgtttttttggtatataattaaaaaaaaatattaaaggtatataattaaaaaaaaaacttcgggagaagagagtttacaatgtagcaatagtctaaacggttgtttgacttcataacttaaaaaattattttcggttttacatcttttaaaaattaataaggtgtgtttggccaattttttaaaaaatagttttctcaaaattgagttacaaaaaatctaaaaaaaataaaaaataatcaaaatattattttctatttttagtaaacaattttaattttttttttgttctctaacatattttgtttttacatttttcgctc

SEQ ID NO: 217757 - DNA, 689 bp, Cannabis indica
tccaccatctttaggaactcttaagatcttcgattgtaataacctcaaagctctaaacatcaaaggctttcaacacctcacctcccttgttcgatttaagcttctttattggaaaagctagagtgcttaccaacaacaaaactgcctcagagtgttaattatttgtcaatagaaggatgtagtctgttaattccgaggtgcaaggaggaacaggggaagattggcccaaaattcaacacataccatacatactaaccgaagaaacagagcattataagagagacttggaaaacaggtaactatccatcttatttcagtaattttacttggattttctgagtttttattttgaagaatactaatcaatagatttgcaggagtggatggcgtatttatagtgagcatatcagtgatgttgatgactattaagattgagcatcaaagaattcagattggataaatccaagtctcgcaacaacattttgggttatatataagtaagccttcttaatttctattgttgttatgacttttgacaaagatttgctgttgtgaacattatttcttggaattatgtttcttaatattctcataatatgatgttttgggtgagaaattatttcatccaaatgtaactatatatacgaatttgttcggtttcgagattctcttggatcttcaaaatcagt

SEQ ID NO: 217758 - DNA, 633 bp, Cannabis indica
tttatctgtctaattggaaatagtggttttagaagaaataagaaaaactgtactccctaccttttgttgaagctattaaatctgttacatagtcacattcacttagtcataatcatatccccatttaacaaaactcaactacttagtctattttagtataaaatccaccttgagtaatcactaatcacagtcagaaagagacacttcatttccacataatagatgacattaataaaggtgagatggatcaggagagtctcaatctagatctgatctcaaaaagaaaaggaaaaaaatgaaaaaaaattcaatttggacatgctaggccatatgataacaaacatgaatcgtggcatgttcttctttgagtctaacagactgcacaatgatgtaacatgctaccattctttggcaactattttcagcagagtagtttttttttttttattttttagctttaaactttcagtaaagtacttggtatgacttaaatacacctagtaattaccagtaattcgaaattttatgctttttcaaattcactaattccgtaacactatattaaaaatgaaagacaagagaaacccaaagcataatattcaaatactgacgatgtataggataaaaaaaaaa

SEQ ID NO: 217759 - DNA, 635 bp, Cannabis indica
gacccagaatcaaacccaaacatagacctgcacacagacccaacctctaactcagactaggatcagaaccctagacttacacttgaaagaaaaccaagactcagatcgagatcgaaacctaggactcagacccgaaccttgacccagaccaagggccctaacccacacccagatcccgatctagacctagaccgagatccgaacccaaacccaaactcggaccaagactcgaaccctaacccaaactcaaactcggaatcacaactagaactggaactggactaggtttaggaccaggaccaggaccaggacaaggaccaagacttgaacccaaacccaaataaatcccaaactgagacccaaacccaaactgggactaggatcgaacctgaacctagatcgggacacaaacacggacacagactaggtttaggaccaggaccagaaccaggacctgtacccagaatcaggatagggacctgggaacaaaactatgaccgtgacctaagacccgaccccaaacacggacttgaacctaggaccgagctcgttacctggcacccgaaatggaactagactaggacccgagatttggatccgaatatggacccaggccttggacctaacctgtagtc

SEQ ID NO: 217760 - DNA, 1436 bp, Cannabis indica
tctacaatgacatcaaccatctcatccgcatcaacaatgttagcctcgacaggttcattcggctccccatggtaaatccacctctcataactgctttcaaaaccctttgtaaagatatgtgcatccacaatattcaaaggatgcagtctagtattcttacatttaacacaaggaaaaaaaatcttctatcaaaatctttgtgttcagacgcgagtcccataaagacttggagaccttcccagtacgctgtatccttacgatttctcatggttatccaagtcttatcgattgtcatctacaaaaaaaattacattgaataaattataataaaatttgtttgtgtgacaaaatttttataattttatgtacatgttgaactaagggtaattttatgtcattttatcaaatatttttaacttttattttaacttattttgataattctcataaaaatatttaaataattaaacttataatatatttatttgttttaataatacttaaatattaaataatttaaataatttacttcttaaatattaaatttaaaacctaattacttaatcatttattaataaataataatattaaactctttttaattaaattacttagtttttaaattaattacatcaaagttttatatgtttataaataaatagatattaaattatttaaattattttcatttaactaaatattaaattatttatctaattattattaattctttttattgtaagaatttattcaattacttaattttaaaattaatttcattaaattttttaaataattactaatttaaataataatctattttaaatatagcttgtcaattattttttttttttgaaaaaaatttactaacttattataatttatcaaattaacataatttttgttattatctcaaaaatttaacgaaatttcgatgcataacatttatattttaacctatccaaaatttttaaaacctattctaaacactccaaaaatttctaaatacatcacagttttatcaaaattacatattttcagaatatatcaaacaatttattaacattgaaaaaagaaaaaaaattaaaaaatttgtttttaaaaaattgcacaatttttttatggaaaatattaatatatatatattataaacattatatattttgcaaattaatttttcttacattcaagcataaaaaaaaaactaacagtgggtccaatatgtatatggcacactgtagctacaacaatttaaacaaaaaagaatatacaaatataaatgcatatataaataaacaacaatatatattatataaaatattattacctaaagatgacagtgggtaatggtttggagaactctcaggcggtggagaggaggcggcagcagtggtggtcggacgatagagagggtcgaacgatgaataatgtgtgac

SEQ ID NO: 217761 - DNA, 570 bp, Cannabis indica
gtcatatatatatatatatatatataaatctcaccataacccaatagagataatggcttaatggttttgatctcggtaggaaaagggatttcatgaaccatcaccatgttatttgccactacatccataattgagaaggaaaaaaaaacaatttaatgatgacaatattaatgttcgcaaatatttattacaaaattgtaaatgctacacaaaaagacaaaagtagaatggtaagagatttcttactgatatatatatatatatatatatatatttatatatatttaattattagagtggtggtgttgtggggattgatctacaaatctcagagtattgaaaatattgaaaaaacggaacaagagaagagcaaactacgtactgagagcagataaaaaagagtgtgggcggtcttatttaagtgagtctcttgtaagtaaccttttggggcagctctttcatttagttggtagtacttgaccaaaacttaataacccctatcctccagtctagcccaaagtgtttaggtagaagaagtaaataaagtacactagtggcttgtaatttctc

SEQ ID NO: 217762 - DNA, 819 bp, Cannabis indica
agggccagagaagcttttatcaaatcgatagaagcatttggtgacagtatgaccttgtttatggcataattgacatgtaacctttgtgttgttattggaaccacgaccacctgtactggagggacgatatccaccacgagaaggcctatagttaccagtaaagggagggtacagtgggggaggcagtaaaccatatccattgtatagaggtgtagggtaagaaccaaaaacagggaaattaggacgaggagtgaaagacatacctcttccttgatttgatacatttgggggaatgtagtagggactaggcctgggtgtggtgaatttggattgagctgcaagatttgcttcaggctttgctatgtcaagttcagaatcaaccatttcattgcgaacttcttgtgccattaataaagactcaacttcagcaacagagtattcatcctttcgtgttgagagagaggtgatgaaaacagagtattccctgggcaagccattgaaaatagcttcgatgtggtcttgagtcaagagaacatgaccgattgaggcaagagagtccacaagatgcttaatcttgagaagataatcgttcagggagttggtgagtttggttttgcgaagctgagttcggaattgactgatcttggcacggttttgagctgagtaatactcttcaagattggaccaaatagcagcagcggagttacaaccaaccattcgagtgaggatcttttcagacattgatgaaagtaaccaggacaccaggagactatcttgaatgtcatattcgacaaactcatcggagacgatattggcttg

SEQ ID NO: 217763 - DNA, 690 bp, Cannabis indica
actaagcaatgttgatgcttaatggcaacatattccccaattattaccggattatgttatgcaaataaattagaaagaaaatctaaatttgcataactttcttcaatttaaactttaaaaagattgataactaatagtaaaaagattatttaattgcaataactaaataaaatatagttgggaggtgaacatggcacagcataaagaaatagaacattttctttgaatcacattttaaagattaaatccatatcatctttaccaaacttaataaataaacttatgaccagatcccaagtaaaaagctgtaataaatttattctaagaatctgatatgggaaatatataaatatattaataaataattataataataatttaatgggcccacaagaggtcaaactaaataaataatacaacacagcttttaacagaagaaagaaaggaatatgagatgacaatgcttaaggaaacaagaaaaattaaagagagagaaacgacagcttttcccctcagtataacaagttggttgtccccttgattgtcgtttagcccaaaatgaaaactctagtagaaaacatttcaacatatatatatggaagatatatgatatttcagatctttcttctctttcattctactagtgaatgtgcgatgatgatgatgatgatggtgatactataactagga

SEQ ID NO: 217764 - DNA, 917 bp, Cannabis indica
gtaaataaaaaaaataaaaaaaatttagataataataaattcctagttattctcgccagtgtttgaaaaagggacagtctccaggcttgtcattaatgacttaataattaaaaaaaattataaataaaaaacttaagaaagaacatgtaataaaaaattgggttgtataatatactcgttaatgcatctttcctttttaaatttttgaaatcattttgactaaattaaatattaatttcattaaaaatttatataaaaatataattctgacaataaaataaataaagtaatttttttttatatattcaaaccctaaaactcagctatctcctcaaaccctattcatcttctttcctaaaaaaaacatttcagtcgctgtctctttctctctatttatctttcgtatgaagcctggaccaagcaaactgcgtacatccgacgaccaaaggaccaagttctagtcattggtatctctccctctctatctctttctgtcgtacgtgcgagcctttcccagccaaacggcctcattccggcaaccacacacagacccacacgaatccagaaacaagatccatgccccccaaaatgtctaggtccgagccattatctctcgtcagaactgtcgtgcctccttgcagcgattaatggtagtcgttgtttgctcgtctatttgatggtagtcctcttcatcaaaggcaaatgcagcggacgtgagaagcggtcggtgctcgcctgagtcaagatttgatttttctttttgattttattttctagttttatatttttggttctagttatcatctcttcaatttgtaacaaattgatgttaatgttctgggacacctattttagttatttaatttaatgtttatacactattggttctcttattggtttattgttatggatttaat

SEQ ID NO: 217765 - DNA, 1117 bp, Cannabis indica
tttttttttttgaaaatttacaagcaatcttatatagccgcaacaaacctgatcgtgaaaaaaaaaaaacgcttgcccatgccatttccgactggaaatcgtcaaaacctacaccaccaccatgataacccatggttcatggttcgcgatcagtcctcacgtgcaccgttgctagctctgacagaggtgttttcgccatttatggaagaggcggactacgaatcgagcttccctgcaactcgaaacctctagcccaaaattctccttctcaccctctctttcgatcaagtaatgaatgactaagttgttgcagaaagattgcatatggaaaccaaacgcccgcatcaaaattaatgaaaatcttgacgcctcacttataataaaaccctaaaaacccttgaaaaatgccccctctctctttctcttctctttctctctttctttgtcccgcctactgtcatcacctcagaaagtatgtttttttttttttttttttctttccttttttctctttctcagtgtcttttagcccaaccatcgtcggccctagcaccgacgatgcttcattaccatttttttttatttgcaagtgattcttttattttgtttaaaaaataaataaattatgttaatatcattatggactactaatatcattcaaaaaatccattctagattgtttgtatcaaactctctttctctacatgtatcaaccattctctactgaaaataaataaaaaaaattacctatggctttagttatttaggtaataacgaaaggcataggtgtcatggttctgcatatatggccccttatggcttcgattatcagctaaataatcgaatccatataaggccttttacttttggttttttttaaccctttttgctttgtttgaaacggttttggttgcaaattttgtaaaaggaaagacgatgaaattacattgtatactcactttacttgttttaatttttaccttctatttatattctttaaaatatactcatttttatagattgatgtcctcattagattctttaggttaatgtaaattatatgctaaacttaagtagagagagagcatattaggcaacctactcaaaaaaagcgggt

SEQ ID NO: 217766 - DNA, 646 bp, Cannabis indica
gtttagttgtctttattgatattgtcaatacttggatgagttataatggtttgaacagtttcttataatgataatgttgtagcttacttttagctaaatctatttagtcactattgtatattgttacctaccactactaatttttaactccactataaaatttaataaataaaaaaagtgaattgttaaaatatattgtttatactaatattagtataattaaatattaaattatttataaaatgtatcgagtaccaccggtgttagaatttataaaacactacaaaaaatatataaatcacagatccaaacatatttctaaaagtgctttaatatagaaaaccctaaatcataaatctataaagcctttgctaaattaaagaagaagaagatgataaaatatgagcggaagcactaacctgaagccattgttggagattgcagagaaggttttgatcttccaagaatacactattttctagagtattttttctaatggggaaggagagaatacagaacccttgtgtttcttggggaccactacctattatagactcatcttagaatgattttggggtatttataatttggcccctcaacaaattataaattaacttatggtatttacacattaattccatgacac

SEQ ID NO: 217767 - DNA, 635 bp, Cannabis indica
ctttatgaaacttgagcaagtttatttttgactattaaatagaaaaacaagccattttgaacaagagtgctaattacaacattttagtcaaccttcacattcaaaattatatgtgggaatatttttttttcattttttttcatagcgatattcgttatagttacagtatcattcttgtaaatttttgaaaaatttacgtaatagttacagtgccaaaatagagttcatgatatttcaatttaccacacatgttcaaaaatttacaaacgtaatttttcgtaatgtaaactattcgaaaattttctaaaatttacatggatgatgttctaagcataatgaacacagccgtgaaaaaaaaaattagaaaaaaaaatatttcggcatgtgtttttgagcgtggagattgactaagaaattgtaataggagattggcggtagcactcctttgaacgatttccctaaagtaaaatttaacctctatttaaattatttaattaatcttttttgtaacaaatagaaatgaattgattaattggtaattgaaaccaaactaatggactttggggagttctttttacaccccacaaaatgataagtacaccccattattaagaaaaatataaacttaaataatt

SEQ ID NO: 217768 - DNA, 542 bp, Cannabis indica
ttttcaaaatctagtaaacaattatataggaatcaatacataccactaattctcatttcctttaagtaaacatgccataagcgaataaatttattgctaacgcaaccctaattattacaaccaattaccagctaagagttcaaaaaaccaaaaaaaacaaaaaaaaagtacatgatttatttttattagaacaaaaagttattatttgcaactaaaaaataatgttcattagaatagattaaaaacagctgataaattactttatatactatttttactttttttaaaaaaaaattatatgatttggattattccaatatagttgtttcgttagttgctatatgagttactatgtagatttttataaaaaatacaaaaaaaaatgaaaataaaaaaactgttttaaaaatgtaaaagtaaaaaaaaaaaactacctaagattatatattagatggtggcattttggatgagtctaattgctctatatataaatttatatatatatatatatatatatatatatatatgtcaacacatgagtc

SEQ ID NO: 217769 - DNA, 503 bp, Cannabis indica
cacgaacaagtgtacaaccagtggcaaacttaggattcaaagtgagagagggcgtattttttaatgggattagaacccttgtcctctaacctatatgctaagtagcttaactattacactaaagttaatattatacttataaatattatcttttattacaaatacatgttgtaactaattaaattgcatatatattttttttccgattttttttcaagggaatgactgctccgccttggttatacgtgggttcgcccctgtgttcaacaattatgaaacttttattaatcataatcaaaaaacaatacaaggagttttctcaattttatttatttttattggagtattgttgaacacacacataacattgtatgttaactaataatgttagtataattgtgtagaaaataattatacatctgtaaaataaaaatttgtaatttaaattatcattgacataaacattactatagtgtttaacaataccatggtctatgagatga

SEQ ID NO: 217770 - DNA, 591 bp, Cannabis indica
gataccgaataacatactaagcacctcttttagaaattctcttcatttattgatttttacagtgtgtgctgccgtgccgacatggtctgagtagtttcaatgtttttttaatcaattaatatcgagctttctttatccaattattaataaactaacacaatatactattgggggatgttatgactcatctacgtagctcataaaaaacgaaatattattatgataactatgtatatatattaatctgtaatagaaagccaccacgagcagtttcgaacaagtgtatattggttcttcttatgccagcaaagctaggcagagaaaattagtatattgtattaactatagggtgaccacatgatcataatttattgatatgtaagggctaaattaaaccagacaaagatataactaaattaggtggaaacaattggtatagggagagctttcaaaggctgagccttgtgtaaagtgagaccaaacttttcatccatgttcaaggctgtggtttaactccatcttccaacttccaatcaaaagatggatcagagccctaacatcaaatgaaccattctaatggccaaaggcaaa

SEQ ID NO: 217771 - DNA, 533 bp, Cannabis indica
acgtaacaacaaccaaccaaccaacatatgctcggtaatttgtatcaatccggtggaaacaagaaaagcaatataggcatcatattttgtatgtatatttatgtatatacataaatatatatatatatatacatacatatataagaaaaacaaaacgacacgccaaaaaagaaaacggagaaaaatcccattacagctcacaataacatctgtctgtaacaaatttacaataaaaaaaaaaatagagcctattcgagcaaataggatgatagggataacaatcggaataatatcagatccaacaacatcaaatcgtcccctcaaccagattcaattaacccggaattctccaaaggcagaccacgccaaaaaggaaaaaacctaaaataggacaagaagaaaattaaaagaaaagtaaacgcaaccttctgccctaatcagatctacaacgcaggtgtctcagttagaacatccgattgcgatttccggaaaagcagacaattgaaaaaagaaagcgagagagagagaagaac

SEQ ID NO: 217772 - DNA, 595 bp, Cannabis indica
tttttattattttaaaagtttataagagtatctccaatattagtattctttagtatcaaaaacttttaggtcacttcaaaatataaattgcagcataaatatttaatatttcatattttatatacttaaatattttatttttattttttaaggcaaaaatactcaatattataattctcttacatttattactacaatatacgttaactcataaatatggacacgtgaaaagttaaaatacattacattttttttattttaaaatttaatattcttagtatcataaactaaatgctactattgttttttttaaaaaaaaactaagaacaattctcataataatttttacatatattacactagttcactcagttatggtaatttagttttgtatctctcttatttttatttttttttgtaaacaagtagcatttagtttttgatattaaagatattaaattttaaaattaaataaataaatataatgcatctgaacgctccacgtgtccatatttatgagttaacggaaatgaaataataataaaaaaaataaaaactaagaatatgtaaaggatattatagtatgatattttgt

SEQ ID NO: 217773 - DNA, 827 bp, Cannabis indica
aacaatacacattataaaattatattttgagtcaaatataacaaaatttttaattgaaaatggctaagccatttaatgaatctaaatggcatgtgtaacttctaatggaaaaatataacaagaaatgttagcaacaagatgtacacgattttaataaatgatataacatgagccaaatattactccgtaagatttgctgtctctccctacggtttttttaaaaggcaaaagtgtttcatgcaactttgtttatgctacaaagttttagacaagcatttcccaattaatcaagaacaaatattcaaatagatactagaaaaacaaaatacaacaaactaataaattcaaatttcagttttctttataaaattcttatatgcatacaacacgcaaatgggtgctttcttcaactttttcctttcggttccttttttttttacggtgtttaattaaaacttttgtaaaaagaaaacaagtaaaactttacctctaaaaaaaaaaaaaaaaataacatgattattactgttagattagacaagagtaactctatggggatactaatacaaaaaaaattctaccaaccaaccaagtcccactttcctcctaaaagttttaaaataataaattaaaaatgtatataaactagtactatatacacaaagccaaaaatttaatattagtaaacaaaaatagataataaatataattaattgtagacacgatcaccccacttttaagtcttaattaaaacccaccccaataacacaacaaacaaatgtagcaccgacttcttcttcttcttctttcattatataaacactttttct

SEQ ID NO: 217774 - DNA, 729 bp, Cannabis indica
atgttgtttacgtgttattttttggacaccgtaaaaatgtaaaaaagcattctttgaacgtgaaaatgtaattattttacaaaaaaaaaatggtgtcttatgtaattattccttaaaaaatataaatttaaaaagaatataaggaattatttcacaaatatacaaaaacaacaaaaaaattataaaaatacggttttacgaaattttaaatacttttacaatttttttgattttatttacagaagatacggtcttttgatgttgtactctttttaatttattgttgatttttagttattagtatgttattttttgttttttttatgttatttggatattattttcatgttacttttatgtagttttttttttatttttttttgttttcgtttgtttctatagaaaatcgtaaaaatgtaaaaaaaattctttaaacataaaaatgcaatttttttacaaaaaaaatagtgccttatgtaattatcactacaataaatatgaacttacggattatataaaagaatttactcaacatattaatttttctttcaattttatatttatactttaatttttatttttactatttataattttttacttaattatttttctactgctttctattttaacaaaacttcttttttctattattatattcctacaattaatatggccaaaagtgaaagtcaacatatatataattaaaaaaataatttagaaaaaaaa

SEQ ID NO: 217775 - DNA, 1048 bp, Cannabis indica
ctctaattattaactaataattggagggcaaactacttatattgattatatcaatagactacaagtaagaattttgtaaatataattctatattgtcaaagagtgtaattccatatttatagtggagtaataatagaattaataaacagattattctattgatgagatcgaaaataatcaagtgtttattaaagcttcaaaatataggtgcatggtccctaagtcacctttatacaacactgtacacggggagattttatttgatgagtaaatttgagtgtgaattaattcctatgagaaataaattcttaaggggaaagtagtaatttatagaaattattattttaaataattacgacaattatgaactgtgtaattaaatagtatttaactagttaagtataatattattcataaataatgtaaaagaaatatatattattttaatgaaaataatatttattttaattcttatgaaataaaagattaatgataattaattaattattatttattggcagaatagacaataaatcttatttatggtaaaattaaaaaaattaattttgaaccttataatatggcccaacctacacgtgtagacctaacccacatgcgtagggtgacatataaaagctcatattaattttgtttgattattttattgttaaaataattcaaattaaattaattaattatctttcaattattgaattaaatatattatttaataatctatttattaaaaatagaataataaaataaaaagatttatataatttttgttcatcagttatataatatttatattttgaattcgaattataaatttaaattaaattaaatattatatttatttaattggataaataaagattttttttaacctttatatatatatatatatgatatatatatatgatatatatatatcagtataacaaacaccttataaaaaagattacaagtgatcaggtttgagagaaaataggattgaacttttcactcttactctctctcacctactcgcacgcctctctctctctct

SEQ ID NO: 217776 - DNA, 2192 bp, Cannabis indica
ttgacgaattttggcaaggatagtctcgaacttttccaacatgtaggcttcagcgtggtccttttctctatggctttggtcaatttctcttcgaaggaacgtgccttcttctcagcttttcttactgacttagtagcctcttactgaatatgggccttatagtccatatactttcccaggtaattagtgtcccacctcttttcctcaacagataacttggcctcctacttttcacgagtcatgtaagcgccgggaacaatctgagcttcggcccgttcaaccctgttgggtaaagcctcattcttggaggctaaagattgatccttggcacggagttggcttaactctatggtcatgttcaccgcttcccaagtggccctcaccaggaacaacaccatctgaaaaaagaggacaagagttaattcccagggttatcccgagagaaaataaaaatttaagacttacccctgagtcctattgtttgacggctatcgatagggtgtaagggtcagtactactgctcaccgcccacttctctgaagtaagttcactgacactacgaccaatgctatctctcatttttgccgtgtagggagcaattgctctacccaccacaggttccagatgttgattcaccatcagaaggtccaacacaaagcctgggggtaacgattggcgagtcccctcagtaatggcaactgtcttaatggaagacaaccaagttgccctcttctgtagagtaacgtattcttgctcatggctcttcctcaagacggtggccttcataagacattcatggtcgacgagtggcataatgggaaaggagaatcccagtgaaggagccttaactttgttgatggcttgaggtagatgagcggcggtcggtcaggcctgtggctaagctgggggtagagtagattgagaagcgactattggcgagtggcaagggtacacagactgccatttatgtggggggaacgcttgcccggatggtgagtgtgagtggtgttgctgttcattttgtggatgttgctggtgttgtggttgctattgtggttgctgttgttgttgcaatggttgttgctatagtttttcatattgttgtcgaggttgtgacagagactgattagaccatagcgtatcatccatcctaagttcctagatagaggatcttgcttttttcacaataaggtcgggagaggaccccaactcccttcgtttcgatttcaccagagtcctttttgatacaacctcttacatctgatacaacctccgggactaaattttctacagggggaactactaaattttctaaattttcaccagattcctccccctccgggactaaaggtctctaggaactgttagacctccttcccccactacctgacgaagaaaggtcgagtgtggtacgcccaatcatggcggggggaggaatttcccagacatctgatgacaaggaagtcgatgggggaggtggtttatgagtccaagaagcccttgttttgattttcctcttccctttctcatgggacttcatatcctcgtaaaccacagccttgattcgggtgttccccgattttaacattttggattatggggtgtctgcacaacaaggcaacgatgtaagcaaggaaccaaagctgtcaccagccacacgatcataataaacaatagcaacgataaggaaagaaactaatgtgaaagcttgtgcatgggcacgaccatttagtgaagtgctatagggttttccccgagaaaaagctaaaatactcgtacaacccgtgaagcttccatattcttcaaattcaagcaagaacatggttgttagagggtcaacactgaaaatatttgatgaagtcccaaggttattagggccctaattattagatctactttctctatgtactcctccatgaggaatttaaagttgtttctacctaaaaaatatttgttaaattctccctagttccgctgagacatgcaactcaggctggggtcgaaaaaatacagaagggcttgttacctcttcctgatgtactagcctatggtacctcagcgcaggcggtaacaaatctctctgagatttcctcttccttagccaaacgggttagggttgcgtgacacccattcggagtatctatactcttaaacttagtgatcagagccgacctatgtgaacctcaatcatc

SEQ ID NO: 217777 - DNA, 803 bp, Cannabis indica
aattttttaaaaattactctttaattacttttttttaaaatttttttcctcacatttatttttatgtttaatttttaatactttatttttgattttcatttttcattaattttttctaactcatgtatattattattttttttttatttttttctaaaaaaatttcatataatttttttattttaattttttttgtcataatttttaaaatataatttaattttgtttgataggtatattttttaagaatataaattaaaagaaaagaattaaaaatacttagtacaattaaagatataaattttatataaaataaaaattattaaaatagagtgaaagttttttggagtgtaaataaaattttccataaaatttcctctcaatgtattgtccagattccaattttagcctcaaggccgttgagcttctcagaactccacatcacactcttccacacccataacaaaatatcactaccaaaaaaaaaagataataaataaataaagccaccggcacccactcttacagtccacactccacagtcctaccaagtttccaacaaatctcatcaagccacgtaaatgatcggtcagatcaccaaatgtagcattctcattactccctacatcgcagtccttcacatctcccataccacgaaccaataataacgcgacatatcataaaaaaatcctcgtgggtccaaaatattttcaatcgttcctccacgcgccaccacaaattgaaccctggaaaacccataaggcggaaccccactctcccacgtaattctcctgctctgtagg

SEQ ID NO: 217778 - DNA, 648 bp, Cannabis indica
atttacactatgtttggcaagaatgaaagaatgttggaaggatggagagtttaaagagaagagagagggctgatggatggaatggattgtttactttttttttttcgttttttggatagttgtttggtgttagagaattttagtgctataaatatagtgtaaatgtattttttagtttatgtttataaaaataaatgaactttaatagtagtgaatgattggatgagataagaatgtatttaaaatttaaatgtaatttttgttttggggggtgaaaattcaaagggaaatttcactatttgcccttaataatatacctcatatcaaaatttatacctttccttaatttgtacaaatttagtccattaattacatgaacttcccattttaccctttttttttaaaaaaaaaaaataaaatacctaaaatctgaaatgatgtttctctctcttccctcttccctctctctcgtgcaccactctctctctctaagaaaaaaactagaaaaatttatacaaaaaactttcccctatccgtcccactctcttgtcactctctttatttgctgttgaatggttgttttctcggtgggtgttggtggaaaaccgaagcacaatacaacatcactcaagaatcttacaccattat

SEQ ID NO: 217779 - DNA, 929 bp, Cannabis indica
agaaaaataaagtctggaatgtagttgtttggggaccaactccaaacaagagatagacttttctattattgattgacaaggaaagagagttatttgattgtggattcgagagaaaaactcttcacacctattttttaagtgttattaagtaaaaaaaaaattgctctagaagttaagctggctagatactggtacaaagcaataccaattggctagccttaagagcaaatattcaagagtgcgctgataggtgtatgtaggaggtgtgaatgctatttttaccagctatagtatgctcaaaatgaagctttgtggaactatagtgtatatatgcaggggcagacccacatagaggcgatgtggggtagtcgcatttgcctcttgaaaaaaaaattgggaaaaaatgtatatgtattttagctagttacaacatatatttctaaataaaagtgatatttgtaaatataatacaagctttggtatactggtataaagctattccatgcacatagtggaggtcatgggttctaatcccaataaaagtatgtatactttagtatttgaattttattttttgaacctctacctataaaacttgtatttagtgtcttaattattgaacctaatatttttattgttatttttttttactttatactatatttaataataaaatacacatttgtatcaatttttaacatgttatacaatgtaaaaaaaaaaaaacgcccccctcacaaaaaaaaaaaagaagtgtcgccccctcccctcaacttggatttggatccgccacaatatacatgatgttgaaaaagttgtacaaaatataaaaagaaacatttaaaataatacaataaattaaatagatacaaaaaaagttagacgtcgaggataaagatgggctctgcaaaattatatgctgagttgag

SEQ ID NO: 217780 - DNA, 527 bp, Cannabis indica
acattcatttgataattgtacaggttttttaattgtataagttggctagtttttagatgttggcaaagtggcctgtctgtttatattcattttgttgagcttgtgcatgtttctttcttcgaaattcatgtcaattgttttcatcaatttgataaatgtacaatatgtgctcaggtattcccagcaccagctgatagagagaaagtgaaatcttgtttgtcagaactgggggatatgagcagcacattcaagcaagttttgtcagctggcttggagcaacttgtggggactgttacaccacgaattcgtccattgttggacaatgttgcaactatcagttacgagctatcagaagcagagtatgctgataatgaggttaatgatccatgggtccagaggcttctccatgcagtggagactaatgtggcatggctgcagcctctaatgacttccaacaactatgattcatttgttcatctggtcattgacttcatcgtaaagaggctggaagtgattatgatgcagaa

SEQ ID NO: 217781 - DNA, 739 bp, Cannabis indica
ttattattattattattacgttatgacaaaaatcaagagcacatggctggcttcaccctctgaaagctaagtctcctataataacactttgattaatatgtgtggtccatcttttattaattagaaactactggcaatgctgtggaccattcatgatcgatcgattcatatctctgtcaacttaattggtcaaatatattttgatatacatattatatatatcttccaaggatctacatatatatatatatacaccaacttatatataaaacataagataatgctttgaggtattaaaaatatttatgtaggattatttttttttaggctttttcatttttatatttaaataattttattttgtattttacggaattgtacatagaaatttctactgtaactagcactgcaatttaaattacaacaaaaaatcgtatagaaactcctatttcaattagcgctgcaaccactttagaaaccaaaaaccgtaaatttgaaaagaaaaaaaaagttaaaaaaatattatatggagtaattctccttatttttttttaagtgttattgtttcattttatgtccatatttaatagtatttctttttttattatttttttttataattatttgtcaaaatactcatatctacaaaaaaaattattttttaggttggatatgatctgagagaagagatatatgtataatttttttttctattgttctttgtacttaatttgtacca

SEQ ID NO: 217782 - DNA, 750 bp, Cannabis indica
acttgtaattttttatttctattctaaaagtgaagtaaacacataaataaaaatacatataaatcttatattgattcctaacagcaaagtaaaaaatttattctgatttcaattcttaattagaataaggataaatttgattgttagtcaatcttatacttaatcaatctgattgcatgcaagtaaatacaccattaataaagcttgtgtgcaggcctcatatgctatctaccaaaatattttagtaacatcaaccccttttataatagtatacatcaaagaaatcaactactactaaaaaaaaaaaaaaaaaaattgaataaaagctgaaattttatttaaaataattcttgcataattacatcactaatgttattcggaacagtgtcaactgaataactacgctcatcatataaccatgagactcgggcaaaaccatgagccacacggttagcagaacgtttaacaaagcgtaaacaaacatgattcaaatctgaaataattctcttgcattcagtaatgcagcagctgaaaggagaattcatgttcaccgagctacggacatcttgaacagttagaggctatccgattctacagtgacatgagaaagcttggactccttatccaacttagcacctctttacaccaaaagcctcagctagggccagattgacacacttattccaagatctcgttctcgcctgcaagcatgacccctgaatcacggagacctaaccataaccaaacttg

SEQ ID NO: 217783 - DNA, 526 bp, Cannabis indica
atatataagttttttattgttacatatattttgttaatttctcttaattaataaaaaagagctttttacaaaaaaaaaaaataaacacctcacatgagtatactgtctatataaacatattaatattgcaatataatatgtatataaaattatattattgatgattatttttagtgcaaattcagtatataatatatccaaaattaatgtgtacatatttacatataatctatttttttttagaaaatatatttatgttatttattaataacagtacataagaaaagaaatactcgtgtctatataatattcttaaattcgtgatatgtataggtattaatttataatttaatatgtatataaagaaatgaaaataagtaaaatataaacaataaaattaaaaaaaaaatagaagaggaagaaaaacaaaaagaataagtaagttagataacttggttagactaagaatataggcatggacgtatgtgtatatacacatatagacacaactgttgaattgattagg

SEQ ID NO: 217784 - DNA, 606 bp, Cannabis indica
gtataatttaatattttgatcattttttgagtgtgagaatttttttatacaaatatatcatatattaaaataattaaatcaactcaatttgcttaacatatttatatataattttattagatatctaaataatcataaaatgaaaagttatagaaaaaataaaattaagaaataaataatttagagatatgattatatataaaatttaagagatagttttacaatataaattataagatagagcaagatatagcttactattaaaaagtaaaaattaaggatataaacacttaattatttttcaaacatatataaatatgtaattgtatttaattacaataaaaataaataataaagtagattaaaaataatgtggccaaaaacaaaacatacataatatataaagtttgtgaaagaaagagagatagagatatgaaaaatgagaagtttgagaatttataccagaatattaaatatatcacttatagaattacataatatagatatagaatcatacattatatatacacacaattatttaaaagataaacaaaaaaagaaaaaaaaaataagaaagaaaattgtaaacgtaatagaaatttaatc

SEQ ID NO: 217785 - DNA, 592 bp, Cannabis indica
tctccgtaatttaaaaatcacgcttatttatcaacttatagcaaatttaaaattttatgttgaactaaattagttggattatcatcccactcattacctggttaactcataatattaaatataaaccctaattattaattattaagcttattggggatattacaaagagcaactatgacaatttggagtattaagatgaaggggctactaggagctcaatatgaatgagatattgttgagaaaggtcataaggagcatgacgatgttgctctttcctaagctcaacgagatagcgttaggggattcaagaaagtacggacaagtaaagctctctacctcatctatcaagtagtgaatgaagatgcgttttgagaagatcttaaatgcaacgacgaccaaagaagcgtgggagaagcttcaagcttgcaacaaaggagcggagcaagtgaaaaagatccgtcttcaagctctcagatgtgattttgaaactttatttatggaagatactgaatcgatctctaattatttcactagagcattatcaattgtcaatcagtaaagaaaaaatggtgaagaaattagtgaagtaaag

SEQ ID NO: 217786 - DNA, 514 bp, Cannabis indica
tctctctctctctctctctctctctctctctctctctctctctctctccctagaaccagctaaggttggggtttttcttctgcttcattcaaggatttctagcagaattctagtgtgttgattcaaggtaaccctttagcaccttcttttttggattttctatgctttaaataggttaaaatgcatgaatttgtttatggaggttttgaggttgttcaagttacttggtttagtattctgaagttgtattgtagctatttgtgttgaattgagctagatttagaggttatttggatgtttgagtacggtttgagtttatgaactcgagctttgctctttaatggttgattttgattctagatatgttgggttgttttattgcttggattatgtttattatataattaggtgatctggaagttattgtgaggtttgggtttgaattgaagtgtgtaagtggttttgggtgttttctgcactaaaccgatcgaacggctcagtgggacctgtagga

SEQ ID NO: 217787 - DNA, 636 bp, Cannabis indica
cgcgtgatcacggtttttcaaattttctataatttttttaatacctcctttgtaaacatattttgtaaaattgcttcttataaaacatggtacccattgcatttatttttatttttctgtaatttcttagtaatgatgaaaatacgttcgtcacattctccctctatatcttctaaggcgataaatcataagagaaaaatgaaggaaacaatatttgaggatagtggaagtggggaatcggatgtttcaaggaagaggaagaagaatgtaaatggatctaattaagaaaggagaattgtagatcgagcttcgaaaatgatgaagcaagtggtggaggaagatgaagctgagtatgttaatagtgatgaagagattgtagttccaagtagcattaaggtatttataagtttgttttttttaaatttttttggtttatttttatttggatatgtgtattgatggttcgattgtttaggatttgctatgtgtttgaattcttgtaagcgtttaggttaaggtagtgttatttttttataatttttttggtttatttttgtttgggattcggtgttataattagtaataccagaagttgaaaacctagactccaaattcttttttatatatataacagca

SEQ ID NO: 217788 - DNA, 610 bp, Cannabis indica
cggactatagcatgcatgccttaaatttactacattcttaatatattatatatatatatatatatatatatatatattcaaaataattttatgtgtaatacattaaagttttttcaactaatattaatattgattcgattaagacctattaatattttaaccacgtaattttttttgttttattctttattatttttttttaagttttatttgtttataatcggtttttaaaaaatttagtaaacaatatatattaaaaaaaaattgtaggtagaaataataatctcacatatatttatataaaaaaaaatagttaagtattgcatgttacaagtaataacaaattttaagatgagttcaaaaaaaaaggtaacaaatttaaatactattatatatctttgagtaatttaaaatacgaaacatcaatattcaaacaacataaatcattctagtgcttgttttgagtataattaatttactgattactataaattaggtcacaaaattattaattaattactagctcctacgtaccacacaaaatatgacccttagaagatttaagaaaagaagagataaatagttttgccaaattaataaaagctttaat

SEQ ID NO: 217789 - DNA, 622 bp, Cannabis indica
tttaatattattttgacttttctaatcacatcatacacacattacccatgtatataatattttatttacatatatataatatgtttctttggaaattaattaatataccttacctattttccagccgaactttttcagttgcaaaattcaaacataggtagcataagtacgtattactgtgtaaaattttaacatttttttttaaataaaaattgagataatataggtatagttataggtaaaggtatatagctagaaggcaataacatttataatgtatgtaactaataacggttaaatacttaccaacatgtagtaaaaagtattcaaaatttacaaatatatcaggaaaggtatatctttaatcaaaagaaagttagttgaataatttaatgtagaatctaattctgtatgaaatcaataaactttggaagcaattctttgcctacaaattaatttaagaatacatttatgaggacgaatacttttatgtggcgtttggtaacatttttttaatcagttttttgtttttaaaattagaaaagtgaaaatattttttaaaatcatgttctataaaactgtttttgtttttcaatttttttaattggagaatcaaaatttt

SEQ ID NO: 217790 - DNA, 531 bp, Cannabis indica
aattttggttacgaattaggatattccattggttgctatgtgtatttttgtaaaaataataaaaaaaaaaaccgctttagtgtaaaaatacaaaatttcctttaattttttgtttagatatttatagaaagtctgtatatatatatatacatatattgtttgtgttttgtgttatttgtatcaattataattacatattaaattagttatatctttttattatctttctccttattttttcattttttttagtatttgagttttacaaaagttattaattagatcatctattttattaaataataaaatagatcttgtattttttaaaatagtacaaataagaccatgagtttgtgattttttttttaatataaccaacttgaagataatttttagcacgaatagatgcagaaaatataatcgattttgtcataacacctctagatagaattattattagttttattttattcagaatcttatttatattattttagaaaatacactgtctatttaattatttaacaaaat

SEQ ID NO: 217791 - DNA, 514 bp, Cannabis indica
ttagggcataaacccaacacttgtatcttcctcctgggcaaaaatagggaaatccccaaaaaatttctctataagaagtctaggagtgcacaaggttgagatacgtaaacttgggcacctatagtggtcttgggacatgcattgggtgcccagtgggggggggggggaatcgtatgaaatcagtctctttgatgctcaatctctttttggtgaaaagtgctccacgaatttctatttcgtcaaatttgcacgggtgttgcccattgaaacaaaattagtgcccaggttggaatgtcaacttaggtgcccatagtgtggatgggcttcttcgggatgtcattgatgaaaatcatgtcctagcattattccttgatggatttgaggaatcagggtccgatgtgccccaaaacctaaatcataactatggtgtgcctagatcaactagatgtcaacttgggcgcccattagggattcttggtgactgggtaccgtttctcatagacttatctccaaa

SEQ ID NO: 217792 - DNA, 595 bp, Cannabis indica
ttatattaatcttttattactatatctcttctctcaatctctaactgtcacattttttttattattattttctaaactcttcatgattgttattattcattctctttttcttagatagcatcaaataatctttttatattcacaaataattacataatttgtaggtacatgtttaatttcataatcaaatattatatagcaatctctctctcctaccgagtcctagtataatctatagcagaaaaacctttcgacaaataattaaatgaattggaacaattatcttagtttcagaaaactttcaagtttttaatttcaccacttttttcttttatttaacaaactcgttgtatctttaaattttctttaaatgatatatttgaagtattatattaatgatagatttcatatgattttttaattgttattttaattaaatattaaatttaaattttaattttgttattattaatttttaattgtttcctaataaattataaaaaaataaaatgttactatgttagatttatgcagtgtagtgatattttaattttgttcttttaatatgttattaaataatattactaaaaaattg

SEQ ID NO: 217793 - DNA, 738 bp, Cannabis indica
ctactgtagaaaagtctttgcaacagccacctccatcattttctcaatgattcaagaagcagcaagatgatggtcaattttggagatttcttgatgttctgcagcagctccacatcaacataccattagtggaagctttggagaaaatgctaacttatgtaaagtttgtagaaggatattttgataaagaaaatgaggcttggcgagtttgaaacagttgctttgacagagggttgtagtgctatgttgaaaagtgaaattccacctaaattgaaagatttgggcaactttacaatgccaatttctattgggggtcgagatgttggaagagctctttgagatttgggagctagtattaatctcatgtctatgtctatttttaggaagttgggaattggagaagcaagaccaaccaccgtcactttgcaattagcggatcgttccatggctcatccggagggaaaaattgaagatgtgtttgtacaagttgataagtttatttttccggccgattatcattattcttgattatgaagtcgataaagatgttcctattattttggggtcggccattccttgcgaccaggagaaccttgattgatgttcgaaatgggcaactcactatgagagtgaatgatcaaaaagtcactttaatgtgttcaatgctatgagatttctggatgagattgaagaatgctccgtttcgagtgtaattgattctattgtggcgtgaaaaag

SEQ ID NO: 217794 - DNA, 681 bp, Cannabis indica
ggcctcagtaatgattcatattacatcccataaagttttgtttattgatcaatggcttcagtagttgttgtcattgatgtttcgggagtgacatttgatgaatttgattaaaactttctgtttcccttaaatgtaaaggtctaacccattagttttttgtttattatatttaaaacttttcttttattgatttatgtatacgatgatgagcttttactttggactattatttaaaatattataaatgatacatattaattatatatattgtttacaatgagataataatatgaagcaataaaatttaaatttggtataggtttatgtctaatattttaagtaaattaattgaaacaatatgtcactaaagtgattttttaaatattagaatggttgtgtgtttgtaattgatgcatatgttgactaacccaaagataagtgaatattttgctaaattttaaacatatcatgtggcaataaatgtgtgacaattataagatattttgtgtgagcaatacgttagtccaaagattgacctatgtttggcacagttttatgtcaatatttgattgctacaccaagagtactgcttatagttaatattattgtccaaagacttgatattaatgtgtgtttagtatcttcagatgggattaatcaatttttgaatttattgtttaa

SEQ ID NO: 217795 - DNA, 605 bp, Cannabis indica
agctacttgtattgtaaggctacacttcaagaagcaactcgagttagagaactccttcaccaatttgaatgtgcttcgggacagaaagttaatttggggaaatcatctatcttttatagtacgaacacgatgaatcatgttcgggaggatattactacgctacttcaaatgcctcaagcagatgatagaagcatgtatctgggtctccctagtactatggggcgaaataaatcagctgtgctgggttttctcaaggatcgggttaggaaaaagcttcaaagttgggattcaaaagtcttgtctcgagccggtaaagaagtgttaatcaaatcagtagctcaagctctacctagctatgccatgaatgtatttttgcttcctttggagatcagtagagatattgagagcacaatggctagattttggtggaaaagtgcttcaaaggaaaataaagggattccttggatgtcttgggaacgtatgtgccacaacaagaataatggaggtcttggtttccgtaatctccgtgattttaatttagcgctcttgggaaagcaagggtggcgtttcatcacaagacccgattcacttgtctctcggatttt

SEQ ID NO: 217796 - DNA, 769 bp, Cannabis indica
aaagaagtttttcttaaatttttacactttacagaaatttagtattttcgttaagttttgacacattatttcgtttaaatattgatgtatctttgttaattaactttgcctcataaattttgacaactatcaaatcgcactcttcaaaataaaaatgagaaacatttaacattttttagtaaatcttaaaaaattaatttagatcttaaaaaaaaaaaatcattttaaatgattaagaaaattcaaaaaagaaattaaaattttaacggggaattaccctatatactttttttttttttacttttttcaaatttacggtttgggtttctaaagtgatttttgtggtgatttctatgtgagttgctatataattttttgttgtgatttaggttgctatgttagttgtaataggggtttttttgtagaattctgtaaaaatgtaaaaaaaactgttttgaagtgtaaaaataaaaaagatccaattttaaaacgaattaagcgattaattttttttttggataattacagtaaaatccccttaacatttgcaattgttacacgtatgaccctaataaaaaaagtgacggtaaaagtactttatcttacgattttgttgtagtcatacccttttttagccattaagtgtcaattaaactcgttaagtgcaaactcataaatacgtggtgacatatttctttagcttatttaatatgcagtcttataatatgtcgtcacgtatgtatttctgagttaacacttgatgaccaaa

SEQ ID NO: 217797 - DNA, 808 bp, Cannabis indica
taaatctaggaatataaatttaaattttccttgttttacttgccttgacgagttgtgttagtaaagctaaaataaaatcgtgaggaggctgaaaacgaagagagacgccattctcaataggcaaagcatgttgattctcctccgcagaaacgaccccaaacttttgcacaatcccattctcaactccccattcttcactcgcctccacacatccgccgctgcctcgccactcccacccaccaccaccggcctctatggcttcgatcacttgaaaacccccaaaggcttccaccgtttcctcgatgatgctatccaaaggtataaatatatacacttaattcctctcactttagtttacaccaacgctaatacatccccttattcgttttttctttttgttgagaaggtccggagagctggttacgtacattgcaacaatgccttcttcaacggaaatatcaaagccatggacgaaatttcagacacagtatgtttaatttcagctcaagattcgattctataatgttttttttttttgtgtcgaatttgattgtatttttttttttttttagtatgtgttttgtaggtttgttccgttgttgactccgcagagctttgtagacacactcatccggacaggtttatttattttcatattcagtttggccttaaaatttctcattttttgaattgctcacatttttctatttcgacctagggaaatttgttgagggtaagcaaacaatgcgtggatgaaaattaacgagtatctacatgtagaggtgaaccgtgtgaaactggctttaac

SEQ ID NO: 217798 - DNA, 737 bp, Cannabis indica
aatactatttaaatttatgcgtaattgagaggtattaaaatatagttgttgtcataaaagtttggctagattcagaagagaaacaaaagctaaaaatacttagcagtcatacatcaaaggtaaaatatcgcctacaataaatgttatattgcctagggtacttttaacaaattgtttttatttatataaaaattgctaaaaagtattagtgtttactactctcctcgatatcacaccgttttttgtgtagttaagtattgaatctcatgtaatttataaattttttttaaagaatatcgttaaccaatcgtaaaatgcacttataaaagatactaaacactactagtgttcgataaaaatactttatttctattgacttgattgtttcaagaactcatttaacttcctgtcactcatttaagtttatgaaagtccaatggtaacaaccaataaagaacattgtgactttcattttcaaaataatagtgagaactctatacacaatgaccaatattgctcatttttttgaaaaaaaaaaaaaaacagcaaaaaaaaaaactatattgctcatttgtcatacactatactcgttgtataatacaaaagacaaagaagttgtgatggtaatactaatggtatgctcatgcaaagtaggaaaaatgttgtaaacattttttattgtaaacgacaggataccatggactaaatatttaactgttgcaaaaaaaaaaaaaaaa

SEQ ID NO: 217799 - DNA, 621 bp, Cannabis indica
tttcaggaaatgcttgaagagtatcaagagttgcttggagggcttagtgttggagatttctttccttcaatggagtttgttctcaccttcacgggaatgaaatcgagattgatccgtactcataagagttttgataaactttttgatcggattatatatagctgaacatcgtgaccccaagagagtcaaagaagatcatagtaaagatattaagtcttattgctttgatgtacccaagcgaaatgatgaaaagtaaattttataatagtaactactggaatattgtgagaaattatttattattatctcgtattctttgtaaaataatttgggttcttctctagatctaataatcattaaattaattatatagatacttaatttccctcataaaaagatatgacacttcaagtagtactaagcactgttagtatagatggttaattctgtaatttcagttaattcttctaactaatttctgttatttgtttgtaactgtttcttttattttggttgtttcttgtgtatataaacagaccttcagtgaataaagaactgtgttctgggtttactctctctcttgcatactctgcttttttctgtttcttcttttcttcatac

SEQ ID NO: 217800 - DNA, 994 bp, Cannabis indica
gtaaaaaaaaatgtgaccatgattgttacaataaaaatgtaagcattgaatagtctttcatacgtgtgtatatattttatatctcgtagatttaattacttgttagttttttttttttgttttttttggaacataattacttgttagtttggttgagaaaatacttattttaaagtttgcccaaaccctaaagcgattttaactagtgacatttgttacatatcttataattcatcgatgccaatagtaaattgttgtgtcaagaaattaattctctacataaacctagatgctatgaaattgtctaagtgtaataacactttgatgaaattcataattaatgttacttagaaattttacggtatatccccttgagtcttgagtgtaccaatgagctattgttttatattcacatagttttaatgttaattttttaatataatattacacaatgtaattatttaagaatattttgtaaatttttaaaaaatttagaataatttaatgtgctgaaaacaagattcaaacagatccttgcatgcatatttttcattttattttatgagcatataaattagattgattagattctattttctatattataaattattttaaattttttaaaattttgtaacatgtattttttttggctaattagtaattttttttcctgaattttgacatgtactaaatcgtgccccctgaacttgtttggccgttaaaaattccccccgaactattgagattgttaaatttaaagacttttatctaatttaattcaattttactgtttcagcgattctttatgtactaaaccatgctccccagactttgatatctaccaaatcatgcccctcaaactttgatatatactaaatcatgtcccttgaattttcatctatgttagaattttttactaaaattagacaaaaatccttaaatttaacaatctcaatagtttggggggaatttttaacagccaaaaaagttc

SEQ ID NO: 217801 - DNA, 825 bp, Cannabis indica
catcgtcagctccaccgtcacatctcttcaatgatcttggatccaatagagcatatgaacgagacctcttgacattccttcttcaacattcttatggctgcattattcattgtcgtctcatattggtggatctttcactcttccaccgttctcctccttctttcagacaaatcattctcatccagcgatctttggtattttgtagtctatctgctgctctttcagtggctccaatgacttttcctcacttttcccccagtttttgcaactttgatcctcctcacgctaatctggatcgaccttccatttatgaatgcaatccatatcaccttggaattagagacaactcgaatttccttattgttccctttcaattgactggtgaagacaactttcagtcctggaagcgtgctgctaccatcaacctggctaccaagaacaagactcccttcattgaaggtactctctctcgtcctcccattagtcatacttatcgatatgcttgggatcaatgtaatagtatggttataacttggatattacaatctattttacgagaaattactgccagtgttatgtttaaggattctactatggctatatggaatagtctccacgatcagctcaatcaaagcaatgaccctcaaatctttacgctcaaaatgtctcagagtcgcatcaaacagggcgccaattctgtcaacacttattttactcaattgccatctctttgggatgaacttaattagttcaaaccttttacacactgttcctgtggtttcacttgtggtgctatgcaacggattcaggattactacacttgtg

SEQ ID NO: 217802 - DNA, 1128 bp, Cannabis indica
ttaatttttgacgataataatacataagtcataattctagaaattctgtaagtacctaactattaagcattaagtaaattgccacatggcaatccctaattagtctatgttattaaatttttatttttttaaaaaaataattcaaatataccgataaaaaaaagacacatggataataacttaacatttaatggttaggtacctccagagttccagaaatataacttaggtattattaccgccaaaaattaaacttaagtatttatttgcaatcgaaagttaaacttaaatatttatatcgcaaattactgttcattattatgttatgttgtaagcaaaatactaattgaaatactacaaattgattaaattattctatttacattagggtgctaatgaaataaatataatttttttttaaaaaaaaaaaaagaaaagaactttccactcttgtttttttagtgtagcgtaatagaattttacaatcaattaatagctgaaaagcttaaagatcttgggtttgaacccattacctctccctttttcccatctttccctcaccactaagctagccttagtagcttagaaaaggccttctaattacttcaaagtattttaatcattctagtgttaacaaacattatatttaaaactcttttttacattctctaatttgaatgcttgacatgaaattaattaaaataatttatattttaatatagttgaaactgattattgaaatatacatgtcaagttaagcaaaaaaaaacatacatgtcaaacaatactgtagaaaagggcacaaaacagaatatgttaaattattattattattctgatttcaaatgagctcttaaaacaatgtattctttactttctggtgcagtatgtaatgtattttatggtgctgcttaataagcacaccaagttgtttctttagtagacaagtaatctatccatatactctattacaagtactctatagttgaaaactgtggagctttagtgtccttaactggtaagcatgactatgagaagggtggagcctagtctctctctctctgtgtagtttatataaatatatatatatatatatatatattatatttatacatatataatctcagc

SEQ ID NO: 217803 - DNA, 619 bp, Cannabis indica
gaagaagaagaaagaaagagaaaagaacaataaatatagaggagtgatgccgtcaacttcatattacaacctcttagtcaatcttaatacttaaaaatacatgtcggaatattatttttaaatttttttacatgggagggttcgttatgcttacaacatcatccctgtaaatttttagaattttgaataatttacagtgccgaaaatacatttgaagttttttgaacgtgcgtggtaaactgaaatagaactttgttttcggtactgtaaactattcgaaaattttcaaaatttacagggatgatactataactataacgaataccgctataaaaaaattaaaaaaaaatattttagcatgtgatttcgaacgtggaggttgactatgagatattaattagcatttctcataaatatatggctaatttaaatttttatttccgaactttaacatgtattaaattatactttctaaatttttagccattaaaaattctcctgaacaattgagattcactacaaaaaagatcacttttagtgacgatttagtcacaatattaatttttttgtgactaaatatgatttttagtcacaacaaaaagttacttgtgactaaaat

SEQ ID NO: 217804 - DNA, 707 bp, Cannabis indica
atatatatagcactgcaccgtatactgaatactagaaacgaaaaatgtaccttttcatgttgcatttacaatgcatggtttttcgtttcttccaattacatctgtttcagtattattattagcaaaaatcgactcttgaacaacaaccgtttatctctgatcttcataaataacatcttttctctagtacttgcgaatcaaaattgtgtttatgacaccatcatgtctagtgaacattggcttttgcattcagcattcacagtctgctgatggaaaaatactaaggtctcatgttgttatgctctatctaagattttgactacaaaaatttcactttacaagctagtatgttctctcctcaccaaaactaaaatacagcattacaggctacgctaagtttcattggttgtgaacattgaatcagtcacctacaaataataagctcctgcagatcaaaaatgagttcgtatttatttcaaggttaatagtgacataagtacagcataaatttaataatttatagttataagtagccaatattagtaaaattgtaatttttgtccaatttcatcaacatgaattctgctaatgcctcacatttacaatcaagccaaatgagtctatactggacgaaaattacggtttcagtaacattagttacttgtatttttaaaaaaatcatttcagttacaaactcaaaactttga

SEQ ID NO: 217805 - DNA, 621 bp, Cannabis indica
aattcacttcatgaatctgatttcaacacaccaccaaacagcggactctctttgtctttgatgtgtgagtgcttacttcttcccaaagtaaggcttgaacaattcttctcccaaagacatttctcttgttcaatcaagttgttcaaccgatcctaagaggaataagagaacaataacataaatattaaaatctagctgaacaactaggtttgcacaaaaaaaacactctcctcacaaaagaaaatatgaaaaaatgaaaactaaaagtgctaaatcgattggctgctctcttggttctatctatagaacatagcaaccctagagataggtacaaatttgatttcacaactgtacaacactttcctaaaaaaatcatgatttgcagcatcagaatcggactctgcagcaacagagtaggaccagaaaggaaactttccaaaaaaaagagcacgatcataaatatggacttaaaacctaccaaatacattatgtttgatctaatcttatcaaaacacagccaaaatcattaaagagaaagaggaaattcaaagttaccaaacatagacaactttccataagagaattcattctcttacaagaagttctctaaacaaaaaggag

SEQ ID NO: 217806 - DNA, 612 bp, Cannabis indica
attaaaacaacaatggaacaactaaaaaacaacagtgaaataatagtataaaacttacaaagtattttgtaaaaaaaattctgtcccactataaaaaagtaaaaaagttgaaaattttagtatgtggggtaaaaactcaaaaaattataagaaacctaaggaaaaaaaacaatgacatatttttcaaaagaatttgtagttcagtgtattttttttgtgtgtgaaaaaatacatattttatggatttttatacaatttgtgcaaaaatagggcctctttcaaaaaatatttatgagaagaaaattaaaaaatattagtaactctaaggaggtaatcagttgccctagtattttaactgttttttttttttttttaatttgtcatataattgttttgttttttttttttttttttagtaaaaaaacctattttttttttttgtaaactgtcaagaaaaataataaaaatgaaaattctctaatttctttttctttaaactaaaaaacacatgtaattttattatggctcaaaaaaaactgttagggaaagcctataattgaatttagaagatttatatagtcaaatatcattgttgatcgtatctttatatat

SEQ ID NO: 217807 - DNA, 565 bp, Cannabis indica
tttttttttaatttttattttcatatgtataagccttacttgcatatgaataattaatatatatatatatatatatatataattaattagtggagcctacttttctctctattgctttttagtggctcatatatatcaaataattgtactaatgaacaagaagtttttcttatatgatatgaatagtacttattgtgctttaataattatgtcatcaaaagaaagttgtatatgttcttaaattttaattatatggtgaaataatgtaataattaagatctaaatatattcaaccactataaaaaaaaaattaaaagtataaaaattatgactaattataaattattatttctacattataattaaaagtttcatcattaaaagtattagtcacaaaaatcacaattaatttattgtgatttagtcacaatacttattgtgactaaaactaaattagtaacaacttgtatctaaatactatgtgttttagtcacaaataatttttttttataactaaaagtcacatttagtaacaaaaaattatgttgtgactgattttttttta

SEQ ID NO: 217808 - DNA, 334 bp, Cannabis indica
gaaccctaacccctgaacacagacccttaggtggcatttggttagaggtaatgaaatggaatggaaaagaaataattttcattccgtttttaatttcagctatcaactaaggcatgtttacttaaagggaatgggaatgaatggtatggtattaattcccatacaattgtttactaaattttggaaagggaaaaactagtgggacccacacaaattagggagaaaacaaaggaaaaggtctccccccatttttatagggaatacctttccctttcctagcttaatttattctaattttaagattattaattaaaagacaaatatgccctttaaa

SEQ ID NO: 217809 - DNA, 1303 bp, Cannabis indica
ataatgggattgttctcaagaaaatcaaacaacaaatttaaacttggattagtagacacctatcatttgttgggagagttcatttgatacactcgatgttacttggtcttagaaattattggatgagtatattcatcctcccccaaagtgagactaaagagattgaaagactatgcagaatggtaacaagagcaaaatctatgtggcttcttgggagaaagtttgtctcccaaaggcttatgggggcctcgggttcaaggatagtgttagatggaaccatgctaatatagcaaagtacatatgggctataaacaccaagagagacttgctttaggtcaaatggatcaatgcaatctacttgaagaacgtccccttttggtcttatgagctcaaacaagacactagttggtattggcctaaaaatttgcaatttgagaaaaatatttttgctagatgaaattgcagcagcaggaggcaccaacaagttcaaaataggggagctctacagcagtgaacttgctcaaattcaggtaacctatcacagagttatctagaacactttaattcttcctaaacatcgtttatgctatggcaagtagtgaataatcaacttcttaccgaagataaaatgttaaggttttgaattttttagaagttctagactgttcggtttgtggcttggccttcgaattacatgaacatttattctttgtgtgtgagttttcccaaagagtgtttgataagatttttgattagttgggttataggacttggcctatgaattataagggctggaatgacttgttgacttgaaaaccaaaggtcttttgcattttatacaggttactatcttagttgcctccatcaacaacatttggctgaacaagaacaaatgtgtgtgtgagagttgctccagctctatagatcttactgtttcgaacataaggaaagcttgtttgcataggtcacaaattgtaactaatagctagcttgtgttactggctgtttgtagcttttagctctaattgggtttgttcaattaatgaagttttttttccttcttgatcaaaaaagtttccatgtcatatgtatcaaaacttattttttttctatcatatttgtaaatagccctttattatatatgtgaatttcttctagtttttacgaattgccttagtcaagagatatggctcaatgttttattgaaagtgatcaatcttcttcaatcagagctatatcaccaatctcaagagattaaaaaaagaaaaagaaaaaaacaaattaatgaaattacaaattagaa

SEQ ID NO: 217810 - DNA, 560 bp, Cannabis indica
tgctacagataggaatcaaagggatagaaatctgaatggatttagtcattatattaactgccatcaatgtaaggatttcttaatctcttatgtgtttattttactgttttaggaaattcatatttaggatgttagattatagaattataatcaatatgcatgttagtaaatctaaattcaggtaaaataagttccaacaactggcctcaaagctatggtaataatttattttcatgaaatatgaatttaaaatgatgtttttgttgatttggatgtgctcatgttagtttatgtgttatttgatgattgaatgtgaattatgaaatttttctacgaaaagtattttttttcattctgcaaatatcttatttgtaatccttgtgaaattttaagcaattaagtttctatgaatcttaattctgatatggttaggttcagcttagttgtattatttatgttcttcaagttgttcgttggaagctaactaatggttctggtggatatttacatcttgggaacatggtagttcaattaagtgagagcgctgatcgtagagattg

SEQ ID NO: 217811 - DNA, 654 bp, Cannabis indica
aagttattaattatttgaagtagcttgggttcaggatctactgcttccatcaattgcattggacaagataagtgttctcatttttcacttaaaatgactattgttgctatttaccaatagtactgtttaattttaattatagtgaaaatttgttataaactttgtaataatgtttatttatttattataatttttatttattttcttactaatgtattttttttgtttatctgcagttaaaacattatttctctttaagggagtcaatcttcacaacaagtacacgattctcacatttatactgctaagatttccctcctgcctagagttgttccttgctgggatttttcgtttcctttgtagagagtactgttgctgaagttgttgtcatttttcgttcattctttttctgagggtgtctctgattggggttatttttttttagatctattaggttcttgttatctatctttctggatgtatatcttctacatgtaatgcgaaattgtaatagcgcaacacatgagttagatatgcactacgaatggaaaacgaggtttcttggttagaagaaattcctcattatttaataaccagtgtattgtttgtctctcaagaataaattagttattatattaaaaaaattaaaaaaaa

SEQ ID NO: 217812 - DNA, 632 bp, Cannabis indica
accaccaagaaaagaagggttcgattggccgaaggtggcggggatcgattggccgatggtgcgggccgagatagtggcggtgctagaaaaaggagttgtctgttgcaccgtcggggtcgtggtggtggtggagaatggcagaagcagattataaggtagggaagccgagaaggatggcgccgacgccatgctggaactgatgggagctgtggagggtggtctgatcattccactaatggggagatcggcaacgtgaccggagccgaaaacaccagaagtgggaggatcggacagaggaagaggagctccgatcgtgtccgacgagagaggagcagtcggcggtagggagggcggagcttcgacgtcgacgatgatggtttcggcggaggagagttcgtgactggagatgggtggtaggttcggagacagaagcggcggccatggagttcctagtccttggagccatggaagaagatgaagaagaaagatggatggggttttatgcaactgataccatgataaaatgaagaaactctttattgtttctctgctagggcacgacagaaatgccaatatgtggaaaatgtaattaggtttctacattgagaatatatataggcaaatgaagacag

SEQ ID NO: 217813 - DNA, 563 bp, Cannabis indica
ctctctctctctctctctctctctctctctctctctctctctctctctactctcctactacctacctacctacctacctacctacctcctcctcctcctcctctctctctctctctctctctctctctctctctctctctctctctctctctctctgtctcttcaaaaatcataagcctccattaacaccgcccgtcgtctttctctcggtggttttgaaccaaccgctctccgaccctcttctctcggtgcgcatcctgccaccatcttcatctccataaatgaggggtctctttctctctcattcctcatatattttgaaaatgttggtttgatttctctttttttttttgcaggttcggggtggtggcatcgttgttgcagcacacaccaagccatggcggagccgtcgcacaagtaaggtattttcgatctctcttctctctcaatgcaatagatctggtatttttttcaggttcgaggtggtggtacgcggctgggttctgggatgatgagtttggggtggtgtattgaaccgtgtcagatctgaaaccatcttcgat

SEQ ID NO: 217814 - DNA, 857 bp, Cannabis indica
aaaacaaaatgagagtgagaaccaagcatttacattgacaatttgttatatagtgataaaccaatttctgtgtaagattaatattaattattagttggttatttacatattattctaaataactataatgtaattatcataaaaaaatgaattaaaatactctccggatgcaaataaaacaaacagaaatataccaaaacgatccttaaataaaataaaaaattagtttgtttacataattgattattatacatcctactattataatccaattccgtttggatgtagtataacagagaaagtatatactggcagggaatctttcatttctaaaagcaaaacatgattgttgatgtttgtaagtgctcactttccaaccatgttgtagttttaacttacatggacttttctttggtgatatcgattaggaactacttatgcaaaatattcaatggatcgaaatgaatcaaaattttggtggacatattcaacttaagattaaagtgcacattagatttgatcgatatacatctaatattaaccccccaaactttaatcaaacctactaaattagggtagatttctatcgctaaactacatatatataatgatccatgaaaatactaccagttgaattctggaaagtgtctagttttttttttttttaattttttttttctttctagaaagaaaaaatgtgaaaaaaaagtatgataaggagaagaattggggagatcgaatcaaattcatattggtgaaagaaatgaataacaaaaggttagtgtagtactttcatgtatgattttgttaatagaataatatattttacaccaataattgtgtctatcacatttcgt

SEQ ID NO: 217815 - DNA, 596 bp, Cannabis indica
gtctaaatgagaaaacataaaatgttaacatcaaccaaaatatttaaatactggaaattaggggtgttcataaaatagtcaattcaatcaaatccatacgatccaatccaatctgtaaagtgcagctatccgcacttgtgcggattggatgttgattgacatgtaaaagtaatcgattcaatccatacatatttatataaaactttaaaaacttatatatacaattaacattttaatataaaaaaaatagtaacttaaaaacccaatacatataatacaaatatattttaaaacttaatagatcaagaatataatctattcttacatatattttttctttccacgtacatttcaaaataaagttaaatattctttttatatacaattttttttcttctttttctaatttgttattttattttattttaatttattattagtagacataaaacaacaacaatttgttttattttgttgttagttatgtgaaaaaaaaataatatgtttaataaatattaaataataaccgatctaattcgcactttcgaggattagattagattggatcactagtatgaaatttgtacttagtgggg

SEQ ID NO: 217816 - DNA, 831 bp, Cannabis indica
tataccattgcctcgagctttgtttgagtccatataggaatctcttgagcaaacaaacatggtcttcatttcccttgatttcatatcctctaggctgcttcatgagaatttgttcatccaattctccatgtaagaaggctgtcttcacatcccgctgttccaattcaagatcttcaattgccacaatgctcaaaagtaatctgattgaagtgtgtttcacaacaggggagaaaatttcattgtagtctatttcttccctttgtgagaaacctttggcaactagtcttaccttgaaccttgccctttcaacacctggaatgccatccttatgcttgtaaacccatttgcagcctatgactctatgtccagcacgtcttctaatcacaatccatgtcttattttttctcaaggaatctatttccttatccatagcattatcccactcttcctaatcttcagattgcatagcttcttcataggaagcaagttcttcaccttcaatgccatctatgctaagagcaaaatgcacaacatcagcatagccaaaccttccaagggattttactgctctcttttttagtcacttactaactgataatcaagagtttcttgttcatgatctgcacctcttctagatcttcttcatggcctaaatcttctgctgtaatctcatttctctctgcaatctcctgatctggttccatctccacctcaaactgagatttctcttcattctccttttctgcaacattcccagttcttgtgttgcgaaaattattaattctacgcaagtgcacgtaatcaagtagtatactcacgcaggtgaggtcg

SEQ ID NO: 217817 - DNA, 688 bp, Cannabis indica
ttaattattgaaatttacaaattcactcattattaattaataatatatatattttgtggcaatgaacaatttcatctatttaataatataatggtacatatatataatatattcagaagtcttgggcaggcaaagccatccagctttccttcacattgaaactactactctatttggttcaccaactgccaacaaacacaattttgccacaaagtcctcaaattaattatatatgtttattatagttttcttattatttattttcctttctcatttaggagagtagaagtttttgttgtagctagttataattagttattatgtagtagctaatattggtatggtaagagatgtaccaaccagtgtcacaagaagaagcacaaaatgaataattttgtcttagaagagaagtttggggtgaagatatattgaagatgtgtattataggcccaaatgttatgtttgttggtgataagttgggaccagcataagcatatgtaatgtaacccaattttgggtccagtatcaatttcatccaattaccaaacttgatcgatccttgcttttgctactcctcttttatgctcttttgttgcgtaaacaacaaaggaagttcataatgtgaccgaatcatcctggtaactttctttttttactagtttcatctcataaaagtacctatttttca

SEQ ID NO: 217818 - DNA, 681 bp, Cannabis indica
agagagagaataccaaagaagcttaactaaattaagctagctaagtactatcttatttatagtaaaacaaagtacaatacaagttgctaaagacaaaactaacataaataacaaacagtacttactaactgtcactctattaaccaattaactaactaatttgttaattggtttatattagataacatggatatatttttggtattttaattgatgtttactattagtgaaaacaaataccaaaaaaaaaaggtcatacaataacattatttatattttctcttctttttttttttttttaattttttattatcattttatcttaaataagaaaatttaattatttaatatatattatttaatcatataatattattttaatatttaaaacaaaaagtatcaaaaaataataagaaagagtgataaaataaaataaaaaaaattctacaatgaaccgatacacctttatttgttttgttatttgaaatatatttttagtcaattttttttatgattatgtacgttataattatttaagatattttgtaaaatttttaaaaaaaaaattaaacacccaaaaataatgtaacgtgtgattaatttatcataaagcctctggacagagctcaaccttgacaaactcggtcatgtctttctctccaaacacaactctggctgcac

SEQ ID NO: 217819 - DNA, 766 bp, Cannabis indica
atggtactcactcaggtacttagcggaagatttcatatgtctaattaccattgtaccatagctctaaataaatgtagtatacatttaaaatcaaaaatataaaattacgagaaaagaatatataccaagggccccaatggatctctagatgtgtatcctcgaaacttcttgtaagttgtatctttttggttaatcagaaactcataccgtaatcttccaaatcgatccaccacacacaagaaatagtgtgggctattagaataaagtgtataatttgttattgattaactctcaacacatgagcaagaactatttgagagagaaaaacaatttttcttttctcctctgtatttcaaaaatagcagtataaaagcttctcttgatttctcaaatcaggcttctatttattgtgattaattccccattaattaaatcatatttaatcattcaaataaatatctataactgaattcagctacagatattttagatgagagaatctcttaaccacttgatgatcgtcgtaggggagggtcgtaagacagcatgtctggtgaacataaagcacgtgttcttgtctctaactcacacaatgatgatcaattgacttaccaacaagcaatggaagaccctgactcagacaagtggaacaatgccatggatcaagaaatggattccatgcgcaccaacaaagtctaggaatatgaaatcccgcttgaagatgttacagctatagggtataagtggatttttaagaagagaaaaa

SEQ ID NO: 217820 - DNA, 765 bp, Cannabis indica
gagtatgaaaaagttttatttagacaattaatggacataggttagtgacaattattttaatcatattattttgttctattctatttttaaataatgtcagttatttaatgtctctactctacagtgaaaactgatcttcacaacatagtttgttacattctttttcatttttttagattaatatattattttaaatgaatatttattttatttcatcaatcactctgtttaaaattatcacatatatatatatctttatttatgttcctatatatgccatttttctcatttatataatgaattaatatgttgctaaagtaatgttgataatcacagttattattaattactaattttttttaattaactagtctttaaaaatataattttaatccttatgttatataacggtatttattttatattacttaattaaagtatattttgtatttttaaatgagataattatcttataatttttgttattaaagaaaagttattagttatttgagttataaaattattgaaattattagagtctataataattatttaaattattaaattattgctctaggatctactacaaatacaaattgcatttgaattctcttgaagttacaaatcaatcaaatgcaatgtctataatattgttctactagaattgagctattggggcctctatcattagtgatggttgggactataattttaatagggtccgaaccttgtagttatttagagtactgccatgtacgttaaatt

SEQ ID NO: 217821 - DNA, 923 bp, Cannabis indica
attatttaattactttgatttatatattctgaattttttattagtatcatgattgtttctaacttgaaactatcatatatagtttctcattttttttaacattttaataaatttattattaataataataaagatctcttaattttatgtattttttttatatataaataataaaataattgacgactttaaataattgagatataaataatattaattgtaaaaaatatatttacttaaataataataatattactctaatttttctctatactactctatcccttttattttattttatattaataattttttgttagagaaattcaaaattctatatatacattattcatataaattttaatttttaataaataaaatagatatttttaattttaattttaataaataatttaatagtgtaattttaatattattatatattagatttaatttttaagtcattatttattattttataagtaatttttaaaaattattatataataaataaaattattgtgcaacagtaactatgttgcttattttatgataagagatatgggaagagctaaatagtggagcccacaaaaagaagacaataatagtatgtctggatcaaatgagggaacagaaaaagaagatagaagcattttaaaggtggccatatacatgcaatatcttcttcttcatcttcatcaatcatcatcatcaaaaatgatatatgaagaaatttttaataaagataaattaaaaataaatgaataagcttagccttatttggtaaagggtattacatccaaaaattataccaaaagcaaaaggccaactaaaaatggacccgactcagttctcttgagtgttgcttatatcatggcttttcacaaacttaactggacccacattcacagtccacgtgtcaa

SEQ ID NO: 217822 - DNA, 659 bp, Cannabis indica
taaaattaatatttatagtattctatcttttagttattcaatttattacatttagttatatcctttagttataatctcttacataaaatatatatattttggggtgcactcttaattgatactacccatgaatggtataattagaaaattttgagtttttatgcttaatttttctatttaattaaaaaaaatctctcaattttatatcatatgggctgagattgttccatcggtaatttttttttagcaagaaaaataagaaaagaaaaagttgagtttgagttaaatatttttgtatgaacatatttttgatatagtgtaaaaagagatattttttgatatttttttaattaagtagttaaattaagcatagaaattcaaatttgtgatttcattattcgttattagatcaaaattcgatggtttgatatttttaaaattaatatttatagttaaatttgtttagtaaccattcatgggtaatacccattaagaagtgttccatatatatatattacatttatatttagttataatatataaatatattataataattatatttttcttttcttaaatctacatatttaaattttaattctataaattttttgaataatactaaaaaaatattaagtttttctgtatttttttttact

SEQ ID NO: 217823 - DNA, 613 bp, Cannabis indica
cttatttaattatttaattagcatatctatcaaacatataataattcttacagtaataatttttataccactaagattatcaataatatgtttcaaacaaaagccaaattgcatgatattcctctataattgatctctgctggcataaatgtattttaaaatatttaattacgttcagttttactgatataacatctaaaaaaaaatagatctactcgggtagtcaaataatactgaccatatattttttttttcttcactgttatattatttattgcacgacaatattaacattaaaaatttggtttatttcctagctagatagaattactatctattgaattaattacattcgcaccaatctatataatatatacatatatagttttgtttactgcatcataatattatgatgatgatagagactgtacagaattaatatataaccttaatttctttctttcttttttttttcattttcaattaaatatttatatagatatttgaccacatttacaagctttttcacagttaacttttctacgtacgtaatgttttcattagaaaagcaataatattataataagtactgactgcttcataattattgata

SEQ ID NO: 217824 - DNA, 561 bp, Cannabis indica
taattatataaaacaccctaactctaacatttattatttttttcccaaaattatcacaacaccgccttagccccgccaatagtaactaataacaatactttttttaaaaaaaaaaaaaaagaaaatgcaaaattcattaagaaaaatccactgttatagaaaaacttcaaaaattgagaacaagcacatgtccaaacacaatctcctaaattagtaacagaagttgtcagtgtattgacaacaccactcgttgatcgcagaatgacactgtaagaaccaccaacaacaacagctaagaaagaataaatatttaataaaataaaactgaaaactaaaattgaatgtagagcttattaatccaaccaattgtcacagtggattcaataatggagatattaaaaccaaactgatgcgcaagaaccgaatctagtcgaatggcaagcagctccgccacattagcagaaaaatcacctaacacacctaatgactatgccaaccaaaccacgtccttctgtatctcgtatctctcccccaactccaaccaaagtccctctccggaat

SEQ ID NO: 217825 - DNA, 502 bp, Cannabis indica
tgaagtcttttgaacatgaaacaaacaacaactaaatctctccccttgatttcctttctttagttgttgaggacagttttactaaactcaagatgcacaaaccacatattaaaaatcttgaaaggattgtactccaaattacccaatttcaagtttttagttagtgcataacagtgatattcatctttaaaaacccaatcaatccttgagtagattcttactctattctgatgtttatttatccatgtgtaatgagatctatttcacttcatctcatctgcgaggcccaaagccatccagtacttattgccttcaaaaatttccccaaatgatactggtttccctctaattctatcaccgtgatgaatcagagtgttaaagtgcccacaaattagccaaagtttcagtggcatatgtaaatcagctaacctttaccaaagatattgtcttgaagttatcatactgctcccataaacaacagtgaaatagtaatcttcattgt

SEQ ID NO: 217826 - DNA, 823 bp, Cannabis indica
gttggattactccaattaatttttatgtttgttattatgttaaattttaatttcgatttaggttgctttatggtgggttggtatgagtaattttttaaaattttttttataataaattttatattcttgttggcatttttttataattatatatcttattttaatatactaaatttcttttgtttgtgaaatggacggtacatgattagcattgaaataattatcattactttgcgatgatgtatattctttttaggtcttgctaagatgaatggcgatcaagattaattggggtcgtttgatcattaaaatcaagaaaagcactatagattgattactttcattattcatgttggaaaattgtaggtggactgttaatagtgcctaaatacaattttttggtaagattaatgtcggtcaagatcgatgactgttgaccacacactaatataatcgagtatattataaatctgttgtatatgtatatcttaatccatatacataaaattaagataaacttatagaaatattagaaaataagagaaagtttacaaaaaaaatataggacatagagatttttacatttttattactgtattgagttaataattatactgtaaaaattttaaattataaaaataatatgcttcaaataaaaataaaaaaaaaaataaaaaaataaaaaactaaaaaataaaccctaaaataacttaacaaaaaacaatgaaaacagctataaaataataaaattaaagataactacaaatcaaagaaaaataataataataaaacattgacctaattacaataactccttaatata

SEQ ID NO: 217827 - DNA, 897 bp, Cannabis indica
gagatcatactgcttagtaagactacagtttaattgatttttaattaatcaattataattctaaaagttagactatgtctactttatgaattttcactaagcaagggcgaaattgtaaagaaaagaattctaggtttatttattaattaagagactttacatgtctaaattaataaatatattaaatggcaatattatttaataattattttcaagttattaaataattagaattggcatttaaaaggttaaattggaaaattggcatttttgagaaaatgggaatggaaaataacaaaatgggaaagttgcaaagtgaggcccaattccctttgtatggccggccactatgcataagaaataccatttatagtttccattattttaatgccatacaattctaacctaaacctagagggtattctataaatagaaagtgttggcttcaggaaacacacaactttgaacattggtttctctcagaaaagccacacgcccctctctctcttttcttctctctaaatttcgaaacacttgagtgaatgagtagtgcccacacacatcaagtggtacctcaatcatagtatgtaagactatggaaaatctgcatcaaagaaggagaaaagaagatccagattcagatcttgattatgctctgctacagaaaggaatcaagggctagagatctgaatggaaggagtcataatattccgctgcacccactgtaaggttttctaaactttatatgtgtttattttcattgttttagaattcatattaggatgttaatcaaacatacttgttagtaaatctagatcctggtaaaataaattccaacaggacatttgatgtccctactcattaatttcttttggataaaatatcaagtgagttcaa

SEQ ID NO: 217828 - DNA, 508 bp, Cannabis indica
accaaatgcaaatttagatatatgaagattttttttttgtatcattgatagaggccggctcttaccccagtgagccaaatagttgataaaaaaaaagcagtgagggaggatgtttcaaaaatcactttttttttttacgagaaaaaaaaaaagaaaatcaaatttctttgatattatttccaggagctaattttctatagtacaatattccccatcatatactcatttccattgtgataaagattccaatatttttaaaagattccaattaattaaaagtagctttagctaactaagcacattcatctacttgatcaatttatatatgttaccaaaccctacaggctagggccacaaaatttatatatataatatagataattagggcctaggcataacaagaaattaaagattagctccaagaaaatctatactatagaaataataaataaggaaaaatgtaatcgacgaccattccaaacagccacttcgttcaatatgtactata

SEQ ID NO: 217829 - DNA, 760 bp, Cannabis indica
taaaaaaaatcccatttatattaccattcctattatcattacaattatatttagtaaaccaaaagctacctcagtgcatctattttaatcctattctaaaaaaaaaatgaaacaaaaatgtggtttgtgtggcaggaggagagagagtagatttccataaaaagtagggctgttacatatatagtgttccgttataacagtatcttaactctaaaaggtctttgtctggattcgcttcggcaatacacgggtgtctcacgcaaactcacgcgcccccaaattaaaactaacagctcaaacatccctatctcgaaacttccaccaaacacgtacccatacaaatacaatcccctttttcttcattcccaatttcccaaattccttcatataaaacttggttccaaacagaacaacatttcacaaacacaaccaaataaacacagaaagaaagaaaaacagagacactcgttctaacatcggcgcgtgtgtttgcacgcaataattctatcgcaattactccgtcatcgtcgccggagtattcggtttcggcagctgtaaagcgccaaaaccaaaccccaaaccgtaatctcgttctgatcgagccgacaggttcggtctctggatcgagccagatgccagagatcgaacagattgatggtaacatcgccgctactggctcggccgccgcgcctgaaaatgttttgtttgggaaatatgaggttggacggcttctcgggtgtggtgcctttgcgaaggttca

SEQ ID NO: 217830 - DNA, 793 bp, Cannabis indica
taatttgagacgtaaatatttaacgttcaactttcagttgtagataaatatttaagtttaatttttagtagtctaagttatatttctagtacttccgtaagtaagttattatccatgtgttatttttttattagtatatttaaattaatttttaaataaaaaataaaaatttaatgatgtagaccaatcagaaattgtcacatgacaatttacttaacatttaatagtcaagtacctacagatgttccaaaattaaaatttaagtattattatcataaaaaattaaacttaagtatttatatacaaatgagagttgaacttatgtatttatatcataaattactttaaacattatttaattttatgtaattttttaatcaaaataatatattcacaactaaacactcacactctttctttattactcttctaattatttatcattgtatctatctcttaggtggcgtttagttgaaaggaatgaaattaaatggaatagaaatgaaacaacttttattctattcttttgtttgattttattttattgtaatgtcattcttattctagctatattttcattcattccaatcaaacatcatctaatagggtatttgttatatgagtttgagttggagagagtagtattggaggaagtagatttggagagaatatgaagaagattaatattataccatttttaatttaaaaaatttagagacttaaaccacttaggctagctcaagtggtcataggagtgtgtgtgttagaggtcctgaattcgagttccaaatta

SEQ ID NO: 217831 - DNA, 659 bp, Cannabis indica
tgacacacacttatttgcctctagaggctttatccctttccgcttcttcgaggcttggtcatgggaggactcgtgcaagaggaagttgccttggcttggtcttcaaatggtaatgatactgtgtcttttattagaaatatacataagtcaaaaatggctatccaggcctggaaaaagaaacataagatgttgaatgaaggagaaataaaagaaatggagatcagattacaatggatccagaatcaacctattaccgaattactcaaagaagaggaagcccaaattcagactttgatttcagattcttggtcaaaattagagagcatgtggagacaaaaatcaagggagacttggctttccttgggagacaaaaatacaagattttttcacgctgcaacaatcatcaggaaaagaagaaatagtatttggtcaatcaaggataaagacaggagagtgtggaaggataaaaatcacattgtggaagtcatcaatatgcacttccaggagctattcacttcctctaatcctatgatcgatggggagtttgaagatttgtttactactcggatcgactccctctcgaatgagtgttttgctgctacaccctcagaggcagaaattagagaagctgtattcagtttacaccctctaaaagcccc

SEQ ID NO: 217832 - DNA, 746 bp, Cannabis indica
tattttaaataagtacaacatatacaaccatacaaaaaaaattgtatttgtaagcgtgtaaaacaaactcgaaaaaacaaataataatacatataatgtggttgtgtgagtctagttaaatataatatagtacatatttaataatattttttgtgaggaatataactataatgttacactattttatataacctaaagtaaagcgtaatttgtcaagagtaatagtgtatttaagtaatggcgcaatttaatataatttatatgtttcaaatttacaaatgaactcaaaaaaaaaatatatatatattacaaatgaacataagtttttctggttgctaaatgaatatgtacatttaaaatatttgtaggaaactgcataaaataattgcagtattttcaaagcgtgattaattgtaaacaaattaggataatatcattcatggagataaatcttaaaaatgcataaatacgggtgagttgtgtggaattcgacatagtaaagtaagaaaggccaccactcattgacccaaacaacatgctacaaatagaatgtcttgaaacataataaccaacatagcataatttagcctaaaaaaactagtccaaacataagaaaagagagtatgggtagtcttatgaatcggattaattagaacaagtcttgtgtttgttttgtaatttgtcattgaaattgaagtagtttgattctaaagcaattagcttgcatgcatcatcatttgttgacg

SEQ ID NO: 217833 - DNA, 741 bp, Cannabis indica
tcgaatagaacctaatcagtatgttctttcaattacacaaaatataactacttgaagctactcaagtagctatgttattcaagtcatatttatatatatatatatatatatatttgatgatcttagcagcatcaaagatctggagtttacccactagcgaggtatggtagcataaaataactacgtacaaggaacagtattgtgtacgatattattaaatgcctcctcaccatctgaatattgtttattatgcttttataattgcttggccataagccgcgtaaccatcttatgaggttacttttgccgaataagtaaaatcaaatatttttggaaaattattgatgtatgtctattctatataaatatgtctatataacagaatttttggtttataaaaaattatagaatacttttttttaagtttttttattcaaaaataatagttaaattcccaaattatttttaaatgctttatggcaagcccaatcgttcagcacctctcttggtgtgactcaacagtttccgttattgtaattcaaacccaaaaaccgatgttgctatttaaaacgcagagcacattctgttttgaaccctaaaatctgcactctcgtctctctatttgtcccgctatactcaaatatcatgattgacttctctgtacgtgagtgtctattttttccactccactcaaattccatgatagacttgtttcagtgtaattttgcgtcaatggtattt

SEQ ID NO: 217834 - DNA, 820 bp, Cannabis indica
atccctcgacccaaacaatacataataccatagaaaaaagataatgatcagttcaatttattagtgatgatgtatatattcttaaaacaaaagcgcctataactctagctagctatttccataatcaatcaaaataaagccaaaatgaaaataactaaaagagaaaagtcagtaagtattactgcttctccttctttttgttgttcttgtcctcccgtgccttcttccctgtattgggttcatcaactctatcaagttatcaactccaacgaggcttctcgcactcttctcaaaaccttttagtatacttcttcacaatcttagcctccttcttctccataatagatcataaacttctcattgtccttggtcaaaaataactaaatggtccctattgaaatacttaagaggcatcaaagatgtaaaagacccagttaaatttgatggtacgactgtatgtagcttagtccattctttaaccccgtattccttcataacccaaaactcaacatactcttccttaattactatatcctccaaattttactacatcacaaaccacccatccaatactgttattgtcgagtaataggattttcccttagtatttttgttcgcaagtggaagttggttgtatttttcagtgattagatcaaatgcaacaataacggtggaagattcagtgccaatttttagccacatcaaccaatgcaaagaacccttttccaagtgttagtgtttaggctatatagacattaacctcagaacgcaatgacctaacaaggtcatacccacaaatacaataatgtatcatttttat

SEQ ID NO: 217835 - DNA, 616 bp, Cannabis indica
agtcgtggtcagggatgattgtgacaatgttaaggctggtatggtgttctaatcgtgggcttagttcctcctgaagttgctgaagctaaggtgattttggctgctatctactggttacaagcaaccaaatttcctgtcactgtattcaaccaaagttttagctcaagaaagaaggcacagaaccattctaaatatactcataatctaaccttagacatgctctagcacaactatgtgcaattttatttaactctcgaggtacatgaacgatgagcaaattaggactgaacaacaatgagctcttaatacaattaatgatatcattgagcacagaactatgacaattagtagcataaatcttatctaaacacttttacaatccgattgaataacagtgacaagaaatttggttgcttgtaaaagtgttgtagataagatttatgctactaattgtcatagttttgtgctcaatgatatcattaattgtattaagagtttattgttgtttagtcttaatttgctcatcgttcatgtacctcgagagttaaataaaattgcacatagttgtgctagagcatgtctaaggttagataatgagtatatttagaatggttct

SEQ ID NO: 217836 - DNA, 527 bp, Cannabis indica
attatttatttttttttgttttttttcaagatatagttttaggttatagtgggctaaaaaaatgaccaacataatttataatgacattcttggaccgttggtggagcttgaaagcatatggagctaattatctcttatttttgcttttaatttttttcaaacaaagagtgtgagacataatcattcacatccatggaagaattattaaaaaaaccaaatcttagtcgaccttttagattcatataattgaaccatatactaaaatctcctagacgtcaaatcacaaaacaagagtagctattgatgaagctcattttagaactaacttatttcttttcacttaaaatatacaaagttggtgttttaccattttagagagaaaacagctctcttattttcagtatatgcagccaaaaatgtggctgtagaatatgtaatgtatagcgtttatttacaataaaaagtgtatatatacacagtaaaagaaaggcccaatgggtcgggattgggccaagtaaacaaataaa

SEQ ID NO: 217837 - DNA, 967 bp, Cannabis indica
aaataaaataaaataatatatttgtaagtgatgtgaaagtatgcacatttactgtacagtattcaaaattggaataaattaatggaaaaatgtaaacagaataaatgaaaaataatcggaatcaacatttgtaatatgtcgtttactaatttttttggaaatggaatagttgtgatttatcgtgtttactttattaagaaatgtaatcagaatgcttaaattgactagcccttttgaattaaactatattatattgtagttattttgtaagatatattttaaagaacaaaattgtcattatatatttaatattaaaaaataaaataaaaataattaaaatccgttacctttaatgacattccttacaaaattagtaggggaagttctcccttatttaattaagttctctttttcctaattttaataatgtaaataaacaaatgtaagggaatgattatcttacgattacgattgattcttattacttattattaaacatgttattaactcttaaaaatgttctaataaacttataccacgtgtcgatcatagaagaagccacgtagtcaaactcagtgatgtagagagagatacatgtgtcttttggttcagaaaaagctacgttgtattatctctctcaaactccacgtgatttccaacgccaatcattcaattttgggtaattcacttttaaacccttataaaaaatcaaaattgcatttttgtcttattttcaacatatttttcagttttggataaagatggacattaataatatttaacaccaccactatattattattaatgtgattaattattttaatttaatatttattatataacaacaattaatcatttaaaaggtgttgctcttttgtgctatctttcaattagggttggacatttaatctaatataatttttttattttaatccgatttaatttaattcaattagcaattaaattt

SEQ ID NO: 217838 - DNA, 764 bp, Cannabis indica
aatatacatgaataaaaaaaaaattaaaagtacttgttcaacaaaaaaaactggaaaccacttaaaaatatcttgtagactaaggcataataacaccttaactacgtaaaaattcttgttgcattgtctactatttatatttctttaagcttaatttctttattaatcagtttttaaaaatctcagtaaaaaaaaaacatgtgttgttgagaatagggtcttgttgttgtgtaaataaagcaacaaatatatgaataaatcaaaaaaaaagcaatgaatgaatgatgagaatatgagtgagtgagttattggttggttattttgaagaagtttttggccaaacaaacttagcatattagagcgtttttaatagtagcattcttttaaaagtgttatatatgttgggtactgctgttatgacatttagcagttagttggaggaaggtttagatacttggtgtgtggctgagagtttggaagtggccatgatgttacggtcaatttggaaggtcaggaatgacatggtatggaattctaaacagccaacatgtgaagaaatgttgcatttagcaaaaataaactttgtggactggtataatgcttaaaaagaagacatggattctcctattgatgccaatagaaatcgaaatgagcattggacactccgagatttcaaccaaatcaaagtaaatatcgatggcgcactttttgctggtgagaggaggtacgacataggattggttgtctcgttcttcagatggagc

SEQ ID NO: 217839 - DNA, 1107 bp, Cannabis indica
acgctgcctaatagacataaagacttagcaaatattttgaattatcagttgcttgatccacgtgtccttgtctggttggtccacgtatagttgggaaaaaatcgaggggacaacaatatgtataagtgtatgtatataaatatgtatgtttgtatatatatgtgtatgtatatatatttatatttatgtgtatatatatgtgtaactaaaatatatataagtgtattgatatatatatgtatttaatatatgtgtatgcatatatattgtatgtatatatgtatgtgtatgtgtatatttatgtgcatgtatatatataagtgtatatatacgtatattagtgtagaattataattattatttttatatttgtattttttttataaacaagtttgtataaatatacgtatattagtgtagaattataattatttattttttatattattttttttttttggtaaataggtttatggtgtttctttacttgttgcttgaaaaaattcactcctcgttatatttaaagattagtgtgtttttataatatgttaaataaaaaaaattaattctatattcaacaaatctataactttggtttacttgttcatacactattgaaataaaattgttctacaatttatttgcaagtataccaagttgtgaatttacttaaaatacctattagtaaagtgtattaatatatatgtgtgctaaaatatatgtaaatgtatttatatatgtgtgtgtatgtatatatatatgtgtacctatatatatatgtatgtacacatatatgtgtatgtatatatgtgtgtatgtgtatatatttgtgtatgtctatatatgtgcatgtatatatatgtgtacgtatataatatatattacgtatattattgtacaattataattattattttttatattttaatttttttggtaaaataatatttagtgtcgctttacttgttgcctgaaaaaattcactcctcattatatttaaaggttagtatgtttttataatatgttaataaaaaaaaaattaatactatattcaacaaatccataactttgtatactttacttcatacaccatagaataaagttgtt

SEQ ID NO: 217840 - DNA, 758 bp, Cannabis indica
gagcctcacaatgagaattcaacaccgaaatattaaattaaagctatagaaaaataaaatatgaacaccgggttttttacgtagttttgcagttaaaattctgcatagtccacgagtcaatcttattcaaatttttgagtattttttcagggcctctagcataggagtttttccgtccctttttttgagattgtttgccactatttataattgcatagtggtagttaattacaaggttgaccaaaatgtaattacagtcactatcccttaaatcgttggatctgattacatatcatgaaatgtaaatgcggtgtatgattttgaaactcatttagctgtgattcttccgattgtactgggtcaagaatatcgtatattaaacacgtctttaattgttgaatctggagacgtctcgacaaaaacttgattgtggtgatcccaatggcgagctagaaccattcttcttttcgaggtcgacatgatatgttttacgtcaattgcgggtatatagaaatcttcagacttgccagggttatgagtctcgcttccgttagttggatgaaactataagaagtatcctcgtagcgagatggtcatctcacattcttgtactccgagccggtccgctttgacacttaatttgttatagtaagctaaggtatgtgttactcttctccggtgcctcgctattctcctttagcgatatatggtttctcgttaatacactaagtagcagttcgtacattgattcctcgcct

SEQ ID NO: 217841 - DNA, 554 bp, Cannabis indica
gttcccccttcaccatttcgccgatgttaggtgttcgtcggagccgaggcttctcgacttcgatctgaccaagtttgagcctctttgagccaagtgagttgtagttttgtgtttcccttctcaagaacttttagatctcgtggttctctctctcatacaacgccattgaccgggaacaaccaccatgcacgacagcgctcggtggagctctcggccagccattgtcgatggtgttccaggacttgttttgagctccatttctcttccccttggtgtgattcctcatgaaactcttatttgctattttggttttggtttcctaaaaaaaaattaagatctttgatttttagtggtggtggtatggtggttgtagtggtggtgataataatagtaggtagtgtggtggtatggatggtgataataacagtgtgtatgagcgttaatcatagatatggaatctatatcttctatagcatttaaaaagtgaaacaatagtttccttagcttaacgcgataaatgatagagctagcgttcctttcagtaattatattag

SEQ ID NO: 217842 - DNA, 1143 bp, Cannabis indica
gcttgaaagaatatcaaaaagattaactcagaagtatctgttcaatgatgcccaatagagaattataatggtactaaaaaatcatcacatcattaccaagcacaacaaatgaaatgttactaaaaaaaacacataagatatgaaatgagctaggcaatatcacacacgagaagctgctttgagagcactccatgcatctcccaattcaagtaaaatttgagctttctgttcatgtaaaactgcattttgaggattcaacagaagagctgtctcccatttccccaatgcttcacggtactctccatcctttaaaaccataattgcattgttattattatgcagaaacaataaaaaataagcacatttcaacttcattttcatcaaacgattttgcttaggttttccagaaaatgttctttttttctttgagttcataaaaatccaatcgttatctttcaaaataataaaatcaatcaatttaggagcatttcacaaaaacccatcacggaattcgctacatacgatgatttttcaacacaaaactgaatcttttcttagaaaaaagaattgggttacctcggcaagcttgtttccctgagcctgaaaggactgagcaagtttgttaacatcagaagagtccgatggtattttcagaggaatattggtgtgtcgtattggggggttgggaattgtcgtttcggggttcgaaagggaggtgtggatatagagaggttaaaggtctcttcttgtggatggagtctttattagtctccttcttccatgttaatttcatctttcctaacccagaattgctttcttgtcagcttcacactccttagcaatactaaatttgtgtaaggaaacttagtattcaaactaatctaatgcaaatttgtgtgtggtgttgacggcgtgtttgattggattctttgggtttttttttttttttttttttgtttacttattgtcattgtgtttgtgtgtgttatttttattgactttggtcttgaaatagtttctctaatttatgttgttcatgtattagtatatgccagattagagaatttgtttaaataggtaatagtaataccctcattttgatagggatgtatatttttaggttgtatgacatttttattactt

SEQ ID NO: 217843 - DNA, 626 bp, Cannabis indica
ctgcaaaacttaacaatttatctagaatctcacccttacttctacaataataattgtatatgtaaagctcaaaactagttatacctaaatcaacaatattactatcaatacctttctccctgtgttcaaaataattactccacaaaactatagaatttctcaacatcataaattgtatcatcagaggagaaaaagagtgtggggactgaataccagatgagtttccaacgtttcgaaagaatgcatgttcgaaacacatcttcagttgggagaaacgacagaatttgaattatcaatgcatcgggaagatttgaaatcatgtcaacttcatcaccaaccaccattgatgatgatgatgatgtcattttagccattttatttgctgggccaatattttttgttgtcatgctcatttactgtaacaaaaaaaaaaaaaaaaaaaaaaaaaaaaaaaaaaacttaatggtgatatgatgaattggaagaataaatttttctatgttcaaccgaaatcaaatgaaggggaaacataatgagattttagggcttttggctgagactacactcggagttaaatttacaatagattttattatttgagttgataaatatctatatatatagat

SEQ ID NO: 217844 - DNA, 809 bp, Cannabis indica
actttaaaaaattactttttacaccgtaaattgggggtgggtttgaatttatgcatttagattttagatggggtggtgaggtacattgattttgattacttgtaatgaagacgtgtcaccacctaagctgtctgctataaactccaaaagaaacaaactttggtcaagaatctgactaggataagcattaccatactcagttgtttagcccaatcaccctaactcaccgcccatcccaccccacctcccaacaaaaaaacacactcaacctcatccatccttagttattcaactataataaatcaacctacttaattcattttcttactaactaatcctatatttaatgaaagccccaaaatagtattttcctatggtattggaccagttttaattggctaattacttcacctatattctcacggactctctagtattctcagggcatagcttgaatgagctctagtattttctatttcttccatatatatcataatgagttaaaccaggctattttaattctatctttgtagccactataagtcagttaaggacaagtgggcatcaaaacgtagagcagtaaccaccctcatgaagccacgtggaggaacccacctgacgtggcagagccaagtagcataagcatctaatcctgatattgggaatcgtgatataggaacaaattaatggtagtaacaacatgatatatatcgatccatattaattaacttgagaggagctttatgaggccatgttttagacaagtgtaattgggttgagttggctatatacatatgtctcgtcagttt

SEQ ID NO: 217845 - DNA, 831 bp, Cannabis indica
acctgcaaaacataaacacaactgttaaatcttaaaaaatagaaaaattaccaaaaaaacggcaattatatatacaaaaacttaacataacaaaaataacgttatttttgaaaataatagccaaaataaggtgaaatttcccaataaaaaagttcattctaagagggatattttcataaaatacccaaaatgataaaaaatttataaaattacggacttatagtctttttctacctttttatggatttaatctttttttaaaaaaaaattggagagttgttattctgttttttttcatgaaaaacttagaatgattttttatagggatattttcgtaaataccaaaaaatgagaaatattttacaaaaatattgacttacaattttacgaatttaaatttttttaatgggactcgaactcaggatctccaagagacacactcacctatggccacttgagctaacctcaataatacatttaaaccttgtgatttcattaaaaaaatatatatttggtatcttatgttttcaataatacttaattggtaactcatattttcaaattgtacatatttggtaccctaaagtaaaatttaattaatataattttttcgaattaactaaaaaatctcaattatatgtaatcatataattaaatttgaattcaaaatttataaaattttagataatttgattgtattgattaatttattcaaaaaaaaaaattaaatttaagataccaaatatgtatgattttaaaatacaggatatcaaataaaaattattgaaaacaagggtacctaatttgtatttagataaaatgtgtaaacac

SEQ ID NO: 217846 - DNA, 718 bp, Cannabis indica
tactgaatttcttattttctacatcaacgttagtgtataacgctaaattactgttgtaaatttttacgtttattatgggctaacaaccaaaagtgggctacacaaaaactgaagaaattaacaaaaaaaatatagaaaattcaaacttcaattaaaaaaaaataaataaaataaaaatatgatacaatcttttatagatatatttttatgagggaaaattatgtaccgggacagatttacttgtagtggtaagctctaataaattaatggtaaatcttggctcaacaattaatttattaattatgatgttattccactaataattaaattataattatactttcaacacatacgatctattattatttagaagattaatcacattaatttatttctattgatatattcattatatgagttatatgattctccattaaatatttcataattagagttaagtatttttgtacggtaatctctctaattatatgttcaacaaatagtgttattgatattttaatgaacgtttctataaatcaaatcaaaatgaaatttttattctctaatataaattgactgctttatgttcaagtccgctatcaatactcaaagaaatatttaatctggccaattaggaaagagtttattccatatctgtgcaatatgtcttggcaacctataatcctataactcaagcatatcaggaattaagtctctg

SEQ ID NO: 217847 - DNA, 1061 bp, Cannabis indica
cacaatagttgttaacttttttaaaaaaaaatatgattaaaggatttataagccaatgatatttcatattcaactatggtagaattagaagcaattgcatccccctttccaaccattttctttaattcttaaaaaaagtggtaattgaccttatccgtataaataaggaatttaagctatattaatttctaaaaaattatagagtaattttatagtacactttttagaatagtgttatgttttttatctgttttactatttagttttaattttttttttcacttgtatttaatttgtatttatttaagattatcagtatatttttaaaaaatttaaaatagttttacagtattggaagatatttctgtcccattttactaattgagtaaagttgatgtggatgaaaatttagggaatacaattttatacatattaaaattaaaatttaaaggtgtgatttagtacataaaaatttaaagagtaaaatttagtaaataaacaattgtcaagttagtaaaattgaagagaatttaacaaaacttcaagtctaataattttcttagttcagaataaatttttaaaagtttaaaatgtttgaaagacaataaaaaattaattaatttatatatatgactttttaatagtggtagttgtcgcactttattattattgttataatgaagagattccactctctattaagtatttgtaatgagttttatgagattggagaactataaataaaattaagattattaatatattatgagatatcaatgtatacagatatgttagaatgtgaaatgaaactaaagaaataaataaataaatcatgttttaattgttgtataacttgttaaactaggcaataataaaaaaaaaatgaagtaatttaatagggggtgtcaatttcattgaaaaaccaaataaaaataaataaaaatagaaaagaaaaagaaaaaaaagacatatttgggattggttagttggtattgccaagtcgttattgcactgtaattggttaatttaattagttatcttgtgttggatttttctactaa

SEQ ID NO: 217848 - DNA, 750 bp, Cannabis indica
aataaccaacataacaacaacaataacctgtctaaaattctcactcttatcgagaacctattgataacccgtcgataataacaaaatttcttatttttggtataacttgaactatcgataacatgctgagaacttctcaataatcagtcgataatttatcaataatcaagcgagaataaccaagataacgacaacaaaaagaatattcactcatatcaataatctatcgaaaacatatcgacaataaacaaattctaagtttttttgcaaaacttgaactatcgagaacctattgaaaaactgttgataaatgtcttccctaaccttgggacatttgcatcgagaacccgtcgagaacgtatcgataaagcgtcgagaaaattatgaacacaggatactcaagaaaactagatctcatgatttcatcgaagaatacatcaaaaccaaataaatacaaacaacaaccacataaatttactgaaaatagagtatactttttgttaatgcagattttcgttaaccaaactttgagctaaatagtgataatttcacacaaaaaaaaaaatgaaagcaataaagtaagaggtataaacacaagggattttttacgtgattgtgtagttaaaattctacatagtccacgagtcaatctaattagatttttggtagtttatcaaggcctctcccgtatgagtttttttcctcccctttctgatccaacctaccactattagaatcacatagtaggct

SEQ ID NO: 217849 - DNA, 1180 bp, Cannabis indica
ataacctcaaaaaaaggtgataagcttgaaatagttatgtcacataaatctataataaaacaaaattatatatttcctcaaagatctccattaattaaaagaattattatgggacattatttagtaccattataaaatagtattttataattaattttttataattattataaaaatgaaatatataattgatattaaattacactaataatatttgttatattaaaatattattacaaattacaagagtgttatactttttagtatttcttatattaaaatgttattataaaatacttttatataataattattatttatatagataattattagaggaaaatggttaaaaagtattactggtgtttaatattttcttcagtgttatactactattagtgtaattaagtatcgggtctcatataacataaaaaaataacttttcaaaaaaattagctaaccaattataaaacgccacttataaaaataaaatcttaaacactaataatacctcataaaatcaaaaaaaaaaataataacctcataatagtcttattggagtagtcaattactaattatataaaacttttaagatttattcaactattaattataattagacctagttattatcaatccttctcataataataattagtacacaaactttgacttatatatagaaattaaagcattgctataaaaggtgcctaccattttataattataattaattagtaataatatttaataataattattaaattaaattatgtgagatttatatttaattatactaatattaatatcacactttaagattatttttaattaataatgtacatttatttaagattaaatttagtctaaaatatatcataaaactatatttagtttaatttttgtatttatgcttcaatacacttaatataaattaactataaaaatcaatattactactaatactcattgaataatactttatttatattatttaataatttataaacatattattttagtatttagtgtaagctaaaacttttgcatatactatcttttgtattaaatatgacacataataacttttagtcaaaatattctaaaaaaaaataataatactatcacatttatagctttttatttgaaaatactctaatcttttttaactattatttct

SEQ ID NO: 217850 - DNA, 739 bp, Cannabis indica
ttcttgaatcccacaatcactacgatcgaaactgctactactcatcaccaccacaacttaatattcaaatctaccaaaaaataaaaatttcttctctcaccaccacaactccttcattcttcttcttcctactttctagaaatttatacctaaatatacaatctatatacatgtaaatttcaaaactaattaaaaggccaaaattcaacctccatcctctcgggtgaagctccatctcatcattagggccgtcttaaacattttggaggccctgttccaatcttaaattttaggcccctaataaaaaaaaaaactattttattataataattgtaatttatttcattacaactttaagtaagtatcaaccttctatttaaaacaggtcattcttcgcacacgttttgaagcgaattcatcaaccatctcttcatattttacagtttctaaaacatcatttttaatcgcaatcaatgctaatccattaagtctttcttgtaacatggtagaccgcaggtaggacttcaacaactttaatttcaaaaaacttctttctgcagaagcaactgtcgcaggaatagtcaataaaattctgtacgcaataattgtattaggaaaacaatctacgcctttcaaaaatttcaatatatcaatagctctcattttttccctaggcaggatttctcttaataactttaactccacatataattcatttccatcaatatcatattgttca

SEQ ID NO: 217851 - DNA, 574 bp, Cannabis indica
tagtacgtactctctctctctctctctctctctctctctctctctctccagttatttgcccatgttattgatctgtgtgttagatgagaggtttagaactacaaacaatgcaaaagggtatttttttttcaaaaacagaaactaaaagtaatacgttttaattaattaatttttttttggtacaattgctgtaaggatggtttatttagatgttagatttaaaatgaactagttaaaccaatcaatggataggatgaagctatgccacttgttggttgattattacaaaatctttgatttggtgtttctgcactgattgagtgtaaaaaatctctttttttttttttttttttaatgttgcccagttgtggaaatggatttaggtagaatgggaatggagttagtggcagggcttttttggttgtttgtcattttgttttttggggtcctcaaatacaaacaccaaaacaaatcaaaatgacaacattagaagagtacctagagttgtatgtgaacagtgaactagtagatcttagtcttttagtttttctctatgacaatactgttctacttc

SEQ ID NO: 217852 - DNA, 767 bp, Cannabis indica
gaaatacaacctaaaatcccctttaagttcatcaaaactaaaaaatatgaatgttttaaaaaaaattatatatatatggtcgggcattttaggtgggttcttggtttgatttcggggtatttgggggtgtcacaatttagaattcaaaacttggcccgttgaacttgaactcgtcaagtatttttcagatgctaatttttcgggattttgcgagttcgggttgaccaggtttgccaaatggatgagtttcttgggtataaatgttctgccctactctaatttgtttcagcaatgcggtagaaatttcttaattatatgataaattcaattaaaataaaatagaataaaaaaatgaaataataaaaaaaaaagtaaacaaacatttgagatttcttaagccccacaaaccacaatcaagtggaaaaaggaaattaaaaaaaaaaaagtaagtagaagaataaagtatcgaaaaagaataaaaaaaaaaaaactaatactactttagtgattgttaatactacaagacattaggctcacttatcacttgcgataatttttttctaaaaaggaagtaaataattttatttaattcacctaacagtcttaaaaatgacaaaacggtgcacccaaattttattttatttatcaaattagtgtgcaacagtcaaaatgaaaataataaatttaatatttttcattcatgtaaattttagataaattttgtttttcgtttgctttcttgattatgaattgattagtttataact

SEQ ID NO: 217853 - DNA, 931 bp, Cannabis indica
cgactatagtatagtattaattaattgattaagatttaattacagaggatgccagtatggtggaagtggtactattgggggttgtccagtatcatggacattgtacggactgttagtatcccaatatggagatgtggatgacgtgatcaacgccgttacaggtgaaactgtgaaacaatacttgagaaactatcttggttacaaacatgacttcatttggagttgttgccgttgtcaatgtcttattcactcttctttttggatccatctttgccttctctgttaagatcttaaattttcagaatagataatatacttcattaattataattttaattattaaataaaatctcccagttagaatgacacattatatatttttgtcttttctaatttttttttaagaacgaaattataatctaattatttttatatgataatgtatgttaacatcttttaagatatatattttaattaatttataatgttgaaaatattactcaaaataattaattacacgtatataaataataaaaacaaataagcttgtgtgtaatttattcaatcgattttaattgtgaatcagagcactattatatatatgtaaattgtaatatatattgctggaaaaaattatataaaatgtaacatatggcgaaaatattatgagaaaaaataaattgcaattaaaaataataaaagaaaagattatgatgaaatataagcgacaaaaatggtgagattataagaagataaccttttaatatatgtgggcaccattatcatttttttgtttttccattgctaaaatttaattagtgaaaaagtagaattattattaataatcgatttttttcgtttctggaaaggaccatcctgataattttgcaagaaagtgggatatggtttatatatttggtcaatgtaagaa

SEQ ID NO: 217854 - DNA, 826 bp, Cannabis indica
ggggtaagttagaaaaaataccactttttattaatcaattaatcaaatttatctataattttatatttaattaaaacatacctctttttatatgcattgtacccaaaataccctgacataagagagtcacgtggagaatatcttgaagtgacagggacaaaattagtacaatagtttaaaaaaaaaggtaaaaatgatagactttaaaaaagagggtacaaataaaagaggacaatataaaaagggtatagagtgtaatttcctcttaaaataactagacaaataacaaaactctaaggttggtttgatatttttaaaaatatttgacaatgtagtactatatttgagaatgtattactattatgacttttaatcatattaaattttatatcctaacaacacatttaaaaagaaaggcctgaattttgttatactacaacttatcaaaccactctctatctgttattgtcattttctttgctaaaattatggcagattggcttgcccttttttcttttttagagaaagatttaaaaacattatatcatttgtggcagtgggccatgtgcacaaataataaaatttgaaaaaaattacacaatacacctaaaaatagaattattttacatatttacaaactttcttttcacttatatttttatgattttgtgttattttactattgtttcatgttgtcccaacgttatactatatttttacaaagttaaaacaacagttttttaaaacaatgtgtaaacaacggtctttaagaaaaaaaaaagtccgtaaaaatgaaaaaaaaaactcaaaattccgtaaaaaacat

SEQ ID NO: 217855 - DNA, 1026 bp, Cannabis indica
tttatttttttattaaaataataatgatatacaaacaattaataaattacacttaaatattacactttatttttaaattagcgaattcaatttgaataaatatgattgattttaaaaaaaaaaactacaacaacatttgtaatattttgatataatttatgtatgggatacatatcattagtctttaagaaaatatgagtcacttttttcttttcttttttaaacaaacatcattcttacagtaaaaaattataaaggattttacgagttccattataaagcaagactcacacaaagaaaagaaacctcaatacacaaagtactaattttatttaacaaagtatatatgattgactaaaagataaattatctcatgagcttcatgatatacaaaagaaatcccagcaatattctgatttaacaataagttttaaatatgctccaatactccatctatatctctacaaccatcctctttattctagattaattgaataacttcaagattaattggaggcggtcgaggaggtcaaaatcccccacatccctgtggacgcaacaaaggttgtggaagatattaaaaaggtggttatgagaatccaccacaggctccttaggattgagagtaaaagtttgtagaaatgcaatcccaaattgatcaataggatgaggaggtctagagattgaaacaaaaaggtcctcctgctacgcctcctcaactggtgccagccgctctgggtccagtggtctagtaaacatttgttgctgatactgcatagagcctctgtatgaatggtttcgcaaacaatgccttcaacctttttgagaggttcaatgtcatgaagtcgagcagcgacacatagtgattgaaaagaatcccaaaattttacgagtaaaattggtaatgatagcgtgacttatcccacatttacaggttcaaagggagggactgccctcggtgtggtgggaaaaatgggtcgtccttcactcgggcaacgtcactacaatgacttgggagagttctgg

SEQ ID NO: 217856 - DNA, 825 bp, Cannabis indica
gaagaaatgttgttttgctcaacaacaattggaatacttgggtcacattatctctgcttctggggtctcggtggactctaacaaggtccaagccatgttagattggccgctgcccacaaatttgaaaagtctccgcggtttcttgggtcttacgggctactatcggaagtttgtgaaggggtatgggtccattgcaaggcctctcacggagcaattgaagaaagatcgattttgttgtaatgataaagctaccgctgcttttgaagctctctaacatgctatggttaccattccggttttagctctttcagatttttctaagcagtttgtgatcgaggcggatgtctcgggatatgctttaggagctgttctcatgcaagaaggtcggccacttgcgtattttagccaagtcttgaagccgcgagctcaacttaagtccatctatgagaaggagctcatggccatagtgttggcaattctcaaatggtggccatacttgttgggtcggaggttttttgtgagaatcgaccaacaaaacttgaagttcctcttggaccaacgtttggtgtctccggaacaccaaaagtggttggtggagctacttggatttgattttgagatacaatatcgaccgagcattgctaacaaggcggctgatgccttgtcaagggttcttcccgcagcttgtgccgtccttctacatcctcttggcttgattgggaggtggtccaccaagaagtgctagccgatcccctgttggctaagatttgtgctgatttggaacaacacaaggaggttcccaggttctcctttgatcatggacag

SEQ ID NO: 217857 - DNA, 660 bp, Cannabis indica
agaaagtctctaattgtgacaaaatgtggttcgattcattgtaaaagtgtgatttgtgtccttgtaatgtgtacatagtatagaagtgaggtcctctctttttatttgaggatgctctttgggtgtatatttggttgtttggagtaatgaaatcatcttattcaattaaaaaaaaaaaacccaatttagaggtattttgacaaaacttgttttctgcatttgttcatattaagaaatatctttgagttggttatattaaaaaaaattgtcaaaaattgagtttatgatcttatttgtacaattttaaaaaatatatggtttattttgtcatttaacaaataaaaaatctagctaattagtaatttttacaaaacactgagtcaaaatagtaataaccctaacaaatattaattctacataattttaaaatttttttagattaacttatttaatatatttattcaaaataaaatttaaaatatataactatattctatacatatatgacaaaatagattatccaccataaatattcaaaatattttcttactattatttgtgaaattttttagttacattatcactcaaaaaaatgaaataaaaattaaaaactttctaaaaagttcgaaatttggtactgcttaaaaaagtgtgtatatg

SEQ ID NO: 217858 - DNA, 719 bp, Cannabis indica
atatatagagcattacttttgcttttacatgtaagagcatttttttaaatttttcattgttgaatggaataattatatagtattaacatatattgttcagttgtttggtatatatatatttttttttttaaaaaaattatgttgtgattttttcaatttttttatagtatctttatatattaaaagtgtctatctaacgacattttttggttaacgacatttttagtttaaaagaatatactttaaaaataaaaaaatattctgttaaatttaacgatgttagtagcctctcgttaactttcaaaattatataaataattatacccaaaaaattaaataattttttttaaacgtttaaacccaaaaaaattaaacatcgccttcataataggatttgattgtctatccaggtaccaaccatctcacgttaacctttttttttttttggatattttttctttttttaagactctaaatcaaaacctcctaaagaataggatctgttcaaccgattccttttcaatttcaaaatctgtaaaatcgatggcctacacacccatgatatctttttcgttttcttcatcgcctacacactagaactgcacttcgacaccacaccctttcttctaagctttctattttgaccgattccccactcaacgcttcttttgtctctaccctgcccctttgtctctgattgagtcacactttttttattc

SEQ ID NO: 217859 - DNA, 841 bp, Cannabis indica
taataactactcaagtttaagaaaaaaaaaatagttactgtcagttgtttttttatatatatgtaaaacaaatcataactatatttgaatatacattaaatgtatcactacaaaaatgtttacatttagtcctaacaaaatttatgaataaaagtaaaaaagttatgactaattataaatatcactcctatattgtcattaaaaagtccctggctaaaagtattagtcacaaaaattacaatttgttgtgactaaatgtgtttttagttacaatacttattgtgattaaaattaaattagtgacaacttgtagctaaatactatgttttagtcacaagtaattttttattgtgacaaaaaatcacatttagttacaaaaaatttatattgcgactaaaaacttataactaaaatcaacagtttttctagtgtatatccatgtgcaataattgactattttaaattctactttccctatattggtaatataataaaaatatagaaagaataattaaatgtgtactgtgatataaaaaaaaaaagtgagatatcttttcctaaaaacagaatgaaatctgtgtatccgtagatacaaaaataagactcgtatggattgaaaggcatccgcaggcttcctcttctttgcttgtttccctttatagattaagagggctcgatgagaacatcgaggagttagttgtggctggctagaggcccaaatcaagtgtgaatttaactcattatttcaaaattgacttttttatcataattttgagaacaatcaacgattgctgatcacaaaaatgtcatttaacatactttattaaaattatatgcgttt

SEQ ID NO: 217860 - DNA, 565 bp, Cannabis indica
gataacatgcataccaaactagctacaaatctacttaatcaagacgtaaaataacctctagaaaatagtagacaaacatcaacagcaagtatactatagattcaagactatttctttagaaaagtcatatttttgagctaaaaattccaagcttgaaacaaagaaaatatcatgcattactaacagcttaaataacttcaaattatcatgcttacatctctgaaaatatcaacaaaatacagcagcaacaatatccaaatatcatgcatgcaatacaccattttcattaaaaattcaacaaacttaaagaggaattgcttagaagctaacctagcttgaattcaagaccaaagagggatgaaatcacaaggaaaaatcccaagtcctttgctgcaccaagaggccgaaagagagaggaaaagagagagagttttgaaatttctatttttcttttctaactttgatttttttttttttgaataaatgaaataaaacaccacttactccttttattacttcagcccaaataaagcataaataaacatataaaatccaattaataaat

SEQ ID NO: 217861 - DNA, 594 bp, Cannabis indica
taaattatttgaagtttacattatttaaattagctcatacttacatatgcattgcttaatcttaagaaaaacatgcctgaatcaacctagtagcattcgttatggacaattcatagaaataaccaaacaaaagatttattcccataataaattcaattctctctcttttttttttatgaaaaatgaagttttattaaacattaaaatccaataccaaacaaaattaattcccataataaattcaaaatctcttcaaatcaacataaactcaaacttctttctcatcatcatcaatggatggaattgattatatgtcatataaaaacttctcaaatgctttcatgtgttcatgttggagaccaatcgccactaacaaactcccatcctcatcataagatggactagatagcaaataaattaaaccatcaaagagaattgtagtaggtcccacaaaaattggtctaccccacccaaaatcaagatcataaaagggtaatctaatccaacttagttaatcccaagattagggcttctaaaatgtatagtggtccctactactaagagctgataaattaggctgaagttctagataat

SEQ ID NO: 217862 - DNA, 1490 bp, Cannabis indica
catttttattttttattaatttcgataatataaaaaaatcactcattattaatgtagactatagttagacaataataaactctattatttttaagaatttaaatatgaaattatcttatttttggattttatttttggaaggaaatcaacaagaatattataaattaataaaacttgtgacaatagtattataataaataatagtccacaccataataatatttgttttatttagtgtgtgtgtttatttatttttactttgggataattactaaactttatgagttttcatttattataattaataatattaaaattgatggtcaaactctatatctcgtttagttaactaattatataaaaataattatctgcgaaattacttatataataacaatttaaatttaaaagattaattaatatttttgttccctgaaattttgatactatttgattttatctcttaacatatataatttgctaaattttttcctaaaatacaaccgttacataattatgtatcttctgttgggttctgtttcttttacagttaaaaattagtatttttacttcttaaactttgaccaatacaaaaatttactcacttttatttgaaaataataattttaaaaagtataatgttctattaattctgaaagaaaaaaattaataaaaattattaaaaaatctaataaaaatattaaattaattaaaaaaatattaagcttactttgttttttgataattaatattaagcttacttaaacaacttaaattattcctaaaaatatatcttcaaactttattttgttttcaaacatatcttaaaaaattaaaccaaaattatttaaaatctaataaataatttaaacacgctaaaattttttaaagaaaaaatcaagcttatttatatttataaactcatatattgaaaaataaagaatacctaattaaaaatttaataaaaatataaaattattttaaaaaaaaaaattagaaattaaactaaaaaaaatgctatgtctacttaaataaatctagaatttttgaagaaaaaaaaaaagacttaaacttgttcctgtaaaatttaatttttacaagaattaaaattttaatatattttttatatctcaatgaattttttataaaagataaataattttttaaatcacttattagttttaaaatgttaatttcttttttaattttcttaattattcaaaatgatttttttaagatataaattaatttttaagatttactaaaaaaaatattaaattttctcatttttattttgtagggggcacaatttgatagttatcaaagtttaggtagctaaagtttttaattaacaaagacatgtcagtatttatataaaataatgagatagaacctaacagaatgactaaaaatctgtaaatataaaagttgagtgaaaattttaacaagtcatatattttaaagacaaaataaatattgtcaaaaaattc

SEQ ID NO: 217863 - DNA, 731 bp, Cannabis indica
gcccacttagctagagagtgagctactttattgcaatctctatttacaaatttaaaacccttacaatcaatcaaaagattagaagaaagaatttccaccaaaggaacaccccactcggctctaagagccttctttgacaccagctgttttatcaccgtgagactatcagagcacacaaaaaaaggctggtgaagcactttctgcatcagttgaagccccagtttaatggctaggacctctgccatcagcaccgagatgtagccctctgtgtacataacctcagcagccaccagatttccctcttgatcacgagcaacagccgccataccactgccctgctggtgtttgccgaagcctgcatcacagttcaccataacagtaccagcaggaggaggacaccatatcaaattcctttgttctgtcttcgtattactgctagtatgggtgtgcataagtgtgttgtctaggtagtctagagcccaaggaatccagcttctcaaattagtgttcttcttttggaagatacgctggttcctttggctccaaaccagccaactcaaccccaagaacgtgtcaaatttctgttttgagcactgatttttccatgaaacattaggaaactccaaaaaagatctttcattaaccccgagacttgtgggaaataagtgccaaaatctgtttctttccaaatcacttttaggctaggcatgtccaaagagcatgcccaatcg

SEQ ID NO: 217864 - DNA, 761 bp, Cannabis indica
aagttattcttcgagtttgttactcttttcgttgttttttcgttttttcttctcttttttcggttttaggggggtgttaagtgtaaatagagattgcagatactatgggatgggagagaagtaaaggaatttttgatgggatcatcagcaactagatgtacatcgaatagtggatttattaaaatctccatatttatattatttttagcttataattatatatatggttaattcttgatgttaaatcatctttcagtatatacgtttatgtgttaatttgctattgtcaaaattatgtaaaactcagatttcaaatattgagattccatctctctctctctcacacactctctctttaattccataattctcatttattaatgttttaaattttgtttcaaattatggatattatgaagaataaaccatcaattgttaagaattattattcagaaccaatctttaaaggtgaaaacaccatattcgtcgtggtatatatcttcatttgtatatgttctctttttattaacccatatatattgcacttgtatgaatctttcaaagatgtttgggattaattcaaaaagaaaatgaatccttttccactagagagaaaaggaaggaaaatactcccttttcaacaacaatggttttcctctttttccatgctagattattttttaaaaataaaaaataaaaaattcacaaggacaattggaatgaatgagagagagaaaggaacaatcaattggaaattaaat

SEQ ID NO: 217865 - DNA, 806 bp, Cannabis indica
tttttaaataaaaaataaaaattcaatgacctgaaccgattaggaataattgtcataatttactttgacacttaacagtcagctacttgccgaagttctagaattataacttagtattattactgtaaaaaattaaaagtaaatatttattagcagctaaaaattaaatttatgtgtttatactataaattattattattattattattattcaagtctagtaaactatattataaactataatcccaagtgtacgtataggtgctttttgtggttttgttttacttattataagaaatattattacaattgcttacaattatgtttattttatatatatatatttagtctaataagaatcattctcgatgtgtgtctttatcaagtcatggtcacatgagtttaattagttaaagcaatatatctttataatattattaaatctaacgtaggtaacttaattataattaacattgcattttataaccaaattagtcctcttttattatattaattttaaatataatatatatatatatattagtgacattaatatgataatgatctgaataagtaatctaatctaaaacttcagataattaagctcatcaagtaagtacgtatactttttttgtctttttaaatttatttattttgacaaataatacgtaccttaattgtttttcaaaaaagaaaaagaaaatagacaagttaagcgcagtcaatgttttggcttaaatttttatatttggatataaattaactattaattctaatgtgtataatatgcataatcattattttga

SEQ ID NO: 217866 - DNA, 512 bp, Cannabis indica
gcatgacacaccaaacacaatcatttatcactatgattcacaccaacacatatgatgtactcaaatgaatatttttaacgtaaaacatgaactcatacaaacactttttacgtgaaatctcactaaaataccatttattaacaaaatatacaaatatgtaattatttaccaaaatcagaagctagcatatatcttaatcatttatacagattataaaacatatttaatctatctagaaacacgtacaatttattatccatatttatgtactaatttacacttaaaactgtatataaaatactaattatttaaataaataaaataacaaaacatctcaacctagtcttaaatttatttcatagactagaattatattgtaacatcatattgacagttcccaaacagtgaacacaatttttaatatttactctatttaaaactcaattaaatagttaattagtcacaaataattataataaatacctacagaaactaataaattataaaaacct

SEQ ID NO: 217867 - DNA, 869 bp, Cannabis indica
tattattatttatttttatttttattttttagttttagaagtaaaaagtaaaataataaaaaataataataatattacaaaaatatttcattggcatcaacgaataaatatataataaatatatttttgtttatgtataacttaaaaaattattaataacttatgattttttttaaagaataacttatgattttaattgctatatatatatttaattttgtttatgtataaagtttgattaattaccattaattaactagaaaagaaactaaaataattaattttaatttcaggcatcttcattggcatcaacgaataaatatataataaatatatgctttccaaatatagcataattatttttcggtctacgtacctacttgcatgtaagtatgtaaccccaaaaacttttagtatccaatatttttgttaaggatatgattttgtcccgttattgtactttcacggattgtaatccgtgatgtacggcagccgtcagatgagggagttatttgatctgacggctgagattgatctaggggtaattagggttaaaaagtagaaacgtaccctgacactcatttaatgtaccctgagacccatctaatgtaccacggaatacattccgtgaaagtacatcacgggacaaaatcatatccctatttttgtaatttaactgaaaactaaatttttccctaaatgtaattatcactttaaaagacgtattaatagttcagtgtaaagtttatgcattaagatgtatttagaaaactttaatcattataaaaatcatttcatcacaaaattggaacgatgatagatctaaacgaggtcatatataggactttttttgacccactttcgctcat

SEQ ID NO: 217868 - DNA, 666 bp, Cannabis indica
ttctttcttttctttctattatttatgtttctattcattaatttatgttcatccaaattgatcataacccaaaattacaaatttgatgagtaaagtaatgatataccatcaatgaagcttcacccacttttacttttccttcttctctggtaggaataaacattatgaaattctacaaatatatataaatatatatatttttgttgtattggggaactaggtagaagggtttgatatctaaatttggaatacatgcactttctatttctttattcttctctttttcttttctagatggtttttattactaaaagaaagagaaaattagtttagaattgattaaagattagtaccgtgataacaatattaattgaaatataaaaggtgaaaaaaaaattacttttccgactacaaaaaaaaaaaaaagtaccaattactttaacttgatgttgtcttaaacttctaacaagataatcatgaggtaacaaaaaattaatttttatgtaatatatgaaaagaaataatgaaaagtttacttctttttttttttttttggatgaatcatatttttttaatgaaatatgtaaaaaatacttattagaaccattaaaaaaattatacaataaaaaatctaaaatgaaagacaactttgaaaaggagcgggga

SEQ ID NO: 217869 - DNA, 833 bp, Cannabis indica
gcatagaagtctaccagcacagggtttgtctgagttaacgagcaaatcatcgaacgaggaaaatgtttgttcttggctctaacctataaaattaagtttaacaacaaaatacataagtaattatgttacaacactgatttagaattcatgtacttctctcaagattgaacggttaatacaaatatttctttcaaagttcccaaaaggaaacatttttaatgagattattgtctcttataagaaaaagaacattatgagatttttaattcacaccgcgaggccagtcagttgaacccatttcgcctcaacttcagcagcttcacttaaaatttctatagtcaattacaagatttacaagtcattgtgcagaacatatatggattcaatccatcgagaaaaataagattttcatagaaatcaatatggagcgagtaagaacagaaatctgcggaccaatatgtaagtacaggtgtgttgaatgaaaggataaatgtaggcaaaaagaaggaaagtatacagtaaaagcttattcgtattcagaaaaaataaaaaatccaggaatgaatatcataaattttaagatgagaagaacatccaatgagtttagattaattgacacaaagaagtgacatgtttgagaaaattatgataatgataatttgattaacaagaccttatgtttgacaagaatcccaccattataaatgcatctaacttttacaatttggttcaatccaattacttgttgactaaagctagttttggcattactgattaactggttggcattgctaattccaatcataatgctaaaaatctagagttcaggagtc

SEQ ID NO: 217870 - DNA, 568 bp, Cannabis indica
ttgtgatcttttcagcaataatgtgttgattgaatttgtttgtttgttttgtttttttttttttttttcttttggcaatagatagttatataggtagtaatgtaacgttgaacattgtaaattatttagaaaaatgcacatagattataaattttaaaatgtcaatacgaggatttttttttttttttttacatttaatttttttatttataaaatattttttttctataatagatcgtgcaatttggattggatcaactatctgatgaagaatattaagctaccaatgacgtataattaaacttaagactttttcatgctaataatttatgtaattttaggatgaactcgaccaacaacagtaaaagcctccaacacatatcctgataatctctcacgatacaccccatcccaagctcaaaattaaaaataataattaatagataaatcaaacaaaattaattgcatgaaggtattaactaaaatagtctaactaaacttaataaccgtttacacaataatagagaaagaaaatattaacaacaatctacaaaaaaaaaaaaacgtt

SEQ ID NO: 217871 - DNA, 694 bp, Cannabis indica
cttcatcgtagctctgagctctctcgtcttacaggttcgccattttcactttctattaagctcttcttttaaagttctctttgtataacagtttatatgctcacacttatttgtttgaatattcttctttgtccatggactttgtacccccttttctggttttctgttgaatattttgattttgatcggaaaagggtttgtataatttaaattggggtaaatgggtattttttattttacattttctctctgtgattgaatagtttttgcgcagtttgagtatggaagatctgggtcaagaataggtttaggcatatatcgaattgagtcaaaatgaaaaataaaattgtttagattgtttcatttgtcttaaatttattgatttagtgttaaagagaaacaattataggtaatggttttaacaggttgtttcttagtagtactctccatctttttcatatgaaattttcttcaaggaaagaaaattttgcgttcatttgtcttttgtagatttttttttcttctaatagacagttttagtttttctgggaattttgattatgcaagagctttagtgtttgtaatgcatctatatatattttttagttagatagttagatactacaaagggaaagaagatgggttactggtgttctattaagcttgatttggttatccttgtaatattgataat

SEQ ID NO: 217872 - DNA, 822 bp, Cannabis indica
gagtaataaaagaaaaaactatagttgtgataattgaaaagataatagaaaaaacttagtgatgaaaaacagaaaacaatatcattaaacgagaaaaatgataaacacatgaatactgaatgagaataggatgaattcataatcaacttcttcttagcagctctgcccaaacccaaacatgtaatgccgaagttgagaaaccaaacaatattttattaaaaaagaaaaaaaaaatcccattagaacaaaaacttacaaccactaagagacccaaatcattttgtcttctccttcttagtttccctgttcttctaataatcaacaattagatacttctgcctccaaaatcgcgaaacgattgctgaatgcgcaacttcttctcctcttggtagttaaatcagctactgggtctacgaatttggccccaaattgttcttctaggttggagaagtttggataacattttgaaaagcacaggcttgcttgctctggagaacagggatgtgatgtgaagatggaaccgtatatttcttcactaaagacatcatttcgaaactgctaacattattatgaggataagccttagtattttttttttattaaaataaaataaatgaaatttaataaaccaatattattgatagtgtaaatactattttgtactatgtattttgcaaaaattaacaattagatattctattttgttaaatgacaaaataaacactatattttctaaatagtacaaacaagaccctgaattgactttttctcaaaattaaatttaataataatccaatctaaaagtgttatgacaaaactatt

SEQ ID NO: 217873 - DNA, 897 bp, Cannabis indica
tattaaataatttaatattaaaaagtaaccaatccaaagtaactgatccaatccgcagttttgcggattggattggattgaatttgagcaattgtgcggattggattggatccaaaaaataaaatccgcacttagtgcagattggatgttgtttgactaaaaaagtacgaattggatcggatgaacagccctaaatacctaatgacccacaattactaaaatgaacactttattttggggcaaacttcaaatagcaatacactaatatacatatgagcctatactaagaatttcaatccaacataaaaatataatattttgatatgtatattataaataaaataatagtattgaaactagaataatttgttattttcaaaatataaagaaaaatagcaattttgtgacaaatattaaaaatggtagaatgaacaaaagaattgcatgtatttgtataaaaacataaatgaaaaaataataatttttcaatttaataaattgtgcttcacttagggtgttcacaaaatatccagttcgcttgatccattctaatccaatatgtaaaatacggatattcacacttttgcagattagattggattgaaaaatctaaatctacacttgtgcggattagatgttgattgacatataaaagtgaccgacccaatccaatccatgcatatttagatatatttaaaaagaaatatatatatatatatatgcaactaatattttaatgtaaaaaatagtaatttaaaaattctaatacatacgatataaatatatttcaaaatataatagatcaaatttatattctattcttatttataaagaaaatataatctgaagctaaaattaaactttttttatacgttactaatttttttctttttttac

SEQ ID NO: 217874 - DNA, 650 bp, Cannabis indica
atgaggtgactcagaactaatagacttatcattattacatatcaacttaatgccttttctaattagttgttgttagattaagtgaccatcaaaaggaggttgtgtattattataaaaaaattgtaattaataattataaattattattcttatgttgtaactaaaaaaattgtaactaaatgtataatttttaatcacaatatatttattgtgactaaaactaaattaataacaatttctatctatcgcaagtaactttttgttgtgattaaaagtcacatttagtcacaaaaaatttatattgtgattaaatattgtcactaaaagtaacttttttttgtaaaagtattgagagatcttatgtggtgcaatgtaatttatatatatagacgcctcaaataaaaaaaaattaaaaaaaaaaaaaagaaaagaaaagataatgctttttctttgaatttaattctaatgtaatgacataaaagcaagacaatgctatacttttaactacagtattaatcatagttacctttaaaattcaaagatctcatatagtcaattctccattcatcatgtcaattagttctatttatcaatgggagataaaggatgtgatataattcagcggtagaaaagtgtcactttaaaaaaaa

SEQ ID NO: 217875 - DNA, 792 bp, Cannabis indica
ttgtactaacataataaaaattagaaaaaatacattatatcaacattaatagtagtaagcaagttaaattttttaaatttttaaacttttaaaaatgtattaaaaaatcaatgttaaacttattcaaaatgctcctcactaataagaaagtaataatatgtgattttttgttgaattgggtaaatatctcttatttaattaatattacaatttgttttttttaatttaaagagagagaaaaatgaagagaaaaaaaaaagaaaatgaaaaaaaaaaagaagagaaagggagttaacatgtaaaagagactaaatataagcaataaaggtatttttgtaattaaagaactttttgaaaagtaaaattgaaaaataaaatttataaaaaagtttaaaaaaccaaacataaataaaaatgtaaaaaagataccaaatttgacatatagtgtaaaaatcccattaaaatttcatataattaattgtattttttttttatttttttattatttatgtctatttgtgaaataattcctaaataatactaatgtaaaactacaatatttgactataaatacaaaaattaattgaagaaaacgtgaaacacatattaaatgatgatttaccagcagtaattaataatacatataaaaagaaaacgctttcttgaagttctaatgtctcaagttaataattggtaatatagttaaaggtgattcacccccttaaaagggtcactcatacactcttaatttatttcggcatcctgaaagatttttttagctaattttttttt

SEQ ID NO: 217876 - DNA, 542 bp, Cannabis indica
aatttattaaatttggccattttcttaatatttttaaaaaatagacatttactagttaccaaatttaaggtttttattaatagataaagaaagatgtattttcaacttctcctgaataatttagggaaatttacatggtatactaacttttgtcatttttttacaaaaatactgtcaggcggtattttttacttttttactgtgtttttttataagtttcatactgcagtatactgtgttaagttttcactggtgttctactggtgttttactggtgttctactgttgttttgagctgttctgctttgtgttttactggtgttttataaaaacacagtatttttgtaaagatttccgtgtgacagtatttttgtaaaagttaacccaaattacagtatttttgtaagttatttatcttttctcctccaggtccacaaccctattcaaaagcccattatcatgcagcttagaacctgacacaaatgggctttgtataaaactttagacagttcataattgttgttgtttgttccaggccgttg

SEQ ID NO: 217877 - DNA, 650 bp, Cannabis indica
attgccctaacaattaagttgagttttcccccatttactatggtaccgacgaccttcactgagagagagaacgtctaaacaagataaattgaagataatttgagatgtatcttgatgaaaaatttaatatttaattagtgctccattaatgtttatttaaaatcataaaataaaaataatttcactactatacaaaaactctattgtttaatgttatagctaaatataatcataaaatagttaaagtgataatatgtaaatataaaagtaaagcatttatattattgtgatgtaaattttattgtaacgtccttgtttcaaccctctattgggtcttcctccacggactaataactcttatacacaggtacgtgacttttggctgcttcatggactgatgactggtcctacaaactaacatgagtgttttcagcgtactttgtcttcacttgcacactttttgggaagttaggtcacccatcctgaaattaccctaggttaagcacgcttaactgtagtagttttttttatgataggctactgaaaaaataagatgaaccttgttgatataggtaataccaaatcaatccatttaagttctcttcaactatatagtcccatacctacacagtctcagaatcatcacacat

SEQ ID NO: 217878 - DNA, 528 bp, Cannabis indica
caagtgctgtctagtaccttcttatgtgtcaatatcgctattagtccaactaaagtatcgggtctcatataatttaatatgataggttttaaagagtatcactagccaattgcaacgcgacatgtcgcaaaggtggtaggcaccactggtgcctaataacaatgctcttataataatttaattgattaaagacaaaaatttcttaaggattcattgaaaaagaaaaaaacaaataaataaattctttttttttttttgaaagtgaataaataaatcatacaaaaatacatattaatatgtggataaattcaaatatttacattaatttcaaaaatatatatttaaatagtttaccaatatactttttttctcttcttattttttttttttttttttttgtatgaatcagaatttcattgcacaaaatctcaatttttcttacaaactataagcaccaaaccatgttaggtaaggccttgatatctatacaaatttacaatgagttgaaccacacttcatctttcttac

SEQ ID NO: 217879 - DNA, 560 bp, Cannabis indica
cttttcatcgagatttaaatgagccaaaatgtagagatagtcagttgtttcataaattcagtattcactggtttgttatcgaagtgtattatactgattagtcattttgggcttgattgccttggcattgtaactgattgttctatagtgaactccgtaagagaagacatgaaagtataataaaagagtaattttgatactatttcaaaagaattattataccctatttgatatccaaatcaatccaatgtttttagcataattacatgtttggagaagcatcatgataattcatcattaatagcaacttttgtgccatgtactctatctgaagcattattcacctgaaaaatcagacaaatattgtattagagcatctaagataataagatggtgtttcacataatgatggaatcttaattttcaaaaaggtttgatttacctctttttcccaatcagtgcatattgttataagagcaagacacaatgcttgcatgattaaggccactatgattcctatccaaagcccctgtgtgaaacacatgttgattattcatatt

SEQ ID NO: 217880 - DNA, 602 bp, Cannabis indica
tgtatatatatatatatatatatatatatatatatatataagttgttttggtaagcaaaatgccaaaatcatgtttatggatattatcaaaatttgcatagttgtcataatatagattatattttgaaaattacgaaaattaatgccgaatggtatttatataaaatatcaaaattcaattccaaatgagcgtaaagtcttaagaaaaaaaaattgtggttgtttccactaattaagttataattaattaattaattaatggttaatcatatgtgattgtatttttgtatcaatggcataaaactagcccttcaaaaatatgtatatgttgtttacgatttattgtcgttttcaacgaacattgtcgttttatatgaaatttgtcgttttattaagttagtgtcatttttaaaagaaaagtaaagtggtcgttaaaggtaaaaaaagaattgtaattaattaaaaattaaaaataattaaataaattatttgtagcctgaacttaattatatttattttcttataaataaaaaataaaaagtactttataaatataatggtaaaaaaagtcttattaaatatttaattaaaaaattaaactc

SEQ ID NO: 217881 - DNA, 632 bp, Cannabis indica
atatatatatatttatgtatgcaggaagttagtgagagttgttaccaaactatagtgaagtcatggtctgaaattgataaagttggagctatggttgatggtctttcaatacttagcaaaaaattcaacacttgccggtattttatatattttttatttatttatttattttaattaatcaattagtttctctataatattaatgttaattaataattaatgatgatatatcatattaattaatactaattatataattctataatcaacaccaaaatattttaacagctacctccaaacttattttttaaaattattatattttgtatttttactattaaaagatataactatttttcaaaatattatcttttagatttttaccactatgcataacataaaaacatgaatttttttacacaataaagcctagttagactttttggccaaaaatccccaatcggcttgagacggccctaaaattaatttctagtatatgactaatgtaaaaaaaaatggtcattaacacttttacacttagtaagttttattttgataaaattgagcttaatgttttaatttgtactgttttaaaaatagataatctgaattattatataaaaagtcccatc

SEQ ID NO: 217882 - DNA, 830 bp, Cannabis indica
cggtagacttgcgcgtgacacatggacacgaaatattgacacgcagaagcatccaaatcgttatttaggggtaaaatagattgatgcccagagctgaactgttgtttgaaggacaaaaaacaatgagctccaggataatgtcagcctcgacagcaagtgtgcttgcacactggcgcccggtgatgccttagggctaagtcactactagaactacaagtatgtttgatttttgtatggttgaaataaaacatgggactaattcggtacaagacctagtatggaaaattatataagggaaatagtatgaccttatgtgactctaaagtccattattttggatagaaaactgaagttcacctctatgttttaataaagtctacaaagggccatgagtacgaagctaaagtttagtacaactttttacctttagatggctagtccataaggatgaatcacatactgaaagatatgttgcaagcttacgtgatggattttaagaattcatggaacaagtgtctgcctttgataaagttttcgcacaataaataattatcaaagtacgatagggatggttccctataagatgctaaatagtatgaagtatctaatttaaaaaaaactagaacagaaaatacttagataccaaagtcagttcaacggaccagtaaggctttagagaagattatggaccaaagtacttgcttctacaaaatagataagtaaaaaaatatgtagtatttgaagcggggtacgttacaaatgaagctcagaaatacagaaactcccaagtaggagaatcatgtctttctatgaatattatcagtagaaaa

SEQ ID NO: 217883 - DNA, 564 bp, Cannabis indica
agagttttttaccattgtcttctttttcacctcatttgaaatatacaattacagagaaaaacctatcttcatccaaaaagttcttgcatgcccaacttatctttgacctatttttttcgtgtaatcaatgccatttttttaaccacactcctattatatctcggacccttggaccggagatttctcgggagaaactaccagcgttattagatgagtggtggtggtggtaaaaaaggagaaagaatgatggttagggagaagaagagtagaaggagaaaaaaagattttagtttaaataatttatattttatttttaatttaaataattatattatatgaactaatgtaaatatatcctatagcaaaattaaatctgcaaataaaaaagtaattaaacatgtttagacaaaaaaaaaatgtttaaggagttaattgttataaaaagtaaaatttggagggtttagttacaaattttagttataagaaaatacaattatcttatgtactatgttttattttaattttttaaatttatagttttggttattttggtagtttttatgt

SEQ ID NO: 217884 - DNA, 618 bp, Cannabis indica
tgtgagtgagtgaaattcttcattttcatacaaagcatgtgagcatagtcccacaccacacaattgcaagtgacataaattgtaataatggatttgtgccgacactgtcgacagagaaattatttcataaattgtaataatatgaaaaataatatgttgtagtttattgtactgatttttttgtttgggaaaattacctattttcaagtaaaaattttacatttttacgtttaagaaaaattacatgaaagtaacaagaaaacaataacattcaaaataatatactaataacaaaaaattaataacaaaataacaagagtataacataaaaatacataaaaatactattttttgtgaaataaaatcttaaaaaccgtaaaaatattttttcgttaaaccatttttttttgttgggatattttataaaattagtatgagttgaacaaaaacacagtcataatatatgttggttaagtcaattttaattatgtgtcagattcacatgatattgtttttattctttgggttgatgatatattgagttgaaagtgatgataatgtaaatggtcccctgattttttttgaaatcaaaattcaggatatttctctctctctctc

SEQ ID NO: 217885 - DNA, 806 bp, Cannabis indica
tatttgtttaattaatatttttatgtgaatgaaataaaaatgcatatgatcgactaaataattatcgattttaaaaagtatacctacatccagggtcgactctggacatatgcagataaggcccgtgcctaagacccacctaggccagaggccctaaaaatatttctccttttaaaattacacatgttttttttttattgattttgaaaatataatattttttctaataagtgccgaaaataatattttacttatggcccgaaaattccaggatcggccctgcctacacaattaataaaaaacaattaaaggctaaaacacaaaccgaaataaatttgatgaaattctaaaaacaaagtacttaaataaataaaaatatcattgttatagtttttttattaaaaaaaatatttgcggcaataatacttgaattcttatggaattacatgtgtgtcgaatgtatatgatatgtatttattatatttatgattgacaacaatagaaactcgacggatcggtaaaaatgttacagtggtataatttagaattttagtggtaccgataatttttgttataaggaggtattgagaatttttatgaataattaggaattatgtgattatgtgggttattagagaaatgaccttttattgcaagttaagtatatgtaagtaaaagagtgagggcatttggtaattttatttatatagtttattaagttctgagtaaacttatcacgatggtcctggattcacgttcgagtcttaagatagtaaattatcataagacacaatgatttttgtctt

SEQ ID NO: 217886 - DNA, 602 bp, Cannabis indica
cataataataataattcaggtttattctaacaataattttaaaatttttaatcaataaatatgtttctaaaaacacaaaataaacaaatttgtaaaattaaataaataaatattaaacagttctaacatttataaacaaaataattttttaataaaaaaaaatttattattaatcttatttggaataaatataatttaattaattttttataaaaatataatatcaaaactataaacattaatgtatttaaattatagaagtgtgtttatttatagttttaaaagcataaaaaaaccaataaaattcaaatgtatgtttattatgttattctaataaatgtttataattatagtatgtagttttatattttttttattacattatttataatatctcatattcattaaaaaatgcaaaacaaataattttacaagctaaattaaaatttaaaaatattttgtgtcaaaaaataaatatttattatctgtttcaatatatataaattattataatattataattataaatatgaaataaaaattatatataataaagtgtatataagcttcataaataattttattattatactatgagtgcg

SEQ ID NO: 217887 - DNA, 2306 bp, Cannabis indica
tacaattgtgcttaaaatttgacatgcatgcaggaaaaatgcgctagatgttgctgcaatcggttcccttgttgagattttaaagacctcaaccccaaatttacagaggaaagctgcttccatccttgagttcatcgcacttaataactcaacaaaggacatggttctctcagtggatattgaatctggtctagatgttgttttccagcaaaaagttctgcaaggtaaagggaacattttattgaactattggttttgtgaaatgctttgtttcatctatgatgtgctagtgtcatgtttcatccttaagaattaaaatgggatcttccgaaatgtgctttacttgtactttcatgatagcttcttctaccattgtcaatatgcttttatgaactactgttgatatcgtgaacttcttctctgatatttggatagaataactctgattgcagctacaaattttatctgaattcatctatatatggaggttcttcttctctagttgtattggtttttcagattagtcaatgatggcagatgcctcaaatgttgactcttcctagctactagtacaattttgttggtttagtgtatctgtttccttgaaattttaattgcttctttgtcattttattttgtaaagctggaatttttctcgtcggtacaacaaagtaagacatattgaatgcttgcccatattttcaatttcttgtttctgttgtacttttgcagacacagattcagatttggagggaaaagagccagaaagatatgctcttgaagttgaagaagcagggcttgcaatttctgcagcctctagcttactaacaaaactactagacttggatcagtttagccgcaatataaactcgagctatttcaccaagttgttgcgcgatatcctcaagtctagtatacccctccattgcaaagattgggttgctgcttgcttagtcaaactcagttctctttcgggtcccaaaccgaacctcgatgatcctatcaacatggaggtaaccctgtacgagacaataccaagactcatagagcaactcaaaacatcagcctctctacaagcgaaagaagcggctgtcatagaactcaacagaataatctccgaaggtgtcattgattccacccgagctgttgcttcagagggagggataattcctttggtggagttactcgaagaagggagcgagaaggcaatcgaagcaggcttggcaatactgtataatctgagcatggacagcgagaaccatatggaaatcattgctgccggaactgtgcctgttttgaggagaattgttctatcgcaaagacctcagtggactcgggctctacatttgctgaggacattgcccacatgaagagactttgttataaaatgactgctaaaagttaaaacaatgtagtgaatttccattgttatcatttttcacattcctatagatctaggatcatacccttttgagcaatatacaagaaaatccaagctcaccttttttattttctatggaaaggaatctatgctcacttttgttagctgtaaatgattgtgttgtttaaccacaaattacaaaagcatgtcatttctataaaattacaatgtctttaaaccaaattcaaaataccctcctaggaataaaatgatgagatgaaaaataatctggtataatatagtcataatcacattcatagtcactttttctttaagtgctctaaacttttcttgccttaaaaatactctccaaaagaacacccacatgacacaattgtccgtgtctcaaatcgtgctccttaaattttgaaatgtacgtgttctttaatttttacatatactaaattgtattttttaaattttaacatgtatcgaatcatgtcttttgtactaatgttcatgtcaagaggctatttgagaaaaaaatataacggtctaatcagttcaacacaataatttaataaatatcaaagtttaaagaaatatactaattaacattgattaattattaaaagcttcttaattattatattcaagcacaaaaaaatcaaagaaaataagacacggtttatggtctaattcttggtccttttttgaatgaaattcatttttattaaattcgaacttcagctaccaagctaggcactaaattagttgggacatccctaaactgaaaaacacaatcaatatatgaactagaggccctggcgaacgcgtgagctactgagttcgttgatcacttaataaaataaacagaaacatttttcatagtagcaagcaaatctttacaatctttaataaccaa

SEQ ID NO: 217888 - DNA, 2749 bp, Cannabis indica
  modified_base (20)..(20): a, c, t, g, unknown or other
gtagcagcactttttaaacnctgtgatttcgaaggtacgataataaaatgtactttgccaggcaaggatctgcttatctacctaatttcatgagacaagcttcaaatgatgacgtgattgaggagactgcaaacccagtaagttttgttctcaatacacatcagctaactaactactagtggtgttcatcaaaccgcccacatcataaataaaccttccatggtgtggctgtagtttgaaatttcataagtactgtttaaaccactgcattatttgctattatttttatagttcttgttgaatacttttagtttttgaggtttatgcagtgcatatacggtttgaaaatttgttcaaactgcatgtacattcgcattgcgaacacccctactaactactttttaaagttgtagatgctaaatttaattacacggggttatgataaattatacttgcaattatatttgttaatccgattcgcctatgttgtcttagaacaccaccaccactttaaactctgccgccagaagatttgacagtaggctgtttttcgcacgccaaggatctgcttatcaagctaatttcatgaggcagggatccaatgatgaggtacttgtcacttgtgctctttctttttttttttttttgttttcttttctattttccttctcactctcactttgttcaattaagtctcttaagactcatttttaaattgcaggtacttcctcctcctcaatcagacacttgtcctaaatcctctgatgttagaactgagggtctttattatgtttctccagaaagaccctcattttctaggccttcatttccaaaacaacctgctgagcaatatcatgatgaccctcctaagtttgctacacaaagtgaaatactcagtcatcaaagggagcaacactcttcctgctctaatggttggtagtgtttgattgatgttatatatacataatgatgcttttaactcgttattctcaatgttttcatttttaatatatttgcagtaatggaatggtcgccaaggatggatgttgcagaatcaggacaaaactttgtcatcaccgttgagattccaggcgttagggtcaaagacattagggtggaaattgatgataataagtaagatttgtgtcgataaacttttatataaggtgttatgtttttacacgttatcaatgtgagacttacaagtttgcgatttctatggcaggttatctgtagcgggaaaacgctcgacacagcactggcaaatgtcaggctgttcaaatgactctactgcctctgcatatctcagaagagagattgttgaaggcccatatgaggttgtgtggccacttccagctaatgtcaacaaagactctgtctcagctgagtttctgtaagtcatcaccacatttctatactcatacacttatgaatgattatcttttgaatctgccttaactcttctcttcctaaaataatgtaaaactgcattagctcttattagcttacttttatttgtttcacttgtgcagagatgggtttctacgtgtgattattcctaaactttgagaacctgttagtgactaaggctatatatataagacaatgttcaactatgatgaataaaagtgtttagagctgtaatatattgtatcgaagtacataatgtttaaaagtgatttgatatgttgcttcataatgtattttgagtacactagagttcccttataattacttgtactaataaagttatagttttgatatattggttcttaaattttactttattttagcaaattggttgcccatgaatcatgatgttaattcaagttaaccatttctgtccctctttacacatacacagaaagttaaatgctcaaacatttgtgctgacttgtcttgctcatgattaatgctaagttggcttgattctctaacattggccatgtttatcaaattttccaagaactaagaataattcttatttaataacctatcttatatatatataaaaataacaattatatattaatatgttttcaaatctcagctatttaacccttcattaacactcttagtccgactaaatatataaaaatctatataaatatatgtattgtgtagtgctacatcataatcagtcaataatttgaagaaattgtatataaatattgatacctttcttggattacaaccactttatgatgatgagatcgagttagcccatcattatttttagttaaagcttatctaattagcttatcatgaataggacaaaggatagaataggttagtttgttagtttaactaagttatatatatatactttattatatatatcattgcgtataagatatatggcacatgaataagggtcccaaccttaaacagtctagacttgttgtttctttttctttctttcttgctgttagatctgtttataaagttaaattaatttggtttacaccatcaaactttgacctttatattctgaaatttatcttttgacattcgaagcaataagcttgttgttaagttgttttctcatgtatatggtgtcagaccaatccagcattctacacccagttaccataagagtatttagttactcttacttaattttctcgttctttttttttttttttttttttttattctttttctttaattttttcataaaataaccatttttttaaataaaaactatacttctagtaaaaaaaaaaaaaaaaaaaaacaactcataaaa

SEQ ID NO: 217889 - DNA, 1636 bp, Cannabis indica
aaacttacatctgtgttcctttctcaggacaaatacttgggattttctcccgaacaacatcctatagttcttcaaattggtggtagtaaattggaaaacatcgcaaaagcaactgcacttgcgaatccttacggctatgatgaaattaattttaagtttgtacacttcctttaactttacaatgttattcttttatttttattcatgataattgtaattaagtttttcttttcttttccttttcaatagttgtggatgtccaagtccaaaagtagctggtcacgggtgctttggtgttagtcttatgcttgatccaaaggtttgatagatagatagattcgttgttcattgtgtgtaaaaaaatgagtatttttattgatatgctcttatattgacatttcggttttacatgggaagtttgttgctgaagcaatgacagtgattgctgctaacacagatgcccctgtcagtgttaaatgtcgaataggcgttgatgatcgcgattcatataacgagctctgtaagatcacttactttgtattctttgtttacattattatgcaagaaagaatatgactcagcttcttatctcacttgattttttccctttcaggtgattttatttacaaggtttcttctcaatcaccaaccaggcattttataatacattcccgaaaggcacttcttaatggcattagcccagctgaaaatcgaagtataccaccccttaagtacgtttttccatataattttttctttttgcaatcttgacgtttgtgggaaaattaactaacaaatacagatcaagaactaaacaactaaaaccatgaaacacattagcaagaacttaaaccaaattcaaagataatgaaaagaataaaccaatgcaattaagtacaagacactaagaaatatactggttcaggaccaataaatcaatgtgatctataactctactccaattctggaacaccaccaaatccctttattgattaagcaagaagcttggtacaatacagttgagttgatacaactcactaggtttctcacaaagtttttctctccactcaaacactcaatcccgagctttcatattcatctacacatgcagctccatacaaaaccaaagtagtctcaatctcactcttttctttgtaccctctctctttctaacttgctcttcttctctgtcttgaatgagatgagtaaggctatatttataggcagctggttctcgagtaagccagctgagttagtagccaaagtagttaagttagttacaactaactttcgtaacagaatggctgttatattattatataggaactaacttccacaacattcaatatgaatgaagtttaagataacactatattatactgtgtatgcagatatgagtatttttatggcctcttgcgtgactttccagacctaagatttactataaacgggggcataaccggtgttgatgaggtgagtctttttttcatctagctttgaatgtggacttttagactcgaaaaacggctatattatttatattatttcaaattataggctaatgcagctttgaccgccggagcccatggtgtaatgattggacgggctgcatatcacaagtatgttacaatccaca

SEQ ID NO: 217890 - DNA, 4088 bp, Cannabis indica
aaactaaacaatgaaccgaaaaattcaatattacagacggtgttggtggttgcggccttttcttttcttccctcagttggaatgataaatacaataatttaaataataaacaaacctttccgttccattctgaccaaataccccagtgaggaaaggcgccaacttggtacaaaccaccggtatcccatgcttcagcaataagctatttgaagagggaaagaaagtttgtttagtgatcagttagtagaaaaataacaccccccaaaaaaaaaattcaattttgagatgggccataaaacagagacccccaaagtagaaccttcactccatggagtattggatcgttgcttatcatgtcaatcaaaggagggctgccaagaggcgtgccaattgtgagaaagtcgccttcaattggactaccatatacattgacagcattccaaagactgttcggaaaagaaagaaaaacaaagcgaataagaagagtgacggtaaaaaacaatgcaccgaataaaaatgtaggtcaaataacctgctactcctggtcatgatggaagcaagatcaaaccgaaaaccatcaacatgcatttctgttacccaatatctgttacaggagaaaaaacacagacaccctcattggtcaacactagggaattgtaaatgaacataaaacagaaaatactcagaatcaatgttttaaaggaaaatctctaaggtgacaatgacaataccatgattctctcggtcaccttcaagatatcatatgtgacaaaaaataaactttagaaactatgatatggtacttgaaacatagagaactgtaatatctaccttaagcagtctactataaattggcgcacaataggatggttgcaattgaaggtgttaccacatcccgagtaattgtaaaactctccctgaagaatataaaatcagaaatttaagaacacgaaatatatatatacagacttttacagagtttaaaattcatattggaaggcatggcttaggaagtaaaaattaaacagtacttgatgattaaaattgcttctagaaatcattatattgtttcacaacattttaccagaaaaagtgccaaagaacacaaactacaaacaagtaacttaccttaggtgcaatcatgtagtaagcactattatcagcacctctaaaagacaaaataggaccattttcattgccttcagctgtgtgattaaatacaacatccatgatcacctgcaagcatggatgagcatcgagctctgtgaaatgaaatctaaaaggaaaggaaaaatgtgaagttatactactagctctcacctcaattcctcgcttatgtgcttctttgataaaaagcttaagttcatttaccgcatcacgtccgcaattacgtgtgcccacggatgaatatcgtatcattggtgaaaagtaattgacagtagaatacccccaaaagtttaccctgagaacaaaacagaatgtatgtggctgaatagaacttttgaccagaactaagaattcaatgtgaaaatccattagcatagcttatacaaatattgttataatttgactaattgaaatttggatattgctatgaaatgccatatgatcgcactaaaactagataggcagacagagtctcacaaacaatgacagaaaactatacatatgaagttaaatgccatacttataatcaccctgaatggcattgtagctgtggtactcaagctcattaaactcgtggcatggcattagctctatacagttgatcccaagttcctacaaaataaaggaaactaatgagcacatccaaaaatcatctcaaacattccttttcttgtcttcctggatagaatcattgcacaaatgagattgttctgtgataatatttggttttcctgatatgatttgaagcagaaagcatttcaagtcatggtgactggtgagaagactaaccactgatatttctcatcttcagcattaaatacgaaaataacatgattaacatagcaagatagctgcttatattatgaagctcaatatcatttcatcaatttttgaatttcctaggaagggttgcatatttgttctgtaatgttgatgtaatatacctttaagtgatcaagcttctccacagcaccgatataagtcccggggaattcaattccgctagattcatgcctcgtaaaccctctaacatgctctcataaataataagatctttttgtgggtatttaagaggcaaatctccttcccagtcaaactgaaatcaaacataagaaacaaaaaaagaaactttagattccaaatgtttcaaaaggatgagaaccagggtcacaataaactctcactcttctgaagaacatgttccttatggaaataaaaatagtaccttgtcatcaatagaaggtatcatgcatgccatttgcggccaacaatttccatctgatcccaaagctccaaactctcctctacgaatgactgcctagaaatccaatccaatccaatcaagtcaaatcgaattcgagtatccattaaacttcatatacattcttctagctaggcataaaggaaaaatttggtactatttgtacaaactactaaaaaccaagaacaacttaaaatgggttattaatggcattgacaccaacctttgcatatggatccaatacaatacgagaaggatcaaagtaatgcccatcttgtggagaaaattcaccatcaaatttataaccataaagcatatctttaaaatcccctttgagaaaaacatgccaaacacttccagtctgattacaaataggatcaagtgttatctcctcactcactctattctgcatcacataaaaaagatcaattctttaacaaatcccaaaaaatccaaattcactatttcaagatataattaacaagaaaaaaagttcgattacctcctccaaatcagaaacactgatcaaacaaagagtggcagaaaccgcattgccagagtagacagcaaaattaacaccaccatcacgaagcgtagcaccaagcggcgccgggtaaccctttaagacctgataatttcccaatttgggttcatcgaccacaaaggcggcgcctttagctcctcctcctgcgtttgggataaaagggtttctccgagtgggagtgagagtgtttcgatggtagttttgcttccgatttgaagtaaaactaaaacccttggatggaaatggcagagggttaggaagaagaagaagatgatgatgacgataatggtggaattttggagcattgcagggaattgaagaagatgacattgttagggtttggtatggccattggtgatagtagcagtgaagctccattgatttttgagtaaggaaggaatctcagtgatgaagatttttgttcgttggcgccatcgatggtttttctcgacacgtggcaatagaatgatttgacacgtgtattctcattctaactaaaaactaaaattcaaataaagaaataaataatcatttctcttattgctcccaattaagaatgcacacggagcaagaaattggcgatcccattcccattcccgttagtaatttgaaggcggggacgggatgggacgaagaatcctttaatacaaaaataatgtttataataaaatttaaatatataaaaatatcaaactacataaaaattataatattatacatcatttatattttaataaattaattattatctaaaatactacttaaaggtcataaaaataatactaatatacttaaaaaaaatacaaacataaaattataaattataaaatattattataaatataaaataaaggaagtgtaattcccatctccatacagatttaacattcgggaataaaatataatctctgtcccatcctattaggagtgggtcatcgcaaaggcaaagctccattcccatgagagaaattgtatactttaaagaaattgtatagattgaaaaaattattaggaatatttgtagcaccactttaaaggaatttttcgatagattttttttatctgtttcgacatctagaaaaaatatttagtttatttttttaatggtcgtcatat

SEQ ID NO: 217891 - DNA, 6145 bp, Cannabis indica
tttgtaagaagcttatttttcttgaactaaacactaataacttaagtggatccattccttcaaagcttggtgagttagttcatctacagaaattgcagctgtatgaaaatagattgaattcaaccataccactctcattgtttcgattaaaatcgctgtctaagttaggattatcgcagaatgagttgagtggaagtattccatttgagttagaacaactaagatctttacaagtattgacactacaacacaacaagtttagtggtgaaataccaagttcaataacaaagttgaaaaatctaacttacttgagtatgggaaacaatttccttagtgggaagattccattgagtttaggattgttgcagaatctaaagaacttgagcttgcctgtcaattttcttgagggtccaattccatctagtatagctaattgtactcaacttgtttccatagatttagcaaacaatagtttgagtggtgaaattccacaaggtttaggacagttgaaaaatctctcagctttcattttggaaaataacaaaatggttggaatcccaaatgactcttttcttgctcaaatctgtcaagttatctttgtcaagtaacattttagtggatcattaaaaccagatgttggaaaactcttcaatcttcaactcttgtatgtttcttccaattccttcactggaaaaatcccaccacagattggtaacttgaccaaacttttcaccatgacacttgctgataacagattttcgggacagattccacaagagcttttcaagctcactcaactccaaggcctctctctacgcgacaatgctttagaaggagtcatacccgagcaattctctgagctgaaacagcttacattgcttgctttgcagcgcaacaaatttacaggacagatcccagaagccatctcgaaactcgagtggcttacaggactgtacctgcatgaaaacatgcttaatggaacaataccaagaagcttgggaagtaatggtaggttatcagttttggatttgtcacataacaatttttcggggtcaatcccgagttctctaatcaaaaatcttaaaggaatgcaagtttatctaaatctttcattcaatcacttccaaggaagtgttccacaagagattggcatgatggaaatggtgcaagaaattgacatttcaaacaacaaactttttggggtcattcctaaatccattaaaggatgtaagaatctattctcacttgacatgtcaagaaacaatctcacaggtccaattccaggggaagcttttgctaagttagacacactaaccaacttgaacctttcgagtaatcggttaaatggtgaactaccttcaaatttggcaaccttaaaacacctcaaatctcttgacctttctcaaaatcaattcaatggaaacatcccttcaagtttcaccaaattttcctccttgaaacacttaaacctgtctcacaaccaactcgcaggacatgtccccgaaacaggaattttcaagagcttaactgcatcaagtttggaagggaattcaaatctttgtggagctaaagttttgaaagagtgcagcatgaaagtttcacgtcggttttcaaagaaaactatggcgattctcgctgcacttggctcggtttctctacttctaattctagtcttagttgctctattccttgttagacatacaaagatgcataaggccacaaaggttgaagatccaaatgaagatgacacattagtgttgcccctcaagaggtacaatcgaaatgatatagaagttgctacaaatttctttagtgaagacaatgtgataggttcaaccaatttgagcattgtctataagggtcaaatggaagatcaaaaagttgcagctataaagagattgaatttgaagcaattttctatagaatcagataaatggttctatagagaaatgaagactttgatccaactaaggcataggaatttggtgaagatacttggctatgcttgggagagtgaaagattaaaggccttagttttggaatacatggaaaatggtgacttggataggattattcatagcaatagagttgatgatcaatcaagatggacattattagaaagagtgaatgttttcacttcaattgctaatgcattggaatacttacattcttgtcatgattttcccattgtacattgtgatttgaaaccttctaacattcttttggatgagaattgggtggttcatgtgagtgatttcgggacagctcgaattcttggtgtccatcagaagaatgggagtgtttcttcatcatcagcttttgaaggcactgttgggtacatggcaccaggtaactctttcacaaccaaactattataaataggattttcacctttcgaactatgacttttataagattttgtatttcttcaatgtgtaaactttttatcaatgtagttcattgctttcatcaatatgaattgactaaaacatgtctttattcagaatttgcatatatgagcaaagtcacgacaaaggtggatgtgttcagctttggtataatagtaatggagtttttaacaaagcaaagaccaacaggatttatcgaagagagcgggctaccaatcagtctgcgccaactggtcgagagagcgctcgaaaatggaagagataaggtgcttcaaatcttagattcagagctggttttgaacatctccaaaaaggaaaaggaaacactagaagagttgttgaaattagccttgttttgcaccaactcgaaccccgaaaatcgccccaacatgaaagatgttgtgacaatactttcaaagatatgaagggtgtaagaaatcatgtttattagttcaaaaaaaaagttgtctttctttgcttttcaacttgagatttcaaaagagtaatctgatgacatagttcttctcttgaggtcaagattcaagctttgtgttctttagctcaaatttatggaattagagattgtgggttgtgacaatcatttcttctctttatgaataatgaaaaataatcaaaatttaatacatcaaagagaaaatatgaaaaattatacataggtaactatataggtaacatattctaattaaacaaaaatgaaagttgaaatcaagaagagtaacataagagaaaaaacaacttatgttatatagtgttactaagaactctattcatttatttacaacatacaataagacattttcatctcacataacattattgttttctgaaaaagaaagtgtaccaatcccttcttcactagctagtttaacaattttgaaagagaaatgaatcatagaaaagtaaaggagaacaaaaataaaaatagaagagcataaaatacagaatacaataataataatacatgagacatgttaggcctaagtccatgtttggctttggcataatcataatgaaatcatcattataattccacaatgtaatcaccattaatatgaataaagattataactttacacttatattatcaccattacaatttacaacatttattttaaaataaaatttattttataccctatatcatccattatcaaaatgatacttttgttaatacactatccattctcattttcatttcttaaaaaaaaagaaccaaataatgtttgttttaagtgatgtaataaaattataataaagaatcttaaactagtatagctcactatgtggctagaaattttagattcaattctaatcataacattcttaaacacactattgtaaattaaaataattctaatacgctctctttatataaattttttaaaaattggaagagtaattttgtcaatttaacaaactaaatatcgtaatcaattctcattactattcttattccattacattactatgatcgttacattccacgaaaccaatcatcacctgaattatcattactattaccattccattacaccgaaccaaaccctaacctaagttgttgttggaggaggatcattgagcaaaaattcctcaatagttgatgggaattctaacccaccaaaaccaccaccatcatcatcaacaccaccttgagaaacaaaagaagcttttcccaaaatcaaaagtgacaacctaaaaggttcaatctttaacttcccatcattcccaccaccattcaaaaaatatctaatccaaccctctaacctctcaacttccttcccacattttggtcctttcacttgagcaatttttgagtaaaacccattttcacaatggcaagaagagacttcttcttcttctttttcttcttcttgcctctcatttgaacaattttcagacaaacccagaagttgaattagcttctcaatatcacaaactgagtcagattgggttggttttggaagtgggaaatcaggggaacatgagagaaattgttgaggaagttcactgctttgttggggtgttgatgagttttggttgttgtgatttgattggtcaaagtggagatatataggtgagcttagtgatgattgtgattgtgattgttgttcttcttctaacttgagtctcttctcaacctgtaattaattagggttgaaatcaaaagaagaatacataaaggagaaaactttacacaaattacagaatgaagaaagcaaaatctgatatacctgtttaagggaggagaagaaattggagtgtagagatggatgtggtctcatattttggcaatttcccccaattgtgaagtgagaaaacactataatttttctttctattcttctttgaagaaaacttaaaataaatatatttacataaaacacacaatgggtattattaatgcaacccctaatttaagaaaaattttaagtataatatttttttttatagttgtgtacgttataattatttaaaatattttgtaaaattttaaaaattgtgatataatttacaatatagaaaatagtatttaaacaatttatctcatacgcgtataaaataaaaaaaatacgcgtgtaacagactgtttgaatcctattttcgatatgttaaattttaatagaatttctcaaaaaattttaaaatgtcttaaataattacaatatacacaaatacaaaaaaaattggactaaaaaattcttttgaattacgaaataaatgggcgtgcaccgatgcatcccttttatgaaagtacattatagaattttccaacactatcttttgtaatttttttttatatttttacgcttacagatttttttatatatatatttttatggtgttctataaaaacaacacgaaaacaataaaaaactacataaaagtatcaggaaaataatattgaaacaataacaataaattgacaaaattataccataaaaatatatcaaaagacagtattttttgtaaataaaataataaaaatcgtaaaattatttaaattttgtacaattgtatttttgtaatttttttattatttgttgtgtatttgtgaaataatcccaaaggaaaaacctcagccatatgtaattttttgtaaaactaccgtctttttaagaaaattttgcagaaataacattgattggtttggggatatgagagtaaatttgaaaaagagtaatttgcataaatatcttagtttaattctcagttgtaaataaatacttaaagtttaatttttagcggtaataatacctataagttatatttttagaactctgtaggtacctaaatgttaaatattaagttattatccacatgtcattttcttattaattttaagtcaatgaccacgtggcagcccatgattggtccacaattttttttttttttttaaatagaccagtaaaaggataacatgtgataataacttgacacttaatagccagatacctataaattttttagaaatatagtttagatattattaacgttaaaaattaaacttaactatttatgaaaagttaaattataatatttacaccgcaaaactcactaatttatctatttttttttaaaatcaaacacaaccttatcatgtcatcaagaaacaaaataccaaaaacaccaaatgcaaaacaagatttcaagaccttggaaaaaaagaaagagaaatttcattttagtcacatcaacaataaacatacaagtaattc

SEQ ID NO: 217892 - DNA, 1662 bp, Cannabis indica
aaatctaattcagtgtgtagaggtatatcattagtactatctatgcacgtgttggaacttggaactcagttggtaaactcttctatgttgattttcatatttgacatttctcattgtattacattgaactctcaatctaaagtttactaattcataaggattttattagttaatatgagtttgatttgttacattcttctagttcacatatgtacataatatctgagtttccaattgaatatgaggaactgcagaacataaattaaccccacatacaccaaaagtgaaagagacagtggtggttaagaagaccaagaagaaactttcccctggccgaaatcggaatataaggactgcatatcagatcttcatcagggaagaatgtgataggttgaaaaaaactagaggggtgaggcaacgaggccagagtttcagaagtatggcagacgatgcgtggaggcacctcaccgaaagtgaacgacaggtaaatcaaatgtttgttttctttgtcaacttacactttttgattgaagtagcagcaatttactgaacttcatagttttgggttactaagcttagttgattcattcaaaaccggaatcatgactcaaaaccactaccccatgtactactagacattgcagactgcttcattatagatattttactatctatttgttttttgcagccatacattgaggaaagcaatagggacagggaaaaatattctcaaccactggaggctgattctgcagtacacaacaatgacatggaaaataaagagacatcacacaacaacttggatgaggattatcatgtccaagctgagtttggaaaaccccaagtccatgatcaaggtgcagttgagtttggaaaccccttattgcacgatcaagacgctgttgacttcgccaatcgaaccatgaacaaaaatctagctgacccaatactcccaaacgactgaaagttgtagtctttgtttagttggggatggtggtcatggtcagtgcttttgtaatggaaggttcttttttctgtacataagttgaaaacagaatagttccttggacacatacccttttgatggcagctcttcttttgtatgattttgtctgtttatcatggagtttactatgtatatatttggttacaaattagagctgctaccttttattatgtacaagagttttggaaccttgttgcagttgcatgaacactgagtcactgaccagaacacttcttatgttataatatagcctttattattattattattttgctttgattgaatttgaattaaataatggtagatcggattcttagagaaaattctaattgttgaaaataaagtaactgtttctcttagtcttttttgattttgacctcagaaatcatcttgtttgttttttatcttttaaagagtgctctttttcttggatccacttattagagaagttattagagaagttgaaagttactcggaaatagttatcaagataattatgtaaccacctgtaataggttttctagttggtttttagattgtaaatttgcttttatctcgaaattttgtataatattgctaaatgggttgatagtaacaacattaacttgatagcctaaaaagtttgggattactatttggtatatttatatttttgg

SEQ ID NO: 217893 - DNA, 4381 bp, Cannabis indica
acaattaataattaaaaaaaattgcaactttacatatatagataaataaagaaataaataaataatttgagtcaaactccaaagttttccacattgctcatcatcaatccttcttgatggacataagttcaggtgtaagttttcactagaatctctagcgacaacaaccacactataccaatccccattgcttttttgccctgcctcaacattagttttgatcatactatcagccggaggtgtccatttgattccttctcttttttgaagtggaagactgacttaattggttctttgacttgaatgtctcatagtaattccagtttcattagttcttggttatttttccccattctcatcttcttcctaacataccgatcgttactaagttaataccaaggaacaagtcaaagtcatctttaccaagacaatattgcatatatatgattgaacacaactttaataaaatccccatcccaatggccattatgaacacattcatgtttttgtagggaattaactaacactttcatttactttacacaaattttacatgcgtatacaatatttatgtattaaaagagtcttgattttatcccataaaaaaaatcttttctacataatatgttggaggataaaagttttcaatatgatgttaattttttttttaaaaaaaattattatgaaaatacttcttgatcataatttaaacatactgatatgtataaatcgtattattatgacttaatacgaactaaataataataagataatattttgttgtttttctgttatgaatatgaatatgtatatagaaaatataaggaaataatttatgcattggattggtacaagtatatatatagtatatagtatggaggagaggacagtgagtgaagtttagatatgtgagcgtgtatgataagtcattttcatatgtacattacaaactttgggttttgggggtgaagctgaagagtgaagaccatgataagtatacctctttcatgaatgtgacctatccacatctatgttcctttcttaatttactaaacatcatactaattgaccactctatatctctttatatatttatgtatatcaagaatattcgtttgttgacagtatagtgtggttatagtatcatccaacacaatacataattatgtattaattgatagaaaaactatttgtgagtataaattaatctcgtttcagcatttgagtagtttaacatattttgtattgagctagtcctagctagataatgtattgatatgatttatttattaaaaattatattcaatcttttataataaaacaaaaattaatgatgtgctcttttaaatattttgagctcgtttagtacgtcgtattgtattgtgtgtattaaattgcattatattgtatttgccaaccgcgaaaatccaataaatgaatgttcgattggacaacaagtatgagggagaaataatgtaagatttccaaaacaaaaaaagggacaaagggtggcctccgccctttttgtccttgtccccctcctcacatctctctgtcatatctcctcacgcgcccggcctccacacggccagctcctccacgcgcccgacctccacacggccagctcctccacgcgcctggcctccacacggccagctcctccacgcgcctggcctccatgtgcccaactccttcgtgcaccaggcctccacgtgcccagaaccccgcgcgcccagcctcctcacccctccttcaaccctttttgttttcccctcatacaaatagaagtgatgagaaaagatcgatgctagggttgtttaagtaaagaaattacagacaagataatgactacacaataagtatggataatgaaaacaaagtttacctcatccaaggtacaagtggaagagagagcttttgtgctactgagaatgcctgagacaccacactatctgaggtactagtctacctagtatgaaagcgacctgacattctcaaaccaagggatctgatgaaattcatgttgagattttatgtcctaaataaaactcattttaatataatcagatttactaataaataaaaaatcagaaatcatttatgttgcatggttcacatgatttctttcatgattatatgtttaatgtataaattctattaaatccagaacatatagttattcatggttatagtgttgtctctacatagtgaaaaataattatgattatatgtttcaaaatttaagtctcatgatttgtcagtacactggatttacactaatatgataatcagcgataaagtttacttacacttgagataagtgatatatatgtcattttcagggcattggcaaaatttacttggcattggcaaaatttacttactctattttgaatttattaaaagaatatttagaagtaactgatgctgcatatttctatttagacccaatgatctagaattcgggctttatatgtgccttgtttaagataataacagagtctgtacagacaaaattagagaaaaattacaattttacaaacattgggtacttatgccactaaaaataaacattgaatttatgccgtttacaaacataaaactttgaatacttatgccgctattcaccctacattttacaaaaagttttgaggagcttctaacccgaaattttgatgtttctatgcaactacccaaactaaagtgattaacataaaaacaataagaaggagggagattatgatggatgaagagtaaaatggagggagatttttggaaggatggagaggtagggttatggttggtgttggaaaaattagatgcgagtcgatggagaggtagggttagggttggtgttggtgttggaaaagttagatgtgagtcagacacgatttgatatgaaataaaaatgggtgaaacatgatacgaacgcgcttaacacaaatttaatagataaaataaaataaaaattactttttataaataaaaattattaataataataaactatgtaaatatatatacatttagtgatacaatataaaagtgatcaaataaaatatgatacgaatacgatacaatgacacgttttgtcataagattatattaactttatttagtattaggtataaagttagaagaatgtaaagagagttagttattaaaattatgcatcatttttagtattaaatatttgttattttgtaaaggataattttaatattttgtatcttcactttaattttttataaaatacttccaaaggtgaagggcatagatttgaaggaggtcttcctactaaataatggatttcacctccattttttactctctccctccacctgctccatccacccatctctcctacttactaaaaatagtacaaaaccaacactattctacaatttaagcaacacccatctctcctattctacaatttaagcaaaaaataaatactattctcattaatttttttttgttttatgagaaaatattattctcactctcatttttattttatttcacatcctaacacagaagattaactattttgctttttgatttgatatgataatgacacaattttcatgttgaacaaattcaaagtcctattctatagtatgtgacttcaatcaaaactaaacaatacccaaacaggagagagaaagaaaaaaaagtaagagagagagagagagataattagacaaaagaggatgaacattagatctgacctaaaatccttcttaaacgctctttttctgtcaattattgaatttgacactgcccaatgcttcactttgcacgcgcactccacccttttttctctttctctattttgacccttatacataccactattctaactaactttccgagggtaaatttgtaattttcacccttattgctgcgctatttgtctctaacaccaatatagaaatgctatctctttcccactcacactcttttatgcgtgactttcacgctcctccattagccacactctacctagctaagctaaccatataattaaatggaaattacttgctaccaaattattccaggatttaaattattatgcactcgtttcgaacgttctattaagtcgtattgtattgtattcagggccggtcctgaaaatatatgagcccgagacgaattaaaatttgaggccctcaaaattatattagaaaaaatatgaaaagatgagtgttatgggatttgaacccatgaccttagacattatgtcattcacctcaaccaactaagctatgaatatttgttgcttataatacacttaaattttacttagataaaagattaacaaattttatttattttttattttgggcccccggaaagtgtgggccctaggcacgggcct

SEQ ID NO: 217894 - DNA, 2549 bp, Cannabis indica
ttaaatttcaaattcaagtaccttagagtaaggcaaaatgtgatcatagtcatgacacagacaacctgggcagcccacaagcttccgaaagacaatgttgccaagggaatctcggcgccacctatctggatctcgccctttgatcttctcagccttctcccagcattgctgcttgacactgtatggaaaacttcgaggattggaattggaactggagctggtgggttcttcagaaatcgagagaccttcaaagagagtgcggtcatcaattactagctcccggttgtgaagagaaactgggggactgagcctggaagagcgcggcccaggagacctagattcatatccagaagagactgtagttcggtccttgatgggtgatgaaggtcggcttcttctctttacttcctttctcggtttcatcgtactatctttctctgcactaagaatcagcgttttcattaaataactaaaacctcaggaataccaatatatacatatatatatatatatatatattagagaatcaacatacaaacaaagaataagacttagaatgactttgttcactgaattaaccgttgcagagctgagaaatttcaccggaagctgcaacgggaatcgaattgacagtgagaaccacgacgggagtcgctgagatagcgatgagggcgagaatgtggcggcgacggtagttgatgggtagacctgaagcgtggaggtcagcggagatcgttaatggaggagaagaagaagaagaagaagaagaaggggtttgagagtggaggagcttacgagcataatggcgggcttttgttgttgcttctggttttggtaacgtacattatcatcttctttcggatttctcattttctctaatgcttttccccataaacgacgctaatgatgttgtcgtctcgtataacaacatccttttttaaaatatgggttaaaaaaaagaataattagtatttttttttttttttggaaagaaaaacgtatttcattaatagaataaattagacctcatggttattacataatatgttgaatgggatggtagatagcggaatatcaccaaataactcataggtaaacgcccacttagctatagtatgggaaacaaaattacaagtcctgtcaatatgagagaaaatacaactcgaaaataaagaagagtgactattacaaaaagagacatagtttctaataactcaattagattccttcccattgagagcattaataactactctcgagtagctctccacgatgacaaacttggcttcaaaatccaaagcagcagaattagccaaagagcacgccgccgcttccccacaaagagcatcacaaaagtcaagacaagccgtatgaactcgaactacctcgcctaagtggttcctggcaacaactgctattcacattaagggtgaaaatcggtcggttatggtcggtttttacaattttataaccgaccgtttaaaaattataaccgtataaaaccgacagtacggtttttggcagttttcggttcagcagtttttggcggttttgacggttttttggttaaactatttttttatctcaaaaaccgaaaccgaccgccatgtcgaaaaaaccgaaaccgaaaccgaccgccaaattcggtgatgacgtggaaccgaaaattcggttacggtctggtcggtttgatggtcggttttggtttttcggtttttatgaacacccctaattcatatgctatcaagccccaatttaacatcgcaattcaatttggagagagaccagcactccttcaggcaagagacagggaaagggaaaatagtagcatgtaattctgcaaaagaaaatcgaatagagtcaatgcacttcttcacatctaaagtgagattattatgtaccttctcatttcgagtgcgccagatggtgttgaccacaagtgaggcatacaggaaaacctcctccacatcaatccccttatgtttcaggtcccaaataaatttgacccggtcccacatcagaatactagtgtcacaaatcggataaataccccaaggagaagatcgctagacatggaaagccacatcacaagtaagaaatagatgttccatagtttcctcctccctcccacacaaagagcatctcacctcctcgatatgaaatcttttcctaattacagacctgacagggagggtgttggagagaatgcaccaccaaagtaccttatgacgctccaaaactttactgttccaaagcctatttcaaagtgaggagcaacctcacaaaagggagctctttccaaggcctgagtaagataagcagatttacaagagaacctcccgtccttttcaagagtccaaatccacttgtcttgacccatgccaaagggagcaccacctcttaaaatcgcagaaacagtttcgcgatcaaaaaggctattcaacttgtgactatcccaacctccatttgtagaaagcaactccgcaacaagtctatggtccctggcaggaatcccaatgggcttagggaagaaattcttcatgtgaggg

SEQ ID NO: 217895 - DNA, 1448 bp, Cannabis indica
gtattgaaaagccgttgactgagaatgcgaccatatacaaataacatggcagtgaagaagaaaagcctgcacatacaagtcaacaatgaaagaaaacaaaatacaagtcattagttattatcatgaatgtttactgcttcaattgtaaaatcacactttaactattaccacgacaagaaattaataatctgaccaatttaacagcctaaagcccgggagatgcctctcttcatggtctcgccttagtagattgaacagctcttttgccataaagatttggataacaattatcatggcagtaatactgagatgacccatatatataatgaatgcaaatcccccaatcatccaaacagaagagcatgcccgtatccacatagacctgtacttgttactgtcattaacaagtaaattgcctccatttgccacactaacatctggaacaacctgagaggccgacaggatatttcaaaacaataaaataaaattctgatgttgaatatcagctaaataaaaaaaatgatcaaatttcaattgtacccatcatcccatctcttatataagttatgacaagtccaaaacccaataaatacaagatcattaattttaaatgtgattgacaatgatcaaaacctgacttatgaagtgactaacctcatttgaacgccttcgatgccgaacccgaccagttggtgttaatggggtgctagtgttatccttctgcatgctttttagtttggctttcacccgcacaaaaaagcatatataaaacgcacaaaaatccctacctgaaatattcagaccgtatagtaggtaattattagcaactacctatcataactctttagattttcagctaatatgtcacataattctccaaaggttctggaactgggatctgcataatttctattcctggcttccctgaaaataatccacacttccaaccagaaagctcccctaataaagtttagaccccaaaatggaataaacgatgaacaattccatatcatacaaactgcaagaggggttttctttttctaacctacaagaagaagaatgaagctaacagccaaaaaactagagccccacccagacccccaataccaaagaccaaaatgtcaccaataaatatacaactgtgggacaaccccaacagctcctagaactagaaactggacaagaggatacagaattaagcattaaagacatggaaagttgatacagtataataattataagagatgccatctaggatgaacctggagcaatggcccataatttttcgaagaccatcaacaaaactcttaatggaagcatcgaactaaaaaaaaagtcattaaaatttagctagatgatcagtacagtatcccacaaaatgctcaaccataagtactaactagtaaccattgctagaaactaagaaaaacaacaacccatctatccaa

SEQ ID NO: 217896 - DNA, 2656 bp, Cannabis indica
ttttctctttaagctctaggcagagtagatcgtaggcgtaggccgaacccggcttagccgaggcccggacctgccccaatgacacacagaaattcagtgaaaacaaagcattagttcttaattataatgattatatatgtatgtccaatcttgtgaaagttaacactaaaatatgtacattccatgcatgtttcctaaatttgaagaacttttgaatagataacaaaatatgataaagagaagcttgtgaatttagatccaattaagatttttctaacaatgaaatataacacttatgttgctcacaagtcacaacgatgatgatgttgatagtactagtacaacttttcaagctcttgatctaaatactatttagtattataaattgatattaattactgttagctacattaaagagtacaagttaatttcaaagctcgcagtaatatcattaatagtatttatttatcttgatagaaaattatattattttgtaaaatacaattagactatagattttttttttattcttttataacaaatgattgtggttacaaaatttttaaaaaaaaacaggagtagtacaagggtgggcagccataataatgggaatgatgggaggaagcatcccatggtacacaatgatgatcctccacagagaaataaatctcctcaagcaaattgacgacaccatggcagtcttccacacccatgcagtcgctggctccctaggcggcattctcgccggcctattcgctgagccaaagctcagccgactcttctacgctatccccaactcccaacgctacattggactcttctacggcatccaaaaccgccagtacaaggccgggtttcgacaacttggcgttcaacttctgggaatagtatttgttgtttttctaaatgtcattgccactactgtcgtatgtttgattattagattggtggttccacttaagctcgctgacgatgtgttacatagtggagatgatgccattcatggagaagaggcttatgctttatggggtgatggtgataagtatagctttgttcacgccgtcaaagacctcgctccgccgcaggaacttgtgcctgtagtcaccgatgaaactagagttgatactcaagctcaaacctcataaatgtgggctcatgttgttaattgataatattttatatatgctacatcgtttttaatgttattattacttatttttttttgttgttgacctaaatatagaaaacacgaacatatttttgtatgtccatatggaaattctatacaaattccttctaatcttatgtggtaagtatttttttttttaattaatcaatataagatgatgtgatatagtttatccaaatggaaatatctctagtcaaagtcttcacgaaagctagtcttcatctggaaaggagttccatatagctagcttgtccaaccgaaagaaatcttacggaaagctggtcgtcatccaaaaaagagttctgaaaggctagcttatccattcgaaaactagtccttccagattgcgcttcatcagtttgagatgtctatccaagaagtgtgatacatgttcggagagagagctcgatgccaagaactgagttggagatctcattgtaaggagccaattaagtcggttaagtcttaaacaaattaactgcttagtagttgtttgaagccaccacatttgggattcatatccttgatttataagtacaatcgtcctctttattttttttaaaaaataacacaaaacacctgaagcagagtacgcaagttctttgagagagagttttgattgaacggtagaaagagagaggtatagagaaaagagattattgggttgtgtaaaggggagccttctcaaggaagagtgttagagtaaaaacacattgagagaattcaaacagagaattgctcttaactgtattgtacttatgttcttgctcaatcaataaagaaagtttcggtggcgttccagaattgaagtatagccatatatcatatcgatatatcgaacttgaacccgtataatttttagtgttattttttacagttttcttgcattttttatttttagttttatcatctctgttatactttattattcctctaattattgaattgtgtttggttgattttatcattgctaattgtctattgattcattttaagttagtttgattctgcacaatagttgaaatttcccacaaatcagagcttggttatcgatcagacagtaaaattaagattcttttcgctacaacagtcaatgtcatcagtggcaacattcgaattggagaagagaacatgagacttcacactatggagagaaagtccgaaaggggtcctagtgcatcaaaaaatctccaaagtcattagaaatgagaagttactggacgagaagaaactaaacaacatgttgcctagtgccaggtgacatgtcgccagacatgtttttttagcacacttgtctttggagttttgtaactctttttcgactctcttaatttctaatattttctacctcattttaattacgtaaatgagtatagtattaattgttgggaatattttaccaggatctagatttaataatgttgaccgagattttcggcaactgataaaatatgaatataataatga

SEQ ID NO: 217897 - DNA, 3079 bp, Cannabis indica
ttttttaaagagttgaccgagttgactgagttgaccgggtcaacccgccaacccgctaaacccgaccaaccgaaacccgccaacccgtgacccgccaacccgccaacccgccaacccatgccctattcgggtccgggttcggtgtcaattttttgaacccgaaacccgtgaacccgaaacccgccaacccgaaacccggtaaacccgcccgatgttcagccctaatagcctctcttcacaaataatttcaagccttagtgattgagtgcatgcccacacatatcaagtaagtcttcaatcatagtgtgtaagagtgtgaagaatccacattcaagagaagaagaatcgggcttagatcttggtgatactctgctacagaaaggatacaagggttagagatctgagcggaaggagtcatttaatttcgctgcaaccactgtaaggtttctcaaactttatatgtgtttaaattacattgttttagaaatttatatttaggatgttaaataacatacatggtagtaaatctagatcctagtaaaatataatccaacaatatgtgcatcaatgaggacaaatttcgttagtgaaaagcccctttttcgttagtattatccatcaatgaagacattttgttggtgaaaattcaaggatcagtggaaaagatttttgtctgaatgcatgtagcagactaagaacagaccagtttctaaactatcaagggtgtgtacttcagccttataatttcctttgggcttaagaatgttggagctactgatcagtgtttagtgaacaaaatgttcaaagacatcttggggaagaatatagtagttgatgtggacgacatgctagtgaagtcaaagactgtgagggagcacaacaacgatttggaagaagccttttcgataatccaaaaatatggtattaagttgatgttggcattttatgccctaattaaaactatttcaacataatcttatttactaattaataaaagactatgaattattttatgttgcatggttcacataattactttcatgattatatatttaatatataagttttattaaatttctaaacatatagttattcatgattatatatagtgttgtctaaacagtagaaaataatcaatgattatatgcttcaaattgtttactcccatgatttatcagtgcatttaaatttacactgacatgataatcaacgttgtggtttacttacacttggataagtagaatgttctttccaggacattggcaaagtaaacttgtatcatatgtatcagctatacatcagagtggaccgatattaaaagtagaaaatatatcataaacttaccattacgtcttttctaactcgatgtcacttagttgaacttaggtcaactgatcttaatcctgagatggttaagttctagcttaattgtactatacaggttctttgacttgttcgttaccagcttacccataggactagtccatacttatatcttaagaatttgttagtgcaattgactgagagtgttaatcatagatatagaatctatagcttttatttagaagtaaaacaatagtttggttagagcttggcttaacgatatatacagaagaactcttattttaataattatattagtttactaaaatattatttataagtagtcaaatattttaaggataaaataatttgaagggtactaaaaatagtaaatttatccctactcgatgtaaaccttctatagaggattaataattgtttagattgtaataatggataattcatactgtatctatatttggtatatagaacattctatataaacaagagtgcgattctgaatctatagtggagttaggaggaattaataagctgaaaaatttacatagtaaatttttgactccacattatttgggattatactgcattgtagacttaattaattgatttaataagtcaattagaattctaaaataagaatatgtcatattttaggattttcactaagcttgggcaaatttgagaagaaaagagagataaagatttatttgtcaattaagacactttgtgggtctattgataaatatatttaaatagatttttttttataattgtttataattattaaatatataaaactgatatttaaataaatagattagataaatggtatttgttatcccaattttgtcctcatgatgtggcatgcttatgtggacagaaccagtgccatgtggtagtacaacttactaaaaggaaggtcaaatcagcatccgaacaaacaaagaccccgacactcaaacgggcatcaagtgacagaccatctccctctcaagagctggccagccacccctggctagctggtcagtgtcgggactacaccatggtcggctagcctggcacaagggactagctggccaaggattgcactgcaggctttcctagatacttctacatgtggacaacaggctatgggctgcaaactaggctctaaaagcccaacaaaatgctgaataatatctagaatcaagggcacttttgtcttgtgtaaatatctaacaaactatgcataagttaagggatttgaattgtaaagctagggtttgagacctcctatataaaggccttaatctttgcctaaacacctaagttgcctttaagtttgaaacctgcctccaaactctaagtgttcgataaactctctttcttcctcacttcccctctctcacatgctaccctagcatatctcaacacttgagttttgccagtattgattcataccttgtaatcttaagggtactatagcagatccctgttggggattattttaccaggatctagatttactaccatgtatgttgtttaacatcttaaatatgaatttctaaaataatggagtttaaacacatataaagttaagaaaaccttgcattagttacagcataattaaaatgactccttccacttagatctctaaacctttgtatccttttctgtagcagagtatcaccaagatctgagcttgattctccttcagttgaatcatcttcacagtcttacacactatgatttgagt

SEQ ID NO: 217898 - DNA, 1317 bp, Cannabis indica
tcacttaattaaataattaaactggaaatattaaaatacgaaatttcattctctaattgttcagactacgaaggttgtgcttgagtattgattgttggcattctctgcaatatagtaggtggagttggaccacactagatccttatttactcaattcttccttcttgattaaagtacttctagaataattgctatgcaattgcaacattaactgattccgacgcaaaattataactttcatttattttatatgtccttattactttgtttataatttcctttcatttgaatactgccggttgatttttcatctctcttttagagttatgagacattattataggttgcatttgatgagttattagttgagggtctgacccactcggttgggcaggctcataatgaattgaagttctattcattttagcttacatgtcagccctttcagccataaatttttgcatagtgcgatgaacatcctcttgatgctaccaattttcttctcgatcatgctgacatttttctttggctgcacgttgctcctgctggaatctttccactgtgagacgttacatctctttgttgtgcttgtcccttgcagtaattctctgactcatctctcttatttctaacgccagtgcagcagtcaaatccatgactggattcaatgtatccccttcactcgaatttgttgctttctctgatacctttttcgatcccatcttagttcgtattcttagcttcaacttttcgttcaagagattcccacaaacggtgccagctgttgatgccaaaaattagctcaacaataaattgttattaagactttgaattctttacaccatgtttgatctagtcaaattaaattcccaattgatttatacaattctcctttcagttctcctaatcaggtttaggtcacttgcttcttgagctcaagtgtgaatttaagagtgtattccgacagagtttcaactagtctggtgtgatcaagaatttgtctactttttgaatgagggaattttctattcataggcgggaagaaatgcttgcttccttctctttttccgttctgatttgtccacatgcattaaatatcgtctgctactcatcgcactttctctttttgcttttggagctcttcaagcgcgtcattctcttcctctccaagctctgcttctcatctctctctatttagagctctactcttccgcctttgagctttctgctttgcttcctttctttaatgaaaaagagtatttctttctatgacctaccatattacagtttcggttctctttcctcattttaacctcc

SEQ ID NO: 217899 - DNA, 1436 bp, Cannabis indica
cactaagcaggggtgaaattgtaaggaaaagagttttctaggtttatttatttataaattaagtgaggcccattacaacacctaggccggccacttaattagctttttcaaattattattttcattattttaatgccaaataaatcctaatcattattttaatgccaaagagttttctgggttcattattttcattataacttttcatgaatttcctcaagtcatttactttcggattccctaaagctccaactccaatggtccgggcctttggctttcaatatgcttgttttaatccagcaatattctttatttttagttaacctaagaacaaaatttttataaagataatttactcccagctccctaacgttttaattccagaggcttggaccttctaaacttcaattttttttagtcttttttacaatttgtctttttattatttaggattttccatcttggaaacctaaatttccttagatcataaacctgggtcaacttatgaattattgatctagctttggtaacaaatttgtacctatgagttctctaaggactccagtttcaacggcctgagcttgttgatttaaaatttgaccatatcaaaaggtgaacctttacacttagaaaataattaattttttttggatgtagatggctacatatactacccccaagtgatcaaagtgttaaagtttatgccctcaaaagcatgtaaagatattttttgtttattaaataaagagttgaacatttgatatatgtatcgatgttaagttattatatttattattgaataatttatattatatatcaaaaaaatttatatccatgtatgaggttgtggcttgtagctgtacagagaactaataccacttagctatgaataaaactgtcaggaacatattcaagatatggaatctttaatcaacggttgctagtaaggttcattgatgtccattcttcggtgcaagtaatcttggttcaaattacgtatgtagtgtgatattaaagtgaaggtactgtatatgatagaaattatatatgacaaggaccaatatgatgaagctatctttattgacatgtcgtttatcataaagatctaattaatatcataatgatgattaatagtaaattggtttagatattaagttaccctgaactcttgttcatgctattagttttttttattcactccttaaagtttctcaaataagataatccttagaatttctattttggaaatttaataatgtgtatggctgggaacatgatttatagttatggaatcctaaatttcctaacaaatcgaatgctaatttcctttaagtgttaattctagaattgaaatattgtgcacaaatttagattaaatctaaattatacttttactagtgaattgatggtaataaagaataaagaagtaattagaa

SEQ ID NO: 217900 - DNA, 1381 bp, Cannabis indica
atttaagaaggcattgttgatgttctctaaacaactcaactctatattcaatccttatagaggtgatcatatatacatctttatattaaaaattataagtttccaacctactttaataacaaatattgcataaattttcctcataagttatgcaagatgtcatgggccgattatttaaaagtttctgtctcatcttattgtaagagaagtttgacactcattggcatagttttaaaccaattaagcctcgcattttattcaatataagctatctaagaataaaaaatctaattatgttcctaagttacttaaataaacaatcaataatactcatatacacttagaaataaataagatgaagaattgtggaatacattcataatagacaatttactaataagaggatcagtgtctatatgaacatcattttaatataagctcagcaatgtgaaaactcttattgttcgtattgtttttaaaaattctaaaaaaatgaaaaaaaaaaagtaacgataataaaatgacactctaactaaattttcttactaatttgccagtaggttgttagtgcgcgagactattaatgcgtgttaaaaacgtgtgtttgaattttcttttccacacacctcttttaattctgttttttttttgtccttttttttttcaaaaaaaaaatatatttattctatataataaaatttttggtttatgaaaaattattgggtgacttttttctaaacttaaactattcaaaaataagtttttttttttgaaaaaagaataaaaaaaataaaattttactatcgtaagctagtttcccaacaaatataaaactaattcccttaataaaactcactttaactctaaaaaaataaaatatatatatataaaaataaaatcttacgatcctaagctaattctcacaaaaatttagtcgagcgataacctcatccagtgacggaccgagaatttttactatgtgggggcttatttattataaaaaaaaatatttatacctacattataatcactattactagatttatttaattttgtggggggcttttctactattttgatccataattatcaaaataaaaaaaattaatatttaattttttaaaaggcaatatttttgttatagcccccacattattatgagtgggtccgtctctgacctcatcaccttaagtgacatatgctcatctcatcacctactattactctctctcacacactatatatatgtatgaataatgtatgtatgtatgtatatatatatatgcttacactcatcagttatgaatttaagaaaattcaatcccatcatatatagggaaattaatatggtatactagattttttacttttttactgtgtt

SEQ ID NO: 217901 - DNA, 1006 bp, Cannabis indica
cgtgaaaagttgtcacagaaactggttcaaattcaacatgttcctacaactaatcaaatagctgatgattttaccaaagctacttccaatacaaggtttgctcaatttaagatcaaacttagtattggaaccaagaccaattctaagtttgagggaagtggaaagacggttagttgttaagttgttagagctagttgtggctgatagaattcggttacacttgattgagttatgtatataaattgttttgtactcatttgttaactaaataagaccattctttctagtcttcatcttcttcaacctttcacctctttctatgtctttctctatctttgttcctctgttttgatctctcttcttcttgttctggaacaatggtagacatgttggacaccacaacacgtgaaaaatgtaattactttaattattaaaaaagtaattacaccaagacttgaacactttttactagaccacaatacaccaaatacttactcttttattttatcactagacacatttactacatacttgtgtatgactcacacttttaggacactttgtctttagacacttattaagaactcacacacttatatatagataacttagcacacactaagacttcacttgtttttatgtacctacatccatgagaccaagggtctatttatagtgcctcatggttggttgttgaagccacttcaatttgcttaagaattctagcattgggcttgacccaaaaactagaaatatctagtgactattgtttctaaaaaattattttctagtcatttcttacatttatctagacttttctactaacctttggcaattacaatgggctttgtcttaaatcaactaacaaatatgtaactagaaatttctagaaatttagaggaggtgatctttctaacactcctcctcaccaccaactcttcatattaagttgttctctgagtttttaaaatcttgttgtgctgagtcctttagtgaataagtctgc

SEQ ID NO: 217902 - DNA, 2302 bp, Cannabis indica
tagtagtagtagtagagagagagagagagagagagagagagagagagaatatttgatgatggaagcaaaagcaacaagaagtatgttcgatgttccaatatgtccatcccaaaaagataatgataagaacaataatgaaacgaaacaattaaacaaaaacaaatgttctcttctcaatgagatttgtttttgggtaatgtacttatgtttggtgtttaaggtcgaaataaaataatttataatagcatacatcatgttttttttagtatggtcaatatcattattctaatcttacacaatataacaaattcccaaaaaagattcattcttctaataatcccacattgcctccactttatccatcatagcttcacagtttcagttaatttgtcagttcaattatttttctaaataaagaattaaagtcacgcatatgtcacgtgatccggtcagctaaacccacgaggtccggtcggaccggccaacccgcacgagggctcaaactaaaacgtttctttctcaaccgactactcttatcctatccatctgggccgagcccatctgcccaatggtccatactactaaaggtccactgtggaccacatttacccaacaattttctttttttttaacttttccacttattttaaaatagttatcattttttattcattaaaaaaaaaatagttatcattttcctattaaaatatgcactcaaacattagatatatattgggaaattctgaagtgtgttatctatttcagcatttaaaaaaaaataatccaatttatttttattagtagtatacgttgtagttatttaaaatattttgtaaaatttttaaaatttagaaaaatttaacacgctgaaatagggttgaaaaaatttagaaaaatttttattttatatttgtggaaaatggattgtttgaacattaaattttatattgtaaattattccgaatttctgaagattttacaggacgtcttaaataactataacgtacacgacaattaaaaaaattacactaaaaaattcttctagatgacgaaacaattagggattacactagtccaccaattttaattagatgcttttttaatttaaattatacaaatagtgtaacaattaaagcgataattacattaaacactaatttttatatttttacgttcattttttacatatatttttacggtattctataaaaatacaagaaaacaatatcaaaacaacacaaaataacaccaaaacaatataaaaaataatatgcaaataacaaaaagtcaataacaaaataacaagagtacaacataaaaaaaattatattttatgtaaataaaatctaaaaaatcgtaaaatattaaaaatttcgtacaaactgtatttttgtaattttttttttattgttttgtgtttttttttttaaaatttatccccaaattaacactaacatgttattgtgtataataattgagtgcatattgtaaatgcacatatcattattcattgtataaagagatcaattagggtctgttttgagtcaaataaacaaaacaattttggctatgtataaaatttgagtggttaataaaacggtagaaatatcatccactcaatgtgtatcatatttggtggctatggtaagttgtttatatgggttaaattttcatttgaaatggaagtagtagagaggggacaacctagtgaaaaaggagtttgtaatctaaaataggcttttgtcttccattgaggatgaggtccccctatttgggtatttttcggatctcgtatatgaggtgtttgtgataatggtaacatcaatgtcacaaattgtcaacaacaattaaaatatattcttagattatgccaaagggttttgtattcattattggttacaacaaataaaattctaaaaattgggttttatataataaaaaaaaaaaaaaatagaagacaaatatgttagtgtcaaatcaaatttcatctctaacattcacttagttctattaggcgtgtccatttcatttgcctaatgggaaaaaggaaagggcaattttcttttattattactgaaaagaaaaagaaaaggtgagagtattaagcaagttactgattcaaaaggtaggccaattaattaatttgggtagctaagaaaggatgagaccgacaataaaaataagatgacttaaattgggttggtctggtttacttttggtacaacatttcattttttttttcttttgaagctacttatttttttccatgttactattgaattatataatatatcacatagta

SEQ ID NO: 217903 - DNA, 2409 bp, Cannabis indica
tgagttggatagaaagttggtttagatgatcaatttccacataatattttaggatgattatcaagtactgatattagtaggcatatatatatatagttattttctctaataaataggaaaacctgtactgccttcattataccacacactaaggaataaatagaaaataaaattgaacttaaaagattgtatttactagtttgatcatctctttaaacacattaagtttatttatacaattgaagttttttttattacattgacaacaattctacagtcatccaccacactcgaccataatttgtatgcatgtattaatatatactataatttgcgactatatatatatgcatacaataattaagttaattttctatcatagtagtaatatttaattagagttgttttttttttttaacttttgaaaatatatatgtggttattaaaacaaaataatgaaaactctaataataaaatgtaataaattatagttaaatagatttatataataagtaagatatataaaatctcaaatttaaatttgataccacaaatggcttaaagttcataaattaacatagcatattttatgaataataattttgacatatttatattgcacacactatttacgttgaaatgtataattaatttcaacatcataattaagtaaattactatagtaaaaattaatgtgtattaagtatgtcataatttcatatttatctagcaatagcattactctacttttttattgcaataaaaaaaaacatattagcatactttttttttttgagtaaaatacttgttaatagcattcatttacaataatagatcaaattggagcagggatttcctcaaatcaagaacaagcctcatccacccctaaaacaaactttgccaaaccatgagcagccattggccgaacgtttgacatgtgagatagttacattagggagaaagaataaaagacaagagatatctacaatcaaatcattaaaagatgagattgaattgaagggagctcataaagcattaaccaccatcagtgcatcggattcaacatgagtcaatggaagttgatgttgaattgcccaattgaaactatgaaaaagagcagaggcttccatttcatgtgagctgaagtttcccacaagtttctttgaaagagcagccacaacatcaccattagaattcctaattacaacaccaacaccgattatacctttgctagagtcgacggcagcatcgacattcatcttgaagtgattgggatcaggtggtcgccacagttgagcagcaggaactgcttgcattgagggccgtggtgtcgagcttggggcagcagctgcagaaaccgtggtttggtgtgactgatgcagggagttagtggcagaggatgctgaaattccatgccgctgttgagcatttctgtagttggttaggtatgttacagcataggaagctaactctctagcaggccttgcttgttgtcgatgaacgatacgatttcgttcattctatatagtccaaaggaattagcatactttttatttgtttaaagaatatttattatctttttataataaatatactaaattttaaaatatgtataactatttttcaaaattacaaacataaattgtggaacgaattgctttgttaaacataaaaactaaaagtgcaccaaatttggacaagaatgaatcttgcaaattatattgaatcaatcaaagttaaatcttgaatacccctaaaattagtaatccatatatatatttttcatttgttttattattttacaatcattaatattgaagatttagagaatatgtacttattctgagttggattggtttagacaactaaaagcctaaaagggcctaatttacttttacaattatctttataaattgataaagtgaacaaggaaaaggaaagaacgtcgtttatgataactaggttaatgcacctatattagctatattcttagttttaataatatttttaattgtatatttatttattttttatattatttaaattaaaaatatttaatttaagcgctaattatatatataaaaatatataataatatttaaaatttattgttaaatataattttttttattgttatatatatatttttttttttccaaaatatgtaaattgagtaaaaaagatagggttgaaaatggaattctgaaaaccgaaaaaatcgttcaaactgacctatcgaactggtaccgaaattggcagaaccaaaaacaaaaacaaaaaaaaccactaacagctaaaaccgccattgaacgatctgttttttttaacaataaaccgaccgttatacatgtatattaatttataaagtttttttttttcctttatgtattgtaattactcataatatat

SEQ ID NO: 217904 - DNA, 1338 bp, Cannabis indica
aactattatatatatatatatatatatatatatatcaatgtacattatgaaagtgaagtgcacggtaggttggtaataattaagatcatcagtccacaacactccatagctaaaacattatttgcattctggctttgttctatgcttgttggcccctcaggagacgacattacaactcactcataaccttttatctttcgtatattttcatccaaatttttattgggaaattttagtggataaaaattaatccatgaatcgagcaatatcataaaaacaaaaatcactttcacgaaaataaaatctaattttataaaagagtaaaaagaatgatgcttttgtaaaaatttacatcatttccattcttgactcacaagccacgaatccaacacctaatttaatttgaaaactttcctaaatctgccaaaatttatgtttttaatatgctagaacattaaaagtcaaattagaccataacatcttcaaaatagtcaaaaaaaaaaaaatactcctatatctataagaggggatcacgggaggacagtaattctctagctgttatacataaacttattacgtaaaattattgaactaaaacactcaacatagttatgcaacaaaaataagttaaagaagaaaaggaaggtatatgttttcccaaattttgataatagtgacatggcaaaaatgataatacgtggcacgaggaaactgaaactgaattgataaagaatgtgtaaagtaatgactgttactcatgaccgttggaagagaagtttaacagtcatctttttctctagcttaggcaataggtgactaccccgagggggacagtggactagcaccctcataaacgggataaacgatcactacacacctacgggagtcaaacaagtctagggagtatatactactactcctaccttaaatgatgatctacagggagttagtctaggggtacaccccttgacccctaaagggttagtctaaaggtacacctcttaccccctaaagtgttagtctaagggtatactctacaccctcatggtacaagtcatgcattccacctatataagacatgattgatatagtgcatcctcataacaccaaggctacccacaacatcgaagaggtctcggggtcgtcacccccagacgactgccgacaccctcctcatattgggttttgggggtgtcacccctcggtattagcttcttcccccaaagggggttaacggtcataccacaccctgaggggactctcatcgttagtggctagttcaaatattcaaatctcgtaagaagctcaatgaaaattacaaacccacaaaaatagtgg

SEQ ID NO: 217905 - DNA, 2529 bp, Cannabis indica
tgtcaaatatagttcaatttttacatctatcataataatgatgtattgggcatatgattttcaaacaaacacgcactaaacatatgtcaaatttgactagacccaaacaaaatgtgtcagtctagtcttgttaggtgttacaatatataacaaacccaataagaaaatacagagcacaaccaaagtcaagaagattaccttaatattagctttaacttttctccactagggacaggggcgcacatttgttttctcacactagcggtgtgtccgatggtccctatgccaccgcattttcccttcctcctctcttaattcttcgatcaaaatttttaagacaattagacaaagcatatttatgacaggcccatttgagaagaacaaatatatctaattaagacaacccttattatacatatctttttctttccatcacctatatctttgagatattcaaaatactaactaaatagtagcaaatgtatacgaagttatgataacaactgatttctggttgtaaatttttaccctatacaatcttttactgattcttaaaacccaatgctgaaaattatattacttttcataccataatataagacctaacaaagcaaatccaatcattttttcaagaagttatttcacaaagggactgagcaatgatgctaacagagaggaccgagacattcataatcaataatctggaaaccaagagcaaaatatggagaatgtacttctttcatggatgttaacaagctgttccaagaaagagtttctcaaaaacacagattaataatgaacaattaatgtgtgcaagcttctgaaaaacaggatcccatatgggtgcacacatcattagtgttcatgaaaaccaatgtaagaattacccatatacatcatgctggtttgggataatcacatgactgagctgccaagtttatatccgacaaaacaagtccctaattaattcacaatcaccatatacttacaatatagtaggactaatcggctttcagcctttaatttaattaaactaaaatcaaaacacgagacatcacattgccaaagcctttaattcacaatcttactgtaattgaactacaaaaactacagacagagatagatataaattatatatagagagagtttagaaaccagaattaggacgacggctgcttggtttttgagttccagatacattaccaccagagacctcttctttcttcatccaaaccattcgagtattttctagtttatgtactgcgcgaccagggaaactcttatacccatatctactggactcccgataaccacgatagtgatgggcgcttgttctccttaacccattaccattttccccagttccaccatttagagaaaaaacactaaatttaggtacgatagtatcaatctgatcaaaaccattgttctcaatctctgcctttaagtcacttctggttccaggcaaacccccaagtttgagaacaacatcagctgtgtgattcaaatcactgccctctgcctgattttcacttctgcttccatggtttactgaatgcccctcttctaaggtgagataaattttcctaccatttgcacttgcagacactgatttgttatgagctctctgattcaaattactgctctctgccctagttttagttttagttttagttttacctttacctctactttctgtgcttcttctccctgacacttgttctttctcgccattctcattcacattcacattcaccgccacagcttcgttttcagggatccccttttcaaccctaacataaatcatagacgaatccccaacctttgctttgatacgagtcgaaatttttccgattcttcggttcctcatccctgatatgtctttcctgttcccttccgtcaatggcgtctgcaccacaacttcctttcctgcaacctccttctctaccatcgcagacgaaaccctgaatttcgtatcgatatcagcccgctctgccctaaattcacctttctttggtctgcttctttgatttcctctctttttcatctctcccttctcgtcattcgccaaaggaaactgcacctcaatcccctctccgactacctctttctgaagcttgtttcccttgcatttcttcttcttcttcttcttcgacttagcttcctcgccttcttctcccacttgatcagcactatcaactcctccgatgacaacgatctccgatactgtccgagtgacagcgttgtggtgatcttgctcttgttgttgctttaattgcttttctttgagccaacgctcctgaagttgacacagagtgacgtaattggagggaaaagaggtcttcttcttctcgtcctccatttttacaaaaccaccaccaccaccaccgatttcttcttcttcctaactaagacacagtcatctctcatcgatcccaatttcccaaatccaatcatcattattacttcattcacaagaaacctatcaattccgaggaactactttttctatttcttttcaaaaaaaaa

SEQ ID NO: 217906 - DNA, 2313 bp, Cannabis indica
ccaaagcttacaatagtcgttgtgataaatgttgacataaaaagttttcctgagaattaggcaaacaaattgacaagaagtttatagaaattcaattccttgagtcaaaacaaaatgttctcaatttctgctaatttggcacacaatccaatccatgccaacttgcttattttcacatcttcacaaaatgtgcacatatcttagtcgaattcttgtgtgttgttttttgaatggattgattgctaaacaactatgtgccaaagtttgtttaaggaagtgggcaagaaaaaaatattgagtttggcagccacaactttcaatttcatccttagtatgagaactaaatggtggtttaaatttaatttaataacagtatgcatagccaattggactttgttttttttagaagtaattggactttggttttagtttaatgatttttggcatgtgaaaactttcacatgtgaatatctcatagtgtatctttcaatggggtcaatcaatgtaaatgctgaataattgaggaccacatggatgagcagagacaaagtttgaatatgaaaatcttatcaaaaaagaaaaaaaaaatggatttgaaaataattgaaatttggaaatataacactttattctctctatgttacttaaatatctagttatttctccatgttttaataatatcaaatatagacaaaagattaatgtttttttcaagaaaaaaaaaaatcttaaaacattacccttaatatctagaggaaaaaaaaaaactataaaataatttaaaaatctaataagcatgaaatatttgtagtgagtgtttcacttctggtatgctacatatacaatttttagtcatcacaaaatttgtaacttaaataaaatatttgttatttaaaaatattattattttatgtcattattaaaaaatttgtagctaaaagtagtataaaccaaaataataagagaattttttatatttttaaaaacaataaaaataattacaaaaatttggatttatacttttttaaacatttttacacatttgaacttttttttttctacaaaatattggcggttgttttaatttttgttgtttttagaacaacattatactatcatattgtttgggaaatttatatggtctactaacttttggtataaaaatactactaggcggtactttttacttttttactgtgtttttttataaatttcatactacagtatactgtgtgaagtttccactgttgttctactggtattttttagttgttctactattgttttgagttgttctgttttgtgttttactagtattttataaaaacacaatatttttgaaaagattttcgtgtaacagtatttttgtaaaagttaacccaaattccagtatttttgtaagtttccctattgttttcatattgctttattgtaatctttcaaaaaaaaaatattgctttattgtactatattatttacacattattttcataaaaatataattaaaaaaaattataataatgtaaattatagttgtaaaaatatataaaaaaaaatattattttgttaaaaatttaaataagaatttgttgtcactaaataatatttttttaatcacaacaaattttatcattacatatacatgatatataagaggtcgtgattaacactatattaatcataattcgttactgtaagtgcatactattttttttttagagaagtacataactttttagttacaaataatttttttttttattgtgaaccaacaaaagtgatgcatataaatataaataaacagtttcaggcaaccaattacataactaaagtctataggggtagccggttacctcctatttttgttttggaatttttctaagaaaatatataatttattttttttaaaaaaaaaccacattttgttttttatcatacaaaggagaaatattattcaaaaccaaaacaaacatgctacaaccaacaagtcaaccagcttcacaagagcttacattttgttcaaaatggctaccacttcagcttctattttgttcaaaaaccatatttttgcagtataaaattaaaaacctgtatatataattttcacttgttattgtaaagtaattgaagatagagaaaagaatttctgtattttgatttatgaagccaatggcttgagtatatatacaagagaagaaagcaagcaacagaaaaataagaatgcaacagaaagtttgttacaggaaacaacaaacaacagaaagttagttagaactgttagacttttatatgtataaactgaaacatatatga

SEQ ID NO: 217907 - DNA, 1109 bp, Cannabis indica
gagagagagagagaactaatgcccacttgaaattaataagattagtatctaattcaaagaaaaatagaggattaattaggtcaaacctttaattattatttaccagagtttctggcaatgcagtatacgaggttgaagatcattctaccaaaattcaaagcaattatgtggatttcgactctaccgcacttgacaacgcctcctatttttggatcagtctagcttttgtagatgatgacgtttatataaaggaagaggagagtggcgatgaactcggtgattagagctctatagaaggaccatttgcgcaatggagctccgatgagcttggggtcgaggtgttgttggggtggggatcgagggtggctaggggtgaagacaaggctcgggtggagatgaagaagaagaagaagaagaaggaaaggaattttttttttttaagtttttaaataatttatttctatttttattttttaaattaaaattataatttggaccaataattcttcgacacatgataattttaaataagtaaacaaattagttaaatttaggactaatagacttacaaaaaatttgattttactattgccactatttctcgagattgagaactaatttgcatcaaagtaaatttatcggagacttttgccataaaattccccttattttattatgagagaatatgcattttttttttaaattgtcattttttataatattaataaagaataactcaaatttcaaaattattaatttatttataaacaatataaataaaacaagactaaatatatttagcataatatataatataaaaatattaaatttaaatagtataaaaaaatattaaattaaatagatatgtaaaaataaaaatattttagctaacaatttttttagagaaaatttaaatatatttaacataatatctataaaatataaaccaaaatttgtttatcaaaagtatatgcagtacatatataaagtagaacacactaccttaaagcatcttcaatagagatgcaaatataaaatatagttcaatttgttaaaagtctattctaataatgtgctaaattatgatgcaaaaatctcacataatcaaa

SEQ ID NO: 217908 - DNA, 4499 bp, Cannabis indica
gtttttaaataatatttaaaaatttaaggctattaatataaaaaaatataataatatttaaaattattgtcattttaatttaaatgggtaattaaaaactttattaactttcaaattcggctaccaaatatgatgtagcaattcaattggaacaatactcatgaaagtacatttaggatgtaaactagatgctctttcatataaatgagttactaaatttatttaacccttaatatataaaataagtagaaatattttttaactccacaaacaataaagacttacattctttaataatcaaaccaaatgaaaaaacaaaaaaaaaaaaattcaaatggactatataaagcttgcacatctactaaaccatctatctcagagttgataccacccttgacgtttgatctagcttaatccttctctaaccccaatagccttagtttcggatgaacaaagtgaagcactatgtaaaaccatccaaaagaaaactttgctcattcctagcatttatcaccactaaatatggttgcatccacatatccccgacaagtaaattagtcggagataactccaatatagagttttgagttgctttccattagtcaagaaagatgctagcgaacacaaaaataaatgaagcagaagatattttatttttccacacttttttatttttggcaccccaaattacccaacaaagagtggctatcaaacacctcttctcaatgcttgaattcttaaaaagagagaatgcactagtctaaaaaagacatagcagttgaatcaagatcgacaacactagcctttttccaacaagaagcagcaatactggaagaaactagagcatgcaagatcatctcattatgaaggccacacctaggacacaaaatattaaccttcactctttttgcaaggactatggtcaaagtagtataacgttcccgtttcaagcctccatagtccttacacccacaaaataatggctcttatacacgagtacgtcagtctggctgcttcatgaattgatgacttgccctacaaaccaacacaagtgtttctagcgtatgtttttttttttcactcgtacgcttcttgagaaaagttcccaagagatcactcatcctgaaattaccccaagtcaagcacgcttaactgtggagttctttcatgatgggctaccagaaaaaaagattcatcttgttgacataggtagcaccaatcaatccatttaagcccactttaactatgtagtctcctacctacatagtctcacgatcatcacacttgaccttccccaggcgatgtggaattgcacagcctactcggtatttttccttacagatcacgggactattgactgtcacaagtaggaaggaagttggtacccccacgccacataaaattttatcattaggtggtatttttaacctcaacaaatcatttcaaaaatttgcagcatcaactacagtccagtaatcattagttttctaaagtaactattgtgcacttttcacagtgagtataccagatatcacgtgaccaatacatatgatcaccacctgtagcaaggtaggggaaattgaaagaataatctctttgtccttgctattaaacaaatcagttagcaactaaaaatctcatcccagaccattgatcatcaaattagacactttttgcattcaaaagaactaggtgaaaagaagtcacatagggttttcattattttccagtcatggcacctccaatgcagcaatactggatccattccccacacgtcaacgagctctttttttcactaatgattgagcttctagaatgctatgccaaataaaactagggttatttcccaattgggcaaaggtaagtgccatttagaaaatatctagctttcaaaatatttgagaccaaaaaatctggacgaacaagaaacctccatccttgcttttctagtagcgatcgattatgatcacgaagctttctaaaacccaagccccctacacttttatgcttacttaatttctcccaagacatccaatggatacccttatctctagaattagatgtcttccaccaaaacttcaccataagttgttccatgtctctgttgatttccaaaggaagaaggaagacactcatagcattgcttagaacacttgcactaaagttttaataagaacttattttcttgccttagagagaaactttgaattctaattttggacccttttctgtactcggtcctttaaatatcccaaaattgagtttttatttctccccatcgtacttggaagaccaaggtatgtactattagcatcaaccatggtcatctaaagagagttgcatgctcgagtcctcaagtaactgttagcattaacattgaaaaaaattgcacctctttgaattgacttgttggcctgaggcttgttcaaatagacaaagaagttatactaaacatgaactaccacagacatgatgcctttgcaatataggtagctatcatctgcaaatagcatatgcgagattctaatagccccattcgccaatttacaaccatgaagccattccttggtctcaaattttccaagtaatgttgaaaggccatcaacacataagataaagatgtttacatcaaaagtaggcctaatgatgtggatatcgatgtttgacatgtagaacgaaagataacatctcagagttgagtagtccccaaccataaaggtcgacctgggagcggtcccaagccctatgcccaagttgacttcatgaactctgaaatgggtgtttggattctgataagttgtttccaactcactatctttcaatattctgtaccatgaagacatgacactacatgaaatgtcacatttgccagcatatttttgtgttggcaaaagtttagtattgcgctggtaaaatgaaatttacttctgatgtgttggcaaaagggattggaaaatcaacgttggtattagaatttttggcaacacaaaatgaaaagcgctggcaaaaatggcttttcttagcgcttaaatacgctggtaaaaattagatttcagccattgaaaatatgcgctagtaagactttgacctttttcccaatgcagtttgcgaactatcctggtaaaagtgacaaatttcttgtagtgtgaagcattaaagactaggccctgatagttgaaaacacaggaattaacacctcagatttcaacttggccacctagggtttcaaccggcacccaggttgaaaacaccaactagggttttagttttcgggatcgtcttagggaaaatgggtcaaactttacattgggacatgaactagacataccacgaatatatttgagacttcaaaataatattcagagaactttcatttttaagcacccagtttgataatatatcagcttgggccaattccaagtatcaaaacaaaaattcgactcatgcatcttcttcatcttcataaaaaatggggagataagtgctttcagggaagaaacaacccaaccattgttgaaaaacaagggaccagcgcctaggttaggttaacacttgtcccagcatccaggttgatattttgtcaacctgggccaattctaaggagtttttccaaaaaagtcttctgtgcatattctatgttttaatcaaagattaagattcaactatttttagggaccaaacggaacttccaggtgatatcatggaatccaatcgggaatatatggagacacaactaggaatggaactcccaaattgttaaacaaaaaaactaaaattgaattcatatgacaaaaattgcaacatcatagttaattttaacacttatattcagtttcatctactgctcaagagacacaacagtagaaactgttgcaacaaattcattcaaccttgtagcttgagccctcaactattatacaaagtacgtaattgcactactattaacaacctcttaagtcgcagaaaatattttattctcaacaactaacagtgatctgatggtaaaccatcaaagaataaagaaccaacaacgaatcaaaacaaaataaaatgcatgtcacaaagactgactaaaacactcagaatcatgtcacagagataagactaattgcaatagtaaaattgaatcacaatagcaaaatacaaccctgaccaagccgcgcctatgtctagggaaggccaaagaaaaaaaaaacctcctgtagctataaatttaagaacaagaaatcctaataatttttttgagataaacattaaatataacatatatatatgagtttttatcataataatcttttcgagatgaatttatgtacttatttattttttaattctaaaaaacatcttctattacaaaaagaaaagaaaaaactgctagaaaacatgcactacaaaaaaatttacttttagtcataacaaaatttgtgactaaaagtgaaaaaattgtaactaattataaattattatttttatgtggtgactaaaaagtccgaggttaa

SEQ ID NO: 217909 - DNA, 1903 bp, Cannabis indica
aatatttcatagtaaaaggtcatatgagaaagggcaatggaatatttgtgtttgtaatatagaatttcacagaatataccattcagtaatctgatcatttgattgtaacaaaaacatatatcagtagtgcaaatgtctcctatacagttttaatagctcattttatatttttgtcaaagtgtgatataagttgagttgatccactttatatgttcaagataaatatgtatttgtctagtttaaaaagttgatccagggtttagctagacagtagaaactctgggaaagcaagacaatgaaagtcttctatagtctttattaatatctctgtttcataaatttagtaggtcccctaaaatggaaaaggaaatgctaccaatcatgagtcttttgggccaagtggtttctatgatataatataagagataatatatggtgttttaggataatatctatctatctatctatacatacatatatgtatatataccttagatttagcagaatatgttcctctggcaaacatgccagatggagtggtctcctctggcatcacatgtgtgtaagcctctggctgaggactgaaagttccaatcatctcttttgtgttgtccactgattcatacatacatgtacatgttatactgttagttttgatatatctaaatatatatgtagatagtaagaaagaataaatggagtcatgatttcatctatgtatgtatatatatatagaattatatatatatataccctttatagcagttttaccaaacagtgttggtgtacttgagaccagagacaatgttattgctgacattaaaggagaatttgaggttataacggctgccttctttcagagtacaagcctttgggctttccatcttcagggattggaagaactatgtcagatctcccaggtgagatgatgcacagttcaacgatctttacttctggctcaagtgtttctgcatttatgttatatatatatatatatatatgtgtattgtaaaaatcaacaaaaagtaacactacactttattcttatgcatgcagttacaaataattaatcagaatagaccattaaaattaatgtacatcaaaagaaaaaaaaaaatctttctatacatgcatgaacttttctttttcgtcacatgaactttataatgtatattgtattaataattaaatcatgtaatccatgactatgctatcagcaaaaccatctctcattttttatatttacgtaaattcaaaatcatgtatcacaactcagcaaaaaaaaaaatcatgtatcacaagacagcaaggtattttgtcatttaaaatgatatgagggtttatatatatatatttagctaagtttgactactaaatatttgtttctttattctgttaataatagtataattgtgtatatagtttcgtatatgtgtcatgtgtgtgactagtatgcattagcaaattatattcaagtatatatgtttgagagatcgtatatatttataataacatttttttatgataattgttaaaaaattataaaaaaacatagaataattgccatttatgaaattccagagaaaaaaattgccatttatgaaaaagaatctaaattaataaagtaataaattggcatagcaaaggcgtgtttgacattgatactatatatacgtgaagatttttttttctttttcagaaacaagtaaattaaaatagaaaataaaataattgggtaatttataaaaaccaattgttaatgtatgtatatattatcaattcttctcacattattttatttgttctcaccttctccctcattttatctcatcaccttctcccttattatttttagaaataattacataaggtatcattttttgtaaaatatttacttttttac

SEQ ID NO: 217910 - DNA, 2451 bp, Cannabis indica
ggaaacatcgtccctccgccggggaatttgaaacgcccattatcataatgtacccaattctggttcctcttctcgacagttaactccttatgaggaacattcgcaaaccacgctaatccccgactctctggccaccggaacggcgtcctgtacccgtacggtgccggaattctacacttcaacttctcctccggcgccggacaatgcctctcacgataaatcagcttctccctgtcgaacttcagcgacctctgcacgtcctcgcatggagtgtactcgctcagcccgacggcgcacgctggaattctacgcgcagtcgtcgtcggcggagccagtggaagatccacagcgcgatggtgagcctcgaagtcgagccgaccgattctcgccaagttcgaatggaacggcgagcatgaggaaccggagacgacatcagaggcggcggaggttgcgacgcctttgtagtgttggtagaatccgacgaagtagcagatcgagcagaggatgattgcgctggtcaagaagtatagacttgggaatcttttggctctgatcaaggccaatcggccgagtcgattggattcggccattaacgccaaaaccaaagctctctaaccgattctggtcgattctttacagtcaactgagaaaaaaatatatatagagagaaaaacagtgattgaagacgatttgtgtgtatgtatatatatagtgtgcgtgaggtgacaaattaattttccaatttattatttattagtaaatattattttaattctgtgggtttgaaaaagacgagtgaggttctaatctcaacgttgatgataacatgaaattacataatttctttattcaaaaaggtaattacttaatttctgaccaaaataacaattaattattaaatcaagtcaagtgttaattagtggataagcaggagcgattccgaacacgcgcacacgcgctctttctggtgaatgacgtaagataacacacacaacacaaggagacgagataggctctttcgtcctttcccggcttttttcttctcctttcgtctccatttaattatctttttttaggggatcctagtcttcataattaaaataaataaaaatgtccaattttattgaatttattttgggtgaatcgtatgttatttatttggaagttttctgaggctttccttttcttgttttgtttttctctatttccaacttttatttttagttttttttttgaaaaaaattacaaattcaaaccaattaatttcctactagttttctgtttgggggcaattcgtgtgacagtggttttctgaggctgtatactagttatttatttgatttggctgataattaattaatggtaaattttaaataaataaatatatattaattatatgatactttccagttttgcttagtatttctcagatggaagtgtaatctgtaataattcctaattaaatgtgagggagatatatgttttaatgtgggatattattcccttttaccataaatgtgtggtctttgacagttaatttttatttgttttgtaaaataaaaaaatattgtgacagctttttttttcttgaacaaactattattgacagcttatgtatgagttactcaccaaaattgattgaaagataagattcatttcaggaaaacctttggctttgaaagggaaaacaacctaccttactggacaaacaaaaatgctgtattttatttattactgtggcacttggatttgttttaattatttgttcaaattttatgtaactaaaaaaagaataagacattgaaaagagctgtgctctatctattcatgttattggtcaattgaaaagttttaactgaatttgatatatatttttaaaagtcagacacaatttttcaattactatgtaaattattatagcttgtaattgtataatagtggattgtacagtagatagatattattttatactaatctagataattataagtagtataaaatatacatgtttttatatgagggggggttcaattgtgggcaagtgttgtgcacgctccgttgagttgaatttcgtgcgtttcatgtaattaagaagagggcagatagaaaatatgttggattggttgaagagaaattgttatttaattttagatataataatttaattgagaatagtgaggcgtttctactttctactttgtagcttacaatttagcatgcaaagaaaatgcaacacttgtacaaaattatctgaagtgcataacactcaaagcactacctgaaatgaataaagtagaatttcagcaactgccaatacttaaccaatcaattccttaacatattctctcctattataaataacaacaaataaatcaaataaaaggcatacttattaatagggcttaaattcgtgagtcccgccccatatttttttttagagtgccctaaaaa

SEQ ID NO: 217911 - DNA, 2779 bp, Cannabis indica
accaacagcagcctttcgtcatttagtccgccttccatgtttaatgcatttgccaagtgaagagctgcctgagcttgtctatgcgctatgaagcaattgggggagttggctcctcttcctttacccaatttccatccttaattaagaacccacactccatccaggccttccactcccataaccattcaacaacacttgttctgtagaattccatccaaatatttccaatacacgctcaacattgttcttcctgaaagttttaaggacaattccactcatcttaacccaacatttgatcatgcggtcaatcttacaaatgtatgattcccttcttcaacctccattttcaccttccacccaccccacataagatttccatatacaactaaagatcgtgagaaacatgttgccattatctggacgcttggctatatataaccctgccaatttagcacttctcccaaaaatccacaaccccctgttcatcaatctcccactcctccttggttccacaaccaaccaagcacaagtaaccataacacaccaatcatagttcaaagtcacagagactagagagaaaatctcggggggaaggattgttgcttattttgcattattactccaccctccaaaaagtagagttatgaatgggacatttatagtggactgaatgatatatcaacattatactattttttttaaaccttcgacatttgtagtggacaatgggacatatgttatatcattggtttatctaaacctcgagatcttatctcattcaaagatgaatggtttgatttgattggcaaaaaatatcaaataagatatgatttgaaaatgaaaaaaaaaaatatataaacaaaaaatcatcaccttatttttcttctcttatgtcgttaaaaaactgttggtgattttagatacaacgcacttaagtttacttaaaatagattttattggattcttctttttctatgtgtctgtcaaaaaccaaactccattacactgacaaattatatatatatatatatatatatacttattctgaaagattaaagctaatgatgcaatagtacccgcatgcggctgcggcatgcccacttttgtgtttttgacccttattgttattattattttcttctctttttctaatagataccattggataccataccaaaatcttacgaagccattaagctatcaaataaataaataaggactatatatatatatatatatattaatcttctaactaaaatcctatctaaaagacttatcaaattaatcataaataattaaccaacaaaaaaattacaagttattggccaaagctgtccaagcttcgccacttttttctttactttttctcttgttgaccaacaaggaataatgtggttgaaagatataaaaccaatcttttgaaccacaaatataaacaaagggtatatctcctcggatgctttttgcttcctaagacatagtacaatatggaaatgataataataattatctagttatcagtatgcaaggtagaatccaaagccaatattcagcttctaccttatatgccaatgcataaaattgtaatcggtatgcaaggtagaatccaaagccaatatttagcttctaccttatgccaatgcataaaattgtaatcggtatgcaaggtagaacctaaagccaatattcagcttctaccttatgccaatgcatagaaatgtaaaatgaataggattcttatccttctaatgctaaacactacttaacgatgatgatgataacaaaaaataaaaaaaagactttccctagctattgttctaaaaaagcaaacatgtgttagctgagcaaagcttttgtacgtaatccccatactgctgaggcaaatacgggtattgtaccatttgagggtattgcacattgaaaccagggtgatgagcttggccactctgtgcatattgagcatataaagggtagaaattagggtacatggcagcagctgccccagaacccccagaggttgctacatatggtggatattgttgacctccatacacaccataatagttctgcaaattcaattttttttcttttaaagttgtaataatggaatccaatgaaagaaaagaatgtatgataggagcatgaattagtatttaccatgggatacatggagtcttgtgaatacccggtgtaactgtaaattagcccccatacaagaaataaatgaatcaatgttttatgtaaaactgaaaagcagggggaatttagaaaagaaaaaaaaaaatatagtaataatttgaggatttaatgttaataattatgagcgttttagcttacccataagctgagtaaggaattgaatattgagcagtgggttggtgaaagtatgttgatgttgagccttgataagctggtggagtcactattccagggcttggtctaaaccttcctgctcctcctgcaggaacaaaaaataagaaaaaagaaaaaaaaatatataatgacatcctttgaagcttgtaagaatggaaatgtgataattttaattaggattaacataatcaattgtcaaatattgaatatttaattatgatgagattgaatgttatttttgaatatctaattaaatttgatgttggatgaaattagtatttttatttagtttaaatttttttttgaaggaaatttagtttagaagttgtgagattttatgttgttatacttaaaaatatttttaatgtatacatgaaaattattaggattaaaatttgacattttt

SEQ ID NO: 217912 - DNA, 1297 bp, Cannabis indica
tttaataggccatgtcacattttgtaagaaaaacatgtaatccccttcttgctaaagttaccttctcgagtcctaacttcttttttgtttttatgaattttcaagaacaaaaagagaattgtgggacccgaaataatatcgtgcaacaacaatcccgttgacatagaagaatctgctactagtaatccgtctcccactactagtaagtcttcccaaaaaactaggaataagacaaaagttgcaggcctatattttgaggcgagttgcatcacttctccattcgaaagtatgtttcaagttcgggattgcctcaaagctcacgagcttagccttggtggcggaacgttgtgtagagctcctgtgtccgatgaacatagttgttccccaccacacaaatatatgtatgcatggggcacttcccttttcatggcgcgtccatgctcccattagtgtcatatttttggaatatcctatgagccttgggagtggctctgtttcagttgtcttccaatagttatcgaattttggccgggctcaagtctctttaccatatattgggactaggagcctaatgcctgtgaaagtattaatctggcacaaaccgagggctagtcctgctggaagggggaagtatggagatgacttttactaccttagttgtacgacgacccagtattactagatggccttcccaataagccgcttgacaataagcatgagttcttttaggtatggggtccatttggttattatgatttcaagtgcatagatactatacattgcaccttactccatttatcaataattttattttttgatgtaagtattgatttgtattttggtatttttagaggttgttcatatccaatcattagactcgttgaatgagagagtgattctcctctaaaatattggtattcattagcgaaacctatgcttccttcttcataatgaccgccttcaagcatgtggtctcttgttaagagtttgttcaatgtaaggtttctggcttttgttctttgtgttgttgttgtgatttataaagatactttttttcttcataaaaaaggggctcttagtgtggactccctatatgaaaagacatgtgagaagatatagtttggttagttggatttgttatgagagtcccaactactaaattaactccatatctaactatttttggaattttatagtgcatattcttaatgcaacaattaaattgaatgttattgagataaaattatggttcacgagcctcgcaacagttatactttgatttaaaaaaaaaaatgaa

SEQ ID NO: 217913 - DNA, 1478 bp, Cannabis indica
aaaataatttccaacacatactggccctgacgcggcccaagtcattgaaagcccacatcatgaagtgtgtaagtcccgtacacctcatcatcatccagaacccaccttcattaatgggcctgcgaatactttagaggagattactgctaaactctcagggcctatgtgggatgggggagagggtccaaatgatactggtgctaaatggttccacactatgaccttgcctccaattttggggtcaaagtcaaaaaagaggaaggcaacgggaagtgtatcccccattgttaatttggctctcaatccatctcacggcactcccacgtctaaggggcaggaattatctttcagaaagggtggaatcgttcctttctctctcgggaaggactctcccaagaagggatcttcaagttcaaggaaattgagaagcaaaaagacatctcttggcagcagtaacattgtcgaaccgaaaatcactgatgatgatggcagtaatgaatcaggtaccaatgccccatctttttcttctgagtttggaaatttacttgttgaagttagaattgatcaaaattttcaattgggcgaggaggcggcccttatcaagcccccccaatcccaatgaggttcctttcttggaatttccgcggcctttcgagaccggcggcaatccaagctctaaaggcttgggtgtggaagtggaaggtggattgtgtttttcttatggaaactaagataggggcaagtcaaatgaggtctatttgtaattctctgcaatttgagaatggtgtttttgttccttctgtggggcacgctggagggttatgtttgttgtggaataaaaatgtggacattacggttacggagatacttgagtttgggtttgtatgtactgtcaacgactatgctgtttcgaagatttggtatttgttggccatctacggcaccccttatgacgaatataaaagggagttctgggatcatttaacgaatatagtcaattccttcgatggtccctgggctcttatgggagatcttaacattcttctgtctaaagaagataaattgggcgggcgtaatttcgtattggactaaggcttaaaaattggcagagaatatcgtattggaccaaggcatgggtgtgcctaggcattggatccttaggcctagttataaattcataaaatgctcactgcccataaaaaaaggagtcatgcctaggcatggaaatcacatgcttagtcctgtgtctaagtagcctagagacgtgtggatttgcacacatgggccacgacataggatctacataccacgacccaacccttcaattttcaaacaaacaatatatttctcagcttttttattttttatttttttttttgtttgctataaaaggagtggatttcgatatttttcagtaagcaattcaagagtacaaaaattgaagagcaagatcaatcgagaaagctttttcaatgggg

SEQ ID NO: 217914 - DNA, 1917 bp, Cannabis indica
taccatcaaggatatgagtcatcaaggtacaaggagactaatacttaaacatagagtaaacattgcataagagttcccctccaaatggcctaggtaattcgtgccatccttttgtacaaaaagatggcacaacgcctctttcaaaatataaagggggacttttccatatgtgttcatccaacacaaaacagcataaaaccattgaaagaagctattcccaacctatgcaacttgtgccatattttggtacaaaatgatggcataacttccccattaaaaatgagagggaggtacttggccaagtgtgtctttcaaagaaacataaaacaagtgtgaaaagccaccaagttgtggagaaccatgataggcgacctgtgccatccttgtgacccaaaagatgtcacaactcacccactttagaaaattggtcaaatgtgtttttccaacatcaagatacataaaataagaaagaaagaccaccaaatgttcttctacgatgatagacgatctgttccatctttctggtgaaaaaggtggcgtaactcaaaaattagttttgagcgccaaactatggtttcatgaccctaaaactaagaaaatgtgactcaccataaaaaaacagtcaaaacacttctcaaggtgtaataccctaggattaagaaatagattaacaaactctaactagttaaatgtgtattattatggaattatattattatataatttattataagtgaattaatttgatatatgacatgttaagaccccgttggtgagctaggggcattttagtaattttgacccgagaagggtaaaattgtgaatttaatttaattgcgtgcttatgaactatattattatatagtatgcgagttttttctttttttaggtgtgttctaacaagtcggcgcggtatagtcacaactggatatttcgggctgaaccgggttcggggccaaaatacaattttgggataatttattggcattgtattattgagtgattaatatgaaagttattttaagtatgtatgtgaagataaatgacacttttgcccttgaatgcatgtatgtatgttggctctaggggcattttagtcattttccatatgagatttattttcaacaaaaggaaattttaaagaaaaggaaatgcattttcagtttgttctcagccctttagccgagcccctctctctcacccttaagcttcatcttttcaacatctaaattgggaaattcttttggaaagaagtttagattttggtggcatttgtgcttgggtttggaaaagattagagttaactctttctactatttttattttgaactttatgttgctgaaattaaattgagaaacatgctttgtttatgatttagttcatctttgcatgtgtgagaaagcttgggtataatctttgtatatttggcatgttggtgttgttgaaatgtggaatttgttcttggtgattttagaggcgtttttggggttattttgagttcaaaatcagagtataggttctgattttaggttatgttcaagcttgtggttatgggttttgatgttcttggttgttcaagcttttggaattgaaattgttatgattttgctcaagttttgagtttatctttattgttgttataatctgaattttgatgcatgtgagctttgattttgagctttaaatgtgtctattagctctttgttatgatagttatattacgtgggaaatgattttgagatatattcatgattggggcgattctgggtgagttttggtgtattttttgagctgctgaaaatggaatttctgggttttcaatccaggtgttgcggcccgcttgcgtggacagatttcatgttgaacttgttttgttcataacttttgacgcgagactctatttgggacgttcttta

SEQ ID NO: 217915 - DNA, 1218 bp, Cannabis indica
aaagaagacattatactcttcatcagctctacgaccctgtcagcacaggtaggtgaaattagcagatttgagcagaccaagtactaatgaaattagtataattttagcaacaatgttgaaaaacaccataaagtttaaagtaacaaaccatcattttcaacactgaaatcttatcccgctacaccactccgagcatatgaatgaaatcattcaaagatgatgaaaggcaaaaaattgataggagaggagtcttgatagtttaaggttattccaattctacagttgaaagcaaaaagaagtaaaatttcacaaataaataagagaagaagaagcaccattacttgcaaatattcacctctattaacttgaacaaaagcagatagcatgtttaagttcatcttacatagttaagagaattttaaacaaagatctaagaagtaaagttcataattcaatatcttaactactaaaatatttgttgaaaatcataaaaattatttgtaaaacatttacttattacgtgtagaagacctaccaagtcaacctcgagcgtcaccctgagcaactgttgatgcacagtccaactccattttcttcaattacagagtgtactgcataatttgttttttgctcatgttctgacatagtttgtaatggttgaaccctttaaataacacatgttttcagccaaggaagaatgccccatgtacagtaaagcatgataatcttgatcacgaaactgctgtatttgttttccagccacataagaatatttcaagctattgttgattccataaaagtggtcaaaaggagttggagtgtatttcaactcatcagagttttgttttgagtctctcctttcaccctgttctacgcctatcattcctcactcgaggcctgttccgagatgtttgctgttgtctatcagtgaacctgaactgtggtctaggtatgactttcccatcaatgaacaaatctcctaaattcagcggaaaagaaaaatcagtacttacagaaaagactagccccaaaaaatatgataaactccaaaaacttaaattcattgacaaactcacctccataatctttgttgggaacgtcaagatatgaatccggtaaaacccaaagaacaccaggttgtgctatccaagtatccaaccaaaataacagatcagacaaattttagaaaagagtatattgcaaagctttaaatcatca

SEQ ID NO: 217916 - DNA, 1331 bp, Cannabis indica
attccattctattcttattcccattctcattcctattcttatattttcattcctcccaatcaaacgcctcctaagtacttatgcctatttatcttattatttaatagtgtttgcatatatccaaatattctcttctcgaggacaaaatgggtattatgtaaaataagagggacaaaataggaaactaaagttcacgagtcctgtcatttcattcccaccgtacggggcacaactaaaaagcttttgtcagttgggataagccaaattagtgggatccacatatattgaattggacggtcacgatcaactgatctgacggtaggtcccacctgttaagctccgttagatacggagacctttttgtttgtcggaaataatcaaacccagttttactcaaatagttttaacactttttttcaagtcacgtttggcgaatcgctttgactcgtcatttttttgtcgctttttgatgacgtgtcttgagctacaattacgtcgatcgtgtggtgtgtattggatggacggtcgagatttggtgaggtgggataaaggagatattgagcgttggatgagagaaaagttgaggcgtgagtgtgattgacagccgtagttggcggactcacgtagtaggtttatgctttgtttgtaaaattgataaattgacatgaaaaatgacaaaataatatataatttttaccaaaatgctattttattggaaagttaaaaaaaatagaaaaataatataaagtaactagttacttaataaaatatttgttatgttacttagacttgaaagaggtagagttagaaagtgttcaattaagagaaaatgaaactcaagtattagagagagttagcattaccaacaattaaacttaaaagactaattagtatttttatccctgaattttaacatgtaacaaatcatgcttccaaaatttttaaggccattaaaaattcttactgaactattgacattgttagattaaataatttttgtctaattttaataagaaaagttttaacatagatgaaagttcaaagaacatgatatgacgtatgttaaagatcgagagccatgatttaatacatattaaaatttagagagtatgatttaatgtataaacaatcaccgaatgaataaaattgaatgaaatttgataaaaatccttaaatctaacaatctcaatagttcagtgaaaaattttaatggcaaaaaaaaagtttcaggaacatgacttagtacatgtcaaaaattctatttgccaatttaaaatgtgagacacacttaaaaacacaaatatctttttattaaaatttaatttactaaa

SEQ ID NO: 217917 - DNA, 3836 bp, Cannabis indica
taggcatttatggcatatacacagacatttaagtatcacatgagagtggcatgctaatctactcagtttgcactctggcttggtatggtgtatttgactctacgctattcaggtatctatgcttatatgtcttctaaaaaacctttatttaagcagttttgtttttttttttgtttaatttggtgccaaaaaaaaaaatgtattttgcagtggatatacgggttcgtgacattcttctaccctggagggtccagtgggcttaggagtgagtctctaccatggcatgtgttctttgggctttttgtatacatattggctttgggcactgctgcattgggctttttagaaaagctgacattccttgagtctggtggagttgaaaaatatgggtctgaggccttcttagtcaacttcactgctattgtcactgttttatttggagcttttgttatattatctgtttcttctcaaggtccaccacaagaagatgaatatagctattcagctatataaataaatatattatccttattccttattactatgctcattttcttggtaatgtagcactactagctaagacagttgtcatatccttctttctcttaaagtacataaatgttgattatttatttttaattatatttgtattaaagactgtaatcaaacttcaaatgagtaactcacttgaatatgatcatatatgtattatataattttatatttttatagattagtggatgatgaatattgttaaatgttttcagatatatcatatcattaatcattaaacattgaaaacttagctgtaatgtaataataacattattttctttaatgtagttaaattaatagacaaagccatgtgaaaacaattctttaaaaacataaacatcagttatatttaagatatttatttaaaacgaaaaaatgtataatgatcaacaataggaattttattaaattgtaggggctccattataagttattttttggtgaagttggccataaaatgaaaagtacatgagagaaggaaagattgatgatgtggccagttatgtaagcacacgtgtggaaccagctgtgatttgtttggtggtccagctggagtaagccacgtcatcatcagcagaaggaagtgccgcaagggaccaccacgtggcagacgatgcccaactttctccagcagccgacaatacttgcctgtcatgtcggcccagttgtaacgcccccaaaataccaatcaaatcacagacaacctctacagtattaccttcatcatccttaacaaacactactttccattttcccacttgaattttcggaattatttaattttgtcttttttttttttttttgaaatcttgtcttttaaaatataaatctttgttaaaaatttctcttaaaatataacagttataaaattatgtttattttttttttttactttgaccaacacaaaattttacttcctttcattaaaaaattagtcaacaggtcgcgtttcgcatgcagctatttataaaatttttaaatatatgtataactatttattaaataataaaattgtatcaaataattttaaatttatttttatgtataattttaaaatatacatttattaaaagatgtatacataaagaactctaaaggtattcaaaataaaacacatacaaaaatatcttcaaatatatattatagtgaaaaaacaataaaaattgaacaatgttcgcacaaaatatagatctaaaataaaaagaagactatatatttattgaaaacatatcatataatttcaaaataattatcattattgtatctcacgtctgacttacacttatcctagtaataatagtgaaatatttaaagccaggttatattatttatgatatctcaaaatctacacaaggtgacgtgacgcttatttgggtgacacatgaagcatttttagacctggatggagggaaccttcgtcagtgtcgtcgacaatggattatccattagatactatttatttgaaaaataaagtaaaagtatcgcacagggtaaacggtaccatccaactaatgtcaattttatggccacttcgtgtatcccattcagggcaaatgtgatagagaaagccttaaatatactttcctcctatatttgtcaattaaatctttaattttatgggatttccacatgtaaataatgtaatttagaaaagtaactagtttctctttttattatttttttaggaaacctaatgaatgtaattattccatataaatagtggagccatttcactattcaaggcatccaaaatcttattttcaaaaagcttttatgctgctaaattttttgtagaagctttcgagagagatcaagagttgttgcttcttttcttacaagttaatacaaataaaatgagaataggctattaccaccatcacagggccgaacttctataacaaatatgtattcttattttgcttatttattcaaattctatttttttcaaatctctttaaaaagtcagtgttgttggccaaaagcgaggtcaatattttggtactttcattgagagcaaaagaacacgattggtgttttaattctcttcaaaacacatgaggatggttgtgaccataaggaggggtactctcacgttaaaaactgatccaattgctacgaatcctaatgtgcaaactccagagaatcaaagagatacagtgaggacgaatcccgatccaaccattccttaacctccaaggggtccccaatcaacagaatagggagtgacaacccctctgactggattcactcagagcatacaagaaactagaaccattagtactcatgccgagcagactagaccaagtgctgaaaatccatttgttagaaatcctcgagtggagattggtgatgataccaaactgcaaaatttgtgagatgctttaggcagatgaaagagcataccgacacttttcaccatgatcaacaggatacccgagtagcgttgaatttggcctttgagtagtaaaaatgccaattccaagagtagatggatcgacaaacggggatcgtgagagcccaacaaccggtaattgacaatcgctctaggtaggtgactgtgctaattagggaagcttattagttaactagacaacaatcagcgggagatactccagttatacaagatacgaacagaagggcacgcatatatatccctaagggacctcaatatgggccaaaagaacacctagccaacaacattcaacaaacccaagataatggattgtccaaacttaggctacaaaattaaattgtaggccacacggtagacgagcatgtttttctagcctattatcttgggagaatggtcagtataacttctgtcctcagacggatataccgaaccactcaactgctgataacaactaaacaataaggcatccaggtgaatcagtcttcaataggttggtacatgtacaagatttaagatatgatattaatcatagaaggggaaaggatggacacttcatcccatctaattctcatccaatctatgtagacaactacgtgcttaataatgttcttgggggtctgcaggtgacacaggtcagtccacaagcaagtcaagttgatctagtggtgcatgcccaaatagatcagcttaagagccttttacaaagcctcacgaacccaaaactcatcgctctagaacttcgccggactaggggatcacccttctcatcgtaaatcaatgcccttgacctgccgcccaaattcaaaatgcctacatggaagatgtatatggacaaagaagatgtctacaggttttttttttttttttt

SEQ ID NO: 217918 - DNA, 2097 bp, Cannabis indica
ctaaaagagagcagggcaattaggtgtgtttccacaataagaatggccaattttcagtcaaaggtgcttaatggttgatcaggaacatcgctttaagcctaagctggatatctagaagtggatttggcatctgccaattcatcctaagatttcgatgacgctttggcgaattttgaacgaggctcttcctaccatgaatagattacctttccttagggacaatgactgtttttggtgtggttcaaccttagaaagttacctacatctgttcagagattgtagctttgtaaaagctatttgtttcactggtttgtacccctgcagaattgatgcttttgatagtgattctatgttgcagtttgttgaatctattttatgttatttctttggtattaggagactctcgtgtccgatttatgttggttgtgtgactttagaagtttggtatcagaggaattcttttagaattcaggggattacaattgacttgagagcagcttgctcaagaattagtcttttggcctctgaattctctattcagatttcccctgttgctgcaatgaaaactaatgttgcaggtaataatttgttaagtagagatggagtcgatattgttctttgcgctgatgcctcttgggctgacagagttgctattttagtggtggttgtggcaaattttgtagatggttcgtggtctcacttttcgtgtaagtctctagctgcttcggctttggaggctaaaaccagagccatcctgttggctcttcctgggctctgcataactcgtgggaagaggttcatcttttctcagattctcttttagcagttagtagtttttttaagatggtgtgtcctccggattggagctttcttaatgtgtcttttgatgttttaagtttagttaaaaagtttaacactatgtttggtagaggggagaggagggaaggagaggggtggagggagaaggatagggggattggagaatcattttgtttggcaagaggcagagaagaagggagaggagagatggaaggagagggtctccctccaaacacattatttttaatccctcttaacatgagagaattcaagaaaaagataaaaaaattatacaaaatatctttttcacccttgaaaaaataatatataattgtattaaaaatgataaaatagaaattttattatttattttactctccatcctttcacatatacttctaacaccaaacaacacaaaggagaacaaatatcctctccatccctcctactccccatcatttctacactctccatccatcctactctctccttcctaccaaatatagcctaagggttgtaagttttcgcttttgaattgtagtttaaactcttttgcgaatggtttagctaaaagtgctatttagttaagaagcttgtttgtatcaagagaagggaatttttcctctgattcccatcttttgtccttagtttaataaacactttgttctttaaaaaaaaaaaaaaactaggtgtgtttccctctttggctttactttactattcttactctatgagagctccacaatatttctcaagacttcgagcgtgggttgtcctcatccatggggtgccttatgagagccccacttagcactaacaacattattgttaattagaattccatatattatctttagctttataaaattgaataaatttataagttattaataataccaatgaaaatggaaaaaaaaattgcaataaaatagaattaaatgtaaatggataaaaaaaattataaaaaaaaaatattaaattctcaatttataaactacactcagggccggccctaggcataggcgggctaggcccgtgcctagggcccacacttttcgggggcccaaaatgaaaaaataaaaaatttattaagcttttatttaagtaaaatttaagtgtattacaaacaacaaatatttatagcttagttggttgaggtggaagtcataatgttcaaggtcatgggttcaaatcccactatactcttttttttgatattttttttatgtatttttgagtagccccaaaatttaattcgtcttgggcccatatattttc

SEQ ID NO: 217919 - DNA, 2641 bp, Cannabis indica
taatttagcagcagctgtcaagttcttgtcaaatttacaagcaagatcacgaactgagagacgtttgcactgctctgagagctgagtagtttcctcttcaataacctccttcaaagatggaccattgttgtcctcctttggctcttccagaatctgattatcagctcctagcttgtactttggaaagtgattggttgcaaaactcacatcagcagatactggaagaactggccccatctcaattgcttcaacttcaggagttaccttcgtcattgggtcagattgtattttctgtacagacaaggaaatcaacaatatactttatgttcaaaagaagtaggatttgatacaatcatacagactctccatattggcatgagcttcaattatcaaattagaactatgaatgttagatttttcaaaacctcaatccgggagattaaacaacaccacgcctagatattaatgcataaaacatgtgtgcttgttcacagaccactgatcaatcacaaattctttcatacaaaacattaagcaaattttcatctaatgtgaatgaaaacattaggaataggaatagagatgaaaagtgtctcacataattggttgatgaattactaatgaatcagccaatcaggaaatggcatagtctttaaaaatgatttgttaacaaatttgtatgtaattcgtcaaatcatgcaccttttcttccctacttacaccaacaaaatcaattgagttggttggatccaacctattcttgaactaaccaaatcatacattccttttaccaaataaataaataatacaccaagcactgcacttaatatgttatagggaaattggatcttggatctgtaaaaccattattaaagtcttaagttaccaaaaaagaagagagcttttctcattacaaactatccactcccaaagttttgaaaaagaaaaatgaggaaactttactagatgatcatgtgatacccatttatagcaagtcacacacttaaagagtaaatccatcaaagaacagagtcttatacataccccaattgcagaaaagagccaactgcatgtatatatgtggtgaatgaagctagaattaggttaaccatctaaaataagcaagagaatactcttacaacacattgtgaatgtatcccagttctcaatgttgtatcaactactaaccatacgaaactaaatttcagaagaatattaacccacattttaaagtttttctatacagcaaaacaatatactaaccaagagaaaaattatgaaaagtacaaatacaccaaaaatactaaagctaatttttcaccacatctaaaggcaacaaaaaaaacgaagaaaagaaacatgcaaaaacatcaagcactcatcagtccatgtagctcagttccttaaaagcttcaagctttgatgcattgtgtaaatggtgaagaaaacccttttgaacaaaacaaaaactgaaaataatcaaatgtgaaaatcacacttacagaaaattaacagaatatctgaccacaaatacagaagcttttgttaatgctgatccataccaaagctcaagagattcatctccaaacaatcttctttttttctataagagagagttaggaagaaggaggagaagactgaagaagaacctaacaaggtattgtttggtttggtagcttagagtgctttatgaaaaggaaaaaagaaaacagaaaaagaaaaaggctatataagagttgtgaagtgtgtccatgcctgacctctctgtctcctgtccaaacaacttgaatgaatttatttttctttgttcttctctctcttatgaatgatattctatgctctgaggaaaaagtcacaaagaaataataatagtaagaaagtaaagagaaaagtgaaagcctgcatgctcacgcgccggtcccgccaccttctcttacgtaccctctcacttgggtcgggtcccactttagggtcagtcagtcatatggagcatctgatgagtttgagagccttcatcacaatcgatggcgcgtgggagatgtgacactcatgaatgtgtttggttcaaggatgtttccgtaaatgaaccacagtcattcttttttcttaaaaacaatattaaatatttgagaacttttgtggtgttttcccgttaaaacttaattcgagattttttttagtataatgcatgagaagcctttacgtaccgtaagagtatcaatttttttactctatcatttaaaatatttttacatatttatttgtatgaaaaatttacatacaaaatataaaaattcaaaaatattactcatatacttttataaagttactcatacatttttatctttgatttgattttattttatgttggaaaagttctcataataaaagagaataagaggattactattaaaatactcaaaatattagggttgtaaaaaaaattcgtaaatcgcccaaaccaaataatccgcccaaaccaaattgaaaaaaccggtaaaaattacaaaccaaaataacccgaaaaaaattacaagccgctcaatctgttaattgggcgggttgaaaataggtccaacccgcccaattaaaccgaccaacccaattttgtacctttaattttttttttaactttttagtt

SEQ ID NO: 217920 - DNA, 1973 bp, Cannabis indica
aaaaaaaaataattaatttgtttttcttgttacattggaatggtcattccttactttttaaaatagaatagccattccaccaaaatagtagaaagagcattccattggaatgctattccaatactttaaaatacaactaaacaaaggaatgaaatgagaattgtttcctttccattccattccatttcattacctccaaccaaacgcgtgtttacatttaaattttgaattattatataaaatttctaattctatatgttatttgcttttactaggaggagatggtgtaactttgctaatctcagccaatgccacagactgatgcaggagaaacttttccagtgcatctcaacatcatgacacaggtaatgggataacgatctcgatatactagagtttttggacctatgggaatattggaggtgtttgggggacaacgagcaacgaggataatatctgttgctccatccacccaatataacaaagaaattacctaacttcatcgaaaagtggagttccagaacaactactttactacttttatatcagtagatgcaacatcttttgagtcttatacatggatttaatgtacccttgtggcctccacaatttgatcaagaacaagctccaagatgaggtggtggtggtggcgacaagacagatgatgatcaggcagatggccatgatggggtaccactcatctttagtttagtttatttttagattacttttattttgagctcttcctccttatagttttataatgtattttagtgtaaagtcaaacacattagctaagttaaaagtttaaatttataataaacaacttattatgtaacttttagttataaatatttatcttaattaacattgttattagtttttatttaaattttgataataaaatatttattaacaagttaaattttattcaaaaataaaaaaaatttttcagccggcaaaatatttcaaaaaaagaaatattttgttggggcaaaatagcactgacaaaggtcagaatatatatttggaaatgttttgtcagtgcttctattgcaccaaaaaaatagaaaacttttactggcatttgaaatgcgctgacaaaacccaccaatatgccgacagatctcccttccaaaaatttttggcagcacattatgccggcattgctctatgtttgttggcattatttagcgccgacgaaagcccttttactggtgcaagcttaacagtgctgacaaaacctgcttcaccaatgcggtattgccagcaagctttgcctgtgccattatgtgctagcaaagatttcccagggcaaacagaagacttttgccaatgcaaaatgatgcctgaaaaagtgttagttcttgtagtgtcatgtaataaactcacatgagtgagatagatcccacaagaactctagttaaatacaaattaattgaatttttagttctatatggcaaacaaaatttggttgcttgaatataataaaacaacataaatagaaaataaacaagaataacaaataacaatgatttagaaaattaggaagattaatttcaattgcttctactttttacttcactaatgcaactaatcttcttctgcctattgtgataacaaattataaattaattattctacctattgtgataagagattataaattattcaattgcttattaagacataaagaagctaaattatatggcactatcctacatctctcaggtataacacacataaatataatcaacaatatataagtaataatccaaatgctacacaagctacacaaatacttttattttgtatcgaaacttatgactaataaattatagcataatcaatattcacttttcaaattttatattagaataacaaatcatacaaaagatggccaatcaattatatgtaataagcacaaataaaattagttcatgttagactatatatatagtgtatgtaatata

SEQ ID NO: 217921 - DNA, 2326 bp, Cannabis indica
aaaaaaaaaaaaaccctcttattaaagttattacatcaagtgactatataggaagaaaagagactattttatcaaacacctctaaaatgtactattgaacaactaataatgatgatatctttggtgattttgtaacttggttaggtttgtggaaccattggtatttggagaatatccattaacaatgagaacgatagtagcagagagattgcccactttcacttcaaaagataaaaacttggttaagggatctgttgattttattgggttgaactactatacctcaaaatatggtactaatgcaaaacccatggaaccaacccactacctaggtgacttttcagtaaagacttcaggtacttaacataaataaatcaacaccatttcaatttatttatttaatctcttcttcttaattaagagaaaattcttgtttcaaacttgcagttgagaaaaatggaattccaattggtccaaaggtaatatttatatatatgtctctatttattcatcaataatatcataatttatttattgatttacttactaattaaattctcattttactatgtccttgcaggctacaggaactaacaatatttatagttaccctcaagggttgcagaaacttttggagttcatgagtcaaaagtatcaaaatatcactatttacatcactgaaaatggttagattggttgctcattttgtttccaatattagtttaaacttaatgcaaaatggtaactaatttatataattaaacccctttgttttctatcaaggaattcctgaggcaagtgttccagatcgccatttggaggattatgtcaatgatgactatcgaattatgttcattcttcaacatctatactatgtcaaccaagctatcaagtaagttaatatcagtatagacttattttcctttaagagattgacaaaataggtttttcagttattttacactatgatttattaaaatttgttgtcacataagtatgttaaatttgtgcctacatatattattactctttaagacacattccgccccttttgcagaaattgaaagaatattttagaaagatattaaaataatgtctatgttcattgggtcgactttaattaagtctgcgcttaggacctatgactcaaaaattaaagttttccttttaaattacacatatatatatatattatatttttaatttttaaaaatatcacatatgtttaaggagtgtaaaattccataaatctcaggactgacggagcttgtatgttcatctattaaaatgattttttaattaataatttttttatcttttcaatcggatatcaagtgtgtcataggaacatagggacattaaaattaaaaaaaaaatgtttatattcttacaaactccctataaatattgtaaacctatttcaatgtttgatattttatatgtaggaatggagtcaatgtgaaaggctacttctactggtctttatttgatagctttgaaggagaacatgggtataacacaagatttgggttattttttattgattacaacaataactacaaacgcattcccaaaaagtctgctaaatggttacattgtttcctcaaacacaacataacccaaccttcaacactcttagaagaatcttccatgtttggtagcaacaccacccagaagaacaatgaatcccctaatggtacccttacaacggctgctgtttccattatcggtaccttcatcggcttcttcgccttgtttgtgctccctactttttgtgagacggaagaacaactaatgatgaaccaatcttcatttaactaatagggaatatttatttaacaatagccatagtctcattctagctagctagaggcttattcagtgaatgtacattacaaagagagttagaaattttgtggttgttgatattgccatccttaaacaacttttcattttgcccaaagaaaataaataaaaatataagttattacttttttattttgaagcaaagtaatgaatttcaaagacttaaaaggggacaacaaactatctaacaaggtagaatcaaattgcatactcaatattcaaagttggacaaaaaatcaaaagataaaaacaaaaaagcatttgtttgttgtggtgataatggagtaggtaccatcatggtaatagataagccccaaaaataataatgttgcaaatatttaggtgaagctcattttcataattactatcatagtagcatttgaagaaatatgccaaaaaactaaaatacttttatgcacaagtgaagtgattataaagtattgttgctccagaattcgcc

SEQ ID NO: 217922 - DNA, 1083 bp, Cannabis indica
gataaccacttaggtctttactatctaatacctgccaaaacaacatttaaacttgtaatcaaacacagactcaaatcacacacttgatgtgtgtgtgtgtgtgtgtgtgtgtgtgtgtgcagagagacaaaaagagatgtaatgtattgcatacttttatgattctttgactggtcaatgcactgagtgaaattctcactgttgggtttagaccagatacctgagtactgaagcaggagttaatttttcaaaagaagaacgaaatatgtgataaccaacccaatcctccgtaaagccaaaaaagagaataggtagcactgggacaataatgtagtttagaacttacttcatctttgtctttctggctttccacaacaccagttgataccatcattagagttcgctcaacatcagctcctttttctctatatacgtaatctttagagttttggtccatcatagatacatgagttgactcagatgaatcctaaggaagtggatagactaaattatacaaaagtatgaaaacttatataaataattaaaaaaaaaagaaaaaacactgataagacgataatctattcaaaataacaacttaagagtcacttgtagatgctaccataaccaataaacaactacactctacactcactgagagaaaatataaacaatgctgtgtattctctacccaattaaatatgggaatagaaatattctggaatcaagtaactgaggaagtaaaacttagtccagagttgttatataagatccctttcccaagaaaattcctcaacaactgaagagaatatattctttaatggttgaaacttgaaataagaaaacatgaactaaagaattttaatatttattacaaagtcaattatcgtaattcgctttatctagtgtctttcaaaattctattattaacgttaatcggtccaaaactttagacaattagaatccaaaaggtaaccatttttagaaaggagttcttgtttaatgacatgtgctaatgtaaatatactgaaccaacctgatcgaaaccagctctatcaatggcagatccaaaccacccagtagcac

SEQ ID NO: 217923 - DNA, 4013 bp, Cannabis indica
tttgttgtacattaatgaaaaaaatcccttaaaattatttcttcatataactagattttgagatgtgaattttaacatattactgaaccttaaaaaacctttgctatttcattacaatttccataaattttcactttcctcttctctctcttttattattattaatactaagtaattaatttgcacttcgcacaatttatttacaataattataattctttagattgttaatttttgtacctaaattattgatatcatataaaattagaaaaattgcactttgcatgtaagatgaaaatttaatattttattgataaagatagactcacaggtaagtacctgagcacactcattaccactagaaatcaacttaagtgccatctttaatttaatgagacacactaaaagacataagataggctcgctactacttcaggaggtcagcctagagaatatttttttattggttttggcaactgtagtagttccacttcttggaatttcttggatgcttgatgtccatgggtcgagggatgaaggtgtctcataggtatatcaatcagtgagttccagggcatgtaacctaacagaccctgtagagttttgatgagttctttgatgggttctctgatgagtcctcacccatgtaatcttttaagtctctgttaccttcttccacacaaatatacttttctactctttcatagatgtcatcgagactgttcaacttgcatttcagcatgtttccccatagtttgtttctgggcgtacccttacggctatagaaatcttgagttcatcttttgatgtcttctctatttttgcaacttcagtgttgaagcatcgaatgtagcttctcaaactttcttgttcgccttgcttcatgctggtgatgtctgtgatgggcatgatgcaatcacatgcatcctgatgttattggaagaactcttctaagaattgcttttaggatgtgatcattcccttttctagctgtttaaacacttgtacgtaactccttttaacgtgatcgtgaaacattggcatatggccttgttagagacttttttcatctttattagttcactaaaagcaccgagatggtacttcgggttagtagtaccatcatatggtgtcatttgtgattctttgaagttgggtgaaattggttccacatgaatatcccttaataaaggggattcttcatcaactccatcataatcattcaagcatcctttcgagacgattgttattctttggcacaggtataacatttttcgcttttagctctttcatcttttccctcattatcctttggaggttagtgggtgaaactttctcctctttgttgtctgcatgggagatgcgtgaggtatctctctcgttccacccatctttattttctttgggggtaccaccttacgtttgcttttctcttggaaggagaccataggtgaggtgtcacctagcaggaaactttttagacaaagtttcttctcaagtttgtgaggtgttccctggcctcagtgtgaccttctgagagagggttaactcgggttgtcttcattgacctgtgggacgtatgtctagcgactgtcttttctacgactatcttgagggagatcattagtagacaacatggagttccctctattaacatgtgtaatggattctcttcaatcctatagtttgctttcgcacttggagagtgatacttgggttttgcccccgagtatgtcactcaacaccttttgcataccagccacctggtctccaacctcttattcttccaacagaggctgtttatctccccttcatagaaatgaatttgggagcttgacctcaccaagtacattctcttatctcttttgagactattgattgagaggcccaagccttgcagagtgggtggcgacgtgcatcgtattggtaatggtcgtctagatggctggatagcttcattgatggggctagccgtagatgacgtcatggttccatgtggtgtcggaggcctcctcttggcattcatttggctttctcttccggtggtgggagaaacttgatatctcatggtttggtctttcatgctttgtctatttctacctagatgaggccagaaggctagaggcggggggtctcctttggaagtgaccaactggttgtcgtccacggggatctcaatgtcatgtagacgtcacaatggtcttggcatcttcaaatgtattgaaataacaaggaatcaacatagctttaaactttatcgttcccgtaattggcgctaaactgttgacgatgagaactcgtcaaccaagctatggtcgtaaaatcaaaggtttttgacaagattagactaaagtatttatgaactcaagaacatgaaataactttcagagaagtaatgtagaagatgaaataaaatttttgtattgctctctaagtgtcttgcttacaatgattttccaaccccttctcaaataaaataaaataaaaaagatatttataagctttaatggcctgaaatatactaatggtatccaatggacatgatagcgttctaattctgcaagttacaggtgtaggaggtagttttgtgccttgtaccgttgtctggtgtcaggtggtcccaagggcagtagtagtggctgtagtgtactccttgtcgggacgttagggcttgcaggtgtggcacctccgctacttttgctctagctgtgcccagacttcacaggtggagtggtcatacctacatgcactatccttttggctctttgtctaaaaatcacaattagtcatctagttgagagacgttatgatttgttgcaataattaatcgtaaggcatgtacatcgagtggtctcgtggcatgcatgtcaagtggccatcatgagcatgcatgatgagtgacccttgagagtatacatgacgagtggctcgtgtagcatgcatgtcgagtgacttatgagccatgcatgtttagtggctgtcatgagcatgcatgcctagatgcttgcatgctcactaaaacaaataagggtttcaggcgcgacactatcaggaacaataaaattttttcctgatagtgatagtatcaggcgcgacttatcaaagtcgttccggataaaatttattttattttgaaaataattaaatgattatcaagaatgacttatacctttctgttgtaaagacaatacttgatctttgttgggagctagctcagctccaagacacatacattttgcaaggtatttttgctagctttctctttacaaaagtgtcatttatatgcagatgatgtcacggtcaccgcatatgatacatataatgttgcaagtatcttagacatcacagatgatgccgatataatagatgccacagatgatgtcaatgtcacatatgccacaaatgatgttgatgccataaatgcaacaaccaccacagatgccaagagtacaacctacaccttcgcaacagactcgagggaatgagaatggtggtgattataatgagtccacatcttagatgtttaatttattacttttgttagtatgaacatttatgaactcttttagtatcaactcttttaaatattaaaatattttttagtatatgaaaacaatgtatgaactcttttagtattatacataatatttaatttttaaagatattgtttaatagaataaatgtgattttcaatcacgagttatcaggaataaaacatcaagaatgactattcgcgccaaataatcttctggaacgaattcagagattttctggaacaaaaaaagccgctcctgatgatagtttttgttgtagtggttgttgcgtttccttccgtattttgagcataactccctcaatattaatctgaattgggtgatttaagatgtttcaaaaaattaagaaagagatctaaaaatccttgtgctttactggatgatttcttgctaccaagcttgtcgagatacctgccttcatgcaatcacactatatgaaatatcatttttaccagcaca

SEQ ID NO: 217924 - DNA, 1220 bp, Cannabis indica
aagattgtgttggctagaaagcacgttttgcaaatatcagatgcatatcaactttgttagagtaattactccgatccatatttaactcaattgcaataagaattattgataaaaatgtccataatcttttctgttactgtagactctaaacttgagactagactgggtttcaatccttctaaccccggcaaacatagaagattctataatcacttatccagcaaaattttgaactccaaaacagcaaagatccatttgaaggatctggattccgatctagtattaccaactatctacacatgaaattaatatacacagatcaaaatctagcaaaactcaactgaaagataattaacaatgaacaatgcacaaattaaaaaacatcaaaaacacaataatcaaacctgcttcttctggcgagccaaattccaaatcctccagcacatattctccaatctagtattcctttcctggggactccttgtagccgaagcctattaaaagaatcaaaatttgaaaaaagagactccgaattcggaaaacattatcgatcaaaaaaaaaaaaaagaaactaattactttaacccaagaacgatggagatcggtctcatcgaatccagtgatgacttcctcaacaaagtagcgagtaggactgaagtgacctctctctctgaggagcaacgatgatttcacgtcgtctaatcctggacctacgtcaagaatcgcctccaggtagctgttaatccaatcatttccagccatattttgttcccctctgaaacttcaagctctggtctacactctacgtgtgtatcagcaacctctctttctctctccttctttctcttcagtctcccttttcagagcaagcttcagatagagatggagagagaaagagaggtggaggtggtttgtatggtattttatattgatacgctgagaattctcgagttttgagaagatttaagagagagaaacaaagagattgtgacagaagagagtagaaagagattatatatataatgtcatagtatctactgatattttacagctttgcctactagttgtctctattattcttttatgtgttaatatagtgcaattaagtattgggctattattcttttatttgttttatttgttaatacagtgcaattaattattgaatttcatatagttttatataatagtttttgaagagtatcgttagctaatcgcaa

SEQ ID NO: 217925 - DNA, 8823 bp, Cannabis indica
aaaaaaaacaaaaattagaagaggaagaaactaccttcgttttaagttcgttgatcacatctccaacagtgctctgtttgggtaatctgatgttgtgaataacaacctagagacaatttagacaagtattaaggacctggaaacatgtatacaatatcatattaaaagattgattcatacggacctcatcttttgttgcgtgatgaaaagcaactttcagatttttcaaaccttgtagttctggcagggggatgtccaaaacttcatagtacaaaatatctgaggtctgtcaaaatgatcaagaaataatattacaaatatatactattaggagcaaaaaattaactaagaaagagttcaatcaaagatctgactacttgattgtaatggactagcatgtctgacaaatgttctactcctctgtattttataggctggggcttaggttgctgagaataacagttatgagctgttagcctgattttagatggatcatccaaacctatttggcgagccactctctccaccacatcatcataactgtgtatctttgacctagaaaataaggggtagattcatatagcatcaccaaaatctagatgattatacaataacaaaatggctttacaaaagtcacttacagttctaaacagaaatcatcctcctttggtctctccaatgctcgaaagtgaacaatctacaaaatatcaaattatataacagcaaactctcatgtaaaaggacatacagcaccatgctcagtcttttagttgattgttcaaggcaaaaattgtatatacaagtgcaagaactaattcaactcaacattatctagagataagtcataaaaacaaacactaatattatgtcgatattggtagatcatatatctgaattttttattcaaaaaatgtttgttttaaaatttatataataagtaaatatcttttaaaatcatgagcaacattggtgttgtaatttgtatgtatagatcaagttttatctacttattctgctttccattctttcatagtaccaaaaaaaaactctatttcactttctactattgcatatctaataccctcgtatcaatattgggtacactaagattgtattgctaataagtttgaactttttatgagtttagttaggtgttgatgctttcttactacgtatgaatgtcaaatattatcatatttaagtgataatataatcatgaaaataatatattatatatagtatatactaatgttttgattttacatttatgataataaaatatatagtatataagcatgctgctcaaatatacctctacctaagcttaagattaattataatatgcatcagcagcaagttagcagacctttttgattttttttattgtattttgttgaattataatttctgaaacatggcatttttatattatgattacgagattattatatactgcagttatctaccaaaaaaaataaataaatttgatctgttaatatattatatattcatgtaattattgaatattattgcattactaatttttatcaagaatttttataattttagacaatttttgtgatctccgtaaatttctgatattttcattcttgataagaagataaatggtcagcatagataaggagtggaataacttagacagtaattattttcttactaaaatagtacaaaaaaagggtcattcattctaatcaaaacaaaatttcgagtacttttttttcttatttaactctagaggacccttaattttgtaagcctgactaaaaccatccacattggttagtacctgtcgattgtgtacatattccaaaaatgaaggcacatctgggtatttgctttctacttcagtttcaggtagaggagatttctgaaagcaaataatgtccccatcttcgatctggtaataaaattggacaaaaatggtaaagtactacatcaaatcaaactacttgcggggcatagataggtcaaaggataacatgagtacctgactcaaccgaaaagaggtcctcttatcaaggtgttcacacatgacacaaggttcaaactttatctcctgaaaaatagatcacacattttacattgtagaattctaaagaatgaaggtgactacgtcagccaaataatagatagatgacaggacaggaactctaaaatgacaaacaaacctcataaagctctatttcttcatcagaagcaaatccagccatttgattaagttttcctaaaatttccattggcttaccagagcttttcacaaaaagcctcccaacatatctgcaacacaaaagaaattattgagtcacaaacaatgagactaaatcagagaatatataataggacaggacaaggctctaagtaccgtagctcctttttctcaggatcataaagcttgaaaaagagtagtatatcctccttagttttgtcaggtggaggaataggacgtaaatcctgaagcattatagaaattttatcagtaactatctagctgctatcactaacatagtaattgccaaaactatcatgacatggaagactcaaaaacccgcaagcaaaaaaaacatattaccggtccgagctcaacttccaaaaacaatttgagctctgcattatgtgtcttatttgagacctctctcaactgtccaacctacaaaaaggcatacagttgtggtcagctacattagcaaacttttaaccaatgcattacaagtacttgtaagcattttttaaaaattaaaggagataacgaattactgattgtgtttcctcctgaggtgtcaaaggtctattggggcggtacgtgtgattttgccgttttgcccaaatccagaatcgttgaaattgcacaggtattccaaactcttttgcaacctcttcctataaaccacaacaaacgcctggtcaaaaatatattatttcaacccagcaaaaagggggttcagagaaaatcaatatgcaaattaggaatataaatccacattactcacaattatctgtaaattttaatgaagtatataaatccacattactcacaattatctgtaaattttaatgaagtatatctgtaaaagctatatataacttaacaagaatagcacaaggaaaggggaaaaaaactgagacaaatatgtggaaagaatagcttagtttcaaggattaaatgacaaaacgaagatgaaagaatgaagaaaatatgagtataataataacataatggccaaagccaaaacattcaaataagaagtttgaatttgatgcatctaaaattcataaatacatcctacataccacaggaccaaaaaaaaaaagttggaaaagttatcagtattattcatttgaatttagcaaaatagttattcagggaatataataaatatcaataaaaactatgatacgaattttgaaaccagaactaactgtcaacagtaccttgaattggttaaaaggtgtttgtttctgaatacggaaactacgaactttatcatgatctacaaggtcaaaatatatatcttttccaatctgttcagaaaggtcctcatctcgtgcgacctaaatacgtcaatgaattatcacaaccattaatatcccagaatagaaactactaattcacgagacaagaagccacactaaaggtcaagacaaaatcaatacctttattatagtaaaaaggtgggcttgtgctttatatcttttcttatcctccttctcttcttgttctttcttcaatctcacctgaaattaaccacaagttagactacataacatgcttgggatattaagtaacctagaattgatacaaacaaaacaaactataattacatacacgcacttacccttaaatgttcagcaatgtccttctcgtcaacattacaaattattttgtccttgtcactttcccttatatacacaagcatgtatgcattagagtattttgtaaacttgaagggagtattattaaaaccaggattggtttgtggcaactgtgaaacaaaacgaaaggcatcaagattaattcacaaataattataacattgaaggatataagaataaactaatgatactataaaaatctaaaaacaatttatgatttacctcttcctcgccaccatactgctcttctagagcccttttcatatcttcttttgtcacgcgttcatcatcaaatttgtacctgaactcccaaaaaatacaaccagttccatggactgtgtaaagaccttgctcacaactgagtgcagtttcatacacatgtataactgcataaatatacttcaaccaaaattgcataccactgatctgtgagggttggccgaataaaagcatagtagtgtccaccatgcaccccaccgctatgaaccaaaacactgtcacaaaagaaatatctagtcatatgaggagatgctaagtagatacagtaaagctccggatttacacaaaaaatctatcacaaaaatgaaacatggtccctgaatcaactgcagacaaaagaaatcctcagcatgcaattcacatatatacctatgaagtgtataaaggttgcggacacttctatcagcatcaggtgatagatattttccattttccctgtcaagatcaagttgaagaggaaactcatagcggtcattgatctgcaaggggaaaaaaattacagttagtacaagacggatgcactgaaaaaaagtcaaaactcaaaactcaaaagcaaaggaacaaaagaaatcctctaatttaaaaaaggaaaagatgtttacagaactgtaataattggtaacatgcacataaaacagctgctatcaacctgatgataaaatagaacaagtatccaaaaccaaccttgaccatagtgtcccgcataaaatcatattcaaaccgctttagttgaagttgaaggacaggtgggaagtcaataaataagacacccttcttagcatcctgatattaaaaaacaattaaaaccagatacataaaataataaatgaatctaaaaaaaaaaaccctactttatatggtaaagagcattgtactttgaggtttgacattttagttttctttctgtaaaatagaatatgggaactaacctgcaaaccatgttcttcagcatggtatttattatcgccctcaagacgttcaacttccacatatttgtcaaaagaggcataaacatcccgacatcctttcacatcaagctgaagatctgtcaagtaaaaagtcaaattttgaatcatgctctgatatcaataatagggtttgaactcttataactgaacactttagccagaaaagaattaccataaaatgattccttccttgtagatttgtagtctacatttatgcactcgatgtaattcatgtgatgaccctcaaataattgttgtattgtaccctccacaacagttccctgaaccagcaacggcataattacaatgaaaacaatcaagaaatatactaatgcccataacatcaaaccttttttaccttcattttgtcttcaagcttttcacaaagtaccctgttgagttcttgcacatcatgttgcataaaagaatcatatgtatcccatccaaaagacttggttaattcttttgtggcaacactgctgtcattgtattgaagcttatagaataaactctgtagtgcaagtgggatgcttcccgatggcatatcattctcagtagttggcatatggtacacagcctaatgaatacagcccaacttagaacattttttagacataagtaaaacagtagaaacaatcaaaatttcctctaagatgaaaatgaaaacacctgctgacctttctgaaataaggaatatggtacaacgtctggagcagagaattcatgtaacaagttgctccctgattcttgagcccaacgtaaccagtttcctttttagaatcataagaccagtaatcaagaaccttgcggacagctacctcggcttcaactaaacatgtgtcattcataagatatcctctactagggtcataaagatcactcagaggcatgaacgatgtgaagccccagtcactttcccttgtgttaaactggtgctgcgtgtctacaagatccagtaataggtagaaactgcaagtaagttcacttattgtctgaaaagacaattggcaagaaaaccaattgctctatcacatcatgatttttgtaatatatatgtatatacatatataattatatatataacccaatcaagtgagaattattgtaaataaggaatatcagtcagcgttcgtagtagaaccaggagaagtaaattaatacaggctggaagactagatcccttaaggtaatggatagcatctactctatgatattgcaacataattatactgtgaatttacacctttaagtagtacaaaagaatttgaggaggagatacattttcttattgatagaatgatggagatcccaaacatcacgtatgactaaacgaacaaatgatcttgacaatattaggaatcaaccaataaatcaattttatttaagataaaaaactgatcaagtatactttaaagttgagtgggagtaagagaatagggaaagaaaagaaaacaactaccattacaagttttttaacataataataagtattataaacaagattatgacagtaaaacattgaaaaaaacaagaagacaatccaagacatacaaacaaattatccactaaagaactaaattagtaaacgactaaataacaacaaaagagaataccctttcttattgagtacttgttatgcatctggttaaccacggccaggctgaactgagcatatctactccatccataaggcaatgttgaagaatcggccacatccaaatacatggatagatagtctacattattccccttgggaaaaattagtattcgcctgagtaaaccaaccaaccaaccagtaaggtcaatatccgatcatcaccaggaaaaataacacacacacaacacaacatgacgctaagtatatgaccataattaccatttataaccccccacgacgaaaacgtcagaatagtgcttttttacattcaaccttgtaaagttttcaattgtccaagtaaatttaattgatggaggatcctctactggttgattctcaacagtttgattctccaccgtattagcgggatccacctgagctgctgataccatcaaattaaaaacaataaggtttggagaaatcaacaaaatcaaaaccctaacacccagcgatcaaaacactcaatcccagatcaatttggcaacattgcaagcttcaaaacaagcttcgttcacaaattcatcgaatttaaatgactaaaatagaaataaataattaactaaaaccttccattggctgaggtccctcgaccaaatccgaatgcggcacaagcatctcctcgtcttcttgctgctgaaagaaatacgcaaatcagaaactgcgatcgagtaaaacacaaccctatcctactaaatcaaaaccctagaaatcaacagtctaaaaaagcctgaattttccgaaattttcagccaattcgaaaaccaagcggacaaaagccctcaagcgatcatgaatcaccaaaagaacgaacaaaacaaagctcaaaattcaaagagagaaacaaaagacaacaaaatgaaacgagcgttgaaacgaaatcaacaatgggaaagaactgagttttcggtatgcacatacatccaacggcggaggagtcatcatagtcattgatgaagaaaactagggttcgtcacgatcgacgaatcgatgaatatagagatagaaaaagaaaatcagtgagaaaaatcgcgagaaaataaagccaaacaggggacttgggaagaaaattaaaaaaggaggtaaaacactcccgaaggaacttggctcccaaaaaaagctctgtgggggagtttttacttcaggggtagggagggacggggaggaggggtattttcgggatttcattattaacaaggggtaatatcggtaccacagtggctgggctgtggtaaatttctctccgatgcgatatcgtgggtaagaaagagccaatgaaacaattccacgtaggggaaagagagtagacttgaatatacaattcttacgtggcaggcttgggaggtcacgtgcgcttgctcaggtccaagatcaacgtctctcatgctatgcagttctcttcttttttatttattatttataataatcttttcttaaaattaattaaaattgtgtacgactttgtgtattttactttactaattgtattttatttgttcaagataattaaatccacgtcttttgggtgtacggctttatgtatttcaccttgaagataatctatctagtcggtgctaagagtgaactaataaacattatgggccgggagttggaaattgggtttgttgctggacccagtacacttcatggcccgtgcagcccagttataaatgaaattgaggaaattagactgcatattttattttttttagaaatttgactctataccctttttatattgtctttttttatttttatcctcttttttaaagtttatcatttttgcctcttttttaaacattgtatcaattttgctcctttcactttaagatactttccatgtgactttcttatgtcagggtattttaggtacaatacatataaaaagaggtatgtttcaattaaatataaaattagaggtaaatttgattaattgattaataaaagtggtatttttcaacttacccctatttttttaacttatgtttttaatttttattctcttttttaaaaggaaaatttacatggtat

SEQ ID NO: 217926 - DNA, 1329 bp, Cannabis indica
acaaactttacgggaaacagacccagaaaaaatcatgtaatatgtccaatcccggaccccaggtatgatgattcagcaatggtgagtgccatcaaataaaaatcaaactttagttaaactaaaaggggtttaaaagacgtttactgttttttaatttcaggaacaaataaaattgtccaattgaaaaaataatcaaatttaagtatattcattaattattagaaaactacttgtacctgagaagctggagtctcagcaaacttggaagcggccaactttgcaggcgatccaccaaataattgggaacattctgtgtatgcagatcctatgccaatcccagcaccaaaagctacagatgcccaacgagatacaggactccctataggacaacacaagacagattaattttaagaatactaatatgaaattttaacagcataaactagcttgcatgcagattccaggtctgcattatactccggacacaaaaatactaatatatctcatgatactcccgatacaagattccaggtctcacagatgaacattgaaaacagctagatctacatcagtttactaatgattacaggccttccaacttcaatcattgagaagccaagtatgggataaaacaaaatcctgatctcagcaagaatcaagtacctaagtgaccaatgcaaacctaaccatttaagtctatactgaaataagagcttactttcagatttaggacagagagaatgaaaagtaagaaattctcattaacttgtgaaagagtttacagaggtgttaatatagagcttagaatacaaggtaacagtgttaccggtcataacaacctcaactaactcctaacaaacactacaccttacgactaattaatcttaatactcccccttaaaggtggagtgtaagtttgttaactgaataagccagatcaggtctggttatggtttattgtagcttgccaataatttttctgtacaactttggatctgctagactctcctctccatcatgacttagtttcaagtttacttcaattagagtatttgcaggcttgcatcccaattgtccgagatcatctaacaattggagtgcatagtgtatctgtgagatgattccttgacttgacctagcaattttaagaccaagaaaatattccagctcaccaaggtttttcaacttgaatctgttattcaatgtaacttttagactttccaaagctgagatgtcagctaagatgacatcatccacatagagaagaaggattagaatacttgatccactctgtttaataaagagagagtgatccatacgcaactctat

SEQ ID NO: 217927 - DNA, 6682 bp, Cannabis indica
ttttttttttttaaaaagaaaagtggtataaaggaagaatgtaattggaccttgtttaagtaggcccaatgatttggagctcaactgggcccaagaccgagtcgagctggagcatcagggagggactgaatgtctcacgagtaaaccagaaaattaatttccatttttttttaataattccatgaaaaatccttaggacagcgacaccgtacgacgacccacagaatcggctccgtgcaacccctcacaaaccctaattcccaatttccaattgttgatcttccccaattttccttgcgtgaaatgctaagatagtgtatgcgcaattctctgctactgttttccccaatttactcgttaaatttttttcttgctgggacagctctggtgttgccattccaagtatcggattctgttgtttgatcagattgagatttgattttaattggtaatttttctgtgattttgatttttttataggttctcttggtttaaactccctcttgctttgatcagttttgcccctattttccacgtataattttatagatttatttatataataatgtataatatatttggctgcctttgaactttagggaatgttaaagcttagttttttcagtaattgggttttcattatttggtcgtgcaaaatgggaaaattttttttagcttaatggggaactagtgcctagtgccgcaacttgagtgaattatagaattttttttattcccagtatttttatattacaaggaagttattataattattgcttctcttatttatttatttatttttcctaatttactgtggaatattgtaggcgtttctttggtgaatctaatattgtacctgcatgatgcaacagggttggtgtttaggatgatttgaggggtttctaaaggtggtcgaataatgggtagcagcgagatggataaaccagctaaagatagagagaaggattcaaagaccccgcctcctcctagtacacaggtctacttgtgtgtttctcgttgagtctatgttcataagttttgaggtacttttgttttgtttttgctaaaactctttctttcttattttctttttcctctttatttttatgtgtcattcaggagcagtcttcgactacaagtactggtgcagttaatcctgattggtcggggtttcaggttttgtagtgatattctgaagtttttctcttttatattctttcatttttctccttagtcgtgcttatgctgcttattattgtaaacaggcatattctccaatgcctccacatgggttcttggcatcaagtccccaacctcacccatatatgtggggtgtccaggtaaataacttttttttttttcgttcctttcaactaattgttaatacttttgtattgtgctgattgttgattggttatttaatttttgttttaaagtcacgaaagaaaaaaaaaagtattaatttgccttccatacctctgtgtttgtgcctgtttagaacaatggcctatagatttgtgtgatagctgtttctagtgacagctttctaaacagaattaagtgcatcaactgttgctaattcttaaagatttatttttaatatgtaattgcagcatattatgcctccatatggtacctctccacatccatacgttgcaatgtatcctcatggtgggttatatgctcatccatctatgcctccggtaagtatgttgttctttattgcctggttgtgcttgtttctttgtgttgtcattttctagatgtcagtgaccttttctaccattctgaaacaggggtcttatccttttagcccttttgctatccctcctccgaatggcattgctgctgaggcttctgtgagtgcaagtactgtcttatgatttgtttcctttgcaatttgtaggcacttagtgaccttgcttataaaatcccatgtagggtaatactcctggcagcatagaagcagatggtaggccatctgaagtgaaggaaaagttgcctattaaaagatcgaaaggaagcttgggcagtttaaatatgattacagggaaaaatagtgagcttggtaaaacttcagggggctccgctaatggaggttactccaaaaggtatgctgaatatgtagactgctttggcagtttataattggagctatagcctatagctgtgcagactgttataaggattggtattcatgtattttttttgcacaatccatctttgcttatgaagacaatagctaaaattgcttattttccgtcatacttttgtaggttagaaaattgtgtagcttctttcttgttttgaaaatgtaggcaaatatgtttgtgttaattcattaagaaatgttctttgttttactatcaaaacaaaaaggaaatgaagaatgaatgaaggagtaagtaacaaatagatatatcatatacttgtgaggcttttcaataaacttgaatggggtaggtcaatctaagacaagtggcctttgtctcttcttctttttcttcttcaaaaaaaaaaaaaaaagaaaaagaaaaagaaagatatatcatatacagaatacttcatatattatcttaaataagtacaatatacattgtgtataggttgatttgatacaaagaaactcttaatacattaatcgtgagcataatgaaatttggaagaaaaagagggactaaaggattttgtctcatggcttaaccccaaggggcggtgtagtggtaaggaggagtgttggaaagtgttggtaggcatttgttccaaggtttgaatccccacagactcaaaagccttgggaccactaggaggtcttctctgtcgaactgccagggccaaaagttaaagaattcaaaataataaaaaaaaggcctcatggcttgaattgtgcttatcactgtttcttatcctataattgtgcacaaagacacctcgttgtttaacgtaaatgccagtgtatttagtagatcttatttcatgcactgattttgttcatgtgaataataaatgaaagtttttgttcctgatttatttttcctttctgatattattattagttcaagacagttagcaattgaaaggtcatggcttcttgttaattgatatgactatctgaaataattacatcgaaaatattgtcgaaaatatgaacaagatggctttttttttttgcaaagaaaaattatttttggacttaatacattttggctaaatgttaaggctttagactcacttcttgtgtgatcatgtttatctggttaattgtttactgcctgggtaaacggttgtatataagtatagggggtcttttattttcccaaatttaagttgattttcattgctgaggctactttagctaatacctgaaagaaccttgaaatgcagtgctgagagtgctagtgaaggctcaagtgaggggagtgatgtaaactcacaggatgtaagtactatttctactatggttgattgttttctagctccttatgtactttcttgcttgtctagtattgtcttgatgctgtttctatatatatataagttcccacctttgaagtgtaatttgctttcttggaagtgttgttgtctactattttggtttttttgttttgtttgtcagttgttattcttgcagtgtggtttcctcttctaatttaatatcagttatttatgattccaaagctcgataattgtcagtacacttctaatttcttttttttttggttatttatttacttacttttatggaagaaaaatgctacgcttttgtctccttcctctcttgtatagtttatttttttaattctcccttgcttccctttttccttgttgggttttgagtaattatgtgttgttgaatactaattaccttacctgtagacacatttgcacttctatttaaagcattgaggtaaatgagttagtgagagacatgttttctatgaattagtttgttgcaaatgttgctcatttgccttatacttctattttagcaattataataaattgtaacttatccataaattacaatggaaaaaccctataggttttgctatttagtaaatgtaggcttcttctttttttttttttaccccttttttggtttggattaatgtgtgaagtattttctgataattaatagaaaactaacgggttatcttctaccctcttttgttggttttgtgaaatatttttaaaataatgaagctttactattcatgaccttctatcttcattcacttttataggactcacaactcaagtcagggggtagacaagattctttagaaggtttgattgtattatcccctttgactataccttgaatccgcgtagatagtgagatagatgttaaattatatggccttgttgcaggtgatgcatctcagaatggaaattctatgcacggtcctcagaatggaggaccaaacacacctcattcaatggttaatcaaacaatgaacattatgccaataacagctgctggtggtggtgctcctggtgctgttcctggtcctgcaacaaacttaaatataggaatggactattggggggctccagctgcatctgccattcctgcattacgtgggaaggttccttctactccagttgcaggaggaattgtcactgctggctctcgtgatagtgttcagtctcagctttggttacaggttaattggcactttaagctgttgcattttcttatctgtgtgaattaaaacatcattgttcccataaatactcctatttaagctggtaaattgaaaactttaggatctaaaggagcataacaaatgtactaagaggcacaaatctttgaatagaaacatataactagcattaattgaaggtcaagttttggtttagacatgcacgtgcacatgcacacacaaatgaacattgaacaattattggggcactctggatattaaccagattaattggttcagttttttttttggtcaaaattcttgtattattttggttcagtgcttcttctcattcagttcttcttattgtcttgcacagttacactttattagtttgctgcagaatcgttgttcctttagtttccttgtattactgtattgtgattttcttatgcaatgggcagagagatgcatttgtacttccaccctctgatttcatcatctgagatgttgcttcataacattagttgaaagctgtgtgattttgcttccttataatggccatccttagtcatcttagattcttaggtggtgagcaactaaatcatgctctttttcttttcctgttgtttttgtcctatctctctcaaattgtctcttttgtttctcactgtcactccagttacaactgatatctagctgtaattagggttttattttagtgttatcataatatttctctctactggactctgcatatgagcattcaaccacaactaactgataactatacaaataagtatatgtgtttcattactgttcatgacctataaagttaagcaatagtttatacaaatgccttaacttatctgtgatgttagcaattaggaactgatgatttgtttatgactctgttaatttgcaactttgctataatttttaatatatcattctgacattttcattttagtcttcaaattcctttggaatccgctagtgtttcttctgttcaggatttttgctgtatgttatatttttttcttctatctgaaagttgcaccaattgtttatctggatttaggatgaaagagagcttaaaaggcagaaaaggaaacagtcaaatagagaatctgctcgtcgctctagattgcgtaaacaggtaactgttatgtctaattcttttcatttgttttgcaactcttagcctacatatgaactcacgggttgtactcatgcatttgcataaaggctgaatgtgatgagctggctcagcgagcagatgcattaaaagaagaaaatgctaatcttagatcagaggttaaccgaatcaggagtgagtacgaccagcttctttcagagaatacttctctcaaggtgatgctctaattttcatttgatggataataaagtaaatttaaatttaaaaattaatgaagaataaggagaacaagcggtttccaaaaccacaaatacaaaaatgaatccaattgcagaggtctttttcaactcagacaggaattccttacaattttgcaaaaaattaaaaatgtctaaatgtagtagactgaagagaaatccttgccctatcttctagtcctttttccagccaaataatcgaataagtggtcagtagactaatattgtgctattccagagtaagaaaagttagaaactcaactttcaacgacttattcaacaaactgaacaaatcaccacaatttctaaggatacactatttaatttcacaagtaaagatttatgataatcctttgcttggttagccttcgataatcaaccaatgcacccacttgtacagcctagagcatgaatgagttcgttcttcgctgaaaaatattataaactgactgatcttgtttgcaatgtgaattggccaaagcatatggatcaaaatcaaagtaacgtatgttgttgatagctgccaaaagccttatgccccagtaaaactagtgtataaattataggaagaaatttttacgaagtgaacaattaaaaaaaaacggctctattttccttaa

SEQ ID NO: 217928 - DNA, 4848 bp, Cannabis indica
ggtggccttcaccacgccgcctaactacgccggcagactatctcacctcctcgccctacaaggcttcgatcccctgtggtgccccacactcctcgtacagtacacccccaacaccatctccgcactcaaaccctatctctcccccatatcactcgactctctctccgccgtcgctttcacctcccgcactggaatctccgccttctcggaagctatcgccgccctcgaccaacctcctctatctcctgccggcgaagatttcatcatcgccgccctcggtaaggactcagagctcatcaacaacgaattcgttgctaagctatgcgaaaacggcggtcgagttaaggttctggttcctccgatcgcgacgccgagaagcctagtgacttcccttggggaaggccgtaaccgaagagttctctgtccggttccagtggttgtggatcttgaggaacctccggtggtgccagacttcctccgggatctcgagtcggccgggtgggtcccggttcgggtcggagcgtacgagacgcggtgggcgggtgggcagtgcgcgaaggtagtggcggagaggatcgagaagggagaaatggaggcaattgtgtttacgagcacggcggaggtcgagggtttattgaagagcttggaggagtttggtttggactggagagaagtaaagaggaaatgtccgacattggtggcggcggctcacggacctgtcacggcggccggcgccaagaggcttggtgttgacattgacttgattggtgctaagtttgagagcttttgatggtgttgttaaagctcttcgcttgagatttgcttggtttcagcccatttaaaacatgtgaaattcttatgttgatgtgtatgagaatgatttgttttcttgtttaccaaacctaagattgaattttgtttggagttggattagattttcagctttcatagctgtattttcttgtttgtttcccgggaaaagatgtacaatgtaattgagtttgagttttgaccttaaaaatagaaagaaagcaacaatattatgaccaagcaacttcttttcttttgatttttcctctacattcatgaaatcttacacaaacttatatatgacaccaaatacaatatacagtacaccataatagatagcaacaaataatcaaatatggtagaaacaagccctaaatcaactcttaactaccaaacaacaattctttataagttaaaactatataataattatatattgtgtatgttaatagtaattttatgcagtaattaaatatgagctaaaatttgaaccccagttgcttctgaactctgaaacttccctgtttttacttactttgtgggttcaatcctgataaaagcttcagtacttcttccatggaaggtctatcatttggagaacttgtacagagcaaagcaacttcaagaacaagtttaatttcctcttctattgaactgtttgaatcaacttcattctccttcaaaacctctgtcagtacaacttccataggcttgttcttcatgctggttcctgcattgtttttcatctttgtccaattgctgtttgataaaatttccagtagaatctctccaaagttgtagatatccatggtaagcttttcttttatgttcccactgaattcacctatagccaaaaaaaagaaaaaatgtaccatcttagcttttaggcaaaaacatactagcatatataatattggcatgcatgcatgcatgcatacatacatacctgtttctctttttgaaaatgaatctttgtttagctctagcaggtaattgattccgaattcggccaaatggggttccatattttcgtcgaaaaatatgttatttgatgtcaaatctccatgaggaatagctggagagcaatcatggtgaaggaagcataaacctctagcaatgccagtcacagttctgtactttgttccccagtccttcatttcaattctctcatcagccaaacttccattgggcaagtagtcgtacaagaggtaagccatatggttgttgtagcaaactccaagcaatctagtcagattcttatgccttgcattccctatttggttaataaactccaacatcttcttcattctctttgcctcccactcaatctttttgactgtaacagttattcctgttggaagaactgctttgcatactgagctaggtactgaaggcacagcatccatggattctgcagagctaaagctcctcaaaacatctttagctgtgaactgaggcagcccactgtaggatatcatcttccactgccctctactacctctgcgaaggtaaagtattgctactattgatagtgttgtgagcataactactccaatgcagagtaacacaacccataagagttttccactgtgtttgcttccgaacatcgccattgagcgagaacatgattgaagaggtgatccacatagctttggattgccagtgaatgcacttttgcccattgttctaaatatttcctttgagggaatcgaaccggagatgtcgttgaaagatacattcagaagttgtaaggttgaagaatgactgaacttggttggtattggtccagtgaaactgttttgtgagagatcaatggcagcaagagcaggtagactagctagctcatcaggtatatgacctgacaaattattgtttgctaaagcaattgtctcaagtgaatggcaattggaaatggttattggtactgctcctgataacttgttcatgttcaactcaataacaatgaaagagtcgcagctttggaatggaggcagattaccagaaataccacatgaagaagctgaaaagttttgaagaattggcaaggtccatgttttggaaggaattgttccacctaagtctggattataagagatgttgaagtattgaagtttgatagcttgggataaatcttttggaatcccaccactaaacttgttgctggataaatcaacatatgtgagttcagaaagatggttaaatttcaatgggatctcacctgagaaagagttatcttcaagccttatacgaacaagtgaagaacaattggagagagatggtgaaagaccaccagtgaaattattggaaaacagtatcagcttataaagctctcctcttgcacagatatctggtggaatagtgcccatgaaattgtttgtggagacatctacccatttgagttttgagttctttcctaagcttgtggaagttccccatggaagaaattgttccatataagaagtgtctcaagtgatgggagctttgcaatactttcaggaacagcaccactcatggagttgtacatcagactgagcagtttaagatttttcaactctgagaagctctcagggattgacccagtaatatgattatcagaaagatccaagcttgaaagaggtgaaattctgcccaactcccaaggtatatctccagtgagctggttcctgaacagaaagagtgattctagcttggtgagattgctgagctcctttggtattgaaccagagaggtttgcaccagcaatatcaagatactgaagctcactcatgttgcccaaatgccatggtatacttccctgataagaattgtaaccaatctccatgtgggttactgttttgagcttccccagttctggtggtatgcttccactgagaaaattccctgcaaggtggagaaactcaaggtttttgaatgagccatattcaggtgggattggtcccctgaaatagctaccagcaaaatttaaagtctggagtttttcaagctgggaaacatcagcaggtaatgaccctgaaaagctgttactaaaagcatctagaacaaccaagttctgtagaccagagattccaggaggaaagtgcccagaaaagttgttcctgctaatatccaaacttttaagactggtcaggttgaaaagtcccaaagggagttgcccagagaaagaattgtaactaaggttgagatcaactagcttagtgaagactttgaattgcttccctgagattgcaccaccaaggctctttgcagaaaggtctaaggcaataacattagtggaatttgtgtcacaagtgacaccagaccaagaacatactgatgttttcccaggtgggatttctgcagaaggcaaagaccaatcattaagactgttatattcatctacaatctcagattttaagctcaaaagcacctctgagtagagatcagctgctgaaactactaagatgaacattgatgctgcaagtagataagagtacaaacaatggaaaatctccattggaacttgcagttaaagaaaataggccacaaatcttgacaccccaaataaagaaaatcggttgtgtcagattatataaggccggaatttgttttgctcagagagagttagagagagagggagatgcatggggaatagagaaaaataaataaataaataaatggtgcataaaaggagggaatgactgtatatgattagttgaattgagaatatattattgagctgcttttggaagcaagaggggacccttatgctgtttgttgatttatatggtgtttgccattagggaataaagccttcatatcaagagctcatcttttttttgctttttccttaagagtatccaataagtttcctgcagtggtttaattttgaattgggatttggacattgtgggacaaacctaagaaaaataatatattatccttttgtttatattttaaaattttcaaaggagatttggtttgtgttctttcggttgattaggtttgaaggaaatgaaggactttcaaggttataaaaataatatacatttacctatatta

SEQ ID NO: 217929 - DNA, 1005 bp, Cannabis indica
taaaaaaatgccaaaagatatatacaattatcaatcaaatgaccaaaatcgaaacacattcttagcttactatggagtgcttccaatattaataaactatctatttcaatcgtcacatgaaaataataatataacttcaaccagcttaaaactttcttaattctcattgcctcaatcacttttgccgcctctatgaaaatattaacatctcaaactacaaacctcgtcctaaatcttccttcatcaacaaaggttgttgcatcgatgtttacttaacttctggttcggcccatggcacatcccagtcccttttgcacaaaagatatgactgatgaatatttcctctttcttcagcatttactcattaatcaaaacgaagatgcctaatcaaatcgcacatagggtttttaaccatgattcaaatcatatgtagagttttttttcttaatactttttgttctaaaatgatctaatagtaagcatctctaaaaattattaaaataatattatattaaataaacaaattttcttactttataataaaatgataaaaaaaaaaaagaaaaaaaaatgtaaaagatgttatggtatgatattcttttgtggcattctttttaattccaatattaagcatcatttaaaaaatactaaaaatatattcatgtcatcaagcatccttcataacatctccattggagatactctaaaaaggtataaaacaatcaaagtaccatatttagaaaatattagagtcacttaaagaaaaaacatacatacaatttaatttgtgcgatgtggccggtttgatttgatgaatactcttaatatatattattatttttaaaaaaaatcttaattaagacaaataaatattattgaaagagttcttatgaacaagtgaacaaatatatttcagaaaatcggaccaccaaatagtatagttgctacactgagagcaaatcttgccacaaggaacataatacttaattcatctcttgcttttaa

SEQ ID NO: 217930 - DNA, 1067 bp, Cannabis indica
gtctggaccaagtggatatggtgcagtgagtgaaatgggtgctttggagatgggttgtagttttacttttgggtcagtgattaggtgtttgggaggtatggaggtcaagctgggcttagaagaaagaggagaagaaaaaagtaaaggtacaagaaacttgaagagattggaagaaggagatagagctccatgattacccttgcggagcatagatttggttgtgttgtggttatggaatgtggaaaaacgtgctcccaccctgtacctccagcgtccagcctcagccccagcccggcagccccaggtgctttccaaaaatgtacaaatatgagatttaagaaaataaataaacctcacttggtacagggtaaatatgattgtttggtaatccaacaaattatcaaaaaaaaacaaaggtcctattataataattttttattaaacaaatattattttgggacttttccattcttacacttcaaataatttttttttttacatttttacgaaattctacatagaaacccctattgcaactagcgttgcaacaaaaaatcgtagagaaacccctattgcaaagcaactagcgctgcaatcactttagaaacccaaaccgtaaatttagaaaaaaaaaaaaggttaaaaaaatagtatatggggtaattttcctattattttagcgtgtgttttataaaatttattaattggacgctatgattcgataaataatagattaaatcttgtattttttaaaattgtactatagtaacttgagttgatattatatcaaaataaaacttaataatatctcgatttaaaagtgttacgacaaaactagttacgtttactgtatttactcgtgttaagaattatctttaagtttgttatattaaaaaaattgtcaaaaattgaactcagagttttatttatacaattttagaaaatacaaggtctattttatcatttaacaaaatagatagtcaaatcggtaatttttacaaaacacatagtcccaaatagtgttaactctttttctttgagtaaattgtggttaaacttccaatact

SEQ ID NO: 217931 - DNA, 3319 bp, Cannabis indica
caggttagcagcttgtggaagtcagggtattcaagcactacccaattcacaagttgaaaggtaaattattatgtcgtttacgttataagattgatttctttgacaaagaaacataagaatgatttcatgttagatttatgttttgtggtcttcatttatttactacccttttatttttggttaattaaataaatcagtaagaggatggagtaaaatgagtcatgttaaggtccaagtatgatttgagaaaaaggaaaagaaatcattgggcatgtagttggaggtttttttggtccattgcaattattattttaaattaatttccctttctctctgtagcaaaagcttgtttttgattattttttaatagacttttgactcttcttcaggttaaagttcacttctgttatgtttctccagttaatatgtattttcagacaagttgtgaggaccattttttttttttttccagaaaagcagttttttctttcttttttctttatttattttatttttccatcctaggaccagtttttctgattcttcaatttttaccatggaaatttggcaggcttggcatattctttccaatatgcagatttcttgcaggaattacgcaaaacctgggaaaacaattcaagtaaagggtatcagtgctgaaaattgtcatggtgctggtaaaacgactctgcgatgctcatcaaacattgatagaagttcagctcattcaaagacacacccatactttagtgcaactactgcagctaatgtcaaagttagtgaacctacaagctgcacaggtaaatatattccgccaaataatgttgaagctgcagaaccagggaaaagtgtaggagggcaaagacatatcggagcaccaactgtatatgcttctggtcagcaggttggtggttctgttggcaatcacaatgttcatggccataccagccaaagaaaagaatcccaaaaagtttgtgtcactgacctggatgacgatgatgagatactagaggttagtttaaatgacttggttagttcaattgttgaaatcaacaacaaagacttgggaacagttggtctctttctcttatatcatggagattatgtttttctttttgtttttttccttttggggggggttggagggggatgttttctacagtaaatactttagtttatgcttaatctttctgaaaatggtgttatttaatactttttgtttaaactttttattaatataataatattttttaattgtaaacacttattctatttttagtcgatcaaggttcctatttaatatcattttcaaactcttatttttcaattagaaatgaaactacttaattaaacaagccttttcaaaaatagaaaaatgaaaaaagaaattgcttaattaagcaaagaaacatggtcatccaccaaaacccaactgcataggttcattaaggttatttattgaatgatcagacttttacattgaagttgtatcttcttcttctaagtagttcaactccaaagtcttaggccagagaaaaaacaagtgtttttcttactggattgttattaattgtttcttacctgtctcatccatctagtttggttgcagagtattgatgtggatcaaatagtggaacaataccaatcatcttgtacacctcaatcaacaacatcgaggcttcctcccatcactccaactacaaataataagagtaactttgtgcgacatgatgaagcttgcttgccacctgaactgtgctcaacttgcagtcatggatctaaagtatgtttatgtgtattatctgcatcagtatcttcttatgttgacatgatatcacatctcttacattctgaattttatacagctaggaacatgcccggacgctgcacgccatttgcaggaaatgaaggacatgttaatatctgtatcaaatgaactgattgataattttgatagtttaagtccagagcaaacagaaaaacttcgtcaggacaggtttgccttttctttttcttcaagtgtacatagttttcctgctaaataaaaacaaaatattagaaaagaaaaattgttaaggtaaagaattagatgaaggaatggactatcgatggatcatgaagtatcaaatatgtttcttatggttatttttgttaatgcttttttagctgattgttgctttccaagagaggatttaaaaattaacacaatgtcaatacataggttggagttgaataagcaaatccagcagcttgaaatatatcttcgttccaattcagtagatgaagaaaggcaaaattcacatttttttgcatccacaactccccaaactttcaattatgaaacacctcaagcatccgtgtccaggaaagatccctggaaatttgaatcacaggttcatctacgcaatgaaccaggagcatatgaaagttgcaacttttcatcttcttcattctcttctgtagatagatttgatatttcctctagtactggagagagggagccatacatccctaggcttgttgaagttaactatattgagggttctaataacaaaaagtggagtaaccaaaatttcccgtggacaatgaaattggaggtatgtatctgttttatttttacttcatttatgcactaggttcatcctgattgttgtttgctgcaatcacttttaggacaataacaagatagtgtttggaaatcactcctttcgccccaatcaaagagagattattaatgctacattgagtggttgtgatgttttcgttcttatgcctactggagggggtaaaagcttgacatatcaggtaaaagaaaacacttttgtgatgatcctatcatagatacttgttgctttttgttaaatttaattttccaatttaaatttgtgccataattgtcttagcattcttgttttataattttttttttgcaagattgtgtatgcatcatttttctttgaggatgttgtgaaatattttctttttgtttgaatttttggccttgactattccaccggatgacctcccagtggccccaaggtttttcttagtctctggggatttgaaccttggaaacaactgcctaccagtagtttccaacactccttgctagttacttgtagactacccctttgggctgatattatgcaacaatttcaccaaagagggtttggctgagtggtaaagtttatgttttgtttcatgaggttcgggattttaattccttacagggattcaccctgtaagttttctgccatccaaggattgtaggtttcagttgaatttggaggacatgtataaaataagatgtgtaatattt

SEQ ID NO: 217932 - DNA, 4375 bp, Cannabis indica
aagtacgaacaaaacaatagaaaaggaaagacacaatagataaacaaaatgtaaacaaaactaaaatttacaagaaaaatgtagaattagccaagatccattgtttttctttatccaaataaagaaaagtcgccaccctcttctctccaccaccaaaacaagcactaaatttgcacattgcacctcttcaacagccataggattggatttggtgcggtgtgctcaaaactatcaacagaattggatttggtttaacaaatgtctagttagaaaataatgattggtggcacattcatgcttattttttcactcttcttcttcctcactactcatatccattatctctttccatacatcataccccttttcactattctccaatgcactctccttctttgccactgtcctccaaactcagcggttgaacttgaagttgtctcggattcttagtgtaatgggaaccttggtcctgtttttgaggaatttgatggtgcaaagttgatgcgtatagattctcaatctcaatttgatggaaattttgtggttgaggtagatagaggtgttgatgatgatgaacaagtttctttaggtccaaagtcgataccgacagattatgaatccaatgtaaatgttctggttgaggaagttgaaaccaagaacatatcaggaagagaagaaggggtgttagaatttggcttctgatgttcaacaaacaaccttgtggttgagaatggtggtaatgatgatgaagaagggattgaaaatagtctctaatttaacaaaagatgaaaaactgataatactgaaaatgagactatatgtgcttcctctggtagtggcaatggcaatgacaatggtaatatcactataaccaattcagatggaggagactgagagaagagcttaagtgaggaagagaaaaagagagtggacaaacaagtttcaacaattaagggtgaagtacttaagactagttaagatagtaggtggctcgattgaagattcgatagcaaggaaggttctttaaggttggcgcttatttcgggaaggcaagctggccaagaatttagcttggaaaatgcaaaggctaaggctttccaacttgaatagaggggaatgatgttttggagttttccttaaacacatttgttattgggaaaacatgtgttggcaagagtgccaccataaactccattttttggagaagatcccaatttatgcatttagaccctccacaactagtgtgaaagaaattgtctgaacagtggatggtgtcaagattagggcttttgatacttcaggtagctgcaatggaacaaagcactaagcaaaaaatcttgtctttagtaaagaatgtcacaaagaaatgcttacctgatatagttctctatgtggataggttggacactcaaagcagagatcttaaagatttttcattgttaagatcaatcacttatgctattggtccttctaatttggagaagtgttattgttaccttcactcatgttggatcctttccacttgatggaccatctagcaagggtcgagcctgagctaaggcgggctaagcatcgacttaaggctcaccaacctaggggaccaaaattttaaaaaaaaacataaaatttttgaaaatacatatatatattttttttaataattttcaaaagtattttttgaaaatacttaaggcctaatagtcccaaggctggcatggccctgcatcttgcacacctttgaactatgaattgtttgttgcttagcggtctcaaattgtctagcagagcattgaacgagctgttaataattttcgaattatgagttcaagtttgatgaatcttatatctattgctgagaaccattctaacggtcaagcttgcgatctcagttattgttttgagtcattttatgaagatattgtctgtaacctctctattaacaacggtgtcagtggatcaccggaagctctttagttttcactcttgttcacctccccttctatacttgttgtcatggttgttgcaatctcgtgctcttccaaaattgtcagctgattgaggtggagatattggtgattctgattctgatgatggcgaaaaagatgagtatgatcagcttcgacaatttaaagctctcgggaatttctaaattgctaaattgagcaaaggacagacaaatgtatatatggaggagtatgatcacaaagtgactcaacttatggagcgaatttaaaagtgcatctgaggaggcaaattttcccatcagccaagaccaattgccgattggtttgtctttggtgaaatggaaaggggacttggcattgggggctgatttgcaatctcaattttcttttgggaggaactacaaggtggtcgttcgtgctggattgagcaacaagctcagtggtcagatatcaatttgcacaagcagttcaaaacagtggtagccattcttccagatgtaaggagtatctataagctcatcttcctagggttggagctgagaactacaccatatactagattacatgtatagcttctcattttgattagtgttataattattattattattacaattggcttaattataagtcagtctctggcttttgtttctcattgaactgatattagataacggaacaagttttttatagttgcaaatgcaatgagctgaagtgagttgaaggaagaatgtaataaagtttggcaatttgaagtaagataaaacctgttttccatgaagtcattatcattaaagtctcttacgagttttctagcagattatataatacaagtttgaatagagttttggtacagttacacaagtgtacttggccacctaacaaatcttacaatagaacagtaaacaaagattttgagtcccataacagaacagaacacaagagaagaaaaaagacacataatcaagccctgaaaagttttgactcctgacatggatgataggcttcattggggcttgggttgattaacctggaccaactttagggatgtcataatgttcactcatgttagcaagatactgattgaaatcctgaatcctatcacggtgagacttgttagcagtcttcgccaatctctggttatcgattctctctctttgttctatgtatcttttctcagcagctgtcatattctgatcataagaattgccactctttccttcttcgctcgatttgttgttgttgttgctgccatcgctatcattgatttcatcctcctcaagaatgccacttccaccacctgcataattcataatatgataaatattcaaatagttatgaaaatttatagcaaggacaaaggtgttttcacagattcaacaagttacagggcatagcataggccaattaaacgatttttaattcatgtaaaacaacaacaacaacaacaacaacaacaacaagaagaaagaaaagtaaagacaaggtatcataccagcagttgaaagatcatcttgtttgattacagagttttgatcttgaagaagcttcttatgtttcttctttttcttcataccgccagccttaacatcgagagcctttcccttgagcttcagcttcccaacaaccacattatcatatgctgacatgttcacttgtatgatacaaacaaaacaaacaagaaaaaaactgttaccaccatataaagaactaagaaaatcagttcatttcaatgttatttcacataatcacaacatttatattagtgtagagtgtggtctaacaaaatcagttccataacataacatccagcaaaatcactcacaaaccaccatcgaaatttcgcataccactaaacctaaacacccaattcgagaactcctattataaaacaaaaatgtaattaaagttaaatatgacaaaacaagaaaacttaacacactgatagcctatggattacctttttggatgaggtacaatatcaaatctgaataaaagataaaagttgaaaattgacttacgccttcttcttgcgtcccttcttacccttggaaatcctcttgttcttcctgaaaaatcagatcacgtgcatgttatgaaaatagaaaagaaagaaataaacatacagaaatccatgattcagaagtacatgaatgaagcatacagtagaggaaagaaatagagaagaggtacccgacggccatggttgcagaaatccacattatcatatatatttcttattgggctttacacgggcctgcctagtcctctatttttgggctcattttgctgaaagcccatattctttttataaaaatatataagggataagttgaaaaatgcctcttttattaatcaattaaccaaatttgcctctaattttatatgtatttgaaacataactcttttta

SEQ ID NO: 217933 - DNA, 3754 bp, Cannabis indica
cttggtcatcacactacattatgctacggacaaaactagtgccttagcgcccaatatagattattagtaatttttgttggttatataaaggtttagcacaaatgaaaatgttgtttttttttattctaaacaaaatgttaaagttttttgttgatggagaaaatgctgttaaatttattgtcactaaaaccacctcaactctcctcgtcagcctaacctcttcacacacaaaactacagcaagttgatggtcagcaaagttgagcgcacgccaaccatttcagataagcaaatccatacaacacaaaccgaggcgacacgtgtcacaacatcactttgtctcatatatttctttctttctaagtcttgtgtcgaacacaattggtggtagtaggcgaaaaaagtaggaggagaaacaaatcaagcaccaaaatttcattgccttaagcgttgagaccttggagagaaagagacagagacagagacaaagatttgaaaaatcaaaaaaatgtcaactgcttcattatgttcatcaactcttcagtcccaaataagtggacttggttcgggtcttaagcttcaaaggcaaaatcttgctcaacccagttcgtttacattaacaaggtatattttttcctccatttgaggctcttttacctcgtcaaaattttctgggttttcgttattttttggatttgacgactgggattggcgaattttgtgtcttttgaggacacccagttcggcaaaagttgtaatgacgttgagaaatttagagacttattacgttttttaatcttctctggccaaatgatttagtgaatttgttgagatgcttttgaagttgttcaattacatagttgttgtccgagtaaattggttttttgaacttgtgctttacgtttatgtaaatatgccttgctggcttgctgagctttctttttgctgctccacttaaaatgaggataaccaaaggaaccttgattatggttcggatgtaagttaaacttgggcataatcctcattaatggttgtgtttgatggatagcttgaaaataattcaacagtaataaactcctttattaagaattcttgtagaatatttaaagcttacatcgatcaataagaggatcggtgatattaaacctctgcggcttagttgtctccaaagtcacaatcttcatccctggtgaatgtaggtgaatttcaaaaccttgatataatgccaagagactttactaacaacataattggcattctgaaatcgctactagctttattgttctcacatagcatacttcttcttcccatcctcataaaatgtcaaacctttttttctcaaagaacatttagtagacctgcttgtcaaccatttaattgcgtaaagtatctcaattattaatcatttaatgcagtgtttgtagcactatcatctgtttttgatcttctctacattttataactagtggttctgaagagtcatcctcccagatttattactgatattttctcttattcctgttgttgtgtcactttaggaaaacttttaggactgcagtgaaggctacagctagggttgataagtgctcaaaaagcgatatcattgtttctccgtccattctatccgctaactttgcaaagttgggggagcaggtactgtgtttctgttgtgctagataaccgtggtgttagtgtatatatatgtaggaagagttaatatggttacaatctgcattattgctgattttgtttatttccctgatatttaggtgacaatcttacagtttgacaccatttgttagcagataagctgaatcaaatgctgttcattatcaagtttcatggattttacattctcattctcacattattcaggtaaaagcagtagaggtggctggctgtgattggatccatattgatgtaatggatggccgctttgtaccaaacattaccataggaccacttgtggttgatgccttgcgccctgtgactgaccttcctttggatgtgcatttggtattaatctatctttttgtatttggaatgattggaaaaaatttaatcaacaaacgagatgttcacatattttgttgaagtgtagatgattgtggaaccagaacagcgggtgccagattttatcaaagctggggcagacatagttagtgttcactgtgagcaaacttctacaatccatttgcaccgtacagttaaccaagtgagctcctctccttttccttgaaattacagatcgtgaattgatattatcttatttagaccatcatacagttattattgtactgtttttttcctttctgtactctcggctatatatgtaaaagtaggatgcctataaaacccgataaaataagttatccattaaatgtcttatgctctacctatgcgatctacattctttatttttgtccttgttctgtgattagagaacaaagtgatggggaccgagcgagagagagagagagagggtcaaaaaaacaatggaattttggtaatgtttgtagatcaaatggttgaagttggtctagtattaaaagtgtgttagtttttaagtagtaaatatgatgtttcattagctggtatatggctttattaatgcttatgccacagcagagctagtttctgaatgtaaaagcacttgtcttcttgatagctttaagtagtgcaatgaaatttgaaatgccctgtttggattccagtgctgctactcactcgcttctgacaatattacatttttgctatctccagataaaaagtctgggagctaaggctggagttgtcctaaaccctggtacccctttaggtgctatagagtacgttcttgatggtgagttgtttctctcttttttcttgctggaagttattgggtcttttctgttgagttcattcctttcaattaacatgtattacaaattacaaaatactgaactatgtttagattttttatttttttatagaactatgttaaaaacttagtaagactgtaacatatcttatctgtagctcctaaagacgggaattcgattgataatgatgttgagttacttgagtaataataatgacaatgatttaaaaaagtagttgcagtaagattcacagggactattgactagcagtcatgtactgaaatgagatcatttgaatttttaccatccaaacaattttaaaggagcaacctatttttggattttgcagttgttgatctagtcttgattatgtctgtcaaccctggcttcggtggacagagctttattgagagtcaagtaaagaaaatttccgagttgagaagattgtgtgcagagaaggtataattgcacttctcattcgcgagtttctctttcgctggatagccatttataggtctcgtattgatatagtgagatgttggcattttatttatcctattgttgcagggtgtgaatccatggattgaagtggatggtggagtaggtccatcaaatgcatacaaggtccgtggtctgttaaacctaattaaagttacaatttaaccaagtaaagtaacgataaagcataatgctatcatgcaaaattatagtgagcttatatggtaagggcattgcctatattgtagtggcattctctgttttgtgcacttcagagaaattataacctaaaggtgtatattatacttatagcaggcatctgcttttaagaaattctaaataatttatgattctatttttggtatcataaaatacttggaatttttttaaaactga

SEQ ID NO: 217934 - DNA, 14841 bp, Cannabis indica
aatgttataattgtggttgtcgcaatgtgtttctacttggatttatatcagccaagacagagagtgtggttgttcttctttgtagagaaccttgcttaagtgttaatgcattgaaggatatgaattgggacttgagccaatggtgtcccttgattgatgataggtgtttcttgcagtggcttgttaaggttagtaatgttttccattggctcctcagttgttacagtattatctaatgttgctccccctcttataagatattgttctttgcaggtgccttctgaacaagagcagctgagagcacgacaaatcagtgctcaacaaataaacaaggtagaagaactttggaaaacaaatccagatgcttcacttgaagatcttgagaaacctggtgtggatgatgaacctcagcctgtagttttgaaatatgaagatgcttaccaggtgaacttgtagtttctcaccttgcttgtattgcatttgaatcattatgacaaaatccttcaatgttcgttaattttatcaggccggttaatgataagttggtttttttatttcttatgcagtaccaaaatgtatttgcaccacttattaagcttgaagctgactatgacaaagtatgtatctgtctgtgttcttttcttttctttttaattattgttaaggtgttgtttttttatttaatatcatgtggcattctatgttccctattttgtgacagatgatgaaagaatctcaaagcaaggataatgttaccattcgatgggatattggtctaaataaaaagcgagttgcttattttgtttttccaaaggtgcttaactatcttgttatttatgagctacacagaatttattcgatgccagacttatttcaatgctttcttggtttttttattgtgacgatttcacataaagtagttcataatctatattgtcataggaggacaatgagttgcgtcttgtacctggagatgagttgcgattgcgttattctggagatgctgctcatccagcatggcaatcagttggacatgtggtatgtatattttatttatatcaataaaaaagcagtgccggactttagatttatgttagtacactctggactgtagtgaaatttatttcatatacaataataaaatattactttcttgtcgtttcagattaagttaactgcacaagaagaggttgcacttgaacttcgagctagtcaggtgaattttagtgatgcactagtatttttcttttgtaataattatatatatttattctggtgttttcctaatgcttgtggatactgtcgcagggagtacctgttgacctgaaccatggttttagtgttgacttcgtttggaagagtactagctttgataggatgcaaggagcaatgaaaacttttgctgtggatgagactagtgtcagtgggtatgttttcttttcatttttttttctttcaggggagtatatcttcttatttgtccaagaactaacttagtaccctattatttaaataatatcacatgttatatttattaaatcagttttagttgaaaatatcttttaaaaatgaaatcttactgctatgtgatacatatgtatatattttttaatatgcagtaatcattttaattactactatttttttttataaaatatatttcaatttttaatcaaatataaattgagatagttttgattacattcgaactatttttatcaaaatcggtgaaaattgttcaatattgaattgatttaatcatatgcaaggtactaaaataattttagctaaaacaataggtaatatgttggtatttagaaaaataacagggtgttaaaacagtattgattaaacagtaggtactaagttggttcttggacaaacaacagggatggtatacttccttcatttttttaattattattttaattttcttggaggttgctgagcagaaaaaatcgtgatgtctatctgttttctttggctggtatatattaagctcttggaaaatgcacccattctttcaatgctttgatagaatataatcctaaacttcaaataattgaatacttcttgaaaatattatagagttcattaagttattaacatattactatgatattgcttttgtatgcatatgcggttgcattttacatggtccaaggtggtgttcattgatgtatttacaatgcttgattaatgaccctgatatgaaagcactgaattttataaatgttatctgttgggcaggtatatctaccatcacttgttaggccatgaagtagaggttcagatggttcgcaatacgcttcctcgtcgttttggtgcacctggtcttccagagctaaatgcatctcaagtatgctgcctgattacatctgaattctaattttctaaccttgatatatgtttatttgtcaaaccatgttcttgttcactgatttgatgctgctcttgtttactcttggtcaattgatttgaaaaggcctaaattagaaaataattgttgctacaaacttaaattatgtcagaacacaattttcttatgtgtctttctagtgtaatgcataacatgcattattagctttattgaatatgggaaatgggagaattacatttggtacaagagctccaagcaagcagggccaaagtatatatttgttcgattttgcctctttctccttaacattcagggatacacttttgtgttttggcttctagtttttatctagattatttattttatttgttcttcactagttggagttcttgttggatttgttgtgactttattttatgttcttttgatatatttatgtgttcacttttgcatgcaatatggcttgctttgtgggtatcttgtatcacttcgtattttaaatatgcacttttcttcaattctaagagtctaagtttcctttatttttaggtttttgctgttaaaagtgttctacagaagcctataagtcttattcaaggacctcctggtacgggaaaaactgtgacttcggcagcgattgtgtatcacatggcaaaacaaggccaagggcaggtaggtttctaaaatgatttgattctttcctgcattttacacatctgatgctacttctactttaatttgttgtttcaggtcttggtttgtgcccctagtaatgtggctgtagaccaactagcagagaagataagtgccacaggattaaaggtaaaggttacaactttgcatttttctttatatacttacaaaatgctgtccttttgactgtttgtctgaaaatatttttgattattcacattcacattaaactataaataatatattctgttctggtctcttgtgcatactgcataattacttgatgcttaggcattagatatgtatttgacacataatgaaactactcgttaacaaatcttcatgactacgtgttaacaaattatatttattttattggacttttaatgtggtttattaaatcttaatattaattcaaaattgattcgagtcgtgtaaatatttcttttctgctgtgaaatattttacttgtagtacgaagccaattatatcacatttttaccctcgagactgttaatgagttataatgtatatttatttgattttgttctcggagtaatatttcagttctcattttttgtgttcttaattgataatgcatttttttaaatagcataaattattttatggtcatgctttttgctcaaggggcttagaattatgtttgcctgatacttaatgcccattatactcaatgtatgctctacttaatgctacatcttatttttcttctgcattctaggttgttaggctttgtgctaagtccagggaagctgtaagttctcctgtcgagcacttaaccctacactaccaggtctgttgacttgtactcttcatcaatatttgtggtattatcaatatagattctctgcttctacgttatgcataacatttgtgaatattgcaggttcgccatttagacacatctgaaaagagtgaacttcacaagttacaacaattgaaagatgaacaaggtctctctttctttccctctattgcacttgcatatagttgataaatcccatttgaggaataattttgacttgttttgtattgtattcatttgagacgacctttttaaaattaatttttttcaactttgaggaagacattatttttggaaaatctggatagaaattttaggtgtcggtggggggattggagagaaagggttttgtttgagtggctccatgagagaaattaatgaagtatggctaactttggtctgacatggaacttttttcttttctttttcacttacaattgcaggtgaattgtccagcagtgatgaaaaaaaatataaagctctgaagcgagcaacagagagagagatttctcagagtgctgatgtcatatgttgtacttgtgttggagctggagatccccgattagcaaattttagattccgacaggttggacactattcatgaatagctgggtgatagtgaacttacaggtgctaaacaacttataaaaaacagtggttaactctcccttgctttatttcaggtacttattgatgaatctactcagtcaacggaacctgaatgccttattcctttagttcttggtgcaaagcaggtatgcttatacacatcttatattgccatttatgcttgattttaaagaaattttctaatagtttcgaaaataggtggttcttgtcggtgatcactgtcagcttggtccagttattatgtgcaaaaaagcagcacgtgctggcttagcgcagtctctttttgaacggcttgttctacttggtgtgaaaccaattaggttgcaggtacttgttcttttcacccaactttctcttttttatttggttaatgtatacatacatgcatgtgctgtgcatatttaagttagcttgtggtattgtttattgcattttaatttatgaatttccaattcaagagcttcattagtttttgattcagaatctatgatcaatgaagataattatatgattattgtctttcttacattattattttggtcaatgtttaaaaaagtgtttttaagcctgaaggcattttgtttttgtaaggaaaagctcaaaaagtctcaaccattgtcacataaataatctaaaactctaaaataaagatgaaaatttagtttctagaacttgaatggtggaagcagctctcctctcctctgtttttattttttcagagggttggagcttatttttatttcacttaattaatttcgggcagggattttgtaatcctaataatttaagtacagttagtgggcttttttaaaaaagcccagcttgtcaagcttttaagctggctttatggcatttaagaccagctattaaattgagggaggtattcaccttccacaattcgtgacccattctaaaggtggcgcctcacctcggagaggtgtctctctgacacggcttaaggcatttttctgcttcaaattgaggcacctaaacaatgcattttccaattatgaatttggttatacattgtatatctaatggcagttctatctgtcctttgaatggatggtttgaccttctcataattacaatgtcttttttatgttttttcctttatttttgttgttatttttgaaacaaaacaacttgtatttatatgggaaaaatatgcatggagagtgactggaagacagtcactggaaaatcaaacactcaaaacaatagaagaattacatggaattacaaaactaactccaatctctgagaaaacagagaaggaatttgttttaattcttttactattttgccctgtaaagggtgctaattttccttcagaaatatatatatatttctatgtgtgtgtggttgatcaattttttttgcttagttctgttctttcaagttgatttcttttttaaataatgctgtaaacttaatgtattattctatattctttatgttttaggttcaatatcgcatgcatccttctctgtcagagtttccttctaacagcttttatgaaggcacactgcaaaatggagtgactatcaatgaaaggcaatctactggcattgatttcccttggccagctcccaatcgtcctatgttcttttatgtacaggtatagtatcaatgtcaagtcgtttgatatggttgagtgtgtgtgaacagatttgcatctctgtttttcttctgttattttgccacttttatttctctcatattaccaatgagtttacaaaggctgttttccagatggggcaagaggagataagtgccagcggtacatcttatctcaacaggacagaggctgctaatgttgaaaagattgtgaccactttcttaagaagtggtgtagttcctagccaggtaaatatggatttttcttttgcatttatttaccatgctgttcatgtttttgtaatattttaatgctgtacagataggggtcataacaccatacgagggacaaagggcgtatattgtgaactatatgtcaaggaatggtgctctcagacaacaactttacaaggaaattgaggtaaaaatgttttgcgtaggttatgtagatactttttttctttttcattctttgatgcttgccctttttccgtctttaaataatttatccattgttgttttctttcttccttcaagttcaaatcttttagtgttagtgtttggaagtaaaagatacatgtttaacatgtccagaatataattgattttttttactgtaaaattattgtttttttcctgcaggttgcaagtgtcgattcatttcagggtagggagaaagattacatcatcctgtcatgtgttagaagtaatgaacaccaggttggttaatttactctttatctttatattgtaactaatgctttcagtaagcatatgtctggctatcatttcatgaagataaatactatccattattggttgactgctgaaatccttctcttcagggcattggttttctcaatgatcctcgaagactgaatgttgctttaacacgtgctcggtatggtattgtgattctgggaaacccgaaagttttaagtaaacaaccattgtggaatggtttattgactcactacaaggtaatatatctattttcttttggtgaaattctacttctttatttgaaatggactcttatgatactgaaaatgatgtgcctgttgtgagtaagaaaagtatattggtgtttttctggtatgtctgtagctgttatgtttgtctagtattgtaaattatcatctggcttctcatattatagaccatattactaaagtaaattagaattattatccatgagattgtgcacgaaaatatttcattcattattaagcctttttataacttggttttccttctcgccttccattaggaacatgagtgtttggttgaagggcctctaaataacctgaaacagagtatggtccaattccaaaagcccaaaaaggtgagctgctacatcacggcatgattttctttaatcatgcttttccatttgttgaaaatttgggaactatgagcttataccatgattgtttcttccatattgatgcagatatacaatgatcggcgtcttttctttggtggtggtcctggagttgtgcctagtgacagtttttcatctgtttcctcatccaaccaaaatgctgaaagaagaagtgctcgaggaaggggtatgttgatcttataatgatgaacttttgttgcattaatgtattagaatgattgatgacttgttgactatatctgatatagaacacataataatattttgcttcagtgtgctcattttcattgactaaggtgaagaaaattttacactgagtgcaggttcttatatacctcctagtccaccaaacggaacccataaacctggcttgcatccggcagggtatccaatgcctcgagttccccttccaccatttcctggtggccccgcatctcaaccatatgctattccaactcgtggagctgtacatggaccggttggagcagtgcctcatgtcccacagcctggaagccggggttttggtgctggacgtggaaatgccggtgctcctattggcagtcatcttccacatcagcaaggtgcccaacaatcttttggaaatattggatcaacttttaactttcctgctttggaaaatccaaatagtcagccatctgtgggtgggccgttatctcaaccaggatttgtcaataatgtaagttctgctgcctttattttgctgtcaacttttggaacctgtttctctaccttctaggccgtgcccttacagtatgttcttttatgtaacagatgccagttcaagggccaagccaaacttttcgtgatgggttttccatggctggcatgtctcaggatttcttgggtgatgacttcaaaagtcaaggatcacacgttccttacaatgtagctgacttctccacccaggtatgaatttggaggtctttactaatgttttacatagtggtatttattggtcatcaaaaagttcttacttttggacggacaaatttatatacgttgatggaaaagcatgagtatttacttgctgctgcctagaaaagtttttttctgtacagaactatagatttatacaaaggtttggacttggatattatttgcaaactggttatcggatgctgagttttgtgtaggaggatataagatttacatgcatatacaaacatttaaaacaacaaagttgctcattacacatttctgttgaagagtgttgacttgctgataacctggtctgcaggcttcacaaagtggatatggtgttgattatgttacacaaggagcgcaaggtggatttccagggaacttcctgaaccagaattctcaggctggttattctcgctttggcactggaaatgacttcatgtctcaggttggtggagttctgtctcacagtcacagttgccattgaaccctggtttttcatttttgctaactcgtttttcttcgaaaattttctttattacacaggattacatgcctcatggatcacaaggtttatttactcaagctgcctttaatgacccatcacaagatgatgcatctcagagtcattatggtgtggctaacgctagtcagcttcagtctcaggtttttacttatactgatggatcttgatatattatgtgtaaaatttagcatgccgctttgggtttttttctgtcttgaacacagacgatttaacatctttttaaacttgtttgcagggattgatgaattcactctactctcaacccttcactcattacaacacacaaccactgaacttgcaagccccacagcagcagcagcagcagccacctcaaccgagtcagagctctcaaaatcagaaaatccactacaatggttgaagtgaagggagtaattgatgtgatgggttaatcttttgcattcagctactctggttgtgctctcttgtgtgcccaaatatgtgccctaaagtgcagaatggattgccgattgaggtcagtttggttatctatctacatcacccgtatagtggatacaaatacacttgttgggttttttggaataagatttgtgcgacggagccaaatgactgagcatcgtttttaatcaaaacacaagcagcaccacatcagaggctgagaaagaaaatgataaccccgattacaagcttaaaagttttgtgttgagaaaaagataaaagaagtgctcaagaggatgagtgcaattacatgggatggttttggcataaagggcggcattggacgggttgaaatagtaggcagggcaagggctatttaacataatatgatgagacttagagggaagacccaatttttggtacagaaagcagtttttactgaaagaatatttttgtacagcatgccgggaaaggttgcctatgaacacccaccccaccccctcctttctgctcttcctgacatgtaatttacacactctatacttgcatagaagagggttattcactaaaaacacttgctttgcaatacaaccctttggtggtatataaagtgtgattggtttttaattgtgtaatgggctaaattattagctactattaatgaccttgcttctcagcgcaattcgctattttttgtggtttttagattttttacttgtccaaaccagtgtgcatattttatttcatttgtttccttctttctgttttatttttgttgctccataattattacctcttcaagactagtagtttaaaacttttcttttaggttacgtttggtaggaggtaatgaaatagcattcaataggaagaaaataaattaatttttattctatttttttgtttggttacattttaaagtattaaaatgtcattttagtttgttatttaaatgattattttattttaaaatggaagaaaagacttccattacaaattggaaaaaaaaaactaattattttttatgtattttaaatttttatctattcttttttaatttctattttttatttttatttgttttttattccaacaaaaataatttctgtgagttttctgtaagaatttgaagtttaggtaaagattccttttcttttattttatttaaaggagagctagaactttcattagatagaagccaaaacaaaggaataagctaacccagtggatgaaaagctaaaaggatttatatatgtgatatatatcttagataacagagccgaaaacacaggaataagtaatgtgatcaggccaattttggtagagagtgagttcccatattgggtgagctgttgcatgaattgcacaagaaaaaattgactatcagattccaaatgatttgacttgtattgtaggctcagcccagaataagccttgtctcactgcttctttaaatatgagagccttcacaactgaagcaaagataagataataagataagataagaacagaacagaactactctctcaaccaaaattccaattccaatgccaaccttcatgggacttattcttaaaatatctctaatcgagtgtcaactaaaaacaaaatagagctaaggtgtaaacaactattagattctatatatttatatttaaaataaatttaatttgaattatataaattcctaaacttaattgtacaaaattataaataagaatatgacatattgtttagggttttttttttttgagtaaaaatacttagttattataaattagaaatagcattcatttacaataatagagtaaattggaggagggatttcctcaaaccaagaacaagcctcatccacccctaaagtaaattttgccaaatcgtgagcagccatattagcaatacgtttgacatgtgagatggttacattagggagaaaggataaaagacatgagatatctataatcaaatcattaaaggatgagattgaattgaagggagctcgaatagcattaaccatcataagtgcatcggattcagcatgtgacaatggcagttgttgttgaattgcccaatttaagcaataaaagagtgcagtggcttccatttcatgcgagctgaagttgccaattagttttttcgaaaaagcagcaacaacatgaccatttgaatctcttataacagcatctactccgattacattttggctagagtcaacaactgcatctacgttcatcttgaagtgattgacatcgggtagtgtccacagttgtaaatatatatttctttatattctcaacaaataaaagaagttatacacaaaaaaatccctaatgttttacatttttatatttgggttttattattactatttgttttacactgcccaacacccctctatcaatctttttcgttcattccttcttcaaattttcatgagaatagtggttgtgatgttaattttcagattccttttgcaacaaattatttgaagttgatttttggtttcactaattatttagaattttttaaaagatatcataatgtttattataattataatatacgttgtcatataaaaaatatatataatttaaaattctcaatttttaaataacaaaacatgataaaaaaatgaactcctcttaaaaaaaatgccaatgttttagctaggcatggataatggcctcacctatattaattttatatcaagtttcttattaatattattcttattatttgttaattaaggttgaaaattatacacataagtacaaacaaaactcaatcagcaattgtatatatcccattgcaaattatttatatatttatgtgtatatataagtatatatataaatattaagtttctgactttttgtgcttgtggtttagagtacaagcacatatatcttcatctttattattatttattcttttagaagataatctaaaaaatatgtgggaaaaggaaattattattaggatttgtaaatgttgtcttgctaagctttcctcaaagttaatactgttttttttttttaatttccttccaggatttttcatcagtaataatcaaattatccaaaagttctgtttcttttttctttttttttttttttttcaggttttctcctatcctaaatatttgtataaatatttctaaataattttaactattgtttaggataaaggtggcgtttaggaatagaaataagaatggaatggaatttttatttttttgtttggtaaagactatggtattgtatggaatggaatagaactgttattattttgactaaattactctttactcttcaaaaattatatttgttttattaaattaccattattttataaattgaacaaataaataatattttaacaaaaaaatatatttatcatgtgatggaaatgtgcacattctaaaacctaattatttaaaataaaataataaaattacataaaatattaaataattagtatcagtacaaatttcattcatttaatttaatcatcacacatatatatatatatattatatatctatgtaattataattatgttcaaagttttaatataattatataactttaacattagtaatatgatggtaacatccaaaaaggaaagaaatggagaaggattgatagggtaaaatagacttttgttagtatggaattagctttcaagtgattttagagtggaaaagcaaatccctagtgtaggtgaattgtaattatatattatattatttaatacataactaatgatctgtattaatttttattataatatttacaaaaaatcctaaatgtggacgcagatttcgaacccgaacgtggaccctaatttggatcctggacctcagatgggtttgtggttagggtctgggaatagagtctaagttcgggtcctagtcgggattgagattggagttggattcgaatttatagtaaaaataatataattttatacaatttaataataaaagtcaatactaaaaacaagtatggtattatattaaataacagtaatataatataatacaatacacgtgtatcaaaagagtcactagagaaaaattaaaaaaaagtaccattagtcattaaatttgaatttgaatcaatgataaattcttattggtagaaagattattctagagaggacatagaacgtaaagggcggtaaaggaagagaagaaagagtaggataaaagatatataaacaaattgattggattctttatagttagttggtattttttttattggattatttatagatggtattgtgagtaggttctccattattaattttgtttacattgtggggtttcacttcactttccccatagaatataggatgcatgcatgccctatttgtttgttcttcttacaaattattctttgaaaatcaaactcatgaaaacattgtaaatttcatttggtggaaaatttagatgcttatttatctattaatatatagaggattgctattatgtacctgtggtgcccagcactagtggcatcccacgattagttagtaatattatctaaagttatttttaaattatataagacccgatacttaattacaccaataacgattttacaccgaggaaggtgttaagcagtagacaccagtgatgccttttagcaattcttatatatatatatatatattgatcatcaaaatcaactttaattacaaactaccagcacttttataaaaataaaaaacttaacaaattgactaattatgacaatcttcccaactaaattaaattatcttgtttaatattcttagacataattttatcaattctatatttaatttttcttgaattcttcattgccacttgttaattccaaaatacttcattgcgatttctaaaaaaaaaaacataaaccaaacctagtattattgcagctcacacttattttcaaaacttgctcattggcgatttttcaatctttttaaataatataagaaacttgaaatattattttaatagactaatatttttatcaatttggtagaatagtaataacatgcatatatgaattgagaaatgttagagaacactttatgatatattaggttcaacttattttaactcaataaaagttatagagaacgattaatcaattataaaacatcatatcatagaaatgttagatattttggtatcccataataataatactcttataaattaggttaattataatgatttttttccccgaactttgacatgtaccaaatcatgttccctaaatttttagggtcgttaaaaatgtcccatgaactattaagattgttgaatttaaagacttttgttcaattttagtaaaaaaaatttaacatcgatgaaagtttagagg

SEQ ID NO: 217935 - DNA, 4401 bp, Cannabis indica
aataataattacccatcaacttcgtgtatgctccgtccaaaaatgagataaaatatgtagtgtagcttgtattgttgtgaaaagaatgagtgaagagaaagttgtgtttctttgtagtggtggagcaatgctcgggagtatacagaaagaatgaaagagggaagagagaggaaggtgatgtaaatggaaagggcattttgaggttaacacaattgttgaccaatcctataaatattaggtattaaaagtttagaggaaaatttttaagctaatgtaagtataattaatcaattaaatagatatcagaactaattagcttccattattctcttagttttctagaatagcttcccttgaattgtgtataaatatattctattttctcaatatacatgtttaatggagtttgttattaaacaacacgagaatatttgaacattttagtccaaaatacacaactgggcaacaccaaaatgcaaaaaagatgagcataccaccaaaaatttagtaatggtgtgaaccaaaggcttcttttctttcaccttctcccatacattaaaactcaaacaacaaaaaccaatacatagcatctagaaaaattggagtggatattcttctcatccatttcgaataagtatcatcacaaacaataataacatccaaaacaaataaacccctctaccatataattgggtttttgagaaacataaagcaggctaccacaattataatcaggaggcaacaatataagcaaaataataggatcctctgctaagtacagaggaaacagaactcttccggtccaacaaaaaatgaacctattcgaaatctggcttttcagggtatgtgcatcctgacctctggatgataacatttgctgcataacacccagctttcacacaatcttcaattggcttctccttaactaactgtgacaaaaatccaccaacaaatgcatcccctgccaacaaaaaacaatagtattttagtcaacactggacttggatattcattctagtatatgataaatcatagcaatatctaataccttcttaattaagttactttcacacaatacttattatttacattcatagagaatgataaccatcataaaataaaagatagggtcagtggaaaaatcaaatattattgttgaatgaaaagatgggaaaagatttaacacctgctccattggtgtcaacaagcttctccttgggtaacaaaataacagggaacaatttgaccttcccatcctcagcaactacaacaggatctgcaccttgggtaatgacagttgtcctcttgtgtgtacctgattgcttgggcaattgggaaatcttgacagcaatctcttcaacattttcagtctgagtacaagagaaaattcaattaagtgactaatggacaaaccaagcagttcaatatatatcaaaagcatagaaacatagtaaacattacctcccagccatgaacccttgcaaacgttcttgcttcagtctcatttccaaaaacgtaatccacgtacctagagtcataagacaatataccgttattgatgagtataataaaacaaaacaaccaaagaaagagggagacttacggcaaagccttctcctgtgcatctttgaagaattcacaaataaatggagcagacaggttcattgtgaagacctgcagaatgcaaggaatcaatatgaatttactaaattttaaaatttacaatacaatagtagacatccaagaatttacttcacagctgttaccttgttgtttgcagctgcatgcgcagcaacaagttgaatggattctggagacacagtgaggaaaaacccagcaatgtagtaatatttggccttttccactgatcaagttgcaaattgaagtaagatgacaattaggatttgaggttgagaaaaaacacgaagatcaacatggcaagcatattacctagggcccagttttctggttgcttcagatgttcagttttgtaacaatttgcagctgacaagttcgcaataagtgacctgtacaattgttcaattgaagaaattataaacaatgtcagccggcaacaagaaaatgaaaaaaaaaaaaaaaactagagatgcctatgagtgtgctcagtagatacataaaacttgaagacttaaaatttaagtaagaatgcagggagggagcaacggaagagcacttgaccagacaaaattggtttatgccgacaaaaacacaatcagtatttcaaataatttacaatgtgcacaagaaaaggaaagacacatagttaaatgatttaaacagaaaactgaagccaatatttacaactcccaaatctaaattaaggaagattaaaatccggaatgggaaaatttgcccagtaaaagagaagtattcaatgatattaactttcttacaaaacaatgaaagttccgcatgtatgactaaaagtctaaaatcacaagatttttgttttttcattcagatgagatgaggagaaaaataacctcttaaaaccaatctactttttttttctcgtttgcaaatataactgtccatgtattggtaaattcataggagctgaaatgcctcaacaaacaataaatttgaatgaaaaacatgtagcaagaaatattcattactaattacaacacaaaagagaaatattcattagtacacagaagatgttaaactgacctctcaccaccaagaacacagacagcacaagttccggtaggtgcagtttcatcttcataatagtgcacctgtttacatttttaaattagtagaaacacttccctcactcatcaagcaatatgaaaaattggactgagcagaataaagtagtgcaagatgaagagaaacttacattaacaccagcttgtttgcaatttttcttcatctcctctccaaacttatcctttccaatacttcccatgtaactagttgcaccaggaatttggagcatccactggagaagcacaacataacaaatgagaaacaacaaatgatatgaaaaactcaaaataacaacatagttatatgaatcattgagcaaacctgggcaacttttattgaattttgtgtagcacctaaaaccaaaacaataagataaaccgagctatcaatatcttgaagacccacattaaaatcaataaaaacctaatatagttcaacatataaatgaaaaattacctccagcaataaactccacatcatattcgttggcaagttcatcataccttcacaattcatattgaaaaaaatgaaagtatttcagtatgaccaagttaactacacaaaataatacttgcataaacaatcacattgcataaagaaatttgtaaactctgattcacctcatttaatatctctccagagatctgtctcttaaatgatttaccagaaaaccagtattatttaaaatatatatacacatacaatctttgtatttgattccaggatatctatagctaaggataatttgtaaatgcaaaaaggaaaaatgataagtggcaaatgcagcagggaaaattatatatgaactgagaaataaacaactagaaaacttacatgggcaagtgcttatcctcagcaagaatagcattgtttggcttgacgtcatatctgtaaacaaaaatgaattaagtatcataaggcaagtgacaataaaccagtttgatatctgactaaatgaacaagaaaaaagaaatcttaaagtaaaaaagcattatgcaacaagcaatttctttagatctatcttattcaacatttcttcagcttctcaaaaagatccagagacctaacaaatacaccatttcatccagaaagcatttagatctactcaaaattacaaacgcaaataataatttcacatattacacgtcataaaacaatcttttcaataccagatcaaaccatttttcagatagcgagaccggatctcagatcagaactaacattaacagtagtttggttgctcaaagaaaatgaaggaaaaaaatctaacaatgcaatattatcccttaataaatcaaacatgattcatatcctgagctataaaatttccctaatctgttcattttctcagcaactaaacagaagaaaaacctgaaacaagatttaggagatgctacttactttttcagaaattcctcagggacgacggcagaaatgtcgagaagaggatttcccataccaagaagaattccctcgttcgccattagagcttagcttaagagcttagagagagagatcgaagaagaagaagagattgaggttagaatagaagacaggcagcttaagagtggttctttgaagaggtatttatagtaactaataatttacctacaacaggaaatgggcacactgattaaagttacacgtcactaccgtcacctactc

SEQ ID NO: 217936 - DNA, 6575 bp, Cannabis indica
agagtttattaattttccaaacaagaaataatgaaatacaagggtattaatgctataaagttataaactccataaataaataaataaatgaatttacgtaacgtcttttgtgggtgatgctaagcttttccacgtgagcataacttggtacataatcttttactccttttggcttttgctttggagaaagttcctagttcacatttcatttctctaatgactcgtgtctttaaaagatggtaacaaaaatacaatacaagcacatttcattgatttcaatattgagaaaattcatgtaagtctagataaatattatttgatgtctacaatattcttactaaactacatcctgattaccattattattattattattattgatttctttaaatatatatatatataaatcgttaaagcatcatgtgatgtggtatatagttgactatatatatatacacagaatcaagatcctaaatttcatgtgacataaacttgtatacatggctagctatattgacattttaatcgagagatgtaagataatactaataacagccaagccaagctaatccaaatcccagtttaagccgataataagggacacttagtaaattacctacgtctaaaaggaaacaacgaaaaatttagtactatatatactttgttaaaatctggagaatcagcgccaaaacacaattcccatgctttcttcttcttcatcttattcatatatatgaagtgaagccaacccaacccaacccttgataactccgctctgtttttgtgtgatatgtatggtagttgtaaggtgacttttacatgaaaacaaaagcaattaaccaaaccaaaacactattgattaataattactttgtatatacatatatatttatatgtttgtatatgcttttgggtttttcagtgttttgttataagaaaaaaaaaagcaagtgttaatggcggtgggaggatattacaataaggggaatggaagtagtggtaatagtaacagaggtgggagaccatatgggttgatgttacttgtagcatttggagcagccttgtttggtgtcatgattctccataagctcagggaaagacgcatctttaatctactcgtccatgacaaagaccgtgacatcttctcccttcaactccttttgcaggtctctctctctatatatatatgtatatgtgtgaggtaatcggtgacaatgaacacttgttgttattttgcaaaaactagagactcaaaactacccagttttcgagtaaatcaccttgttagaaaagtgaaaatatgaagttttgaatttgactcttcagaattcatgactctcaattatgatgaaaatatagaccaacggtcgagagagaattagaattggataagtagaagtatcgcacctggccatttgtcacattgaccaaaaaagacatgtttgaatggggattttgttttttcgttttcttttgtttcatcactttatttatgaacaattttcttttttattattaatgtagagggaaagagactacacaaaagaagcgaagatgaagaatgaggagttgaaagctaagatattctctctgagaatgcaaaagatggaaattgagaggagagttgtggagatgcagtcaacaattgagtcccttaaagatgaagggaagaccatggagggtgccattgaggagaagcaaaacgaaatcaaaatgctgaggctacaacaacaacactctactactactgttaataatgatgagaaagataattcccaagtgatggccttgactcaaacattgaaacagaaggaagctcaaattgaggatttcaaacgtcttcttcagtacccagagaaaaaggatttgtcaattagtactactactgatgacccttctaagggatcagtaaatttgacactggcagaggatcaaaaggtgaaaactgtggtacatggtgaaggtgaaagctcaaataaaaccgttatgggagaggtcagtgatgatagaaggaaaatgatgagcaatgagaaagaaaagtttgaacatttacaagaacgaatgaacaaagagatggggttatagcaaattcaagtgatgtaatatctcacaatggtgggaagcgtacagataataatgacgaaagtaagaatagaggaaatgggacaaaacgggtaaacatgaaagccggaaaaatctagccactattaaaggtggaatgaaactggaaattcaagatggctctagtaacaatgttgagtccatagctaggggaacacttggctctgttagtagtactagtaaggggaaaagatggaggttgatggctaagaacagcagatcagaaaaaaatggaaaacaaaatagagtaaagattattaaaagttcaaggttggaagatgaggatgatcgtgtgatgtcaaagggtggagttaagaaagcagcttcagtcgggataccaatgcctaacaatcaccgtgtggaagccaaaattcccgagtctttaagcttgaaaaatagaaccggcgatgaggaacagcagccatccaagaagttccaaacttccttagccaaagaaacgccattaaatacaactactgttggggagcagagtgacacaagaatgcaatttagggacaagaaaccggaagtcaggaaactccaagatgccaatgcagttgaacaaggcatgagcagaacagatatcggcgcagagacaacagatgatcttgaggggttggaagattacatgagtccagaagaaccagaaaactttgtcagtgatgatgagtcctctagtaaagctggtttcagtgctaaagaaaataaagaatacaaggaggagattgatgagactgagttctaacagattaccagatttttctttttagcttattgtagtagtttttgttcttgaaataggtcataaattaaacatatatgcatctgttatgaatgatgcttttctgcttagttttgtttagaactgattcaagagcttagttgcaaaatgaaatctagtcttggatataaagtataaagtgccaaagtaagaattgtctttcagactctttcatgttttttcttttcaatgacaaacttaatccttattgaatatcataaaaggttaatgcacccagcgtaataaaagcaactatagaacaagcaaatgaagagactctcccgataaaaacaaattgacctttttgtcttaacaaattcaacatcaactaactatcaaagttgcttttgccaataagaaaattatctcccaggacctggtccaagcaaaacattattatcaagaattcctgaacatcgaagcttaaagaacttagtttgttgcttccaccactttctgtaaaacaaacaaacagataactattgtaagtactccagattagtcgctttaacgctcaagtcataaaaaatccaaatccgaaacatactgcaattcttttcacgaatcgttataggcttatgctttgcttgattaaaaaaatatataattaaatttggacatgaaatttaaaacgaatttggatcttatgaaagccattaagccaccatatcatagaatgctcgcctaaaaacatgatggaaaaggaaggagtgtccctgagcagcaacaaagaaggataccttatttaagccttgaccaaaaaggccaccaaaaaccaatatattagacctaaaatcttcaaaagtgacactgcagtgaaatattacttgaaagtgacactgcagtgacaaatgctcttggcattgctaaaggtaggaatttaaatctgctcagagcaaattcttcacaaaatagagcaagtaatacaaggccttatcttttcagccttgttgtctataaacaaacagcaccatattttagttactgattggcatgataaacatgtttaagtgaggatgctagaaaaaatacaaaacccaacttaagtttgcaagaattggagaatgaacaatttgaagatagatactgcttcacatataaggaagagcaaacaatgatgcacagaccactaaatatgaataactacagtaataatgcagttgcacaatgttaccacacgcgctcagtccatactccatagcccatgcaaaactaaataaataatactaaatcatagaaaagtgttaattacctcttccttcttgtcttttcctcctgaaaacaatttgtaccctccgaagatgagcaggccccaaccagataatgagacaataacgaactgcaaaagcagaggtaaaatgaaatctgtttcctagacgtacacagtaccttctattgcaaaaacagctgcaatcatagtaataaattatagaaaacacgttgaagaattcatcatatcacgacactgctaaacaatgtaagaagaacctaacaaacccaacaactgttttaaaaatgaatttgataaatttcatctgccgtgctattttctaacatccacaaaagaacactcaagacatatacgaatgtaatttcaaattctcattgaaagaaagtgcaaattcaaactgaaaaattaactgaaatgtggttaatagagcatgtactttctagaaaactaggttgatacagctaacaaggattaaccattaaactcataaatagacatagggcatccccttcatcaaaactaaacattccattgatatacgacaatgtctgtgttagatgagatttattcagattggactatattagttttaagaaattcactgcatcaagttaagctgaagcccagtttagaattgcaaaaagataaagccaaattactacagcaacaccaaatagcttatgatggaaccgtaaataaattgcaaagcataaaattgtaaagtggtttttattttcttattatatttaagacttcgtaacataaccctccatggccatcttgatagaaaccaaataccaatgagaatagtataataatcactttttaaggcaagagaaaaaacaaatcttacatgttcttccttccatttactagggctcattgggtcttcccagacgttaacccttgcggggccatggtgatctgcaatattctccaaagggtcaacaatgtacaatcaatataagaattacaacaaattactcgtaaatttagattcaaatcggatttattactattcttcaaccctcaaaacatgggattacggaacttcgttttcttttcatctcaattggtttttggggattacaaacaaaagggtttcccgaatttgatacacaaaaataagatcaaaagcaaataaatggagaaaagaagaagaagaagaataaggattaagagatttgcttgcctgcagcaccagctagacctcgcttctgaactaggttagcggcttgaaatggggttcttggagtagagatgcgagtgagagttgcggcttgacgagctgcagccgctgctaaagtagccatggctatgttctgagttaaaagggttttggagggagagaaagaaacggaaggagacgacgcagagggcaacggaagaagaaggtgtgcgtgttgggatttgggagggactgcgcttctcttatgcagactatgctactccaaaacgacaccgtcaaaactattcatgttttcacaattacccttcttttcttgttttacggcaatttacctcaatttttataattattaagaataattagtatttttattctcgtgtatgtttaatttttttttttaaaaaatataacatttacataatgtattttacgttcggtttcttttatagttaaaaattagattaattaggatttttatccccttaacttttaatgtcattaaaaatgttccttgaactattaaatcatgccctctgaacttttaaggtcgttaaaaatgcaacctgaactattgagattgttcgatttaaggacttttgtataatttcattcaattttactatttcaatgattgtttaagtactaaactatgttccccaaactaaatcatgcatcttgaactttcattcatgttagacttttttacaaaaattggacaaaagtttttaaattcaacaatctcaatagttcaggggtatttttaacgactttaaaagttcagagaacatgatttggtatatatcaaagtttacggggcaaaaatcctaattatcctaaaaattaatattgttatcttttgaaatttaaccaatactaaaattgctccgttttattaaaaaattataatactttatttattgtaaaaatattaaaaaaaacatattaaaaagggatattggcggctaaaccccccaaacttttgggtttgtgacagttaaccaccaaaactcaaattttggcggctaaactacctgaaccccacttccgttttggtccgcactattccgtcactttggctccgtttaatggtaaaaatggcttacgtggcacaatccttgtcagcaactcatgccacattggcattaaatcatgccaccttcctaaaataaaattaaaacttaatcagaaaattaaaaaatttaattaaaatcagaatttaaattaaaaacagaaataacccatcaaaaaaaaaa

SEQ ID NO: 217937 - DNA, 6755 bp, Cannabis indica
ttttataaaaaataatcaaaattagattgggaaaaaatcattttcccactgaaaccatcacctatttttggttttggtcctttgcatgtagggaaaaaaatataacatgcaagaatttgttttttttagacaaatataaaatgaaagagagtatttttgaaagaaatatgaataagtgtggtattgtcgcaaacaataaatcttctctcacttgagtcgcacatttcccttcttaactctccatcgcaaatactcaaaccaagggccagagaagatagagggacacccactccagccgccacacccacaccctctctgtctctcactctctccgccggaccacttctcatccaccagcctccgccgtatctccggttcccactccctactttctcgttcagtcacatcaaaatcgaagtgagctggtattttctttgatcttaatcccttctttcgttgctaaatttctaagtgcttaatcggctaacgattttggtgatgacacttcagtccagtcagaagctttgtttcggtacttttcttggatatgataccttaatttatttgatctgtattgcgtgtgctgaactgctgataaattcttacgattaagtttttaatattttgttgcgtgctgatctgagaatcatatgatattatttttgtgctgtgtggtatgaatatgtatattatttttctttgataacattaaaaattgattcttactagttctaaacccccattgcctccaaagttcaaaagaaaaactagggtacagtctgaagtttgggaacattttacaagaaataaggatgattcaactgacgggaaggttgtatgttttgactgttagggttatgctggttagtaggaaaaattgtattattacttcttagaaccattgaacccatttcggaaatatctatttagattggaggcgttagaagcacaaaagaatgggaatgagaatgtggatggtagtggtattttttctgtggtatacagtttttttcggcatattagcttttatgtgtgcaaagatgattgttattaatgagttgattattggatttgtggagaaagaggatttttcaaattatcatgtagcgttgcatcccccaaaattttttctttcacgcattaccattgttagggatatcacgaatctctacaatggggttattttttgctttcgctataagttcacaaagattccctcaccagtcaccgttgacacatgaacttccattgtgtttgtcatagggttgtcagcaatagaacattacatttccgagttataaattctggtttcttgtgatatcttttgttttgggttagttcactacacttttccgtgcttcatttgacgattgaatttacaaatgtgagagtgttattgcttaggcatcattttggtatgtgtaggtttcaaagtacaaacatgaatgccttcaaggctttcaaagcagctgtcccaattgaatggagtcctaatctttacatcactctggtgagaggtatcccaggaactaggagacttcacaggcgtactttagaggcattacgtcttggcaagtgcaaccgaactgtcatgcgatggaacactcctactgtcaggggaatgcttcaacaggttttccattagcttccaattcctttgcttaaatttcttcaccagggtttgatttcttacgtttggcatgtctgtatatactactgcaggtaaaaagattagtcgttattgagacggaagagatgtacaaggcccggaaacaaaatctggcaaaccaccgagctttgcggcccccattggtcataagtcatctacctcctgcaagtagtcttcctccttctgcaagtagttcttcctaaggtcaggtctcagtttttaggagtgagtttattgtccaagaagacaatcttcctgtagtgcaatttctttgtactgccaatttccatctggttcgtatactatatttggcataagtaggaaatttgttgccgtcttaaataggtgtactcggagtaataaaattttgctcccgagaagtgaaatgcaattgggcacatctatttacctttatatttatagatactttcatatctggttttcttttatgaatgccttagtgtggttggttttcatgtgcatcatgaacaatatttaattatgaattactaatctcattatcacattgtaacttaatcacacattgtctaataacggatacaaacaagaagaatgaatcaatactatatgacatggctctcttctattttccttttttttttctcctctggggtaagaaaataccacatctcaagggattaatgacttaacataatcagacataacatcatatatcaagagtgatattttcgggcccctccattgcatctatggtatttcctcatccaacttgtctgatgttacgtcatttgaggtcttaagctctttttccccgctgtcattaaggccaatgaaatgcatatctttgtactgatgtcttgatgcgaagactaggaaaactccaaaattgatcaatcccagaactgcaaggagccaatagaagttatctaacattcccttgttcaagttgcttctgagccaacttttcttggtcactttatccactattgaaaccaacaaactgctgacaaagaaccccatggagagtgaactgaggaacagtcctgtgctcatggacttcatcttctccggtgcttctctgatgaaaaactccagttgcccaacgtaagcaaaagcttctccggcccctacgagaaagaactgagggactagccagaaagcactgatcatagttttgttgtgaacggcttgttcccttcgttgtttttcaattattccagcagcaaccatagcaaccattgagaagacgagtccaatcccaaccctctggaggctagtgattcccatggggttgtgagtgagtttccgaactatggggacgaataatttttcgtttagggaagtaaagaggagaatggatatgaatagaaaagtagagaaagagcctgaagggataacaaaattcccaacatttcgtttcatgaaggtagcttgctcaatggtgaaagtagtcatttgggaatagattgtccaaaagaggatgcaagttgaccatatggggatgagcttaagaaccatttttacctcttcaacttcagtaaccgtcgatactatccaatgattgtttttgttttcatcactggcattgaaattatccttttctacaattgcagctttgtccagacacctacatattaatttaaggaaaaaaaaagaaaacaaattatcagtgcccatgaaagagtgaacgaaataattgagccgtaaaaaaattgaccatgtgctaatgttaagttgattgagagtgcattataaattgattaaaaatgacgtaattatgctcctttcttaaaaatcttagcatggcctttctttaacttgtacttaccacatgaaaattaattgaagcaaatatgcataatcatccacatgtatatatgagttgacaatgcagaactgaaagcatactagctaattttaactcaatcctgaatatatgaatatggggtcatattttcattggaaaaaaacatatgaatacttacttcaacttctctgtgtatggtactgtagcttctgagtacttgttcaaaaggcttggatgagaaggaaaaggatggctcctcttcttccaggccaataatatcaccctccatatgactgttaaagggctccctttaggtttcttaaaccgataaaatggtgtcccacatagcaaaataataaccgctattatcattgtccctgctgatatcccatagccccatcctcttccaacattatcttgaatataaaccagaacaattacagcaaacaaggaccctaaacttatcccaaaatagaatctgttgaagaagaaaaccatggccttctcctccttggggtctgaaatatcaaattgatctgacccgaaacccgaaacgtttgattttattccacctccaccaagtgctatagtgtacaaagcagcatagagcaacgcaagttggtttccatttgcctcaatacactgatgatggaaatttctgaagtcatcgcaatgaggaggtctcatgctgggaatgattgttgccagagttaacataacaaccccctattgatttaaataacatgattagtttctcataatatgtttaagaaaacaactgctattcttggctcgaaagacttacaatagcagttatggttgctgagattgcaacggtcaggtaccgaccgaacttagcatcagctaagaaacctccaagaaggccaaggagattgagtgttcccatgaagttagtgactattgttgcagactttgctgatggaatatgcaagtactgaaccaagtaagtcacaagattcattgaaattcccataacacatatcctctcagagagttctacccctgcagagccatagtaatcaagaaacataacattagtttatgagcattaacaaccaaagagtttcaacatatttttaagtactcaagcttgttgaagtacctaagccaagccctgcagcaagccaccccccggtcttggacttatcagccagattccctcgataatcgtacacagttctatcacttccaccatctttctcaccatgagatgaaaccagaacctgtcaaaacgatcaagagaaggaaatttgaaaaagaaggaaaaaaaaaactaagtcaaaacaagatagcaagtatatatttgaagtaacttaccatgttgttgagagaaggggaagagtgagtctactctactctagctgattagctagccaaatgggctgtaaagagtaattgtggcaacgaaaaatgcagacaaggctaatggaggttgagatgtgaatgagagttggaaagtttttatataagagctaaaagttatcagctaaacatgcacaggcatagccctccacaactaattctagtggtggggattaataaagggtgaaagttaactactgatgatagattttcaattaaagtcgtgggagtttttggattggcaacacactttatgtggtttctatgcctagtaactgtaacaatcgaacaggttttgagaaagacaataaagctttccaaatttgattcctctctcttcaattatttttattaactatataacatacgacacttggacacaaagttatgccatgtgaaactgattatatagctcctctttgcggaaatttgtacagtattatggataatgagaagagtgaagctaatcctttaaatcacaaggacacgtttggatgttcattatggcaaatcaaacagctatttataatagtgtcttggtgtggaatgtggggtcattgctctatacataacacaaacttttggggatatcccaattatacatgtattatgccatataatatatattaactttttctagttctgatatttttccttttctccacttcgaattgaaattttcatgaaagattcttatttggaatctggattaggtaatgggggatttaagctctttatgcctaatttgctggtacatgtctattgatgaaaatatcttatgtactattccaatcttcatggcactaaaatctgtcacatatccaccggacaaaacatactgtgatagatagaaagtaaatatatatttttttatttcttctttacagaccatataatggcatcttaaggatcttttttattctacctcctatgggcagtttattttttttttatctatttttttgactaggtaatgttaatatactcatcaatgattgatgggtcaaactggggtaccactactacactacactttgtttctgaacaatgattgataatattggtcggttcgatcaatatttatcttgaagatcaaaagtgcatcaaaattcagagtcacatagttatcactttacagtttagatataagaaatctctagaaagttttggccattattgaaacagagacgtacttctttgttgttatgaagtagcaacctaataaacttaccaagaagaaggataaatttaaatgataatttggtatacttctttgaagggggttgtgaatatttccaaaaataagatggttaaggctttgtttggaaggttgattaacaaagtttggcctttgggggaaatcaatgggtgcttagttcaaccaattaataggagaattaataggccatgttgcatggttttacaaacataaataataatagccacacaaatactattactactgctgcatgagaaaaagtggtccaaaatgaaggagttattgtttgattcttgtgaacctgaaacaaaaattaaagaaaaaaacaaattataagaatagagaaggtgccaataggtggcaagtagtaggacctataaggccaaaggagagaaagacgtgaaagaaagaagtcatctttatcatttttggatcttttcaacctataaattataaagacgcctctaatcaattttcaatttcacaatcaaattctgctgggtactagggacaaaacggaagatgtggtggtaatgctttttaggtatggtgatatgattttcttttagcctgctttgaaaaaaaaaatgatgataacaacatggctatatagactatagtgtatgttcatatataaaaatatgaaaaaaatcacacccattttatttctatgtatttgagagccatatatatat

SEQ ID NO: 217938 - DNA, 8163 bp, Cannabis indica
ggaatcccaacctagcccctatgtggttggaagtaagaagtcttgccattgaattgtgtcatttttctgttattgtataaaaccattgtggatttcatggtgtttgtgcaggtgactcttttttggtgcctggtgcaactgtggctaccttacttatgcttggtgctcttcatgcccgtcgaatgtatgacgacaagaaggtaggcaagtatgcaagaatcaatcagattcttcttattaaagaacttttcatgaggtcttcaaaggagagtagaacatagccaagctaaatgttttatactcttatgatatgatacagtgctgtgggacctatttgcaagggcttacacattataggaacaaagttattttaggagaaccctagaaccctattatggagatgtcttgctaatttttaataatattcacccctttgaaataatgtctaatcaaccggtatcatcattcctgtgtgcttttactttgataaaattgaacaaattatatcttgagccgttactgttgggagagccagtattctagttattgaacccaattctatccatgcagtggaagtgtagaattgtttttttttttcttggacatggtagttctatcgggagacttccagtggccccaagctttttgagtctagggggatgaagagtagattgactaatgcatggccatatgcagttgtatgtttctttaagcaatgaaacatgtttatagttttaactttgaaccacttataattgaaatagtatgctaacttatttctttatgctgtcttgtctttgttctcctatacataattttttctgctagattaaaggcgttggcagaattcgatccatctatagctagtagtacactagagggctttagctgcatgtttcctagttttaatatgtctacttacagatgactccttagttcttggagatgcaatttattcctatttcctacttttcttattcaccaaaaaagttattcttcttgctatttaccaatctcttctcgtccctgcaatttttttttctttctgtttacttaggtggacttttctctgtaagttagataaaatggaatgcttatagtactttgtccaaatgctaaatattttgtttacctaactataggttgaggaggaacggggaaaagggattgaatctgagttccaacctgatttaaaggtgatattacataactgatctcacttttttttttcttcagaactgttgtgtttttctatttttaatgtctaaactttgacatgcactttttaaactgttaccaactttaggctacttttctaagatttctacctctgcgctccatgtctagatgttggggatatttgactagtgtggtaagtatcttctcattttaagctgagtgagttcaattttccttatacactttaacctgataagagtatgtttactcgagtcttttgactttggttaaaatggttagatgagtgaaatgaaacattttcactagctaaccagatttgggtatttttaatcttaaacttggaaatatgttacacataaaatacatgaattaagtgcatgacttagctcgtgtttatacttaaatacttttacatacaggtgttattttagctcctgcttctttgccagaccattaacttttttgtatttttttttatttttttttatcttggtcttcttacattgccttttgttttcagaattggattttgtacttacctttacatatcatttacttatttaaagaaatttattttaggaaatacctgtttggctacgcccatacatttatagagcttgggcacgggcttttcactcaagtatgatggttacctcttttaactaattaagtgatatacttttcagttttctcatgtaaactaagtacttgctgtttcattgaaggactagaatacatgcttgacagattaaactttaagaattattttaaaactatattgtttgtgttcagacttagaagaagcagcttcgcctctggatgaatatgcttccttacgagatttctttattcgcacactcaaagaaggttgcaggcctattgactctgatccacattgtctggtaactggtattcagccatttagtcagcatacttacgtattattccaacttataaaatttacttctgctgacaactattttatacgactgcttatggagtataggttagtcctgttgatggtactatcttaaggtttggagagttaaaaggacccggggctatgattgagcaagtcaaagggttttcttattccgtttcctctcttcttggtgcaagctcattccttcctatggttgccgaagggcaaatggaggaagatgaagaggaaccagaaaaaacttctgttagtaagagtaagaagtcatggtggagaatttcattggcttctcccaaagtctgggaccctgtgctatcacggtaaaatgtggtttatcctttcattcagtctttcctttggatggtgaaaccactgatttctttttcctgaatgaaatttagtggaatacaatatttcaaagtttatgttatatatattgcagtccgatgagaggtcttttttactgtgtaatatacttgaagcctggagactatcataggatacactccccagttgattggaaaattcttattcgccgacatttttcaggtaaagttgttgagagaactctgaatcttgaaaatacatgggattgattcactgaagataaattattctcatggtttcaaataaatgtgcctagtcattcctaggatgttctttataaactgttggatcctttggcatcaatgtatttgtactattgatccctttaaactcacagaagattttggctatttaagactaccttgggagttattttgataccaaccagtgagtctttcttactgttccccatatcttttttcgagagctagctgtatcacctttgccaaagctttcactgatgctatttcgaattctggaagtagaattgaaaaggacacataatcccaaggtcaagaggttatctatttgctgttttcgtaggtttttcacttttacaactcttggtcttcataaaagaagatttagtttgcacattaaatcaaaagacagaaattttcacaatttctcaaagattacgagcttcttctgttaaaattgattttttttttcacataaaaattgtttcattttctctttcaagtaaatttagtgttgaccaaattatatttctggatatttttgacaatttgtgcacatctatgagctatgacaaattgatcgcttgtatctgactttataattttgctagcttttcacccaaacacttgaacttaatttgaggggactgaaaagggtaggaatagacggataatgaaaacagaataggtgattgtagctttagatgcttcactagtcaactgttataataaacttatttagtggtctttttattgcttacagatgcgttatttcactttgcaggcaatttatttcctgttaatgaacgtgccacaagaacaatcagaaacctttatgttgagaatgaaagggtaatttctaacttataacttacatcagcttgacatggttttagagattgtgttgttgctccttgacatattattagttctttattttcctctccctcataaatgaggaccatgtgataagcctaaggggctccgtgtgtttcagagaagaattaaagggaataattaattcttctctcttttgttattggacttttaattagttcttgtatttgattaattttttgggcccagttgtaatcctaggtggctaatgtctaaaaagaccagagcatataaataggagtgtagcaagttcatttgggagttgctgagaaattaagttagaaagatttgagtggagagatttcaccctcttgaaaggtggaagtaggagaggggagcctctcgaaaagctccaaacctttgtaattctgctaccaaattcaataaagtcaaacttactggatacatcatagataaaaaattctaactaaggaaaatctatcgccatgcacaattttcatctatatgctggaaatatctttttctttggtccagttggtgtatgccaaattattgtttgtaaggatatcagctagcaggaatctgtgaataatttcttcattgcatctatattcatatgcttgattatgtcaacaaagttcggacttccttcttcctttagctattgcttttgttgtttttcttatttgtttcaagtgctgtcaaattttccgaccgtcataaactgacacgttaaactcacatggccgtatttttccttgtggtaagatttttattgacctattttatttatgattattgcttaatacaggttgtgcttgaaggtctatggcaggaagggtttatggcaattgctgctgtaggtgcgacaaatattggatcaattgaggtataaaaaataaatagacgaagagagtgagggttaaagaaagaaatagggttgaatatttaaccactggatattatggaaccttactagagcatggttacgctctatccctacccttttcagtccctctcaaattctccaagcaatatgatcattatggattgaatgcatttttgcattatggatttgttacgctctggtttttcgagtggtagcgcccctatgataactgtttgttgaagttttgctggactggaaacctgaacaaagtttgagggcatcaattgtcaagatctcctagatgagaatgttcaattgtcttgtagattatgaaagtgagaaaaaaatagcaaaaagaaagtttgattaagaaattttcaattgtcttgtagatgttagtcaacatgttattgaactagctgttggtatttccattgagccatctttgcagacactgaaataggatggccacacatacaactgcacacaaccttgtccacaatagaaatgttttgtgcattgatcattagtgaagaggaattaatttagcttcctgatttaccttttcttctgctctttaacttcaatctgaactttactcacgcagcttgtaatagaaccaaaattccggacaaacctgcaaagaaaaagattagcacattcagagcctccagaagaacggctatatgaccctgaaggtgttggtataatgctcagaaaaggggatgaggttgttttccattttgtgttgttgaaagtttcatgcttattctgtcacatcttaattctccaagcattctgatcatatttatgcttcacatcttttttccttttggccttgttcttcaagtatactgtcccaatagttttttacttcatacttacgtcaagaccaatttgagtaggctttgtttggaattggtggatttcactcatatcttgtttctcaatcaatttaatcattattgttcccctttgcttggatgagttctcaatctaattatattgctcctctgccaatctgttcaggtaggtgcttttaacatgggatcaacagtggtgatggtgttccaggctccagttaagaagactgttgattctttatctgaatttaagttctctgtcaaacgcggagataaaattcgtgttggagaagccttgggtgggtggcaggaacaatagctacaagccagaaaaacataaggaaaatgcatgcttagtttttttttttttttttgcatcatatatacacttttttgagaaaagcaaattcattaaaccatgtttttcattatagcacaaatcaatctcacttctcatatattattcatcagagtagatggtacgttcattaattgatttgcttgctgcaaattgtatcaattttgttccaagttccaagttttattgatgattgtccatcataaagaatgacctgtgcatttccactagtttgtacttgtagtacaaagtagaaagttactcaatcttatttattaatactcgtgctaagtttcgttagtatgcttattgagattaataaggaaaggaatcattgatgctcttaaattctcagtatttccataaactccaacttaaagtgtataaaaccaaagttctaattataatattcaatgctgaaacatcaaaaagattcaacatcccaaattatatcgagtttaatacaatcagccaacattcgaggacagcaaagtccttgtgtacattaacagagaaaacccaataatcttccctcaaaaacaaaaactcatttgtacgacaagcggcaactaagattttgtgactagaactctccttcttgccctcaatatgggtcatgtagccctttctaatcggttggcagcttattaaagctttcgggcagtcggtttttgcatactgctgacccattggaaaaaaccacggcagctcaggaggtcgtccgacatttttcttataacaaacttctttagcatgaaagcaacacagatatggcaggcattgggatcggcattatgccagccagtgtccatcttgtctattagtatatactagtaacaaatttagatattgatcactaagctcatggagtcactaaatataagtcctacataacagcattacacactacaaagtatactacgttcatgggattgctaagcttatgccaatagctaatttttgcatatttataccattacagagtatatagggaagcaaattctaaaacatatcaaacagcaaaattttcagacacctctaaattaaccacattctttcacttttgatgatagaaaaattcttttaaaagaacagagttcaatatagttaactgtagggtgtacgcatacattgcagtagaaattaaccaaaatggagaagaatctagagaaaggtatacccctcccctaacaaatgtatgtactgcaaaatcatttctaaatttaatcataatgaatgatcaagatagtaaagaaaacaaatcaagattgtcgtgatccaaaaagttacaagggaaaaatatattgacaaaaatgaatccacatataggcccctaaaacacaagcatgttatttctgtaaaagtgaattaaattcctgaacaaacccatatagcacaaatcgatgttccaatgcaaatttacattttgattacttcagtagagatccctcaaagcttttgtggtttccatcttctcaattgcctaaaaaaaacccagaaactgaatccaaatctctctctcaattctctataactctatatcaaaactttgctcctgtaaaaacccacaaaagatatcccaaaattagcttcatcccacttctaaaatctcccattaaaataaaaaattctccaatcaattacctatctacaatttaccaaagtgtttttcataataatagtaataaaagcaaagcacacctacgtctgtttggagtaagaggaggaagaagggacacgcttgttacgaaacatcatataaccgacgggtaatacaactccggcgatcatgatcgctgcaccgatgatgtacctgagcggactcggtggctcaacctctattatccccatcagctgcaaagtcaatgatcattacattaatcattccattagatctggatccaaacagctcaacacatacaccattatacacaggaaaaaggaaaataaaaaagaaaagagagagactagtgaaggaaggtgaccgtacgatggcgaaggagaatctgagtgggttaagaatgtctggggacggtgaggtttgggagggacgaatgagctctgcgactgcgagagtctaaggagagcagagaagtagaggatctcttgtatttggtactgtaagatcgataatgggacttcggatggataatcacaagcttacacgtggcgaacatcaaatggtgcttgcatttccttttcttttttcctctcataagtaagaagagtaaattgcacttcttcaccccattcatttagcattggtgctacgacttaatatcagtgagtttggtcggattttttttttatataaaaattcagaattcgattttcagtctgaattagtgcaattcgacagccgaccgaccaatccaaaacttgaattaaaactgactgttttaaatcttggtttgatcagattaaactaccttaaccgaactttttttttttttaaaaaaaaaaaacat

SEQ ID NO: 217939 - DNA, 12969 bp, Cannabis indica
aaaatagtaccttatataattatccaaaaaaaaaagtgtttgtcaattttttcatcttcataaaaatataatatcctcaaaactatattccttattccttctaaaatatatttatctttctaataagtcaatttttgcaaaaagatggtttttcttgaaaaaaaaaatattttatatgaaaaattcaaataatagttaaaaaaaaatatagggagaacaatattagggaactagttacaagtaacttgttaccttaaattgtttttattcatattttttatttttctcgtaaaatattttttttttttgtaaaaaaagtcatatttttgtaaactttgccaaaagaacataaaaataaaaagttcccttctgtaatttttaaatttcaattgtatgtgactagtgactaatgactatttatggtccaactccaagtcagcttacttggttcaagttttagatcatgctatttcttatgatgttgctccttggaataaattatggaagaataaggtgttggagcaccataagactttttggtggagcattctctccaatactcttctaattcgagctcttctagctaagagactgcagattaaagatttttttctctcctgtctgtaaggcgagtgaaaagacaatagagcacttttttctccattttaactttgcttttcacttgtggggatcttccccctagggtattatgtcggttattgaattaagtgctcgtgtttgggattggatcaaatttttattaggccttaagtcaaaggggatcaatgtagatgaggtattcctctatgcttttgtttacccaaaaagttgggtggatgacgtggatactatttttgacacatggcacgaaggaaacaacacctggggccctgctgccaaggataggacagtgttacatgcacattaagggcacccaattaagcatcaagatccaacaaagtcatttctaggtgttatccttcaataaataggtcataatgaccctaaaatgatgaaccatgaagttgaggatttcacgtggacatcttggggctcaactttcgtctagtacaaatactgagcacccaggctgacatcttgtgcgtcgtctcaaatcacttttagttcccaacaacttcctttaggcgatctgcttagccattgccctatgatacatgagagacatgtcccaatcaagtttcagagtttggagactagtctacaagaaacggcactcgggcactatgaagccctaataggcgcccaatttgatatttagttgatctaggcacactgcggctagggtttaggtttttggggatatctttggaccctaattcctcaaatccatcaaggaaacaatgtcaagacatgatatttcatcaatggaatcccgaaagagcccattcccaactatgggtgcctaggttgacatttcaacttgagcaccgatttcgtttcaccagtgacgcccgtgcaaatttgacgaagctgaaattcgttgagtacttttcaccaaaaagaagattgaacataaacgagataaattttagagatgttgccccccacctaggggtctagtgcatgccccccagccaatgagcacctagattgacgtattttaacttgaggcactccagtacacctttctggagaagtctcttgggcatttcccttattttctcccatgataaagataaaaagaaaaagaaaaaataaagaagaagatgaacaggagagaaaatgggaattagaatgaaaaataaagaaaaaaatctaatataagtaaaaatataaaagataaaacatgtaaaagagggttgttcaactttttatcatgatttttaataaaaaaaaattgtcacaaaagtgacatatatacataaaacatattattaaggtaaaatggaacaaattttttttagcaaaaatagttagtacacaatataaaacataagtaacaaaaatatagtaaatatgcgtgctacactaaaaataaaataaaaatggaaaacactgtacttacttaaatttccctatattattaagttttcaaaaatatatgcaatatgtattagtttggtttaatttctttaaaatatctatacaaatagatcttaatcgtatgaattaaattgaatttacgagtatttatgaacacccttaaatgaactaaattattctcagtatagatgtgtaaactctacttagttatttaaaaatgaaaaaataaaacattatgaagaaaaacaaacaattagatatcaagaatccttagggcacaccaatagggaaaaaaaatcaatgtgggtttgtcatatttcaagttgcctacaatgaaaattgttttatttaagtagatgaaattgtagaaaattatatttgtattataaggaaagttccatttttttccctaaagagaataatatgacaagcatgatgcatttgctgcagatgaaagaaataagtaacaaacacaatacaaacaatataaaactggtaaaattaaaatatgaagggcataacttgcatttgcaagatgaccagaatccagtttaactctagtcactggacgaagaagaattatacaataaacaatgtttatacagagcataaaacgtacaaaatttctcaagaacaaaactcaattggatgaaagataagcctactactgaaaatataattttaatttatacaggatgagctattattgatctccaagtatacacgaatgggaacacgccaggagcattctttagtctttacttctacatcatctccctatagttgccccaatttctcctgtcaaaccataattatatatgagagaagcataaaatgtaaagtacaacacattatgaagagtcctcaaaagatgaccatctaagattttgattatgagaagcaaaaaaatgaaatggggaagactaaagagggagaacaaggggaaagtgatacagaaagttgtacaactaagataacatgatcaagaaattaaatgaaagaaagttgtacagttaattacttatcattcatcaaaatcactagcaatcctgagaaaagggaaaatatacaagggaaatacctgaagcatctgcattaacttggggtgctgctccaaaagctggcagagtttgtctctgtcactcaataaagactgccaacaaaatgtgtaagtaatggggaagttataacaggggattctgatcaaacagaattgaagattttttagcatataaacaaattcaaaatacctgaatagcttcgggtgatttgaaaaactcctgtaatgacattgctggatcttgttgctgctgtgaagcagtatccataagtgggtttatcatttgtggatgagcatgttcaacttgatgctgcagctgcacatgagaaaagtcttgttgctgctgctgctgataaaatgtattcatatgagaagcctgttgtggttgctgtagcatctgtaaggaatgcatttgcatgtgaccaggactttgcaaagacacgccttggtccaactgctgtgaagcttgcataggtggcctaaggtggtggggaggctgcggaggacgttggagctgaggtggctgaagtggctgcaactgagaaagggaatgaattgactgaatggaagactgagtaatggagagattctgcaagacatttggtggattatcaacctgctgagttgggaagtttccatagagatttgcaggcattgaccctggcctactgaaacccaagtgtgacaaatggggagcaggtgcataggcatttgctctcgtccctgaagcagttgaagatgtcatctccatctggttgtgtgctaaaggttgggaggaagaatttttattagaagttatattatatggaccagatgagaaaggaggtggagtaggaggaagtggtggtggtggcctaacagatccaccgggagaagagatggaattcctcgagaacttggcatctatccctaatgatgcagaactgttgttaaacatgtactctgaatgaacctgcaaaataaagggatcaccaagttattacatagatgcgcataaactagctaaaggtagcaaatacagggaaacttattgaaaaataaaatcatgaaaagccctattttctcatacttggaaagatgatagagatggattctggacatcagtcaaagaattcataaatgaggatggttggcttgaaactagatcagaactctgagatatcacaggtgcaactgttggaggcggtggcattggaggcaagggaggttgacttagcagatacctctggtcataatgcccttgagaccctgtaggtacaggtacattcatagagggaaattgaatgttcttttgatgtaaattttgtggagtcaacctagtatccactggtaatggtgccaatgatggtgatgcatgactataaatagaaccaggaaacccaggattgtttgatgctaccacagaatcaaacccaccagaattcttgactgtaattgcatttttcatgtcatcagactgctccatatacttcttatccgaagtaacactctgttctctagttaatgacttttcaggacgcgaaatcgacatccttgaagaaaattcactctgtgtattttcatcaatgttagctgctaaaggtgtgcccaaacgagaaaattggctactctcatgaacatcactgtctgtctcttcaacaatagagtggggagaattttgctcgacaataagaggggagggctgctgcagattatcatctggctgaggaaagggtaatttgtcatcagtttcggactcctcgccatcaaaaactatatcaatcccatgaagatcatcatccagatctgtcttcaattgcttaggtttgctggacttctctgaagctatttcacccatggaagttgcattcttgacctgtgttgtatccactccgactactgcagacatgggattctggcgctccctctgtctagccataaattcatccacatgaattgaaggaggccttccaccagttgctcctactcgctgaacagcaatcacgttagaatttgtaaccccatcaacatttctttcccttgcaacatagtcatccacgtgcatggacggaggcctgctagtattcggtttgcgctgcctaaaagtatccctccgagtaggagctgaagaggtagtagatggcccaagtcctcgtgcaaatgcattttgagctgcattctcagctggagaattttctcctctagcacgcctatttgatccttctacagaaggcatttttcgtttggcagaaagtgttgtctgaggaaatctatcaggtaatgtttctggacattcccacagaaacttgtctccgagtccttggaaaagataatcttcagacctttcagcttcaccatctgacatcagatgggcttttgaagaaaacagatctgatgaaacccgaccactggaaattatgtcatttgctgttactgaaccagcagggttttgcagtattgacagcaacaattttgcagaatctaaaacctgtaaatagtcaataacatcatgaattaacagaaattataacaaaagaaataaacttataaacacaatttcaaataagtatgcctgataaaaagcagtttgaatatcgtagttggtcaaatattcatcatcttcaatctttgaactcaacagagatactaatttgtgtatgtaatttatctgttcttcaggagcaccatctgctccttcttttgtatcctgaatgccaaaaagaaacttcacagcaaccacctggtccttcaaactaagcaacgaaacaacatttagtttccaaatcaaacattgtaaacaactaaagaaaaattgaacaatctaaagtcccacatgagtcaacttcactccaagtcgacaaaaacaacctctagcaacagacgtatagcctttcagtaaagaattgtgatatgtgtacccaaatattacattagtgtcagctttatcaatcaatcacattcatctaaacaagggcccaatgtttaaaaaagagtagtttcatatcactgtgtaatgtttgagtgcatatttagggtgcacatatcattactctaaagcaattggaaaaaaaggaagcagaaagcaaagagcaaatacttgaaatagcattacagctaaatcaatgacatgctgaaaattatatggtgaataacatacacaatgaaaaataaaggggcagtaaagatgatgttcctgcagagaaacaactaaataaaggcatgaaaactaacctctccccatccatacaaaaggatgaagaacccaaacacaacgcattaatagactcaatggcataatctgaaaacccgtctttactatctatagattgtaacaacttcttccagcagcatagcaaagggggctgttttctccattcaaattcatcaacattgccataatctccattgtcatccctttcctgtgctctatgtgatccaatttcctcagttcgggatagaacacggttgaaaataacaactaaagtattttggcctacattgtcagaacccagttctttaaaaacagtaagacacgccaacaactcttttccaactggtagaacctgaaaaattaaaaataaaataatcacacgattttgacactgataacttttttccttttgatatgatgaaataaatagaattttttatccttacattcagtcaaagcaccaaaaaatagttattatcttacttgaatcccagaattttagtgttattattttatttttcgactactttttcttctttgattataaattataattgtcacaaacaaagggtcggtttggtagcattatcgcttagacaaacatttaatatgttggaataacatgaaattgttgtgtatttggtaatttataatttataatttaaaaagttgtgaattggaaaaacaaaagcatggcaattgataatctataatcaaagtatgaattaaatacaaaattattaaaataaatatcattttaatatatatctaataaaatataagcagcaaaaatacttttttaaacaaaataaaaaatatataatttttattattattaattttatatatatttatattggtttattcagatatttttatcatatatgataattttttttcaggcaataaataaataaatatatatattagcaatgaataatacatgttttttttcctagcatgaatgatgcatgttacagcaagtaaatatataaaatgattacagattctcttataagccataatttgaagttcggttgtgtagcttcaaattttagctttagctattatacttcttaaataagttgttacttaaataagtactgaacaatttatttgataattatattattaaaagaaaaagagagatttttctttttgataaattcaatcacaccaaacacgcaattagccaattaccaaaaccctatcatggaagagaaaattttcaataagcaacatttaacttttataaaagcttcatcaaattgggcccaaggatagttataaaagaaaatttagtaaatatagctaaaaaaatccttttggtatttttcctaaaaacttctcccaacagaacctaccatcccaaaacaaggtccaaaacaagttcaaacatagagaacgaaacattcttaagtacgcttcatagttcatatacagagataagcttgagtatatttcataaataaaaaacatgatgctgcagtattaaaagagaaacacatacacacaatctacttaaaaagaaaatatatattttaattttctcacaagttacaaacataaagttatagcatggaaaagaaaaacacagaactaaatgctacctgacagaatttgaggagatacgataagatcacagcacagtcctcagcactgatttcaaagccgtgcctaatgaaccaccaaagtattttaggaaatgcagagagagactaagaaagagaaagaaaagagagaaacagggatacttacaaatcatgttttccagcacggtgaacagatgttcgagaactacataataatgagaaggacttgaatacaggaacacaccagctaagaatagcaacccaccattagttgaactcgtagtgtctaaaacttagttttccatctgaatcaataacagttaaacaccttcccagcactcctagtaagcatctgaatgaaaccctcctttaacaaaaatgcctgaaagaagaaagcccatacttgaatctgtttctgatatagaagaaatgaaaaagaggtccaaacataaaaacaaaaaacatttaatcgacaagcctgcaatagataagaacctgggcatgtggatgttccaataggctggcaagaaaatcaagatatctgtaaacctgaaaagtgcatgaataaaacgtttaattctggaaaattagatatcaatatcaagattttagagttagaaagggaaaaaaaaagttaccttgaaactgtccatttcagatagagatgacacatcagagacatgctcgcttatccaggagaggataggttgaagaaggacagagcaagtttcaacctttaggcatccaatgcgtactataaaaacgcgtagcatgtcctgaatcactaccaattcctgtaagagaaacatcattcagtcatacagaacaatacaagcagataaattttcagaaacacctccccctagttgaataaaaggcaataatggtataatgtaaataaacaaataaaggaaataactcctaaggccaaagggtaagtcacatacagaaatagcataatgctggataatatgggcaattttgtcaagctgtggcatcaattgagcaagcaacttctccagatgcacaggctgaagataccaattgacctgcttttccttcctgggccccaataatgtaccaacagacaactttctaagggcactcaacaagggcaatccatttctccaaagccagaaacctccttcgggaaataaatcattctagcattgcaagagtgataaagaaagacattaaactaaactcaatgtttaagtgtgaagcttatagcagcttcagcatgcaaaatgcatagtttccacagcaataatcattagctgcagaaaatacaataatataacacatattcaaatggaccgatatagcagctaaacagacaaatatatgagtgcacaagcattactgctttttataattataaacagattattatctaaactctggtgctttcaaaaattgtttaaaataaaaaggatgctaactactgttttgtaaaaacaacttgcattacaatagactcactagttgctgctagttaagcttagcaagctgaacatttaacgtaatacaatttaaattttagctaaagcagtatctaaaccaaataaaagaaatagcataccaaaagacagagcaaactgcaggtttccttaggacccaaagccagcactgaagtagattgaacactagcaaggagggaatggaagagaccaggagtccaaccatatactggccaacaagcaagtgcagatgcaacaagatgacaaatagctccaaaaccaagcgcagaatcaggataagatgaggataagtccgctgcacatgctgctaattttggactgattacagaatccgatcagataagtataaaaaggaacattaaataatgtaggctgcaataaaataaaaaaggaagtattgccaacctaacttctcgatgcagtcgaagaagcgcattcattaatttggtatttctatgctgctcctcagcttcctataataaataatgaaacaactcaagattgagtgtaacggaagtgctcaacatgatataacaatacaatacaaatacacataaatgcactaaaagttttttccacaacatccaaaccagcggagtcagtgcttcaaaaatgaacaaagtgatcatttcactgtagatttaggttttaacttcaagaaccaaaatatgaaggaatagaaaatcaattatagactccggtccctactaacacccctagcccttccatgtaacttccctttcttaataaattcattcttctataattcataaggaaaaatacatacatttatgtatggcatgtacacacgccaacccaatttctcatcgctgttttacatttaacataatagaatgtttattcaaaaaaaaacataatagaatgtgaaattgctccactccaataagaaacaaattttctgaatacacaagtaacaattatattgacaattaacactaacacaataacaaaattcttaataccactcttctcatccaaacaaatcatatgaataacatgaaatcaattcaataaatatatatatatatatgcataaaaaactaataattaaaaaaaaaaaacctgtagtttctgcaagaggttgatcaacaacacaagggaaggaaccaaaagatcaattaaactctgttcacgataacgttctagtagtaaatctgacgtagaattgcattctgtgccatcatcaacaaggtaatctgtccaaggccaaaatatctcatttccataaatatattagatgacagccaaaaggacaatagtatctttagtaaacaactaaaaattgcacaaactagtaacataagacaaacataatatccagcaacaaaagatgtaaaacaattatacaagcaacggactacaaaatccatgtcccatgattaaaaataataataataattaaataggcaaaaacatttctcttctgattgttcttgtgagaagtgcttaactgtcatattcctgccgatacatgataataattatattttaaagaagaagaagaaaaacatgataagaagaagaactgtacaacataccataactgtttgatgacctttcaagcatgaacctacagttcaccagaagtgtgaatatgactgttatggcaccttcatcatacagagcagcagcaacagactatattcaaacaaaacattgtaagcagcatacaaaatcacaatcgtaaactagctgatagatacagttacatactgagttctctgaaatgaaagctaaaattcttatagctgttgttaactgtgctatagatgagtcacgaaggatcactccatcaaaagtcttctcagagacaatttttccaagattctccataacattaacatcagaaccactagaggaatctccaataatgttttctacatctgttagatctgacactactgtggttgttgaacttaagttggcatctcctccagaagctaagacagcagcataccgcaaaatcccaatacccccatttttatgatagattacaccagcatctatccattccaacagcctcgtaggagcatcttttcgattggatcctggagacgaggaatgcaatgctctatggagttctacagcaagtccaatccaagaaccaagagaagatgcagttgaatcagtaacaattacttcaaaaatctcagccgccgagtgaaatatggcaagatttagaggcaaagctcctgaatatccagaataacaagtaagtaaatgcataactaaaacggtgtgaacaagatatttcatcgaattccagactcaattagaggagttcattaccactaattttggcaactggatctggttcctttgcagaatgcagcgcttcaatcaaaattttcatagcctataaatgataaaaaataattgagattcaaaagtaaagaatgtaaccaaacatgactaaataaaaatgacaacacgatcatgaagactaatactgaagaaataccatattgctatcaaccatctaggccataaaaacatctattaaagtagattctacatcatgattactcgtgataaattgtaaccatgttaagaatagcaaaaactcttcaaagcataatacatatttgacaacatttcactaaaaaaaatacaaataagagttacttaatttacaggtaatcattaaattagtttacacagtgacataaaagaaaaaataaagaaacaaaaaaatatcataataatttgttcccctaatacaaaagaaccatttaaaataaacttcaagatggcatatacctctggaaagtatcccaaagccaacaaagcatgtcgtccacaatcagacctgtagacaataagaaatcacaatcatgaacattgtatagcattccaaaatcacattttaactaaatagtaccaccttgcaaaaccacatagctcccacaggacccataaaaactcttccgagtttggggatgatttcagcaaacgatctattgcattaacctgcataacaacacaataatctgatctctcagcaaccagttattagcaaaaaaaattttgaaaaagaaaaagaaatagcaggcataagcttggatgaagcaaagcactaaccaccctcaagtgcatcccaataatcatcccaacttcttgagaatcacacaagaatccatttgctattaaaacagatgcataacgcagaggaagacagacatccttattcacacccctagctccctttagagcatctattagagtcacacaatgatcaggttgttgtagcaagaaaatgagacctggatataataacgtatgttgagaatcacgagatcttagaaaaatcattaagtaaagagaaatgatgacagtgaagacctgaacgactaaagagaagcgaaataattatggcttcaatagaggatgcaatatccacgtatacatccatagcatgtcccacttctgaaggtaaagtagatgatgataacaatgcaattgatagaggtagaaagcccatgtcctgcttcaagaaaacatatatgtataaatatattaatatatatttgacggcataaagcatggtacaatttatttttaagaaaccacagaaaagaagaatataatgtccattaccataaatctgtgtgtgtgtgtgtg

SEQ ID NO: 217940 - DNA, 44495 bp, Cannabis indica
tttcctttttatgaacacggaatgatcagcattccttctctggaaacccatctatcttcgtcataaccaaacttcatatctcgaaccaagcccgaggagcgaagccactcgaacgaatgtgagaggagcgaaaggagaccatatatcgccttttttttttcacctgcccttcctccccctgagctcgaaaacctggtggaggtctccatgaagaaaggcctttttgacatcgagctgatgcagtgaccaagatctgttagctgcaactgacagaatgactcgtatggaattgagtttagtttggccacaggagcaaacgtctcgagataatcgatgccataggtttgtgtgaaacctttcgccacaatacgagccctctcgatagagccatcagctttgtgtttcagagtatatacccacctgcagccaaccgtccgtttgcctcttggtaacgtgatcagttcccaagtgtcgttcttctttagagcttccatttcttctatcatagctttcttccactgaagatgattgagggcttctttcaaattggaggttatcttatcgctgaaacgaaagctttaaaggaaggaagcttgataggacacaaagtgattaatagggtgagaagtccaaaatatcttttctttcctcaaggcaatacagatcagaaacaacagaaggaggaagatagatagtattgaaagacagatcgatcagatatctcttttaacgaattgcctgattgcgacagcttatcgagacttgttactagactaagcaaattccctagaagagagcttaaagagggctgaagtttaaggaaaagagaccatagaaaagaagtccggaactccagaacgaaggggatagattgaatactgaaatcgtgtttcactactgaaagacggaaattagtctatcgaatagaactatttatgagggtgtgcctatagtaaataattcatgaataaaacattcacacgttggtagggtttatagcaagacctgggaggagcatctgaaacacgtagagactgttctagaagctctgcgtgagcaccagcgcccatacggagttgtggaatttcaaccagatttggaggatgactgtgagccttcgaatcagatctattcggctttcgcaggtaggcagctttccagcccatctttatatgttcattttgattcaactcatgctaatttcgaatatcggaagattatccaccggataataaagctcaaatttgaactctcaacagcccccagacgaatgcaagcagaaaatgatcaaacatcgcaaggtagtttacttgcttacttgttagaggaaggtcttgaagagcctgacatcacggaaaagacaaagcagggaatagcttcaacggcgaaattcaaaagggagaatcaaaggttaagaagtagaggccttccatctctccccctcgcccggctcattctcaatcacgatagtggcctcttggaactttagggctttgaatgggcgagcttcgtaaagggctgtctcggacttcattaaatccaagaaaaagtatatatgattttgctccaggaaactcaagtcaaagaggacgtaatccatctgtaaaaaataaaaagaaaaattagaaaaagatgctggcagctgctatgttccttcgaaaagtagagatggtggctcttggattaataaaaaaaaaatatatatatatatatggctgtcccaactcacattggaacctagaccatcactatagaatacgctccctagaccacaacttggaatggatggctcataagtctatgctccagcatcagtttctcacaagcaagactattgagcttagattcatccataccgtttccaacctaccttggtgcattagtggaaagtaaaatgaatgccttatgcaatcaaatatgaaaggggttcttactggccgaaaataagagaatcggtattgaagatttcgcggatcacgttgctgattgtgattgggttgacctcccactctatggcgcttctttcacttggtctaacatgaggaaagggaaggaaatggaaatccgatgcagactggatcttttcctaatctactcagatggggaagaccttctgcaggacactattaaaaaagcagggaccacattcgcttccgatcatgacctcattcttcttttctttttcgaacaacttccctccacggtacccttctctttcgaactgatgtggttatccctatcgaaatctagaactaaaagttgtgaagcaaaaaaatgcaacattctattgacttgatataatatatttctctattagtaatacatcctcaaaagaggaaaagctccctaaccttaataataaaagaagggctaaagtaatacccttaagataaattcgatttctattgttatttttttttattatactgaagaatcaaacaagaacttctacatgttacccttcaaactggagaatgaatatcgatcattccctgtttgcgagtgagaagaaaaaggagggcctttaccaatcctttcgcgaagagatcggcaattgatcttcacttctaatggttggtgttctgatgatttcggcaatcaccttttccccgagaaaatgccctacctaagtaaggcgacttctacatgctttgttctctcatagaagaccgacttggaggctatgtggatagcattctgattctcacagaacatgtgtcatggggttctgtgaccgaaatcccaatttcagtcagaagagatcccacccatacaagttcactagttgttgatgccattgcattcggcttcaacataggatctagaccttattaagtattgcaaaagaaagggcctgcttttccagggaataaattatcctatatggttggtggattttctatcagagagaaagcctgcattaataccttccttcagctttcagaggtaggggctgcatctgaataggtcctaagttgcccggagcaaggatccttttgccaataaaagaatgccttttctagggctttatatacctgaggatcttttttagttcatcataatgtcacttctgcagagatagcataacatacattgacaaccaatcccagcggaagacatgttagtaggacgaaggataggttgatagatgaaacttccaacttatcttctgcccctctgttatcgaaaggaggatcatcaaggagatctcaattctctaaagagaacttgtgattttgcccccttttctagttgtaaggtcttgtccaccttagggttacaatgaaaattctcaaaattgcttataaagatggctatctttcttcaagtgagaaatcggatcgagaaagcatcgcccaaaggtgctcattgagccggtcaccgttggctaagaaccatttctcacttgtgatgtgaagccttcaaaaattccaatattttttttgtgttcagtgaggatatcgagattgggttagttttgagtcttagtatgagatgcccaagataaaaggaacgaggagaagaatcgacaaggattccatggacgaggaatccataacatataatcgtgaatcaaaaagaaagcgtgacgagaatttggttttttaagaaatgttagaaggtgcaaaattaatgggtgccggagctgctacaattgcttcagcgggagctgctatcggtattggaaacgtcttcagttctttaattcattccgtggcgcgaaatccatcattggctaaacaatcatttggttatgccattttgggctttgctctaaccgaagctattgcatcgtttgccccaatgatggcctttctgatctcatccgtattccgatcgaaggttgaagtgcagtttcataaagcctccttagtcagtctaagccgcgctgaagctttcacgaggaggattaaaaagacaagtgttaacccttggcgtgggtggacaaattccatcgtcgtaaggcgtaagggggaggccttggtcaatcaatggcagtgagttgattttccaagggagggggagtgggaagtgggccccctcacatcaggttttttcattgtagccggaggtctacaagccaacggagccagggcgtttccgccccccggatgtactcacgggcagcgtgaggaaccgggttaacaacgcgattagaagaaatgggagttcgccgggcctctcggaagtgttggttcaaatctagctcgcgaatcgaacactttggcagtaatggttgacgttgcttgctttgtgcgtacgattcttttattcaataaggattttcgtagcttcaggtgaggcgatcaacatttcttgaaattgggaaaaagtctcctacaagtgtggtctttctcggtcaactggaaattgtagaactgtagcagctctcgaaatcggtcggtaggtccttcctctatttcaagagttctagtacttgcattgcggtccgtccattagttcgatgattcttcttcgcctttaagtgttggcttgttcaatcaatctcataggttcctatggctcgtcctataggaaaggggatataccataaccatagggaagtcaaggaactataaataagctttttctgagcgtatatagtggtatagtccaacatgcgcaggagcaagaaaacggatgcgccttactaagcaagaaaggtatgaaatctttgttcgctaggctttcgcacctttacgtagtcttaatccacagcggacgttcaacaccttagcctctatagttcggctaagctatttcataaccttagtgtagtctcaatccatagttgatcgtaccttagcgtaaatgttgggcttcgttccgtagtttcatttattcaaaagaccctaattcattcaaatgcatctatatcagcatccacttcaaccgatttgggatgggttctcccgagtgcgaaactttttttatgaaatcactaatataggagaatgaacaagaacgatttagaatggtgtctaccttgattgaattttatacgagcatcaaatcaaacctgtcggctatttaatctctttctgatcctcgctataggaaatgaacccgcgagcggcccttctctaatcaagttgcgagcccccttagaagtagctttcttttctccttggaagtagcttccccagtcctatgacggtaagtaacagggagatagcatccttccttattcttcggattagtgggaggctggctttctggtgggaaatctttctcgactcacttgaatactgagttccatcccagaaagctctttgaaatcctttctagtctggaaagggaccgcgaatctagccaccactttctctatttaaagaaaaagaaagaggtccttgattgaggaagataactaaataccttcaaccgcgttcccttactatcaagggattaagccactatcaaggcaggaaagagacattagcatactagctatcacaaactagatgcttacagtcctttttcctctcccagtgcagtaagtaataaatacatctagaaagaagatattctctagcctagaggaaagagaacaactaggatgaaaggtattactaatcttgatatagtgacacaggatgatagaatgtcactaggataagcgtccggttagaaccatgggaagattagaatgacctcactaggaacctcattaaagatagatagctaccttagagagcttacacagtcaattgatctatcctaggttgaggaatccgggaagaaggctttcaagaagagattcgctcctaaggaggaaataagggactcatatcgaaagggagaactaacctatatctgagagcttgaactggcctttggacggaagataaatggcattagagccccgatcgatctaaaagattagaacaaccacaggaatgaggaaactcgtagagggatgttgattcgagcaggcagcaatacagcatcggcagctttctgacactcatactgccaatcagctattaccttctggctttctcttctagaaacggggcttgaaagagctaattcgttcttagctgtcctagcttcttagaaacaaactaaagggaactaccggacgatgttagataaaaagaagatcgacttattcaactacagccttccttgcttttgctctttcttacagcaactatacgacatgttattagatttaactattgatcaacattggattgggggatagagtttgcaaggctcatggcaggttcgatccctgtctatcccattgaagtgaaagtagtcaagttgactctaatcgcgtacgccgagcttcgatggattgttgtgttaagtcgctcttgtgagagatagggataacagagacaaggaaccaccgccccttcgggtagggcataggtggctacgtcggaaaaaccctggatctacaagactgacttcacgctctctagaagctcactgcagaggaaggtaaagttcttattcctagaacataaaatcaaagaaaataaagatattgttcaccgggaaataaatggacttccagagcggaagggaatacttaaccacgcctcgagtcccagtctcctagtggtgggatggtaaagggcaatgtccggttctggccaagagatgtctttgctccgtcccccttcttgttggttggcacaagcccttgtagtagtcagtctttcctccggccggatgttagagtaaattccattgttggtttgaccattaagtgaatgcaaatataggtagaatttgaatcaacgacctaagagtcttcttttgcctatcgtagttaccttgatgtgagaaatggtcctcctttgtttcaagatctgatatcgagaaactcctgctcatggtgaactgctcatatacatactaatatgatcgctaccaggtcatcccactacacaccatcaagcaactactactggaagctatcaactcgattctctctattgaacttttacctctgtttgctgggttcccgtgtagtccttctcatatagggggctcaatcagagctggtagaagccctcgcggcagggaagtagaactcacctttcataaagtaacgaaatctggtaggagtggatacaagactatgactatgttatgtctaaaaaaggaggaatgcagcaagaaagaatgcggtactaggaccggacatagtatctaaatgacaaaaggcgatatttgatccttcacttatggtcatccatcgggtctatctgtcgtctaactgtcctgtataggtccctaatcaatccctggtgcttttcttttggttgaacgtcctcgttcctaatctgccttcacctaatgcccgagcctctacctctcaaaagaaagaaggagtacgatatgtaaggcataaggagatggatgattcacctcaagagctatagggaaatgttgattgtgggctaagccgaaagcaagacgcagaagcgctccaggaacgtaggcccgggagaatacttcctttctccataggaatgggtgcactctgaattggtaggtgtcgtttttaaataatggctttgtgatccgcgagtataggttgaacttatgtcagggatattgggacaaaggggcactcagaaagtgttaaacactatatttcatttattaacgatcacctctcgggtgcggtagagtggacgattagcgaggactggttcagagctagagtcggctagcattcttttaatttaacttaataataggcacaagcttccgtcttgttggttcgaccaaaggcatcgggtaaatgggatccaggtaaatggcttactgttcggtcaacatttcatgattcgtaacagccggccgggactgaactaatttacgagagaaggttcaatggacctagggtagtgcttcgtatggtatgtatgagatgggggatcttcaacaaggtattcgccctatgacctttctttattctttattgcccccacctgacactatcgatacgggtcggcccttacttgcgcttgcgtagagctcgtaccaggccattgcacccgcgtacacccggtagggctataaaagacagatccgaaagggattgggattgctgtgggaaagaagcgaaatcgaactcctccttggctaaatccggaggggtccgatataatagaaaccggcgcacaatcgtccgttttttgactttttctttcatatcaggtatttgaaataggtttattccgcgccatccatctctttcccatcttactcaatcaacaggatccaattccctactatctcccccccgcaggcaggcgaggtccttgaccagaaagattgatagggaatgattggttggaaggggataagcatccgacctagagatgctttctagcttctggattcctgatttgtcacttccccggtcattcattctgcttgtccttccatcgagaaaagaagttgaaatccctgcgactgatggccgctccagcatccgatccaactcattcaactgcaggcagccattgcttcgttcccttagcgggaatccgattcgaaccattctcttgatggttcgagtgaatgccttatcggaaggacgattggcttcgagtgaaggccacccattgaagcagagatgtaaacccttgcggaagaattggagtgaaaggcaaaagagttgaccggtgcccccctggttccctacttgccggttatccattctcgctttcctttctttaactactggtctcgtgttccgtacctctcccttggcctgggaatgatagaagaaggtatggaaagaggaagatgttgagtaaagcgtgattgaatgatttaatttacggaagacacttttccccagaaaagccagatggatccatagttggagagagagaggtccctttcccggatccacggaacgaatggaacttctcgagatcttgacctctcgctccccttttccagatatccacattggaggggcggcttagcagcggcaatacgaagcactcgtccttccatgagcaattctataggacagacccagccattcagtattgatgtcgggaccgggatcagaaaggaggtccctaccggcggtaggagaaaccataaatccaggctcttcaagacctcccttctcgcttcattccttccgaagccaagctaagccactgagccatctattcaaatcattatttctccggtccggatcggaaggagccggccccgggccaagaaaaacctccctctccttccccttctttcgttcccttcagtcgagtgttgatgatcgggactaaagactttatggatgtcgggacagacaggggctagcagctaaaaggcttgtagtttgggggctggggaaaagccaaacagaaagaaaaggtacggaggaacagaaggtttaaaccttcccatagtaggctaaaccggaaagagagagtagtcgcgtcaccttcaagctctaagtcaagaagtcaagcagcaaagaccgctactaataagatagaaaagagctacctttttctcaccctcggtgaactttcctttaaagacagacagaagcgcatccaaccccgttcttttggcagcaagtcagattcccttctacgaggatatcctggaacgtgccacttacttttagggaagtcggtcttttttgcttacagggtcaaggaagagatgggccttgaacagggaactccaaaaaaaatcgatgattcttggctgggccactaaataaagagttttggttttctcctttttgggctaattcttgtgaaagcagcaaatccttctctaagtatggaagcagttagttaaggcctaccatccgatagttctttcgttacgccgacaagctaatagctcttccttgttttagttaccgctctgtgggaatctcatttattgatgagaccccttattctatgacaccagaatgaagttcatcccttggcttgtgtacgagcatttcattttttttgcccacggctgaactcgcttaatccgcatatctggaactctttgatttgaactactccgaatccggcgatgaactcacatttcgccctgggggactcttgcttctgtcttcctctttctggcatctggtggaaatgttatctcgatcgatcagtttcttctactctatgcctactaaaagcttaaccatgccctaccaccaagaacagattctcgccatcggaagaacttcttcttcaacaaaagaaatcgcagctcctagtccgacagttcgctccggatattgttggaaagagttccggcatactactctattatgataccgaacccttggggaacttcactactttgagagtagagttaggccttttattctgctgtgcctgggcatgagtagactgctttccttatctgtattctgtacattttcttgtctaagatagaaggtcttccctcatcacctgtcccatttgaaagttcttccaatagtcaatgagcaggaagaggtttaggaagttgagtcaagcaagaaaggcaagtccattgacttggctacgatagggctatgattcccatcgagaaagaagagtttacagctaccagcaccgattcgaactaataagaactacctcaccactacctattagtagtccttcctccaattgattcaatagaagggcttcttcctccaacaacggggctaatgccgactctgatctttcctttgcttctcttgagccgaatgtgggattgatcctttctatgggtgtgactaattcggccatttaacaaagaaagacggactctcctgcttgaactgatagctatttcgaatcaagcttgagaaaagataggcttttgccttgttcactcaaagttctttctgaaacagaatctaattccccgtactaacctaacccaccaagaccggagaagcaactggatcgattcctaacaaaagaaaggggaagcaaaaggcaaagcagaaccggggagaccttcagttccttcgctcccaactcttagaatagaaagaaagtcaaccaatgccttagccctgccttaaagcaacaagagagaagcccggtaaagcctaatccaagaatactgaatcctggacgggagaggcagctaacaagaggctagcagcccaactcaatagcagtggagtcgcgaaaagaccccatttcaagcgctgattcaatagcagtcttccaattagactgaataaatcttagtgtggttaagccggggccagggtcagaagttgttccatctccggggatcaggcggagcctctacgctttcttcctttgctacagctaccgggtattcattaaaaaagaatgcatttacctttctcccctgggaggagaacttgaatctagctaggcttgcagacctcgtaaggggtataactgtcagaggaaagcgcaacgaagaccctctttaagagagaaagctccccgccgctgaaagagaccgaagaaggttcaactagcgcttagagttcgggaagatagccgaaattagagcgaacgaaaaaaatctgaccaggcaaatcctttaggtccggtttcggtccatctatagaagatgcctttgcagcctccactggaaatcgggaattagctcaagcgaaggtctctcgagccttctctctaactcccttcttgagacaggattggcggtatgaagaaagagttggacgtagattattagcatcccgcccctagaacttaagaaagagcctttctttttgaggaataagaaaattattaccttaagaacagggctttcaaaagatctcaaatagggaagtagtccttgaataaatgaaccctatatccctctacttctccggaagcagctaattttcttcgtcttttaagggagttcagttcccagaggtcgaggatcaagaggtgagggaatccctgactgttgaacgaaagcttgaaggtgaaggaaagtcaggcaggttcggatttaggcagaattaaagtcaaaacaacaattatgactcgtcctcaagagtggacgtagttcagcttattagatagaaggagaagggagtacgcttagttaacgaagaaatcattttgcaataacagggaatagcaagaaaatgggttaagaaaagcaaagcacgggttcagaacaaaagaacagaggaagctctgatcggagaagactgatcactttcaataagacattgagcccataatctaatcccttgactaaggcattcgtgaaaactagaagaaattcacatatataagaaaatctctacggaagacatggaatagcccagcaagtagaaagcactaatgggtgactgaaagcgcttaggaaggacagattcactcttttcctgctaatccaatcttgattcaagtacaagcaatgatatgaatcacctgtgcgactaattcttgttttcactttcatttcgaattcaagaatgaattaaaaaaccctaagtaggaattgaacctacgaccagtcagttaagtactgacagctctaccgctgagctagttgggtggcttaaggcattgagttgctaaaatcgacatacaatcttcttctatcatgggttaacctccatagaagctacataaccatcgaggttatggtatcgaacgaaccaaacaaagaaaaaataagtccgaaactcccttccggaaaaggttcagtagatctaccaggttaccggaaatgaccaaaaagtctttaactgctaaccgagagtccttgcccatgcggggaatcttttaactgaactataagacatgaatttaaaggaaagaagagttatgatccgctcaatcttgtacctagtaagaaagtacaatccttggggacaatggtaagaacaatcataatcactatggcactcgcagaatccatctcaggtacaggcttaattgtaatttaagaatagacaaaagataatggaaggaaaatctttagggagattttacaactaaaaatgaggttgagttgctgagaataatggaggaagggtaagaaggaaaaaaagaagccgacctctctttcaagaatctaaaagaacctttgctttggcctttggcggatcccgacgtctggtttggttcccgatcatgcgtgtatttgcccatcacttgacttacgaactggtcgttcgcatatgtcactgatagctaagcggctagctctcgaatcgatagaccgccttctttctcagtcgatggggtgacattcctctcatttccgaatccaaaatgattcctggatttggctatctatcatcatcaagaggtttttattactttatttgtcatgtcacgacagttgctttccggtttgcatctctgcagcacaagcatctggtacaaagcattgcattcaacaatcactgttgtggcgtgaaagagttcgtcactggatcaacggatacattcaattcaccacggcggcattaatgagaaaagaagaagtaccacgatcatgaaggaatagctcgacccacccagatgtatactcaagttgattccgacttcgacgattgccgaatcaaaatgaaataaatacactagaatcttagctacgaaagcagatgcattgaataatcccataataaaaaaaggctagtccccgaaaatcccgttcctttgtcgttggggcttacaattcaccttgtgactcattccttcggtcgagcgttcttcggacgtcgatcaatctatcacaggccgctctgtcattgtctgatttctggttgtctgatcacagtcgaaattatgtatctacttatagtttttttgccccttctcggtagttccgtagcaggttttttcggacgttttctaggatcagaaggaaccgctataatgaccactacgtgcgtttcattctcttcgatcttatctctgattgctttttatgaagtcgcaccgggagctagtgcttgctatctaagaattgctccatggatctcatcggaaatgtttgatgcttcttggggcttctttggcgaccgtgaagtcaccgaatgaattgccgagtagatagatcagatccggacgcggctgttgctccgcggcgatacggactcgacccgctcctacccaccccggggcactatagcatgtcgggaataaggggggacatactggacgtaaccactcccttggttgggggctgtgccgccctgcctttcgatcgatacagagttgagtaggccgatcacgaacgctacgggtgtgggagcgatcctggtcagggaaggctaagacggcgcctcgcatatgggtagcaagagggcgcttatgccccgacggtggggccttatggggaagggcccagcccaatagggacagcacaccccccacttcaagcgcatctctgtatcgactgaatcactctaagagtctagtcggtggaaccggtgaaccacgcgagctggttagatgcgtggggcagagggctcgtagtacccccttttcttgatccagccttttcttcgcttcggtagtgaatcacctactaaaaaaagaggcaggcgcttttagccctatttgagactactaaggcaggcggcggactctttcatgttggaagggaagaaggggcctaagcacggcagatgccgtacacttgagtggcaaaggaaagcgagatcgtacctgtttttccaggcctgttcggacatacggttcccgcggaagatcaagttggtgagccgtgtgatgggaaaccttcccgcacggttcggagagcactgaattagaatgagaggttcaccaccacatcattgcatgcaaggggagctcgctcgattcgcaaattggtccgactcgtaattcacttctgactccgtgttcgatagcccgaccgtagtgatgttaattgtggttacatccataagtagcttggtccatctttattccatttcatatatgtccgaggatccgcatagccctcgatttatgtgttatttatccatttttactttttttatgccaatgttggtgactggagataactctcttcaattattcctgggatgggagggagtaggtcttgcttcatatttgttaattcatttctggtttacacgacttcaggcagataaagcagctacaaaagctatgcctgtcaatcgagtaggggattttggattagctcctgggatttcgggccgttttactctctttcaaacagtagacttttcaaccatttttgctcgtgctagtgcccccagaaattcttggatttcttgcaatatgagattgaatgccataactcttatttgtattttactttttattggtgctgttgggaaatctgcacagataggatcgcatacttggtcacccgatgctatggagggtcccactccagtatccgcttcgattcatgcagctactatggtaacagctggcgttttcatgatagcaaggtgctcccctttatttgaatacccacctacggctttgattgttattacttctgcaggagctacgacgtcattccttgcggcaaccactggaatattacagaacgatctaaagagggtcatagcttattcaacttgcagtcaattaggctatatgatctttgcttgcggcatctctaactattcggttagcgtctttcacttaatgaatcacgcgtttttcaaagcattactattcctgagtgcaggttcggtgattcatgccatgtcggatgagcaagatatgcggaagatgggggggcttgcctcctcgttcccttttacctatgccatgatgctcatgggcagcttatctctaattggatttccttttctaactggattttattccaaagatgtgatcttagagctcgcttacactaagtataccatcagtgggaactttgctttctggttgggaagtgtctctgtccttttcacttcttattactcttttcgttcactttttctaacatttctagtaccaactaattcattcgggcgagacatcttacgatgtcatgatgcgcccattcctatggccattccttcaatacttctggctctcgggagtctctttgtaggatacttggccaaagtgtgacccgttagcccataagtaagtactgtgacgaagcggctgttgctcacccgacacgatcgtacgaggtcacaattcacccaacacgatcatccggggtgaacaagaattggggatcggatgcgggcgaaattcccgccaatggctgagatgttcagtcgactccctccccctttgtgggggtccggacccctacgagtgagcagaaaagggaggaggaaagaggccctggcgaaccgtcataattagtgaacaagtgtaagctttgctgcccgacagtatggagtactgaccacaccgagggacaggccctgaagcgaaggacgggaacgagcggaatgaatgtgttccaatttctggccttgcaccgaccatctaatggaccatggactaaacggccactgcctgaaaggactatgtccaggggaccgccgccccccccacaaggtacatctcgcgcctatgggccgctataactatccaagaagacactcgaaactggagggataaacaaacccacccggtggactgccgagctacaagtcccacgacacaggagcgggattctctaaaaagccaaggtcgcgggtggccaagagggcccacttggagacttgggatctccgcaggaaatgcgaaggttgcttaaagccggccgataggcgaaagagaatcaactagttctgatctgagtaggcaactaatagggaatactctaaccctgggaaccggggcctggccatccttcgtttgcggtcgacgtttcggcaaagtttgtccgtcgacagctgaatgtttcgatctggttcgattcatggtcgcatctgcaaacgttttcccgtgggccgacgccccccccagtcctggcattgatctatatcacttcagaagaaacgatataaaagtacttaccttctccttggtgagtcgaagtggggttccgtcctcccttgccttgcgacctaggtattccttttctggtttcccagactttttgtaaaaaggccccagtcttccgtttttcagcttttaaaaaactcctgctcgagctactcggctaactctggttctttcgaagaagaccttgatttgaaaagagaaatcaacaccttgcttgatctattgaatgatcaaacaatttttctttgaatactcaaggggatttggaggaccagcgaggcgaggggaaagagcgatcgcaaatctcacgaatcaattcaagagtaaacgtatgcggtggctcctaaacgaactttctcctacatctgatcgcaaccaggtctggtcattttattaataggttggggcggaggggtaccttttcttttctctgtcccgctatacagggcttgattacagtttactctttttcttgcatttatgttgatttgcctatttcactttctggtgctgtgacttctgtaagccctccttcagatgaagcggctaaagcgtgagtctctactgctccgaaaactaaggattcagagaggtagacaggaaatggggtctcacagagtcctctagttccggcccaacttcctacttagttcctacggagacgatcttttttcctttccttgtggacatgactactatttagctgtgcttgattagtcctcgcatgactcttcttcacactgatttcaatccgattcgtcgactctattggccggatatcaataccttatactgatcatggaagctagtgtggccaatgcgtcagcaaactgattcttcgtcctcgacagagaatttaaggtaatccgtctgaactttaggctgatatcttccagatactgatggtagggaatgagcttctgatctttggttttccaatcaccagttgtctgaaagatgagttgtgacgaatctccgtatacatcaatctccttgattctcaagtcgagggcgcgcgcttctttgaagcgcctgtgatacaatacacgcagaatattctgcgatattgtttgtgcaaaagaacctcaacttgactttagaaagccttttttttggcgagctttaagatagcatgtagaaaggggctgctccaactccatttccgttttgatttactgcaccgtcaaagaacatttgccaatcatgaggagtttcgtcttcttcttcgcctaccgcaaatagaatagcttcgtccgtccccttactaataaaataaagctcatagtcaggcacgggatgggatgattgagtagatatttctgctattgcctgccccttgccttactcatttagggcttctgggtgacgtacacaatatcgaactctgagagtaacatctgccaccttgctgtacgtgagggctggcttttcaaagagatacttcagcgggtccatccttgcaatcagcatggtcgtatagttcaacatttagtggcgtaggcgttgcgaggcccatgtaagagcacaacaggtcttttctagaaccgtataccttgtctcataatcagtgaacttcttgctgagatagtatatggctctttccttcctacccgtttcatcgtgctgaccaaggacacaactcatggatgcttccattactgacagatacatcaggagaggtcgaccaggcgttggcggtaccaggatgggaggattgagtagatatttcttcactttgtcaaacgccttttggcaatcctcgttccttgtgtctatcttttctgaaaggcggggtattctttctgagcagtttaaagatcggctcacagatgggtgtgagctgggcaatgaacctgctgatgtattgtagcctgcctaaaaaagccctgatttctttctctgtctttggtaccggcatgccgataattgctttggcttttgcaggtcgacttcgatttctcttcggctgacaatgaacccgagtagcttacctgacgaagcacccaacctcctcccggctttatatgcttttgcggatgaagacgaagactgtatttccgcaatctgttaaacactttcttcaaattcaatatcttatcggcttccccaattatctctcctccttgtctatttgacttcccagctggattgaaaactggttgtaaaatgcctcaacatcaaaagctgcaaaggacactccactccaactgcttagggtaattcattccatgaggattaggaaaggcaagaaggggtttagcaagatagcattcatttcaagagatagagtttcagatgtggaactctttgccagaggatcttttctttgagatgctaagaatcgaggggtggcccgccttaacccgaatctcttcattcgtctttactaggatgtttctatctttattcgtgcagacttgcacttttgagcatagttttattctattatatttgatattttctggcagattaagattcaccaagccaagagtgactgagtagccaaacaaacttaaagatacgagaaaaaaggcgggtaaaacgatgataaagaaaataataaagaaagcatggatgtacagaaagagtccgaacccgacgaagtgacttctcgggctgcctacgtacctcccccgccaaggagcaagaaaccttccagtcgaataagttatgaggtatgaattcgcatccttttccctctttcttattcactgcgcctctatatccatcaatcttttgtctttgtggtttaaagtagcacttctaaacttttttagaagtgctactcgactgtcccttgcaaataactaagttctctttcctttatttccaatgtagctctttgatcattctcttttttcctataaagaattcgaattcccctatataggattatctttgtctaaccttcgtggttatttttaaacttgctgtcttctcgcataattcacttgatactttattgtttaggcaatagatgtagatttcgcaattttagttttcgcatatgtgtggcgcactgaacacatagtttccggaagttgtgtagaatgcgcgggggcgccttagtctggttaaaacttgaaatcggtttttgggttgaattattcagccaaataaagggctaagcccccgtttcttccaaaagacctgagtcaaggtaattacttaaagcgcatgaatagtttcaaagagaaaaaggctaggccatggctttatcatattaggacgggatcctgggataattaaatagaaagagtacccgaatcctccttcactcgtatacttcctgaatggagttgacttgtagagctaagctggtaagagacctaatcttgctgttgcattcgctttcttcacgagttagattcaaaaatgaagactaacaactattaagaacctgtacgatgattggctagaccccctatttaaatataggctctgtaagcttcttcttcctattcgaaaagttcacttacttaaatagctttatgactgaacagaaagactgaagatttgtgactttctttactgagacgagtggtcttcaaactctatcttaactcattctatatattccttatgggcgtactacttcccttcaacactcctttccactactagacttgcttaactagagaaagcgaaagatgaaaatagcaaaggaaagtatcagcccttgaatacgaaagtacgctagttgagataaagtgttaaattaaataagtcaaatccttccttactcctagggtgatttttcaagacctggctcgaatgaaggaatggaatagtgaaagtagcctgtctctgttttattttcggattccgaggatgagccggccgatcctaacatcatttatgaggagccggacgacgtttttattcctcagataaagatgtctccgacgctactctcccggcaagaaccactttttccattgttaattttttggcgggttcggtcaggagggacaaaagagagatgctttctatcagtcaaaagcggataccgcccccccatgctcccacggtccgctccccgaggaatagaaaggggggacctggggccagagcaagttgggttggggtatagagccgtaagcgcggtggggggtgacagaggacgtgctcgtacggttcaaagaagggtatgatcaactcgttgattgttgggaactttcactcctctatattcgaaatatgcctttctaggagcattacgatctgcagctcaaatggtcccttatgaagtctctattggtcttattcttattgtgcgccttgtgagcgcgtttggatccgcgaaggcaatcgctcggatgttcccctaacccaacccgggaacggaccggagggaaccgcagcatggggagtgtccgcgtctcgtcgcaaggctcatttttagttgtgggtcatagggcgggcagctttatctgatcaagggccggggcacaagggtcctggtactatccaggtgcgaagaaccccggaggtgactgcaatgagcagaaatctcactcaccggcctaaacgacgagcaaacactcgaacgtgagagcaagggatcacccaacgaatggacgagctccaaggagggagggaggcaagaaccatgctttcagagaagtggcggtccgaatcttatctgaactgcgagaataactgactaagccgtgccataagggtcattctccaaacgggacggggccaagcctttaggttttttaagtaggttgggtgacagatcggccataggagtactccgggatatacaccagggcaacaaatgtcgagcatacgacgatgccgcccgttttcttttcgtggaagtccccggcagaggaaagggctgtaggtgatggcgcgttccgcttcttatctagagagaggcgctgaaatcgttcctattgggtcgtgcgtggcagctggtatagatgaataaaggcgggccgcttgaacgggacctattctcttacaacataggcggcaaagctgaataggaaaggggccgagctgactgatgagtgcctttttagcctttagaaaaaggctatcatgtggagctaacatggctggctacatacaagtatagccaaatcaagatgagacgggacggagggtcagaggccgcagcgggactaccataggaaagcccgcccccgctagctaacatagaaagaattctattcccggaaagcaatagtctccatgtgaatctcttcccgacccggccaggccgaatcgggccaccccttgggatgggaatggcccagcccacatgcatcatttgatgaaagcactccagtcgcctcctcgaagtggcttgtcaaccacgctttccctccctcaaaacaatgctcctcaccaaaagcccttccttgggttggggcaacacagcaatgagtagttcgctccaggaccccaccccctcgagagcaggatgccggccgagatggagctgggagccaacctatactttcctggggcttgccttgccccaacatctaaataaaaggcgggcgccgaaaaggaaccagcccagcctcttcaagaaagctttgcttggtaggcgctgcctattcactcggacaatgctctgaacacgaaagtgtgcagttccgcccccttctcccatgctgagtcacaggcagcgcctcggaaagcacggacgagccacatgcagggaaacttgcacgtgtggttctggccggggaccccggtatactgtactaatatgtgtaggtccccgtaattcgagtgagattgtcatggcgcaaaagcagatatggtccggtattcccttgttccctgtattggttatgttcttcatttctcgtctagcagaaactaatcgagctccgtttgatctcccagaagcggaagctgaatcagtagcaggctataatgtagaatatgcgcgggatgcgatccttaatagtccactgttggcggaagccaatgtcccggggtcccggggactcattctgactgaaacaaggggtgggtctttaccaactttaaaatattcgattttagggaagccaaaaaacgtgagcgcccctacgcgagccttattgaaaaggccccttactatagaacaaagcaagggattgagctgcgtgttagcgcatccgctcgttagcgctttctatttttcaataaggacgtttaggctttactaataacatagaaagggcttttcttgcttgtttagtaaagtcacgcttttcattttgataggagtaggtgcttgctggggcagggcactcttcattcttcatttgaaactaatgaatgtcgggtcgggccttgttctcaaaaaaaaagggagttgggtaaagcaaactccctccttggacgagcacggggcttagtcaagtagaaccgggttgcgttgcttgatgctccgatcgaaaacaaatcagtggggccatgccggtacgactgaatatgcgttagaaaggtcaatcccttccctacgacaccaaaaaaaaaccgggccgaacttctccccgcccgcttccatagaacaatatcgtggcaacgtagacctaagtggtcatattggatccttgggaaccatcacaagtacggccggcctatatttaaacgagaatgccgtgtcgtccagcggagcctagaagaaggtgactcgcgcagccagctgactccttttcaatagaaaggaatagccaaatccacccagctggctggtcaatctcagagatcttatcggccggcaaaccggagacggacgacccggtcccgaccttaccagcaccggaggtgtactaatcaatgaacccccgaaacctactttcttttctgacaaaatcaaccaagcctaaccggtcacgacatgttgttgatattgattgagtttcagggactttcgctgactgaatccatccataaacctagacccccttcgtaaccaaagcgtcacgacaacatccaaaggtcacctttggattcttaagtaggggggcaagcaaggaggagcacgtaggaatgccgaccactacataagccactagtggctgagagaaagcgagcagcaccttgtataggttgggctccgcttgaagaagcgagcccccatcagagaaagccattgcgcgctagcctagctagctggcgtttttcagctggctgttatgttagttgtagcgcgccttccctccttctctcatttcggaaagatttagcagtattttcttatgatgacctggtcgagagagtacgatacatcggtgtaaaagattgagtgggatctgtgaggttggttatagtaaggcctggccggaaagtgttcttgcctctatcattagctcgggtagtccccgtttctggtgtttcagtcacctttcaatggctcccttaattatgtgcgaggagttgccctcttgagtaatgggaagcgggctagtccccgaaaatgcccgttcgcttgtcgttggggagaaaaatctgacttgctcttgtttaccttactagtagccgtactgttttccgaatgattgatataaacatgccccactctatgttgggcgtaccctatagttagttgtccttcctttcctgaactattcaaaccttgtttatgggcccgggaaggcgttccttatgattacaatgagttcttttctatctcttagcaacactataagcaaatcaaggtgcaaacgattcagcgcaaacaagctcttctttcacccccttttagccagcctattggacctagcaaggaaagcaggaaagtaagaaagaaagaagggaatcaggtaatcctactgctactaagctgctactaagtaagactactctgtcttagggttaggagttaaagcgcggcgtaacgggggttgtcagcgtaacagctggtgctcagagataagctgtctgataggaactgcacttctacttgatttattctatgctattcccccctctctcacccaagtcctagaagtgaatgaggaatgattgaacttctgcttccgcactgagacgctaaagcccttaaatcaaggaaatcccaatgcttctttcagtagttcaatccgcctttcttaccccggatcccgctcaacatgagccgaagagaagtgcatgaaatggtagagctaccattggtcaacaagttgcgtagacttcagccccactttgctttcacgattttaccttgacattccataaatgaattcatctttcgctttgcactgaccccattcctaaagtccgtggtcttcgatcataaactatctctccctctcgataaagtaagatcctcgaacctaaaatctcccacccattgcagcgttggaggccttccggacgctagctttaaagcctaacctatcaaaagtggaaggtcagaagccagagaacgttgtcgagagagagcgtaggatggaaatgggagagagaatcgagattaaaggtatagatcagatcgagcccgagatgcggatcatgagcacaataaaataaagagcagccaagatatgaaatggatatgcaatgagggagcgctagccccaagggtaaaaaaaagtatagctacccgagctgtcatgagttcctaaactttatgaaaaaatcgcctaaactcaaaaacggagtggatctgagcccccctcttaaggggtggggggccgaggcaggtaagaaaggtatgaaagccaaactactttcaattaagggcaagcgggactcaaacccagcaagcaacggacctgccaagaaacggggcagtgcgcttgtgcgagccagcaccccttttgactacaatacaactaactatatatacacaattgtggttcgtgcgtcggtacttttctgtactccttgcgagctctaacctgttttacctcttttatatggtgcaataagcctctttctagatgtctatattctctatacaaaaaaaacccttaattcatgactttcactctttcttgttggtggtcttccaagccttcggaagctacagaacttggagatccctggaccttacttaataaaataggatttcgaatacgaagctttagcgccgaaagatcttacgtttttcagtcggggtccggcttttaggtggattgcctactttgatacaaattattaagggattcagtccggtcccactaacggaacaagaacacattagcgtatgaaactgagctgaaagcgcgagtacacgatctcaaaagcggcaagttcacgttccgcttcctcaatctcgaactctggcttttgggatgagctccccttaccatacagtaacacttgtagaggaagggcttgcccttgttgctatgtgcccgacccaccgcttagaaaaaaatttcaagcataaaatctgacgttttctcggtataggccattgagtgagtggaagggctttcctatttggctgaaaaagcctgttcgttatccatattgatttccacccgccaccccccccttggctttggctttaagcttcatccgccgcagatgaagtagatgaggcaagggccgtggtgtgcgctgacggatcatgtaattgcgtatatgacgattgatgtgagattttttagttccattgtccggtctctcaaaggaagaaagatgggaatgtcaaacaaaggaatcgaaagatgagtagttcctttgatgaggggcccctggtcagggagagcaaataggagtagttgattcagactaccacgtgctggtattgttacgactcacttgagacattccatctttatacgtggccgggctgctactagtaggcttcgccgctacgggaatttccttgaggaagaaagaaaggcagtgacctctgtttcagtcgacatccgctatggtgaccgagccagtgccagttgactcaggatcgacgaatcccacaggaactatctcagagacagctacttcgacttctctaccttcagttccaccaggtttgttttgccgcctccgggccggcgacaaccaccgaacaggctctcctacggatgtcatgaactacctgcgaggtatgaatggcaagattgagaatattgttactgagatgcagtcgattagaacgaccgtgaccactcgcggttggacaatcttgaagtgttgcaaggacctccagcggctttttaaagttggctgcaggctccaccttcgaaggcgacagggccttcactacaaccaggagttccggtccattccgtagctccgacatcccaacacgctgagggttcctcttcaaaggtttaccctaaacctataatctaagtcaaaaatgggaagagcacaactccctttggacatcatctgctccggcgaaagcagtttgatcatctatggcagaaaccgactcagcaaccaaagttatggaaaaagatccagcaagggcagatcctttagacgattataaggggggtaggtgattcggctacatcaactactcaagcatcttaagtggtaacatatggtccagcaacggaaaccgatgacgtgatataaattttctcgcctaaagtctccggttccggtctccaacagtggaaatttaaacgaaggtaatctttttcgaataggagctagcagcactcgatgaaatgaaaggagttctaagtcaacgacagaagtttgattatatatcatcgtccgcagcggaaattggatcatctaaagtacccgatggggtgtgaaaagcctagttattgtaaaagcccccactcaaggggaaggaaagacagatcagtaccacccctctcttcctattctaaaaaactcttggcttaacaaacattcttgtcccgcacgaagcatatgaaattggagatcaaaaaaggtatggcggttgggcctcttattcattcagagatggtccttactcagcgggactcaagacaaagaagtggggaagagggtctgggggaaagatctgtactacttggggtattcgtactctccatttaaggaggggtctcccgtgtgacctcggtcacaaaggcaaaggactcaaacctctttttccacaacaggagctgtatcagagactgagtaagttatagcagtctctgtttcatgaagtgtcagcgcgaactcttgttcatcctctgactcagcaagggaacggaaagcaattcaatggcaacttgaagcagaattccgtatttataaattcaagaatctctggcctcctggcaaagatccttcctcgaaatcttttatctcttctcttcgacccccactttttaagttagggatcgggtaacctattaaggtctctcgagcctctttccacattcttatagaaaactctcctctagactaggatttcccctggctaagagaaaagggcttagaaagctatagaaaagcctctaaaccccttcttagataaaggataaagagaagacgaagaagtcatagtcggctctaagagtagagtacagctactcttcttattctcttaaatgaaaggggatttagttctgctagaacaatcgaatgcttatcctagatatagagcccaatgagacgaaattcacttttttaagtaaagtactttccctgtggtaagaaagaattggctaaaattcacatagaaccgatgtggacaagtccaattgtagatcatgctttgacttcaacccgattcctcaaccaatagaataggctttcgggcgatgaatcttggcttggttttccactctattaagaggttcccatcgagaaatttagatgatccaatttaagaagaacttccccctgggtctttctaaacctggaggaagttaatcagaagaggttcttcaaaaagggattgacctaaggcaaagttgacttatcctggaggaaggtgtctccggaagagaatacgctgatgccgcaaatccggtgttatagaatctgctgctcttggtcttgttggaatatccgttgttggaggaagaacaattaaatcagaataagctgttaatgaatttcctgaagcaagggaagctttagcttgtgcacaattgaaagaaaagggcgcgacgcgaaaaggcctctttcaaataggggaatgggaaagtttgggcgctggcaacgaatcatttacgagaatccccccgatctaaatccttctgtcgtatgagaggccacagcctagatgaatgcaaagccaaacctgttctaaataaaggcaaagaacctttgcaggaggatactatgaaccctaatggagccaaggagaaaccagttgcaggccagggtgagacttcgaaagctgctgagagtgtaaagccagtcacacgaacagatcgaaacaaaaaatcaagaacagcgtgggattgggaggttttcggttgcgcctagtctggatgaccatgaagtgcaacgagttaatgctgctacgaatgaggaacaagccctttttcttgataataataatcagaatggcgagatggctggtgatgttgaatccttggtattaacacaggtatccaattctaaggtgaaagctagtgtgcccgtgcctgatgcaagggtagagaaggaagatacaaacggaagtttgaatgaaaaaaaagctcttgaacctgagaattctggtgcatgtgataatagagcgcaggagaatgtagatcaattggatctcaacaaggcgatcagatatagagagttgaacagcttaaccatgtcagatgcaggcaagcgtattaactctaaaactgtgatggatacgttccagttgatatcgactgcacccctcaaacgtgtagatgatgtgaactctcgggaggaagcggttgaaaagccgaaaagattcaataatgaactacaggccagaccagatttgagaagattataaacaatactagctgctactgaaaatgagtcggcacaaactcttatcgaacatcagccattgaaaaaggtaagtgactctgaatcttctgagaatgagaaggctattgaatctgttagacctaaagtcactaaaactcaaaaaaagaatagtgacttgccccctggaggtcttactaggtccaagaaaaggaccatggatggttcttcttcgttccaaaatgccctatgaaacattccattgtatggaatataaggaatattaaaaccaagcgtccgccaccttaagaagttaatcaaggattatcggattagttttcttgcagttcttgagccaatgattagttttgctaaaaaaagatcggcaggaaattgaagcttgctaatgttaaaaaagggtggtctacgatcagggaatgcctttattgttaaagagaattggccgtagagagagcgcctatctctcataagagaagaagagctaccatttgaaagtatatgagtaggactgaaattccaagcgctcctagctcagaaaccacacacagacaaacacatggaggcccagtccaactcataaatcatagactaacaaatatacgtgacatacacaacctgcgtgaagttttcatcttaatcaatcaaagcactttgtaaaatgctactttaatttctgcaacaagtaacagcagtttcttatcatacactcttattctttgaatgaatgaatcaacaaaattagactcctaaactagccttctctgtatcttcaaagacagaagtacacatcacaggaaaaacaaacccaaaaacagaagcagaagaggaaatactggtagatggctagcagattagcagcaaagtaagcaactagttccttttggcacaacagggtaacagggtaagtggtcaactctatctcattctctctctgagtatcttcataccaacatacctgccaaaacaaaccaacaaattatcaacccctctcacagtcatcaatcctgcaacactcaagcattcagataacaacaaacacttaccgtccaagcatcaaaagagtagcctgggtgagttataacaacctggtgatacagtgaatatcgaaccatcaacaactcggagagcatcaatcccaataaccctgaaattgcgatcaactaccttgcccacaaggcatccaccatggtagtgccatatagtactcactgtgcgacggcaaaactctcccatcagccgatcatttgattgatcaacgggctatgcgggccccacgtatctgaaatctcggcccccaaaccattccctgaatttgaaatcctccatggaacggctcctcagtacatcaccgatcttgcgggtgccattcacacaccgctccacatcacccggattactaaagtagttgaaccggacaattgggttaaccctgacatccgtagatgccaaccgcagtgaacccgcggagagtggcccagtaatcttttccatcagggtggccacagtgagatacagtggtgaagctgggttccgaatgaaaacagagcgagcaggggaggcaaaaggtatgacattggaagctgcttcaaggtaagcccctgaattggttatgcccacgacttgtatcagagagtgctccaatggcattgggggcacaattgagatgccatttcggggattatcatagaggaactgtccgacataaggcaagtgatgagccacaggaattccccacgatgagaggtacggcctcggtccaatgccactcagaagcagaagctgtgggcttccgagagccccagcacagagcatcacctctcccttttcacgcaccattgcatggtggtatcgccctgtttggtcgcgaaaaacaaccccaattgccgattgcttcgatccagaataaggcgaagaagaggctaaaagaattctttcaacacttgcatagacagccactcgaatattcgaagctttcgcatagctgaggagatcagcagcactgtgtctacgaccagaactgtcgaatgtcgaaccaccaatcttggtacccactgaatgatccaaagtaaacccattatagggatcaacaccggcttccaatagcccgtctctgactgccgattgccaattctggagctccggcctaaagacgatagccctctcaacccactcataggactggttcacactcggaggtcccaattcacccctgaccttccgtagaattattgatcggctcgactatagaacccggcattgatagcactactgccgccaagaacccgccctcgggcattagggacgccgtcttcggaggttcggcttgcttctcccccaccttttagcgttctgggtccctgaaaaaagaaataaaccagaaataaaaaagaaagaagagaaattgggccatgtttcccgggggagggttttttaggcaggccagcagtcttctacttctagtcgactgctctatgacgggcttccctgtttcctgggctctactcgctcgtctacgctccgacccagcaagtaataattgaaaaacgacgtttccttgaatgcattaagatttaaaacttgtcgtcaaaaaaaaggcaatcaatcagaatcaagaaaaaaaaatggaaatagtgaatcaagatctagatggatccctatctttatctctatccacggggatacccggaaagaaatctatctatgaatcgatctagactatcctctatccggatagatatgtccctatgagcgactacgccgatctttatatgttttggccacgtccgtttccgctccgaagaagaaggtttagatctttcaatcttatgtcgtgagggatgtgacctatgttaggtccataagataccacagcttttagtgttctatgattcacctccgaataatgagtaggtagttcaatccttttgattcttctcttcttagtaaactgatggggggatgcggagaaataggtcgaattactatataaatcagagttgtcacctataggactgcttgttggataaggaagatttcggtttttctcgttccttctcttcgataagaatagggatttgaaatgatacaaattcctcttcattctgttgtgctccgcgaaggaactgcctaagcatactttttcggatccaaacttctttgttctttctaagtcttcttcttgcatagaagaacgcaactgttgcaaaaaccgggattttagtagtaggcggcatcccctcttagttttgagtaggtggaaccattctgttttggttcttctccacattcttaccgggtgattcaggaattttcctatgattttttcaactgaaatttctttatagaaagatctccttatttcttcaccgcggattctcgcgtcattttcttgaaaagatattagatcaccgtgggaaactttcaaatgagttatgcttaccattccattattcacacaaacccttcgatgacttatcggctgccttgcttgaggaatagtttcacaaaaatggagacgaaccggaataacgtccgatcttgtttctggattgagtggaaaagggatataggaagtttgttctgttcctctgtgcatctctgtgatgggtaaatccccatgaaaaaggggcaactttcgtgtagtttgtgattggatgtaactgttaagattttttctcggataaatctttctcttaatagatctcatcttgttcctcaatcttcggagaatgcggcgttgtattattgtaagttctctgttccgaacatttcctgaaagtagacgacaagttttaaatcttaatgcaggcaaggcatatctcgttgaatcagtctagttcgccacaaaggggctatgggattcgaacccaaatattccagccaggacaggacccctcacgaatagaataaatgacgactttcaaacacgagccgttccccatttcagacgacggtggacttacttcgttcttgaacctgcgactgatagctcaagctcgccaatcaataagagacggctctctctggctagttaacgaatttcaagtgatcgatcggattcgactttgccagacggagaccggcttgaccctaaggtggaaagctctttgggcgctggtttttcgattctctctttcctctcttgaagataaccacttatttacgcaataatgattgagtgattttttctgggtaagacgcccgagcaagagcaaagagaatccttctcaggtctctctcccgacggcagcagttcaaaaaaattatccatctgaggttgaaaccaaaggatttaaaggccaggttgatcagtgaatgaagaaggctcatgcccgtccatctcttgcatttggggtttccagaggcaagcaaaagactaaaagcaagggatgtaaggaaccttcttggagacctgctttatttaatctaaaatcagtcgtctctcaaaagattgattcttggatagcttgttctgaacttccctataggttttgcagaggcaggagagggtcgagatcagatctacgggatttgctgcccccttgaaatgggaatagcccttactgtggatatcttctactgatgagaaagatcaaagctagcataataaagtattcaaaaagaaatggcatggcgcacatcttctgttcgagaatctatcccctttcttaccagaagtgatataaaagaatatctctattaaataaaggaatattggaggggatatttagctaaaggtgcggagcgaagtctgcatttattgctagttcttctaccagtctcggaataagccttttaaactaaactgccgattcgcacctttactctctgtctcaatcgagccggtcagatcaatagagatttcaggcacgaagaggctccaataaggataagataaggctcttcaagaccttactctaacaagtaagcaagtaaactaccttgccttttgaaagaaaagaagaaggtaggaaaaaaatacgggctttcctttgttcgagaatcccctgcagtagaagaggaggcatgccatagtttaagaaggggacagagatcctaactagggctattcttcgtggactaggctttcgtttttccttttccggggccccgcttgcagggtatccgctctttgctcgcttcgtacacccagagctactcgctgcgttatcgctccgttcactccctctggggattctatctcgtctcatcggtcattgaaggaaaactatcgatataagcatgagaaacagcaaattcaacttaagacgttgatggtattgtttacaagtttatggaaaataaaagcattatcaacagcaaatgccagacacctgtaattaaccgcagagacggtggaaggtgaagaggtcgagtcagaggtaacggttgaacgctaagtctcaactcttagattctttttaaggcggacagaaatctgcatgttatgcacccaatagtatcagcatacattaaagtgaaaagtggtgatttgaagcttgatacacaggcaatgaaacaatgcattgaatttgactgaagcaggtaacatgttttttaggtgttctcctgtatagtgagtctagtgcttcgcttgatggaagcacagggaaaaaaaggatccgtgttggcgcactaccaaatgccctaagaccttattgtcccttcaccccaaaagcctgcctacttagccgtgtcccactcccattctcttcctcgttagaaagccgttcggttggcgtacttctgtatagacccaccactcaactagtcttttcgacctcttcaacgtatttaagtatccttcttctcttccgcttttctagctgattgaagcagggatagcctccacgtaactaacacggccgtcttgagcaaaacgaactcagccctaccaaatccgtcgaatggtttcactcctcttttcccccttctgtcagttccttgtcagtcagtcgactcccgtccctcaaaagattgtcgaacttcacggttattcatcgatagatgggtaatccccggcggtcagagaagaaaacatctctatgaaagcaggaggtgttaaacattagtctgtcttcaaatgcgggaaggttagacgttcagttcgatgagggcaggttccgtagcattagaagcttaagtatccggaaagaaggaggaatgaggatgtagaaaagaagagttggtcttagacgttatcttagctgtttaaataaagcagcggctaggcctctgtccccggattcactgattcaagggttttttagatgggatggacagaagagtttgaagcagtacggaagagtttgaacgggcgagtgactttagagttccactggttccaaaggctaaaagccggaatagtggatccagtagttctaaatatagatagaagaatcccgaatgaacaaccatccacaaatgtcgattcattcaagcaagagagtgcaaaatcctttcctttgacactggtcccgtaaacgagtgaaaaatgccttgtttttcttttccctttcagccagtccaagagttcactcgaaagcggctgttagatatttggtttgaaccggttccgccccaccccttatagtaagtactggtgagagggaaagagcgcttctgccctttacccaaacagtacaagaatggcaatccacctattggtgtgctgctgccctcaaccgacctgatcgtcccaatccggttgtcctcactaaaaacagatccacaatctcttatctaatgaatatgaatttgttatctaatcttcgtttgcctagctgcccattgctagaacttccagcgctaaggtggttggtgtggtaaggcaagcaactacgcaaacgggggatgctgacggtacggaacaagcaacaagggctttcgcctccaccactttcgctggtttggaacccccttcccaactagaggagtctcgcttatcgtagtatgctcgctcatcccgaatttccgtttcattacgtgtagtcagttcagtaaggttcgttttcttgtactgaacacttttcaaatctttaaattaacgaaatggttcaaaccccgtctgctattttctatcgtatagcggatccgacccatttttagagtgagcagatggatctcggttagtgatttcgctcgccaactggctcccttttcaagggaattgcgccgtcggttcatctcttacttacaatcaatattttttttcctttttctttccgtttagtaaagacttctaagcttgttctattcccgttgctactgccttttactagcttcccaggcgtccttaattaaggtaataaaagagaaggacaaaagagcatggattagatgaagctaagggcatggttgttccagtaatccaatatgtatgctggcgaagagctgagaatagatagaatgtcttcctgggtttcaagaagaaagagtgcagaagcataagcccttgaatggactctagccctatgaaggttagttacttggtttcctctcttttttattttctgatgaggtactttaaagacctagctatacttccttttcttgtatgcaaggctactataaggtgtctatctagaaagagaagcacaaggctgcattgaagcgcttttttttgaagtttatagaatgtaaggaaagaaaagactagattaggttgctgctgttgtttttcgtaactagatgcgactacggtaggttccgaaatgagataccttaaaatttataaccctgtggttttataactagatagaatgcataataaaaaggagaatcttagctaagggaacgggggctttgtgggatctcatctccccccagtaagaagaatccacctatcttaggtgtaggactaagcatgatttccttacagcgctggaagctctctaaagtggctatctatcttaaatgtatggtttttgataggtcttaacttttccctgaggggctctcttaatcctttcaacgagagtgtgtatatcttcatatatatggtcggcttctttttttcctttaagcttaggatagttgttcctttctgtgattccttgctaaggttaggactagcctacttccatagggttctctttcctcttttctactccacgagcgtttaagggtaaattcctatattgttaggaccttcctatctagtgttttaattatttgtatcctctcttattcttcctttcgggccggtatctttcagatttgaagcgaggatctgaaagagaaggtaacagcaaccttttatcttattccttcgtgccctacacccgtaggtcacttctctcccttcagagagggttaacaggcttattaatgcaaggagaaccttgattcaggtagctctatcttgctccggttggttctgttcagtaatcaactacctggggcaagtggctcctgtcggtttagagaaagcaaggaaaggtaagaatagattagatcgatcaagacaggtagctatgtagttagttgttcctatccgcctagtgggctatggaactaagagaatagatagagcggtaacctcaaccgatatatccgcttttgttatccgcactccgcttattgatctttgagttccctctttctttatgggtcctcccaggcggttagatcaagataagacagataagaatgttattaaatggttgtcttcttctttcctttggtagtaggtatgggttctttttggaatggtttaccttgggcatggagctagcaaataaagtatgtctgctatcgaatagggtaggcaggatcgaagagaagtccctcttattgtgagtttatgttgacccgtttttcttttctttgctgattcctctcaatgaaatttgccgtgttgcactaacaaagatccactctagaaacccatgaagattcataagaataggaagagaacctaaatagaatagaggcagaagatagtgagtctttctcatcctgcttccacctctcgggaatagatcattcttgatttgaaaagaaggatgatgactcatcggaatcctagagcattcatgtagcatggatttcttctgcggagaagctgtagaggatgggcagcgaaaaagacctaagcctgagggattttagagaagaagaagaatatgaaattccactgttggaccgtggttgagaaagaaaggaaagctggcgcaggccaggggattgaacagagggggcagctctttgttctcttcccttcgacctctgctttgatatcctcatctctggtaacggagatcctcttcttactggtttctctcctctttttagcagcaggaagattatgaacaggctctgaccactgctccgtgggcttctccccggccgctcaagcaagacctccgaatcatagaggaggtagaaaacgagatgaatatcagagttgcccgccacgctcgattaggaaagcgccactcgtagtatgttgacgctatccatccttccaatgctacgtgttggttaatcaaagcttatattcatttcttaggccccaagccgagctctcccacgttccgaacatgagacttctggaactcgacgccccatcgttcgtacccggccacggctctcaccttgattcccctttggttgatgaaggcgaagttgattcccatatccttaaaaaaaaggcgctttatcttcgacgttctattctactgtttgttctatatggattttaaatggtcaaaggcctaatagatttcattcaaagcattcataggttctcacggaactcaccttgtgctgctttccctctcttggagtggagctctcagttgatgagaactggccttgtgctttcgctccatctcccgtgacatacctttgtcttgaacctgttgtcttttaccaactccccttataaaactactagtgggtcagcgggtctctcgtctatggaatggccagcacctacacccgattcctaaactccagctcctgctcatgaaagtgaagatttggatgtccacccggctgaaggatccaatagtgaattcttcttttctttactcaatgctgaagctggttctgaaggatcaaataggtcatggcttggggagtcattgaaaccaagactttcggtttagtgtatattaaaaagaacagaggaaggatatattatatatagtagagtattcggcctaactcacaggcggagataaaggctattaaatagtcgcctaagcagacgatggacgagactctggaagagtggctttctgctgaggttgcttctgacgggcttgtgaccaactcggtaaaaacccctagtgaaaacgatgtctgtatgtataaccgccgcttcaaatcaattgaatcaatgcaagcaatgctgttcccacatgcctattcattcctatttggttggattcctcggttcatgttatgccttagatggaatagctgtttttctagctattagtttccttcattcaggtatggtggcagggaatacgaagttcgagtaggctttttgagaaggtgaacgacaaatccgagtgatcgaaggttcaagtactgagcgaatattcaaacgtctattcatgtgagaacttcttgcgcctttggttgacaccaccttagccttagtcagtaagggagggaggtgactattagatagggactctgaaagttcatgtgaagaggttagtggaagagatcatgtttccggggttggagtcaccgaagtggacgataggcaagagaagacccaggagtggacctgacaagcataagattcattcaatagccaagccggagagtctgcaccactccgaagtactaataactaagttgaagagagagcggggcaggccatagacgaaagtgaactatagactacttaccggagaccataggcaatggacgaaagaccagcggaagggccttagtcgccgaggtattccttttcatttttatcttcgtagactggtaggcctcatcaaaaaatcgcacatattgtgtgctaggatctaactctttgaattttttgtcaaatgaatctagataaatatttgttaacgattttctcatttcgtgtattgatgtgtactgctttacactttccatttatttgttctactagattgccggattatagtatttttcagtgaaggaaagcacctgcagcctacaagcggaggagtctttaggcttgcagacctgaggcaggaactattattgaatgaaatacggccttaaaccgatactagaagagatagagtaaggaattaccaatcggaagcattagaagaaaggattactcactcatagggattctattaagacaagacccggaggatataactcgttataaggcatatctcgttgaatcagtctttttcgccacatcgcgtataacgggaatcgaaccccctctgctgctggcgggcggatggagaatgttctacttcgatccagcaacttgttaggtcttgaagagccttcggaccctttctatgttattagtaaagggcttttctcgcttgttgctttcttcgcatgctttcgcgcattaatagaatacatatatcaaaaggtagtttacttgcttacttgttagagtaattccttgagttttcaataactaaagcgctaacgagcgggtgcgctaacacgcagctcaatcccttgctttgttctatagtaaggggccttttcaggatgccgggtgcgcaggaacgcccaacctatacaaggggtttccgccttcatttggtcgtgctgctatgatgtaacgtgcagtcgccccgaggcagcaggatgtatggtatagggccccctattttctctcccttaaagtcctttatggatttcgagtcgggaatagagctgtggcttattcggcgctatatcacaattcattctcgggcatagctgttcacgaaacgtggcatgggacatctgtcggcggtgggagtcttacatccgagcgagaggtcagaccaatcccattcatcctggtccgatccgaacggatcttgttgaatgaattgatccattgttgtatgccctacttcttagtgaattttttcctactcggacccgccgtacttcctttgactactcctgagatatagtggaaacattttgttatggtggagagtggggagtgaaaacaccaatgcagcagagaaggaccgcatgaatcggaatccacaactattaagacagacgcccgagaaagaaaggcttcacgttctccaagtggttggttgatcttagcgtgctagccgctgcttcatttcgtatagtgataacgctttctctttcttagcgctccgccccccccttgtatagatagtaaggggaactctggttgcgcggctttctcttataggggtctattttctctgacttgactcagcttgacctacttgactcagcggttagagtatcgctttcatacggcgagagtcattggttcaaatccaatagtaggtaaaaccggccgaaacccctgcttttgccagcatgacagcaagcacggactggcggcaaggagtcaactgaatgaccaaagcatcggttgcttccacttgtggccttcttcgaccgccttgacaccttaatatcaaggaaccccccctctcttcttctcttcatgtatgtgggctgcctgcccgtcccgaatagacgaagaggaacaagctgaagaaaggcgcgagagatagagttgagtatcaactcacctcccctcttccacaattaggtgaagacctggggggccggaaaccccaacgggaaacctttcaccgcgccacacgattctttcgcgaagcgctctctcagacgtttccattcctgcccccgcaagcaaaggggtttcaagataccaggcgaccaagtgaaagtgaacagccccgagcaaatcttctagagagcgtaccctttctctcttctaagaaaaactaaataaatatagaatacaatttttattctatggacctccgaccaatgaggtgatgacacatgcatgcgtgcacatgaacttctaaaaagtgggttccaaacctgggtgttactatgtaactcaatccatatccattatagggctattggtttcttttttttttagaatagactctgagatagaggagactttaaggatattttgtcgagataaggacttgcaaaagtcgagtagtcgcagaagtaaggtctcagactcgcagaagacaagtgaaaagtatctcgaggcttcgccgtgggaatttcgcgagagttttcgccgctttgaaacaataagtctcaaaatatcgcaaaaattcagcgtggtttttctcggaaggttccgccagaaatagtttgggattaaatcgtttggtctttggaagttccctgattggtttgagaacctgattgaagaagaccagaatttttgaatacacgtagatccgcagatctagtgtttgaagttattatagtatgtttttagggattccacagttcagacagaaacgttgttgagtatgtggctttactccaaggtgactcaagtctcgattgagcagtcatttttcatagtcacgggtcctgctttagcaccgtttcacatttgcaactgtagagggcggtttatgaccctccaattttccagtggaccgaaaggtcgtgagagatagcaaaaagatgcacccatttctaggcgaattcagtgtcttgtggatgctatctatgaggtagttagacacgccccttgggggatccgttgggtcttttaaaaggactcaatcaaagggcacaaacaaatgaagggaaagcctgcagtttttcttcggtttttagttttagtttctctagatcatactcatgtatacgttccgaaatagtacttcgttcaaaaacttggccagctttaaaagcaccaaaaatagctatcgaaagaatgagtccgactccaagtgttgtgatgtgctcagaaagaaatctatccatgatagaatttcttttttcttgtagttccgcttcttgctctaaaaatgcaataaagacttgtcggaaatcgccggtggttttttccaccaagaaaggcatgggagtctttgggcattgcttgagctaagtcaagcttggatcaagttaagtaaagactgactacaattaaagatccttcacagcacactttctatatatctttcttcattatcggctgcatgctatctccgatagagcaatgggaggttcagtctaccgcgcaccgcactcaattcttccccctacccaaccaaccttcttcgaagaaaaactggtaacctcaaacatttcttataagacaatttatgcctttgggcctatcttagaagaaaataaggttctttcttaccgaatatagtgagtggtctaatgggtttctttctaggagatggatttgttgcctcctcgaaagtagcctttctgctgttctttatgtgagaggttttatgagctacaattcatttcataggggaacttttcggttgtgaactcatacctattcttcgggtaatcaaatcccctctttgttagtagatagagttcctttctggcattcatagccttgagtgagaaaagccccttttgtttccaaaccttctccttagctctagaaagacgtttccttatcaagagatgctaaagctatttatagttgtttttttcggaaggcacgacttgtcgtcgtatacttcctgcaaa

SEQ ID NO: 217941 - DNA, 5289 bp, Cannabis indica
tcttgttgattttatgttgttttcgtgttattttttagaaaaccataaaaatgtaaaaatacattatttgaacgtaaaaatgtaaatattttacaaaaaatggtaccttatgttaattttttttttttttgtgtatattttcattaactttgttttctgatttaaattcaaatttatatcatcaatattttataataagataattatcatattttattaactaatgtaattttccaacgttttcataaacattttatgttttgttaaaaaaataattttattaaattttaatttattttataattaattaatcataggtgatagctagaaataatattggtaaaacatatttattatgcatacaatgtctattttcctttaataaaatatgcttacaacatatacattaataatagagaacaatccaaacataaataaaaaaaaaaataagttgttaatacaaaaaattgataaaaataattaatacatttaaaaaaaaaaacttaaacaaagaattacaacagttacggtcaaaatacaactgtaaaaaatttgccttattaatgagatcaaaaaacaactctaatgtaattgttgggctaaaactaaatgcaaaatctattaaacgacatttttttagtaaagaaaaagcataatatatataaagttatctaaattccttcaagaaaaaaagttgtaagtcatacagaccaacatacaaaaatgcatgtgcacccttgtgttagtgttcttttaaagggtgaaataagtaacaggattttacaaattagtcaaatgcttctacttttacataaaaatcgtcaccgtcgcaaaccagctttagaatcaagaacccggagaagcaaagccaacccccgccctatcatatttcacgagacccttcagtttgttaagtttagcgagttcagcacaaaataaggcgacactgattagctgaacatgagttctttgttgctgatgttggaggagcattatgtcagtcttctgtctctgaatcaagaacaccgaggatgttgagggctgatgaaccaaggtgcaagcctcggataacccctccatagccaactttaatcctgtggcacacgagcaaaatcgaatcccacaatgccgttcttccctgaaataaagatcatttatgcaattggtgataatggagtgatcacacacttgtacacaaacatgtatgcgtaatcattgatatacaaaaggatataattatgcaattaatttgccaacctggagagaaaactgcaacttcttatcccagtacaaagcgaatgttggagggctttgccttccgacaactagtatacaagcaccggggtgaagaacagaagggactcctgatacgacggcaatgaacttctcgggaaaactttcctttggaggtagaattcccaataataaggggtttttgctagattggactccagcataggatgagggatctacatgtaacatccacttcgggtgctcaagaaaagcacagaataaatacaagagcaagtgagaatcagttggaagctctagggtccatttcttgttcttcttatcatacacctctccatttccaagatactcgtaattcttcaagcaggttccttcagcgagctctatgaaaaccccaaacgcaggttaatggtttacgttagaaaacccaataatggttttctcttaaacaaagtaaaggcaagaaattacctcgaattctttgtactgtataatcagcccgaacactactttgggggagcaaacctttaacccattcccctttcatcaatgcttgaagcttctggtgttcagaaatggcatccacacactcctgcattacggggactaagggattctgttgtggagactgttgcagattggcttgagccaatctagctgcatgttatgagaaaagacacaatgagcgaaattctataaatgtaaagcagtccggaagcatttaaaatgacattaaacaatatgtacgtgaggaagcatcaatagcctggacgagagtagcgcgtagctgatgcagaagtccatcctcgtcaagcgtcacagctggttgccattctttatttctatcaaccgatgacacagtagcagatccactagaaggtaagtcactacccacttcactaattgtgattgatacaccaagtttagcagctgcttgcactacctattagaacaagcattttgtagtaatcagattcaaaacgaaagttaaaagttcaaaacaggtgagatctttttctttaatgaatttcagcttttgcaataatcacttgatggtttatatcctacatgactattatagagaaaacctcacaatgcatgggggtatgcatacaattttttcgaagattcccatattgctactaaataaggcaatgttagatatgcatcatgacttataatcaatatattttttaccaaactaaaagaaatagaagtaatcaatgatgtaccattttaacaagcacaaattatccattgcccgaaattataaaaggagaagaataattgatcattgacaaatgagatgagacaggaatagtgatgatggcatacctgaatatgactggtttcaatcttgcttagaagaggattaagcaatgcagaagaaaaccactgcctaaggcggtcacgccattgctcaatttgaggatagatgcctaaatgctcaaatgctgcaagggattcctccatggacataggcggaggaagctcaccttctcccttcttaggtggagttttgaacttctgggaacctggggacatcctcacagacctcaatggtgtgcttcttgttgtcccagaagtattagttgatgtgctaatggtgttcggactggcaacaccaaagcttctgatggttggcggtggagtagctaattttgcagctgattcagtgattttctcatctacatctgccaagaattgttcaagtttttcttctgaagttatctctttcgtagagcgtctgttatttgaccaaggcgtagataccattgtatcaaaacctggtgaattgtggacagaagacataggcgagatcgatcctggaacaagatacaatgcagatgatgaacttggtgacttggaagggctactcatcgagcgcatcttattacctccactggagtttaacttatctccactgcttcgagaagaacgcttgggagtggccataggctgatgaagtggaacaaggacatctgaggaggatttagacttgggtggttttttagcagagccagatacagtttgttcaacctttggctttattcccaaaagccccaattgacgatttgtaagctgtaattgatccttggtttccttcaaggaagaagaagccgccggtataccaatagttgctcggcgccatgatatggttttgaatagagcaaatgtggtaccaataaatatgcaaccaacaaatgcctctatcaatttgacaaataaatctacagcacaaaacagaaaacgcatcataataggatttaaactacagaaaccaaattggtcaagtcaaactcaaattacagaaagtaaatttcatttgattaacttacaagatatctgtggggaaacattcttgatcttcaaattgctaacaagcccagtttccctaacaatttatgacaacttctcacgttagccccaacaaatttgataccaaaaacaagaaatcatataattagtttgaaactctaatttacaaaaaataaataaactgaaaacaatagcctcaaagattctttctttctcgatcaaaaagctaaccccaatcaaagattcaatcttattctacccgaataaaataaaattcttaaaccctcgaaaaaccctaatgcaaattcctcttcagagttagaaaaactagaaagttcagtggggaatatgatcacaaagacagtcattacttcagaaaacacaagtttcggtgaatttagctgaaaagaaaaagacttatggagttttcgatgagcacctggagaaaatggcgaggagagctaaagcggaggcggaggagagagagaagaagcggaagaaagtagatttggaaggctggagactgttggcagtgagtgcttgagaaaaggcttggttttggtagacagagaagttgggtcggggcttgaatgaaggcgaagaacccttttctctgacacctccttccatggcgccaccactctcactaagcttctttcaaatttttgaaaacccacccaaccccaaaaccatctgcaaaccacaaattttatatgaagttttacaactttctcattaattctttttccctttttaactctaaaagtaaggtattggaaaattctacaatacacccccttaaaatggatatattgatgcacccttctgttttagcatccgaaataactttttagttaatttttttctcatggtcatgtacgttatagttatttaagaaatcctgcaaaattttaagaaatttggaaaagtttaacacgccgaaaactatgttcaaacagtgtgttgcatgcgtgactattttattttatacgcgtgtaaaatagactgtttgaacattattttctatattgtaaattattccgattttttcaaaattttataagatatcttaaatagctataacaaaaaaaaaatgaaaaaaaattagactaaaaaattcttctagatgccgaaacaagttaaaggtgcatgagtacatcccttttaaggggtgcattgtagaatcaccttaagttatttattggaatattaatttacggcataaataattaaatttaattttagttataaataaatatttaagtttattttttaacaataataatattttagagtttttttatttttatactttactataattttttttatggaattttaccccaaaaccccaattgcaactagcgctgcaacctaaattgtaataaaaaatcgtatagaaatccttattgcaactagcgctgaaactactttagaaacccaaactgtaaatttaaaaaaaaaaataaaaaatagtatatggggtaattcccctaatattttataattttagaacttttataggtacttagctgttaaatacgtgacaatttttgattgattattaaattttcattttttttaaaaaaattaatttaaatataacaataagaaaatgacacgtggataatatcttaatatttaaccgtcatatatctatagagttccaacaacataacttaagtatttaccacccaaaatcaaacttaggtatttatt

SEQ ID NO: 217942 - DNA, 1991 bp, Cannabis indica
ccatgtcaggtttcaacacctcacaatgggaacgtagaatagagaatgtacaagtattccccaagccttgtacattccaacaaaatagattcattgcgatcggcgaccctaaacatcaaggctcgccacttcagaagaaagacgaagagaagcacaatcaccagaattagaaagtactttcttcagattaccactagtctccaccattgcagaattcaaagttaccacctcaggattaccctccatctcaaaaccacccttctttgaacgactcttgtccccattgctcccattaatgtttcgagaaagctgcttaagagaagccttcttcttcgtactcactcctttcccacctccttgttagccactgaacccaccataaaatcaccaacactatcttccaagccaagaaccatctccctttgctcctttgcaccatcctataatggtttcttagtctctctatgaaaatcaatgatccccgaaattcccacatctatcacacttctcttgtttcgttctaaaacactctcaaagatagcaactcttatctcgcccacctaataaaaaagcttcttcacaccagaggaatcaaactcacctactcgaccgtcagccaccccaacagtatcccttcgaacaagacttttggatttaagtgcctttgtgatgggcttagaagcttggaaagtgaaggtggagtcaacactttccctcccacttacaagtggaccattatttaaatttgtctcctccacattagaaaggcccattaccgtgtacagcccaataccttgccccagattaacctcattctcaactccttgacaagtcaaagggctcttggcttattgcaaatggtgaggctggattggctccaaggttgagaatatcctgttgcagaatttggttagcaccaagcctccgaatgttattgctcaatgatgcttcaccgacatccttggggtaacttttttgtcttgtctccttctagctactttcatttgcttaacatcacttgacattgtcctcttatctttaggcttgtgtttgttatgcttacaccatgaataacgaacacaaaaaggcggttaagcttgttgagaagctcgaggttgtagtagatcatgttattgttgcagaagaataagtgattgctttgaaaaagaacatcagttctctggagagtgagcagactagtcttcgagaagtggctaatagtgccaaaaattgagatagtagtctgaagaaaaacttggcagttgctcaaaatagacttcatatcttgaagagtcttatcatcttgcactggatgaacttcaatagctgccgatcttagagaccatgtcaggtcttaaaagagcaagtgactactcttgaggatcagtctcttcttgatgtcaccttctatgattgcttatgtttcgatgccatctataaagcttggtttgccaatggagaagcaaagtcattcagttggttaggctaccccgacaaataggtgccgaagtttatcaagcgctatgagcggtgttttagtgtagaaactctccaaaaaaatagacttcactgtgaatggtggtgagccagtggtcgaagaggcttcaaaagttgaaggctacaaccctaagcatcccgactttcctccttctgatgttgatgtgccagttgtagaaagtaagggcaaggatgaagctattgttgatgtgataagctttaagggtgttcccttggtccactcttctttttgtttttagtatttaactttagtgtgttagttggtcgttctcgggcagcctttcaatgtggataagccttggtaaaatgttatcagaatttatttagttatattagaaattatttctaacttaataaaacttttattccaatttttgcttttttatattactttattcgttacctcttgaccgtttaacacttgcacaatacaccatgtcttaagaaactcgattactgggagtaatgtcact

SEQ ID NO: 217943 - DNA, 4159 bp, Cannabis indica
taaattagtgacaacttatagctaaatactatattttagtcacgagtaatttattgttgtgactaaaaaaatcatatttaatcacaaaaaatttatgttgtgactaaataattgttactaaaaattgttgttttttgtagtgggagttagaacacccaaaactgccacaaaagaccacacatacactcaaataactacaataatatcgtccaatattgacaatatgtttttgggctttgaaaataagaaatttaaaaaaaaaaatgaagaaaaacagtgaagaattgatgaactggcctttggaaaatggtgattgacggtgaaaacgatggctgaggagaagaggagaaaatgaaggagaagatgaagtgtgggctaatggacttcgcgtagggttttaataaccctttagcttcagttatattacataataactgaagcctaaatagacacgcattaatcattgtgtgccacaatggcgtcaaatattacctattaaccgaagccaaagagtttacttttggcattttcgtttcgtcatttgtgtctctactacaaaaaaagcttttaatttcagtttttaagtgacacataaagtatttatttcggttggtgtaatcgacgctattaccgtagacgcaaatacttatttttttctcttcggttatgagtcgactctaattgattttttgcttcggttataaaccgaagcaaaaaaggatacgtttttgctttggttcataaccgaagaaaaaaaccaatgcaccaacgctaattgtttcttgtttcggttatgaactgaagcaaaaatattttacaaaaataaatacaatatcatatcaatcctttaataaaaaaataatacaatatcagacaaacaatatgaaaatttgtttaaacaccaaaaaataaaatctagatctcaaataataaaaatatatctcaaattatactagatcttaccatataaatttttacttttttgagtttgaaagcaaagcaaaaatcttaagaaaatatcattatgataatatacaactacagatttcttatacataaatgttgaagcattaatttacagccatcttaaaggatggacagccatcttaaactaatttacattaattatgagaattacaacaaagttaaatacaagtattgggaactccatccttcgaatagcaatataatgaaattttggcagccaggaggagaactcaataagagcagcccaaagaataaagcgctataagagaagaaaaaggaaaacaaggatttgattaatggaaaaaaattgtaaaatcaccttgtcatctctgttgatgatccaatatggatccaattctttttgtacacttgaggaagaagagcagtagtactggtaaagaaattttacgacaaactgaggaagaagagtgactacaactatcgcaagcaaacacaaccaaaacaatcctgtccttgcaacgtgaaagatcgccctgtcaaatttataaaattggagttgcaccatcaatttatagaaacaagaattatacttgctccttttaagtatcatgatattactgatgataagcacaatagaaatacatatgtgcatatagtattaactgccaatatatatgaaatgggaacatcatttagcaaaccagataaacaacactcacttgtttgattaataacaaagaaggaagaaaaagtattaaaatgctggaattcttgaaacagaaaatcaggccatgtgtatgatatatatgatgtaactataaaaatgagaaaacgtgaagaagtgatttaggttgaaatgaaactaattatcttccttcaaaaaaataacatacctatcacgtaatataaaaagtatatacagtaattaaaaccatgaattcttttactcatacaaaaaaacatctcataatcaaactctctccttgattgtttgattgtttatattaccaagtcgatctcatcctcaatattggtcaattcttctacaatagttgggactcgtatgcataatcctgaactcaaaaagtccactccttaacaattctagagtttatttatatatagataattatgatgagtaatatgactggggtggtgctgaaaattttatctataattacagatcaaattaccatcaatattacaaatacagtgccacagttccaccatggagctgtactagcaataacaacaacattaatcatcttccttatgatgattctctatttctccaagatgtaaaaagtacaaacctatatcaaattcatcatgcatacaacaataagaacacccttctaattattactagaatgcaattcatgtaaaacaataccaatcgagttaattaaaacgagctcatccacaaaaggaattaaacccaaccaatttaattattaaatgcagtgctacgttattagcacctgttaataaatcagaaatttccaaaaattttaaatttcaataagagaatatgccaatacatgcttttaatgttttggaagcataacatattcattcattacattacagtacacatattaccatctccaattgccagtgtcatgtccgcagtcctactctttacgagatcaacaattccagcttttgcagtggagctactcggcaacatagccccactgaacatttactcaccaaccaaaagagctgttatcaaatttaaaaaaaaaatttaagatttgacttttaaggcagaatccaaaacttactaaaaacctaggtctataaaaaattacctgttcttcaagatcaatgtcaagaatataataaaggctggttccatcaacaatcaaggtcgctgatgtcaaagcatttcccgaaattccttctgtggcttcttgtaacgcgttctacaagattcccaggagttatacaattaattacatgttgggtcatcatgggagtcatgagctttgaagagtatccaatcgatatggcaatttcttgcttgtcacctgtcaaaaccgacactttaatcccagctgttctcagagactctatagcttcaggcttcccgctttgcagtttatcttcaattccagaggcactcaatatgcagagattggtttctatgttgccagcaaccttgcgtagggcagcagcccgacctctcaaagatgtgcttgctgcctcaaatgaagagcgccacacctcaaattctaaaggagaaagttcacgcattccaacaacaagtgttcttaaacccactgaagagtaagcaagaagatgaacttctgtagcatgcattatgcttgtgttcaccgattcatcaattacacttagcattgttgtatcatcggagtcagtccgagtctcagaatccgatgagtcgacttgggtttcatacttcaacgacttagagaactgcctccgcggcgatggctgaagcttcttttgcaacttgttagtttgaaatggaggggggagggctctactagggttttgaaattggggggataaagatgctgaaataaatttttattttgtgaaaattgagttttaaaaatttttattttttttgcttcggtggataatcgtgtgaaatgtattaacgtcacttttcaactgaagcaaaaacaattggcctcacttttccactgaagcaaaatgtaaaagacattttttaaaaatttcatttttttccacggttattcttttagtgtcggggaatgagctgacgctaattggtacttttttagcttcagttatactctgaagcataaaatctttccatattttttgcctcggtcaaccattttaaagagacgtgttgaccgacgcaaaaaagttcttttgtagtagtgtgtacacaatcttttagcttcgctttttttttaatgaattaaaatagggtaagaaaaattcttcaatattattatatcaaaaatataaatgttattcctttaggttttaaaaattatccttatcggtcatacaaatattagtctatataactcaatatatcttggggtcttttcaatattatacctaaaattgattttatttataaaaatacctttaagaaaattatttgcacaaatatcgattgccacgttagcataaataccgaaatataaaataattaccgaaaattgaaaaaataaaaaaaatctcgcttccagaaatttcagtg

SEQ ID NO: 217944 - DNA, 2427 bp, Cannabis indica
  modified_base (2396)..(2396): a, c, t, g, unknown or other
cccagtgagctcggcgagctgtagctgctgcagccgctgctagcagtactactgttgctgacgggctgttccagcacatcttccagctggggatggtacgccatcccttgatgatgaaattgaaacccccactcgctcggtccattatcggcggcgcgtgtgtatattgggctgctgtagttcccgtacatggcgcgtgatagcccagtttgtatatcgtttgagtagtgagttagtgagtgaagtttttgaaagtgtgggcttgggtttatatgtagtaatattattgtgtgtatataaagagagagaaagagagtggaggtgggagtagtgggccaggtgaggggtttggaagatgacgtggaggatgacgtcataggttggttttgagagaaaaagcgttgaccttgttattattattaataatattatgatgataaaaaaaagagagaaaaaactaattggggtaccccaacgtcgacctctttctctctaatatttctctttctctctccgaatctggtatgagatagacagtactactattgttgctaaaatgatataccatcaaattcaatttatatgtctctatatgattttatttcatatatctatacattattattactcagggaaaatatatatatatatatgtgtatataataattgggtttggaattggtgatattgtcaacgaaggattgctcgttagacgttatttttgacaaatgagagagtgttgaaatatataattcacaaccaaatgatcgacctgagttaaatatcaaaattacaaataatgaaatcaatcctctctgtttttatttatatcaaataagtaagaaatcaatgctctgttttttatttatatcatttttttcttcaaagctttagtgtttatgtattttgtttagaatttaaattactattgttttgttaataaaataataataatacgtaaattttattttaaatatatatttttaatatgaaagggaaaaatacataagcttatataactaattaatgaagtatttcacatttatatatgtaatctcaatttttcggttttctattaaaaaaaaattaggattttctgtttttaaatttatagttattgaaggttattttttttctccggctaagccagccgattttttttgagcttaggtgcggcttggttgaggttgtgttttgctactatcattaatcttatctttgtgacatgcttttgagtgtgttagccttgtttgtgtaacatgattttaagtattttagttttgtttgtgtgacatgattttgttttgttttattttattattagttattctttgttcatcatgactcatcatttaaattgctattagtagttcagaataacaagatttttgtgattgaagtcaattacataccttatacattagttgagtgttcaagctacaaggttgaacctgcaacaatttttgttgttttgtcttttaagtagtgtatgaaatagaatataagagcatctccaaggagatattaaatttggtattacactattactaaatttggtgtcaaaaaatatttccactccaaccacaacactaaaatctataccaaaaaatatattttattattatattaataaaatataagatgttttaatattaaacaatatatataaaaataaattagctattaaatattaataataataataataaaaaagatacagttgctacagtgctacttcatatatgcagtgcactgtagcaaagactgcataaatcacttcaaaataatgctaccttggagaagattaaccactgcatcctcaaatttgatagcttcttggagttgctctaagtattcttaaaattaattgtgatgctgtaatctttttcatatagttttattttaacttttttttatgtcaaatgaataggaattagatgactgattatttagtttgtttttttaattctaattttagttgtgtctccaacaagagagatgtctcgattggattgcacactattattttttattaaaaaaataaatgaagtattttccttaaaaaaataaagaatgaatgtagttaaataaatttaataaatatcaacaataataaacttgtggaatcaataatttaatatatatatatacgtacattgttatatatcactagacattggacataaatgagatatatctcgtatcaaaaagtaaatactaaacattaaatgggtttacatataattgaaatggataactcctctggcaacattttaggtgttcatgtttttttaattagtttataggggtagcgtacacgatgcacattagtatatcatgttatatatatatattatatattatatatatatatatatatttgttttcgagtttanagttgtattgtactgtatattttgttattta

SEQ ID NO: 217945 - DNA, 4912 bp, Cannabis indica
ttaaattgaatacgacttgtatagtcagtggtcgctgctgccttaatggatttaatgatagtgtcataccttttttttcttgtgttgcttctgacagatatctgatgtggttgttgttgctcgatttcttaacgtgaccttagtaattccggagattctatcggccacaagtagtaaaggaatcaggttgttattctttggacaacaatcaatacaaaattaagtttattttagtgatgttcttcgtcaatttatcaaatcccgtgttttatgaagttctcagttcaaaagttttgcctacctttacaatgaggaccaattcatggctgcattagcaaaagatgtcgtagttgtcaagacacttcctaaacatcttaaaggggaaaggagaaaaaagaaaattccagtttttaaagtgcctttcgctgcttcgccatattattatcagcaccatgttctccctatgctaaagaagcaccaagtagttgaactagtggtgtctgaaggtggatgcttgcaggtaatgacaactatcttgctgcctacattggttggtttccttctgattgagatgattcatttacaatgtgtaattatattcataaatagttctttttctagtgttttatatttttcctggatctgccaggctatccttccgcctgaacttgaagaatatcagaggctgagatgcagggttgcttttcatgccctcaatttcggcaggaagtccaggaacttgcaaccaaaatattaaacaggtcattgactattcatcacaaactctctctttttgttgtactcgtaaatttcacttattctgattttttatttacttaaggttacgggctcctggactgccgtttattgcatttgatccagggatgactagagatgctctagcatattatggttgtgctgaacttttccaggcatgttgttcaaacccagagtgatgtttgatgaactcttcagtaagtctttgtagctgatttccttctcgttttttgaattgctttcttaggatgtacacactgagctcattcagcacaaaagagcttggatgcttaaacgtggaattgttaaaggcaatcttagagtgaattcagctaacaaacgtcttaacggttcttgcccactaatgcctgaagaggtaagcataagtgacaccaagattcggtgttattggtggcttctgttgcctgtctaattctatacttctttaaacttatgccttcaatgatttaggattttacttaaaaaatggtttgtaggaaaacatgtaagagttatgtgtgatatgatcatttaacataatacgatagaacaatgacagtaatgattacaacaatgtaatctatagagtttactttatccaacaatattgtctttgaggtattaactatgcctataaagaagatatttcttgatagagaacttaacatgttttgaatgcctgcaggttggcattcttctccgtgcgtatggatactcatgggacactattatatacgtttctgggggggagatcttcgggggacaaaggacattaattccttttcgtggcatgtttgagaatgtcgtcgacaggacttctcttagcaccccttgggaaatcagtaggatttatggtcgggaggccaatcttgaagatagttttcgtaaaactcccccttccatggaagaagagatgaaagttgaagcatggaaaactgcaggcccacgtcctcgaccgcttcccccacctccagcacgtccgaaatcctataacgttgaaggttggtggggctgggtggctgagagtgacaatgagcctgacagtacggttatagaattaaggaccaacgctcataaattactatgggaagccattgattatgctgtatgcgttgaagctgatgtattcatcccaggattcgatcgtgatggtaagggccatcccaatttcgcaagcttagtgatgggtcaccggctttatcaatcagctgcatcgaaaacatatcgaccagacaggtaatgtttgcttaaaaaacatagatggatgtcttgaagtaatttaattttgtttttaagcttagacataacccacattgcccttttaaatgctttgatacattttggtggttgattttgcaggaaaaaagttgctaattttttagatgaaattcgggagcatttgtatcatgcaaatcatacttggttgacctcagtgcgtaagcatttgcgaaaaacactaaatgatggattactagaagcatcacgagcatcaaagtcgaaatctttcatctctcatccagttccagagtgttcttgcttgaggcatgaatctgctgaaaaaacaacaactcaagcttcaagtcctatctccacctcacaagccctggctgcactcggtgttgttcatagatgccccgtatggatggacaacgaatctacattgcattcaagagagaaggaaaatgaagatgatttcgacgaagatgattccatatcatctggactgtttttcgaccaggacagtgaaaaccaagaaggcagtggagccggagagttaaacaacaaagaggaagctcaactcgaggatcaagaagaggagggcggagaaagatgaccggtatgctaaatgagttctatgatcaatccttcgatttttcattaaaggcattgccacccctctctcagcctggccgcctacaagatagtgttactagctagctagtgaaagacaatctcgaatgctgagtttttcatctgtgctccgaaaatagtggctcgaaacacatgcccatttgctgggcagctctattatcatagagaaagaaagaaagaaaggaaaaacactagtccattgtaagtaattcaattcaaatccccatcataacctatttaatgtaacttctttttggccccctagaaagtcttaggttaagttccttattgcctagaatattataattattagatttacataaactttgtcaagcaagtatcatataataatgttcatgcttgacacccatgattaaaaataatttgtcaggccaatgttttttggtttgtaattgccatcagaattatggttccattcttcagtgaaataaattctcattctgcttagtagatctagattcattttaaattattattattttatattaacagctaaaaatgagataataagttactacattactgttaggagagttgcttctattttttttattgtcttgtaaaagatcaattacaaagacacttttgtaagtaatatttaacaaaaataaataaatgtttctgtaacttcaaataaaataaaaaaaaattgtaactaaaatttacaaaattaatttgtaattttcttgacaaattaatctgtagacttagtttatatgtttgtaataaagatatagtattttgattagtgttgtaagtttgtacgtgtcgtgttggctagattcatttatcagtgtttttttaaaaaatggattgtgtcatgtcgtgctacagaaaaatataaaccgtgttgtgtcatgacaatacttttaaaagataagtctgacaagacgtgtaggttcaatatttttaggtcgtcctcatatttatatggtgctttacttgagcaattttttctttttttttttaacaatgaacaaaattttattgaaaaaaatattagcgttgagtatatcataagaaaaagatagaagatcctccagctcaccatcaccctaaagaatacatattttggaagaagaacaacattttcatgaaacactttcggaaaaaacatattttctaaattttgaaaatatagtttttatataggaaaaagggcgggctcaagccccaagcccaacaagtacataaggcccaaagatcaaagttgaacagaatctaaatatcatatcattgtagataaccacttgtactgtaccccaaaccagaattcgtcacgtgttactgttggttaaactatagctgcgcatgttagtggatataacaatagctgcgcatgttagtggccaccactaccaaatcaaaataaatctcgcatttttttgtaataattaatatcaaataaattctaacaccaaaaaaaaaaaaaaatgaagaaatttctcattaaaaaaggtgaaggacaagcataacccttttttgggaagtagacagcaaaaatggaagtcatcaactagggctccttctctcaacaactgtacactttaacattaatccaatcttaaattaagactcattttctcaccctctacaactgcctcacctgtacggacatctctcgttggagcctcacattctcatcggcgctgccactcttacttgtccgacttctttctctccctcacaatttttgttcaatttcactttttttttgatttggcatcatggtttttttttctgtattttctcattattttcagggtgttggaaagtgagtattggagatggtggagtcttcgaggggtcaccaagaggaattcgaagacgaagaagaagtgacccacaacaaaggtatatatatatatatatttatgagttcggaccagagtctagtggcttaactgggttttatccttcttttgtattcttgttttaaattttcaatcttgaatttcttcccttaataatattttaatttctcttagcgtgtaaagttgttttgagtggtttttcagggaaggtagatgggaagagtagggaaaaaaataggtctaagcattcagaaactgagcagcgtaggaggagcaaaattaatgagaggtgacctttatgttttgtttttattattgctgttgttattttgtctttacttattattattattttgtttccttagcattatgaaattgagagaaaagaataatgagaaaaagatggttgcccaattcatgtatgaatc

SEQ ID NO: 217946 - DNA, 7483 bp, Cannabis indica
ttttatttatatatacatatatatatatatatgttattttggtttcttgaaaattccttttatatgaggggaaaacttagttacctgttgagaattgcagcagatttggcccagatgaagagaattacaatgaggaggaggaaaacactagagagtagagataacaaagtatagccagatttctcaaaaaccacccaagcagctaatgttactaatagtatccccacagtcacattcttttgtctccataaaatcacatcagcaactgattcaaacaaaaaataaaagaaattaaaagtcatttgatcaaatccagagttcattcaatgatacaaggaatcattataaactaacatatgttaggacttattaagtacattaaatgctgaacaagtataaattttagtgtatgataatgatgaactacattcaattcaaataaaaataaaatgaatgaaaagggctccaattgaaagactaacaaatacccattaatgaaaaaagcaagaaaaaagtcatacaatatgatcagataagactcaccaagaccacctccaaggatctcatgaacacttctttgcctgttaaacaaccgatccaacgagcccatgtaggaaaaaacttatttttagttttcttaaaacagaactttgaatctgaatcagatctttaagacccagaaaaaaaagtttacagtttagagattgaaatgatcttcaaaccaagaaaaaaccagtggctcttgccctttttatccaactcttattctattctgaatcttaataactagaatataataatatacaggaaatgaaattttgaaaggtatgtttggtggtcacattttccagcctaaaagcagtaagccactcatagtttttcttgctttttatattcattttttttattctcccaaataatactaaattcttatattatatattaatatgattacacagtagatatctatacatagatcacatacatcatcttaatatatatatatatatatatatatatataagatacaagagttttgaacaagaaagattgacattttttctccattagtaaccgactttgttataattgagctggttgagaagaagttgggctgcttttttgttaccatcttttcaaactatggagggtaatatggtcagtaagcaattgaaatgatagtgtaagaacaagatgtttcaccatcgtatgagggtattttcgtcttttgagtacgtgagtgtggggttggctgctcggacaaaagcatcatgtggggctgtgtgtgtgtgtgtccaaggctaaggaaacgatattctgctgtaaaaaactgactcatatgacatgaaatggtaactaataaagtcataacaaataatatgaaaaaaaagccttcagcaaacaaaaaacaaataaaagagaaacaatataaatgcgccacttgtttttattttggttggaaaacagtctttgaaactctactatgactctatctatgagttgtggtatattatttgtcactaattcattcaaatgtttggaataattttaagtgagggtgccaaaaaatttataaagtcgggtcgttttttatttatagtacttaaaaaaattattagttaatcttttcttatattagggtgaatatggtacttataggtgctctagacctcagaaaattttcaaaaagcactcaggtattgttcgtgacttcccgtgggatactaaggagcgagacctcgaatctaaggtggcttatgaagaactctctgatgatatctccaatttcccgagccgcactgatggaatcatgaaaaaccctctggttgattcttttttaattgaagactctggctctagcttgtctgttcactctcaaaatcctgtggaggagaatgtcaaatctcctccacaggagccatgagaggcgttgtctggaactgtaaaaggttagagcagacctctacagttcgagaactaaagtccctgatcagaacgcactctcctgatttttgtttttttgactgaacttaaagtggaagttattcccctgagttacatgcttctttcttgcctagctagttctacgccgatcttgcgggagacctggactccacctcctcaagattgaataaaattgaattgtgatgttagagtgtgcttagagagtatgtgcactgctgttgtagcaaagaatcacctaggtggggtgattcgggttcacatgtctcggttggatttcttggatgcgttatgtggagaagttgcggcctgctatttggctatttcgttggtgttggaattaggttctaagtatgttattgtgaagagtgactcgaggctagctatcaatgctctcaatgggaaggagtctcattgggctcttgagaactatgtctccttttgcattaagtctctttctttattagttgtaattttttttaatgtaagcaggacttgtaattatgttgcccataatgtggctaagtttccccccaccaattgtacggctctattccgacctcctccttaccgaagaacctattttgtaataaccgcgagatctaactgctttattgattaatgaaatgagtacgcttatttgaaaaaaaaaatatattgtacttatagttacaaaatacactgtgattaaaaaattagattataatttctctagtgtcataaatagaaaaagatcttagtggacactttttttgaagtcccacccacctaagaactatgtgctaataaacagaaatttcataatggtaaattagtagaatcttttagtatattgtttgaatttatccaaatagcaaaataatctttaatttctaaaaaaataattaaaacctacgaaatcagagttattaattaattaaattaaattcaaatacctaacactaaaaaaattaaataaatgattctattagttccattagtacaaagtcttgattataaatttaaaatttcttaattcaccatattattattgcaccaataataactttgataatcagacattacgagagacaaaatcaataaatgaaactcttaacaacaatggttgattggtgaaacccataaaatatgatcatccattgcaagttgggaaatttattagttttacagtggaaataaacttcaatgtagactcaggcaaaaagtatgatgcaaaatgcagacgtataccctccaaaatacaattgactttagtgccaaggatgcgagtttgaccgacttaatcccaacatggatgattgtcttctccagccattagatgataaattaaagaatcttattgtgaatctttcttattcaactttatttttgctgctttcgttttcatcttgtgaagaagctacagcttcagatttgctcgacgctggggcggaatccattagacttgcagctattgcagctttcaagtcgtcatcctccatctgagagagcatttcagcttcgccgtatgatagatcagatgattgttgattcaaacttggcttctcagatggcgcctgagtagaggagcccaaggatttcgttattctctctgcatcttctggtgaaagccactggccataaccattagaagcttcggaagctgaaatggggcactcctttggaaaatttcctctaaccagaaaaatgctccaaccggcgcctttcaaagtgtctaaataagctgagaggtaaaacttggagaggtgcattggggccgcatacaaactgtcaaaattgtaccactctccgttgacttttcttatacagaaccaatggtcatgcaaatgacaaatgaatgcattttcgagttcagggtcgatctgagcaggctcagcaactggagaatgaaggggtatgacttggagatcccaaacctccaaagccttttctagaacctgcaaacaattattcaaatggagaaaatatattaagttgatttaccaagaaaagattcactcctagacgaaatgatagtgcatgcgtaattatcttcataagcctagacaattgcagaacatacaagataatggaaacccagaaagccaacttatggttcacataggagaactcaaattcccaagtataaaattttagttgtgacttacaagcaaatacacacatggaaagaaggtggagaaacctaattctcattttaaatttgacaagaggacaacaaagtactataaatcaattaatgaaagacatctaatgggacaacgtgagatgatgcaaaaacgggcgtatttcaatcaattctacattggaatattggaaaagatagaaatctacagtagaattatccagaattctataatatcgtagccagaaatattccaaaactgtttaacatcactgtgcatccctaaagactttaccaagctaagcttccaagatatggtaaaaaatacctagaaatggaagaagacttctatattcgcataactagttcagcttttgtctaatatattcacgtcaaaatctaatgcagaaaacaagcatcaaaactgcaactatctgacatgataaattacaaaacttcacctgtgtgaaatgacttccaatttatcatgtatatcaactgcaatacaatcatccaactcaaaacagtacactaatcaaaaactatgtacaaggggtaagggatttaatatcgctcgcattgtattagggaacacagtatggtaaaagataagaaatacatatgactaatataaaaatacactgcagacaaaatttaaatatgccaactattcagggttttctccaaatggccttaggaaactttccatcatagttaactttcattatgctctagttaagggcctgctaaagagactgaagaaagctacttgactcaaatagagtttttcaacaaagatcgcaaatttcttcaacgttttagagaaaggaaacaaaatttgatgaaaaggtaattaagtaggcagaagcataggcagacctacgttggggcaagaggggtggtgaattgacccctcaactttttttcatttaaatatatatatatatgtgtgtgtgtgtgtgtgtgtgtgtcaatatatttcattaaattaagtctagctagtgtagtggtagtttttttcctccgttcatggggttggggttcaactatccactcctgcatttttatttgacaaaaattataaaaattttgaagtgattgaggcttgaaccttcttcttgtacatggtttgagaacatatttccattgtgcttaagaatattatgccaataatttattaccaaatttatatttaacttcttgccccttctgaaaaaattatctaggttcgcctatgggcagaagggaaccacattatttacaaaattattttgtcataggcctctggggatgatcggctcaagtgaaattcccattttataagggttttccagctactacatgttgttcccaacaccatctaattcattcaatcatgggtagaacttgtcatgctcaactatcatttttttttattcccttcatagctaggaaaacaggatatgaatcagtctaatagcacaaacactaacactcacatccacaaaataaacataaaatgtcagttaacaatgagggcttaattgaagacaaagcaattcagccaaagtttaaaattgtacagacagaacaatgatcaggtctacatactgtattaatggcatcacccacagcatttacacaccctagaagtacccatgtgacacttgaattccttctatttttgctcttcattatccatagtaacaagtcaagaaataaacctaaagaatctgacctaccagcccttatatgtatacatatatgtgtgtgtgtggggacgcccgccctctcataaatatatacaaacaaaggatcattactctaaacacagccagcagccatttgaaccaaagacccaagtttcccacaatcgtaatttcagtaaagataacttatttatagtaattgaagtccaactaagaaaaaattccaaatgagtgtaaaataatatcctttcactccattttttaataaatatacaaacagatttactttgctaaaataaacaataaatcattttgtgtttttttttccttttcttcgttctatttcattttgcatcctttcccactaagcaagcaagcaaatatagaaagtaattattgggttttgaaaactcaagttaaacaaaaaagggaagtcaaaccaattaaggaaagaaaaataaaaggaatgaatggtcatagaaattgaacctgaatactgaaatcaccgtccaaagagacgttatgtgactcttcagagaagaaatctccggagctagcagcagcaccttggatcatcatctggcgttccttgagatcgagatcagaagcgagtgcggccaaatcgaattcagagaagaaagggccttgtaaaaccgtgttcacgcaatgtacagcgcatagcttggactcttgtacctcgtggtacaagatccctccattgctggctccttccatggttgtggtcgccatcatcagcttcagcaatcaaataatcaatcaatcaatcaatcaatctctattgcagtgtggttgtgtacagtaaaagaagtaaaccctaaaaagattttggtctggttttgataatcgaaatcgaaaatgatagttggtttagctttggcgaaatgaagatgagagagaaacataacggaaaaatatccttcttttttattcatttatttatttaattttataaataaaataattaaatgagatgtgagtgttgtgttgtgtctgtctgggacgttacgaagcagcacgtgcgtcgaactgttcgacacgtgtggtaacctataatatcttattttttattttttaaagtaatttaacgccataaatacttaatttaattctagttgcaaaaaaatactaaatttaatttttagtaacaataatacttaagttatatttctaaaaatctgtaaatacttgattgttaaatattaaataaattgtcacgtgataatccctaattaatttaagttatgttctagaaatataactcaaatattattatcattaaaaattaaacttaattatttatttacaattataggttaaacttagatcgtatcacaaattacttttttctttatattttgttggacatataactagattggagtgttagtgtttcagttatactactgttcattttgtaaacaataaatatggcatttgttttcaactatcacacttaaatgatttttctttctcaattagttttacgtaaaaagtgctactcaaattttggaaataattatatgtaagagtgatctaaaaacatttataatggtgtactaattttagaatttatatattatttaactttaataacaaattgaattatgcattaaattggtgtacaccaaattctataccattaataatgtgagatttaagtttacactaatttggtattaaactttttttt

SEQ ID NO: 217947 - DNA, 4778 bp, Cannabis indica
tttttttttttttgtgtgatatgaatttgaaaaataggttgtggtgggtggtggtgttaaggtggtgataatggtggtggtttcggtagtggtgggtggtggtgtttacggcggctacggatgatggttgtttcagtagtggtggtggtggtgtttacggtatctatggatggtggtggtggtaacagtgtttagactgaagaagaagatcataaaagaaaaatattagagaaaaaaaatattttttttaagaaaaatatgtaatatgttatggttgaaaaaaaatatatatctttttattttattttatttttttaataatataattacgtgggacaataaaattgtgccacttgtacactgtatctacgtggacaatccgacatggaagttaacagctaaatttggattaaagttgtaatttgctaacagtattgtaattttaggggttttgccgccaaaatttttattttaggagttaattgcaagtaagtaaaactattgagagttttgtcgcaattaacccttttttattttatttaagtcggtccagttcgaggtctggggccgggaccgtggtctaagtctaggattggggtcgggaccggaagagttctaggttggggtcgaagtctaaaatattaattataaaaaaaaaaattgtttaagaaaattttgaaagtgatttttttttttcaaaattttgattcttaattaaaaattttaaaagtaaaaataattttatagaacatatttttagaaaatattttcacttttctaactaaaaaacaaaaaacggattaaaaagtgttatcaaacacactctaatttttattaaaaaaacaatatataattttcctttaaaaaaaaataaaaattagacattaaatcactgaactttgacaaacaaaccttacacatccttagtccagtggaatgtggatgtgggactgggaagtagccgtgggcacgaaaagagaaagaattaatatgttgtgggtttaattccttctccatgatccaaaatttagaattcagtcacaataatcatgatcctaccagttgtaaaattagggaccctcgccataaaaaccatctgtaaacccattgctaatcgcctcaagaaggaagctggcttgcaccccaagttcaggaacctcatcatcaaaattgcccaggttttttaattttctgtttttttcgaactgatggatgattatcactctttttatttgaaacaacttagacatatttgaaatgaagttgctgtactttacttcagattactgctttctttgcttgttagtagttttgtctttactagtctaatgtcactggtgcttgatctctgttggtttattcagttcatcgatatgcatttgtattttgttgtctttgttaaaaaaaaagttatttattcattttgatcagtgagaaaaattatccccttcgagcttgtgatcttattggtggcacccatttgtcgttgctttgaacattctgttctattatggcaagaataatgttaacattttctaggaaaaattttcaactttgaaaggctgctgatagtttattaatttcgtttcggacattgatttagacaaaccatcgatttacaactcaaatgcaaagaaggatttatggacgagcaactgatgttgaaatacgcccactaaatgaggagaaagctgttcaagctgctgcagatcttcttggtgaactttttgttttttcggtacttacttgctgtgaattctctgcttttataaatgttcaaaaacgaaaggtttgtttgaatgtaaaattattgcccatttttgtgtgtaatataagagctagaaagtttcaattcttcctttaatgcaatcttttcaattttcataagttcaattcattgtttgtacattttcacaagtacaaatcaaaattgccattgaaagggtgcctttagtagaactaaatatacttgatgtttgctgatttatgaagctgcaaattgcacttgtgaattctgaagaatgcattacatatttttcttgttcttcttcttcctgtacactttggttgtaaagagtttactgcttgattggttcatcaatatggaaaatatccaagttggcccgtgtgttaataatataagatggagaatttcacaaggaagttacctctctgcacccttcttcaattaatcttgctttacttcattttagttttactactatcttcaggttgctggagctgcagttatttttgaggtgcagagaagcacaagatcagaagctagaaaggaggaattgcgcaaacaagaattacaggtatttattgatattattacctgacaaagaaaaaattgtcttttctattttctttttgtcctgcaattgtgattcggagtattaactccttttttagggaacatggaagtttctaaaactagaaactggattgagtcctttttcatgtttcttatgttacgtagtataagtgtatgtaattagcatttccaccaagtaggttactaataagtacttagtagcatatgatctttgactagtttataacttatgaaaatgtattacaattacaaataatgagtaacaaatgacgaaactttcatgcctaatttctttttgttccatcttgtttttagaatctaatgaagcattataaaagagatgggagatctatctaccaatccatcattcaatatatgattggattaggatatttgtattgctgcatcatattcttcaattggaaaaacttctcttgttatgtttatgaatattgttcttttagtatgggtgatttaattaggggcagctttctcttttcaataagatctgcatatttaattgacaaactgagttgaatctattgcctaaatgacatcaaaatgcattagtttctgcagtaactttacaattacagtgtggatcaggtgtgttacactcatttggtttaggtgtttgaaactgatttttcattataaagagccgtaatttagatgatattgatgtcaccacaagattaaaaaaaacaaaatacaatccctgattctggttagatgccgtacaatcagcggtgtactccacttaaagttatcttcatgatcttttcaaactgttccaggaaatgaagcagagagatgacaatatagaaagagaaattgaacttctgaagcaaaaaaattgaagaaatagaacatcttgcaaaagaaaaagggatttatggtattttcaatttcaggcatgctcattcaactgaagatggaaagacaaagcccatctgatcacaatacaatcaaatcaactatggcactctatcatcttaattctgaagagctaacattccttagtatgatattcttttactattattatttggagtaaaagctaggacaatgattttagcaaattgttaaaggttgtttgtgatgagaaaaaatttacaatttttatgttattgaaaaagttggagtaatgcatagttggaaacttatatcaaaattagtaatttttccacctgaaatttgacatgtagtaaatcgtgccccttgaatttttttggccgttaaaaatttgccctgaactattgagattgttaaatttaaagacttttgtctaatttcatttaattttactgtttcagtgattgtttatgtactaaaccatgctccccagactttgatatctaccaaatcatgcccctcaaactttgatatgtactaaatcacgccccttgaactttcatccatgttagaattttttactaaaattagacaaaagtccttaaatttaacaatctcaatagttcggggggaatttttaacggccaaaaaagtttagggggcacgatttagtacatgtcaaagttcagggagaaaaattactaattagcctaatcaaaattatgtgattaaactaattagttctatgattaatatattgaatttacactcatatgataatcaacaatttagtttacttatacttgtacagtggaatgtcttttttaaggcattagtaaaataagcttgtattgaatgtatggttatatatcaaactggaccgatattcacagtggaaagatatcataaatttattataatatcttttccaagtaaatatcacttaattgatcttatatcaataatcttaatcctaagatgattaggttttggttttaatgtattacatgtattctttgacttgttcgttaaagctaaccaattggattgacctaacacttacatctttgaaacacggtagtgcaattgagtaggagcgctaaacatagatatagaatctatagcttctataaatacatagaagtgaaatgatggtttctttagagtttggctaaacgagtttaaattgtggagtactcatttcaataattatattagtttattgaaatatcatttacaagtagctaagtattttaaggataaaatacattcaagggtaaaacggtaaaattctccctactcgatgtaaatcattaatagaggatcgttgattatttagattgaaataatagataatttatagcgtatttgtacttggtatagagtgttctatgtaatcaagagtgtaattttgaatctatactggagttaggagaaattaataagatagaaaatttacttggtaaattctagaactacttggttggagcttgattatataggctcatggtccccatactacttgaaataatattgtcttgcagactcaattaattgattttattaattgattagaattctgaat

SEQ ID NO: 217948 - DNA, 2526 bp, Cannabis indica
aaacctccgaaaacgaacgcagtaccaaaccagagctcaaactctgctctttggatcatcaatggcgggaggtaaggccaggaaggacaaaccgaagccaaacgctgcggctcacgctccttaccaaggaggcatatcattccacaagtccaaaggccaacatattcttaaaaaccccatgcttgtcgactccattgttcaaaaatcagggattaagaccactgataccattcttgagatcggtcctggtactggaaacttaaccaagaagcttttagaagccggaaagatggttatcgcagttgagcttgaccctcgtatggttctcgagttgcacagacgatttcagggtactcctctttccaatcgtttgaaggtttgtatatactaataatttaatgatagttttgagatcaagttttctcttttcttctaaagttaggatttttgttgaaggttttaagggttaattgattgatttttgtagttatagagttttaacactgggatgagctatatgaatatgtgtatgttatatatgtatatctataaatatatatatatattttaatcagataacgagtgaaaacgattaattgaaacatattaatattgagcccactaaaacaatgtcaaaactgttataatcaaattctgtttgttctatgaattaccaaacaacgtaatgtaatgtaaagccattgcaaagtttttaaagcgaaaccaaacaatgtatcagtgtaatggttggtaataatgattctattataatttccactacattaaaccaaacattgcctaaatatgctaattggcaacataaaagagtaacttttaattatgatctctaaaactatcaatagctatatggttatgttgtatactattttattggaactatgattcatagaccatttctcataaaaatattggctttaagccatgaactaagtgctagttggaaacagaaaagagcaacttctaattatgagctctaacgctatcattagtttttatctgaacaaagctatagggtaatgggtatgttgtatgcttgtttattggaactatattttatggaccatttctcataaaaatagtggctttaagccatgaactaaggatgctaatttgctttaaattgtgagttgttgattgaaactgttattgttgaaaatttggcaatttttctatttgatgatccttgtatatgatatttgtaggttattcaaggagatgtgctgaaaactgagctaccttattttgatatatgtgtggccaacattccctaccaaatttcatctccacttactttcaagttactaaaccaccaaccttcattcaggtgtgcaatcatcatgtttcagagggaatttgcaatgagactggttgctcagcctggggacaagctatattgtcgtctcactgtcaacacccaactcttatcacgagtttcacatcttctcaaagttgggaggaacaactttcgtcctcccccaaaagtggattcctccgtggttcgaatcgagccaaggaagccacggattgaagtgaagcaaaaggaatgggatggattcctgcgaatttgtttcaatcgaaagaacaaaacgctgggttcgatctttaggcagaagagtgtcatcaatttgctggagaagaattacaaaactgtacaagcactaaagctctcaggacagagtagttccatggaagaaacgggtgatcatatagacttttcgaaactcggggaggccaatgaagatttaagtatggatttagatgatgatgttgatgacgatgaggattttgatggagctgatgaagaaatggaagtggaagatggtaatgtaggaggggagacatctgagttcaaagccaaagtcttggcagtgttaaaggaaggtgactttgaggagaagagatcatctaagttgacactacaagaattcttatacttgctctctttgtttaacaaagctggcatacacttctcctgattttgattttgagtgtaatttataaccaaaatttcaaaattttaagattttgatttctcttattttataattttgtaaaagcttttcccacacaaggtattactagttaaattattcttgttgctcagtgagttgaatgagcacgagaaaaaaaaaacttgagaccaagaggattattggttgtttcggctctgttatatgaacttagatctttagtaactagggaactatacataattgctcgtgctttattagatttttgtttaaagatgttgttagggttgtttttcttttgattgttaacgattttagttgcctattgttttcttaacataacataatgaattatgttcgatttaattatcaaaaacacctattttttaaaaaaaatttaattaatcatcatccctaattaccaaatctttattatagtttggctagagtttctatgaggaaaaatggataacagtagccaatcttaaaacacaaatttgttcagtgtgattacattttaatcaattacattgtt

SEQ ID NO: 217949 - DNA, 3314 bp, Cannabis indica
atatattattttagaaaaaataataagtataatatattttaggtatttgacttttttatagtaatagttagaattattttcttaatagtaaataacttgtttttatagtaaagtaaactaaccggttagtttttttctcaaattaataaattaaattaaaaaataagacaataaatatcattggatttgatttttattaaagttatatagattgaattaatatctattataaattattgatttttataagtcattaattaataattataaattaatttttttcataattaattaataataactgcttttttttaaaaaaaaaaaaacgtaaaaaaaattaatatataggaaacaaacactcttttattatttatttttctcaatgcaaaatgaagtatagttagcacatataataaagaaaataaaacataattaactaaacaaaaaattacaaactaataaaaaaatatttttgattcttatatatacaacttgtgaataaatattatcccctaaacgtagctatataagaggaatattatttatatatataaaaattaatattaaaattttattttttttttattaattgcaagatttcttccttacttcattttattaacacaaaataatatttttataaaaaaatcaatatattttaaggaatggaattttccgaacaaggaaatttgactgtttctaataaaaaaaaatccaatcaagatattatttggacaaaaattatttacacgatttttttgtaaaagacctttttattataaaatgcactttactaaaaacgacacgtttcaaaacgacatgccgttttactaaaaacggtgtcgtttacgaaacaaacgacaaatggaatttccattacatatttggtcaactcaacactataaaatctccgaagaaaatccaatttatataatgaaaaaacaaatctaagctaacaaaaacatactacacacagaaaaattcaaagaagttgaactggcaaaaatggtgagctcaagggctttctgtgctatcggaaccctagctttactctttctctcttcggtttccgccgatgacgtcgttgttcttaccgatagtaattttgagaaggaggtcggccaagatcgcgccgctctcgttgagttttacgctccttggtacgtcatatttcccctttttttgtttgattttagatgatatgaccaagaaatgatttttatttcaagtttctcttagtatctttgtgtttgcgtgtagtgtggtgtatgatgatagctagtgattgaatatgtttgatttgatctgttttgattggatctattgtaactggagctgtgaaattagatctatttatggcaccgatcgaagcaagaaaattatgctaattttgttccattttcgtgataagttgattctgggtagttattccgtaactgtttcgcatcggtttatgtacggatttttgataaatccgagatatgtcgtaaagagataatgtttgaggagggtcgcattgatagttataactaagtatagtatttactaggatcttgaagttctactataatcagcttcaattttaagtgtttttaatagtttatgttgatttcattttcacgtggaagggtttgttgtgcgctttattatgattataaccgcagtgtggcatttgtgctaattttgattggaatgacaggtgtgggcattgtaaaaaacttgcacctgaatatgagaagcttggagcaagttttaagaaagcaaaatctgttctaattggaaaggtcagttctcatttttgtatccttgttaatatactatatggttaccgtgtaattttttaagtaaggattttcaggtggttttttatctcatttcttgatgcgatggttccatatgtcattttattgaattttggttactagttctggatccgttttatttctttctgttaagttatctaatctaatttgagctatcttcctctgtttcatgttcactacaagtggttactttattgcagtttcttttgtattttagttcatgccattgttttaatttataatgatgttttgatgctttgtggtaggtggactgtgatgagcacaagagtgtttgcagtaagtacggcgtttctggatatcctactctccagtggtttccaaaagggtcccttgaacccaaaaagtgagtgcattcctctttccatcacattatagtatttacgtaagttctagtcagaaagattgaccgcaatgtcaggctagcattttgtggacatattcatgatatgtgagtgctgaggtctaggttcatcaccaaagtagaaaaccaacaccaacacaataataaagatagagattacatattccctgtacttttaatctgcagactggattagataaagctttttctcttttgctctctttataataataatttttatatattctaattagattttacatgatttaggtatgaaggcccacgtactgcagaagctcttgcagaatttgtcaacaaggaaggaggtattagtttaatcgtattacttacttcacttcaatagttgtttattgagtgacagtgctaatgcaagtgcacttttttatattgattcttttttcacttttggtaaatcaactctaatcttgttttttcaaaattatatcttttgcaaacctgttattcttgataagccctagcaactttcttttgtggaaagtggaatattgaccatgttaattcacaaatatttgtcttcttgtttcgttttagtttttctctggtaccatatatcatacactttctcgatgtttttgtttgttttctggaatttttaatgaactcccaaatccgaaatcccaacttctcttcttttttttttgctggctggaaactaattctacttgcttttagttacctaatctgtaggtagaaaaatgattaatatttgtgctaatttgcaagcagggaccaatgtgaagatagctgcagtcccatccagtgttgtggtactttcatcagataactttgatgaagttgtccttaacaatgaaaaggacgttctagtggagttctatgcaccttggtgagaaaaatacatatatattatttccagaaaaatatctaatgtgttgttagttagagcaagacagtgaaagagaatcgggtcaaaaagaaaagagaaggttaaaatattaccccataagaattgttacatatcaataattttgagtttttatttttttattgcaggtgcggccactgcaaatcccttgctcctgtaagtataatcccctaaaaatataatt

SEQ ID NO: 217950 - DNA, 9614 bp, Cannabis indica
ttcctttttgtatttttttatttttttcccaaaaaaataacatacaaataataaaaaattaacagtaaattaacaaaaatacaatataaaattcatcaaaagattatattcactataaataaaattgtaaaaatattaataaatcaagttacaattttgccaacaagtttttttttctttctaatttatattgggagaagacaaacaactcattcatttttctttttctttttctaatagcaaactcattcatttttctatatcatacattgtgggcatgtttaatttatgtattgttggtcgacagatatgattgtgaaatatttgtccctttactaataatggggctaattaacaccaattccaaattccttaaatatgtcatttagattatgctttggcttataggtatctaaataaactcatacatataacaagaaaaccggtttaatggagaagaaaataaatgataaaagcaacagattttttcatgtataataggatcttggtaaacaccaatgccaaatcgttatttatacatttcttttggaggagacccacatacacaaacaggctatgttttggctttccctgtcttgattttgctcagtctctacaaggtgccattgtcccaccatgagtgtaacaatgaaaatgctctcttaactgggaaaacagacaagatcccctttaggctttaaggtgcattgtcccttgtaaaagaaaattctaaagctcccgctaaaattgatactagctgtgcactactttcagctcaatgaaaccaagcagtacaaataatataataccgaaatgtcacagaaaaagaaaaaaaaatactatgtagtcccacagggtatgttgctaactcgagaaatgtcacactgtcctgtcctgtttgatgtgaaaaaacacaaaaatataatacattgacacactgcgtaaacgctgttatgcacctgcgcaaaaggattctgtccgaatgatcgatcagactccactggaagattttcttggaccctctgatgatgaatcactactccatctgcatcaagagaaaccatactttataacaatctggtaaatccatgaagaaagatataaagaatgatttggcttaaaaaataaagaatctccatcaccgtcaccttttgtcgttttgaatttggagagcttgattcacagtcatcatgtcgacgtgatacccccacagtagagttctcagcctgatgtgatgtcccggcatcagaagccacagcctgcaaaacaaatttttaaaaatttgctttttatacctatagatagatccattatttgatatcatttagccaataagagaaaaaaagagtgaagattcagtatatctttgccaaagggtctctactaataagatacatacaacctccataatgaaccggtggaagaatgcagagcactaaccggctcagaagggctagcctgttctggatggacagtgtctgattctgaaacagcttgtctggatattacaggcatgatttgacgaagaaggttggaaaaaaatattccttcttcactaggacttggttctgcttctggttcaccctgaggaccactagatgttcttgcctgatctggggtagaaccagcacctgcttcctctgaacttccgtcttctacatggatttcacctccaggaaagaggtttcttatgaattgcatgacattgctggggagctgtctatcggaatcatcattattttgcatccccccagcagacagaatgtttatgctaacactgcgtgcattcaatgactcctgttgtcttggattaggtcctgccgagttaaaaaataataataataaaggaccatcacaaagtaaggtagaaaacatcatttccaagtgcaaaggttcagacaattacacacaattaaatttaaagaactgggctagttgtcaactatgcaataagcaacaactaaactaaacatacaaatctgtgcaagaatatgattttataaaatattaaggttagcaacataccctgtagcatatgattttaaggttagataaaatattaaggaggccaagggccaaatgtataaagtttggagagaatcagaaaaaaatataatatatatatgtaatacacagttccgtccctgggaacgagtccctgaatttcaaagcaagctaagaatggtttctcttaccaccttaagctaatgaatgtatatagtgaagaattacactacgtttggtagagggtagaggaataggaataggaagggagagaagagatggaggaagactctctccctccaaaaatggaagaatctactaagaaaaaaaaaacaaaaaaaccatatgaaatgtcttttctacccttcaaaaaaataacatataattgtattaaacacgatgagatagtaattttaatatttatgttactctccatccttccaactttaatcctaataacaaacaacacaaaagagaacaactaccttttccatccctcctactccctatcctttctaaattctccatccatcctactctccctccttcctattaaacatagccttaaagaacacctaagggacccgtgataataaatgataaatggtcgacttaattttttgctagcccatactatatatatacaagtgtgtaaaatgtcattttgaccctaaaattccatgttattttgataaaaactaaccgcctattatgtcaagtttccttcaaatttaacagagcacaatagaaattgtgcaagaagttgtagtgctggatctgaaacttcaaaaatgtctctttttctaaatacttcatgtcacactgaaccctataatatttggaagggggcaccagcaaatacctaggtagatcataaggagtgaaaaagaaagaaaaaaaaagaagtcttgtttttagtgtccatcaaatatttataaaaaatatgttgaaagggactaatttgacacttttcagtagcttttaaggaccactactgtaatagttaaacgaccaataaggtaataagtaaattccaaatgtctactatggaaaaatacagttttagccaaaatgattagacctatggtttcacccccacaaagtttaagttcaatcctttctgagtacttacataacaattgctatagttttcaattcttcaaaaattgtaggaaggcgaggagccaagtttatgaaaaaaaaaaatgggctactatagaataacgaaaggtcaccaaaatgaaataatgatgcttaagtgtttctactgtccgcaattagatttataccattgaaacagatgttcatgactacatgcttaatttttataggacaattatttttcattaaaaggtttaattgaatcttaccatctcttgcagaatctcctgcacgctgctgagctgcagattctgtagactgctgctcaggatgcaagcctccagcatgagctgcatgacgctcaccagatgcctgtgctcctcgatcaccactcaaatgcccaggtgcaacatgttggaatctaccaagaacaggatagtataaacccatagaattacctgatgagtctgatggtggtagacgaccaaaaggaccaggtactgctgcaaccatggtcctgagtggtaccacccgtacagctgattctcctgcaaaaccaggtgcatctgagaccctcgcagttccttgattgacaggaatttctccaccagcgcttgttgctggattttgttgcccagaaggttgctggccattcccttgttcctggcgattaacattggctgcggatgttgacgagccttagaaatagaaggaaaatatgaaccaattagaatacaaataaaatagagtggattataataaatagcatgggatgagagtttctttacagaatacctcttcgtatttgtatatcaatacgcctagggaggagcccatttccaagaccattaacaagaccagagccagcgtgcacagctcccatgggaatggccccaagactcgtaccaacttggaaaggaagaggctaaagaaagttggttgaattagcagatttcttttcatattaaatacatatgtgaagaagagaacttaagatagtcacctgaaccatgatgggattaggaccagttggggatataaaaactgcaggtccagcattcaccacagcctcagactgtataaaaatagagtaacaaaaccaggtcagatagtatgacagggaacaacatttatttattagcttattatgaaaaaaatttgccaaggcagtttcacccaaaaacctcccagtggccccaaggtttttgagtccaggggatttgaacttggaacaaatgcctaacagcactttccaacactccttaccacaagacagtggacaatatgtcatacaaaggacattagaatttaggatagcctcaccggagtttcacccaaccgcaatgtcatcattgtgcgaccaagttcaagtaaaaatgcaccgaggctatgaaacaatgctccacttctcattgtactagtctgaatgtttgaccttaaagacacatctgtaacattcacttgattttccaattgtcccacaagttgctggcaacaataacatggaaattaacattgtctcccatgttaatcacaataaataaacagaggcaaactaataagaactttaatactattaattaatccatcaaaaaataaagctagagttgagatcgcacaagtagtctttctgaggcctgttcagtaagtaattgtctcgcagaaagcatgacttctgctagggatccaggtgtgggaagtcctcgtcttgttcctgatgcagattgagaactcgtgtcttcagacacattggatgcactttcttgacgaccgtctgccccatctcttcctgacagaaacaatgtaaaaaccaaatcatcagtatgcaacacagaataacttacaagaatcacacagaaaactttggagggtgacagatattaacctatggcatcaaattctcgtcccatattgcttagatattgggtcaaagttgtcaatgaatcaggaattacctacaaaaacaagaatagataattagtcttaagaaaaaaattaaacaaagcaaataaaaatattcacaactcacatgaggcggcagttgagaccccaaagaaaatgcagatgaatgtccaaaggtgccaataccaagtgatcgatcagatgccatcctagaaccactttgatcagattgaagatggagagaatctaagaaactactagcacctgaagttctttcagatctttgagggccatgttcctttagtatagaatcaccaaccgaaaaaaaaaaaatacaagattaaggcttaaatgtttctatcagttttcaacaactgttcaaatgcataagcatgtgtatgtactacgtacacatgggtgtgtttgtccctaaaatagttaaaatccagaacatgaccataaacttcttccatctatagatggcacccgcatttcatcaagtgaagacatgccttatatttcacacagataggtactcaaatttatcatctatttgtttgtatgtgtttatttgtgtgtgtgtgtgggtgggtgggtgtgcttgtattacaaagtagcaatgtatcaataaaaaatgatcattgatgctgctattacaaagacaatgtatcataaaacatgatcactgataaccaataaaatacacacttaaattaaccatcaggctggaatggtcatcttaggaagtttaatatttaccctgttgtccatcccttcattgctacttccaacatttgaaataccaattgacccgagaacagcagatagaatctgtccacatagaaagaataaataggttcatcaatatgagacataattgcaccaatagagactagaatcttttatgtagatctcagcaaagctatttctattaaagctaagaaggtttctcacccgactgatttctggtggagctccatctccttggacaggcaaactaaaagtctcaattactacaccgggtgctatatgagtactgtgactacgacttgtgcttgaagcaggatcagtggctgcaaataattacctttgttagttaatccatcaatgtgctaagccactcatttatatttcccttccagaataaagaaagataagaatgggtgacaatatgtatgtatggttgaacacacaaagatgtgcaattattacaagtgccaaaaaatgattttaagttatcaaacctggatgattcaataaaccctcaggtggcgatgaataaggctgtcttacaaccaaatgtaaagtgtgaccatcttcaacatctaattcttgttaaagtaaaagaaatcatttcaatgggaaagtacaacaattaaaaataagagaagctataatagcaaacagattttggcattcctgtaaagtgggttttttttaagacatctctgagtaccagaagttacaacgaccgacccaaaaataaaaagagcaggacaaaggacatataatatacaatttaaaaagattttaaatgctgccattaaagccaactccatgagcaaattataaacacccaaataggaagtacagcaatgaaacaccaacgttttcatagttggaaacacagaaaaacgaggatacggtaagcagagagaagttggtcatcctttaggactttcccgcgacatataagtctttgttgctctgataacacaccagtgacagaagcaatctgctctttcaaagcaggaactggcacctgcaggaagagaagaaaatgtcaataacatcaatgccttgtgcccttgactgttaaaactcttactcgtatacaatttactgtaagtaaaaccagatgccaatgctcttataaagctttgaaacttcaacaaatatatgtaagtgctggcacacgtgttgtgatgtaccaaatattgttaattgtaatactatcaaagaaagccatctcaagctgccacaagcataacgacacataaactagagaaacaagaccactttccaattgcaacaattgaaaatttatactcaaggaaatgtaactagtaaaagtatccctgtgtttcctaaaattcatcttctctttccttttcctttttcattgatatgtaactgtaaggtcatcagtatactgatagaaagtgtctctgtaatcacttaagagtcgatcattaagacctgaaactagatttttaaggaattgcacaaagggcaattagagacattacctgtttatcaacttttaaagtgtaggtttgtgaatccaaggttttaattttaatctcaatgtcagcttcagatgcttcaactgcatcacagtcaggaatcagatcaacacccttgcttgccattcttttaagagcacctttatacctgaaaagaacaaaatgagaataatcagaattatacccttgtttccattatagtgaggtgagaataggagaagagagttattaaacaataatcaaatgtttattcatggttcatagcttatgatatgcaaaaaagaggccccctttcggtaagtatggatattatattatatatagttattgacaaacgaaaatactttgacacattgaaggtacatacatataaacaagcaacaaaaaaaaaagttctttcttctaaatcaatgattctttctatcctaactcaatattcctaaatccatttcatagttgtgagtattgaacacaacaactcaatttgaaagacacaaccaaaacccaatagaaatgggaaaaattgcacttagtttaaaactttagaattgcaagtgcatcaaaagagatgaaacaaaccacaaaatacaaatccaatctccagaatttaaatatgtagaaatattcagttacttataaatcaatttcattaaaaaaaaagctggtgtttgttaaaagagaatacagttacaaaaatgtcgaactcgatactgaactaaagcacagccaacaaagaatgcttctttcaggcatctacaattcacaaacttgattagttgaaaaaacccttttcgattcaataaaaatgataagaattcatcaatacccacctcgtacttcggccaaactttaccaaataaaaatcaaattcaccattctctttcatcaaacaccttcaatactcaaaaccccatctaaccaaacacattaatacatccgtaccaccacaccaacaccaccattcaagtttaatttcacaatcaaaagacataaataatcaactccaacctcaccccccctaaaacaaaaacaaatgaaaaaaatcaccaattaacagcagttgaaatcgataacgaaacaaagcaaacctgattggaacaaagagcttgggatatatagcgagtgagagacgaagttcgaagaagaagactagtggtttaaagtagtgaagagggcggtgttgatgatatctaatatgggtttcgtctgggttgtcctctctgtcagtctctccgcgtggcaggtcgaggaagaagactgaggaagccccaggaccaggaagggaagaaaaattgtttagatgatctctctctggtctctatatatactatgactattactcaatactaattactatatacactatacaatcaaaactatacttaataaagatgatacctttttttattggtatttttttttttctttttcttctaattttgggtctaaacagatttttagtctaaatttatacaatcacatgccaattatgagacattttttttatagctaccaattatgagacatttagaatttagtgattaagaaaaaaaaattccacatatattaattttatatttatattttggatatgctaaataaattattattattattattataaaatttaccttttatattgggcaaagatataaaagtttgagcttttttattagataaataaaagtttgatcttattgtggttgtaatttatttaataataattaataaattataaaattatattaaactagaaaactactcgtgcttcacggtaaatatttaaaaaatttaacattactaatttttttatataatctttgttaaataacatgagaaattaggtgtattaagtgtacaaactgctcacatatatttacaaaattagaagtgtcacatgattcttataacatttttatattctaatcattcaaaattattctcatcactgtatattacatatttttcattagatctcactaaaaagtttactatgtacatataaaataaatcaagtaataagttaacattactaatattttattcaattttatttttttgaataatatgataagttaggtatacaaatagcctaatctgtatttataaaatttcttttttataataaaagtatgacataattcgtataatattattttatatcctgatcatttaaaattgatatcctcattttatattacccgttatcattacatcatcttatacatcatttgaattattacattataaaaaatttctaattaaaacatatataacatacaattaatcaaaagaaaaatataagaatgatatatatattattagagttataattaggtaaatttttaatttttttaattt

SEQ ID NO: 217951 - DNA, 7869 bp, Cannabis indica
ttatatgtatatatttggatatacaattataagtaagcaataattaataataatttaattttttctttttaattttttgaacatgaagggagtcacatgtgtaacattactctccagataacttttgtcgtctaccatatcggaaaaagaaaaaaaatacttttttttttatagcaaaagaaaaacaatactattaattacaagagaaatactaaagggcacaacttatgactctcttatgtgtcaatatcgctattggtgtaattaagtatcgggtcccatataatttaaaataatatcttttagggtatcgttatccaatcgcaacgcgacatatcgaggaggtgctaagcaccactggtacctaatagcgatgctctaatcataaaataaatattaatatatggcgtcacgagacattttataaatttatttatttatttatattaaaattaattaacgtaactagtcagctatacacatacaaccattaccaccctatagccttgtgctgctaccttctctcattttatatttttcatctccacacacatctacatcttcatttatggccttttccactaatttcttctagccacttctctctctcccatcatcatcatcatcatcatcatcatcatcatcatcatcaatgaagcacaatcaagctaataacgatcatcatcatcatcatcatcagtactactacggattaatatacaagcagttttgtacaaaaaaagtgggtctcttagcactaatcttcctagttatccttaccacagtcccaatctaccacccttgtataaaatactcctcatttttctctacaacttcttcttcctcgttattggccggtggtgttgatgatgatttggatgatattaaaatagagtcgtcttccactcacaagtgtgacattttttccggggaatgggttcccaacccggaagccccttactacacaaatgacacgtgttgggccatacacgagcaccagaactgcatgaaatatggccgacccgactccgaattcatgaaatggaaatggaaacccgacgcctgtaacttgcccgttttcaacccggctcagttcttggaattagttagagataaatccttggcttttgtgggtgactctgtcgctagaaaccaaatgcaatctctcatatgtctactttcaagggtaattaaaacttaattatattacacttctctatgcaaatatatatatatatgtacgtaattatacaaaaatcgtaatatgtggtaattttcagtatatctgtagtactataacactacacaagttagaactttggtgataagtattgttagtcgtaaaagataagtttcgtatgcttttttttttctttttttttaataatagggatgtgatgtccattttctctttttcttgtgtggtgtggcccatcttccctttcttattccatatgtgtctttgtaagtagatattgattgattcgaccatatgatattcatacagacttattaataatgtatttattctttctttacaaaattattatttatgctgttttttttattattattaaaatagctttatactatgtgtattgatgcatagtttcagtatagtttcaacttttaaagttgattatttattactattctctatatatgtgatagatattggaaagtatgagaacaatcaaataatagtctcttattgatcaagtgtacacagttttttgtattttcttttaatgttcactcacctttaacttttgggtaaaaataagtgtactgttttctacctaaataataaattattttacttcttggaaggatcgatattgtctagtgaagtttacagataatagctctctctatttccagctggaaagaatcaaactatcgaaaaatatacatatatacaatacaagatagcataattaaactattttttgtcacattgtctttggacattacaacaaattttcataaagttgtttggtttacatgcttaatttttaataaatatatgaagtaatatatatttatacattttctattgattgaaaaatacatatacacatgcattagattaaattaatatatacgctgtatattttttttcaggttgaatatccaattgatgagtcatacacttcaaacgaacaatacaaacggtggaagtacacaacttacaacttcactctagccacatattggacccctcatttggtaaaaacccaaaagacagagacagaaggcccaactaaaacgggcctattcaatctctatttggacgagttggacgaggcatggacggcccaaatggaggactttgactacattatactctcaggaggccaatggttttatacacccatggttttctacgagaaccacaaaataataggctgccacttctgccaaataccaaatgtgaccaatttgggtatgtactatgggtataggagagccatgaggacagccttgaaagccatcaatggtttaaaaaactacaagggtgttacttatcttaggacttttgcaccatcccattttgaaggtgggctatggaaccaaggagggaattgtgtgagaacggtgccgtttaagaataatgagaccgttttggagggcccaagtatggagttttatatgatccaagtggaggagtttagaaatgctgaaagagaaggaagaaaaagagggttgaagtttaggatgcttgatacaactcaagccatgttgttgaggccagatggtcaccctagtaaatatggtcattcggccaatgtgactatgtataatgattgtgttcattggtgtttgcctgggcctattgatttctttctttcttttttttttgttgtatttatgatatttttttaatttcccattgtatttacttctcctgattattattacttaataagatatgttattgtggctagagagtaatgcatgcatttaattaaaatatatctatgttagagaacggggaagttctggcataagtcagttgttaataaaataagaatatttgacttgtatatgcgagaatggaagaaaacgacagcaattcactttagtgtgaattagtaaatgagaatataattatcaagctaattataaaaccaaaaccaaaaacaaatgtaaaatgtgtgttaaaatagttactttaaattatttggaagatgtcacattctaattttcccttgcattctcctatttgtatcaaacatcttacatctaaggctaatatctgaatggtgatatttttttcttatgttttcttttttaaatgctaagaaaaaaaggcatttcctttatctttttgtttagagaataaagacacttgtggtgtttagtaccttgtaaaatcgttattagttcaatttcatattaggcctcacttattttattttaataaaagaattgttaaagggtactattagtgtctagcaccttttttagtgtcaaattgctatttgtataattaagtaggggatctcatataacttaaaaaaataaattttaaggaatattgctaaccaattatagagtgatacctaccaaaggtgctgacattactaatgcgcaataataacgctattttaataaatattataaaaaaattgctaattaattgtagggcaatactttatcgtagtaataaacaccatcaatactacattacttttattgtttacctatatatatagggaattgtgtaaagttatatacctaagcacaagcatcaagcaagcctattcctttgtaatggagataatgaaaagtgaaacaaacaatctaaaagataaaaacgtaataaaataatgtgcaacataaattatataaaattatatgacaagtcttttttaactttatcgtaaatgaatacaattggttaattaaacaaattaatcatctaaaatcaatcacataagtggtatagtttattgttaaagataaaacgtgaaggtaaatatgagaatccaaattttagaggcataaatttgtagcaaattgtatgtaaagcaaagattacattattctcaactggacctatagtggcggctccaccactgcacatgtatcatataaatatttatatatatgtatagccaagatatactgtcattgtcaccctccaaaaaaaaagaaaaagaaaggttgcacaatttgactaagtatgtgagaagtaatagatcttcttagcttaatgctctgcttgtttttgagccattctcttactaccgactgtgttaaacaagattgttttattcataattattttattatatatcagcaatagtatcactcaaatatataaattggatcaacttagactattggagtccatggtttatgattattataaggttcaaattggtaaaagccaagatgcccttcatctaaattattggttatgattcgtacacactatattgattaattctttgtttttcttcttcagatatacatataaccccaaatgaatgtatagtttttccaatcctcaaacacacacacacacacacaacaaaaaaggtaaaaattatggcccatttcctgaaatattctaatccctttggtaagacaaatctgctaccacaaaaacagtacttgagttcaacctttcgatttctttcacttgcacttaccataacactactctgcctattatcacctcaattgttcagtttcttctcttcatcatcatcatcacttccatggctcaaatctcacatgttcagcttgagtagttttcgaaacaagtgcagtatttttagaggcaattgggtttataatcctgacaagaggcctttctacactaacttcacttgccctgagatctatgatcagcagaattgtatgaagtttggaagaccagattctgagttcttgaaatggagttggaaaccagcaggttctacttgtgatgatcttcctagttttgatgctgctcagttcttggagcttgttaaaggcaagtcaattgcctttgtaggagactctgtggccagaaatcaaatgcagtcattgttgtgcctcttagccacagtaagtactattacatatactgtttgtttaactttatttcattattatgagtaatatatatatttatcatcacacacatgtggctgtttgtatccataattgtagtatcaaatcaaatagctgtaaaccatcactttgaaccccaattagtttttctttgcttttgtaaattctactaactaaactatactactttacactattgccacatacacagttgtgatgatgttacaagataagatatattggagttagtgccactaccccttacatttatttgcatatacatatatatatatatatatgagaaatatgtgttctataaccccactttggttgaggacaaaacaaaccacattttggctaatcatagtcacattcacatacatataaaagcagtaaaatgtggtccactcgaaaaggacacgcatggtgatcatgaagctatcttataataatgcttaaactatatatatatatatatatagaaccaaaaaagtttccaccttttttctttttactaagaactagctttatactattccaatatatacatggtgattgtgatcctacaagtgaaagtatagaactagtacttgtacatttaattgtactgtatgtatgtattattatgtgtctatattagtaaaaaaagaaaaatagaaagaaaagtctatgatgacctcactttaattggttgacgacaaatgaaatccaatttggccattaataatatacatagccaagcatagcgtggcccacttggcaagggcatgttcttgaagataataattgtatatctgtatatatatgtataacatatatatagtgagagctcatcatacaattattaatcaactatatttatgtatatacacatagcaaatctcatgtgtgataaagggaaatagtgaagtaacagagtacaaatattcttgtgtaaacatgtcatgtcgggtacaaacatgtaaaaaagaagaagaagatatcaatgtttcattattaagatattgtatacgtaatatgttttgatgtttctaatatataatattgttacatataggtagaatatccaacaaatgtgtcgtataagagtacagatacaaagttcagacgttggctgtacccaaattataatttcacactagcgtcgttttggtcaccttatttggtcaaagcccatgaagctgacccaaatggcacagtccacaaaaagctgatggacctttatttagaccaagttgataatgcatggacggctcacatggagtcatttgattacgttataatctcagccgcacgatggttctttggtcccgaaatataccacgagaatggtgttgtcgttgggtgtaattattgcctgaaaaacgacatcaaaaacctgacaatggcttatggctacaaaagggcttttaggacagccttcaaggctcttttggggcttgaaaagtttaaaggagaggtaattctgaggaccctttcacctgctcattttgagaatggtgagtggaataaaggtggggagtgtaagagaacagagccggttttgaggtcagaaatgaagctgagttggtttgagaaagagctgtatttgggtcagattgaagagctgagagtagtagaaagtgaaggtaagaaaaagggtgtgaggtttagggttatggatgtaactgaagccatggtagcaagacctgatgggcatccaaaccattttgggcactggccacatgaaaatgtcactattgctgattgtgttcattggtgtttgcctgggcccattgatacttggaatgagtttttgtttcaaatgttaaaagcatgagtcaaatcaaattcattcatcatataactttatttgatttttttataaaggggttttcttttttaaatattttttatttttttattttttttgtacttgaccagtacacactatatggcatttgttaagtttcaggaagttccaaaggaaaggtttcaaaagactgacacaaaattaaagacatcccatcaggcaccagcttatacattatgcattattatttcattttagccaaatatttaatattgggttaggtatggatgaaccaaaaatgccaggtctactcaatatacaagtgagagatctgctttatttttcttggtaactactaactagttgacaaaagagttttatatacaaaaccccgtaacaacagatcacatctatttcatactcttataacatagtttgcttctttgggctaaacaactattgatcagattaattgtgtgacgaatttaaagttctaaatatcctacctatcagactttctttctttaattgtctaactaagactacctaaacgactattttgttttttctatttttttcaatatattcatttcttccagagatagataccacttgcctttcagtgtgtctagtctagctaatataatgtagttaagtatataatgcattctacttttagtcttatcaaagttattaaatatatgagagttttttcggctgaatcttcttaattattaatctacttacacttaaatatttaagcttaaattttggtggtaaaacttttcaaattattgaactattaacaaatttaaggtgatatctatttttcactgttacctgccaacatagacgaattacgtgtacatttttgtacacgtgacacgtttatagtggtacacctaatattatttaattaaaaaattataaaaaaattaaattttcaaaattttaatagtatatttttttaatttttttattaatttctattttttttaaaatttattttt

SEQ ID NO: 217952 - DNA, 3575 bp, Cannabis indica
atttttgtaaaaaaataacaaaagtgagtataccatataaatttcctaattgaaaaatatccaaataagcaaggccaaaaaaaccttccttggacatggagaaaataaaagcaaccaaaacaaaagaagaaaataaagtagctagaactaacattatagcaatactcaagttatatgttattatgacgaatgtgagttataaatgttcatctttaatatcatctaattttaatattcatagaactccaataaaaataacttatatgttcctgaaggcaagaaaaagaactacctttctaccaactattgtaaagataatatagattatagcaaagtaatccttacttatcattatttggattaattcagcagtactatatcacattcacattctataatatgctttatattttagcgtcaacattatgtcactctgtcaaaatttaatcagaatttaataaattgggtgtttaaaataagctgactttcagtgaaggaataacaaccaaaagaattttaaaccatcaacaaactggaaacatcaaactcttgacattaaactaaggtccatctgaatctgaaacgtggcttcggtggtcaggctaatctcttttctcaacagaaatcaaactcttgacatagaagttggataaacaagttcccatatcgacctcaggaaggggaaggcctcttaatgtttgggtcttgagattgtaagacactactcctttatcagaattcaccatgataagctcatctgtactactaaatattagtggaaagtgataggtttcaaggggcccaattgttggatgtgtggtccaagaatattcaccaccattgtagtcatccattacaaacatttgaatataacaaggaagattctccttatattcgtctaccacaagcaaggcaactgatttattccattctacaaggcacttttctcttttatcaaacataaaatccccattccgcattgcatctactggtagtggcatggagtgaaactcctcattagacatgtcaaaagaaagaattgtttgatactcaaagtcagggaaaggggttaataacatcatcaaccaataaaaaactcctttgcacaacactcctttgccatggtgaaaacaagtatcatcaagtttcacatcaattttaatccgtttccaagaatcagaattcatgctgtacaactcggcaaaacatttaaaattacgattacgaccaaaaatcctgaccaacttaaaatcattagcattcaaatcgtatccaaatccctctccatgagtcttaagaatgtgacgaagaggaatggttgattcaggaagaatcctggtttctctgataacaggatttatgagaacagatttgcctttatccatgtagttttgagctatacagatgatgccattacaatgataggtacgatagtaatcatacatttcatcccaataataggtacgaggtaaatggtcgaaaaaatcagtaatagaatgaaagaggttaaggaaatcggtaggataaacagcctcagggttactaaataaagaaagtattggtttgattttattgtgccgtgcaaaatcaacgctaaaccaactcaaaagtattgatgtggaagacaagactgtatcgttattatggtggaccaagtgattgtatgcaaatgatgggtcagtgatgaagccatgccatgatttagaaacccatttgaatcgcactagagactccgcaggaacctttacaaggatttttctcatgagttcgtctggtagctcacaacttaattcccccatttaggttcttcttcttgatcaaaacaaagctctaatgctccaacaaatttcagaacaaaatgagataaaccagattgtattacaattttcagacaaggaaataggcaagaaatggggaaaataaaaatcatgtactcaaaacccaagttttaataaagacaaatgcaaagaaagctcattggaacttgaaaacaaaacaaaatcacatctaaatcgactgctgtgggaacctttctttttggaaaagaaataaagaaatcctaactcaatagtgatcacatttttgggttgaaccaagaaaaattagagaagcagagtcttaatcaaatgacagggaagagataacggaaaaaagagcgagagaatcaaactaagaaagaaaggttaagagttaggagtttgtaccagtggtgtcaactgtcaacaatggagatgcttctatggaaaaagaaatgttttttatgaagtggggagagtgaggtttctagtagactcaataatggagattctcctatggaagaggaaattaatttaatgaacatgggagagcgaggtcgttcagtagactctttttattgacgacagttacaaaccgttagagagaaacctcaataaagctttatggatgtgtttcttgaatcttgctctgtttttgtttttggctttatttttcaaatgaaaaaaagaatgacgtaatgatgctttataacttgatttggcgagtgaagactgggattgagtgtgcgtgactacggtagtcttatatttgataactgtgacgttctataatctaataaatataaattcacatattaataggggtttttttatttttacactttaaaataatttttttttatatttttacgaaattttacatagaaattcctattgcaactagcgctgcaacctaaattacaacataaatcgtacagaaacccctattgcaattagctctggaaccactttagaaacctaaactgtaaatttgaaaaaaaaaaaaagttaaaaaaaaatagtatatggggcaatttccctaactaatataagaaaatttaaaaattagtattgtccctaaatttatagctacaagttgtcttttttctccgaccaggcccactagcttcttttggacataggtgcagcttggtcagagctgtgttttgctattgcaatttaatttttgttactgctattagtcttgtctttgtaacatgattttgagtgttttagttttgtgtaacatggttttatttgttttgttttgttttgttgttggttctttcttgttcttcaatagttcgtcatcaaatcgttgttagtagttgagaataacaagctctctgcaatggaggaggttgttagtagtgtagttacgtactttgcacaatagttgagtgctcaagctatgagattgaatgaacctactgcaatagtttctactgttgtattttttttagcaataaataaaacttaatatagatgttcataatgttaattatgatgatgcaatcatttttatctcactttatgtttagtttttttgttaaacaatctgagaattaggagatttattatttagctcgtttttctaatttgatcctagtcgtgtctctaatggagaatgaaaaaccgtgtttttgcaaatgtcagttgtatataagaaaatataaaaactgtacgcgtttgcagcagcagaaagtaattctgctacagcaaaactgaacaggcagaatataaaatatttgcagaaaaataaataacttgacacaagag

SEQ ID NO: 217953 - DNA, 4383 bp, Cannabis indica
tttttttttcgctaaagctctccggaataattttgtgtgtttcttttgtattgtcacattggttcaactgctatgatttggtgctctgttctgctttcatttttctaattatccacaaccgcccggggttccaatgcttccactttcttctgtgttgtaggttcaaattacgaatgcatgggatacaagtggataaccagttgccattaactccaatgccagttcttttcagaccccagaaagttggggatggggcagattacatcttgaaattttctgtgacaatgcaatcaaatgggttactggatctttgtgtctatccatatattggtttttatgtgagtagatcattgtttagaggaagtattttctattttattttatttttatgctaatcatatctttattaatcatatagggacctgaaaatgctgcctttctgataaacattcacgaacctattatatggcgccttcatgaaatgatccagcaggtcaacttcaatcgcttatatgataaccaaaccaccgtcgttgctgttgatccaattatccaaattgggtatgttagaagcacaagttggtgatttgtatttttcttgggctatacgtttatgccctttatttaagttgagttcaagttctaattatgtttttggaatgtgcagagttctgaacatctcagaagttcgattcaaggtgtcaatggctatgtcacccagtcaacggccaaggggtgtacttggcttttgggcatccttgatgactgcactgggaaacactgagaatatgccagtatgtattctaattctattttgttatgctttacatagcaaagttgtttaattgtaaccccaatggcatccctgattccctgtactaggaaacagtattctgttacgatggccagaccataatatttttactacgaaacttcctactcaaaattacgtctttaatagatgagtgttttccaataataccctgctgtctcctcctatatttccctctggaccacttttgcgatcttcatccctttatcaggccatcattatgtttctgaccatcatggattacacggcattactgtggagtctcattattgcttttgtggtttacttttttttttttttgtggtttacgttttttttttttgaaaaaaaaaaatagagaaagggctcacttgtcttggactgactgccactcaattttattgaaaagcctcaccgtggcggatgaatgctgtggtaacaggaaaattatagggcacttacaattagagtaaaaacaaaaatataattactgaaagttacatcagtgttttccactctacataactctagaattgagaactcctcaaaatgcttagtaggtaggtggagatatccagctactttaaccaactaaagccaaaggcttaaagccacatgataatgttttaggagaatgtgtgcaaacattttaataacatattttgtatttattatccaggttaggataaatcaaaggtttcatgagaatgtgtgcatgaggcagagttcaatgacaaatattgctatttcaaacatacggaaggatctccttggccaacctcttcaattgctttctggtgttgatatattgggtaacgcaagcagtgcactgggacacatgagtaagggtatggctgccctatcaatggataagaagttcatccaaagccggcagagacaggtttgcataccctttttttggtacttgttttggttatttctgggaggttcaaatatttgaattttgaaatcaattaacatgacaggaaaacaagggcatagaggatcttggtgatgttatcagagaaggaggtggtgcactagcaaaaggcctattcaggggagtcactggaatattaacaaagcctcttgaaggtgcaaaaacttctggtgttgagggttttgttcaaggtgttggaagaggattaattggtgcagcggcacaaccagttagtggggttctggatctcttgtcaaaaaccacagaaggagccaatgcaatgagaatgaagatagcatcagctataacttctgatgaacaacttctccgcaggagacttcctcgcgtaattagtggtgataatttactccgtccttatgacgagtacaaagctcgaggacaggtatctgtttttcaatcatacataaattcctcaactaaatatttgctactaggaagtctttattatctaaaattatttcaatgtttatagatacacattcaattttgtaatatgtttggtcctgacactaattagtttagatataaaaatgcttcttcattttgttggaatggaaatatatttatctatggtcaatattctgatgtgttttcacatatgctattaatttatcttatggagtcttcattttgttcattgattttgacttttacttcctgccttcgtattttattttgtttgtcatgcagatttatactacattagcagaatcaggttcagtttttaggccaggtcgatctattcaaagtacgtggaaagtttgccttaaccgatgcttatgaagatcatttcttactcccgaaatcaaaaattctgtggtcactcatcgaagagtaatattattacaggtaagctagctagcttgactaaaaatgttctatgtctttacgtagtctccatctcaaaaggacattaaatagtgttaaatttctttcaatcaattccagcaaccctccaatatcattcagagaaaattcagcccagcaaaggatccatgttcaatagtatgggatgtcatgtgggatgacctagcaaccatggaattgatccatggaaagaaagataatcctaaagctctcccttcacgtcttctactttacttacggacaagatcaacagagttgaaggaacaagttcgtgttgtaaaatgcaatcctgattcccaccaggctcttgatgtttacacttcgattgagatagctttgcaaacttacggtcccaaccaatcaaaggtcagtctttaccgccatatcacgtgttttaaagagtaacctgcttaaaattgctctgcaaacatgtgaaagagcaatcaattcttttcatgcaaacgagatgtcgtaagctaccagctacatgggataagtttgtgtctagcccattatatttggtattctatcaaataaatcgcttatatattactcgggtcagcttatatatccgattttgttctgtaatgttgttttgttatgttgttcaggattcgttaaaaaataaagtgacgagaccatatgcaccaattacggaaggtgcaagctctgaaaatgtttcgaaagaaaccatgtctcctccacaggtgcccgcgtcagtacctcaaagttcaactttcgggagcagtagcagttgattgtagaaattactccaattttaaaactcgtgttcttcgctgcttctgtcgtcacattataagattttagcagcaacagcataatcttttgaggtattatcttatttttcttcttctattgcaataatattttctgttttaattctctaatctgtgggattttgccactccagttacttaatagtacaacggcataggccgcaatatttagctgatgatttataagtaagccattcaacgacagaagcgagttttgtgagagatggatactctgcgcatagggaccagcttgtttgtaaatatattatagtgtacaaaacagaattggccgttggaaaacttgtacagattttgatatttgttgtataagtaactatatttatgatattttatatatatatgtgcagatcggcatacagaaaaaagaaagtaaacaacaacatatgtttcaaatggaaatatgaggttctttattcttaatcacattgatattggttgttttctcgtctctgcttaatttgattgttgtgtaatttgagtgtcacaacaatgatacacatatttatgtggtatgtataaaagttcaaccaagcatatttatttgggaaacttgttaaaagtcaaatggtattgaataaaataataaaaataaaaattagtgtgaatgaaataaagtatatgcaaacttcataactattttttttttatttaagtatatatattacaaccatattttatctgggactcaaacttaggacttccaacacaaacacttacgtataaccacttgaggctaggttacaaatagaattaggacatggaattgatagaattctataaattttaaatctactttaattaatatataaaaatgtgttttctttataattgatcaagctgattgataaatttcgttttctatttgaagtgtatatttaactaaactgagtaacggtattatcattgtacaatacatgactaacaat

SEQ ID NO: 217954 - DNA, 4219 bp, Cannabis indica
atttatgtaacttagtttttttttttgaatgatattttatgtaactattaaaatctcttatatatataattaattatatatttctattttattagaaaaactatatatttctattttattaaaaaaattatatattcattgacaaaaaaaaaactatatatttctttttaggaaaaaaaactatttgaaaaaaaaattatgcatttttaaaagttattttcaatatcgtacaaagaaattaattgaaaataaactttactataactaataaaagttttatagtttattttcttttttatatgtaaaattaactttaacaccaaatttattcataatttttttgaaatttggggagaaatttactataaccgtaatataatatcaattatcatataaaaaataattagataatattttttaaaaatatcaaatatttcttcacttttaaagttttttttctctcctcttctaaagtctcttctagggtttcttatgcaccttgggcgtcgccgcccagatctagatcggtggcacccaggaggctaattagtctcgacatgttgcgtgttggggaggaagtctcctcttagtgggtttcggtgttagcgggtcaggtgggtgttggacgttgttcttcaggaccggttccttggcgcctgttttttcaggcgaccggtcactgcttttggaggttgtccatctttgttgagatggttcttaccgctggtcagaggtctatggtggttctgtcctattgagcagcgtggcgctggtggtgggcttctttgggttctcaccatttcatttttgaggaaaatgcttggttgtggtccttctcagatgtgtactttggctttggagtgttgttttttttttcctctttttttcagatctcagtgttttctcgtgggttactattcaggcatcctggctccagtgcacaatggttgttgattagctttcggagtgttgtagatgtagaggggggactcgggtcttacccatatggatgtgcttctcttgtcatagcaccttcaccattcggttagccgatatttgtgtcatctccttgtgagtttgtgcgatttgtccgccaggcatgtagagttttggcccctttcttaaccttgaatgaagtcttgtttcttaaaaaaaatatcaaatataaaattaccttaccaattaaagtaaaataatatttattctataattgcttttagtagatcccttatctatttggacatcctaacaaaaaatttagtctatttttttaatgatcatgtgaattgtagaaccacctgtaaattttttacaaaatttcaaatattttatagtgtagaaaataagaatcaaatagttatttaccactgtgtaaaaaaacagtcgcgtgcaacaaaatattatttaaactttatttttagtattgtaaattatttaaaaaaaattatagataattttaaataactataatgtacacaattatgaaaataaattggactaataaattattctaaatgttgaaacagatataaggtctactgaaacatctctttaaggaagtgtatagtagacttatccattgctctttattcttatttaaaatagttgaaaaaaattaaaaaattgctaaaatatattattagtacttagtactcttctcggtattatattgctattagtgtaattaattattagatttcatatataacttaagaaaatagtttttaagaaatattattaactaatcataaggtgttacttatataaaatattgggacaatactaatgccttataataatgttcaaaaaattatttgtaatttgagatttgaatgtgtttttttttttaagcaattgagagtgtggttaaatttttaagaaaaccctatcccataatattcttggagatggatatatggtactagtccttggagaacgaaaagcaaagccttaaataaggacaattatattattcagaattgtaagggttaataaatacaacaactaaaatttaaatttcatggtgaaagagagattttttgaattcatgtagttgaagctcatacattattggtgtttaattattatagttttttttcttttttggtgaattattatagataattatttgattgtagaaagaaattgagcatttaactggttggtctttaatattaaaatcatcgaagaggggttcgaaatttatgtcgtgttgggtccagagtactagtcttacaattacatgtgccacgtggtttcatacagataagcagtttcagtacaatcgagggagctcagctgcgtttgaattcaaaatctgatgatctgatgcgttcaatttacggtacaccctagtcgcttcatgatattattggctaagtcgtcagcggaagcatttaattggtttggaattcaaaataaaaaaaaagaataaataaattagtggtagaatagtaaatagtggactccattccattccatccatctctgccgttacttttttcagtttcagtttgtgatgtgtgtcagagagctttactgactccatctccgtttgtctctttagccccacctcagtagtacttcatattttcttggcaccacattccctatttattttatttttactctcccaatcccattttattttcttggtaaatcagtagtatttttcttttgaattatcgctggaatcgttgaccaaaaacccagtctaaaaggccttttactctttctttgttaaaaattatgaaatggactggagtgagctaaggattgattatatatagggtcgaaagataaaaaaataagagtaacttacggtaaaacttataaagttccaatctacttgcaattaactcttaaattaagtttttggacttgtattctcttaacatttagtcatttctatttaatttttacaattaagtatcatgtaaatatattcatgtgtatatatataattgttcacatatgacataattttattagcacacttaaataaatatttaaaaataaattaatttaaaatatatcataaaaaataataaaaataataataaaaaagctaattccctataagttctttctcttcttcttgtgctctctcgcattgccataaacctattcgttatccactaccattctcttccgtcctagacatcaccaccatcttacagcatagaccttaccacttgagcactattcccttccatctagacccttcgtcatgaagttcaacccaagtcgtcatgagcccagaatgatccatcccagtcgcgagcccaggtcgatccatccccgttgaagccgtcaacatttcatccatcgagtagcgacctaggtgcgaaacctctaccaagccaacttttcttaattatttttttttaaatgatttttaactattttttattttcttaaataattaaattacgtggacctatgaaattgtggcacatatatactgtgtccacatggacatgtccacatggaacttaacagtaaacattagatgaaaataactaaatgctaactgaatacgaatttgaggattttactgtcaaaaaataagttttgggagttagttacaactagggcaaagcttttgaaaatttcgctgctatttacaaataataataaaaaaaattggactcaaaattatctcgtaagttggaaggaaaaaaaaataaaaaataaatatttattagcacatttaccatattgtccataatactattatttttatagtttactttcaatttaaaaagagaatcatagaaaaaataacttattcattactcaatcctagtgttgtaagttcttgcgtgttgtacaagctcgatctatatttatctgtatttttccaaaaataggtcatgccgtgtcgttccacagaaaaatatgaatcgtgtcgtgtcgtgccaacatttttaaagagtaggcccagcacggcccgtaggcttaatattttcgtgttgtgttcggatttgtgttgtactttgctcatgtcggtccgtatttcttaaacaggtcaccctgattttatatctaggcttaaattcatgatttactttttcatatatttttatacaattacatatattttatagcttagttatatttatatcttttaaataatattttaaagataatcatataaaaaaatattaacatcattagaatttaaatatcttctaataaatactcaaattttaatatc

SEQ ID NO: 217955 - DNA, 6505 bp, Cannabis indica
agccatatcagaccaagagggttaagggtctatcagtgctgaacttctgaattctgatttgccgcttaggtcggctaggtcgaaaaatgacttgtaataaagtttataaatatttttgggatcccaaccgtttaaaagtttaaatatattacaagttttattttcactccgtttaatttaaaagtttaaattctgcgctattttgattaataatcccgaattaggggatttggattccataagtattttgggtagcgtgcctaattatttagggtgttacactttctctcgttggaacattttatctcgatcaaaggttaaattttacttttcttggtccgaggttgtctttagttttctcgatgtgagatcaggcttacccaatctcgattttaggcggttctgcttttcgtccagttcaagtattgctctggattccttttggtccaatttatacttctaccgttaaaaggtcttttcggctatctcggttgatttatggttttagtctatctcaaacttgggctttctgagcctgccttgggatgtgttgtctcaggtttttctcgacagatttatatctaaactatttttaagcggtaggtccttgttttggcattttcctagttttattataattttgtcattttatttcttttgtctttttctgcttcttgggcttatatttttgtttaattctcacgggccactttagcgtatctaatttcttaggcctttccatatttagttcggctttagttattttatttttgtccctttttctccccatacactacttcccccagttccatttatgctcgtgcataatcaggagctgctccgaattatcattgcttgtatggtattgtgtcaattattattcattttaaaatcaaatttataagtttttttttgtaaaattgcagtttgtgtgatttgatcgtggcacatttataaatgttttttgttattcatgtatcgttaatttcttaacttctcttttaatttttcgacggcacactcctttacataagatctccaattttaaaaatctagtgcgtgctctctctgatgttcgtttcaacttctttactctgaatttccaaccttttgcgtaacaatggactcatttttgatgcgaccgtgtgcctcatgcacactttcgtctctcaaacaactcccaccgagtcatcctcgaaagtatccatgagtgcatccacgcatcgaggctctctagcactgatactcacactccataggttcaaattatgataaggaaaatcccaacacggctcacctagtcactcgtgacctaggtagcatgtatggcaagatgccagcacgtagccgatgtgccaacacttctaatcatgccccatttgatactctctgaacagtctgcttcatcgcccaagcactcccgtatgtccatggtctaatcctcaaggcaccgtgcctccacgcatgttggtaggtcctcgagacgagccaccaaactagaagcattcgttagacctctgtctctttccagcatggtgctttcgtctcatgcgtgtatataaaatagcccacgaatgactacctgtgtcatctcgtgtcaagactcatggacaaggcgcaccacaacatctcttggaggtttaagccacgtaggcaaatcttcctgatctcgactcctatgcttactcctagcttcatccaaatacaatgtctgcagttgtctcccccacttcattttttttcctaaatgtcctgctctgaccaagatctcgatcttgccttttaaataacctcactttggctaaatatcccacctgtcgtgatattcacattgcttctttaagtctctttagggattttgccacttgagcatctttagtccatattctttcttggatccttctaaagcctcttcccgactttggtgtttctattctcttttgtcccaagagttacccaagttctgtcccagaacatctactttgaaccatctcaaaaccaccttctacctcgttcgtgttgcaccgtactcagaaacgtgggtttgtgtaggtgcgggtatagacacggagggtctgcaaatagtcaaagtacattgggttccgggaacgagaattggtgatgtgaatctgagagcgagactatggctagcactgatgctagagcgacttcagaagattattggcaggtgtcttccaaattgataaatttcttgggccgttgacataagctcggacaatgtttttactcttttgctctgtttctcacaccccaacagggagtcgactgttgtaggtctccgggagtgtagcttttgtgacattttgatgcaaggctctaggtctccatcgtcagaattggtgagggccacattctatttttccaacctttcgatgttactgcccatgaaatcccttccatggaacttaacagtcaaatggtcgtggaggtcactacctaatagccttgcctttccaaccttttcatacatagtatcatggtaccttctgaggtccatcatgaaatacctgtcatcataataatgttcccttgtgccattgtcctggttgacaaaatcactagggcggtcttcttagcccctgggttcaggtactttcgtacgttaccctttttgtgtggttgtgcctctatgaccagaagggcatccaggctcaaaagcactggtggccttctgcatctttaaagggcttaccggcttgattcatgtatgtccaaaaaggtatgggagttgtgggaactttgggattgcctacctttgcttttcctatgtccttcgcaggagcagaggcttcggcattggcagggccatctctattattcttaacaacgtattcgactaaaagatctttgcctaaaccccctatggctagatctccagtcctggtatgtaggcaagccatgatcttcttcattttttaagcaagttcctcttgactggtcaacctttgctgaatcccgaataactccttttgaagttctaactattttgggattgtgctcgtaatggtagtcgttctcctttttttttgttaggacaatgataatagcaacactcgtaatttagatctttcatcgctctcaatgaaagcacaaaaatatttaccgaaatttttggaaactgaataattagagcataagaaaaatataaaacaataaatatataatagacaaatagatttttacgtggttcgggcgttcataatccctagtccacgagtccattgtattagtcttgctgacgaatgtttaaatattacaagtatttacaatatgagctgtatttcacttgttcttctcgaagaagaagatcttatagaaattttgggcaaagattctctaagttaaaattgttcatcccttttgtacaagaaaagtacgggtatttataggtatagatacgggtaagggcattactcttttaccccttagggtttcttactcaacacgccttaagggtagatactacaacatgaggatccacccgtctatttggtaggtaaatattccatcgtatggtgcacggaggtagagtccagtactgtctgaatcaggggtacgtgtgttgcccaaagtctctccttttagaaccaacctctagacaggccactgggcaaaggacgtatacagtggtgcgcatgtgttgtactatggcctggcacgaggaacaagatttgaccctgtgccaagaaaaagcatagccgtcacttcggtgatctgacaggcgcaaaaaactgacatccctaatactgcatggggagcaatatccattttaagtctttccactacctatatgaagagagccttctcgtgagactcttttgggtctggaagagacatctttcctttcacgtctaggagggggggctaggcgtaatgagtttctgcgtgcccttttattgtagaggatgcttctttcggtgaaacccttcaccaatagagcaatattagggagcttcaatcagttgaggattaatttgactttctccatttgccttataaaaatgtgaaaaacataatatatcattattttttattttacccaaacatatttatgtaatatagttctttcaaaaacaatgtcacgttggttttaataagaacattgttacgtcatatcttagtaaaatattaaattaatgtacaacataatattaatatactaaattaatatacttgtgatacagataataattataataagaaaaatattaaagggcgtgccaaacaatatcaggtataatatattattattgatgtcgggttttatatattttaatttaacatataatataatttataatgggccgattcgacatagtattgagcatcattacatatctaataccaattctcttatgatatatagaccaaccatatacggtggacatacagatataaatatagagaaatattgtaaaacggcacatacagtgaatatatactacttcagattcttacattaatactattgtattgaatctaacttattttattatagaaaatataaaagaagtcggcactaaccatgcaatatacatacacaaatatatataatataaatatatacatcacagttttgacagggacaaaacttcaccttaacagaaaccagagtaagctagtttggtgattgcgtacgagaggcttcaacttataacacgtcggcagtattactattcctcactcctcatcacatgcccacaagaaaaaataaaaacttttttaataaataaactacaaaacgccttttcagactcatttagacggttaaataatatcaatataaatgtttgtaatttttttttctcaactttgacatatattaaatcgtgttttttgaattttttttgccgttaaaaattatccccgaactattgagattgttaaatttaaagacttttatctaattttagtaaaagaattctaacataaatgaaagttcaaggggctgatttagtacatatcaaagtctgggaacttggtttagtacataaacaatcacttaaatggtaaaattgaatgaaattagacaaaagtctttaaatttaacaatgtcaataatttagggagaatttttaatggcaaaaaaatttaagaatacgatttactacgtgttaaaattcagggaaaaaattatgaattaggctaaatgtattaatacatgtaaaatagaaaaacgaaaaacaataggaaggtaaaaagaaagagagagagagtctgaaggtgggagatgatggaatatgtcggccaactttggattagcttaaaggtagatcaacgtggcggccgtggccatacgacagagtagaagccaagtaggaaaacttcatatgatatatatatttatatctatatatatatatatatataactcctttagttaacccattagttttctcttctctaacttataaaatattatcccccccccctgatgccgaattaatttatttttatcgttttaattgaagcataactatggaaggagatgagtgttgttcgagtaatagtattatttctactactactactacaaagcggaagtatgtaattaaaagacaagaagaagaagaagatagccataataataatcatcaacatcatcgtcatcatcatcatcaacatcaccttcttgaccagcacaacgaaacggcgtcggatgatgatcagaagagccgaccgtacagaggaataaggatgagaaagtgggggaagtgggtggcagagattagggagccaaacaagaggtctcggatttggctcggctcctacacaaccccaatagcagcggcacgcgcttacgacaccgccgtgttctacctcagaggagcctcggctcggctaaacttcccggacctcatactgcaagaagaccttcacctagccgatatgtccgccgcttccatacgcaaacgcgccaccgaaatcggcgccaaggtcgacgcttcccaacaaaaaaccgcccaagctgataatccatccttgatcacgtcatcaccatctaataataataataagtcgtttaaggccgacctaaaccagtacccggaccccgatgattccgatgaacaagatcattgaaacaaacatactagttagttaactactcagattctcccagtcaagtagataggtacagcccgatagatcatgatgtttccatatagatatattaactatttcctttttttcttcatcttttggtttggaagttttgttttctgttgatatattatattttgctttagtattactggttttggagtgtggtcgaccaataacggagtcaaaatgaattctgttaggttagttgaagcttcttgattgtacgtgcttgcaacaaagcaaatagacggctagcgacagaaacgtctggtccaattcaactaaccgtatgtgttccttataagtagctaagagttgtcgatcaatccaattaattttgttattctccatatatatatatatgtgccattaatgtatt

SEQ ID NO: 217956 - DNA, 4611 bp, Cannabis indica
ttttttttcttttttccttttgatcttttcgtcatccacagtttcgggtatttgagagttgtgaaaaatctcatgcaaatacctggattttgaattcagtttctttgattttcaagatgggttttgagatttcggatgaattattgggaacgtttgttccgattttgatttattgggcttattctggaatttacgctcttctgggttctcttgagaattaccgtttacactcgaagaaagaggaggatgagaagaatttggtctctaaaggaaccgtcgttaaaggggttcttcttcagcaaacccttcaggcaatggttgcacttcttttgtttacggtatgaagttaattatatcgaccctctccaggaaaagaaaatctggattttgcatgaatttttagtttcattttctagtttaggcgagaaaatgtgtatattaaattaccaaaatgacgctttgattggattcttataaaagttgttgctgtttacagagttggcatttgttgacatatgataatcgttcaagaaatatttttctatcaatatttttcaaatgaaaaaaaaatatcttattctttttgtgctgggaaattcttattattggtttaggattgccttgcatgttctaaaagaccaattattagtttataagcattattattgtttatatttttggttgaaagatatacctgtgatcacatcgttgtatgaggtgagactttaacaaattttttttttttttttaattcaacgtgcttactaatttgatctaacagaccaagtttctatgttttatttctctacttcccagagagctgtaaacttagaacttataaacttttatactgcttaccttaagattgtatttgtattttgtacaggctgcatatgttcaatatgttaggaaaagttgtgtttcgtgaattatgcatgatttgaaaatttaggttaccatgtacatcatcctaaatgattgattatttacaatgtcaaccagggtattttttttctttttctttttttttttttttttgttgtgtgtgtatgtacttcctatggtaagctagtatcaacgaggtgatgatgactctggtacacaattatactgcacttttgcctatgtcgacagaaagtacttgtaagagtgttttacatcttgtgctaacctttattaaaaggaaattccaaggatgtacatgtgatagctttgtcaaaagccatactgtgattattacttgtaaaagatcattggttagttagtatctagttatctaaaacgatcttgcttgtcatattctgtgttatgatgttttcgtgtcatcattccgggatattcccgtgtatctgctctgtcaacttattttcctttgacgctgattttcaccaggacagtaaacagagagacctgatgtatcatctatttatgcatatgtgattgtgtcttagtttatatatctgtggataagattttattgtttgctgtagcttatgagtttctctatgctatttttcatcgtgtaggttacagggagtgatgatgggggcattggagattcaaagccttctttaatcgtccttgcaagacagtttgttaccgcaatgttggtcttggatacttggcagtacttcatgcacagatacatgcatcacaacaagtttttgtacaagcatatccattctcaacatcaccggcttgttgttccctatgcatttggagctctttataatcatcccgtggagggacttctacttgacacaatcggtggtgccttatcttttctcctctctggcatgtctccacgagcttccatctttttcttctccttcgccactattaagaccgttgatgatcactgcggattgtggctgcccggaaaccttttccacttgttgtttagaaacaatacagcatatcatgatgttcaccatcagctatatggaagcaagtacaacttctcccaaccattctttgtcatgtgggatagaatccttggaacctatatgccttactcattagacaagagggcaggaggaggctttgaagctcggccttcaaaagattacaaggatgattgattttcatggaataaacataaacttattattatttgtaccagtaattttttcccttgtgagtgaaccacacacactgcgtttttaatctgtatatatacatatactcttgtgtccttttctctagatttcttttgtcgatattaactctcttataattttaataataggatctattcatgtatcgttttcttagggaaatataaagaacgatgcctttatatttaaaaaattatgtttcactttctattttgtttgttttttttttcttctgaaaaacctcactcaactcaagataggtgagcacatgggactcacctcccaaaaaacgaagcaaaccactacaattatgcgacaatgagaaatccaacaaatagataaattgccaactgaaagaaaatgaagttattataactaaaaacaaggttccaattccgtgattgacaacctaccaaagattgcaccaaaggatggcagttagagaaaaactctccccatcaagatgcaaatccaaggcaagctgaaccctaaacaagagagcctccaactctcctttcaaaacagaggaagactcaattttagtagctccaaacaccatcacattcccattagcatcataaaaaacagctgcaactgcattaaccccattagccgaggcaaaatccacaaaatctctaatacgacttggtcttggtaaatcccaccgcacctctatgacacccctagctacattaggagaagaagaatgcgtagcagcagacctccaatgtttagcaaaattcgactcaaatgtaatgtgcaaaggttccaccgaaaaagaactccctcttatgtcttccacctttgaacattggcgaaggctttttataatggaccatattacaagtagctttgtaaatattctctcgagtattaaccagactagtatactcgaagtatcttaattcttgactttttcccttttttgaggctttatttcgacttggagctttagaacttcttttgtctcaggaatgattcacattagattccaaaacttttgtttattgactcgtctgtagaggagcagcactatatccggtttgtgccattccaaaacctgaaaaacttttctgtgcagctggttgtccagaggcagtaggtcctccttacactgttgggatggtgagtgtacttcctaaaggggcaatagttggggcagaaaattgaggagcttgagttgttccactgacattggcggatggtgctggaagcactccttaagcatggacatatgcctcttttaggtttatgaagccttgggctctggctaagaaatcagacaatgtgtctgacctttttctttgtaaatctccccacaagaaagatccaatagaaatttctaatattgaagttaccaacttcatatcatcattaaccttagtatttgcaacaacatccatcattatatggatgtacttcttgaggatctctgcagttgttgtttgatgtttgttagtgagctgacttccatataataatgttttgcggttatgaatttcttcttgaacatcacttacaaacccttccaactatgaacagatccaggagatagtcttttccaccaatcttccgcaaattttgtaaaagttagggaaaattagagacatttggtatcgtcacttgtatttgctacttgcatcaaccagacatatttagataagtgggccctagggtccgttctactttaattcaactccatttgaggcaaatggaagtgttcaggcaagggcgtctctttattctcctcacacattgttcaagatcttcgtctttcgaatctaatacagctccattatgctttgaggaaagtcactctacaaacttggttaatttatcaacttgctcttttagacgcttagttgttgcatcttgagatttgcgttcacaaacacgatcgttgatgtgatttctgagatcattttcgcgaggtctgtctctctcgcttctagcttttttccccattacatttaatgtgtttggaggtcttgcatagtcatactctctccataaccttgtggaatttattctacatcatcatcgattcgatccatagaattgttgaggttatccccacctcgtcgaactgtgggcccttgtacctgagcattaggcctacctttcgatgtagctctgcctcacagattggtaggatttcctcaccttggagcattggctaccctacttctcctttgaggttggttggcaacatttgtgtcattacacagagcaatgggagtagttctctgttggaatatgttttaccaggatctagatttactaccatgtatgttatttaacatcctaaatatgattttataaaacaatgtaatttaaacacatataaagtttgagaaaccttacagtggttgcagcagaattaaatgactcgttccactcagatctctaacccttgtatcctttctgtagcagagtatcaccaagatcggagcccgaaacttcttccttgtgtttggattcttcacagtcttac

SEQ ID NO: 217957 - DNA, 7971 bp, Cannabis indica
aaaaaaaaactaagttgggagaaagcattcctatctttctttggcttatcgaactatcaagtggctatgtgaaatgaaagtttaccgattgaaacaggatactatactggtcaataacaattttgagaaagcttgtcgcagactcagaggtttctaccctcctaaaaaccaaagaacgggaaagactccacgggaccccatttcccccaaaaccttctctcctcaaccgggcttcccggaaaaatcctttccacgcctgtaagcagaatgatttcgaaggtagaataaacatagccccttattatcctgtcttcttggatagtaaaggcaaatgtggtttgaaagaaaataaaagcttcatcctttcattcggaaagaagcggcaagagaaggaccagtcaggcattttagaaagtgaaaaagccgattaggttgccacttgagaacttgaacaccctaccttccgcctccggggccttcaattggtcctttcgaatacataccgaatgcgagatgttccctcggccgtcgaagtggtgcttgacataggccgcacctgtcattcttaggccactctcgtccaatccatcgaggaccattctccttcgtagacatccggcccttggtcgtagatcagctgttgcccatggctggcccgggaagtagtctgatcgcggtatcgatcctagtactcgatctccagtggtagggaaccactctgttttcttacggaccgtcctcatcatgctgatgcgtcctgttcccccttgtaaatattctcgggtaagaaactccgggagggagttggattcccctttgatgtgctctatgtcaaaacggaacaaagagaacatggcttgccatcttgcaaagatcagtttggctgccagatcctttgcatccttctccaggactccctttaaggatgaacagtccgtccttaaagtaaagtgaatatgcacctggaattttagaatggccttgagagcagccaagacctccttctcaggggtatttgctttgcgcctcattccatacgccggaagcgaactggatcacttcctctttcttttctcaccatttttatgtttaagaactgcgccccacccctatttgtttgactaaggctggaaagggtcaataggaataaggtggagaaaatttttggggagtcgatctagattcgaatgcaaatggcacacccgacaccttttgacataattgatgcagtctttgctcagtcttggccagtagtatccgagatgaattcttttcctttcgtcccttctatgtcgggctagtaatacgaagagcgtatggtgaatccattctctcttggctggggttttcctatattaaaaagatgggccttgagcctggttaagaaaggaaagccagtaactcttgtaaaccagcttaagggtagtgctagggacagtctcagtaccactgaaagtgcgatagtccttcaagcgggcaaacaaagtccttactcctattccaccaactactcgcgtctcgtatagagtttttttactatccttttcgcatagactcgcacctgtatccaaagccagtttactcaagagtaagaatgaaaggcatttcgcaagcttgaatccctataaaaaaagtcctttacagctttagcctggaaagaaaagtatggtaacctccgatcaaaactattctaggccagtttcagttgcttttcttcggctttctcttacattcttacatagtcatattcaccgtagagagctctagagaagaaagatccatctttcccttaaaatggaatagtaatagctagggcggaaaagcaagaaagcagtaaagttgtttaccagttcaaaccagctagtatcaatatgctttcaagcctgagtattttaagcaagtttctagtctcatacctgtaatcgcatattaccagtagctcgtgtacattatgtcttttcttttattggcatagtccgagtgtattaatatttaatactttcatccagtacagcctctatcttttagccagccagcggggtaaagagtaaagagcaggtgattagggaggaggtggtgcttatactagcactagcatatctgcttgctctagagattcagagtgaaaaggttttattcgaaagctgctgacttctaactcttctccatctgacctgagtagaaagtgggttcttgtggcctaggagactcctctttccttatagacagagccagttcttgcctattcctaagtagtagtcgtcttaagacgtaaggtagtgcttagggttgaagttctaagcaagcccatatccctcaaactcctttattctccgtatgacaagtgccgtctatgactagtatgcttgattgtgcttatccctctttctttccttggtagggtggttctagttcccgggttctgatatggcggctataggctctcgataatatatacatcattttacctaggagtggaggtatgaggatttctttttatttacgacatgcctctttttccgcgggtatcttccacgtatttgagaaaggctgttagaagcacaagcttgacttcaaaggggcaaagaaggtatctttctagcattgagctagcaggttcaagattccatcctgtgggcaatcctgtttgaaagttttcaaagtattgcttcgctcctcgctttgattctttctgctttacctttagttttctgaaatccagtgcttgcttgctatgaggtaactcgctcattagtagcaggcctctcacttcgttctctttgattggcacatggatgatcaactgaaagcagcaccttccatagtgagtcaaatctctttcttctttagcaatcatatctttcgaacccaacaactcatggggtttcttgttcaatcgtctgaactagctaatttaggattggagctgtggctgccgatgaaagatttgactcatgagacctgatgaagaagatgtttaggaaccccttaggatagatccccaaactctctccacccaggggagacccatttcttagagagtggagcctccctaataccattccctttgcccgctattcacttgctctggtatttgagacttcgtctccccttgacgcttccgctgctgcgcttttccttcaactgcatacctacttagaggtttaagtcctataaagtctaaaattcaagcttatacagggcctatacaggaagagttcaatgatcggattcttttgtcggcacagcctctttgataggataaagctttggaggaacaagattgaggttaggaagatggggtataattcctcgtagtgaatgaggtaaaaagaaagagctttatatacgaaaaacattcaattacgacctggacgaaagaaggttagcgaccttacctcatctttggattatatcgtcgagccagggctcgcagatcgagatcttccaatccttgatctagtaccaaatttaggggttgatgagatggactcgtaatgtacaaccgatacaggagaatgaagttcgtaacggaatcaaagcaaaagtggtacaactcgattcgatgaccccctaaccgtttcaagtgggactcttactactctagtctaccttaaagctagctcgggcattcgttcgaatccgtcactggacttattccgtgggcggggtcgtagtttcttcctataggctagcccgttactccctttgatccgtcatttttcgggcgggagattgtgacccaacagatgggacctaagccgaagaagtcagcccaaccagatcaagtggtagaggcgggatattcaaaagaaagggtttggtattacgtgtaaagccctacttccttagaaagccggtcagcttgcttcttttttacgcgtatttgagtctagtttaacccggcggggctcagaagcgcaggctatggctagtacgctcctaagtgtatataatagtagttcggtcaagcttaagcaggcataggccttagccttaggagctcagctcggagaaagaaattgaggtgtctattgaccatcaaaaggtgcaattttgacagaggctgaagccttcccataacaaagaaagtcttcgtctaagccagcctgggtaagtggtggtcagcagtccccactaccatatgagttagtcggaaaggcagatagccaagccagaggtgacgggagaaaagcaaggcaggggcttagcccgagcacggaagacaaagcaaatcgatatttttctaaagaaaaaagagggtgactacacctatctaatctaacaacagagctagcgaactacagctcgaaagcggcaaacggaggaacggtaacgacgtctgggcttgtggttcatggtcatttctcttctcagtaaatggtctatcttctataatagaaagaaagagtttcctttactcgcttcgatggggcggtagcacgggctagctcaattgggttatatagggcaaaagcgcctgccgaatcaacgtgatagggggagaggaaagaaaactatgcgttcaagttccgaacccaaaatggtacacttttcctacaggcaaggggttgctatcaaaagccggcctaccaacaactagggttcgacgtaaaaagagggcccaatcccattccggacgtaggattggcttgagaaagcaagactagaagaaagattgtgttatagaggggtagactgattctcaaagctcgcacgggaatcgagtacttcttaagcgggaagtcaggtttagtagaagggtagatccagtagggttagaatccttgttagcagtctcgggcgatggcgaaggttgcttttagcccgtgggcgatctaatcataggaattgtaatagatagggcgtcaatgagtccggtggcggcattaagaatagcttctaatatgttctggtgttgatacgggtttacaaaggagaactggctaacgaagcctttagtactgacccgtagtacgtactctttcgaagtcctcatagctgatttttctagtatgtgtttgttttctcgggtttgcacgcatttgagagccttacctcttcaatgtttatacttccggagtgagtcccacgagatagatcagatccttaggaaggtcttgaagagcctgtggtctaggttgcaccaggtaatatggaaaattgcacgcacgggacagaagataagtttccgcttccttttattagtcttagttcatcttttccgctttcaagcgtgtacactgaaaaaggataatatccctttaattaaataggtagctcactggagcaagcaacgaagtgccgtagggttcgggataaacttctactgaagtaggtacaatatctttgtggatcaatcttagagttcatagagaaggaaaaccctgagattagagttggagaaagccgcatagaatacgaaaagcaaaggcgaaggtgactttacatctcagtcgaaagcggttaatccggatccatttcataagtggactggggaatatcaatctcaaaggtcttcgctcggttccatagttcaatctaaagcctgtgaggctggaaacttctacaataatattacatatgataccgaatccagtaaacgatacagtaaacctttaaataggttcactctcggttaattccatgctcaaggtctctcgagcgtccttctgaaaggtcctcttctacggctcaaggttcaagctaaatcaagtcattttctcacttgaaatgggtgtacaaggagattccatgccatataagctagggaaatgaaatgcgatataagcagtcttttaggccctgtaacggcctttcttggtgttctttcgtttcttggtgttgttcacagtccgcttcaggatcactggaacaatgggcagggcgtacagaccccgcctaggcgaaagagagtctcgactagacgaaagagagagatggcatttgacgaaacttgggattgaacattgatagtagtagatagtagtagagtccgtaatgacccaatcgatagctcacgatccagtctaggaagtcgggttcgagccgtgtgagtaggaagttgctttcgacgacagtctgacatcccgacctcgcagaagaaagaacatatagaatgacgtatctaatatcgatgacttgggcaaagacagagaggaagcgaaacgaccgtctcaggcttgcttttcgttttcttcgaccacatcgattaaagggattaggccgctggaaagggaaaggcaaggcaaatcgccaagctacaatcgcccttttagccactcggcaatggggcaccgtataagcagtcccccctctacgaaataaatgatcgaaaatgcttcacaaagacataggggcagacggatcgtaataacataaatacatcgaagacttcgaaaactaaagcaggccccttcttcgactattcgacctgctcctcgataatatttttccgacgtggcagtaagacttaaatgtccttacaacatttcccggccgtcattgtttactccgaaaactacaacaattttaggtagttgatagacgagtctgggcctgcacaagggagtgtcctacaacaaaaggaataacaggcaatcggagatcgcacaataccggtctcgcatcataacgggtatgagctcttgactctaactatatagaatctttctatcaattctaggatatgactaaacctcgaccgaaatcttccactcatctcattctaaatcaaacctattccctgcaaggagacaggtgccttatcatccatcatcccagaactgtgagcattatcgagtttactcattctattcccgccagtagacattttattataggaaggtaagatagccgcctctaaacatggcatgtaaaagggagcgcctcctgcctgatagatagattttagagagggacttctttaatcgggattagtttgttcattagagttagggcattatagcaccctaacgggcgcggaatggccgctgcattaaaagctgccttatgcctttttctcctttaagccagagaagataagataaaagagatatctattttagagatacatgttatttagggttatgtgttgtgtcattacggttagtacattatagtaccctcactcacatcggattctgattctattgattctagtgcactatccttaacacaggtaaatcggtctttctatcatattcattcggtttattaacagcgataagcaacagaagttaacagctgatatgcgaaaaaaagaaatatcatatataatcacagaaaactcatatccgctgttctataccgataggttacttcgatgtgccttgcttgcatcccctttcgtttgtgcattcgaattcgcatgctttccgttggtcaacaaccaaccacagctctctatagttcttaactatagttcttcactactcctacaggcttgacggagtctggagggaatcatttgttttcaatcaaaaaaaaatggaaaatcaaaacattcaattcattgtccccgatgatcgagaagcagttttacagaacttatgtgatcgagtatctacaaacatggatgcaactggtcttcggttgccaccagcatggacgtcggtaagagagcttgccgaacatgtctggcatgttaatgatgctccgcaagtcaaaattgagcatctaatctacctcagaaatgagctcgcacgtgaggactatcaaaatagttggatagggcaggacatagactaatgggcacaagccctactcgccggtttaattcccttcttcaggtccaaaagagcgtcatggctagaggtcgaagaagctccaaccccggcgatctaagtgaggcgatgcttttcctttgaagtagcggacctgggcccatccataggtgtgactgaactcgccgatcaggcgtatactgatgacattatgagaaataagattcttatgagagaaagcctccaa

SEQ ID NO: 217958 - DNA, 7741 bp, Cannabis indica
gggctactcctcccattgccaattggttttgagatacaacctcattcatcttattcccacattttaacatatagtattcataattagcctatatgacgttattatattttcaatgaatttgtttattatttaaaaaaaaaaagaaaaaaaaaacttatactggtactaaaaaagtgtcaatagtgttaagaagtttttcttttacatcaattattttaaatcactactaatgcttatatatgtcatatcatgaattgcaataagatagtgatagtacattaaaaagtaacaacaaagtctgatgaacccatgtccagtccacatggaaaaagacatagattcgccaaaatcaaaactattgcaataagatgaaaaacaaaatctacaggaataaaaagctacacatcatttttttttttagaaaaagatatacatgtattatgggatttggataattaatattagtggattaatatagttgtatttgtatgtattgttggttttgttagactttggaaattgagaaagacaaccacacatgacacagcagagacttaatttggactagttgactgctcataagaagatctctggttagttgaaaatatttatatatatatattttcatttcaataatatcttcaacatttatgaaatcaccaatgtaagttatgaaattctgtttttggttcaaattttgagttttggattgttgacttgagccttaaacttaataggattataaggtttaaagagttatagaattgttatatgaacttttttttatttatttttgaagttaagtcattcatagtttgagcattgaaaagtataatgaaaataatttatttttgtcaatcagaaaataatttagaagaagaagaaagatgatgaatagagaagatatgtggactaagttttgtgatgatcattctggtagttcatcaccatttgagtttctgagtcatacttcttcatgctccaaagatggtttgatgatctgtttagatgttattcttttactcctgcttttgatcaccatgattaaaagaccatcatcatcatcatcaataccggctcatgttacacctcgatttcaagtcttttcggttctgcagatgatctcagctgtattaagcagtggtattggattgtcctacttgtcttttggcatatggattttacaagagaagctaaggcaaataagtacagctatgcctttgaatcggtgccttgtagccttatttcaaggctttacttggttgtttgtgggattgacagtaagtctcaaggtgaaacagcttgtaagatcactggttcagctgttatctattcttgccactttgtctgctggatttgcttgtgcaatgtctttgttcgtggccatttcgatcaaaaaagtgacgattatgataactttagatgttttatctcttccaatagcagttcttttactcatatgtacttacaagaactgtcaagaagatggtgaggctaatgatgatcatgattcggttaccccatttgccaatgcaggttttttcagcaagttatcattttggtggctaagttcaatgatgaaaaagggtaggaagaaaactcttgagaatgaagatataccgaaactgagagaggcagaaagagccagaaattgttacttgatgttcttggagaaacttaacaagcaaaaagaccattcttctaagccatcaatgtggaagataatcatgttttgccactggaaagagattttggtatctgggttctttgctttactaaagattttgactctttctgctggtcctttgcttcttaatgccttcattttggtttttgaagggaaagggagctttaaatatgaaggttatgtattggtcataattctcttcttttcaaaatgtcttgaatctgtttcacaaagacaatggtatttcagaagcagaataattggtgtaaaagtgagatctttgctcactgctcttatttacaagaagcagcttagattatctaatgctgctgggttgattcattctagtggtgagattatgaattatgttactgttgatgcctataggattggagaattcccattttggtttcatcaaacttggacaactagtctccaactctgtctggcgttgctaattctttttcaagcggttggattggcctcgatggcagccttggtggcgataatcttgtccatgatttgcaatgccccacttgctaagttagaacacaagttccaaacaaagcttatgaaggctcaagataaaaggctgaatgctctctctaaggctattgtgaatatgaaagttttgaaactttatgcatgggaaactcacttcaagaatgtgatacaaagtttgaggaaggtggagcttaaatggttattggcattgcagtttcgaaaatgttataatactattattgtttggtcatcacctgtttttgtctcagttgtaacatttggagcatgctattttctcaaagttccaatgcatgccaacaatgttttcactttcatagcaactctacgccttcttcaggatcccgttaaagctatacctgaagttatcggtgtggtgattcaagcaaaggttgcttttgcacgaatactaaacttcctagaatctccagagttgcagaccgcgagagttaaacaaaggcttgacacgaggagtgtggagaaagccattgtgatcagttcagcagatttttcatgggagaagaatagatcaaagccaaatttaagaaacataaatttacaagttagtcctggcgaaaaggtggctatatgtggagaggttggctcggggaaatcaagccttttggcagctattcttggtgaagttccaactgttcaaggaaatgtaagcttacttactatacttttagtgttgagcactatgctttgattcacatagattttatttgaattttcagattcaagtttttgggaagattggtatgtttctcaaacagcatggatccaaacaggaacaatacaagacaatatcttatttggctccactttggagaatcaaaggtacatagaaacacttgagagatgttcactagtaaaggactttgagttgcttcctcatggagacaaaactgaaatcggtgagagaggagtaaatttgagtggcggtcagaagcaacggatccaacttgctcgtgctctttatcaaaatgcagatatatatctgttggatgatccattcagtgctgttgatgcacatacagccacaagcttgtttaatgtaatcaatcatacatttcctataataatttcagcattgtcactcttgttatttaatgccaaaaacttgtttgtaggaatatgttatggaagcacttgcagataaagtagtcctccttgtgacacatcaagttgatttcttgcctgcatttgattctgttatggttagtgttttaatgatcataaattttattttaattatctcaattttctttcaatctgatgagagtattgaatttgttctcagttgatgtctgatgggaaaatttttgaatcagctccttacaatgaattattgctaaaaagcaaagattttcaagaccttgtgaatgcacacaaagagactgctggttctgaaagtcttgcttatgtaaataccacagagaaacttggaacatctaacaaggttatgaagaagagttttagagagaatcaagatcaagtatcaacaggagatcagttgattaaggaagaagaaagagatatagggaacacaggatttaagacacttaaaaaatatctaaaccagaacaaaggatacttgttcttcttcttattcatcttcttccaccttacatttgtgattggacagatcttgcaaaactcatggatggctgccaatgttgacaattctcatgtcagcacattgaagttaatagtggtttacttgttgattggaattggctcaatagtagtattacttttcagatcctttgctatggtttacttaagtattgagtcatcaaaatctctattttcacaactacttacctccctctttcgatcaccaatttcctttttcgactccacgccttttggaaggatccttagtcgggtatgcatctacaacaacagacactctttagtctttagacataggtaactcttgttcatgaaaataaataatttgttttgtgtttttttttattttatgaaggtttcatctgatttgagcatagtggatttggatgtgtcatttagcttactcttcactgttggtgcctgcattacttttactgctaatcttttagtattagctgttatcacttggcaaatcttaattgtctcactaccaacaatttattttgctatcaaattacaggtaatataatgtcatgaatttctctccttattttgtgattcatatatttttctcatatgaaaattgtactcttcaatcaatagagatattacatttccactgctaaagaattaatgaggatcaatggtacaaccaagtccttggtagcaaaccatcttgccgagtctttggctggagtctcgacgattagatccttcgaagaggaagaacgcttctttgcaaagaatctagaacttgttgacatgaacactagcccatttcttcacatctttgcaacaaatgaatggctaatcgaacggttagaaatactcagtgcagtaattcttacttcagcagcattttgcatggtcattttcccccctaaaacttttagctcaggttactattgaaaaaacttacatccccttttaccatctttgaagttaaaaaagagaaagttacacaaacaaaaactgatatggatatgtgttgattgcaggatttattggaatggcactatcttatggcctctcattgaacaattcccttgtatattctattcaaagccattgtactctaacaaattacatgatttcagtagaaaggctaaaccaatacatgtgcataccaagtgaagcacctgaagtgatcgacgaaaatcgccccccatccaattggcctaatgttggtgccatagaaatacatgatttgcaggtaagtttttgttcattttgaaaatttaatgacaaaagaaaagggtgagtagtatgcaatgctgataaagatgttttgatttggaacaacagataagatatagagccaactccccatttgttgttgatgggattagttgcagatttaaaggagggcataagattgggatagttggtagaactggcagtggaaagtctactcttattggagctttatttcgtttagtagagccaagtggaggaaagattgttgttgatggcattgacatctcaactattggacttcatgatctaaggtctcgttttggagtgattccacaagatcctactctctttaatggtactgttagatacaatttggaccccttatctcaacattctgaccatgaaatattggaggtaagttaactatacactctatactttgttagtaccactaaaagtaaggcttatacaattttgaatcttgataatttgtcatgtttgtttaaccatgtgattatacttacaatttaaccgttggtaactaaggaatctcggttaaactctcgaattctcatgtctcatgataattactaatttactatagtgtaattgctaccataaaagattacgcaatctagtaattatacagttatattcaaacacaatcttataatactagtttggacactctttaaattattaaaaaaaagactccttgtttgaacttttctttcataatttttcgtttttagttgggaggaatgaaaacataagaatggaaatgtgaatgagaatgagaataggaatggaatggaataaatttaaaatgtaataaaaaaattgataaaaaattattaaattttttctcatcatccattggaatggtgtttccttctatttcaaaatagaattgtgaagtctataaatagaagttaatttacagaagttggtttaatttttagcaaccttgtgagatgtttcattgaaattcttctctaaatagtgcttgctagttcattgttaaatcaaatttaaaaatcaaagggtctcttttataattatttgataggaaaagttgtatgtcatttgtttgattttcaaggttcttggaaagtgtcaacttaaagaagctattaaagacaaagaaaagggtttggactcattaggtaataattaatgacaacatttttgttttgtttttaaattattagtagtgttttggttgtgaatataatataaatatataaacatatacatgtttttcagttgtggatgatggatcaaattggagtatgggacaaagacaattgttctgtttgggaagagctttactaaggagaagtcaaatattggttcttgatgaggcaactgcttccattgacaatgcaactgatatgatcctgcaaaagattatcagaactgaatttgcaaactgtactgtcataactgttgctcataggataccaactgtcatggattgcaatatggttcttgccatgagtgatggtagtaaagccaaaatatgatggttaattgagtttttgattggcaaaaattatatattacaaaatttgttcaactaattattttattatggtttcaggaaaaatagtggagtatgatgagccaatgaagttaatgaagaaagaaaattcactttttggaaagttggtcaaggaatattggtctcattttcagtctgctgaatcaaattagcaattatgctaacttctttgttggatatatcacttttattttctatctatggaataagacataacatcggaaacccaataattatcaatagtgttacatttttgttacatttttgtttttagggtgcgtttggaagtaactctgtaattattaggtagggtaattattacggtagtaattacacagtatagtaattatactatattttaaaatgcaaagtgtgtttggatatgaggtggtaattacatatgaattcctaatagcttgtttggcaaaatagttagtaattacatggaaaaataatatttttagtagctaatatttaatatggaaagtttttagcaattacacagtgtaattatattcaattctcatggggggccatgagaattggagagtgtaattggaacccctcaattacttccaattacacagttacagtgtaattacatgatcagacaaacatgctaaattgtgtaattacctccaattacacacaaatctaattacacagtggcttccaaacgcacccttaaaaaaaagacagtagtatagttaaattatgtgtgtataaataaatgatataaagggtactttttattttcaatttgtgggattattgaatgggaaagaatattgattatctgtgactgagttacgatgaaagtcaaagtcaacactattaaaaacaattgttttaaagttgccaataatccatatgtaagtgtgaatatttgtaataagttaagtgtgtggaaatagtagtatttattgaaaaaaaaaaatagataataaagggcgtgtaggataatctggttgttgttttgctagacgattagctaagtttgtggtgtggagaaaattgataaatatttgtattactatatataaggagaaggttttaataattacatcaaatataaccatcatggttacatttatttttagttgttagatcttaaatagttgtgattaatttaa

SEQ ID NO: 217959 - DNA, 4441 bp, Cannabis indica
gttggagttggaatgagatcaggttttttctgggtttatcagaggtttactgcatgaatgctgcttgaattcctatcaatctttatctagattcgtacatgtttttatcccattataaatgatactaaatggatttattccatgaaaaaaatgatttgctcattgataggacttaggaaccgttaaaaaactctactattcacaaccttttaaattcaatagtataattgtcagaatactttacatttgtgacaaaatttactagtctgatgaagatggatatgacttcattggaccacatattggtgtttgtgggtatctaatttcagattttagacagaaatttgtgttgtatgaaaaccttaacagccttgttgtcgcagtctatctgtcaccagcttaaaaatgggaagaggtacgacgctgatgtgtttgttggttatcatgtcgttatactattaaatttagtgtaagcatggatttgtgcatggggagatatgtagacctagaacatgatgctcaaacctatctgatgtggcctaattttgactagaacattttgtcaggttatgctatatatgtttctttatgtcttttttacttttctactaaaaaagagacgaccgaattagttaacatttcaaagtattgcattgagaagggaaacatggtaagtaggatgtgtaagcatgttatctttctcatgttagaaactttataatgctgattttgaatgtcaatctttggacattaatgttggaagagtaatatcataatgggtagaagcagtcatgtggcaagtgatgaacacaattttatttatttatttatttgataaagtcaatgtctattgcaatcagaccatgaaaggaggtacataaccttgggaaggaaatttgagtggaagggaaaggagatgagttttcacttactgaattctgcagagatgaaaaagtatagacaaaaattcaccttgttcgatacaaaattattacaaggaaggactagagaacaatttatgttatttgagtaacatgtagaaatgttgattagacatagtggtaatggtgttttgcaaccagtttctttccttctaaaagggaagaaggtcatatgtccatggctaacctcctcacgaatttattagggagcctcacttctgggggaaaccgtggtaacaaaaagtaaattagagaaatacagcaaaacggaaagaacaaatatgaattaagctaacatactctttttctcagaacagaaaacaaaacaaaggcagaatatactgacagaaaataataaaacttagtgcggaatgcttccttactctctcctaaggtctcctcaaatcctttagccttatagacccaagttgcaaaccaaaatttgaccttctcccacaaatcttctgctgtattgactttatcgttgaggatcctaccatatctttatatttgaatctcagttccttctttattgtcagtttttgactcaaaagtcttaaacttcaactataattttggagataaaattggaaaggttgattgtttgtatgagctaggatgttaaatatataaaagtgaggtatcacactgcttatgtataagatctgtgggaccatgttcaatgatataaaaagtgatgcagtagatttgtgggagaagaccaaattttgggttgcaacttgggtttacaagactaaaggttttgaggggctttctttccaagatctaagcattggggaaatcttttacaataagatcccatttaccctgtttcaatacttattttcttctgcttttttgtatttgattcgatgtattgaaatggtaggtttggaattttggttcaatctttaggttgtaacattcctattagtgtttttgtttattactatggttttcctctactataagtgagcctctctaataaatttgggtcagtctcagacatatgtgagctttgtctcttcttttcttaaaaaaaaaaagaagtatcacatttgcttccatattgtaggacaattaagaaagtttacatttatgttaatttatagaatattcatgtactgtgtaagaaaacttattcatcttgagttatccaatttagaaatatgtctgtgtcttgagtgtcattgtttatgttgcttatatttagatattctctttgccatatctatgtgatgctatgagaaagaaataatctgtagtttgttttaaatttgtgaaccatgcccaaagctaaggttcatatgtgcacaatccaatttcatcttgtatctcatcactgacctagactccaacagttctgagattttgtttctaagcttttgtctctgatcataaattggttagttctattatacatgtaaaagaatctacttgcagtgaacgtatcaattcaacatgtttatatttctattgtcaacttaaaatgttgctatcttaaatcattttagggatatgttggcaacaaatcttccgtcttccctctccaattattaggctacgatgttgatccaattaattctgtgcagttctcaaaccacacaggcaagatgattctcttaattcattcaaacaacgttagaattctaaggccttatgtatgatatatttttcattaagttagtatggtgtcctagtttgatgaaatgaagatcatggattgattaacttgaaaatcatgcaggatacccaacttttaagggtcaagtcctaaatggaaaacaactatgggaactaatagaaggccttgaagagaataatttgttatactacactcatttattaacaggtatcattaaatttattttcgtgacacttttaaaatttgagcatgattagatttatgagtttggatgaactatatgtctagcataagagacaagctttctctgcgtagaatcttaattatgtttgcgcaaccaacccaattgatgtaaaggaacttgtttctagatctcatagtgtgatgcttttacttttgatgtaaaaggtttatagcagcccaaaatttgtatccatttttcacgatattatgtaaggattagatatttgatggcaacacaatataaaaataaacctatttatgacatttggattatttatcaaaggaaccaaaacagtctatacaaaccttcaaaaaataaaaaaataaaaaacagtctatgcaaaacttgtgctcgtattatacattatgccttacattaccttttatcatcaatcaaaaataagaacctttaccttatattcaaaagtacttgtgacatcactttattaattattcttcccatactagtgttgatttgaataaataatatattcacatttactttcaatctgatatcattttgtagtggttcagaattatattatgcaatcttaatttttttaaaagtggtaacttgaaaatatggattgccctttacagtctttccatctattaattccaaggatacgtggttggtaaatgataagttttgaaataatatttgtatattattgatttaagtagataacttttgactctacctcatttaattaattattattttctttttggtaaagtaattagttctctattaatttgatgctatttaattcttgctaaattatactttgcaggttatattggttcagtttcttttttgaacactgtattggaagttgtcaataagcttcgtactgtaaacccgaaactcacgtatggtaagtagatttagtggttcgaaattcattgccatttactaagacttctaacaaatctctacttttgttcacttgaagatattgtagaattgaggttattgaaaaatgtatctgtcctgcagcagggctatacattattggtttttcacattttgcacaccaacgacacctctctcatgtttcaggctcaaagatcaaccctaattttgcaataaaagaaatcagtttttgtagttttttgtgattattatatcaatacctaaccctatctaaggtgttcttttaattatgttacactagacatgcagcaaacaagttaataaccccatattatctggtcataaacctttctgggatatgtatacaatacttgttttcaatctgtcataattgagttcatttgcaacattgtatgaacatactagtacctacttgctagaatcatcctaagattttggaacaatatcttatgtacttatgcaagctgtcttagcaacacctttttgccaaaatcttacatccattccacaaagtttatcagtctgaaattcgagatcatgacccgacactaatccacttgaaagagctataaaacagtgactcttattgacacacaatgaatgagcatccattacaatttacaacatgcctgggtaatgaatacactaattatgttgctttcagtttcacatagataattactgttgaagtgtggacatagtaatttttctttg

SEQ ID NO: 217960 - DNA, 4529 bp, Cannabis indica
acttgatgacaaagaaggtgacttacttgataacccatctcactatcgccaacttattggtcgactcttatgcttgactctctcacggccagacatcacctatgctgttaaaacactcagccaattcatgtcttctccacggactccacacttgaaaactctacactaccttcttcgttatttaaaaggatcaccaggccaaggtgttctctactccacctcctctttacttcacctgcgtggtttctctaactccgactgggcatcttgtcccatcactcgtcactctaccactagtttttgcatattccttagcgaatgcctcatttcttggaagacaaagaagcaaccaactgtatctaaaagttctgatgaagcagaatatcgtgctttagcagctacaaccagtgaagtcacatggatacaatacctttttatggaccttcatataacacaaccaacaccagcattcatctattgtgataatcaatccgctatccacattgctaacaatcctacttttcacgaactgaccaaacacattgaattggactgccacttcatcaagaaaaaaatttccaattctactattcgcctcatccttgttagcagcaatctctaattagctgatgcctttaccaagtctcttccttccactactcttacttctcacctttccaagatagccatacacaatatatatggtccatcttgagaggggacgaggggtaacaaatttagtggttattttagtcaggttcgttttatgtattgttacatgtcagtaagacagttatatcgattaagttagttagccgttttttgttatgtttctgggtcttttacttcagatggttgtactctgctttggcctatgtaaggcttgttttgtactgtttgtaaatcattcctaataataaaaaatatttctctattactttcgcaataacaataaaattattaaagtatcattgaagaaatacattgagtgcaagtgcttgcacctaaattactaaatgtgatactaaaattcaatgtaaatgagttgtatcaaatatatctagttaattcgttaataaaagatagatagaagtcttgtatttttataatttctattaacaacggacgttatattatacaagcactattatttttacaagctcaaaccagcagaaatttgtctagtagtaacaaatggagcctctagggttggctaacaatttgtttaggaaataaagttttgaatgcaaatttttaattacacaaaactcctattcatgtaaatccattaagaaccataaagaaaccaagttaggaaaaaaaataggcttgaaaacatgtcagagtaatgcaccatgagatagggatgaatatgttaaaatattatagtgttacctctttttggtgagagttgccccaatcaacagcaaattttatggatctacacttgtcatcgggattaatgggccaataatggtgccttggtaataaaccacgagtgaagaaatcatagtaacgtggctttaccagtaatgtcacagcatcacatgcaagaatgtatttttcgctaaccgaccatgctgctccttcaatataaatcttatacctaataaatttataacgtaattatttaattgacagtacactaaacatatattataaaaattttatacaaaaataataagaataacttttattttaaaataaaaaaattcagtttcaatttgaacaatttataaacaagaattaatcttaaattataattatttataaataatttttgattatttaagcaatttataataagaataaagcttaatttataattataatcatatttacttaaaaataatttttttataatataatatatatattttttatttattgttatattgatattttttagtattttaaatatttttttgtagtgcatgtaattttatttagttataaccaggtaattatatcatgtaatatctgcccattatacatatatacctatggatacattgctttgccaaatttgatttgttgtaccctttctttgattcttgctcccaatcctacaaaagccaacattatgagcaaggattagtcttgtcatggtaatcaaacacaagaattttatgtaatatatacataatgtgtcactagtatatgtggcaatttaaaggccaaatcagttgataattaaatttaattaactatacaagaaaatcaattaaataaagaatatataaaaattcttgatcacctggatataaagacgagctttccaatcttgtttatctgaaacattacatttgagaaggtcttttctagtgtcagcaacataagggtttcctttccagtaagcataaggtgctctgttcaaccatttggttttcttattggccttttctaactctttcaacaaaggtacccatggctttatatttatctcaggcctaaacaaaagatcaaaagaggttagattagttttatgtaatactaattgaaagatttctatttaaaattacacttggaatattgtttgagatgtcttaccaaccccaaaatgtccaatcagggaacacaatatcaagtgtattgtcatccttacagaatcgaaacaatggaggtggtgacgtggcatttgacccactgtatttgtttgactcaaccgttggacgatcaccacaatttaacatcaaatctaaatcagggactctacctgggtacctacgtaataactgtaggataccccacagagaagaaatgtctctagtttggaagggcttcttataagtttcaacgtaagcctttccctttattatcacgagtcttaggtgagccattgtttgagctctctcaaccatttcctttgatattcctgtaagagcccacggccttaggtcttcataaatccatcggaagtactctggacacgtggcgtccgatgaacggtcttgattggcctcttgggggttgtaggtaatgggattgtgtgagggacatgttccgttatggttgtaagcagtgcaatctaatgggatttccgaattcctcttaggatatttgtagtgtggaatggtatttacagtactctgacaaaaaaaggaaaaaagaaaaaaaaggcagcttcagaaaattgatttgcactatatagtgtttgggaccaaaaaatttgagaggataaaaagttatagatggaaaataaattttggtttcatgtagttgtttggtagagatggagaaaataaagtttcattttaaattttaattgttttagtgaaaagtattggaaaattctataatgcactctttaaaaggcataatataattcaatctgtttttagaatttgaaataaatttttagtcaaattttttcccatggtcatgtaaattatacttatttaagacatcctgcaaaattttaagaaattccaaaaatattaatatgtcaaaaattgcgttcaaatagtatgttgcacgcgtgactattttattttatacgtgtgtaaaatagactatttgaacaatgttttcgatattgtaaaatattcaaaaaattttaaaatgttgtaggatatcttaaataactaaaacctacatgaatacgaaaaaaaaattagactaaaaaattcttttgaatgctgaaacaagtagaggatgcattagcatatctcttttaagagagtgcattgtagaatcatccaaaaatatatttgtattatttgttttttttttttagttttttttttttaaaaaaaaagaaaactagtttcaacttttcagttacttctcttaaattttagacatatatttttcggactagcttaattttttgtattaacttttctattttccttccaactttttttttttttccattcttctcactttttttcaataattttttcactctttttcccattacccatcaatgaatctagggtttagattagaattttacatattattgaatgttaaatgatatgcaagtaagttgttataagatataatagactgagcttcaaaatcaatcaaatttacatttcaacaataagtttaaaattcacacaaaataattgcatttaccaaaaaaaaaaaaaaaaacaaattaaaacttacagtactagtagttttgaagaagaatagggagagcaatgcagtgaagaaaagggaaaatataaggatgaaaagagaagctgatttagctgatttcacaaatggtcgccaaatggtctctatgaaattagtccacacccattgcatgctgtctttcatttttaactttcccacttcgatcttctcagttatatttatatctgaaatataacatacttatataataataataggagtgatgtctacggttcatatatatactagaaatgtgaaatagactataaaaagatcttaaatatttaactcgtgtacccgcttagttgtccttatttagtgattattaattaatatgtatataaatcacttaaacaccttgttttgttgacaataatggcaattacatatccataaaacta

SEQ ID NO: 217961 - DNA, 2591 bp, Cannabis indica
aaaatattaaatgggtccaccataatgtgcgcgtaacttcatggtaactcagcagaaacttcttgttagttacatgagacacacatatacaaattaattatagtcatagagtactgtataaagagagctatatatatataaatatgagagctatatgtacagagagagagagagatgggtaatttagaagaaaatcatatggtctaattcaagaagtatgagagtgttgtcgtaggaaagatggcactatatatatagctctaacaataataatttaatattctaaccacctgattgattcaataaagatcgatcagatgaagttaagctataaatatatattaggtagtgccatcttcttacgacaacattcacattctcttcttttattaataatatatataatttcctcatctattccatcctttgtttttgcctctatatatatttacaaaaaagaaaaaacggtaatttctttttgtctctctctcaatatatttacaatatttatgaataattactgagttatattattggccatcctagatagagttagagttagaggctagttcccccactggttagttaggtagtttgagttagttaaattcttaaaattttataataattattaaaataaaatatattaattgtacaaaaaaatagtaagatacctacttacctagtgactgctgagaaaactaatacattttagcattttcaaattattatatattcgacttcaattttattgttggccaatatgtgcatggaatagccatggctagctagttactattatattaatttgcatgagtttttcaaagacaaatattataaatataaaacaataataaattaattaaattaaaatgtgtaagaactaatattttaggtagttacaaatgttaggagtggttgatatgaagtctacattttgtactattacgtccataaaagatattttaggttttttagttgttcgccttttcgagtttcattgcaggttcttgcaagaaattccacagaaggtagttcaaggtttcattgcaagctctaaagtcaagtcatgatagctaaagggatttcagttgagacttggcaccatagatttgaacttttattgaagggggatttcaacaaactaaagcaagtggatcttcaattaattgataactgaggaatttagttatttggggtaaaagtttacttttggaaagattgatttgttttatggttgtaatctagattggtctgtacaaacattatttaatataatgaaagtaactactctggttcggagaactcaaacactagtcggttggaataaatttccagtataaatgaagcttgtaaatttttgacgttgaatctttgattttatctttaatattcaaacataaatcaaaataaaataagctttaacagcaaaatctaggttactaaagtttaattagggtttataaaatgtacacttataaaatagagcaataaaattaccatatataccacaaataatctcaccctacaaaacattgtcttattgggtgttgatcaaagagactcatgacctgttgtctctcatactttgtgggaagctaggaaggaaattatacaaagtaacgatggtgggcccaaatcatatatagtcatcaaaatcgaatattatttgtatactaagtctcccatattaatttatatattaaaaaatatatatttttatatatttgatgtttatttgacaaatattatattattaatttttaaacaagagtgtaacccatattacaatcactaattctcatatgcatgaatataaaaggatttcaaagtctaaacattattaatgatttatatgctatgcctatagttttctttacataagttaaaaagggaaaatgtcatattgacagagagcaacaaaattgccataacatcaaagaaaataagcatataaaacaacaaacaaaatgcttctcagacaaaaataaagaaacaaaataacaaacgaacaacacaatactaataataattttttttgtatgagcaacttttttaggttagatattcaaagaaatatcataggtggataggtttcttagggagaccgacgagaggaggagtgggtggagattgatggacgaggaagacgagaagaaagggaaatcgagaggggaaggaagatggcgagagaggatcaggcgatggtgcagaggtgtgggtgggattttggagagttaaaattttcattttagggtgtgaaaaacggagaaaaataagtaagaagaattaggtgggcatgtgggaaatagaaaagaagtaagtgggcatgtagaaaatatggcgagatgtaggtgacgattttttaatgggcccttatacccgatggtttaaaaccgtcgcctatagtataggcgacggttttaaactgttgggtataagggcctaataaattcacgaattccaattcaaatcatcgcctattcctgtaattactgttataaacctcgggaacactaatttttcccgacagttttaaacagttacttaactttttcaggacggttccccaaaaaaaaacgtttttagga

SEQ ID NO: 217962 - DNA, 6933 bp, Cannabis indica
ttatttgtactttgataaatccttgccctttcaagttgagggctaactattttaactaatgatgttgattaaaacaagctgttaaaaagaggcgttgaagtctcaaatttgttttatttagatttgcaaggatgagactgtaatatgatttgaagcacaattaaactcagatatatctatcttttctttgttctactattttccaaattcgagagagctctttgactgcagttccttgttttttatactttttgagttttaaaggtatgctctttccaaaataattattgtgcaactggaaaatctgtttggtgataagacagactataatcaaatttgcaactgttataagttttatcgtcatagaccttctatacaaaactttttttatccccccattccgtcttatagtatgtatttgatttcaaatgaaaagggatgctgaagatcatatagcttggctgcttgaacatgggtggcatgaaaaagctttggctgcagttgaagcaggagagggacgtagtgagctccttgatgaggtattttagaatcattcaacgtgacattcatattataatttacaacttaactttttctcttctttttattcatttagtttttagcaacagcagttaattcataatgcatctactattctttaggttggatctagataccttgatcatttgatcgtggaaagaaaatatgccgaagctgcatctttgtgtcccaaattgttacgaggatctgcttcagcatgggagaggtattttttgctattgtttttattaagatattttgcaattcttgcaagtaattttgtatttggaattataattatttgtgaccaattttgcagatgggtttttcattttgctcaactccgtcagcttcctgtattagtaccatatataccgactgaaaacccaagactgcgggatacagcttatgaggtgtgctggggaatcattttttattaactgcataactttctgacaagtcaaatggaaaatcacactattttgttttccgaggcacaggttgctcttgtggctctggctacaaatccatcttttcataaggatctcttgtctactgttaaatcttggccatctgtgatatattctgcattgcctgtaatatcagccatagaacctcagctaaatacttcatccatgacagatgcgctcaaagaggtccaagaatatgctttgttaacttacatgttggatcttctaatggctgcaatcttattatcattacatatcttacatttcaggcactagctgagttgtatgtaataaatgggcaatacgagaaagcattttcattctatgccgatgtaagtcttaaactggatttactgcaatgaaaacgagtgatcaagatgtcgaacataccttgttttcttattattgttgtttgaattttgcagctcttgatgccaggcatatttgacttcattgaaaaacataacttgcacgattctataagagaaaaggtaagtaagttgctagaacagctaatgcttcttgggttttatggttttatacagtggcaaatatagctcttctagcctgatcgctttttctttagagttttcaaaaccttgaatagtctttacaagctatgtttaaggatattatgcatagggatgatggtctttcatctgctgattgcaattgcaatcaatttattttatggatgggattttactcactgcacagttgtttttaagttctttccctactgctgttctttgtgcttctgtattttaaaaaggacgaaaagattccacttgagttacaacgatagcttcccattcctcataaaatcagtaaacaataaatgtttactatattttctaaccaagatctataaatcaacttaaattttgtcattatcccaaagtgactcagcattccaattacactaatcagagagaccaacactggtttctgagttccactacatacacacacacacacacacatatatttattgctatttcatttattaaatatctatttttttgcttgacctcgtaaatttttgtttaacctatgattttaggttgtccaactgatgatgctagattgcaagcgagcagttcctttatttattcaaaatagggatttgattcctccatcggaagttgttacgcaacttctaagagcaagcaaaaagtgcgactctcgttactttttgcatctatatctgcattcattattcgaagtaaaccctcatgctggaaaggattatcatgatatgcaggtattggccctatagatcatggatgaaattattgatttttaatggtacttgtaacctatgctaacctgtgtagtgtgtacagcgtaaatctatcccgaagatattttattttcttacatcccctctgtatggagatgcgactcattgatattcatctaatttcatccatgccttgtttcctcttcttctttttttgttaggttgagctttatgcagactatgatccaaagatgctgcttccctttcttcgtagtagtcaacattataagcttgagaaggttcggatggttaattaatgaactgttcagatgattttgtaacattgactatgcactaactcctgccatcatgtaccaggcttatgatatttgtgtcaaacgagatcttttgagagagcaagtgttcattctcgggagaatgggaaatacgaaacaagctcttgctgtacttattaatcaattaggggatatggaagaggtaattcatgtctttcttatctcgggaaaggttaatagtttatgttttgtgttttatttgtgtttttgatgtacattcatgtttgtaactatgtagttgattgtacacaggctgtggagtttgtaacgatgcaacacgatgacgacctttgggaagaattgattaaacaatgtcttcacaaacccgaaatggtatatatagggaaaaatgaatttgtgcaagcatggaagctgtatgaacataacagattttgctataattgtctatatttgtcttgagtttctcaaatcgttttttccctaaatttgcaggtcggcatgttgttggaacacacagttggcaatcttgatcctctctatatcgtgaatatggttcccactggcttggagatacctaggttagtgtatctataggctagttatgctgcaatatgtatagaggacattagttaaacatgttttgaatcttttctttcaggcttagggatcgactcgtcaaaatcattaccgattacagaacagaaacttcccttagacacggttgcaatgacattctcaaggtaatccttctcttcgcaacacatgtttcggttataatttgaatacaaaacagagaaacaggcctttaaacatttgacctgttatttccaaacaggccgattgtgtcaacctcttagttaagtactacaaagaggcaagacatggactatacttaagcaacgaagaagacgaatcaagagcaaaacgaaacgacaacaacatgtcttcatctcaagcaatcgagagatctccgagcgtgagaagcatggaactcaagtcaaaaacaagaggaggtggaagatgttgcatatgtttcgatcctttctctatacaaactgtctcagtcattgttttcttctgttgtcatgcatatcacactaactgtctcatggattccacctatacaaacgccaataaaacaaacggaaccacttctcgagaagagtacggcgagtacagtaatggttatgttgatgaagacgacgatgatgacaatgacaacaacgctgaatcgggtaacccccgaatgcgttgcatattgtgtactaccgctgcaagttgagtttgtttcggtgaagtatgggttcaaattttatttatttttaaccaaatatatattcttaattgtgaatagagttgcctcatcatccatcactatattggccagcttgagttgtcgatttctttgtattatatgaacaaagtaagcccggcttttcatttattcttttcctttttatttaattttttttgggttttgagctttgcatgttagctaaattgggtcttttgagatcccttttttgggttcattgagttgctaataatttttttttgacatgtaaaaaatgtcttctgtatgtgtgttatttctacattatagagaagaggatgggtttatgatattggtaatatttttttttactacatatagtaaataaccctttatttttaaattgacaaaatgtataatcatgtaaaaaatgtatactttttatatatttatctggcattttttacacataagtctggttttataataactaattaagtaatttgtttttacaaatatttaatttaattttcaattgtaaataagtattttaagttctagaaatataatttaaatattattaatttagttattttcagtatgttttgtctcactcgtacgctctttgtgaactcttgaaattattcttaattaagaatgcttaatttagtatgttttgttctcactcgtacgctttataaaaaaacttttcaagagatcatccatcctaaaattatctttggtcaaatatgcttaacttttgagtttttttgtgatgggctatcagaaaataaaatacacattgttgatataatactaatcaatctatttaagccataaatatttataaccttaattataattgtatgttaactattttaaattattaattaataaaaaaaattcataaatattataaaacatatatcgtataactcattaaatatattagagagttcttgtatgggaccattaaaaatgaccctaatattgaaaatgaaataatatatagtgtatttttttttatagagattcaaaaataagtatataagttaaataaggcatatacataaataataatataatataaattaatagattattgatatattggcaatatttttcacttattattttttatttaatttttattaatattgtgagtaaaaaatttaaacagctatttgcaaagcttgatttgttttctagttgatttataacaaacggaaaatattattctcgttaattaaatttaaaaggcttatatttatggtgtctatttagctaagaattttatgaatggagaatagtttttgagactgttttaaaccactagaaaatataatattattgtagtgtatatatgatcattctccatttattttggaccaccaaataacataaatgcaacacttaagtgttttgaagatttcaaattggaattattaatcaaataattattaccgatatattatatggttgaatgtcattatctattaaatagatatttatatattgcttccttctcccaattaggactgatttgagaatatatgggtctaaggatatataaaaatattttttaaaaaaagtattataggactccaatttatactattgtgtgacgtgatatatactccaattaatccaattaatcaagttgtaaacatttattatttataatatatttaattttacttctaatgaagccttttattttttattttaggtttcaaaaaatgtgagctctaggtacgagcctaacttgcatatattggttatgcttccaattatatatatattttcttctaatatactaaataatcatgttaaaaaataaaacgatacaatataatctttgtaacttgtttataaacttgaatagtacaactcattcataaacgagttagactaatcaactcaaaaataatctaaaacttatttaaactaaacttaatctcgttagttttgtgcagatttcaagtcgcgtataatccattcaagaattagtaatttagtatgattgtttttctttgagaaagtagtacattgtaagcgtgagaattttgacaggaaaacaaagtttccttctttaaaagagaaaaaagaaaatgaagttattattacaatatttatgtgtggctatagcgcattattagaatgccaagatagtggactagtaataattattgttatgtgtatttttcttaggaaattatataatgtatttttggggtgtagtgatgtatttttttttagcaagtagtgatgtatttttatttgttttgataattaaaaagaatttagtctgaatttatttttatgattatatatattatagttaattaaaatatttagtaaaattttaagaaatattaacaaaaaaaaaaataaaaaattatacatcaaaaatagtgtttaaagaatcgttaacttttttagtttatgtgtgtgaaatagatagtttgaatattgaattttaaattattttaaatttctcaaaattttgcgaaatatcttaaataattatagcatacacgattaataaaaaaaattaaaccaaaaagtttttttagatgccgaaaccgttaaagattgcactaatacatccattttaatgaggtgcattgtagaatcactcttctatcttatatatatatatattataattatttatttatttatctatgaatattattctacaacattccatttccacaactttctttcatatcgtcctcattttttttttttgagatgtctatttaaaatgtggattgctgaccaataactaatcacataatttatatctacaaaacaatatattattcatttcatatatatataagaaataatatttttattttccatgcatgaaaagtacttatcttttttctacaaatttcttctcataactagtaatataaaattattatctaaaaattaaatggccggcaagagaattattcctacctttcttcccaatataaattatatatataaactattattactgtaccaaaatatcaataccaaaaatcatatcatgaagttctccaacatttcaaggtctaaaatactattactatt

SEQ ID NO: 217963 - DNA, 5888 bp, Cannabis indica
caagatgggagatataactagctctagttaaatatccccaagctgatcttttagagtaaatgtgtaaataaaataaactcattaatattctacctgccctcgaagttccaagtgcagtttcttctttcaatcccaaatttcaagaggctgttcttccatagcaaattgcagctatatacaggttctttgaccatttttcctgtaagacattgttttttggaaggaaaaagtatatagatattagtacataattataggaaaaagactaccaaaattttgaactttcattttttttttcttttattactatgaaagctatccagcaatgacatactgcagcaactccaagaatgtttcattagataactaaacttaattcattgttaattctcttcagaatatgacacaatgttcttaaacccgaaaaatgagtgacgatgcttaatatctaagatccatgaacttgtcaacaaaaagttaagagcttttctttttcaccataatgcctaatatattaagaagattgaaaaccatgatggggttgtaagaagattgaaaatcctggaatgagtaatctctgttagtagcaatctcacaagtataacggtcctaattagaatctaattgtccctaccaggatttatgcaattatttgtaccttgacatgggtagctggaaaagcagatgtccgaagtgtttcttgtgccacatcgggcaatttcctcttcggtacactaagtatgaatgcagcttgatctggtgttgcagcaattgaagtaatccggtatccatcttcccatcttctatgaatcccttcacttggatagagaaaatcaagttccacaacctaaaatcaaaaaacgtaagacttctgcagtatttccaataaagcagtatcaaaattgaagttcatattgcaatacctgattcgaaaaacctgcattgcgagacatgacaataccccatttgctacctgcagtggtcatgcaggtaacagagaagccctctttccacttcctattaatccatttgaaaggaaaaacatcgctgactttgtaagactgctgagtgtaaggcacacctaagaacagcaaaagaagaagaaaaagaaaatcattatattacattgctttcgggtttattggtggagagtgacgaagtcattagtgtactcgtaagatcattcggcacaactcacaaaataaagaatttagaaaaatgtaccatatttactacacatccaacaaaaccaatgaagcgaatttaatatcgaaagacagcttatcaagcttgaaactttagtggggtacattagatcatttgctctaaaaaaataattgtatagaaacccatcccttgcctatttatcaaaatatttgcaatccttgggaatccagtaatgtcatatttcactctttcctaattagtacaagcaacctatgaaggtacccgagagggactcaaacctcaagactttgtgggagcaaaccacacgcctaaccattaagctaccccacttgggtagaccattaatgctttattatcattcattcatataaccaaaatttcttttaaagatcattaggccaaaattttccaaaccattgccaagatggcctcacacgaaagcaaactgcagagaacaaagctctgcctcacagtaaaataaagatatgtattacatacaaaccctacgattaaaggactaaaaagaattaaagggacaaacacttataagaatattaaaaaataaaacctcatttaccttgagacattacaaccaaggcactgccattggaagcgccagcaactgcagtgatatagtaattcttctcccactgttccactatccactcctgatgaagtaaaaaatgaaagattaaaacttgtgaatccacaaatacatcattttaaatgacacttcagatgtaaaagaagaaactatggaaagaaaaattcaggtaaaccaaccttatgcaagaaaatttgtgatagttcaaaaacttgtgatgaaaaacctgttcctgcatccaagacgacagcccacgtattcaaggaagaagatacacagctaatgtacaaaccatcctctttccctttatcaacgtgctgttgaagtcttgcatccaaaacattgtagtgatacctgtagcatagactttctttagttgctgatacataaaagatcaaaaagcaaaaaaataaataaaagaagaagaagaaaattatagttgctggaaataacaaacatgtaaacaaattatattctttccaaaaaagagggtgtaaaaaatttgctaaaattgatgatttaagatcctttcactaatacactccttcctaaagtccatccagcctaccctctttctttcctctcacatatattttctagctggacaatgtcagtctacaagcacaaatcagcgaaatgattcttatataaactatgttggagtctggtgacacttcatcatcctttcttagaaaaaatcaccaaaagagctacttgtacaagcatttagcagaatcatagatcgggctaaagaccaaccaaagtgcattctagcatgccaacatcttaaaacataaagtatgaaagcaaacaaaggaacacaacgaagaaaaagataaaagagcggacagaaagttccatcacatgtttacatcaactacctctgcttcatggctgatctgtaattatatactgagatccactgagagactggactacccgatcgaactttcttcctaggctgctccccatctcctaactccataagtgatcttcctcttttttgaccaaactacatcaaatgaagatcccacatttaattgaaaggaaaaaaatcatcttactgaaagctactcaataagctatgacatacggcaaccaccttagctgccccgtcagttctgattggtcgcagtgacgcattaagacctatactgccatcaaaaagggaaataagcttcgaataatcgggttcttcatcgaatctcatgttagtcaccatctcaatgaatttttgaaaaggaggaggacacaagcagcatagtgtctcagacgaagttgccatctttctcttacagacaaggaaccctttattatctccctgcatcacaataatttccgaaagcattaaaaacaaagaaccaagaaaaaaaaagtaggccaataataaattacaattgcaaatgtaaaatggaaactgaaatactcacaacgtagccctgccagggaagttttcctttaagaagaaataccaaggtataagctagcgactcgagatcatcccgacggctccctgttctacctaaatgagcatgtacactcgcatagcgtacagttcccctatcaaaagtaagaaagtatatcaggctatcaaaaaaagaaaatcacgttaaagtgaaacaaataagtggtttaactttctttctgggagccatcttacagtttaaccattgaccatgcatagggttaacataggaagtagtacctgaaaacatccggcttttggtcatattcaacatgtcgaccagacggtgaatctctccattttgacgctggaaggaaaaaaaaaggaaaattagttttgtgcaataattatgataagtacagaagcagactgacattgtttgtctgttgtactattgatctaatacacattaacaaacacttacccaaaccaagatcaataagatacaatttcttctcattagatgttccgggtaggccaagtaaaaagttttcaggtttaacatctccatgcacaaaactggagttcaattaggaaacacaaaaataattagaataggtccataggataaataaaaaagaaaagatcgtagataagaatgactgacaacttaccctttgaaatgaagctgttctagaatcgatatagcctccactgctatacaagcaactgtttcttcagacaacctttaaatagagtagacattaagaaataaacaatgtagcactatttgggaatgtatgagtatattgagaattgataataaaatttgaaacatgcaaagggtaacttggaaggaaaaagtagaacagacaattacttacatttggttattagtgttccaaagatcccataaacttgggccaagcatgtccatgacctattttcagaatcaggaaattgttagtcatgaatatttactggcaaaagcaatttcaaaacaaataaaagaatcacaactgatagaatggaaactgactaagatatagtagtctccttgttggcctctataatggacagagggaattccataacaaccattgagagaactgttatgttttattagcaaaaacaccaattaggcgataaaacttggttattaataactactaataatgataaaagcgtataataataataataacaataataataaacataataataattacctgtacacttgccactcatatggaggaccgtgactgcagcctttactatttctatgctctaacttcaaagcaacctacaaaacgttaatgggattgtcattagcaacacaacaaacttccttaataaatgtaccagaatgcaaaatgcgggaggaacagaacctcaaaggcatccggcccagttcctgcaatacaaccagtcgctcttcttcccacaaatacttgtccaaaaccccccttccccagctttctatctaacttgtacaggggagaattgccaatctgtacctgaagatataattttaagaaaattatcagtattcagtattgcacaagaagctcagtccacaaactacacggagaagaaattttattattatggaaaccatataaatatgaaacagaaatcatgtggttggagcaactgcacattgtcgatctgagagctacaaattgttcaaaaaaaaatctaagagctgaaaaagtttcacttagtaacaatatagagttaccacacataactcaatcaaatgaaaacagaaaacttctgcagcatgaaataagtgttgtgcgtacaataactacaataatgccatttcaaaccagcaagggcaaaaattccaagaagtgataagtagctgccggttttagatggcagttccagttaatccattagttttttttttagtcaattggttccctgaaagcagtattgttaagttctagtaaaaataggttgagaaaataaagacaaaaagtaccctctcaggaagcggacttgtgcttccttcatcgtcagcaacagccagcttttctgcacttttttgagccgctagctcacggacagaaatcaaatttcctactggcaattcaaaaccagtgtttccctgagcgctgattccagcaccaatcagcttaacatttttaccttgattcatagctctagatcctctccctcgtcctctgctggttggcactgcattttgaaaagaatacagtgaaataactaaattttacagaaactatatgtagggagtatgattgttaaagcctttacctattcgggtacctgggcaagcaggtggaactaaaatagcaggattgtcttgcgcattattaaccctctttgatcgtctaactccacttctgggatcagccattctatttcatacacaaaatctctcctttccaactccacaactttttttttttttgtgaaaaatcaaaatccaaggacttcagcctaacatacaaaaccaatgtcattttataatacaagaaaataagaggtactcaaataagctttccaaaagagacaataggccatgatcaatgaagacccttcataacttaaacttcaaacacagaatatcacatcagcataaatcagaaaacaaacgtttgacgatcacaaattggggctttagttaagaccttttaaccaattgagcaaaaccat

SEQ ID NO: 217964 - DNA, 4726 bp, Cannabis indica
gcaaattcaaaattttagaagttacatacatatcacaacgtgacttttatctcctaagctaaaagatgaaaccaactaaactctatgactaatctatcattatcatgataatctcaaaagacaacagcataagaattaaaaaaaaatacaaattttattggtttttatactatctgaataaaaaatataataaaaaaaatataatttaaaaaaaaatcaaagaaaaagttaaaaaatatataataaaaaaaaaaaacataagtaggagtaactaattatcataagaataactagttactttatactatttttcccatttttttatttttgttctaaattttttccataaaataattttatcgaaaaaaactacatttttgtaaacttacaacttaaaaaccataaaaaatgaaaaattcaaaaaaaaataaaaattacacaacatctttgtttcaggtgttagtgtgaaaaagactaaaatgtgaataagttttcacaaataagctaccttaattttggaaggtgagttctatttgtcaactttgaataatgtatttttgtgatttagaaaattcagtatatatagcttaagcaagtacaacctataaaagcttttacaaaaagcatgaattgattattaagcaacccatattttttctttcttgacattagacttcctgtctaatctaaaactataaggacataaaaacaccataacaattattatataagtactcgaatctcagaccaagtttgacatttttggtgtatttgaaagtaattgtagaattaccaaacactataattacaaatattgtaaaatacaatgtgtatttggctgtaaactgtgattacatataaattcttattttcatattttataaataaatattaattatatagaaaaataacattaattatctaaaaatagtaatagttttgtacttagactcaattctcatgaaaatcataaaaattagaaaataattgacacccttcaattatccccaattacaaacacatcaaatctggtaactactccgaattacactcaattccaactaaacacttactttccaaacaatgtttaagttaagctacaatttaatgtcaatttatgataatttgaccttgcatagctgcatgtcttttgtcaaagttgtttggccaactacttctaatactaactaagatttcgttttttctttataaatgtaaattatgatcaatacctatgaaaacaacattcaattttagaaattcacagttaattaagtggtaaacattgatgatgacaatgacaatactaggggaagaatttataaataaaagcgatatgagtagtttgacaatcaatttccctaattcaactatttaactaagaaaaataaacaagtggattacaatacgctcaacctcgtaacctaaggtccatgtacaccccaaaatatcgagatatttaaactatcgaactgacaccaagctataagagcagccatatgaatgcaaccttggacaccgacttttggaagctcgctctttgcaaagtaggttgcttgtaaagagcgagcttctaaaagacaactttgaggtttctcaaggttatctttatgtgtggcattcgagccatataccgacactaggaaatattattcaatttacttcaaagagtggaatattcaatgaacatgtataactgaatttagtcagaaaaatattgcttacttttatgatacatgattcagtataatacaggtttgtttgatagagtacctttctagagctaattccataggcacccatgtgaatgttcctttacaaacgcagaaagtaagatttacccatggcttctgggatcaacaacttggtgaacctttctggcttcagcacttgaatactgtccaactactcgggcatggggcaccgaggcttctcctcgagcaagggcttccacattctcaagcaggtatttttgtggaagccttcccactacattgccttcttcatttccttctttgtcaaggaatgaaaagtgtggtataccctcaacaccgaactcgtcaagctcttgttcccactttgtgttgtcaacattaagcacaacaaagttcacccgatccctgatgagaagaaaccaggaaaaaagaatcaatgcccatgaccacaaaaacttcacctaaaacagaaaagtttagaattggattgataatgaatagcaagctacagcataaaactttacttgtactcctgctcaactttgtaaacatctggtgctaattcgcgacatacttcacaccagtctgcatagaactccacaacagtaggcttcccatttgaaagagcctaaggaatcgaccaacaaatctatctattacataaatttacacagcattcattgatacaccagaaaatacttcacctgatgcattatgagagaaaataacagaacgaaaacaaatctacaaatgcggatgataaactaacaaatagcattgctgctatatggtatatggaaatgaaaacattgcttctgtaagagatggataaaagggcgacttccaaagtctatattttccccaaataagactaggaaggctatggaatacggcatagacaatcataatgccaattaagaacctcaaattttgattaacgagtcctgaaattttgtcattgaaccctatattactaaattatactgcatacaatcattaagatatgccatataaacaagtccaccacatcttaagaaagagaaattcaattgagttcttcacaccggcctacctactaaacccgatgtccatgatgagctagaactaaaatgagaggggttgtattaacttattgacaaacctcttcataaggtaacgcagtagctgctatgtccttcaaagaaacaccaaaatccagcctgcctgataagaaaagtcccacagctgcaagagtagaaaccactgctatttgcttgttgagacctttgcttggaaattctggaaagccagaaccttgggcagaactggtagcttggctactgctctcattgcttactgagctaggctcaacaggcaacttcttctgaaacaatgataatagctttcactttttgatataattggtaaactagattatcagccatagaatcaacacaggtaaaacaaatcaaattcaaatatggaagaaaaaacccaagtccaaaaggccaaaatgcatccagaaaagaaggaaaaaccaattttgaaaacacaaactaatattgatcatatagattcagtaatactttgagtgttggtttactcctagaactaagaagaggaagatagaaatagaaacataaagaatagagagaataaggaattcatatattctttattaataattggtaaatttatacaaagctaatgttaggttgtatcgttcagcaacttcaaagttcccaactttatattaccataataccaaaatcatatcttcatacaaactaaagacatttccacaaacaaaaaaaaataccaaaattattgcaaagggtacattcctaaactccaatttctgtaaattaagaggtgcagataccaaaattcatgctcaatggctaaatgcccagaaaaaaataataaaacccaaaatctttgcaagtagagggaaaaggaagagataaggcttaccacagtggagggttggggttcggtgggttcaggagtcgtttgacatgaaacgatgtgtcgtttgtgggtcttggtctggaaatgaacagaggtttttactagggactgggaatttggaaaacaggtttggaatctatgaaaagctatgggattggtggccacacgagccattagagcttcttcaattcagtttttccagttctctttctctgctaattaaactaacagatattcaatcaataataacatattatattattcccatggcaatgacttttattattattattattattattattattattattattattatatttttttttgttgctgtcctcaattaacttattattagttttatttgtaaataaagcaacaattaatattttaatttaaaaaaaattatagccaacaaaagcaattattttatttttattttggcattgttgtttttgatatctttcaagcttggaattctttttcttctgtcacaataaaccattttaaaaggattaaaaaatgttagtgctttttttttttttaaaacatatgttcattaaaaaaaattagacctcccggttaggatattcataaaaatagatactacggctagacgcctaaaatgattaatgattataggtaaaagctcacttaaacatatatatatactataaagttacaagttctcacagtaatacaaaataaataactaataaaagaagaaatgattctattacaaaataaagaataattcctaattggcctttatcttttcatgcttcttaagtttggtggtctcgaacttctcccgtgcctctaatttgacattttggttgtacattttttagatttctttgtgttacaatataaattaatgaagagcttattaggagctctttagaatgaattaattaatgctagcaagagaatggtaatgtgaaacattaccttgtttgttttgaaggtttagccttagaatgttattccccaagtaatataactacccttaaagagggtaatgttgataccttaaaaaatggtaggattgaattatt

SEQ ID NO: 217965 - DNA, 10887 bp, Cannabis indica
aatttttaccgaggtgactgaatgatagattgtttctctctatttttcatcattgtttgtggcttctactatttttgaattttgacaaaatatgatagaaaataaaggttccaaatcttagactgatcaataagatggtaatattagctacacaatgtgctaattttgtaatttttttttaaacattaaaaaatggctaacaagtgttcgtcctacatatttgcttttaactagattttgatttctacaaaaaggaaaaaataaaaaaggaaagaaagaaagaaaaaagagagattttgaagtagtccatttattaatgtagtattccttactttttcaagatatattggtttcaatattctttggtcactgttaagtgtaatattgatattcatactctgatgctgtctgtgttaggcagctgatggtcagcacatcattctccacccaataaatatgaagtgtcttctacatcattttgggagcgccgatttgctgcctgacaggttttgttgctataaaaattttcttgttttctgcaatatagccccttgaaattccattgtgcccgttgatttctgtttttgcaatatgactgatagttcttgtcatcttatccaaaggctttactagaatgggcctactgtgtagtgtaattcaaatgatcaattgaaattgtagcttttcctttgttaacatgtgtcagtaacagttttgccagtaattgattgtccgatttttctaaatattctgttttaaaagtatcatgtacatgcctaatcatgaactatatatgtttttttattttgcagaatctttggaaagattttgtaattagccatggtgttatttctgtgttaattttctgatcttcaatttccttcattgtagaatttctgggaagatctttgcaattagagacagtgactcagtcagaagccataaggaggcgctttcgcttcttgagccatttttctttaactacaactttttcaggtaccttggcactagttattatataatatagtaaaatttttcattggtttctcacgtttattcatatatataatttgaaattatgtttctaatgactaagttttgttcagctatgtgaaatcgatttgagcgagcttttaccccctgattccatgcttccctttattgaggaaataaagaaacgtgcaaagcaaaggaagcaagttgctcgcaaggtatcattacacttgtgtactatattctctataaacgtagtctaaacttagatttgttttcatctttgctgaactaattgatattgctttctgttgactatagaagcaatttttgcctcttattgcgtgcgtcagcatgttttttcactggaagaaagcataattgcatgcataactgaaacatacaccggatactgttaaactttcaaaacctctagggaggccagcacactgagcacattagaattttctattatggtttactgttaatatgtatttctttgtactgtttcggttgacatgattgatcatgtacagtacatggtaggtttgtagtgacatattgggtttgtgcccatccacattcttgtattgttcattttattaacagaaaaaaaaaattctgtgtcgtagttgttctctggtatttaatatatgcatcaaacatgagtttggatgtacttttattatttgctaatatgctattgtttatttctaggagcggaaagagaaaatcaaggccgaagctgctgtagagggcccaatgcctatattttctggttttgtgcagtcatctcgtaatgaatcccctattttctccatggatgactttgaaggtaatcttatcatcactatttggtctacccagagatgtaggaatcatatgatttcttgatgtcttaagaaaatattattgcgaaagagaaagatcagtattagtttgccttgtacattatcatgttgtctgctatggtttatgagatgtgtgagacttttaaaatgttctcgactatcctaatgtacagttaatttttttccttgcattttgatttgcatgttcattttcagtcctttttcctgttaatctcatctgagctttatatgttttgccatggttacgatcagctctaggaacttcacctgtggcatcatcaagcacttcagttgttggggaacggaggctcttttcaaatgttacgaagcttggttttgctgctgggcatgattctccatctctaaaaattgaggaaattagttctcagcttgaaaaccttgcgacaaccgagtcttcttctgctggttagtttcaagagctgcttttctatggaacaatacttttggcttttgaagcatgactacctattctatatatactttacgattgtcattgagttgcaactatgtgcatgactcattaagggttgcccacaaacagttcgattccctcaacctgctatagttttatagttccgaaatattgtagggttagggttaggttgggagcttaatgctctttttcaaaaaggttaaaattatatgcatgcaccattaactttcattatcaatgtcccatattaaactgttttgctcttggattatgaatcgattgaaccatattgtttcaagtagtaatgctgttttcgcaaacctttttgctatctgcaggttcaagaaacaccggtgtactgtcgttcgctaatgtaatatctagagacaaagccgttgaaagcttagaggcaccgaagatgaacgaatgggaaagaaaggcaagaaaccaagccgtgtccttttgtctacagcaggtggtcggcgctattaactttcatcacagtaatggcaaaatgacaaggcatctctagttcattataaaagaataattctagggttcctgtcttcttttagctgtacaaagtgcatctacttctcagactgtccatgtattggccaatggccatggcggcttttttctcttcctgcaaatattggggtttttaccccactttccacattgtgttcttaccaacgaaggttcataaatacaaatatgtaagaaatttaattaatgtgtttatgtttcgagcttcttatgagcaaaattagaaatttttattgtggattttagtaatatgtttctattgcaaagtcatgttcatgtacttgggttggagcaatattactatccaatttcagtggcatttttagtttgcctgcttgaaataccttatttaagttgtttttaataagtaaaataagtagataattccgctcattgaagaattagtaatgaattgcacattttgtttttacttaagctaagaatgacccaccatgtaattttttttttatatctgattggaaatttggctgaaataatctataaagatcagatatatttcacttgattgtgatggttgtctccttgaagatacatattttatatattggccctaccttaatgtggattggagtgaagaacttagaaagtggataagctttttatctacttctcaatcagtagtacacatcaaaatcacaataactataatattaatgcaaataatatcttttagaggaaaaacatgggagctcctttatttcctttactctgagctcacttaaccaactgatggataatcaatactttctttaattatgtctctgattattattattattattatggtcctgaaaaggagaagagctaccgatgtggttcaagaaagtttcaaccccatctaagaaatgttcaccaagaccttatttgctacgatggaggtcacttgggctctaattcaccatgttgtaattaggaatacccaaccaattattattttgaccttttggttaatacccttaaatcctttccaagttaaatatagcaatcatgttctacttaaatatatattttttttcattcggatcatcatattatttatacacattcaagactaaataataacataataaaagagtgttgtgtacactaaaaaccaagtcatgttctctctagtacacactcttctgatagtcatgctcacagaactctccaccaagatcatcacaagcctctcttcgaaaaactctgcaccaattcaatacaacattttttaactattattattaaaaatatttagccaaagaaaatatattgattaaagtatatatatgcatgcttacgtttttggatcattgtactcaaaatattctctttcaaaggtctctgaagatgatgttgaagttgatgttgagtcagtctgcttttgttgaagctttgcttcaggaaacatgccttcccaacatgcctctccacctatagtttcacaggcttctgcagggaacacactgaacaaaacaaaatccattaaaagccgaaatgaaggcacatttggagacagcttgtgctcggggagagtacgctctcctcagttgtttttagtaatgatatgcacattcaaaatatatttagatacaaaaattattaaacgaatattattttgtgataagttactctaattttattgaagaaaaaataaaattctatcatgaatctctagaataaaaattctaactttgtctctgtaataattattttcgggagttttttttatttttttaaataaagtatttcatatttgaagtaattaaaatacttacgagaattgagagttataattaactgtgttcgtatcattgattgtcacaacatttgctttgacactagaattacgggaagtgaaagaagtacataattgagaaggaaaaagggtcaattgagaaggttttttggagggtttcaaagggataagagtaggagaaataatactcaaacttgcctgcattttttcttttttaattttgaaatggtaattttgtgaagatgaagctttttagtttgttttggggtttggaattggagtgaatgatcatatcaagtaaagctcaaatttataggataaatttagtgatggaagaagcaagatatttgtgcatttagataaggttacaaatacaatgatagagaagctttggcatgttcctatcatcatggatgagatatttataagcattttatttggactgttttctctcaattattattctaggatgggaaaagttgataaatactaaaagttaattataaattgccacgtaagtattttacgtttaaatttttatgtaatttaattgggtaaatactattttgcatcttatattttataaaagttacagattagaccatctgatttttaagaaataaaataaattatgtattttttaaaatgttacaaatagaatcctgaacttaattttggacaatttttttaatataactaacttgaaggcaatttctaatacgaacagatgcaaaaaaatttaactaattttgtcacaacacttctacatcggattatcattataaattttttagttttctcttattttaatatatttataaatttttaattacatttagaaatatctaattataagataactgtttttaagatcatattttttaggtttacatttttgactaattatatttaacttaattttattttataaatatgcaatttgtcattttgtcttttgtatcggggatatggtatttgtttctatgttcgttatggcttgttttgttaccatatatggtaatttgttatgtgcttagtgtggtttgttttgataccatatatggtggtttgtcatgtatggctgtttgtttaaatcttttcgtgagttcttcctacaaatggtgtaaggtagcagtgatactctcaattctaaggatattaaacataaattatttcttcattaaaagaaaattttagaatacgtttccacaatgaaattaaaattcttactttaacttaatattatcattaagcggtgtgttaattaaattttacctatttatttttcaggtgtattttacttcactcacttgattatttaaggatccaagaacttcaatgggatatgttactattacaacactttttttaaaattactatatcatgaactttattggaaggatttcgaactgataattttttttaatgtgattttgtgttacaagattattgacaatcttccaggtagaaaggtaggatcgagatgggcccaagatgttggactacctaccacgtggatcatctcatattcattgtctttaatgttggctttgaagttgtccacagtataccagaatgagatggggtatcctttatgatattgaaggatattgaaatcttattgtctagctttcagggatatctttttcttatgtcagtcacaacgttaatattgtagcatataaattagctaaacatgttcttaagatagacaataagctttaatagatagaagaaacccttgcacatttgtgtgatattttttatttaacctaaagagattactcttatctaaaaaaaacaaataaaaagattactcttacaaaaataaataaataaataaataaaattcttagctatacaattaaaaagtaatgtgattcctacttaaaaatataaaaggttatttaatgcatatcatttagtgcaattagagtttgtatctagcattattctttcgattatttatactccaaaatactatcatgatcaaattatattttttgtgtaattttattttttccaaacagaaatataggaagatctgttaattttccagcatgaaatttaaaattttaacacaaaaatattttcttattaattattaattaattaaattttataatatcattaataataaaataaattttaaattacgtgtcagttctatatttcagcattgtagatattttggtaaaaacatttaacaggtgaatttaaagcaaaaatcccaaatgaaggatttacaatatgatattcaatttttttgtatagataatactatagaaaagaaaagatataatatgtacacggtaagccatttttaagatcatagtaatataattaatatactttcattgtattcaattgctacattacgtagtacagtatcaaacctagatatgaccccatcaccaaaactacgaagaaaattagacaaaagtttattgtattttccatgtaacacactatatcccttccccgaaatcctcactaaaatgattataggtttcgatgactgccactgctgctgctactcgggctagtttatccgaaaatagctgaacatgcagagtagcagcagcacaaaagctcaattcacatgccctttcacttgaaattccagaaaacaaaaatgggagtaccttgttaggcgcggccgccatggttagaatgccatctttttacgagtgtctcacgcatactaaatcatccaatttgtttccatccattttgtatagagacactccctccatttgatgatagtgttcttgtgcagcttctctcaaactctcaaaaggcataacttcccatttactgtaatttgatgactttcttacactgctcatatctggagaccccgacacaggtccatcgctttcagggctcccattcccccacaccttacaactaccaaactgacccaattcgccagtttcgcccctcttcaaatacagggccgctgcatgagctcgctgtatcatttctctagtcggcacatctgcccaatcctgtttcctcttggatctcatgggtgaatggatcctaataacctgtgaaaatataacctcgaattacattatgtcatcaagattgcatctgtgttaagacaacttttccatagattccaacaacatagaattttcaaatatgtattcttacaccgaggcattctaggagctggtaatatgctcttccttgaagtgggttgtgccctttcctaggtgtagagaagtatcttgtcctacaaggtgagactaaattattagcaatggaagttgctgaagaatgtctttccaaaacgaacacacaacaataaactatatatgtataacaggagttaactgaccattcagtatagccagggtcaactgtgaaaccataaatgtcaacaatgtcacacatggagagtgctagttctatggatttcattccagttcctttcgcaccacggcgtagcacaattccttgaaaaagataaactggatttggaattttctgcaacacgatataatttaaaatattaatggactattacatcagtgaatagaaaagtgttgtgtagtaataaagttaaacaagagtaactcctgatcaagagatcatgaccacacccaaaggaaaaaaaaatccttggcagcagtaacttctaatcccaatccaataaataaatgtaaaatctcactaacacagtaatctacaatgatgaatatagatataggaaaaaactcagattgaaacatcaccttgatcattgtattgaagtctctatgtatcacacttttgattatgagtacttcagtatctacaacaaaagaaaattgtaaaaaaccctgctacggtaaagtcaaatcatatgcatcaataactttcttcaatggttttcccaaaaatataaaactagtaaacaattaacaattaataagaatgaggtaaataacatgcatttcataactcacccgacccatttagaatggcaaccatgttacgagcagcacccctaaccacgagtcgaaaatccctcttcagcccaacatacttggcatatttctacaaaggacatggaaaggcaaaatacatttcattaactacttttgtagacaaagactttgttagtgataggaaatatctctaaagctttctaccttattaacaggagcctcattgtcgcgtattacaacatcatgaccatcaatctcttctccaaactcagtctttaaaagatctcctgaatttccaacaactgcacaggtgcggaactgtctaggatggaaagggggttttgctggtaaaatcaaattgagatgttcctcacagagtgtccggttgtagcatttatcagctcccctataaccaagacaatgaaataatcagattcacttacaactaattaaatcattcatctacatgaatcacaaggggttcatgaggaaactaaggctttcataatcatacaactgtgctatcctttttgctgcatagtcttcccacccatccggccgaacatctagatactctctagtgagcacagtagtcatgttacgatactacaccatcaaaaaaatgtaagtaagcaaatgtaattggcctcataataagctaactacaataactaatgattataagataatcagtttagtaacctgttcccaaagtagaagtgtctcacaaatgttgtacttgtactccaatggttcaaaaactttgaattgctcattgtactgccattaagaaggggtggtttaaatttaaagtaattgacttttctttcttaatgaagtaaatgtgtgagaaaaaaaggaataaagagaacaaacccaggtgctgttagtgccttgtggaaacttaaggaccaagttacaatgatcaattatatgagcagtgagtccaaggcctctgtttgcctacaattaaattcaaagttacaaagtgaaaaaatatctaattttgattaattgatgaacattggaattgaacaaagaagaggcaaaccacgcattgttgaacattggactgaaactcctcaagaattcggacatgttgaagagtcttcagatctaacttctcaaatttgttttgatttgaattggaaggagcacctgtaatagcaaacatgaacattaaaatcgaatcgagatcacctagagaaaaatcaagttagagtagtagtaggaactgtaagaacctgtgaacaaagagaattggattccgaaaacgagaagagcgaataatgcagcagcgaacaccaaatatataaccgtagggcgctttccatggctatgagctttctgaatagacctcattttggaagctcatagcctaagcaatcatacagaaatggagatctgcgaaacctttaaggtcggtcttcaaccgtccctagccaactagatctcgccttagagtaattgaaccccgtcgtcgatccctgaccggagctctggtctggtaggtctccggcgatgtagctgagttcgcactggtttggttcctaacccacaaatttctgagttgttaagaatatctattaagcccatcttacggaaagaataagaaaaatgagaaattaaaataataacaaaaacaataatcatgtcaatttttttttttttggagagaaatcatgtccaaacttttagttagttaactcctatgtaaaatattttagaaaatatatttaaaatattttagttaactctaatgtaaattaattgggaagggatttgattatatgttattttttaatttccaattaaattgatttggatcatattatatgtgttgttcaaaaatttaatacaattaatatctaattgaaattattagtatttttatttagtttaaatgagtcattaataaatattggatttatttaaaatattgaataaatctaaatcaatcttaaatacatgattatatatctaatgatagaatcgatccaattcgattggatagctagctaacactaataggatcgaatcaaatggtaaaatctaacatctaatatataattgaatcagatttgaatacgcctaaaaagtattagatgtggtctaataaatactccaaaaaagtgctaattacaacctcctattattcaaccttcaccccttaaattatatgcttgtatattttattaattttttctcatacgagtagtcaggcccgaccctgggcatagacgggctaggcctgtgcttagggcccacccagtccaggggcccaaaattttttttcctcttttaaaattatacatttt

SEQ ID NO: 217966 - DNA, 7001 bp, Cannabis indica
atttatttttttttttaattattttctttcctaaaaaaaaaaccattggtttttaataaaaaaaccattgtgaatcggatctagaaacccatacattttctttgattgtttttttacgagaaaagttttcttagaggtgcagaattagtttgggaacttttcttggcctgagaacttccttaattggatttcttggagatgactgtattcatggtatctgcttccacccacttgttgaagtaatcaacaacggctatggcgtatttgagtcatccttttctagtcgtaagaaaacctactagatcaattctccaaacagcaaaaggcgatctattgttcataagggcaatttctattggtggagctcgtgggaccttgacttagcgctgccattgttcgcacttacggacatactcgatgcaatctttttttatagttggtcaaaattatccctattgaagaattttcttggacaagcttggtctagatgtgtggtctctgcaaaaatcgtcgcgaacttcatgaatgacagcgcttatctctattgtggctatgtatctcaaatatggaacggaaaaccccctgcgataaagtcttccatctagaatgacatatctgagagcttgatattgaatcttttgggcagaatccctgtcggtcgaaagctctccaaaactcaaaaatcagaagattgggcctttccaggagcttgaatgatcgatgacctttacccttgtgtttcaatgcttagggagttcaggtggtcaatgggcatgttgccaatttttctaacatattcgcaaatgaattctaatcccttgggatctagcaaaagttatatctcttgaaatgttgcaatagttctttagatcgagacacgtagacaaccatcacctttggtctgatactcttcgaatatttgatttatgactagccaggagttgctgtatacttcaatattatgagctcctacttccttggctagttgtaggccagccatcatggcttcatgctctgctttattgttggaggctgggaattcgaagcgaagagcactctggagctagtgtccctgtggagagaccaagattattcctactctagcgctcttttcattcgacgctccatcaacataaactttctagaacagtagtctagaactggctcgtccgaatcatcattcatcctagtgcacttaaccatgaaatttgctaaggcatgacctttgatggaaactcgaggctgatattgaatgtcaaattgactgagctccacaacacattttagtaaccttccaaatgactccggtttttgtaaaacctggcggagagggtggttaattaacgccttaatgtcatgggcttgaaagtaggatcacaactttcacaagaaaattagcaagcaaaaggacaatttctctatcataggatatctagactctgcgcccactaatcttttgcttatgtattacaacggaagttggaccttcccttcttctcacactaatgcaacacttatagtgtgatctgacacgaccaagtacatgtataacgaatctctctcaactggcttggaaagaataagggctttggtcaaatgttccttcagcttctagaaggccttttcgcactcttcagttcacttaaactttttgcttccgcgcaagacgttgaagaataggacacccttgtcagtggatttagaaacaaacctactgagcattgtaattcttccaattaagctttcgacgtctttgtgtttcttgggggaaggcatgtccaggaatgccttgatcttctccagattagcttcgattccttgctagttaataatgaaacccagtaatttctccaaagaaactccgaaggtgcacttttttggattaagtttcattccgtacttcaaaataatggtgtaggcttcctccaagtcactgttgtgctccctggaagttttgaacttgaccaacatatcatccacatgtacctccatattcttccccaagacatctttgaacatcttattaaccaatctttgatatattgttccagcattctttagtccaaatggcattacaacatagcagtaaacccctttttcagtttgaaaattggtatgctcttagtctgccacgtgcattttgatttgattatagccggagtacacatctataaagcttaataattaatacacagacgtgacatccaccatcttttgcaaaagcgacaagtatcagatccaccttcgggtaagctttgtgcagatccatgaagtctatacactttctccacatgttgttgggcttcgggactagtatcagattggccaagcacatagaataaaatgcctatcgaagaaacttaatagaagtcaatttgtcgacttcagtcttcactgctttcgccctaacaggatctagtgatcctcttttagcgaactggtgttgtatttttgtcaatatttagggcatgacagatggagttcggattgatcccaatcatatttgaatggctccacgccaatatatcttgatttttctttactgtgtacacgatttcctcttttaccactcgagatagattcattcccaccttgataactttgggattactgtaggcattacttttttttctggtcgattttagtaaccctctcttcaccttgctttcattccactgcgccctgtacctattgatccttgccctggtctttaattatctgatatgttttgggcctctcatactggtttccacttctcaaaatgatagtctggtattgctatatatttaggattgacttcagtgatgttaggtatatttgcttgagccctgttggtcatgagagtggctattttctcaatcttattttttaagtttctaatggatgaccaattctcaatcatgaattattaagaacactaaattgagcttcaggttgtctcatggaatttgttgttgttacttctattgtacaagttgttgtggttgttttagcctgaaccttggctagtaaaattttagaggacatcgttgaaacaattattgcagttgttgaatagactattgtggatgttgatcacttttctaagaaaatttcggatggttccgccatcattttaatatgtggaataggagttgttaagtgatcttggaaaatttcctatggaatgagcttagtccaaaggaagattattgacatcttcactgatcaaacgaatgaggtctcctacacaacatttttgcttgcataacttggttgcgtattgggaaaaagtgtttaatctgtggctctcatgataaaaatcatcaacactcattcttgtttgtcaatatatatgtttggatgtattaaactttggttaggaatgagagttccaaaaaccatcatttttagtatgctgaggtggatttcgagaagcaaagctagtaactttcgaagaggagtgtatgatatggctttggtggccatggtgtaccacatatggaaggtgaggaacttagtttttttgggaagagatggtttgactatagagtatactctaaagataattatagatatgatgtatttaatataattacagttttacctttaggaattagttaagcagataaagattggttgagattggttgtataaggggtgattggttagattgtgccttcttgtggctagccaaacttgtgtaatttcgttctttattgagtagtaacgtttctcttacttaaaaaagtgttgatataagtttggtcgatgatcaacatttgttgcatgtttgattattattagtattttaacttaatattcttatacattgtctaactagtaattaatctcaaaaataatagtactattgtatacacaatcacttgcagtatgtcatgatgtatgtataaatataaatatatcatatgcgacaccaatttgttaaaaatactaagttagagagaagggggcttatggaggtcatttgtcccattccacacttattttcacttttttgctcctataaattaatattctatttatatctttttatatttttatttttatcccatagattttatatttataattattattaccccatttgttcacacccacctataattataaatgacacaattacacaaaactcaaaagatctcttacgttggcctcttctctctttgccttgttcttggtttctgaaagttctgcccttcttaaaataaaaagcagtgttttatttaaaaaacaaaaaacaaaaaaacaatccaaataggtcacagtaacatatatgcaacacagcccacactatactctacgtaccactttttctaactaataacaatgggggtgtaccaaattaatattttagggctcgtttggtacggtgaataagagtcgtacgtatttcatgattaaataataaataacattatgttcagataaaataaatgtattatattaattattacgacaaatttttttaataaaatataagttgtattatttattacataacaattgattcgtattagcttgtattataatatttacaaaggatctagagtcaactccaattcaacctgaacccaagacccagacctagacctaggacctgggactcggatgcggacccaaacttgggacccgatcccagacccgaacccggacccaagatccgagacctgactcagaacccagaccgggacccaaacctagactcgaaccctgacccgaaccaagaccgagactgagacccagaccctggacttggactcggacccggacccaacctgtagtcagtgttggggttgagtttttgaaaatataaaccctacacaatctataagtcaatacttaacatagtattgtattaaataatattaatataatacaatataatacaatactgcctaccaaacgagcccttaaaaactggttttttacgttgtgttgtgttctatagtattgtggtagattgtattttattaatattatttaatataatactattttagtattaactagtattaatagcttatgtaaaattatattatctttactataaattcgatcccaactctaaccccgtccgagtctagggtttgggtgtgggttaggatccggggctaaggtctagggtcgggtctaggtccgggtctgggattcgagaccgagaatgggcccgagtttggaactgggactggatccgagtccgaggttcgggattcaggatttgggtccaaatctaagtcagggtccccaactccaaaccctttgtaaaataatacaagctaatacagataattgttatgtatcaaataattacaattcacatattgtattaaaatttatggtcgtaataattaatacaataatagaatattttattcaaaaatatttacttgtcatttactaaaatatgacgctactatagatgctccttctaacatatacacgtgctttatatattatataatatatgtatgtctacagatctagtagtcacacctagcttagtatatatatatatatatccaatttacacaggttgttttgtagtttagtacaagaattcatatgtgatcatgatcagtttatgtaataactatttcgaactgttctctaccatctatatatgtcgtagctcgatcgattgttctatagtgtaattacatattatatatactatgggttcacaatcacatcatcatgtggcttttgtagtagctgtgttgatgatattgttgggaaatggagggagtagtacaggggtagttggtcgtggtgggaagattatgtcaaattacatagtgggtccttcttcatcttgtaataataagaataatggtaatgctccggcggtggatgacaagcgaggtgtgccgagtggggctaatcctctgcacaacagatagtcgaatcttgttctttattcagcccacaaactcatcatcatcatcaaaacctactaatgtgtaatccatcgctacctatatacaagaattaattattaatccacttatttattactcatttctattattatttttgctgttgtttttgatatattggatgttgcatattgcatattttgtaagtgtaaaaacaagaatatatagttacataacatgtctctgaaagcgtgcctataaaaagttaataatcaaacttggattctctctcgttttgtatatattcatgctctaatgtctgacatgttatgcatgagttgtctcttggttcggtgtgctctctctatatatataagttattaatgaaccgtattaaagaatattgtcctatatgaattaaatataaaaatattgaaccatatataagaacatggactactctactcatcaccaattaattttgaaatgaaattccataattctcatcagtctatataattaatgctctaaaaaaaaacattatacaattaatgagaatataaatatttatctctctttatattagatgatgagttatattagatcgagcaattgtaaatatctgcatcataaatttattaataattctaattattatatataaaaataaattatatctatctcgctatatatacaataataagtaattagcatcaatattacaatgaagtgatatcttaaattcaaacttaaaattgaattactcaaaattaaggacatgttagagtattgcatagcttttgtatttattaattattgcaatcatatatattaatataatacaatttaatgaataagaaattgtatgtattaatttataaaataatttgcagtataaatatttaaatttaatttttggttacaaataaatactaaagtaattttttacggtaataatacttaagtgatattttgtaacttctataagtacctaactgttaagtattaagtgcgagatcggggtccaagttcgaaaccgaggtcagatcagggtccaagatttgggtctggagttaggtctgaggccagagtctgggtccgagtcctgagctagggttggaa

SEQ ID NO: 217967 - DNA, 1888 bp, Cannabis indica
cccatttcaccacagatgcccaaaaacacatatttcaaaaaaattggtattaactaactgaaaagaaagctaccaaactttattacattccctcacctcacctcatctcacctaaaggttccatctcaatgcatttgcaaaatataaaacattttaaggttaactagcaatgaaagaaagcatatcagttcaatgacaaacaaaagccacagactgattgatattcatgtcaattgtaaaataacaataataatagtaatcaaaatgagaaactaaacatgtatataatctagtagagtgcatagttctccgaaccaggcccggggcagatgagcttgtagatactcctaacaactggaagaatggcaaacagtgcaagttggagctgttctgaactgcttgttcgaattgatatctgaccactaagcttgttgttcaaccctgcacgaactgctaccttgtagttccttccaagagaaaactgagactgcaaattagcccccaatgccaggtcccctctccacttcaccaaagacagtccaagagaggattgatcttggccaatgggaaaatctgcctccctcagacgcacttctaaattcgctccatatgctgagtcactttgtgatttgacaactccagtgctgcccaccaacacaacccgcttcccaagcgcagtctggttctcaattttgaatccagtggaaacattttcacctaagaatgtcacagatgttccagcagttgtcttgttctttttgaaacttttgaactttgtctccccacggacgatgtatgcaagttgttttccaatgttttgaatgtcaaagccagccatacttgatccattgtccccatgcttagcagcaactgaggaatccagatggatattgaattcttttttatccttggttacttgaacagcaacaacccctggaaaacggttgacaatggcaagggtttgctcaaggttaacaccgtcataaccgcaatcatgatcccagccatgggtgtccaataccggccttgccagcaattgagaagtgggctccaagaatcggtacctgtaagccggattatcaccatcaaaagaaggaggcagagccatatcaggtaacgcaactggaacagcagcaggagttccattttcagggtcatcttcaccagcaaaagccaactcttcagcactaaccttaccacccctcttcttcatttctttcatccgtttcaactcctctctccattgcttcttttgaaggagtttcaccctgtaatcatactcctccatatatgccttcttctgctctttgctcagcttagcaatctggaaattcctaagaggtttaaatggtggaagctgatcatactcatcttcttcttcaccatcagaatcagacaagtcatccaaatcaatatcagaatcaccaatctctccaccttgatcacctgaaagttttggatgagcacgagactgcaaaagccaggacaacaagtatggaaggggaggcgaacgagaacgaaaaccaaagagcttcttgtgatccactgattcctgtggttttgagaggttgcttgcctcagataatatcttcatagaataactcaagagcaacagctgagatcgccaagcttgaccattcgggagcactttctcaccatccctattctttctacaagaggaatgattctcagccagtgatataggattcatcaaacttggactcatagttctaagatcaccaacagcttgtccaatggtctgctgaacaatttgagaccgctgagcaacaaacaattcatagttcaggggcgtacccgatggtccatcgggtggagaggatgcagcatgagtcaaagtaacaatgacacttctccagatcgaagggcc

SEQ ID NO: 217968 - DNA, 3768 bp, Cannabis indica
tgtgttaattaattagtttcatctgtttgaatattggaccgtatatgatacacgtataagtccttgaattgtacattttgctatagaataaaaatatctgagtatgagagatgataaaaacaggtatagcaaaattgcaatattatatgtgaaccggaaattgtagaataaattatatatattataaaagaaatttgcaattatcattattttggatatattacaataattttagtggaggttgtaatgtcgttttctttcatcatctaaaatgacacaattttctattttgattgtaaagtttctttttcaattctttatgctttgtttctgttcacccattttttttttccttccattttatatttatcttcgttgtatttttgctcttttgtataaagtctaaacaagttttgtatattaattattacaaaatgcgaaattgtagtactagaaaagggttcgttaacacaccaaactttttgccaccaaaaaaagaaaaataagaaaagatcacatacaatgaatgaaacataactaaattcaactctttggtccataaaatagtaatagtcctaaaatatagaggttaaccataataataataataataataataatataataataaaatgaataaagacaacttattacaataatcaaatgggacaaaatgggcttctaagggcggttctttcttggaaagtagtgggttttgcctttcaagcttaattgaaggtagaaaaaattcatatttttaggaccctttactcagtcataggcatacataaatgcttccacattatttaatattactgtttgttgagagagagcttccacattgtatatgttagatagaaaatttatgatattttcaaatgcatgtaaatattgtaatgggaactagggatagatagggaataatttgataatttgtgattgtgtgtgttttatttttaatatcttccactttcacatgcttagtggtggtggtccttttcatccctcttctcctaacctgctctacctactaataatagtcatattagaaaaagacttttcattattatgtaaacaacccaatgggtcattatttttcattttaaacttgaatcaaattaaaatattttagctccactcatcacatgccattataaagtggtgacaaactaatagataaatgaacaatgaaccagtggtaggactaattatattatatatatataaaaatgttttgaaaaaatgccaatttcttgagaagttatgaaaaaggcctaataatatttactaatgcaaaaaatacattattttaattaaagtgtaagaaatggaatggacacactcacactgatttccataagaatgaatggcttttttccaattgatttcatttgattgctcatttttttgataagttcgatttgtttgtctatgctttcctctcccaaaaagaaaagagagaaattagatccatttttggagggtgagattctgatagtgtcacatggtctgtcacctgtagttaggcaacatttaagaagatagtgaatgtgtattttctatattttgataagtcaaagttggtttgctttgattcattaataagtattgggggactctaagttactttgggctttggtagaagaagttatttattggactagacatcggcctgaggctgatttatttgggcctttcttaacaacccttccgttttgtctttaaatcaaactttattaaatatttctaaataatcttggattctaagttatgtataagttacactctttactatgttaaataacatttcagataatatttttcaaaatgatttataaaatattaatctgagctttttttttttcaaagtagaacattagaagtattataattaggttattgtaacgtcctaattaaaaaaaaaagtcacatatcttgattacagtgtgctaatcatattaatcgggatctaataaactaagtgaataaaatttaacttaaacaacaaaacaacttctaataatagtaatatacctttaattcaaaataaaaataatatagttacatattcaggatgctgtaaaattcatttcaaaatattacaagttgtttacatacaagccaacctaaccggaaaagctaagatttctatacaatctccatgttggacccaactctcgtggtctagctagtttggccagaacttgtacaattcaccatcaatacttttgaacccatggcttacctggcactgctttatcctttcctgcaaaataaagcacccatgagtgaaagcccagcaaaaaaacataatcaaactataacatataacatacatatcatacacttagtacgtcattgcatatagatcagcgtgccactgcactaatataacatgccactagtcttatgatgatgccatcttatcttaggtctatataatatagatactacgtgttacactcagacgtctatttattaaataagggcttattagggtcgatctctgttttgattatcaagtttaacctagttatgccttgattgcacaactctcaacatagattaaactaattatgccgccttactcgcgcatctacatatactcaattaattcatgtattgcatgcatagatatagaaactttagcgtaataatcttaattcacatttctaactataaatacaaaatatacaagtgtgccaccaagctatactctatgtgcaaggttcactttcttatctgaaatccaaagtatgaggagaattccaatccacaagtaatctcgagtaagtgtcgtcgatcctagtcacaatcatgggtttaaaacataatagggttaatcccaaaataaaatttaaaaaatattcatagttaggaatctaactctggaccaagtaatagaactcatcacgagctttccaacgatataaagaacgtctaaaatagagttcaaagtcaaaagttatggtcaaaactagtttaaaaaaatctatgaccaaaaagggaattagccctgtgaaggcgttgcggcacacccttaaagaggagatcccctaattctttgggctcatgggccactacaagaaaaatgagcattaatgaggacaaatttcgttagtaaaaacccctgttttcgtcagtattgcgcatcaatgaggacatttcgttggtaaaaagtcgttgggaatacttcgttgggaaaaacgattatcaacaacgactttcacatctgatatcaaattggctcaatttttttaccatttcaaaaatacaccatttcaactcaactttcacatctgatattaaattggctcaaaagcccaatataaggcataaataggtataagtcccatcaaaatatatatacctaaacacgcatattactaagctcaaaaatcacaaaattcatgctatcaagctcatagaaaaaccaagtagaatttcatgctcaaacttaccaaattgacaccaaaaacaccaagctatttgacccattaactcagaatatacaaactcaaataagtactctttgctttcattcatggaataaacataaaaaccacatcaagaataccttcatatgaatatcaaacaaactctaaccctagaatgagatttttaaaaattaaaaccataaagagaagaaatcaataccctcaaatagcttactaaacttagcccatcacacaccaaaattcacttcaattgcaacaattcttctaaaaaactaaaacaaattttcaaaaggggaaagagagagagaga

SEQ ID NO: 217969 - DNA, 3217 bp, Cannabis indica
taaaaggaaataaattataatttattttatacgagaaaaagaaaatatttttttggtacaagcaaaaataatgcatttacataaaaagaaatccctatacattacgtatattagaataatcttctaaatattattatcatcataaatctatcgtggttacacatcatccatatgtattaagtatcatcccactaaatcccacgcatcaactaattattactattattaattattttctaaactattttatatctataaatttaggtttattcctttaatgtttttgttggtttttggttagtgagctggcacggcacattcccaaaaaaaattatcctaatcatacaccatttatttacgttaatattatcttaattaacaaattattaagcatgaaatagcttattagaaaaaaaaaagtcaacatgactcgtgaccgctgacgtggcaacacataaccccgacaatttcgcgccaaaataaaatttagtttactttcttatccaatccaagtctgagctgtacatgacacattgacacatatttggcctttccttaaaaaaaataaattattatttccttaaaaatataaatcctatttcccaaaaaagcatcccaccttcctttcaaatcacgtgatcaaaaaaggccaaatccgacggttcataaagcgtgtgctttccacgtactttgggttcgcgtgtaaggtacttttgatatttaattacgtacgaaaagtcatcatgtacgccaatttcattccacgtcgtttttaacgtgagatcgttaattagtgatatttatttaattaaattatttaaactaaattaatcatgttccgcgaaacaccagattaagaaagaacataataaaattcataaaaataataagaatatccaaaagaatataactctagaaatcgaagcagaaaaagaatattcttaactcagatcccataatcaaaacacatataaatacacctcaaaaccacaacccaatttgcctcaaaacaaaatctcaaaaataccaactttttttctctttctttttcaaaaagaggtattacctctattctttcttcttcttcttctctctttcttttttgggtttttgagaattaatggctctcaaagctgttcatgtctcagacgtacctaatttagatcaagtcccacaaaatgcctcattctctctctactcaactcgtcttcccaaaggtaataataatcaaaatcttctgcaactcatcaccattgtccaaaaagctttgacttttttcttatttaatcttgaaattgctttgatctgaaaaatatttctctgtttttggatcgacaggtgtggaattgggtagaggaagtttaaatgcaccaaaatttgctgtgattgggcatcgaggccatggaatgaacgttttacaatcttctgatatgaaaatgaaagcttttaaagaaaactccattgtttctttcaacaaagctgcctcttttcccattgatttcgtcgagtttgatgttcaggtaagaaaaaaaaactttttcttgtatttattaattatttattttatgtcaaacgtccaaattcatcggaacttgaaagagggtgacgtgattggtttttgtcgccgcgtacggtcggtgtttttttgtgaaaaaagtctacagagtagggtattttagtaatttcagttcgttcctaaactcgtactgataaaaagtttgttttttttttggtggggtgggattgaaaaatcaaaaagaaaaacacaacatttgtgtgaatcgaaccgacatatggttgtgttttttgtaggtgaccaaggatgattaccctgttattttccatgacaactttatcctcaccagagaagatgtaagtttttttttttttttgcaaaaataccaataatgatggtaattgtttgaattttggtaaaaagtttggatttttatcaactggggtttgttggtgtttttttttatctatagggtattgttttggagaagagagttactgagctgaatctttctgagtttctatgttatgggcctcaaaaagaggttggaaaagaagggaaacctttgcttaggaaaagcaaagatgggaaaattacagagtggaatgttgaaactgatgactctctttgtacactccaagaagcttttgaacaagtggaaccatctttggggtttaacatagaattgaaatttgatgacagtgttttgtatcaacaagactatcttattcatgttcttcaagctattttagatgtggtttttggttatgccaaagacagatctataatcttctcaagtttccaacctgatgcagctcttttggtcaagaaattacaagacaaatatccggtaaaaaaaaatcatatttttgaaaattaaaacataggttttggttttggtttagttttgtaaagtggggatgtttaagaatttactaattatctttttgttatatttcaggtctattttttgaccaatggaggaactgagattttccttgatgtaaggagaaattccttagaagaagccatgaaattgtgcttggaaagtggtttagatgggattgtctcagaagttaaaggggttttcagaaatccaggggctgtgcccaaaatcaaggaccataatctttcactcctaacatatggaaaattaaagtaagagtctatagtctaatttttctacaccaaatatcttgacttttgttctaattggtaactatatagtaaccttttctttttatttgatgtattaatgcagtaatgtaagtgaagctgtgtacattcaacacctaatgggaatagatggagtgattgtagatttggtacaagaaattacagaggcagtctttgatttaatgaaaccaacaacaaataacattgaagaagagagcctttctcaaggtgatgatgagaacataaagctcaaaacaaagccacaattttctcagaaagagctttcttttctcttgaagctcatccctcagttgatacagatttaatacaatattttaaccttttgttttttttacttatattgttccactttgttttgtggtgaaaagagagttggattagaggagtttgacacgccaatatactcgtaatgatgtacataaatttatcgtagtcagtttcctctattaaatctatacataaaagttatgtgttgctaacttcttatttttcttttgaatacta

SEQ ID NO: 217970 - DNA, 5329 bp, Cannabis indica
aaattcgtgttttcgtgtttctatgttgtgccgtgcttaaggccatattaatcgtgtcgtgtctggactcatatttattcgtgtcgtgctaggcgcaagctcatattcttttgcatgtgttatgttgtactgtatcactcccgtgcgctcgtgccagtttcgtgccttgccaaaaaactcgacgcaaatttacaacttcacctgtgattcccattaacaatgctcaatatatatatatatatatatatatgccagctcgtatataatggtacggtgtttaacacctaaaagctaccttgtaaacttaatacttatttacttttaaactgaagtaaataataataaagcagtaacgtatctactatatatagtaaacagtagcataattttgtaattattgttttacattaatatatctatatagttcaaattaataagcagtctaaatttatttggtctcacataattatacatgataatgatatcatattatatgtcgttgtagaaatggtgcttgaaaggttccatatgttcaacttgcaaacacaatgcaagaaccagggaaccatcgccactgggactagagatcagaagagagtcgccatcgtaagcatggatcccagggccaacataaatctccttaccccatccaaaatcaagcccatacataggtagccttaaccagctcaccactccaatattaggattcccatagaaaggcccctgctgctcgtgatcatcatcatcatcactacctcctaacaaagcatgaatattctgaagcttcttcaagtccttctcattctttaaatactcaatgcttgaccaaacatactcattcgtaaccatctcaatagcttctcttactctactcgctgcgaagcttaacgagtttagataacagctccccggcgctactcttggctatcacatcgaaagtggcgttgccaaagtagcccgtcggcaaaggagggtctattcggctccgcacgtcaacgctgatgcccagaccagtaggttgttccttaacaagcctcctcgctttgcatgcacatctccaaacatgtgcggccatggtctcataacgggtgtacggacgagcagtatcattgacagccgtagtaatttgaagtgttttaacttcttcttttgttatctttaacatggccacagtggttttcttttttctctcttcaacactgtctgactttccaactaaaattgggggttggtcgaattcagaatggtggactaaataaaaagcttgattgttattattattagccgggggatctcctgctctaaggacttttcgatccagaaacggaggagtgtttaatggttcacctctagcaagaccagcccattccgagatgaagtgtaacgaactatttccatcggccacggcatgagaaataaccacgctgagactgattcccccacaagcgaatttagtcacttggacaatcaatagaggaatttcatgaattgggagaccgtagtctactgttggaataaggccatcgtattttgatgaaggagagaaatcatcgccaaagtcatctagtttcaatagtgaatctgattctatgaaacgaactccttcattattacagttgagttcgagacggcttcctccatcgctgtgccagtgaaggcggccagcgagcgggtagaagggcactagggctcgacttaatgattgtttgagtgtggcggctatactattaggtgacctaaggcagttctcaggtggcctgtagaagtagatggttggtacatgagtaatgataccaacttgatcccattctgagagagataatgtgcctttccatgttggctcagctggctttactatagagcagcctttcattctcacattttggttcatttcaaacttgtttttggtttgcttaatttcttttttctctgtttggtatgagatgggaaaactatgaataccaagttatttataatggcaaaattggtatactctctttgatcgaaatcattatgtaataattcatattaacatacgtattattatataagttattttaatttccgtatattggctaaacagttggaaagtgaaaatcgtgtgatcagagtttgttccttaaaacggtacatacgtacgtaaagtagtttattctgccataaacgggagttctgtttccctgtaatatcaattaactcaaccaccaaatattgttgggtatatttcatttcaaagggggtttaaatgaaattaaaaccaggtaatgagagtaaaaattatagatcatttctttttatatatatttctttttagcaaaaaaatcataaatttcttgaaggattaattcctgctgaattatccacatttttttttttttccgagagaaactggtcccaaaaaactccacattctagaacaaaaactctaaatagggaaggggacacataattgtattcataaattatttgaatcatggaatgtacgattttgaatacaaagagggtaattaggccctaacatctaccaacaaaggaagaagggttggttgaagggggtcggcacaggtaccctatggtgcagggggttggcataggtcacccttggcacacgggttgattgtgtgactttgtcttagtgttttggccatttttatccatgtacctcaaatctgatgatttaatatgctttgaaaaactaagaaagagatctatgactttcatgtttggtgtcgcactctcatttggggcgggaggttgtctcacccccttggcatcagggtgtcgatgcagtgcccctagtcgcagggggttagggtttccccggtggacaatacaagaaaaaaagctctagtggcacgacaaaagtagcgcctacaagctttttatttatttttttcatgcctatggtcttcttgttgtgccaaaatgttagtgccaaaaaggtgtaaattggcaggacaactaatatggcgtgcctaatgggtccttctggcacgacaacatggcatgcctattgtcgaagtatcgtgccaaatttcaattcttttataccccttctgccatccttttgtgcactacaaaaaattctacaggtaccaaaaaattgtataggtaacactttgtcgtgctcaatatttcttttatttttctaaaaataaagtattttaatttaaaatatgaatattactataattaaaaattaaaaaccctattaaaaaatagaaaccaaaatatttataacaagtgccttttattatgtaaattaacaatccaaattacgactaaattaaaattgttcaaataaacaacacttatacaatcaaattcatataattataaagaataacactacaatcctaaatgggaagactaatgttttgggatctccaacatttgtggatagtaaggttattctgatatctgatatctttgacatttatagttgttggatctgcggcatctgctgcattggtgcgcatccaaaaaattaggggcatctgttgtatcaaatctctcaaaaaaaatagtgtcaaaacagtaggacaaattaaattgcaaacataaagtattgaattaaccaaataatatataaacactcaaatgttatttactttttttgttctaagccaaatattataaaattctaagaataaaattaaaaaattgttgtacaaactgaaatttactctaaatatattgcactttttaattaattttaaatacaatatttatatttttcataaattaccaacttttaaattaaaaatttaatatcctaactattgatctcgcttttggccaatcaattaaagcgattagaataaatgatattgaataagaattatataaaattagagcaataagaacacatatatttatagagattcgaccccgtgatagtagtaatatcttactctcctttttcttgtatttacttatgagagaagaagcaattgagtttcttgatctctctcgaaagcttaaaattttacagcgtaagagctctcttaaagaattgattttggatccctcaatagtgaaatggttcttctgtttatagggaagaattgcattaattaggtttcctaaaaccattaagaaataaaatgggaaacttgtttactttccttcaatcgataaaattaaaaggaaaactaggatggtttcctcttatttcttgtcggtgcaaatgtatcccacaaaattacggatgtgattgagatttgaatgcttgaacatttatggaaagtatctctaaagatcttcttaagctgaagtaccttagttgaaagactcggtattcgtgaatgacatggatttgtaaaggtgatcacgcacaggttatacctggatgatccttactgaagatgtaaccttgacaactttaattagaaagttctctagctaggctcttaagtaaaaatgacccatccatgcttctcaatattcttcacatgtcaccatgttagatgccacatcatcttatgcagaatttaggataacatatgccccccaagttcgtgtagaatggtctacttgcacgcgagcgtattcaaccatcaggttggtcagatgggtgacatgtgttcggttcttgtgctatgtcttgattcgatgtgatgtgatgaaattagtgaagatatgtttgtctcttcagtgctgggcctttaatgccttcttgaattatagacctcgattgacacattgacagttattaagtaccgcgtgcctgacgtgtgtactcctaatatgtgattattacactttttcgaggagaaatccaaaatttgaattccagattactaaattacccttctaactgcctataaaaggggttaaaaaagtcctttatactcttttagctattttattcttaaagaaaatcacagcataaaaaatcctttttctctttataatctttgaagaattattgcttggaacatgatttacagaagcttccgaagagtatttaagagcatccgaaccgagagtaagtttttttttaaattacacacattgttgtttttgaattaattttttcaaatttgggtttttgaggttgaactttgacgattaaaattaggaaaaagctaaggctttcaattctggatttagatgcacactcatggcttttacattcccaaatttccatcagctccaagttaattttgctagaaactaatcgaaattacctatttaaagtttttgggaattttctagattcattatctttttgaatctattagatcgacatatcaaacgtgttttgctcttgcaaaaaatcatacattcggttcttacctccttgctgtctttcctcttttgtaga

SEQ ID NO: 217971 - DNA, 6803 bp, Cannabis indica
tctgtccacccaaattggtcttttttgagctgatcggttaacggtcgtgctatagtcccataatccttcacgaacttccggtagtaacccgtgaggcctaagaaacccctcaactccttggctgttttaggcagcggccattcaagcatggccttgattttagaaggatccacggccacaccttggcccgagataatgtgaccaagatactccacttgtcgctgcccaaagcaacatttttttaagttagcaaaaaattgatgtggggacagcatttgtaacaccatttcaaggtccttgagatgtgtgtgtgcgtcgggactgtagacgagaatatcatcaaaaaacaccaacactcgtttccgaaggtaaggtttgaaaatctcattcatctgaaattgaaaagtggccggagcatttgttaatccaaatggcatcaacacaaactcatagtgaccttcgtgagtccggaaagcggtcttgtgaatatcttcaggcttcacacgaatctgatgatacccggaacgcaagtccaacttcgaaaatacttgggccccatgcaactcatcgattagctcatctatcaccggaatgggaaacttatccggaatagtggcttgatttaaagctcggtaatccacacaaaacctccattcgccatcttttttcttaaccaaaaggattgggctcgaataaggactattgcttggttggacaatacctccggtcaacatatccctaactaaacgctcaacttcatccttaatgtgatacgggtagcggtaaggtcgaacacttactgggttgatgcccggtaggaggttaatggcatgatcatggctccgtggtggaggaagagacgttggagtttgaaacaccgactcgtactgctgtaacaatccattaatatcttctgggcactccacattcccttgtgctactgaaacacaccccaattctacccacacaccttgtttttcatgttgcagtaacttgaccatgttcttcagagatattcgagttttatggagaagcggatccccttgtaaagtgacccgttggctacccaccttaagtgtcattgtgtgttccttccagtggtgagtagtcttgcccaaggtttctaaccattgaacaccaagaatgacatcggtgttgcccaattggagaggtagaaagtcatcaatgatttccaattcttgtaacgagagatgaactgcccgacagatgccttcccccttgacagcttgtccgctacccatttggactccgtaagcctccgtcgcggatagtggcaattcaagtttcttggccaattcagtggtgatgaagttatgggtggctccgctatccactaagaccaccacatcatgcccatgtatagaccccagcaacttcatcgtttttggcgaagttaatcccaccacggcattcaacgacacttccactaattgagcttctgctagagctaacaaatctggaagttgaaggtcttctccattggaatccaacaatccctcctcggcagcttcttcttggataatgatgacttgcatttcagtttttttacactcatggccacgggtccaacgaccatcacatttgaagcacacccctgctttcttcttatcttgaatttcaaattcagttagtcgccggtagctggtggccgcggctgctggtgacgatggagaccttgaatttccactcacagaatacgacgatgaagaagaagagggtgatggaaggaatgtacctctgtgggagtcgggtatggttaattgagtaagtggaggttttgggcttgacctattgggcccagtcagcccaactcttgagaggttagctaaaatatgattggttcaacaatttcagccaattccatcatatggaccagcccagtaggctccaacattctcaaggaagcttgaatctccacctataagcctgtcatgaacgcagcttgcagtgccggttccgccattactccgacggacgaagctagtgacgcgaactgcctacggttcctgcacggtcgaggtctggcggaggacgaaaaagcgatcatacagcgatccttcgtgtgtggggctgaaccttcggagcagtttcagttttagatcgttccaagattgaattggacgtctctgattctcccatcggaaccaactcagagctgaatcttcaagacagagaatcgctgcctcaagctgctctgctgaggataatccctttagtccaaagtacctctccgcgcgatacgcccactcgtcgggatctccaccatcgaatactgggagttcgattttccgggcgcggaattccgatcgttgttcaccagcgtctacacgttgctcaacaacctccgtattcctgccattaattccggtaccacccacaacagatccgtctcccccgtgaagacgacgattggaccccataattcccgtcgacccctcccggagtgaggccagctcatctaccacacgagcttgggcagtaaccaaccgatccaagacctccttcataactttcaagtctaccccatgactcttcaataacactccgtgatcgttgagctggttttgtaccccaaaaactgtagttgataacccatctacccgagattccattctcgtcgataccggcattcaccacggagtgcccgctctgataccaattgataagggctgagacagcaaacggttaacaacagaagcaattcaactatagcagaagagaatttcagtaatctttaagtaacattagcaaaaaatggatgaaaatactctgaagctttattgatatttcaatggagactaagtctcttacaaggagaaggagctctctccaaacagagagatcactcactaattctcacataaactctgcacaatagcttcacccactactataaggtcaaacagtacccaaaataccctctaaccaactctacccgctcaaccacaaatgacccaattacccttgagccatgtgtctaattggcctctttctagtataagtaaatcgtataggaggtctagcaattctatcaagctacttgggaggactcccacatcacttaggttataagaggagggcttagtactaattgtattatttcagtaatattttagttgtccttttgtaagaatcttttattaattgatctaggtggctgtagttcatttgaaaagggttgagttgtagtgttttttgtcttaagttgccctttataattagagggaaagggctctttggaagggtagctagagatttgctaagagaaaactcttgtgcagagtcaccctctcgaacaactctaaactataactttgtcactatgatcaataaaatacttcatacatacatattttttccaaataaaagaatcaagattataatttttccttttaatttagagttgtgttgtcattccgttgattgtctttgatgttgctttcgaatatgtagagtttgctctttccatgttgatacttgtgtctttttatttcagggagcaacatgggaccctgatgggcgtatgatccttcttgctttctctaaatcttcaacactaggctcaattcactttgcatcgaagcccccttccttgggtatgtgtccggcctttcaattcaagttcaaatgatttgcttaattgttggtatgtccctagttgcctaagcttttaagagctgcttttgggcttctgaagctccaaaagcacttctgttgcttgttgggtaacgaatgagttttagcttttaactttaaaaagctcttttaacaaaagcttgttttagtagctttctcaggaatagctcttgagaagctaaaagcagaagctcagtcaaataaggcctatatatactatttccttgcaatacttcctacgaaacacattaataaataaagcttgagaattgaataaagataaagctacgtttctagcgtgtttctaaattgtggacttattatggaatttgttgaagtttattagataatattgagcatttttgtgatgaattaagcaacaattgtcattcaaagagtttcaaattgagcattttgtgatgaattaagcaacaactgtcattcaaagagtttcatatgtgtcgtcgttttacataactaagttagattctgaaacttaagtgcacttctattataagtatgaacgctaaagtgcatttcacacgaaatacattttaagcgaaatacattataagtatgaaacttaagtgcacttctataagtatgaacactaaagtgcattttacacgaaatacattttgtgtgataagttttgtgaaaatgactagttataagcaagcagtttatgtacgttggtggtacacaaatcagaatacacaaagatggcaatagcaaactaatgaagaaaaaagagattgaaattgtctattaaaaatggcaaaacaatgacaatttcctcaagtatttgagagatttggagctctccatgatgctgggtttcactcctgaattcacgtatattcctttctcaccattctcatactccattctctaattaaccacaaaattaccaaactacccaatacaaaaatactttttcctacgacccatataccctcatttcttatttgcctatcaatatatgaggtctaatgttaccagttgcccaagtttcaccttgtcctcaaggcgttagaaaatagcaccaagaaaacttgggaaaaactaaagaacaagaaaatttgagtagaaaccacaacgtaacatggtgactagtaacgaaaaacaaattgagtaatgttgtttgacttcccttcataaacaaaacaagttaatgctgaagtgaggcactgagtgtagaagcctttatgctattatgcgaatttttgccccacaaaagagtgacttctagcttcatgttaagaatagattcgtggtaagtgtgagtaggaaaaacacacaacgatgctacaccaattccataatcagaacctgtaagtctccatcattggaaacacatttcaaacctagatgcacactcaaaaagtagaagttgagtttgttgctcttagtcgaaaacccaacgctgttacttcactaaaacatcagcaaaatttcagtcccttagagctaaaggaatccttaaaataaggtcaataaacttagagaaaattaatggagttgagacaacaatccgtgcccaagctctcataatgaaaccctccaacaacaaagatgaattaagagaaagagccattgtcaaaacttgcttgttgacaaccacaccatttgctttgtgccggacccaggtgcaagctcggggttgtgacctcatcgtcgttagtatagggtgaatgtcaagtatgagccagtaaatcgggtactgactattgagtcctttacatggagaagaaacaattaaatgggccctactaggtcccatatgtccatcgcattatcgtgatccattgggttaaggttgttgctaatatgtgatgggtttggaacaagatgtaatgaactgggctgtaagggatagggttgtctttggcttcaacaaaatgatcctagttgcgtcttttttgatgaatggcattgtcaacaccttcagttccgtgagcaacatcctcaccgtcaaaagtacatctcggaggtgtgcattcattgccagattgggttgcataagccctaggatatctttaagttcttttgtcaagagcattttccaatgacaaaacatcctcaccgccctccaccgttctcccataaccgctttgcgtctgatcatgagattaacaaacttgctggtaagtgatagggttttatggaaataatctgtcaatctccatttgtcgttggcttcagcagaatgatcctagttgtgtctttcttgatgaatggcagtgtcgatgtcttcaaatccgtgagcagcatcttcaccgctagaagtacatcttggagggtgtgcaatttattgttagaatgggttgcataagccctaggatatcttcagttccttttcttcaaatcattttccaaaaacaaaacatcttcactaacctccactgttctcccataattgctttgcgtctaatcgtgagattaacaaacttgttggttgtcgctatctcaatcgaaaagcttgtttgccattactagtagtggcgataatgaatcactgttgccaggttgtgcctcgcttttgtggaggatgttgttgcaagtttgatcgcacacatagggatcgttaataagataggaacacaatgagcaaccacctgtttgattgtagtaagctgctagctaccttcgatgtgctaagagtagcgagtagtcatcacccgcgccaattgaggactagtttttgaatggaagcacaacaaggtcccttgccaattattggatattatgggttcgagcttcaaccatttcttccaccacagtggactataccctcatcgttatagtggtatccatccatgaggcaatgcgagttgttggtagtattgaatgaacctctgtactagcaattgtagaatgatggtagttgccaccattagcccaagaggtccaagcattgacttctccatcatcaaaaagcagcggtgccgtgtcagagccatcgatgaagtggattaacgtcgattgcccataaattaacaaatcttgtttggcagcagcaagctcacactcgtggtggtggaccaattccttcaatcgagtgacatcactttgaactgtatgcactaccaattgagaattagttttggaatggcagcacaacgaggtccctgccgattattggc

SEQ ID NO: 217972 - DNA, 32037 bp, Cannabis indica
aggactattgatcaccaaattgagttggttccaggtgcacggccccggctaaagcaccttaccggatggctcccgtcgacctagaagaacttcgaaagcaattagaagaattgctcgaagcgggtgatattaaaccctctaaagcaccgctttaaaacccatcctctttcacaaagaaatcccttaatggcttgcgccaaacaagcaagggtggtcgtagatccgctttcatgctttgaacgtccctgaataggcgcacgaactgatcggtgatggtaagaagacccccaggagcgatggtaatggtccatggttccgtaaattccactcaatccttcccaagatgatcaataatgagggtttcgaccccgaatagatacatctacgcccagcctcgggaaagcccttcttaggccttattcaacgcttgaatgcgcaagaccgaaactcaaggcggggcggataaccttctaactgaggccaggaggtattcgatttatcggatttcgagctagctcccaatcatgccttcccagataaagattcattctgtcttgttctggtccggaagaagaagcttggatcagcagaactggcatctgtccgccggatcgatagcagtgtgagggtggtcgtagatcagagctcagaagagcccggaaagtttctttcgtcaaattcacctctcccacgcccaatctttacattagtggacggacaccgcccaatcctagaatcccgtctcttttctggatttaaaattgcacgggaacttccaactattacgaaaaaaccgattcttaggtgcgctctctcttactagctcactgctttagcgcatttccctctcttcgcgctattgcttacttccccatagggcggtagtaagaagcttgataaccatgtgttacaggccgcggaaatgagataatggtgattgctgaaactcggacttcggaagctccgtttgcacgatcgttgcatttgtattcatccggaaagaagagctggtggtatttggttttgctggactaaacaggtaaagatttctgaacccttttaatatctaagcaagccattcatgttcttctttctgaaccaaatcaagaggtaactctttggggtttatgcaagtccccaatatctccgacggacatttttttgggaagagtaaaaataaatttcaggtgaatggaggggcggtcggcgatttgaattccattactacaacatctgaaaagtgcggaggttcgcgtacttttccctcgcttgcttcaaatgagaaaaaggagactatggcccaatgcaacttctttgacctcggcttctctggttcaaactttacttagacaattttttttttgttttagagcggcccctcttgctaatggaaattggagagttttagtgagactacggtgaatcatctcgctagagcaaaatcagatccaaatcctttacttatctcgcttcgcccctggtcctcgaccctttctggttccatgaattttggttaaggcacccttgtggacgtggtcagaaaagcttggcacaatcattccccgatgccttctagcccgagactttccctaaatctggacaggacagctccagaattaagaagatggaacctggggaatttcttaatattgataaagaaagctcttacaagattacaggcttgacaggttgagattggtaatgcatccaggcccaatctggcgaaactcaaagaagaggctgaagtgcgaaaatactataatgaatgcctactcccaaaagaaattctttggaggcaaaagtctcgggttgattggcttaaggaaggggatcggaatataaagttttccatctccaaacccttaaccgcagaagcaggaatcgtttatcacaattgaggcttgatgatggctcaacagtttatgggcagcaaaacattcagaatgaaacagttgcctattttcataatctgtacaagttggacaatcctagattacgggtcaagctgatgggagttattcctagattggtcacagatgaggaaaattagagattgatttccatgccagaagaaagcgaaataaaaaatgtaatcttctcaatgcccaattcaaaaacaccgggaccagatggattttcagcttcctttttcaatatctctgggccactgttggagctgatgtggtagatgttatacaggacttcttttcctctgggaccatgcctagaggtctcaatcataccttcattgcccttatccccaaaggtgaaggttcctctcgcttatcacaatttcgtcccattagtttatgtaatgttgtttataaggccatttccaagattatgactaaccggggtgcttccaaagattttttcctctaatcaggttgttctgggacggaagctccaccatcaagcaatccttgcacaagagctggttcatgttttgcataaatcaaaggccaaggatggatatgtggcagttaaggtggatatgcgacaagcatatgatatcagatagaatgggttttcattgaggaaaccttaaagaagctggggttttattctaccggattatggagtgtgtgaaaattccaactttttctaacattattaatggccaaagtttcaagagctcgaggggacttcggcagggtgacccactttcccctttactttatgttcttggtatggatgtattctcaagatatctgttggaattggcctcaagaaatacaatcagaggttttaaagtagaccgagtggcaacccctgtcatacatctgctttatgcagatgactgcaccctatttttagaaaattccactggtgttattaaaagaaaagagcttcaaaggccctcaacccgttttgcagagcctcaggtcagttggtgaactttactaagtcacattcctacttcagtcttcacgccccggcttggcttaaaagaagacatggtaggattttaggcatgaatgaaggtgctttccccttcaactgggtattcccttaaaagtaggctgccttaacaaggaagactgtagacccctggtggattggttcagtggaatactaccgggaaggaccattttggatcctctgctggaaaactgacactcattaagtaagttctagggggtcttcctatgcattagaggacctgcctaaggattcctttttctattgctgaagagcgtagatagactttttatttttttggtctaaagctggaggattggaaggctttcactgggttaattgggaaactgtgaaaaagcctttagacaagggtggtctcggtagttggagagtttccacggcgaaccaggcgcttttggggaagatgagctgggatttggcagtggataatgaaagtctttggagcagaattctcaaggggaagtattgtatcagtatggagggcttaactcccaaacaaagatcgcaaacttctgctgtgtggaaggcggttagttgggaatggagtttagtctctaacaatgtttgctggcgagtagggaatggtgcgtccataaacctttaggatcccagggtgcgcaggctgcggagagtcttaaagctattcgcttaccgaagacaaagaaggcggataagctggtatggacgcaaaactcctcaggatgctattcagctaaagggggttatcgattgcaaatagctctggaattcagcggcagttcccatcatttgcagtctccggcgtcacggcaacatgaagtgggcggaatcaggacctgcaagacggagaacaagcgtaggctaccaagagccgaagcgcgtgagtacgccgtccgtcagtagatccgtgttgtagttgttgtttccccctagtggtggaaccgcctgaagtcaagaccggtcaagagcagaaagcaagcgtgagttatggtttcggaagaagaaggaagagctcccaagtcgagtccggcttgttcccttgcttgagtaagagatagatattccttgtctgtactcaggcaggtagtagcagtaggactggactaaaggttagtttcatagcgcctggtagtcccatgccttatccgtacttgtgtttgagggagctcgacagaaagagagggtggtcgtagatcagagagaggaataggcgagcgccattatgattattagttgtcagtgccgttctgctctagtagtgttggtaaatatctctctttccggtaggtttttttccagctttcattccggtaagtatcgttctcgtggcggtgtcgttctaggtttcactctcccctttcgtcataaggcgtgctgtctctgtcgtgttgtcgctcgtgggattgagaaaattctctctctttagtcagtgccgttctagtagtggaataaaaaccttccctccctgtggtcggtcactctttctggcctttccgttgggaagctcgcgctaaacgcccttcggtggtctctcgagcgtccttcttgcaaatcaaaggctcgagagacctctcaatccacagctttctctcgaacatctctggttttctttgatctttgaagtcaatttatcgggcttttgtgaaaagttgttggtatgccggataaaagggttagtaaggcggtttgcgagaatctcatcactggcaaaagaaagaagaactacccaaacattagtgaccagtgtctgtcgagtccggaagcccgagcggagcagtagatcaagcagcgtcggagtagacggcaccggtgaatgaagtcgaaaatcctgctgggtttagtgagctgaacgagtcgtcgcaaaggacgtggctgaaagaattcgttgactttttggagtccagctcccgtagtggaacctttctttcccagagccctgtaagcccttctgtcccgctttgagccctctacctatcgatccagaccctgcttgaaaatatgcttcaaacgcctctttgatttttcaaaaatacagaagtagtagtcttcccgggtctcactgttcggataactttcctttgaatcctactgcataggcaagatctcatccttcggcgaatcttggggctcagaagagtgctccctacgacgggaaaaaggggtccaaagaccttctcttcgacgacgtggacacggggaatcccatcatgggcgatccgacaagagaaatgcagaagaatatgccctcctcaacgggtcaagccctcgctcagaactaagggatcctgaacatcggcactcactgcatgagctcatagggcaagatgaagatccggagaaaggctaaacgtcaccacacatcgtcaactttaccttggcatgcttccatcagcgctgaaaagacagcattgaacgagaagagaactaaggcaaggctggtgatgtgccactgtatggagggctcagagagagtagaagtgctttccttcacgctgagcgtgaactggagatttcaggctgctgctatacgaggaagattgcttatgacatcaatcagctaggtccgtctgtcgaatagtttttcaatgcatgcgatctttcgagtaggagtagagtgaagggtctcgctttcaagttgtatcggctgccatagcggcaggttcagaatcggaccctcgcaccgagagaaaaccagagctctttcaaaaagacagggacagagcaaagaatgagtcatttgcgattggggaggaaaagtcacttgtttccaaagacaaagatagggggcgcaaggaaaaagtggtttcatcaggatccggtcccttccaccgatggttgagtaagcttcctctgtcctctctcttccagtcgatcttccacttgcgcttccctcttaggtcgaaagcaagctactgctttcctcaccactgagtactccgaactggtccctgcaaagccctatactgggcttgttccctgtttttttttattgaaaccactttttgaataaatcccccacttctatagctatccttctgctttctcgtgtgctggccagccttctgaagctctttttgaactaccgtctgacagctgtgaaagatcaagaaatggctttaccggccctgtccaactggtactttccttatgactccgactgtggtttccctgagattagaccgattctcctcctgctgctcaaccagctcggtctgacctgactttgaccgctttctgatcgctggtcaatgaaaaccccggatccttagccctatcctttgctggctggttgccccacagggactactctttgctctttgctttagtgttggatggggcagcgaaacctacgattgagggtggtcgtagatcagatgggagcatgcaagaaagagagtcgttttgtaatcttatcaaatcggtgttaaaacagtcgctttttcagaccaaaaattagcgctttaatgcgtggaccgtaagtccctactcctaataagttgcggaattcagtcccttccaatatgagtgtcagacttgcttcctgatctacccctcctgtgctaaaaaaaaagcagctaactgagaatccgcttttcctggacccggcaaagcaccaaccagtttcggctccagcagtccgaagtcagtgggacaaagagtggaagtcggagcaaaagtataccgcatagaagggctctcatgaaaatgatagagttgtggaatcctgtcccaaagggaagtactagttctcccacaaagaggtcgtgaccagcaaataagtgagccggggcttgagtctcaggaaaggcaatttgtgctcaactgagttttagagggcagttcgaagaggaaggcaagcggtctatggttctcgctttcgataaaggggtctccgccagaaaagaagggatttcgtagatcagacaacagtagttggaggagcccagttaccgaaagaaagtaacaaatacgacgaaaatacgggttccatggacagagtgtgagccagccaaagagttcggccaatactggaatagtcgactcgtgagcagggcggggaacaaacaagagaagatcaggtcaggcaagagggcacagtccgaagcgttcggcaagcggtctcacccaatcatcggtcaactgaggttcggtctactctgaaactcgcttattcctctctaacactttcttctgtctattcctttctaacagttagttaccggtccgactaccaaactctgtttgctccatgaaaagtgaaggtagtctacccgcatcgtcaaagaagatatcatgatgctaccttttgcgaatgacgacggtgatttcggcttttcaaaagggtgacattgtaggttagattcctacttgttgaaggtctatagtgatgttatgttataatgacaattaagtagttacagtagtctgcctatagtctcattcattgacgtagataacgagatcacactctcgttgactacctgcttctagtgcgacagagaatgcaagcaaacagagccgcctctgccggtgccgtcggcctgcaagccgatgctagattagttggagccccgagcccgcacattcggcccgagacaagaagcttccattagataaataaaagaaataaagtagaattacgacacagaccactactgaaacagaaaggtgataaatcagctgtactctttcccaatccatgctatgtatgacataccgtgtcgaaaatacaccagctgcgtaaccgaccaataccgacacctataaatttctcacccgaagtgaaatttttgatttgccgggaaagaaaggcagaaataagaaagagattattccctaagagcttgtccagtaccaccgataccaaaaatgcatctcaagtgattaggcggggacaggattcgaacctgcagtcttcaggtcatgggcctgatgagtcgaccaattcctctaccccgcttcttccccttctctttctttcactattcccacctaggtccccggctttggttgcttggccgggatagaaccagcgcttagtaaggctcttcaagaccttactctaacaagtaagcaagtaaactaccttgtctaggttggagctatgaagccttattattatgaaaaggggaaagggctttttcagcttgctgactagggttggcagctaaattcagtcttcgagaccccataacataagaaagttgtggagtgcataagcccccttagagaaaggggctactttcttgtggtagtaattgcgaatgagcaagtagggggcggcaactaaagaggtagcgagactgaccgcaattgcaggaataggttgactttctttcattttggttatggaaagtgaaagtcgtttcgtttagtacgagatcgcttcacacctcgcggtgcttacacctctcgcctatcgaagttctgttcaaaaacctcgtccgagaacttgtatagagaaggatttcccgcggcgcagcagttcttccataccaacttagctgcccggcgctgctattggcataacaaccggtacaccataggttggcccaacccagtcctctcgtactagggttggctcctcgcagttctccctttaacaccaacggtagataggaaccgaactgtctcacgacgttctaaacccaactcacgtaccacttgaatcggcgaacaaccgaacccttgggaccttcttcaaccccaggatgtgatgagtcgacatcgaggtgccaaacgactccgtcgataagagctcttgggagtcatcagcctgttatccccggcgtacctttgatccgttgagcgagagcccttccacacgggactcccggatcactatggccgactttcgtctctgttcgaccagtcggtctcacagtcaggcaggcttataccattacgctcacgagcagaatcttagcttgagcctaccttcgcacacctccgttactctttaggaggcatccgccccagataaactacccacctcgcagtgtcccgccccccccgaattatcggtgcggcggttaggcatccttagacgaaagagtggtctttcaggattggtcgttgtgtgtcaccacctcccacctatcctacacattcgatcaaggttgtcactgcgaagctatagttaaggtgcacggggtcttaccgtctagccgttggtactccgcatcttcacggagaattcaatttcaccgggtccatgtcggagacagcggggcagtcgttacaccattcgtgcaggtcgctacttatgcgacaaggaatttcgctaccttaggacagttagagttactgccgccgtttaccggggcttccattcaaagcttataacacttctccttccgaccttccagcaccgggcaggtgtcagactctatacatcgtgttaccacttagcagagtcctgtgtttttaataaacagtcgctaccccctggtatgtgccgctttcctaatcaaaagaaaggagagcaccccttctcccgaagttacggggtcattttgccgagttccttcgacatggttctctcaagcgccctagtatactctacttgttcacctgtgtcggtttggggtacggtcagttcaccggggggatcgccctcccaattcgaagttttttcctggaagtttcaaccttgttgactatgacaacagtcgcgactataaacagactcgcgactatggcagggcggtacgctctgctctctcgcgaccctactctaatcaaaagactaaaggcccctactgaagattcaaaaaggcgagcactgaaatgagaaagtagactcgtgacgctgaacgacacattctaaaactaaagcgcacactagaaagtgcttcgaaaggtgtcagcaggtgcgcggagccggagcccggcatgttcgcccacttcagagtcttcgcctttagataacaaaaagtgtccgccccttaggtcgccaaacaaactacgacgagagtttcgccttactctaacaagtaagcaagtaaactaccttttgaagcgccagtcgcgtagggcgaccgggccaggccgagtcagaaaggctttgatgactcaaggttcatattagggaaaggagagtgaggggaagagggggcagccctcggcccgatcatccaattcgctccaacagacaggcatggttctgtagtcaaagcaacttcgtcactttcgtgtacccatcggacggcagccctttcgggggttccttagggaccgattcactctgcgtagattgactgaacgcagaaagccttccactggcaggcgatcatgtttttcacaggatttatcgttactcatgtcagcattctcacttctgatatctccaggtgttgtcaccaaaaaccttccccgattgacagaacgttccgctactgacacttgaaaaagcagctttcaaggtctcgtcgcttcggtgaatcacttgagccctgatacattttcggtgccatggagctagaccagtgagctattacgctttcttcaaaggatggctgcttccaagcccacctcctggttgtcatcgctcgatcacttccttttccactaagtgattgcttagggaccttagcgtacgatctgggctgtttccctctcgactttggatcttagcaccccaaaagtctgtctgtacaaacgatctaggcctgtattcggagtttccctggggttggtaaggcgaaatggggccaccctagcccattgagtgctctacctcgggccatcgacatcatacgctctactgaaatagatttcgcggaaaaccagctatatccgatcttggttggcctttcacccctagccacaagtcatccccgtattttgccacatacgtgggttcggtcctccaaggcctgttagagctctcttcaacctgctcatggctagatcgatcggtttcgggtcaaataggaagaactagaagattccacctctggaaagcgcctacacctaatggcttaagccgctgttcccattttctcgctgacccatcatgcaaaaggtacgccgttagagtgagtgcgctttactaatagaatatcaagtaaaggctctaagctccgctccttcgactgattgttcgcatcggatctcaggttctctattgcactccctaaatagggttcttttcacctttccctcacggtacttgtacgctatcggtcattgaggaatacttaggcttagagggtggtccccctttctcgcgtaaaagcgatcagaattcgaacacgccgcgttttactgggaaggatcgaaccatgggaacgaatctacagggctatcaccttctttggccagatcttccaaccttttcacaattacagttcactgcgccctttactaatagaatatcaagtaaaggggcttgctggtttttccatcatccaatccacaacaaatcgaatgaaacctggcgaaaaagaagtgaacactttgctgacaagacgtgtttgtttttcttcaaacccccaatccgctctcgctcgccgctactaacggggtctcggttgatttcccttcctttagctactcagatgtttcagttcgctaagttttaaaagtccaaagagcgcagactagccacggagcttggatacggtttcccgatcggagatccatggatcacagacggtatctccccatggcctttcgcctctgaaagcgtccttccttctcaatgcccgggcatccatccaatgcattcttttcgatcttgtacccacggtacactgaacaccaacccaatctcgatttcaaaaagaaaactacaagcaactacatcaaaaacctctattcctgacgtgaacggacgctttgtcattagagtggtataaccttaaataacgagaaagcttttttatttgtttactcaactcgtaaaggcaaacaaaaaaggtagtttacttgcttacttgttaaagtaagggaggagcctcgaatcaaaacgatttctcctttcttttctacgctacgatctttcttctcttatgaaatttctagtttgatcgagagcggtacacttctccccaatatgagataggttgcagctatagtcagaactcaaactgagccaattgggtaattatgacctgaggtagcgaacgagacagcaaatggatggaaattctccacttaatggctgccgcttctagctctggcgctcttaatctcgaaggtcttggtaggattcttacttgctggccctgcccttttctttcttgcggcatcccttgcttagtttggcaagctccttcctttgttgagctctgtcataccgctcttctatctctttcattggcgcaatcttctttgaattcaataaaaaattgcgattgacttttatgaaagatatctcctccctttaatctaatcagtatattacttatgagtaaggaactctccgaaaggcaggtaaacaggagttaacggcaggcgcaatagaaaggcagttggagacgggcgataggcttagatccgctgcaagctcagtctcaatatgcgcattagagaaggggggttggcgcttcggtcaagaggcagtgtcccaccttcctgtcttgactggtaggcacaatcccttgagtctagttcttgagcgaaggaatcgctttcaatgacaatttctctttagaaatcagccatcagccctcttcaagctgtcgaatatagataggagatccacttcaagttcaaggctggcagcaagcgagccagtcaatccctatgaatatcattaatcaatatctctccggccctagcactctgttatggcgcaatcactgactctagttctggagttctaggtcctctagctattagtgctggtagctctccttctggtaatgcattataggtctctcgagcctcccacctctctctatcgcccttccttcttttagcagctcatctcgaatcttgaatgtttagcgaatcgatcgtaattggtctgaccgctcaaggcttatctctctattcccctttctggtctccggtcattggtagaaagcctgtaaattgaatttctctcctctcccacctctccagcttgggaatacttctttctattggctatatatctgtagtcacaatgccagttcaagctatcttctggatagagcaagaaaaagtatgcgcaagtgcagtagttcaaggcaggtagtaaaggcaagcgcataggcaggggataggcattcaaatcactatcttcaaatagcttatataagagaaagagtggctcgtgcatcttttcttcttttagacaaacaagtctagtaggcaaaagaattgttatagcaagcatgggctagcaaagatgagcgggaatgagcaatgacttgagtttagttctggagttcgagcgggggtagcattccggtcttaagcaaagccgtcctgcccggccatatgtcctgttcagtcagttgcatatcggtaagcatgattgtagcaatacaaataggcgcggtagacgaaggagctgttttcaacaaatcaatattatggtgggtgcctggctgatgaaatacatcctcagaatgcccttcgtgcctaaaaggttagttcaagggctttgatagggaaatgcacgcacttgttgtcgtttcagatgcgatcaaaaagcctttttttcaagcgtagatactacatatgaggaagatgcgaatagagatgcggaagttcctgttggagttggaggtgcaggagcagtgaacatgactcttgcagaaggaagaaatgcggtaaataaagaggagttccaggcgtaggagttcattcaaatagttgaaataggaggagcaggtgcaaaagtagtagcagtagcacgcgcttccctagtagcaggaaaggaggatagaattagtgcgctaccttctccccaaggcctcctcggtcttcttggacttggtttatgtctgattccacccgaactgctaatgtagggttttttggggtaatggcaccggcacacttttcgtctaaataagttctctttcgtcttccgatagttctgacctgcaaagtgagctccgaaaactggcaacctatgaccaaaaagcttcaaattaggcacagtagctgatagagtagaaggtgagattatatattctatagcctatgcgcccgcttctgatgagatagaagtaggatcccggtgcgtcttccttcggtcggcctgtcatcgaaggatgttagcaaaatcagaagaactagaggctcgggttggtcaagcgaactgattcatttaattcttcgcctagtcttagcacccgcacagtagaggggatttaagaagttgtttggattccgacaaaactaagcgtcttgccgctgggtaaaggcaataggaggtctgcaagccttcacgctgaggttcataaaggtaaatccggcctccttgatcctcgccccaaagccaacgcatgaatttggtgctctccattaaccgctcaaatcttgtgctcaatgaggtcccggtaccttattctgggagctaggctaaaactcgtccacatctcctgtccgaacgatcatctcccgtcgtccttccggcttgctatctctttctatctcgaatccctcgtgatggtaggactctctcttcgccttggctgctgattaaattgaagacatccttttagaggcgccatctttcttaagaaaaaacgtgactttcataggcctctaggtggtcttttactggcgcctgtcgataaaaaaaatgggatttgagaccagtgcgataaaagggcttttgagactccgttttgttaacaacaggctcttcaagaccttcctctaacaagtaagcaagtaaactaccttcacgggtaaggatcgtctgtgctatgagtttctcttcctcaatagtggctaaggcaagaaagtatgatcaatgatcttctgctaatgctagcgtctttttcatctctaatctcatctatgcttcaggtgcgaagcaatctacccgctaataattaatagaataaattagaaagggcatccatccaacatttcacaaagaattgagtggtttttgctccttgcccttagtgaagcgagtggcttctgctccccaatttagcatttgtgagcggctttcgcttctcttctttgaaatctagatcttctctttctgtgtctataaatcttcctgccccaagcccctgtaacatttggctttttgcgtccttctgccctgggatagttgggccgggcctggtaactgccgcttcgatcaagcgttaaactactacttatggcttcggtcgagaaaggtatgggcctatgggtcgggttcgtagtagcagacggacaattaaagtacgtggggtccgcttggtgaagcgaagtagacgggtatcccctagatatcgaacgaactagccactcgttattgtagcaaggcgccgtgggtcttgcgagcttctgggtgtatacgcctggagctcctctatatgtaaggaaatagctacatccaaaaggggcaatggtcgccgccctggactctcccaacagtctttagcctgaaaaaggctaaggcttgaatggcgctcttagaatggcttgtgcttcaagaaaacctacatggctggaaaaaggggcacagacagagaaccactctgagtctttattccccgttattgagagtcccatgcgccctagtcttctttctttgaagacatttttgtgcattgggctatgacggttcttagcttcccgggacgggactagccgactcaagtaggaacgaggggtataactattactactatacgataaatgctttccgcccaacccccgtacaaggcggcttaccaaggcttaccgaatttcttcaacggcctatgtgctacgattaggacttgcggctttacggacactgccgcttctcctttctccccagccccgaaataaggctatttaccttctctacgaccacagactgaagttagaagatccaccggagatagtcctttctttgacctaccttgactttagtgggtctacgaatccgcggagggacaagtctgctagtgaccaagcatcgagtcaagataggagcaaccccccattccaaccaacctataaaacaagttttcactaggttttatctggaaggcgggaagagctctattggagcatttgggcgggaagccctacatgggatccgttacttgacttgtgaagccctgtgctcgaagcaaaatcagattacttgcacaaagaaagtgaccaaagatatattcaaaacttagaaaaaggtcttgaagagcctgaacattgcctcggtagaatcaaacccaactaatacgaaagcccatctcccgaaacaagaaaatcaaagcaaaagtgcctcgcggctgtcgcccctctctcctttatgttacccatcccgggagcacctgacctcatctctgtcggtgaaattcgatcacagactttcgctcctctcacattcgttcgagtggcttcgctccaactcgaaggcttttcttagatatctccttccggttcagccgtacccccatacttaacccaacctattccctaagcaaaggaagaagtaaagttccacccttccgtaaccctagctttgatttcagacagggctataggttgatgaggaagaagataattctataaccagctctactatcttctgatcgtgactaaaaagaaagaaaagaaagatccctaccgttcgtttccggagggcggatgagaaagaagagagaaaggatggattgattccattgaggagggctatcgcaactattaaaatagttgctataatcacagaccgagttgatctcagaaagaagaggaggaactctcggggccaattgttgttggatctggcaagatcaggtgcacttcgccttcactcttctttgcttctcctgtccactatggctgaagtcaaactagactttgagttcctcttttaataacataaaaaaagcattccacagtcgtaggtaccgacaccggcagtcggatatcaataatcacttaccccgcgttaggagagtgaggagtgaacggactcaaatacagttgtcaggaggggcctccggcttagacattaggcatgagaatcggccaatgcattcactcacatccgttgattgcggtgcgccatacaccaagcttgtttcagagcggatgtcacaggagtggaaaggaagagttctaccgaggacttagtcaagcagttacggtagcagtcctctttggtttcttacatgacagctttcgaagcaagctagccaagcaaggatagcggggaatgagaaagatacatctagaaggactgtattaggatgggccctagcggttaggcatgcaggtggaaacaacgttaaatactatactaccttcgatccgttcggtcaacctcgcccctcatcgcttgttcgagagctataacttcaccggtgagattgttagccaggttagatctatttgattgggaagttcttagcggatatcaaaggtgcaatccaacaatcgcatgtgttaagtatggagagtagattcatttcaccgagacttcgttctcgaccgggacttcttcgataccggagatatagatataaaggaagctttccattttcttcaggataaggtggaaccagttggcgacctacgccatgcttttcaacggaatctcatggaagggatcttacacattcccgccttatttttttaggataaatgctgttttcaggaattattgaatcagaagcatctcggggactgttttcgacgtgaagaagactcggttgtagatcgctaggccctttatgaaaaaggaattgatagagtcagattcatatgtaaaggctaggcaccttccccgcattcgcacctttaataaagtttatagaactcatgctacatctgatctgctaatttaattagatattttatctcttcctcggaacaggtaaatcagaaatttgatctccatgcccagaatcggaggaaggtctaagaagaggcaacatcaacagaatcccctgcatggctctttcctgtctttgaatgccttgttagtacggtggatactaaccttttcaaagggtcggtcctgtcttgatgccgagaattcggaatagaatgccctctttggaatagaatacagagactaggctgcacatgaaagggaaagggcttactactctcactaatatagaatacactctgagggcggtttgtgcaagttaaattgaaggcacttgcagctaaggcgaggaatcggccaaaagcgctcgcaagggaagattttagcttatgaatggtctaagagcctactgaaagtcctagaactattatccacgttatacacgatcttactattataactagtcttgctattaataggagaactatcttactattaactctaagctaagatatacaccttattaatactatccccgaaaaaaaagtatcccatccccagtaggaatgtttttaggagaactactagtgtttatcttagggaataaattattaagctgctttctcacttgcttgcccagggaagtcatagcgatattaaggaatggacattcggactcatgttacgtgtccacgaaggggccccttttaccccagaatcccgatccctagttttctttctcattgtctttattcactggcttgccctttttttttatgctttaatttcaaactggttggcaggaaactgaccagaagaaggctccttatgcaatctcccaagtccaaaagaaaaagacccccatgcggcttgatctaattttcttggattggagaggcccgtatacatagcacgcaagggatccgcttggggaattgaaatccttatagttggatctccctataagctttcatcgatcttaggagcttaacccatcgtctggcatcctaatgatggggttcttctatctgtgggagctactaagtgacattcaaatcattgaatttaaccggtagtccctttgttataaagatctcgtactcacccctttttagataaagtgaagcgcgcaaagagaacaaacaagatggtgagagcgacgtggggcactcctctttacccaaaatttgagaattcgcagtatggttgaacccgggaccggatccacaggcgttggaactactctaaggactctctcccctttagtgccggcagaagtaggtaatcgggtcccctaagaactattgtagggacttcagcaacttcctttatctatggggctactaatgcggcgagagactccgtggtagagttgccctctctcttcacaaaatggctttacccatctcttagttgcaaggtctctcgagcctcaatcaagcggttctccaaggcggaaggagcaagggttaagttaaagggctaactatggtatagggttctattccaagcgagatcacaaaagaatcactttcggtcatgtgcataacctgggccaagacaagaatgtctattcgttcttaccttacgaacgaaggcgaccatgggggcggaccggttccttctttctttatgttatgttggttgcggtggagggcacttaaccagagttcttgcgggcaggcttccttagaggacaggctttcttaccccgtccaacttactttgttgctaaacctgaacctacacctaagaatcctacaaatacaggagacggtaaaaaaatatgattttatttactctctagtaaatctcgttagactggaacgggctattcttactggttcgtataaactctccccatttcggataaaagaagaaaaagtctgccgggacgactcactaactacagggggcacctctcgcctatctaaattccaggctatggagtttaagaacagtcaatggttttcttcaagtatgaccgcggttttttctggagtctgtccctccagccagtacattttatcctaattttctcggattttgtgttgacgatctcaaagctcaacattctactgctctctaaaaggggacattatggataagatcatggcacgaaaatttactgtaccccaaatctgttcaacatagaccctactcccactcaataaaaatttccttccggatatgatattgaatagttacaggtaaacgcgtggtctctcgagcctctaagataaaaccgcggcttagttggaaaggtaggctgtcaaaatccgagtctccgcctcccccgggttaatataaaagaggatacaataaagagatcagtcggaacttgtactaagaagcgtagcctcacaccaaactaatctcgattaaaaaaaggaaacttccggccgcgggaaacagtgacagagtagaagttttccggatatagtagtttcatttgtcccggtggttgaagtctaaggcttaagattcctacgggccctaagcggaacaatcgagctcatagtggaagtctttgccggagttcttccgttggagtttcgggtattaaagtttgtattattctctctgtaaggggtagagtctaagaaagatttctattgggcatgcaacactcccagaataacaccttgcagtgttagaacaactctattggaggtaataaaaaggaggcattttccggctagacaggttaggcttttccgggacaggaggtaactgctcttagggaaccacaaagtcagaactttccccgctctatgttctcagccaataactatcagactgggcctattagccctgaactcttagaagaatgtctaggtaaaaaagagtttctttagcttaaagtctctctcttttcctagaactcacgttagccggtcaaagattccgttggaaaggtagatgacatttctgctctttcggtttccttccttgaagttgagagcttagacccgagttctttctttgacttctagtatgagtgtgccaaggcattctttcaagtagcaaggaaagaagcttactattctttcgttcaaagttagggaatttccccgcggaagagcttttctttactatatatgcatcagatctatcaactcggatcggataaagacagtgacttgcacaacaaagctggacttgcttgctctcattcctgaggctcgagagacctttcctcgttaacctggcctatcgcttttgcccttgccagagatagattctttccatagtgccaatgcttcccctggtctttcccaccttaacttaggaaattccaaaagaataacaccatgaagtttatccacgaagtgaattgattaagtcttctccgtaggcaaaccttaaacctagaacttcccaactcaaatacgactttgtttccaaggcaaatccattggacagatccttgcttttggaatggattgaatcggttcactggatggaatcggaactttcacttccttactatcgtcttctcttcattttcttagaagaccttgtagaggtgggaataagaatttagataagctatgactccagcataaaaaacagcacattatggccatgaccagctaaagatcactgccatctcacgaattggattcgaaccaatcaagctacttgccctttagtagatcgtgagtgggtctgtcgtcctcctcattatagtcctcctaaaatcaatagcatttccctccaaatggtggcccacgccgataaaaaaggagtactttaggtaaagcaattgtagctgctcctgcacccattaatttataaacgtccttacctacggaaaaatttcactggttgatatagagtaaaatttgttgaaattcttgactttggagacctaattcggtaagattccgtaaaatagcgagcagttcctccaaggctgtttttccctgatggaggtaagttgcaatgtctcgaatcctccgaccagggggaagaacaaaaggagcaggaaaatatagttggagcaaggtgttgattttttcggttatttggtccttaatcgtatcgatacataggtctccaagtctctctaccatattagcctcagttaaactccgaaggcgtcctgcccgaagattaatacgaccagtggaatatatgctacccctactatggtgaggatttcatgaatcatgtcacttaagaactccagaacggctggactcatttccgtgcggattggaaaagttttacttaaaatgaatgtcaatatcaatccgggcttggaccatgtctcccgaacaatctcagtacatatggcgcaagacgattccacatatcgaggtcggaatgggatcgggtgttttcacgtctcaccgtagtgcccggtttgtctttctttccgattgatgaacaagaaggaaaatggaactattggattttttgactcgcccccggctacgtgtcctttgcccgcccgccaccagtggaagctagccccctatgttgcccctttccccttttttatttgaaataaaaaggggaaagcattcaagcccagcaaagcaataaaaggccccaacctataggccttttatttttattatataattagttgacctttcgcgcagctcaagcttacttactaagcaaacgggctcgaaagcaacaaagcaacggattaagcaacttgcgcgaagcgttagcgcaggccgttttcttgcagggcgtttattaggctttactaataacatagatagaaagggcttttcccaaccgcttgtagacctattagtcaagctttgatttgacgccagctgaaaaacggatgcgcgctactagcgcgcttcgcttttgttgcggagctcgctgcttttcattttgttaggagtaggtgcttgcccttagttgggttgggggaagagggcatttccatcgcgaaggattcaatccagccacaggttcccctacggctaccttgttacgacttcaccccagtcgaagaccccaccgtggtatgcgccaataagaccaccaaaagcctttgtggcacgtgtggtacacagaagtcatgggtgatcattggtccgatgcttcgggcgaaacctattcccagggtgtgacgggcggtgtgtacagggcccgggtacatattcaccgcggcatgctgatccgcgattactagcgattccaacttcatgttcccgagttgcagagaacaatccgaactgaggcaatctttccggattcgctccgccttacagccttgcttcccattgtaattgccattgtagcacgtgtgtggcccagcccataagggccatgcggacttgacgtcatccccaccttcctccagtatatcaccggcagtccctcgtgagtgcggcacgcacctttttgtttgtttcggagccgttttggcggggcgtactaaacccactacgtaccacaccaccgggcggctcgcctgaatgccgagtctttctccgccgccaactcgacgtcgtcgtcacctgcaaaataaggccaaaaactggactttactaaacaagcgagaaaagccctttctatgttattagtaaagcgcgctagctgcaatcaaactaaagcgcacactcgaaagtgcttcgaaaggcgccggctcccttcttactgacagctacgtgctggcactcaattagtagcgctggcacgtcactcggctcctcggctcacttcggttgcaaagactttctccttaggcgcatgtctcagcaacacaaaacgagggtttcgctcgttataggacttgaccaaacatctcacgacacgagctgacgacagccatgcagcacctgtatgaaagtaagtaccatcccgttaaggacaggtttttttgttcatatgtcaagggctggtaaggttttgcgcgttgtatcgaattaaaccacatgctccaccgcttgtgcaggcccccgtcaattcctttgagtttcggtcttgcgaccgtactccccaggcggagtgtttcacgcgttagctgggcccctgatctgcgtagaccaagggcgaacactcatcgtttacggcatggactaccagggtatctaatcccgttcgctccccatgctttcgcactccagcgtcggtagggacccagagagctgccttcgcttttggcgttccttcgtagatctccggatttcacccctacacacgaaattccactctcctctgtctcactcaagtgaattggtttcgagagcattccaccagtttttggcgactttcactttcaacccgattcaccgcctacgtgccctttacgcccagtcattccgaagaacacttgccccccccgtcttaccgcggctgctggcacggagttagccggggcttcttcctcgagtcctgtcatgatcgcgcactcgacgaaagagctttacaagcggcattgcccttcttcactcacgcgatattgctggatcgggctttcgcccattgtccaagattccccactgctgccccccgtgggagtccgggccgtgtctcagtcccagtgtggctgatcatccgaaaagaccagctaagcatcattggcttggtcagcctttacctgaccaactacctaatactacgcaggctcatcaaacagcgctttttagctttcttcaggattttggcccgaactgttcggcagattcccacgcgttacgcacccgttcgccactttgttctcaactgttcccgcctcctgggcgagacaagctacctttagctaggagcctcttttccttctgcccagctccccgaaaacaacgttcgacttgcatgtgttaagcatatagctagcgttccttctgagccaggatcaaactcttcttttgagtatgattgggccctgcagtggtagaacctggtgaaccgggcgtactacttcccaaccttctgtgaaccttgcttctcttatgatttttgctactttctttagaaaagtgattaatatcaaagagagtctaagtctagtcactcaactaatccactcgtggagattgataccttctcgttatagagtgaccgtttacacaccttctcgggccagtgtagtggatctttcccattatgacagtgaaacgatcaaaagatgccgattagaaaggcaaggccgaagctttactaataagggctagccttgcttctccagctccaccagagcatttaaaaagagcgctcgggaataaagcctaatcaaagcgggcaaacagaaagatcgtgtaacttgacaggtgcagccacgactgttcctcaaccgcaacttgttcttcttccttctcagaggtcgattcagcagcttcagtgacctccatggttagtctttgtattgcaggttctaatcctgttccatagcgggagctgtggaagcagtggcgcctaaggtcttttcctacagagaaggcgactaactacctgcaaattctgacctggacccttctattgcaaacaccttgcaattagaagcttcttgatgtactttatcgtataaacgccaaccaaagtaggccgaaacggacaaattcattgtcagtgtttcggcgcttccaatgacacgacagggtactcaagcagatcagaaagcggggtattatagtctaaggcaacctcagcgtaccactgaacccacttgagccactgctgcatccaaccccggaacagcgtgtactcaaggaattcagcttcatcctcagatagtgttatgccatcagaggggttatccccgataggaggtaaccgtaactccttaggctgtacaacaactctgaggtactccgctattctccctttcaagtaggggttcaacggacctttaaagtccattaaccaccactcgaaagatagcggagtgaagaggctaggtttagaaagatataacaggagacgctgccagcgcttagagcgctggttagttgagcgagccaagaccctataaataacccgcacctccaagtcgcaacatcggatttagactaataacattatacgtgttacgaatggaggcgaggcctaaggttgttctgcactggagaagagccttcgctgatataggtgttatatcaacccggccttctctactctaatgcggaaccttttggcgaactcaaacgctccagagttagaacgatttcgaagttgaaatcttgacctctaacttagagagtctctcctggtactccttcgcgaccctactatccgcaatgacaacatcgtcaccaaggatagcataggccttaaacttcccgctgccgggataaacccgttctgctgccagccacaccaccatgtgatgcgacagggagaacaggggccaagaagcgtagtaacctaacggctgaccaacactaaatggtaaccggtggtacctcaacactaaaggaggaccagtcaatacatgactgagccccagtgacgagttaaccaccgatgaagcggtatacacatcaaacaatagagcgatcatctgatagatgagcacacgtggccatctatcagtggcggatttcatatcaaaactataaacattttgaaagccgaccaaccgctctaggggttttgtttgattgtaagtaccatcaccatctaagcgacgcaaaactgacatcgcccagtcgtgagttggcttcaacagcctctgcttcacatagttacctatgatgaacagtcgtagcttacccgccccggcaggtgtggcggcgactctgctacagaacacttcgccaaaccgagaagctgcatcatccataacgggatgcgcattctcgatgtaacgagagatgtcactgtttagcatactgggagattctctgtaaagagcaaagcgaaccctgctctcccagagaaatccagtaggaatgagccccatgctttctagctcaacacgtgtgtggcgagcgaaagcagctaactcatacttaagtgcagggaaactggaaactacacgtttctcctttcctctcctttcagtcgagcccttttagccctctcctagctgctagctggtagctcttctttcctagtagatcggttcttagttcctatcctattagctattagctcgtagctctcttcttgtaactaggtagctaggcagttagttgttcctatccgactagtaggaatgacaagaacaagaactactagctacccagctcttggcttggtaatgcactcgggcatagatccatttttgtactaatacaaatgcgcactatcaggagcatcttcctgcgagtctgcctagctattaggaagtagggtcctagaaacccggatatacccatcttagtaacgagggtaagtacctatgaaaagattcactcctcggggttctgtcttcttaagtagctttcctgtagggttggcctagggatccggtttttggatgggaataagcggcctaccttatagcttaaggggacaacaccaatacccactcgattggacaaaacaagacctgggttgacatccgcgaggcaattcaagtaaacaacagggttgaccactcggggatagacttggttcctcagtgactcagaaatgcaccccctcttagctccgcttggatgagctgacccttctcttacaatactgggatttccgcttttgctcttgcattccataatgggaagaacctcttcgtctattctcttcgggggatagcagcaacctgcaggttcgagagacctggggaagaggaagagaagcatgactctcttatacaataagtagggaacagagccctagggcggactgactcaaagaaagatcaggggaaagattgaatcttggcagagtgacccactttatacccatctgcctatacggggcaaagtcctcactttaggtttaggaagaaatcccgacttgggagctaagcttggatcagaggtgggcggacctttactcttactaaattctatttcatatttgtgcagccgctctaacttctattgagaggcccttcggggagagagccattattgggcatatagaaagacgtactcttctgtgccccgactacgtcctcttttttgtaccaaaaggccgacactaacagagcaggcctactagcaaatctaggacgggggctaggaaaggggaaagtacagaataagactaacagataggcacgcacaatagaaagaatagaaggaaaggggcctggtcgtttctatgtccccgcaggtaggcaatccagaggcaggagatcacccaatgactcactcaatctaaatggagtgaggcctagcgtcggagttgcgtaactatgatcaggtagaaagcctcagttagagtgaccgttccaccccttcgggtttacttgggttgagcagacgatcatgcggactatttttcgtcttaaagatcgtcagctcttgctctcttctctttggcagtcagatagcgggcaaggaaggaagagacagaatatgtttagagtgtagaaagagaatcttctcattcagaaaatgccctcttatgcgctatccgatcgcgaggaagtttcatactggcaatgatcctatcaattgactagttcagtttcgggacttctcctgaagaatgaccaatggaaccgaccgtatcaaagtagtgatctcttggcatagctgaaactcgatgtcagaaagcacgttcctcgcgtagaagcccgaactcttggacgaaggtcagattcagcgaacgggttagctttcccactctccttgctttctctcaaaaatttcatcctctgatgaaccaccgattgcttggttgagttctcccacatagcgtcaaggaatcgaagcaatcctgagatcgggcatagcgcaaagtcgacatcttcgtgattctaggtcagaaaatgcccctttagcccactctctttttacatagccaactagttggccctcgacgctgacccgatagaagtaaagccctttgtctcaaaaagaatggtatcgatcttcttctttcttagcattattgtaaaccatttgatcctagtcgtcttgcgtggaaggagccagatgacagagacttttcttttctcaccctcaatatattagattgcgtccgaccactcgatcgatgaagactcgaacctaaccaccccgcttttggagatgacggagactttactcgacgtcttgacccatccgtagtctgctaatctaatcccaacgtctttgatcctgacaagcttggataggactagatctctgtcttttgtttgttacacaacactgaatagttcctttgttcttctggctatggttctttctattcttatttcttccttttttatttatggtatggcctttttcaacctactcaacatattcatatctgaatacgagccttgttcaactgtgcccacggccccgtaagccctcgaggcaaggcgaaaaggaagagatgctctggctttctttggtcttgaactcgctccccgctcgagaatgaatgttggaaactcttcgatgacatcttcctttgagtgcacgattccttagctgtgcctgtttggtaccgagctctttgagggcttttctttatccgttcacgcggtagtgagtggagtcaggcacaaagcgatcctcagcagccgaaagaagccttgttaggtctcctgttgaagtggtgactcacttgcaacataagttttgcaaacctaggtggacgaaggcaaaaagaaaaagatagaatacgacggtttttcaggtgtataaagaatgacacgatcatctagccttggtcctctcatcatctgattcccgaaaggcagaactgaagaacgcactgtttggtctctcgagcctccccctcttctttctttagactatcgttttttgttttccggatgtggattgagcattttgttgagtatggtttttgcgcttgttaaccttcttctttttgaccggacaactggatgcgcgaatcttgctctaccacccctttctaacaaaagaaagaactctagtgaatggctaagaggaagtaccgatggtatttcagtttcgacatggccttgatcttctggtgaagtggcagtaatgtgagccttatttatccaattccttttccaaccaaggatactgagtctgaccgaggaaaaggacttctatcttggctgtctagctatgactaaaaaacctacttgtgacaactcgacactggaagctttgatgagactctttttgccagcacacgaccctaagctgtctttgcttatttccttgcttagctaccctcgaatggcttggtacgcgcttgccggcccctcacccctattaggttgcttggatgccgatcagtggcctatttaccgaatcatgattcttttgagtcctatttttgcaaacgaataagacggtgctgattccgatgtattcgatttctatgacatggagtctacccaaacattgttattatctatggccagtctttcagttatggcattcaaactaaccgatttcatcttgattgaaatcctggcgattataccaaaccgttcttccagcgaagtggtttaattagagccttcttcggcaccaagacccttttaggggcgaggcacaagaggatgtactgggccaaccatgacccttttcgagcagctctttcgccgcctaatctcctcattggccaatgtcgacgtcctgtaacgccgttgggtaagaatgctccctgtgtgagttcaatctataaagaaagggaggcgaacatctgctacaggctttcaatccaaatcagctacagctaaatgaaaccaaaagcaaagcttgaaagctcaattcctagctgctacagctaaataaatctaaggctactacctaccttagctgttctagtagctcctttgatttagcgtagggaaggtggaagctctataggacaatagctttgggctatttggaagctatgctatataggaagagatagcggcggctaagcctgatccggagacggcaccgagccccatccctggggacctgattgtacagaaaagtgtatccgttctccacccttattagcttagctgtcaagaaccccaataagaaaatgatttaattaataaataaaaaatattatgtatataagatacttgcccttccaacccggattatatagaagaatatatgccgatcctacccctttatccgccgatctttatttgatctctccgcttcgcccacccccatcaatgttgaattgatgaatcaatgaaaggccacccaacccacaggacttaccaaaactagatcttcagtcacctttttaatgcgcctcaatcgacctgttgatttcctagtctccccccatctttgtggtgatcggcttaatgacctctgcagaattaggaacgaatcctctaagtgatcttaccagagactgattgcactcctttctcggttcctgactcctctcttggttcttggtatagggatctgttgaatcgctctcacccgctctgggttagtcttgacaccccctttagctttagacacaatatgaccaagcaatttttgccttcctggggtaacagcaaaaattgccatattcccagcatctattagagacctgcggtgagcaacatggtcaaatctatgcttcgaaaagacagtagggtcatcaagatagatgagcctcttcttgtccttaattaacatccctgaaagcaaaatccatagccctctggttgcaccagcattgattagaccggcattcttggttcttcgcacctggagtggtgaaaattttatttgctttaccctctccccttgataatccgtctagcatggatggcatttctaagcctttaaccctttgtttgcagcattctatccatgtttggaacagggtagttatccttcaaagacgaaaaatgcgagttccagaagtaaacacaaagtcttatatctccattcttatttcccattggaaccgagttagcaaccccatctaggatatatcaaagacagaaatagattaccgcttttctatatctttattgatgattggcttcagcttaggattgactggcctttgcttttgcctaaaaggctcggcatcgggctttaaaggaatctgatgcttcataatctcatcattcttgtgagtttacaactcatcgtagtgccaagcaaaaaaatccttgtattcttggaagagttgga

SEQ ID NO: 217973 - DNA, 8135 bp, Cannabis indica
tcaatatattcattttaaggggttgcattatagaattttccaattttttttaaatgtggaaacaagaatgtatcattacatccttttaagagggtgcattgtagaatcacccattgatattaatcctaataataataataataataataataataataataataataataataataataatagaaaaatctgaatttgcaattccaatctgtcatctctctctctttgaagtcttaaccaaatactttttttttggttagatattcaatataccgtcgtcgcgtctctccttcttctccaaaccaaaacatgggtccttctccttctccaaaatccttcactttccctcactttcccgcattttccctctcatgccctaactttcgcactctcactctctccctgtttgcgttcctcctcactttcgccgccgcaacggccagtagtccttccaccatttacgattatctccggctgcacggtctcccgattggccttttcccaaagggcataactgaattttcacacgaaccttcatccgggaatttccaggtcttgctgaaccagccctgtaatgccaagttcgagaatcagtttcactacgatttcaacgtctccggcaccttgacgtttggccagatcggaaatttgtctggcgttacggctcaggagctctttctatggttccctgtcaaaggtattcgcgtcgatgtacccagctctggtcttatctatttcgatgtgggtgtcgttgataagcaattttctctctccctctttgaatcacctcccgattgcaccgccgctgagccctctgatctcacttccgatgatgcctcctttcactcgacatcccacatagccgatttacagtctcgctctcaggttgattgatattccactccatttcattttatccactgctactgcttctcttgaaaaatttagtgtccttttgattgataactttcttgttgatatttaagattaaacatttctctgtgattgaattttatgtattggctgaggaattttgtgggtttgttaagttttctcttagatttctttaatcgaatgtggaattgtcaattgtgtttgttccatctgatgatatttattgtgggtttcacggttactttgacagctttttctctgtttattcattgcttttctgaattaattgctatggattctatggtatatgcaagttctaatattgattgaaagtgagctaactattacaatgagtaaatgcaataaccatacatacactatatatatgtataacttgtaatctgtgatgcatattaatttcattattattgtgattagctcatttaaattcttatttattgatgttccatttaaactattaactttatcggttttaatactgtttgttcagttcactctattcacatcagtactggtagaagatttatcttgtgctgtgggttttatgagggcaatttttgtgtagtttttctgattcttccgtttgattctagttcatatgagatcattataaaaggctttctttatgtttatcttttattgcattgtgattccgaggtcttaatatttaaattgaaattgctgattaattgtgattgcattacagaatggattccgaaaacttggaaatgaaaatgggcgaaggagcgaattaagggctacttcgtagattgtgaaccaaagacatcattcaagattcaagttatctcgatcaatctaagggttttcctttgcctaaagagaatgtttaagagtctggtttggaaggtcctatgctttttgtatgtgtgcttgcttgctaggttgtacagatatttcagcctgatacttccatcttttacaatgaaaagtaacagttttggttataatggacgaagaagaagaagaagaaaagatttatgaaagaattgacctcatcaatcaggaactgaaggcaagacaggtcattgatcaggttggtttagccaataatataatagagttatgtgttttttttcatttcccttttgttgttataatactatgcatatagaagaaacgtgagtttgtttttgaggtcttgtaaattaaagaatgtctattctgttggttttgtcttgtgaagttgctaagattttatgattttttttcctttaaaataatataaacatttgtttaaattataagatatggtatctcttcgcttattacatttagtggacaatatatgttttcatgatagaacgaactatagaggaagttatttctctcacctgtgcttaaatacaaacaacaagcaattagtggaaaattgctcggctttctattagaactgagaggagagagaaaagtggttttactctttattgatatgaaattgaattgttcttgtttacaatattgaagcttaaataggtgaaaaaataaaaaataggagatgacagaacaagaaagtaaataacagaaataactaacttgagctgaacaatcctaactaaataactggttttaacacgcctcctcaagatggagtgtagaaattttttacacccatcttggatacaatattgtggaatggaatggggaagagaggtttggtgaggatgtttgccaagtttgtttttgaaggaacatgattcatcttgatgttgccattgtttattttttcccggactatgtgacaatcgatttcaatatattttgttctctcatggtagactgggttttcaacaatatggattgcggttatgttgtcacaaaataggagagaaggtgtcttaatgttgatgtggaggtccttgatgatggagtggagccaagtgagttcacatgttgcatttgccattgccctgtactgagcttcagttgaggatcgtgaaaccgtgggctgtttcctagatttccatgagatgatggactgatcgaggaatacacagtagcataatattgatcttctagtgtctgagcaagttctccaatcagcattagcaaatgcttgtagttgaggtgtagaggagcaagctttataaaagaatcgaccctatcatggtgatgttttcaggtaccgtaggatacgattggcagcaagaaggtgaggctgtcaaggagcttggagaaactggctgagtttgttgactgcaaaacttatgtcaggtctaatggtgaggtacattagtttgccaattaagtttcgacactgagttggattttgcagaagatcaccagtttcgttgtttaatttgatgtttggttccactggggtggtgacaggtttggaaccaagatgtcctgtatcatgtaggagctgtagtttgaatggtctttgagttactgaaatacctttgttgcagcgagcaatttctagaccaaggaagaagtgtaagtcgttaagatcttttagcttaaaatgtgcatcgagagtggagataaaagttggtaatgctgcaacattgttagtaccaattatgatatcatcaacataaatgagtaaagctaagaaaacttttgattgttgtctagtaaacagggtatggtcatttttggactgaataaagccttgttgtagtaaagtggtgttgagtttagcataccactgtcttgaagcttgttttaagccatacaagctttggtttaatttgccaacatcatttttaggtatcactcctcttggggtgtaatcttaaggtagttttatagaaacatcctcatgcaattctccatggaagaaagcattatttatgtctatgtgatgtaggtccaattgttgatggcagcaagggctaaaagaagtttgagtgtattaaattttgccacaggggcataggtatcaaagtagtcaatacctggttgtgtgtagcccttggttgccaatttggctttacatctttcgactgagccgtctggattatacttgattttgtatatccatttgttgtatatggcatacaatccatctggtagagtaactacgattcaggtgtggtttctttctaaagcatctatttcaacatccattgatgtgttccaaaccttctgtttgtaagcataagaggtaggttctgagatttttgctgtggctagaacagtagctctgaacctgggtgttaacctgtcgtaagagagaaagttggtaagaggatgagccgtgctattagttgaataaacaaaatcacaattttaatatggtaaatgtgcaggtgcatgtattggtctgccatatttggaaaccatgggaggctgctgtgttggacaaacatttgaaattttaggataagatatactggtgtctgcagcactagaagaaataggatcagtagttgaataatattgaaagttgccaatgctagttgttgtgttggtctgtttgagtggaaaatggattcataaaatacatctcctgaatggaaaatattattggtttgcaagtctagtaaggtgtatgctttcatgttttctagatagcctatgaaaatgcaagctcttgctcgaggagatgttttctagaagtgacatgagatgcatatgccatacaaccaaaatttcttaagtgagtgtaatgtggttgtttgagatgcagtaattcatatgatgtcttaccttttagagttacagatggtgttcgattaagtaaataaacagcagtagtaaccatgtaactccaataaaaaagaggaagattggactgtaatgctagagcccgagttactttgaggatatgttggtacttgcgttcaacaactgcattttgttggggtcttcctacacatgaattgtgatgtgtagtgcctttgctgctgtaaaagtttgtaagtgtcaattctttggcatttttacttttaacagctttgatattacttttatgttgaatattgacaaaagtaaagaagtttggtatgattttttgggcatcacacttggcccttagcaagtaaatccaggtgtatcgtgaatggtaatcgacaattgttagaaagtatctgtatccttcaattgaaggtatggggtatggtccccatatgtctatatgaataagatcaaaaacagcattagaaaaagtgtggttagatggaaatggtaattttttttgctttgccaaatgacaaattggataatgaaattgaagagatgaattattgggaaaatgtagtttattgattttatttgtaatgagtacagaagggtgaccaaggtgattatgctattgatttttatctaagtgaacattacaggaaatagaaattggaatcatttcttgctgtaagtaatagaggttgtcatgtctcttagctgtcccaatcttcaaggtccgagaaggtcactggatataacatacattagaggtgaacaccatggtgttggaactgttatgtaataaggcactaacagacagtaagttaaaattaaaaaaatagtacataaagaactgttaagtaaaaatttcacttttagaatataaaaataaatgcaaaatacaatttcacctatgctaaatttataacataagagtttattaattttatgttcgacccatccaagatcataataataatctcttaattacaatccttttgtttaaaggaaataccatttgatttcaattacgatgatattgaactttgaggtaaattttgggaaaaattaggggaatttagaattgcagctgaactcagtcaatttaatttactgacctgcctacaaaccctttttgtgaaggatcaagccacttgtagtttagaataaagtatatttgaatttaaatataagaattctggtagatgaccactttcaggaattctttgctatttaaaacttagaaaaattcgtatgtagatgaccttttatggaattttgagatttgtgctttataccattttgcggtatcggcgatacacttagtcttagcaattaagttgcttacgtatctttttataggaatcaagtcaaacgtagttccaagcatattttgtgatgctttgataattaagaggtgaatgacctctttttggatccattttttttggtggaataagggcattccatggatgagagcatccaattgttttgtggaatgagggcattccatggatgaaaacatccaattttttgtggaatgagggcattccatggatgagagcatccattttcatttatggaatgagggcattccatagatgaatcacgagacagtgagaggtaatgaacatgaaaataaagagagaaaggaataggaataatagcattccatgaatacttacccttgaagcttgttgattgctaacaaaaatttatcgtagtttttttctctgtctcttttctctctctcttagatttttttccaaagtgtcgatcttttttttctgttctcaattactcatatttgtaaagtcttttttaatttttatttttcttttatcaacttcaccacccatgtaacgtaatgggtgagagaaaatagggaagcgggcagttaaagagtagagagagtctcctgatttgcctctcgtaatttgactgattattatttaaaaatcaattattcatttttaaattcttttaaagaaataattatactaaaataataataattttgtaattgcgagaaaatagggaagtgggcagttaaagagtagagagagtactcttcctagtaccctcaaatcttttgtaattgcggatttggtttgctaataaaatacccatttccattcaaaaaaaaaattatttatttatttattttcgttcaatagattccccctcaagcaagtgcgtgccatttatgtacacgtatcttgcttgagaatttcgtatttgattttgtctgacctgctttttttgtgcagtatttctaattttgagggacttggctctcaacgagctccaaataatttagaaagagaaatagagattggaccatcttatcagcgttccatttcattgactaaagttaaagcatccaatgatcatcaagaccctgcttttttatgtaaggttgaagatgtaatttgggtgacttacaatatcattcttcacttgatgataatgttgtccaacacacccgaggcttttgtcccaatttccaggctaaaattctggatattgacaataaaagggatgctgatatggtttaccaagtaactgtggacttttatccaagcattcatcgtgttttagcatagaaaaaggccaataataattttttcttttatggacatgctgtatttgtgacatatcttatcgaatggacaaaccttattttgcgtacaaatcgagatattttaaatcagactgggatttatggagctatttacatatcaagatatccattcaattatgaaggatctgtatggcgggttttttctaaactctggggtcctcagtctaactcatttcaccatagcagcggtgagatgggaatatctttgtatgacttgaaggttattggagggttacctattttaagaattccttatgaagagttcatacctcctaacaaaaaattggttgatggcactccatatcattctactactacagaacttttaatggtccatgctcaagtttataactatttgaagagtgtcaacgttttttataaatcaaataatataaatgtatcttgggagcaatggatagaatttttctatagagggacgaagatgtttaaaggtgtgaaagaaagctcaactcttgagaacgtaggaggagacaaccaaaggaaaggtaaaccaaaagttaatgttcactctattccattgaacatttcaaaagagggtagtcttgcagcctttctgtctttatggctaagtcgttttatttttcctactgagggctccaatattagacccagaactttttatatggcttccatgatggctcacgaacacaaagtttcacttgcaccctctattttgggatacatttatcgagctttgtataattcagccatacatggccaggggcgaggtcaagtcttcttacatatgcattatgtgataggttggttagatgagcattttcgtcgtctctatagtagttgggatcttatggatcttcctcatttaagtaagtatgcttggatccttactgaacgtcgaaagcatgaatggggctagacatattttaaggggagaagattatgttat

SEQ ID NO: 217974 - DNA, 5760 bp, Cannabis indica
aattacgatttaataaggtacatatttagtagtgttaatttaagacacgtgaattgaattgtgtgttttctgattttaaagtgaagagattaatttttgaaaaagtaatcctcctaataatggaagttgaggtgagttggatggatccgttaagaaaagaggtgaaagagagtacggtatgggggcgtcaatcacgcgtgtcaagtgtgatgaggttgacgtctgtgacaggcaaacaccgaactggaaactcctcaccttcgcgtgtacctcacgcgttccttccccgcgttttaatgcttctttacctctcttattactcaccaaacactgtttttccctttctttctttttattgttaaattaatattaatcaacataaatataagacaaatattaatattaaaacttaattattattattataaggtgaggaataataatagtattgcattggcaccacgagagaaataaagagatagacgtctctctctctctctctctctctttctctctctaaacaaaacacactcattctgtctgtcatctaattttatcgtcctcgccgactttccttcgtctctctctctccactgtcacagttgccatatcttcccgtattagctttccttcttcttcttcctaccattttcattttctccaaaaatgtgagattcgtgaagagtttttaatgccgttgggtttcacaatattgttttaaagcgataaagttgctttctttttcatctagtattcctataaagaagggttttttatttacctagttggcctgtcggtgccggagtacgtctctgaaagtttttttttttatatataaaaaaatatagtgatcaaggtaaaattaggaaaaatgatggtgagaaatgtggtgattggtatgttgtttgtgactgtaattgctccgattgttctctatacggatcgacttggaacctttcccaccttctcctcctcctcctgtgagtacccgttgcttttttccccttttcttcttctgggtcataaatcttatatgggtttcgtttttatcttattttctttgcagcttcaaacgattttgtggaagatgttacaactttcgtaagtgggatttccttgttttttattttgggtccatttttcactgggaagaaggaaacttaatctgtaattttttttcatttgcttttggacaggctttcaatggcgagaccggtcgtctcaatgtgctttctcaggttggtatttctatgtctctttctgaatttttaaattgggtaaaggtttcattttcagatcttctatattaaaatacccattttgaatacaggaatcatcttcaaaatttaaggagtccattggaatggtctattctgataactctcaccaccaatctctttcggattccagtaaagtaatcctggaaagctccaccgacactggcaactcgaaaaagggtactacttctgatattgttgtttgtaggttttgctgattttgaattggaagtataagcaattctcttcattaatatatgtgtgttgttttgatttagatttgttattaggggaatcgagggagcatgcttcagccagggtattatctactacgaatgaagaaaatcgttcaatgagtgaaaacgctattaaacaagttactgatgatgagattgaagatggtaatcaagtgaagcctgatacagatactgaaggggatggaaaggatgatgccatgggtacagactcgaaagaaattcaaaaacaaattaatgatgtgtctggtgatacggtatgcagcttttttttttgcacaattatttctttcgaattttgttgaccctttggagcgttagatggaattttgtttatgttgaaagataggcacttaattttcatgtctgattgcgtcattatatgatgagaagtatccacgtgtgataagatctcttgtcatagtcttctgtacttaattgacccatttgattttggaagttggttgttcttataaaacatgttttcatgattggattgtttgaagtgagtgccggagaatctccaataaacgtattcatacacattaacttgtttctgattattttgttgttcttgtaattacaagaaatgcttctgtgtattttatgatctcttattaattttttgctttgcctgcaggcagcgaagcatgaacaaaccactgaaagttctgtcagagtggttaagagggaacctgcaaaaactagacccgagaaacaaaatgaacgagtagctattcctgatgctcgagtacggcacctcaaagatcagcttgtcagagcaagagtttacctttctcttcctgctacaagaaacaacccccattttactagagagcttcgtctacgagtgaaggaagttcagcgagtactgggtgatgctagcaaggattctgaactcggaaagaagtatgtatctcttgggaacttgaatgcctaacttaatttcacaattgctcttgtatcacacacatgcgaatttttaagcatagctattgatgtttttagtagtttccatgtataattcaactttaaccaaagagtttattgttctgttgctctctaattttttttttagattttctgctttgtacttaaggtttgtgtaaatgcagttcctatgacaagttgaaggcaatggagcagacattgactaaaggaagacaaattcaggatgactgtgcttctgcagtgaagaagcttcgggctatgctgcattctacagaagagcaacttcgagtgcacaagaagcagactttgttcttgacacaactgacggcaaaaacactccccaagggtcttcattgtcttcctttgcgccttactaccgaatattataccttaaatacttctgagcagaactttccaaatcaagagaaattggaagacccacagctataccattatgcactattctcagataatgtattggcagcagcagttgttgtaaactcaacaattacacgtgctaaggtattgtgcattaaaacatgcctcacttttcattctcgtttacttttctgtattccaaggaataaagaagatgatacaactatggaggttcattaattttgattgataagaccttagcttttgattgaaactcaaagtcattgtgcattgcttgtgatctttgcaggatcctgcaaagcatgttttccacattgttacagataggctcaattatgcagcaatgaggatgtggttcttggtaaatccacctggaaaagccactattcaagttcaaaatattgaagaatttacatggttgaacgcaagctatagtccagtactcaagcagttggcttcacagtcgatgattgattattactttaggacacaccgggccagttctgattcaaatttgaagttcaggaacccaaaatacttgtccattctaaaccacctccgtttttacctaccagagatcttcccaaaactcaacaaggtcctgttcttggatgatgacatagttgtgcagaaggatcttactggcctttggtctcttgacatgaagggtaatgttagggccgttgaaacttgtggagaaagtttccatcgcttcgataggtatctcaacttctcgaatcctctcatagcaaagaattttgacccacgtgcctgtggatgggcatatggaatgaatatctttgatttggatgagtggaagaggcaaaacatcacagatgtataccattcatggcagaaactggtaagacatgttcaaacttcacattcggctgtgttatcgatatatagtcagctcggttttttatatttaaatttaacattctatttgatcttttttggtgctcagaaccgtgacaggcagttgtggaagttgggaaccctgccacccggtctaataacattctggaaacgcacttttcctctggacaaatcctggcatgtgctgggtctgggatacaatcccagcgtgagccagaaggatattgaaagagcagctgttatacactacaacggtaacatgaaaccatggctggagataggcatatccaagtaccgaaactactgggcaaagcatgttgattatgatcatctttatctgcgagactgcaatattaatccatagttgaagcttttctttcgttctttctttttcttttttaaatggtatatttattttctgaagaagaggggggcaagtgttctgtggatatcagccagccaggccatacaattttacaggtctgcaaatcgttctgtgtaggcaattttgattaccaaaaaaaaaaaaacaactatagcctctaatttgattcatttgtatacattttttatttattttaattaggatggtgagaatatatccttgtgttacttgtctgcagaatatggcatgtaatgtacttgtaaataatttgaagctttgatattttgccatattaatatctttagttgcatgtcataatatatctcttcttcacttctttgaaagccatgttttatattaatctctgtaattatcgttattattattaatattaagaggctgttttgtctggtggcgtcgttatccgcaccttgtttatttgaatggactggacttaataattatggttgttaaggaaattaattaagaaaaaagatattagttcgtgtaactggatttcacatggcattggcccacttcttgcccgacattgaggttatcatacttaacctctttttacataaaactttaaattaatgataattagtgaggggcccagttgatttatttatcaaactcggctgctttagagtttagactttggtttaggtaaataaatagggcatggctggctggcaatattcgttcaccatgtgagttgagcttgctgtctttttctgctatgactctatgataagcttccagaatgtttgttcctatatcgatagacttaccatttgtattttcatatggggcatttactctaatagaaaaataagacaaggaataaaagaaaataattaatttagaaagagagagaataaaaaggattaaaaaatatattttagctaaggaaatatagtgagttaaaatacaactatacttgagctcatttgatggagttattacccacttcacaatttataccatcaatttttagattatactgtacgaaagttgttaattaaaaatgagcatcacaacaaattatctaataattaaacataaacaagctcatcaaaactgtgagttagaaacacaatacacctcctccatgtaactgtaacatctcatctcgttctatctggaaaaataaattgtaaaagagctattagaaaatgacgaaaaatgtaagtgtagaatagcgtagtcacgtagttttaatagttgaatgaggccatcgttcatttagaaaaatagcactactcactagtatacaaaaatatatatatatatatatatagtatacaaaaatatatagatatattcttgattaaaaaaaaagaagaagaaattatatatagattgtttgttattgaagtccactacttggaacatctaaaggcccaatactacaatgactgtatagtatggctaataataggccgatccaaaataatagatacatttcctatttcaattttatgaaaattctctgtttcaaaaaaagtaataaataatataataacattttccaatctctgtccaatgtttttttttttatttaagcgtttacatattacaatatgttttacctgagactcgaacccaggac

SEQ ID NO: 217975 - DNA, 4505 bp, Cannabis indica
ttgtattttatttaatatataaatataataaacttttgttccaataatctaattgtaacaatatatcatatggaaattatagtgtatcctcaccattctaaaatattactggtctgggggaccatcaaacagttgttctcaaataatatttttttcaaaagcttaatatagttgatgatgataagcaaatggaactcatgctaatcagtgtttttttttcttaatttaatttttactttttatgataataataatatataattaactatatatatatattaggtattataatatatcatggtttatgggtgacctaacttctaatcagtaagtatcgccgacaaagcattattgaaagtggctattgtaatagtacatatataaataaagaagtaggtcccaaaacaaggctaatcaactttctagttaagcaaagatcggattcttgttgatgatgatgaatcatattctggcaccattataactctttgaattaaaactccaatggtgttttctacctacttttcattttattagtccatttgtattattttataataatgataatactaattaatattacttttctcgcacaccaaacaagaaaataaagaaggcatataacactaatcataaaatgctatatatagttatatatttttctatataattatgatctctccctccacattcataagcaaagaaaaaatcaaaaccgtccaccaatcccttcataaacatattttttctaaaaaagaaataagtaatggtattatttggaaaagcaattatagatgacatggtatctaatcttagcccaattgaagcaggcatggaatgggagacagttcatgtggtctgattttaaaagggaaaattattatcagtacccaatcatcgactttaaattttgttataattttttttttagtcagaaataacttaattaatataggtggcaataatctttgtaatgagaagtacgtacaagaacttgtataacaatattagcgctattataactgttcatatcaaaacctaattgtggaaaatgaaaattaagaaaaagtaaccaataaaagaaaaaagttgactataataatacatgcatatttataaagtgaacctatatataaatattgtaacaaattctaacatttatatattttaagatagaaacgtacataacataattaggtataaatatatataataaaatattatatatatacatgacaagaaagtggtggaaatagttaaaattggtacgttaatgggtggcgaaatgcgagcgaatcatcatcctcttgatgtgtttcccactgccatgtgaattcatgtaggattctgtagagagagagagagagattgtccttgtttgtttgttataataatggagagagaaaaatagtagtggggttcaaatggtcaacctatgtagcgagatagagaaggactttgatataaataataattattatatattatttctttttatttatttatctaaatatttttcctcaatgcccagattcgtttctctactcattctttgctttgattaataatcatagccacccacccacccacccaaatgccccacaaaaaaaaaaaaaaaaattaagtcccattcattctcacctcatcacctcccttctcttcttaagacccttttgctccccataacatttcaagattcaacccataaacaaattacctctccacacagcttccacttttcccctctttctctccttaattcttttgatcaaaattacttcttcttctttttattatcattattccaaatggggttcgatgatctttgtaatacaggcctcgatttaggtttagggttcacagcttcagctaataatactttttccaaaaaaccatcaacgaccacaactactttcacttcttcttcttcatttgagccttctttaactctgggtctttccggcggtgacccttacaataaagccagaaagatcattagtagtattaatattgatgtgaacaaaggtggtagtactactactactattaccactacttgtcacgacgaaacacttaataataataatatggatttgtataggcaagcttcgccgcctcacagtgcggtttcttccttttccggcggcggcggcgttggcggttgtagtcgggttaagcgtgaaagagatctcagtagcgaagagattgaggttgagaaagttaattcttctagaattattagtgatgaagatgaagatggacctaatgcgagaaagaaacttcgcctcaccaaagaacaatctgctctcttagaagaaagcttcaaacaacacagcactctcaatcctgtaattattatatattcccttctctctctttttctctctttctatatatatatatatatatttcaattagtaataactaaaatgtattgtttgttgttttttatataaatatacagaggcaaaaacaagctttggccagacagttaaatctgaggcctagacaagttgaagtatggtttcaaaataggcgtgcaaggtaaataaataaattatttatgtatatatatttatcaataccgttatatttatcagagatctatatatttatcattaaacgacaacgttttgttttgttttgttttgtttttaataatattgcaggacaaagctgaagcaaactgaagtagattgtgagttcttgaagaagtgttgtgagacactgactgacgagaacagaaggctgcaaaaggagctacaagaactcaaggctctcaaactcactcatcaacctctgtacatgcatatgccggcggctactctcaccatgtgtccttcatgcgaaagaatcggcgccggtgtcggcgccggcgacggagcttccaagagccccttttccatggcttcgaagccccacttctataatcccttcaccaatccttccgctgcttgctagggttaattaatattaatgcaaacttatttagtagtattatcatataattaggatactaaaaaatatatatataaatataaaaaagaaaaaaaaacaattaaaaaggcttcctaaaattccttgacccctatatatttttttgatgaagggcttgtagcgatcaagtaagagtagtcgtgtaattataattgtagaaatgaaggatagtataattactgatcaatttttacttcttttaatttttcttcttcttttcttcttttaaatatatatatgtttgtaaagatatcgaatatattttaatgaatggattattgttatttatttttggatatcaaattttgtgttattctctgttttttttcttcccttggaattgtatttatttatatctgtggatggaattgaagataatgtgataataaaattattatatttttaaggtttaatttatgttgataatggttcagaaaaatatttgtactacagaaaatgataatttatagttgcctcgtgcatgacttaatattagttggcccaaagtggagaaaggccagtatattgccatgtatatatgtactaataaaaagaaaaactttaatagtgtttctacgtcatgtaattagtattagttaattatttgggacaaaatttcgaactcgaccaaacaaaatctgtgcttaatttgttggttaaagtcgtggacttaattatattatatatataaaaatgaaattgtcagcctccacaatcatcccattcataaacctcctcagaattaattaaataattattttattaaggaaaaaaaaatatctgagtcatgctaataatgtatatgagtcacaccgcattgctggttttattagtgtcttagaaaagaaggaaagagtggataaagatatataataaagaaagaaaagatgttgaggtgatgaataatgagatttaatcacctactatatatatattatgtataataatttaataattaaatgaaggtatgtacgtatatgataatgttgaatgaataagtagggttgtgggacgttagctcacgtgtatgtgtctataattcggttgctttagagagagagagagagagaatgggtggtttattattattattataggaatatataattgtagttagttttttgtggtcatacataggcgctatattaaaaaaaaaaattgtagttaatttttatgtatgtaaaaaatattactgtagaattttatatctagtttagttaatttttggtataaatatttaaatttaaatttttaacttttagattttgtttaaaataatttataaataatcatgttaattattaaatttttaagttgaattatttttacataaatattaataagtagttaagtgcaaatataaattcactattttggtattttgacaccaaatttttttatatgggtagttaattaaaattatatacaaggagatttgctattattattattattattattattattattattattattattattaaattcctaatcaagcccccccc

SEQ ID NO: 217976 - DNA, 8277 bp, Cannabis indica
tatatatatatagtgtaacactctcttgtttagcagctgcagtgaatgtgaatagtgaatccaaacaagtaccagaaaacggacacaaacatactccttcctgaagattccttctcagtcacccaagtttcctttttgttcttgtccttttctgccccaaactcttctttagggctttcaataagtgcgtattctctaattggattcacaccaactttacttcaagaatgggattgtgggattcgcttctcaattggctccggaggtaaccccttttccttttttttttctttttctaatctatcattttaggttaaaattgtgccttttatttcaactttttggttttcctaatcagatgtattcaatttttcccctttttgtggggaagacaatactaggatttgggcacaactccatttgtagctttataatggcctaaagtatagtatttgagagcacaatttgcgagaactgttgggtatttcagttcttgtgttccaaagttattaagaagccattgaaaggcatatgcatagtcctccaggatgggttagagagattttggaaaatttgatctctttagattgcagtaaatttaacaaccaatgagattctacaaaggaacccagtcctgatagtattcaattggattagcttagatgaagaatcaagatatcttataatcaagtaatttacatttctactattttcaataataaagccaaatttcattgtagtcaccaaaagccaaaagtgaagttgatattccctgaatattctgcaattgagacactattttggataatcaattatctttatttataggatttttaggcccttaaaatgagtatatacgtataaatatgatacaagaatgacaacatgtattatgatacaaaaattcaagagattgaataaaaaagcttgattaatcatgcttttctccataatttatgttgtgaagtatttatagcataattctgttcaacttttaagatgtaagctttgcaaattatatgttctgtgtgagtctgcataaagtataaagtttataaacatagttccttattatttttctaagacaatacaattctgaataaaataatgtcgttttttagaaattgaggttcatgttagcgttgggttcagtttgtcttcttcgttatttcaggttacagttgatcttgcaattagttctatcataatatttgcttgtttagaatgcttaattggttgagctgctttacatttgcaaggagctttagatagaaaagtattttatgtctgtaaatccgtttggtaacttctcttatttttatctctgtatgtgtcagtttattttttaaacaggaaatggaactttcattggtagggctgcaaaatgctggaaagacatctcttgtaaattccattgctgtaagtaaccaaaaagggctgctcaactattttgtatttggtaatggtgttttcttcacattaattctttcatgttttggcagactgggggctacagtgaggacatgattccaactgtaagtatgcttcaataatggttttatttcttgatcataagaatctctttctctctccttttttattacttaataaatttctctctgaaaaagttgtaactatttgttcgttaataagactttttatcttgaaggaatatacaaagatcttattctatcaatgcataaattaccaggttggattcaacatgcgaaaagtaacaaagggaaatgtgacaattaaactttgggaccttggagggcaaaggaggtttcgtacaatgtgggagcgatactgtcgtggtgtctccgcaattgtgtaattatttctcttttctaatcttttatttgtatgctcaaactttctttgcctttcaaataatttaggttgatgctacatgcttttaaagaaacaagtgaaggcttgcatgtcttcaaacatgagattatgaatcatgtgagctaatacaatgtttcctttctcatgtataagtagcaccctgattttagtatgtcaacttgggcaacagaaaagctaataacttttcctatcatcctctattaagggttttaggtaatgcaaattataattacgaccctgtgttacataaagtattgatgctctgtctgccccattctataatatccctcagcatatacacttttgcttggttatatattgtcatgtttttgtttgtgctatgtattaccaatacattcaggttctttcttacacggatttcattgcaggtatgttgttgatgctgctgacagagacagtgttccaatatctcgaagcgagctgcatgaacttttgacgaaaccttcactaattgggattcctttacttgttctgggaaacaaaattgacaaatcggaggctcttgccaagcaagcgttggttgaacagttgtgagtaccggaaatcatatcataattgcttcttcgtcggtcaatctgacttctttataacttgcctttattaggcatgtcaaactcctttttgtcctgatttatcttttggatgaaccagaggacttgaatctttgaaggacagagaggtttgctgctatatgatttcatgcaaggattcggttaatatcgattcggtcatagactggcttatcaaacactctaaaactgctgggtaagattagatactggttaaaactcaagcaggtatcgaaggttgagctggtgaccggagcagaagttgccgaaagagaatccttagtgctagattctgagatgttttagcacatagttatgtgttgatgctgtacagtgtccaaaggcaagaatttcatattttctttattaatgtccttttttcttttcgtttttcatcatttggttactatgtaatatgtatgattttgttcctggaatactatttttttgctttttactttgtttggttcttttcttattaatttcgtggttttattggatgtactttttaattatgcattgctgcagtatcatctcagatgttatttatttatttatttgaataaaatgaatttctcatatcacagtgatttaggctgattacaaatataatgaatgttatgatttgggggaaatgcagcataaataaatgcaattatatttcaattttatttcgtttttttttaaatgataaaactactcaacgttatattttgggtgcatctgaaaatgttaaacccttcaattttccaagcatataaattattttttagtacaagtttgaatattgtcaaaattaattgtgggaatcgctgccactgacgtccctacattcctcaccggtaccgacactcctatcagcctgagttgtattgtttagctgtctttttctttgctggtggcttttcttttttcctttactttagtgaaattatattcttcgagataaaatttaacttgcaaccttaatcacaacccaaaatcactatcgaaccattcggcattgctagtcttcgtccacagagttctagcccaaatcaaaattcaaagtggcaacctaaattgcaatcataaatcactataaaccatttgaagtgctagtttctgtccacggcgttcaaaaccacttggcctcgcatggtattgttgctatttgcttaaagtattctctaaaattgaaacccaaatcacaatataaatcgcaattacatcttttccctttcaacttgtaataaatactactttttagtatttcatggctataaattaaaaagtaagagttgtataatagctttgtttaggggggaaatatagtattgaaataagaagattgataacaaagatcacaacaaggcataaaagtgatgaagataatatataaccgtttgcaatgaatgaaattcatcacaacaagactgcacaagacacaaaatattccaagtagatagctaatacttcacttagagaaagtacataaaaaatgtttaataatttatcatatccaccaccaccagattacctttcggacccaagcaaaaggcacatacataacttcaaaagtttggtttgttgtttgtttgttatatacacataacacaaaaatgaatgaatgaagtgttaagtgtactaacagttgacgccacattgagatgcagctttcgcagcatcggaggtgaatggatcgatacgcacccacagcaacgaaaagatcgaagcaagaagaatcgaccaaacaatgacaatggtaggtgtgcggttttgtcgaccaaggagacccttcaagaatgggtacaaatgggcaataacccatattgcaaagaagagcttcccaaagagtggtccccaagattggtagccactgtttatggcatgtgaaacaccagcaacaatacccaccatgttgaaaatcagaactgtagttggagggatgagaagtgttgtccatttgaacacataaagctcagcaaagtctccatcatcatctgatgccttggaagtaacagtaaagtttgtatcaatcccagcaagaactttcaacaaaccttggaacacagcaaaaagatgtgctgatgttccaccaatgacccaaaactgttcatttctccaccagtcctcaatgctgacaccactccacctgagctcaagaattccagtagtgaaaatggagacgaaaagcagtatgaaccacatgctagccaagttgcttagctccggaataataaacttcccagtgagaagacataaagcagggaggcaacagtaaaaaagtagtggaattgaggtaaggggatacacaatggtgttgatgtacgccaatcgctccaaaagtctgagtttcccattgtaaccataccaaatggggcaatgtctgctaagcaaaatttcgatggatcccaaggcccatcgaagcacttggttcaaacgatcagaaagattgataggagcagaacccttaaatgctgggcgaggaggcatacagtatatcgaaatccagccacgagcatgcatcttaaacccagttaaaatatcttcagtcactgaaccatagatccatccaatctcttttccccattcagtcttgtcttcgtatccacagctgattacatggattgcttccttcagtagtgttgccaggttggttgagggtggaatacctccttgttccatgaaggtggctgcaataaaaacaggtgactgtccaaaacgtttctctaagctcttctgggacataagaagtgctctatgaccctcatcatcatcataaccttcttcaacattaccatcctcgatgtcttccatattgaaaatcggaatagtagactcagttcttttagctgctctctttttgtcaacgtacttcttgttgctatgttttgctttctttcttgaacctccacaacagctcttcacaataatgtttggttctaaatctttctcagttaatataggatcatacccatataaagctttcctgttgaaacaacaacccgtcccacataaactggaccttggataccatccagccctttcaagttgatatcaaagaagacaatatttcgatttgcatatcgatcgtgattgtcaatgccatcgaaacgctgaggaaattgtacatacaggtctttttcccataagcagggtccatcatgaaacacattgcttctttaagagccttgctgttattgaagtagtgatcacaatcaacattcaagagatacgcaccattggtaaggacagccgacacgcgaatcaaagcattcattgctccagctttcttgtgatgctggaagccaggacgcttctcacgagagacataaacaagtcgaggcaactcattaccatcagtatcaaggcccccgttatggcctaagaaaacctgaatcattccaggatgatccctagaattatttccaggccagggagtgccatcctgcattgtccaaccttcctcaggcatcttctgtgcttttgctacaagggcattgattcgcaccttatattcttcgtactccctcttcattgctcgtcgctctttcacaaaagaaggttgaattttgtccttcaagtagtctatcttctgggcaaaataaaactcaggagcccttggttcaatgttatgtttcttgcaaaaaggcacccactttctagcaaactcagcagtttcagaaagggattcaaacgtcaacatcgccgaaccatcatctgatacataacaagagactttgtcgacgggataatccacagcaagtatagacaaaacagtgtttgccgtaacaagtggaggctccttgaggggatccacagtactcacaaaaacatcaattggagctaactgtgatggttcaccttcgcgatcaaacctcaatgcaagtctgtccagataagtctcacggttaactggacaccattttggaaattgatccagaagccaagataacgcaaaccaaatctcacagataacagataccagccatattgggtatgcatctttgactgggtgagttgcacggtattgcaaaaagaaacccagaatgataagccgaagtatgatcacaatacgataaggagtcatatgtgatgatgaaattggcaccacacgactcaatggttgtcgagcatcatcatcagccatttgaagctcttctccatttgaaccagtcccttccatgtctccctttccatctgcatatctgctggtcacctgaatcatattcttatcttgtttaagcttccaaccttcaaccctctctttccagtcaacattccctaacccatacgaattcagatcttttgatggatccacaattctcactggaactggaagccgaggatcaagatgcttgtccccattaggacccaaaggacccgaattcgttctcacagattggttataatcagatgtagcacatggaaatggaatctcaccagataccggttgcccattggtgaggaggcgaatcggctcatgtctagaagaagatggattgaactcattttccagatcatcatctccatcctcatcatcatctccatcgacacgaggactccccttaagcctttgatacctagtcttacacttagggcaagactgatctccctcttttctttcgtattcataacaaggccggcaaactgggtacgcacactcattgcaagcaacgaatacatcaccatcagctgtcagaccaacaacacccccacagatcttacatatttgaccactcacatccacgggtttcgacccactatcggaatcgtgacgaatccgaacgagctcattcctacgatgagatccggcaactaaaccggcattagcttccatgactctctctcttcaacttgattcctcagcctgatcttcttcgcccccacttcaatacgccattgccgtactgccttttctctacctagtgacaaattttcagtaatacccagattcaaattgtgagtgaattaacgattgaaaagtaaagaaaaacacaattaaataaagtaaaatcaatatatgaacacattaaattacaaatctttgaagctaaacacaaatggaaaagatgatttgataaatcagtaaaagaaaaatgagagagaaagggagagtaagtagtacctgaaggtgaagagtgaagagtggaaataggagaataataaatggtagatatgaaggtttggaataatgtcggtgcacatggtttaatggtttatgatattttgttgtataaattggatcttgtctaaactctcttcttcctcttctcttctcacactgtcaaccactcacttacaggtggcaaacgtttccaatacgaaaacaattttatcgattagtggtgggctgttttttttttttttttaaaaaaaaaaagaagcgtattatcataaaacgaaatagttcgacctcccgctcgttacaaaataagtttttcggtaaggagaaaatcgaaatagagtcgttcaaatggtgagtaaaagcccacttaaccacgttgtgggcaacaaaattataggacctactaacattgataaaattataactaatgaaagagggagaagacttagagcagaatgagacatagttctcaagagcttaatgggactccttcccattgagcgcgttgattactagtctcgagtcactctccactattacaaatttagatcccatttctaatgccactgagacggctaaacaacaagctgtagcctctccacagagggcatccgagaagtccaactgagccgagtggattcggatcacctcacccaagtgattccttgtgacaactgcaatacacatactctccaggcccac

SEQ ID NO: 217977 - DNA, 7037 bp, Cannabis indica
agaaagaaagaaaaaagataaacacattgagtccagttcaaaacttgagataaaaacacacccaatcaaagtataagggtcaagaatgagtgcataaaatacacacatgtatgggtgatcaaaccatctttcttcaggagtcttgagtccaagaacatggtttggactcttattgactactttttcttatcatatttttccattctttaaaattttcaaagcagtcacttttatgttaaggagatagatccatacttaatcatgtatgggcagataggaagtcctcatttccacttggagtagcaacactatttggtccatgaatccgagtgtaacatattcaacaaaacaactcgatttataatcatctaccacttccaatggatactctacagttctaccgtcctttatggtcactagtttgatcttcttgtttcattttcttcttcagatcccaacaaaaaatgaagattttatgaaggatgcttgatgacatggatatatttttaccattttttaattgatgcttaccattggaatgaaaaaaaatgccacaaaagactgtcataccatagcatcctttattagggcattttctagtctctttacctcacaatttggtcaagtaggtgactttcaatttcagtattctctccccttactgaatcttcttattggtctttctctcgttagaaaagattcgtttgtcttggtttcctcaacatatagttcactctttagtcttcaagatggaaagaacatgttttagacacaattggttttttttttcttttaatttttagccctggcagttcgactggcagacctgccagtggcgccaaggtttttgagtctctgggggatatgaaccttggaacatatgcctaccaacactttcaacacctccttttaccactagacctttactttttccacctacgttaacttggttcccatcaaggttctgatccaaaccctttgttggatccatagtgaaccagtaaaacattcccttcaagtagattttgtaagatgttgttttggatcagaaccaccccttaaggttttttagacacaattctattaagccatgaagaagtatgataacttggtcctcttcctttactttttccacctacgttaactagatcaagaattaaactcatcaaggttctgatccaaaccctttgttggatccatagtgaaccagtaaaactttcccttcaagtagaatttgtaagatgttgttttggtcattttgtagaatagaacttaagtggcttttcgtatttgatttggtacgaggactactcaaacgatgaaaaatgctattccttgctggacccaatgcggcgtttgtatgttaattatctgaagaagctaacaacaatgtacatttggtgttggttgtgacttatttcttctttgttcctgtcttgaaaatataggagaagtttagagttgcggttttggtttcacaagcagcactacaatttatccatggtaagaacatattgatataacgcactcagactctgctaagaaagaaatgcaaataggataaagaaaaaaaacctccatttaatttcgttccatcttcaatgtttacaggtctgaatttgattagtgaatactctgtacctgaggaagtcaaagatgcaggttttgaaatctgtgctgatgagttaggaacaatagttgaaggccgtgacgtgaaaaagctgacaattcatggtggagttgaaggaattgcaggcaagctttcaacatcaccaagtagtgggatccctacttctgaacaactgctgtgtaaaaggaaagagatttatggtattaataaattcacagaaagccctgtcaagggttttttgactttcgtgtgggaagcattacaagatatgaccctcatgatacttggtgtatgtgcctttgtctctctaattgtgggcatagtaatggaaggatggccaaagggtgcccatgatggacttggaattgttgccagtattttgcttgttgtgtttgttacagctacaagtgattatagacaatctttgcagttcaaggatttggacagagagaagaaaaaaattgtggttcaggttactagagatgggtgtaggcagaaaatatcaatttatgatctacttcctggtgatatcgttcatctaagtattggagatcaagtcccagctgatgggctatttttatcagggttttctgtggttatcaatgaatctagtttaacaggtgagagtgagccagttaatgctaattctcaaaatccttttcttctgtctggaactaaagtacaggatgggtcatgcaaaatgcttgtgactactgttgggatgagaacccagtggggaaaattaatggccactctcagtgaaggaggagatgatgaaacaccgctgcaggtgaaacttaatggtgtggcaaccattattgggaaaataggtctattttttgctcttgtaacttttgctgttttggtgcaaggactgtttagtcggaagctgcaagaagggtcccactggagctggtctggagatgatgctatggagattttggaattctttgctatcgctgtcacaattgttgtggttgctgtccctgaagggcttcctttggctgtgacattgagtcttgcttttgccatgaaaaagatgatgaatgataaggcacttgtgcgacatttggcagcttgtgagactatgggatccgccactactatctgtagtgacaagaccggtacactaactactaaccacatgaccgttgttaaagcttgcatttgtggaaggatcagggatgttggtagctctaaagaagcttctgatttgggctctgaaattccagattctgctttgaaaatctttatacaatcaatatttaacaacactggaggagaagtggtaacaaacaaagatggtaagactgaacttctgggatcacccactgagactgcccttttggaatttggtttgacgctgggtggtgatttccaagcagaaaggcaagcttcaactatcgtgaaagttgagccgtttaattctacaaagaagagaatgggggtagtgctagaacttcctgatggtggtttccgagctcactgtaaaggtgcttctgagatagttttagctgcatgtgacaaagttgtagatttaaaaggcgacgttgttccccttgacgaagcataccaaaatattctgaccaacacaattgaacaatttgctaatgaagctcttcgaactttatgtctttgttacatggaagttggaagtgaattctgtgctgatactcctataccctccagtggatacacatgcataggaattgtaggtatcaaagatccggtccgtcctggggtcaaggaatccgttgctatctgtagggcagctggtataactgttagaatggttaccggagataatataaacactgcaaaagcaatagcaagagaatgtgggattttaactgagaatggtttcgctatcgaagggccagaatttcgtgagcttagtgaagagaaattatttgaaataattccaaaaattcaggtatgatttatggataagatacaaaaatggaggtttatggtcaattgggatagatatgagtattttgaatacaacaatatgagagattattttatatgcaggttatggcccgttcttcaccattagataaacatactctggtgaaacacctgcggactacttttcaagaagttgttgctgtaactggcgatggtacaaatgatgctccagcactacatgaagctgacattggacttgcaatgggaattgctggaactgaggtgagcacttgtgttgtgatccttattttattttaaaatttaaacgtctttgggctttccaaggaaaacttttctagagcttacactacagaaattccactttgaaataattttatcccgttactattgtcagcttatactcaaattaatcgtgtcctcgtattttcttctctctctagaagtcaggtctcaattcatgactctataatttgataaagcacgttcacttttcaggtggccaaagaaagtgcagatgtaataattctggacgataacttctccacaatagtgactgtggggaagtggggccgttcagtttacataaacattcaaaagtttgttcagttccaactaacagtaaacgtggttgcccttattgttaacttttcttcagcctgtttgacaggtgagattccattctctttgctttctgaccttttattatgtaactgtaaccgaaccacctatggttcgcttatgcatttactttgacacttatactcaggaagtgctccccttactgctgtccaacttctctgggtcaatatgatcatggacacgcttggagcacttgcattggccacagaacctcctaccgatgacttgatgaagagaatgcccgttggcaggaaaggaaacttcatcagtaatgtgatgtggagaaatatccttgggcagtctttgtatcagttcttaataatatggtatctgcaaacaagtggaaaagtaacttttcagctcaatggtccagattgtgatttgatattaaacacgattattttcaactctttcgtattttgtcaggtaactatttattctgtcatcggatttgactacctgctaatgtattagtcctaaagtgacaagtctactctgtccccaccctaaactaaactaaaagcccaataaactgaagggttgactctttaaactgagggagtctatataagagctgtgtgagactaagaaatccatggctcaaatggtcttttgagctttaaatcaatgtgaaaaagcttcatattgtagtatggattagaatccctgctggaagcatgactacgtgaacttgctgaggaattttaaaactttaattctctgatctcagtccatcagttctttgcaattagttcaattctgtatttgctaagattatgaacttgcaatttatgctgatttattctttgtatatacaggctttcaatgagatcagctctagggagatggagaagataaatgtgttcaaaggcataatgcaaaattatgtgtttgtgtctgtgctcagttgcaccatcatcttccaaatcataatcgttgagtttctaggtacatttgccagcacatctcctctcagtttacaacaatgggtcgttagcgttatccttggattccttggaatgccagttgcagcagcattaaagatgattcctgtaggatctaaatgaatctgtggcaaaccaagtacaaaggttcatctggcatagctgttgaaggaggactacttgataactttcagctgccacaccctcacaaaaaagaaaagaaaaagctgcaggtaatacaaagctgtttgttggtttagacgatcatttgagggtattttcaaactttgactaacttagatttgagccttcctgcaaaagtttgcgttaggcaacttgaaatagaaactgtgtacagacttttgaggcacttggcagtattaacaaaaatacaaatctacttaacagctttttggagatgctagtccagaagcgttgatgagatgagcaattttaaaagaccttcaaatgatttttcagattccatctgtcttttacaaatatttccaaaaaagcatataaatattttctttttctagcagaaatagctctatatgataaaaactctcccgaagcacatcttatatatagagaaagtttttatagttacattaaatatgtaattaatatttttagtctttaggctactattgaatgattgtgattaatttaaaaaatttaaaaaaataataacaaataatttgtaacttggtactttattatttttttttttataaaaactcaatcaaaagtaattatttttaaaattaaattataaataaatatttattaattttatgcaatttgctattaagtaaaaacttttttagcaattaattttttttggattgaaatatatgaaatatttgtaataaaacttcttataatttaaaattattatgcacataacattaactaataaaaaatagtaagaatgacttctaattagaggtaattttatactaaatcgttgtttttcaataccattaaatgccaaatcagtgtgtcattcctaggttggttcaaggcatttaggttttttttttcaaaaaaattaaaaattaaataagaaaataatttaaaaggtaataacaattataaaatttaagattagttaactttttagtgctcctcgttgaaatcatcttcatcaatctagagattgtaaaaagaaatcaccaaagtagattatcaattaactgagattgttgcttctttttcacaaataagcatatcactaggacaatagcaagcaaatcactaaaaatcaaagagaaatctaactgtagccggtggattggaggaatgagtttgtggcagagatgtagaagattacattgaagtgataaattctcatgatgttaggttgggacaaactgaaatctgaatttttgaaattagagacttttttttatcataaggagggaagatgggtcaagcggttgttgcaaaaaaatagttagatgtcatttttttaaaaaaaaaattaattattcaaaagtttattttaaaatgtgtaaaaatagaattttattataaatattatagttaaatagtttaactgttaaaaaaattattaaaaaaattataaaaggaatttaaatataaaaataaagttgtttacaaatattaattgctaaaaagagtcttgttaaatagttaaattaaaaattaattattttaaaaaatatttaattataattaatttaatttttaacaaataattattacctgttggtaacttgcttttataggttaaaaaatataacaatgatggttataatactatctcctaaaaaattgagaaaatatatatgtgtattttagtttcttagagcatatatttggaattaaaggtgataaaatataaacataataatagctttggcatg

SEQ ID NO: 217978 - DNA, 3552 bp, Cannabis indica
gatttgaaaattgaagtcaggataatagttttatgcgaattaaacttgatttatggttgaattttagtttcgtagtagtttttctgcattttttttcatgaattcgaaatagcccctattttgattgattacgatcttcttctcaggtaaagtcgtcggaattaatggtggttctctttctggtttggttttgtttcggttgtgttgggttgctggattggtcgatcgaaggttgtgtgcgtaagtttgttcttcttctcaggtgactcgtcaaatttaatggtgctttcttgcctgttggagttttttcatcattgctgacctcattgcatcgcacgaaggtttcaatcccaggaagtgtggatcatgtgggttgaaagtgtgtgtaagatgtatttgtgtaatttttctttgttggattgtatatttgtttatttggacgttttttgtaatattactactttttgtttaaaactaaaaaaaaagtcccttttttatgataaaaaatagtgtttctatggcgcaccatctttgtattttttatatccaaatagttataatctcaactttattatataacaacatagatcatacttatttaacacatcgtgcaattttttaaaaaaaaaaaatagaatattttacaatatagacagtgtggctcaaacattctattttatatgagtattaaaaaaagtagcacgcttgcaacaaactaactttattttcggtacacattttattggaatgcattatagaactttcctaaaaaaatatatttgaatttactaagatacaatattttaataatttttttggcacctaaagaaattatattattttttctatatcatgttatatattatagttataaaagatatttaccattttttttttaattttttgaataatttaaaatattaaaaacaatatttacactcgtacaaaatatgtacaatcttcacccttaactttagactcatcccagttcagtgctaacttttacctgcacatacacgtaataattgtgagttgacagactcagtaagaaaagtataatcataacataacaatcttatcccgcgtcccacgcatactaagtctagaacgttcgtatgacagtactattagccataatatcagcatatactcggtactctagtcgtactgatgtgatagcactaatctgtactttatcaaacatatatccattgctatttggtgcaactctatgtacaccaataccgccattacagatatgctatctaacaggcattcataaaacatgcacgttaaacatgtaaacatatatgatactattatgctaatcttgtcttaattctgaatgtaagcgtgcctacaactcttagtggaaactgctgctcgacgatttaaggccctaagtcacaatttccgtaaaactggtaagtgatccactatatcactttcggggacttacacttgaaactaaaagtttccctatcaataaatagcgtaactaaatcctaaatatcgagaaaatattgaaaaatgagatttcatgaagaataccccaaaaaatggcagggcgttttcttgagttttcagcctagaaaaatagtagactgttttcccataaacaacctgctgtttttatagcataaatgacccaaaacctcaaaacttaaccaaaacgattccaaccttttccaaactgtccaaaacctcaaataatgttaaaacaaacacatttcatcaaacaaacacaaccataaaactatgaacgataacctaccattaatgagctaagcttgagctcaataccctaacttagctcaaaatatagcaaactaacccaaagcttctagcaaaagcttaaacaaacacaataaacctcccaaagctcagctctaaaaccaacaacacaaaacataactaaaatccccaaaaccctcaatgaaaccatataaaaaccttaaaacttaagagagatagaagaaggattagcttaccttaaccttctcaacaattaatcctcaaaaaccttagctgaattctcttgattaggtctgaattcagagaaaagtgggtgggttttccttgtgcttccttgtagccgaacccaaagaaagagaaagggaaaagagattttgtttggataattctagtttcaatgtatttttattcagctactataaaccttaattaacctaaaggattttactagaaaatctatttatttcccacttaataataaaagccaaaagacaaatctacatggcagatctattcacaaagatgctactagtaaaatcttttgtgagtcatatatataatgtgggacaagggagatgcccaatttgcttttagggcaagtgggagattattaggatttatatcctagatatttttgattattaataagagttgaacattttgatatatgcatgaatgttaaattattaatatttaatattgaataatttatatataaatatcagaaaattccttattcatacatgatgttgtgacttgtagttgtagagagaattaatatcacttagccatgaattaaatagtcaacaacatattaaaatttaaggaatctataatctatggttgatagtgttgttcacttatgcccgttattcggtgcaagtaatctcgattcaaattattgatgtagcatgacatctaagtaaatgtgttgtaaataatagagattatatatgacaatgactgatatgaataaagctatctttatcaaacttaccatttactataaagacctaatttatatcataaagatgatcaatagtagatcgacctaaatcttgagtaatcatgaactcatgatcatatttttagtttctttgattcactcgttaaagtttcccataaaagattattcttacagtttttattttaggattgttataatgtggatgtctgaaaacatggtctacaattatagaattctgactttcctaactgatcgaatgttggttccctttaagtgttaattctaaaactgaaaagttgtgcacaaatttcgattggatctaaattatacttttactgctgaattaacagaactaaaggataaatgagtaataagaagggtaaaatagtaatttaacaaaaattaattacaatcgacacaaggaggactaatcactagaattaaatatatcaatggacactgcaataaaactcagtaaatataattctataattactaaggatttaatttcatatttatagtggagtaatcatagaattaataaaaggattatttgattgatgagattcaataaataaatttagtttattagagcttagaattataggttcatggtccccaaatcgccaccataaaatattgtcaaggggtgggataaatgttgtatatagaagtttagaaaaatctattttgaattagcaaatagtaattatttatttttataataaataatttattttttcaaattaattaaatatggaaaatacaaaatttgtcgagacaaaaattgtcaggacaaaaggcacgttccttgtcttaaatgagacaaa

SEQ ID NO: 217979 - DNA, 3092 bp, Cannabis indica
cctagtttagtatagggccaagagtgctaggtttgttgagtgctcaatctgtgttatgctgtcagattgaggttaaattcctccatatcaccccagtagtaaatgacccctgttcgatgctttattgggttcaagattcagtaagtgcttcagtttcataaccgatggtggtggctgcgacgccttcagggcaccaagggtaacccaaattcttggttttctttttccgtcatcttaaccaaatcatgaactaatttagtgaacctcttattttattttaagaggttttctagttcatcttcttgtcttatatatcttatcatttaaaggagtactttgtttaatttttaggaataattgagctattttgagcagaacaactgtatttgttatggagttaatgctcataataaggatagcctcaggcaggtatgtgattcatagcttcttaagacgaatcatgtctatgaaaaattatgtctgttaaattcaaaaattgtttttttttttttgtgtgttcattttttatagtttttgaacttcttacaagctcgagttagagaattgaggaagaaagataattcttttagacaatattgttattggttgggattcttagtgttggtaaatcagctcttgctaactctttgcatcaaattgggaggacaagtgcagcaggtactataaaaaattcagagtatttttttctgaataaatatgcaattttcttttcaagaaagtttatttgggtatgactacaactaccatttatctttaatttgtaaaattttagatgtattttgaatttaaagtgcattgcttctttgtagagagagagagagatttaagcatgttaaagagagtccacagcctggtgacaaaagatatcagcagcttaaatgtatgtagccgtattctattaacattgtatgctgctatagtatgttttacaagaaagaattttgagttaccaatatttgcttagatttattgtgaaaatatattaagattccaaatttactaaatataagattaactagtggtttataactattaaataaattagaatgagaggataaagtttgagttataaatccatgtttagtttatggtgattatatatgtatatgtgaccaaattaaaataagaaaacttatgaacttgatagtgcagtggaatgtttgataggaaataataatattcagtgtctattcattaaaatctcactgaaagaaacttaatttattttttgttcttctattttttattttaccgacaagggtgttgattgtttatagtctaattaagtgttgagacttacataaattaggcgagaatcttatagtctttattgtttatcaacacttttatcaatctttctttgtgtttgttttgtatttgctcaatcatttatttagctctctatgtgacaaggtctgatttgtctcccaaaggctagaattcaaatattttatcatatactttagttgtttatttttctgggattaagaattggatagttctatctcaagtctcactaaaaatactacttataataataataataataataataataataataataggcaattgagctaaaatgcaattattttgatgtgagtttttgaatcctttcctaaggcaattgaggtatcaatatggagattctgaaattaataaatgagttattagggtcgtaaatggtgcatatttgcaggtttctctttttctttgtactgccttgactgctcatgctagatagtgtatttattgttcttaattttggggttgtcgttcctttctcttcaaattttttctccactatgcaaatgaaatttaaaattcgttgagaaagcctttgagttttgttgattgagctactcagtattttgaatcaaggactttctttatgcttatctgactttgctagcctaagttcactcttcactttagtaacatattttttatttaaaaaatatagaatgaaagaattttcaagactggttaggaaggaatttacataataatatttataatgttggatttttgtagtttgctttgcttcttttactactgtacaaaaaaatttgctattattttacaaaaaaataatagcaaataatgtccaatacacacatattgagttacattgccaataaaatttcagaaaatttatcaaatttttcctcaactctacttgctctatgttgtttcatacttacacatattgattgagttaaggaaattttatgttattgtcttatttacaagttttggtattaattgaatgattctaattatttgtttgtaattattaattgtcttatttgtttctgtttttatatccttttgctgtaatttagtacttaataggatatggcatcagacgagaaggcaatatatacatatataattaacttgtttcctaaactattttcgaaaaacaaacttttcattgtactaattacttatttgattttttttctgttgtgcataaggtggaaagtgaatctgatctaaaaggaacaagaagtggcaaatcagaaatgagtcctctaaatctgctcaatacaaggtataattagtaaactgactattttcctttatcaatatttatatttatgatatatgtgtattacaaatcaaaacacattctacccctgtataaatgcaaagtgtatgtgatataacctactagactaattcattttgacagatcaaaactttattgtgttgattctcatccaataagcacaatagccatattgaagaaaaagtttatagaataatttattagaacacactcatgtatttttctagtatttcaattatggggataaagcttacagagatgtttatacgtacgcccttgacaaattttttggatgtgtaatatttttttagtaagcaatgtgagtaccttaatgattataaaaataattattttttattatagatgtttactaatatttaacttttttaaaatttcagtgttgactttgacaatagaaatacaatatggttgtggacttgtggtgcttagatatcatctttcaatgttactctcaataagcacttcaagcaatact

SEQ ID NO: 217980 - DNA, 4184 bp, Cannabis indica
ttactaattgaattgaatcggataaagaaaaaaatgttggattggatcggatgtccacccctataaagggactatcacaaaatgtattctgtaatgtaggattacttcatcgtgtacctatatatatcaataaaataaaataaggagaaaaattacattagatataaatactcttaaatagtgatttcctctctttctcaaaaaagtcactataacgaaacttcgtggaagctaccatggcagagaggcagtaccttcactccatccaccatttaagcacactaccttccttcctatttctcctcaacaacaccaacaactcttcttcttcttcttcttcattttctttctctctctactttttctttttccgccatgaaattcgtcaaaaatctcaagctcagcccaaagcgacttttcaggtcgtcaaaggatagcaacaagttatcttcgtcaacttccgatccgccttcattcggatccggttcatccacgtcatcatcatcttcatcagatgcttcaacttcgcataatctcaaatccgtcggttcggttactccgaccagcgttttgcctgatcagtggtcagattactcgaccgatactcattctgagcttaatcaagcttttaaactcatagatcgagataacgacggaatcgtttcgagaaaagagctcgaggcgttgcttttacggcttagcggctgcgatggagcgagcgaagaagttgttgctacgatgcttagcgaagtcgattgcgatggtgatggttctattagcgttgaggctttgatgagccgagtcggtcctgtggcttgtgagccggagtcggagcttcaagaggtgtttaatttcttcgatacggatcgtgatggtaagatctcggcggaggagcttttgagcttctttgttactatcggcgatgaacggtgcacgttagacgattgtaggcgcatggtagacggtgttgataagaatggtgatgggttcgtctgcttcgaggatttctctcgtatgatggaccttcaaagattatcgtaaaatatcatgaaaatcatggtttttttctaattaaaattaaatacttattctctctctcttttgtgttatttatctggttattattttttttttacggtgagagattaatctgaatcgaaaatctacggtcgtgattgggtgatcttgatatttgaggaaatataagcgtcacgttaacgtgtgtactgtaaaatcttaagccaattagaatctgacacgtggtgtttggagttgtggaaaaatgtttaatgaaaattcaaatatatatctcgaaagctaatgaagaaagtgatgacgtggccctttttttttttttgcgggagttgtacttgtcaagtcatatatatacaatcgaaaggtctcattcagatttgaattcattgttcctgaaagtttatttattatatatagtcaccagagttttactttatttgcagttccatccctgaatctctttaatttactaaataggacataattggagaaattgttttgaaatttaattgtactaatgtcacttagtaaaatattaagtagtactaatatattttgttttttagcatttctcataaagtttggtatcaaactcaaaatccaatactttcattactagaatcttcgattgaaagcaacattattgaattaatgttcttttgttattattattatttaattatataaataaaaaaaacagaacaatattccttacactgaatttgtgtttaagatgtaacttgttattgtaataatattgttcatgaattatctaaatttgcattaaacaattcaaaagaagttaacatgaaagaacaatatttcacttagcatattggtcctttattttatttttttctttttaaaagaaaaccaataagcaagtagaccatatgtgatctgaccatatgttttaaacaagattcaaaatagtgtaagtaattatttagggctcgttttgaacgtcatattaggtcgtattgtattgtattatattcaattggattatatatcatattttttatataatactatattaaactttaatttatactaaaatattatatatttacgtgttcataaaagttaatatcacatatagttttacataaaaatattacataaaatacaatttaatataatacaatacaacctaatacggcgttccaaacgagcccttagtcaaatgattaccaaaacactccttaaaaaagtattttgatagactctttatctattttaccatttaggagagtattttttttttcttatggtcgtgaacattatagttatttaaaattttctgtgagtttttagaaaattttgagtaatttataatatcgaaaataaagtttaaatattttgtaacaagcataattattttttcttatgcacgcagtaaataactgtttgaactttattttaagcactgtaatttattcaaaaaaatttaatttttttttaaataactacaatttatgcgatcatgaaaaataattagtacaaaacttttctagatggtgaaatagatatagtttctacttgaatatctttttgaagggtatacactagagaaatttcttattttataaattttgttaggaattttctaacactctaataggatgttaataaggatgtcttgatcgatgatcattttgcaagaaaattaaaataagactcgtaaaaaaattgcatagaaaaatccattttgtgatattgacacatttcattatattttttttttttttccaaattaaagtaagaagagaaaagaaatagtccttataagttataagcatgcacgtagtaccaatttcttgagttgttttatgtgaattaatactcatatatttgagataaaggagaacatgactcttatagggctaaataattaagttgttttgtatattaatttgggtgaccatcacatttctaaagattgtatttctattattatttgatgacaaccaaatgcattatttgtttgactaatttaattgtctctattaaatcattaattatgaaactataaatatagcccaaaacatataaaggaattaatacgttattgcatcctatccttgtcacaagtcatctaaaatttaatgaataacaatttcttttttaacatgcaaaggttgtttaggtaaatttttgatctgtttcggtatttagaaggtttttagtcgtttattttataattttatacattataactttttagaactataagtaaaatttaaaaatttaaaatataattcatagaaaaaataattaattgtgtaacaaaatgttaaaattttgacacaataaattattttgaaattctcatgcatgtgtaccaaaatgcattttttagggaagtatagtataagattttcccatattttaaacactttttttttacaaagaaaagtattattatcttaaatattcctcaaaaggtgaaaatagccttagatccttaatcctataatatgaaactgtgagtgcccactttatttaatttgtttgtatttaatcttactaacattatcttaatagttttttttaactataaataaaaattaatgttagaatatgatttgacataataattaaaataaggagtatatatatataatataatataggcacatgcaaatattgacataaaaagaaacaagaaggagcacgcatgtcagtcagtattggcagagacgaaatttctacgttagtgcatttataactaattattgttaaagcattactattggctaccagtagtgcgagtatcttctataagtgacactttatgattagttagtcaattatttttaaaattattttcttaagttatataagactcaatacttaactataccaataatagtatgatgcaaaagagggtgttaagcactaatggtcagcgacgaactgagaattggcttaattattattaaaaaaaaaattaggtttactttattgaatttatttatttttgtgggattttttatttttttttaatgcaagcccccattagtttataagtgtgtctgtctagtggtatctgttagtaatttttctcttattaatactacggtaaatagcaacacaagtatctcaaaattttaagtttgtaaatgacataaattcaatatttattt

SEQ ID NO: 217981 - DNA, 4642 bp, Cannabis indica
aaacaaataataacaaagttatacgtaaacaaacacattgttgcacaaattgataaaaaccttaaatagaaacaaaaatatagaaaaatatgggaaaaaaaaatagattatatgaaaattataagttaaaaagatgaccaaacccgtaacaatatataaacaaaaaatataaaataaatataaaatagaacctaagattgtattgttataaacaaaaatatacatgataaataacacgtgtttgttatgttagttaattgtctgttgtaaagaattagtttgttatttctgttgtggtttctttgtaactgaattgttcttagcagttcaacagctctttgtacatttcctccatataaataaaagggtctgctcaaaggaattctttagagcttttacaattctctggtttcacttcttggttgatcctgataagaattgtatagatgagcatctctttcatggtatcaggaagccattgactcgcgtcgataatggattctcgacacccagaacctactttcgctgctacagccccgatgaatcaacaaattgctcctctgcaacaatggaatcccttccaaaattccctccattcctctctcacagttcgtcttgatcgaacgaactatctggcgtggaaatcccaagtgattcccacagtaatcggtcatggccttgacgacatccttctcaccggagttcctcccgttcaacgtcttgtttcaggcgacatcaatcccgagttcactgcgtggaaacgaaaagatcaactgctcctcagttggttacgctcgtcaatgaccgaaacagttcttggaactttggcccatcatgaatcctcctgcgaagcttggcgtgccctcgctcaaagattctcaagtcaatccaaggctcgcctcctacaaatcaaatctcagctctcaacgatacagaagggtaacctctcaatctctgattactatgacaaggtcaaattgttagctgactctctctccatagctggtcatcctatggaagagagtgatctgattatgcatttactaaatggtctaggtcctgaatatgaccctgctgtagttcatgtaaccagtcttgtagatgatgtttcttttgagtctattcaatcgttattgctaacccatgaaagcaggattgagaggcactatagtgtcaatgatctttcaaccaagatctctgccaatctcagtatgaacactccaagaaatggtcctggtgcaccaaatcgttactacaattcccagaacagaggttcttatggattcaagaacagaccacctgggagaaattcaagatctgccccccctcgattcctcgactgctatgtcaagtttgccacaaaccaagtcatacggctgctatatgtcattataggtttgacaagaattttgtcactcctaaacctggtgaatctaaagcttttctcactgaacttgacgaccaaaattttcctcaggcctactcctccaatgccttacccgaatttgtcgatgactatgattggtatgctgacacaggtgctacgaatcacattgctcaaggcatggaaccattggaatctgaaacaccatactctggtcttgaggctctcacagtgggcaatggcaagaaacttcccatatcccatgttggtaatacctccttatcttctttaacttctcccttgaaattaaacattgttcttaaagttcctagtataactaagaatcttattagtgtcctacaacttactaaggataataatgtgtttttggaatttcattccacttgttgttttgtcaaggacaaggtcacagggactgtcttactcaaggggagggttaaaaatgatctttacacattgtctcatcgttccttttccaccccagaagtcaatctccaatgtcatgttgccacttccaagcatagtcctactattgctactgctgttacatcagtatcgcatccctcttgtaataataaagctgctacagcagctattactcagtgtaatgactcttcaatgaatacaattagtgattttcagtttccctctcttgtttctcctaaggctttttctgttaataaatctgatgttaatttatggcatgccaaactaggtcaccctgctccacgaattcttgccaaaaatattaagtcaattgcacatttcaccaaatttaaaagccttaaaattctgtgatgaatgtaaacaaggaaagagtcataaagccccttataataattctgattcgagagcctcacagcctcttgaattaatccacactgagttatggggcccatcacacactccatctaaagagggatataggtattacatacacttcatagatgattttagtaggtacacttggattttcccacttacactaaaatctgaggcctattctacatttctgtaatttaaattgtttgctgaaaaacagtttaattttcccataaaatgtgttcaatccgattggggggggggggggggtggagtataggtctctagccaacttcttgcaccaacatggggtacactttcaacatccttgccctcatgaccatgaacaaaatggtcgtgctgagagaaaatatcgtcacataactgaaactgggttgactttacttgctcaatctggtcttgatttgtcatattggtggcttgctttctctactgctacttatgttataaacaggatgccaacattggttataggagatatctctccctatgaatgcttgtttcacaaagcacctgattatgattttttaaaaccatttggctgctcttgttatccacatcttcgaccctacaacaaccataagctcagtttcagatcagaaaaatgtatctttattggatactcgcttcaccataaaggctatctatgtgaaaacaaggatggcacggtgtacatagctcgcaatgtggcctttaatgaagatgaatatcctgccctttccacaacaaatgttcaggtacctcctactttctctacacatgtgccttcaacttgctttcctactacaccattattcactaatattgttgcacctgttactgtcaatttgcctactcaacaaaattcctcctccactgctcatggattgaggtctgatgctcaaggggtttcattacctgatccaacagctgcaccaatagtgaatggtgctggtcactcaactcctgacgtgagttgtataccagcagccactgagatcgattcaaggcctgttccctacccattaccaccattattccatacacaaccatttattcacccttcatctgatgcaacaagatctgctatagcagaacctccaaacacaaatcctcttaatcaacctgttatcatcaccaccaactctcaccctatgcagacacgttccagatctggaatcacaaaaccaaaagcatactgtgccacatcctatcctctacccgaatcccttctaccaaaagaacccacctctctcaaacaggccttggcagatcccaaatggtttgcttccatgcaaatggaaaatcatgctctcattaaaaataacacttggacattggtaccttatcatccttctatgaccttagtaggcaacaaatgggttcataagatcaaattaaatgcagatggctcatttgacaagtacaaatcaagactggttgcaaaaggatattctcaaacccctggcattgattttaaagagacgtttagtccagtggtaaagccagctacggttcgcattttactgaccttggcagtcacattcaattggccaatcactcaactagatgtctctaatgcttcccttcatgggacacttgaggagacagtttatatgccacaaccaccaggctttgtcgacactaactaccccaactatgtgtgtaagttgcataaagctctttatggtctcaaacaagcaccgagggcatggaatactaaactaaagacaactctatacagcaaaggatttcagatttcaaaatctaataactctttgttcattcgaggtactggacaacacttgatagcacttttagtgtatgtggatgatattttaataacaggaccagatcaacactccattactgctatcattcgtgatctaaatcaggagtttgctgtcaaagatttgggctctttgccttattttttaggggtggaagttcatcgaactacttgtggtatatatctctctcactcgaaatatatagcagacctacttactagactcaacatggacggtgccaagccatgtcctagccccacaagtacctctcatgttctttcactcacaaatggggaacctttccatgaccaaacattgtatcgcagcacactcggtgccttacagtatcttactttgactaggtccgatgtcgcatttatactacataacataaaattgttgtttaaatgttggagatgatactagaatgacttaaaataatattgattggagctccttatcaaatcaaaaaaaaaaaaaattaacaaaatattagattactacttaatatatagattaatttgataattactaattgaataatatgctgagaattgcctactaatgattgaaattttaattcgaaaaattaaagaaaattatatataacaatgaatgtttattg

SEQ ID NO: 217982 - DNA, 5480 bp, Cannabis indica
agagagagagagaagcttttttctcaaattttggtttttctttattttctaaaaataaaactaagcagaaattattaacttaattataataaatggccagctaccaattaaggggtatgccacctaatcccctaatgcaaaataccaaaaatacccctcctacttccaacttaagtcattaaaagtctaggagtaaaatggtccaaaaccatgactccgctcaaacccggcatttaaaatatctcaaatgtttgtcctgctaagaattaggttctaaacttatccatgtgactctaacggccatctaatcatattttctatcgttgccaagaaaaaattataaaaaaattacatatttcatatttagcttaaataatacttttagagattaataaaatctctagaattgataaattataactccaatgcccatttctaaaaaatgggcccacaacaattataaaattgtatataattataaaatactaataattaatgctaattgcctttactaatccatcatctaacatgcagtcattacaaaatgatactctaaaatgtatatagaattttgcttataaatttgatacaaaatataatatatgtaaaatttgattttttttttttgtcgaaacattatagtttactgaaattacaaatggaaccattacagaatgggaagggatcttcaatccacaacgttcattatctatccaaacgaagtgcttagtcaaaatttaatttcctgaagcattctaagtaagtgtaatagtagcaaaattgccactaccttggaagaattatagaagagaatccttcataaaaataaggattattttttggaggaaattcaaaaacatagcttgtagagtggtctagtggagagactttcaaaataaatgtggttatgaaaccaacctctaaggttcctaaaaacaaggggaaaaataaaaaagtaacacttttggtccaaagtctaatcctatcaaattcaaaggtggaaaaggtctgtaacacttcatttcgatattgattaggatattgcgtcgctatgccagaagaatgatagcaatacagtatactttaaatcaatccttggtacactattgatgatctcatccatgttttgtgtatggaaaaaatgaacatgttgttacatcagtcctaaataaaccaacaagttaaagactatgatgacatagcatgaatcaagacagctcaaattggtcactcaagtttgttactattttttctattagttaagttagttaatgtttgttatgtaactatcctaaaacttggatcattgatctataaaaggatgcctagtctcatttgtaatagttgcagaaatattaggttgagagacttatgtattgtgaggtttatttggatcttgaagcaagaaggatagagatgaagagagaagaatagaattgagaaaccgagggaagcaaaggtcttcaagggtgtttcctaagtgttctgagcttcatggtgaatattgctcaaaggaaaagatcaccattgtaacagttcaagttatcttgaacaaagtcttgtaatctgccattattcatagtgaaaaggattccttggaagaagttcaaggggaataggctctctactcattgtagaggaaagttcaaatccctctaaaatctcttgtgtcttttattggtttcagttcttatttttctttctgcattactattattcttctttgttgtctttaatttttggttcatatgatttgttggttttaattcattgtaaactgaggttgttagttatagcaaatggtatcagagctaatggtttatgtttcatagtttcagtttggtaacattggcatgaaactagagaaaatagaagataaggtatttgaatcttggtttgaactgaagcttcgagaaaatcaagaatcaaacttaagaagagcaagaaattatgtccactaataagataaatatagaaaagtttagtgggaagaatgacttcttcctatggagagaaaagatgaaagctcaccttagaaacatgggattggatgaagcactgaaaagagaggataacatctctacaacattggaaaaatctaagaaggaggagattctaaaaaaggcaagaaatagcagtgttgagccttgaagatgagatcttgagaaaggtggtttgagaagagacaccagctgcaatgtggaacaagttcgaacaaaccttcgtgacaaaatcactgcctagtagggtctacttaaaacagaaattttatgtttttagaatggatgaaggtatataaattgatgatgaaaatctaaataaattcactaaacttttgtctgatctttgtagctcaaatgtgacaattgaggatgaggatcaagccatatgatcaatttagggacacaattctatatgcaaaagatagtttggtgttagagaaaattattggggcaatctattcaaaaagaaatgtcattaaagaatagtggaaagcttttaagaaccaatggggaagttcacgtcacaagaggaaggaacttacaaatatccaatagtcaaaacaaaaattgcaacaactcagggtacaaaaagaaagcgagatcatcttccaaagactcaagtagagatagctctaaagatgacaataagtgctatgtaagtggaaagactggacactacaaaagagactgttatttcaacaaaaacaaaaataataacagacagaagaaagatggtaaaagtggaaacaagcatgaagactaggactcagccaactttacagatggctatgattcaggagaggttctgatggtggcttccaagtgttctaatgataaatggatactggactaaagctgaactttccacatgacataccagaaaccatggctaaagaacttcaaagctataacaggagggaaagtggttcttagagatagcaatacctgcaggatagaaggaattaaagatgttagtatcaaaatatttgatggtgtcatcagaacactcaaagatgtaaggaatgttctaaaactcactaaaaatctaatatttgttggaactttagacgatgcagggtaagcaaaaaaacttgaggatggagtcataaagatcaacaaagactctatggttgtcatcaaaggagaaaagattaatgggttgtactacttgattgtaaataatgcacatgaagaggctgctgtagcagcaaacaatgaagatgaaaagactgttctatggcatagaagattaggacacataagtgagaagggtttgaaagtcatctatgatcaaggactgttaggaaaagacaaaatcagtaaggtggaattctgtgaaagttgcattttgggtaaacatcgtagattgagctttaaaataggcaaacatacatctaaatgtattttagattatgtacattctgctttatgggtctagaaagaatccaaactcatggaggtaactcttatttcgtgtctaaagtagatgattactctaaaaaagtttggatatttctgttgaaatttaaaaatcaagcacttgataaattcaaacaatgaaaattattaattgaaaatttaacatatagaaagattaaaaatttgagaactgacaatggacttgagttttgcagtgatgaatttaatgagttttgtagaaatcgagggatataaagacatagaacattgagaataactccacaacaaaatagagtggttgaaaggatgaacagaacattgctcaacaagacaagatgcatgatgttcagttcaggactacctaagaaattttggggagaagctataatgacaacagcctacttggtgaatagaagtctctccacaacaatagaattcttgacaccagaaaaaaaaaatggtcaaacaagccaccagatttgtcaaattcaagagtattttgatgtacagcctatgctcatcaaagtgaaggtaaactataacctagatctgtaaaaggtatgtttttaggatatcctcaaggtgttaaaggtcatagaattttgctaaaagatgaacaaggtttcaaaataatcaatagtagggatgttatctttagggaagatgaattcccttgtttgaaatcttttgacaaaactattgatgattcatataattttaccactaaccctacaagtatctcaagctaaatggatgcacctgatccaaattaagtggaacatttagaactagtataaaaaatacctgatctaaatcaggtggaacatgaacaaatacaacatacacctcactctaatcaggtggaaccacgtgatgcaccagctggatatgatgaagaggatatggaacctgaccaagaaaatgttttaaacatccagaactaccagctagttcaagatagggagaaaagggtgtcaaaagcaacacagagatatggatttaatgctcttgcaaacatgcttgtatatgcatttatgatttctacaaatctgaccagaattgagccaaagagcttttagaagcaataacaagtaaagaagctaagctttagaataaaggtatgaatgatgaaatgggatctctaaccaagaacaagacttggattgtaattaaaagacctcacgggagaaggataataagctgcaaatggcttttcaaagtaaaaccaggactggcgaaaggagaacaaccaaggtacaaagcaaggttagttggaaagagttttagccaaaaagaatagattttaatgagatattctcacaagttgtgaaatacaagacaataagaatcatgcttgcactggttgctcaatatgatctagaacttgagcaaatagatgtcacaaccacattcttaaatggagatctagaagaggaaatcttcatggaacagccaaaaggctatgaaaaaggaagtgcaaaggactatgtttgtcacttgaaaaagtccttatatggactaaagcaagcaccaagacaatagaataaaatatttgactcttttattagacaacatgattttgtaaggagtatgtatgatactttcctatactataaagggtcaagtattctccaagctgagtatctcctactatatatagataacatgctatttattagcaaagaaagaacaaaggtagaaagaaccaaagagattttgaaatatgaatttgaaatgaaaaaattggaagctgtaagcaagatacttgggatgaatattcagaggaataggaagcagaagagtctatttctaccaaaactattttgccactttctagttataatttttttctttttatttcaaccaattattcttctttcaataataccatattttccaattcaatcctataaatgccaaaactatttatttaataattataattaatcatcaaataaaattatcatttatattatttattaattagaccatgcaaagtctcttaattaataaattaaccccaaaacctcttttgttcacaattaagccattgcttag

SEQ ID NO: 217983 - DNA, 3415 bp, Cannabis indica
aaaataatttccaacacattcatggcgttgagattttggaggaccctctgcaacctccaacacttctattcttggctaatgtcgcaaagacctggcatatctctctaagtcctttcccaaattcccagccaggtgtgggcctccgatcactatttcaagcctgcctgctataggcacaagctagagtggtgcattgcacccagctagagcttcaggtcgctcatacaattgaagatcagcatgcttctgtccaatcagaaattatatctcgtcttgcaaatgattacacttgttcgtgttgtgaccgtaatagttgtgatagcgtcagaatttgttcatgtctctcttcactaactctttaaagggaagaggattgcggtacgacactatcgattgagttgtcgtatatatctcttttcttaggaccaagagaatagagtaggtggtgacatcaaatgatgatattctcctcgagactcgcactaacataatcaaatttcagtttgcaaagccatgttgcacacgctccattaagaaaagtaatctccacaagataaggacacaatgccaagtgtcgctccatttcaaaaaaaataagaagttgtgaaccacaaacagttcagtttagaagtcaaaaatgtttctccttttagcctccacttgtcctcacatcattcggggaggtagcatgcaagcttccataacacctagagttccgaaaaagtctaggggaaaatgttatctatatttctggatggggacacgtgtaattgcaaaaggcggtacatctcatccattttaggcccaacagtaggcccaattaagataatggacattagtgaagtcatgtcttccgaatgttggacagattactcgtccaagcgagaaaaccctccagcacagcgtgtatccagaagaccttggtcaaagcatccaggaaagtaatcagcaagcatccagatatcctgctcattatcatactcattaataaccagatattatgataccatgacttaattcccaagatctcgtctgatgatcatatcttcccaatatgaaaagatagtaattgaccattaagcattaagtttctttattatccacaaaaataagacacgattcgacaactatcaatatgatgtggcctccacgtcagcatacaatcaaaacctcacgagctaggcctcatcgaattggcccaaagtcgttatattagttgtatttatcacatcagtgggcaagaaccctagcactataaatataagaaaactcattcatgcaaagggatagaacctcaatccttgagtgctcagacaaattccagggttcaaacacttgtgtaaatcataaggcttttctggtcttataaaaataatattgattagtggactaagactcattaaggccctaataacataaaattttagtttaattattcattgattattatttctttagttttattatatttattttgtttttgaaattctgagtttataataggcaagtgccttaaaggttacagagtacaaagagagttgaacagctctaacagaattctaacaaatgcctaaaaacttggagagaatcagctgaagttgagctagtctaattaactgtcaactcacttaactaaatcactctcctccaagtcactctcatcagttggcgcatcactatgctcaatagttacaatacgtcaagtttagttgtattctgtttattaagttttggatttatggtgtaagtatataaagtttttttcattaaggtttttgtaatcggtttgttcgcaaggttttaagacctgcaatcaactcctctgtccataactttgttgttgagataaggaattttacgatcattaacattgaataactccaagtctccaaccacgagctttgccttgtgtttaaaaattcaatgtaaacactagcactatcaactatatgtaatgcctttaaagatcaagtgacatcgttgctgctgtggctatttttgatgaatttgataataaggctagtcaatttaattaatgggattgttttttcagtactttgcgattttatcaaaagttgttgctcaaggctcgtctaaattttataatatattggagataatcccattccccaccctatttttcatgcatccttgtactagtttaaacgtttgattcagtgaaatgataaaaacaggcatttaaatagatgttcatatttagaaaaagccattgctcactgccaaataaaacaataaaaaataatcaattccagaaaattcagtattagattagatccttcatcaaatcccttacagctactgcagttgcagtgattcatttcaattcaataaatttcatttcatttattacgtaatttgtagatactgcattagccaggctaagttatccctcatttttttatttgtaaagcaaacaaaatcattgcagtacttcagtcataaaaacagagccacatacaaaagcaaacaaatgtggaaaactttgagtccagcattctccaaaacatgaacgtcctatttgaatacgctatgaatcattgagacgataaggttactcatcatcttcatctgcatttgcaattataaagcaaaaatcaaacagtggattatgaatcagattgtataacaaagtaataataattagtgtcaatattattttagatcatgtgttttgcaattattactgataaaacttctgttttgtcaaatgacaaatcattatattttccaaaatagtgcaaaataatagttcaattttgaatatttcgcttttagtataactaaacagaaaccagccataacatctcccgatcatattatgtattattaagttttattttgacacaaaatgaactcagggtactattttgtactatttaaaaatacaaggttcgatttgttatttaacaaaataaaaagtctaatcagtaatttttgcaaaacacagaatcaaaaaaatgtaatcaatatagtcataacacttttaggtggcgtttgattaaaggtaatgaaatagaatagaatggaaaggaaactatttttatttggttgcatttaaaatcattagaatacaattttgatggaatggtctttccatcattttggtggaatgactattccatcattttgatggaatgactattccattttgaaatggaaggaaagacaatttgaatgcaagatttgaaaaaattaataaattttttcatcaatttttttttatgcactataaattttattccattccatttctattccaattcctaattccattcctattcttatattttcattcctcccaagttcctcctaaaatgtgaaccaaaaggaattataaatcggattgtatagcagagtaaagttaataataattgtagatagctctccgtaagtg

SEQ ID NO: 217984 - DNA, 12160 bp, Cannabis indica
acaattcaaagggtacaccatcatgtagattccaagagaggaaaatgcaactacaaatgctcttgtatggttagcaagcaatacagtgacaaataagttaaactttgtacttatctagtttctaaagaacctgagcattacctacatagaagaaattgagatgcttgatattactcccaactagatgaccccaaatacaaccttccttagcacagatgagctaccaagtgatagaaataaagctcaaaaaatgtgaaggaaagctatgtggtacctaattatggagaggcttatccatgcctttttctaacatgtgttactaaagaagaggctacacagctattaactgaagttaacgaagggttttgtggcaatcacactaggggcagagcttgtctaagaaaatattaaggcaagttacttctggctgataatgatcaaagattccaaagcttatctgaaaaaaatgtgataagtgtcaaaggttttctaaggttctttgggcaccgcccaatgagttaatacatatacaaaacttgtggccatttgtgatttggggaataaacctgatcgggcagctacccaaaggaaaagttggagtgcagtatgcagtggtggctatttagtactttaaaaagtgggcagagcctgaatcactagcaacaatcacttccaagagagtgttagattttgtggtaaaaaatatatgtcgatttggtcatcctcagaaaattggtttagataatgggaagcaattcgatagccaaatgtgcatagacttctacatcaagtaaggaatcatcaaaagcttcttggcagttgcacaccatcaagctaatggccaagtcaaagtagttaataaaactctcaaggacaccttgaagaaaaggctagaagaagctaagggcaattggcctaaagaactgctcaaagtactttggtcgtacaaaaccacagaaagaacttccatcgggcaaacccaattttctatggcctatgactatgaagcaatgttgcttgtggaatggatcctccatcccacataaatatggcatactgccaggaaacaaaccatgcactttaacagaatcacttgatgaaattgaagagcaaagggacatggcaaacctaaagttaaaagccaatcaacaaaagatagctcgatacttcaacaaacaagtgagagggagaaagttctttgtaggagatatggtgctcagactagtattcttaaactccaaagatagtgcagtagacgtgcttgggcccaattcggaaggcctatatcaggtaaccaaagtcacagagttaggagcctataagctggtcagtataatgagaacatggagctgattttggtaccaaggtactaaaatggtgagattttaagaaaatactaccaatgaaacatcactcctaattgatggccttatgtacggttacgtgtgaaggtagactgaatattcagtactaaggtctgttgaccactttcaaagtactttttatttttatgttttcttttcaattaaagctaaagatctatttagatcatgtaaacaactttaatcttcaatagatgtaagttacttttaagtaaccacacatactgatcagtaaatgaaataagtgatttttatcattcaaattgtgtttattttacttacaatatattatgattaatttcaacaaatacaaaattacttaacatgcacacatggagaccacccaaaagaaagagaccgaatagacaaaaaaaagtaaaagtgaatagtaagtgaccaatagtcaaaagtctgcttggtcacttgggggcacctatatccatacagcattaaagagtaacagcaaaaatttcaagaaaattaaaggtgttcaaattaaaaagcaaggcaaaaagcatgaattaagtttgggcttaaaggatgcccgattagccatttgtcttaaaaaaaacaaagataattgtcgcttggtcaatgtttgtctaaaaaataaagaaccaaaggacgcacaactattcaaaagtaaagatggattaaaaatccatagggtttactgggttgagagtaattatgggtagcatcctagtcggccacaaagaagtttggatccaaagccactagcacgaaataagcttcagcctcagatgattttgttggcacattaggcttttatctcctctacccgagcaaacataaatgccttgtcatattttagataatcaaagttagccctaggattagctgctcaaaactcatagaagaccaccgtgtcagcatttataagattatcaatttctttgtcagcttcgacttaggcggcttctagctcacaaatctgctctttgtgttttttgagcagagtctagaacccttcctttttagtcttcaacccattgttggccttggtaacctcctcaaggtcgttttccagctgggtagttgatggagtgttagctatctactgggtcaactcctcgaccttctttgtctgctcgagaaaacctttgatggcttgctccatggccgtctccttctcagataatatcttttgaactttcccaagttcatctttgtttgtaatggattgcttatcaatgacctttgtccaagaatagatgtagcctacttgaaaattcagttgaagaaaaaataagaccgaattagttagatgacacgaaataaatttgttagacataaaatacgacaagtaaaagacaataccttggtgcactctttaagaaacttccccatcaagaagttagtcataagaatgtctcctcccccagtatctccccagcctccgcacggtacctttcgtgatatttgttgcaaatgtcctcaacacgtttcagctctgcgggcaccgtggccatagtcttgtcctttgaattttgggatgatggggcaggagagaggggcagacttttcaagctcttaatttccaaggaattagttccaactgtctcctgttcaaagttgataacaactaccacttctcaagagtcctttgaaaagaccttagggtcagttttttgtaccttgttttggctttccttacccgaggtattgaccaacttccatttgtacaaagattttagtttgttgaacacatctgcacaaaaaaagagaaaagacttggtcagaatgttggtcaaggttacaaaatgacgcacaacctattaataatgtctacactgaacttctagaggagcaccctcctaaacaagaagtgaaggaccatgatcatcatctgaggattcttctataatttcttcaatgatcacttttcccttcccttcgacatgctgggccaccctttgtataggttcttcctcaagatccctaagacgaataaattcttccatagatgaagccttgaccctgctggctttggtctttttcatcttggaagaggttgacttgacatgcactaagggcttattgaggaatgcactacctagccttggatagagcctatacttgagaaaattcttaggagatgtcaacaaaaaaatatgtcaagcagaatcaaacaaattcaagatggcatgggccctatctcttaggacaagtgtaaaagcaagccaaacatatgttttagcacgttgaaaggccaaaaatttagtcttcatcttggtgactatgtaatagtcttggaggaaaccaccaatttttttgacacacttcttgtttgtgctgatcggccattaacattccagtagaaaaaattaaaaatatcatgagcattcatgatgtggagaggactttagttcaaagaactagtttatattatgagcagatggttccccccatccttgctacgcatagaatacaaacatagtagccaattatttaattcactttggtgtgaactagtcagggatatttagtaattagccaacttcacaaagtacaagtgaaatggcaagaaggaaccttactcagcatgtgggtcagaccatgcgcacatcccctcacccagattgttagccagctgtccctcaaagggaagaaatatgtgcatgtcaccaagaggggcctttctatcaaaatgattaaggtagatggcgaagagacccacattgggccatccacctcctgaggctttgatggtttagcctcatcaaaatctttgtccgtataatggacgcctagggttataggacgaccctgaaagtaaaaaggtcatttgtcctctgaatagccaccaacaccttcaaaaggcatgaaggcatacctatgattttcaccttgcccttctattttttggacttctgggtcccttacgggcatgacgtcttttgcctcagagcttgctttgcctagttcgtgtcgcctatccattaattgaccgaactcccaatcgtccggaccaattttttagacaatttgtttggcacgagcaacgtttcttaagaagaatggatagctcgatgaagggtgatctacaatagttataataatttttgccatgaccctaggctgtagtgaaggttctgattccacttctagtaaaatgtttgggatgcatgcatggacaacgtacgtccaattaaagggcaagtattgcctccaacctatgttatactcctagatgaatctctcatacacgctgcctccgatctattctggataaaaacgatacttcccactcttcaaagctagaggaagagttaccatcaaaagaagactttgcatgggcctttggttgatcctcaaaaagtagttgtagcagatcatcgtcaatgcgattattacctccccaatagtcatccagattcatctacaaaagtaaaagggggaggtaagtaccgaatagaagtgaagagttcaaatagaaataatccatttattctgtctggatgaatgactggatcaagaaaaagaactccatccaaatgacaaagaacttggtttaaagatgtttaaggacagggtagaacccagaagttgccaaaatgatgtacaggccttgattcaacgaatcctcttaggaaaaatatgtatatgttcaataattttgcaattaaaccctgcgcaagtacattcaaccacgataatttatgaaaatatgaattttaattcaaatagtgaagaacataaatggcataaacccagggttttcccagaaaagtgtgtaaagttgaatgtaaggaagtaaagagaaaatgtacataaaatagatacttactcattgttggagctactggttggaatgggcaaagccaagagtgaagtcaaaattgggtacttgaagtctccaaatatacgcttgaaaatcacagaaaatgcaaaatctatatgatattatgaaagttcgaaaggagtaaaaatgccaaatgaacctttcttttttttttaataagagctttaggggtataaccataattttggcacccaaattgaattcttgtttccccctaaaaatttgtaatgagtactcttgataagtacagtcgtcaacgcatgcccctagggcacgataatctatattagagcattaaatccctcaaatatttgaaaagatgcctcaaaagatttgaagtgacatccttcttttccatgcttatccatctaacaagtgtcaccgcattcacctagtatgtgggctgggcaagtccacacaccaaccaaaaagtttccacatggacttgggggggtaaatgtatcctgaatcttgttcaagtgacataacatgttttttcggtgacacgtatcatgttatcaagacctgagtagaataaatgttcttttgagttcctgcccaggataaacaacttgctcgatgcaacaatgaaataataaggtaaaatgttccgtatagagtaaacagagttaatttggacgacacgaagcaattagcgctttgtgtggttcgaccagggaaaaatgtgtgaagagaactcattaaagtcagttcccattttatatgtaatcaaatccctattttagagtatttccatatgtaattatcacaatttaagaaagttattagttttctatttcatggcctgacaacttttaggaaactattttctattgtaattattcccaataaatacttgagccattccgttatttagagaagggaaatcatactttcaagagagttattaccctactcaaatatctgtaaaagctttcaagagagatcaagttattctttcttctcttctcacaagtgaaatacaactaaaaggtgagtaggctattacaaaataagtggggttgaatctctataaaatctcgtgttttcagtttatgattatcttttagacatgttatctgctttcctggcattggacacgtggactccaagtcagcattcaagacccatcagtgggaccctcatcaatgataaagtgggccaagcccacctggatatgcccttccaggagctatcttggttccgtactcgcagagtcttccaccttcgatggatcaagcctagaagacacttctggtatcatgaggccagaggggtaagatagtgccttcctgaaagacccttctagtttccctatttatttttgccaataaataaggaaatttcaactgtcagatcatgtcagaatatcgtatcatgattaaaggggaaacttcccataacaaacactatgcaattaatttagaataatcacccaccattagcggagatggtgttgacctgatcaacgtaactccaatttgcctagtcagcagatcgtattcttcatgggctggacatcatgagaaagcccaaagatattttttaattgtaaactcctcagtagagggaaaagggaaaaccctaatgtaatcatggccctcaccagaaccaaattcggtctttgtttcaccaatctcggtgccaaagcatgagatacgtgcgatccccaagaggtaactagtcaccaacaaggtcgtcaggacgaagactagaatctagacgctcccattgtagaggatgtagaatcaagagaaattagttttgaggacatcgaagttaacaccgatgatgcgccgaaggatatgcatgaagacgaccctcaagacaaagtcactgagaataatgttggggaaaaagccagcgtgacaaatcagaccccgtggtcatcatggcacaacaactgtaattgaccaaaaagaggttatctcagcaagatcaattcaatgagatattactttgtaagatgaccagaatggaggttgtaatgaccacattaactaagacggcacccgatgcacgagcccctccaacaataaatgcacctaaaagggtagatctgaaggagccccaaacttcaggcattcacaaggacaaaggcaaaggaatcgctcccgaagagccaaaggaaactccttccacgaagcagcccaagaagtctaaagtagctgaccaaccaaaatagaaaaggaaagcataccatgcttcagggcatggagaccaaaccaattctagaggcagagtcacacaaaaagacaaagctaatgctgggacacggaagcctgagtcttgaaagaaaacaccccttcttagtgattttagcaaccatgacaaggaggttgaagaagtgcatccgatatcggatgatagtggcaaaagccttttacaaatgatctccaaagaaaactggatgcttaaaatgaaaaagctaaagccaaaaaagcaagaccccatggaaacaatttgaagaatcacattaacgaccgcatttgcggaagagaatcctctaatgataagactcaacatcttgaatgtaaagttgaagagttgacaaagatcattgaaaagatctttaggaaacaaagtggtgtcgtatctgactctgaggaagaggatacagagccttctgtgaagagaattattcatgcaccattatcggagcattttaggatgccccagatggaattgtatgaaggacgaatggatccaagggaccatttatcgaaatacaatcacatcatgcaagtttccaaggccagtgatgatgttaaatgtttgtgtttttcattaacattaagtaagtccgtagaggactcatggaagaggttgtctccgagatcgatccacaattggagagacctacaagtaatgttcaagaaacagtttatagcggccaaggattatgatttggaagctagctccttgataagcgccaagcaacaacaaggagaaagtttgaagaagttcatccaacacatgatggacgtggttgccaagacaaaggttactgatgacatgaaaatggtggtccaacatcaggactaagactggatctttactatggggataactccaatgaaaagggcagataccttgagtgaattcttaacaagagctcaaggattcataaatctagaaaatgcttatgcccagacatatggtgtactccccgcacatcccaccaaaataacaaacacccaaccttgacaggtgacagctccatctacttaccgtctaccaactgcttttactactaccacaatatataaaccaagtacttccgtacaaccaactgtacaggctagtttctctgggcttggggctgcatagaccggatacaatgctgctcctaaacaaatgaaccaaaaattggaagctccagagtcaaatataacccactcgagaagtaaaaggagtatgaagggtccaaatcggagtgattctacgaagaagggtaaaactcaagaatcgaggtacactgagtacacaagtctcatggatactcaggagaatgtatataatgcaacatgtaacatggtacactataggaagcctccgccaatgtacaagggcagaaaacatagaagggacctaaataaaaagtgtgaatatcatggtgatattggtcacactaccaatgagtgtgactacttaaaggataaaatagaggggttggtacggaacagacacttgaccaattgggtaagaatcctagtcatctatccaggacaagaagttgcacatggacaactttttgttctcgaacaacagggagccataaatcctcctcagggagtaggccacccataaattcctagaatacaagctcctagtgcagaagcccttcaaggggcaccaaacgctccagcagcggcaatagtggtggcccccgatcttgaaaattcgtaccctcctagatctgcattactagctttaaatggtcatgtggaaattattttaggtggaccacatattcttaaaagcactcaaaatgcacagaagcagtatctgaatgaattgaaccaaggcgaagcttgtcattttgtacaatcacctgcccagcatcttaggatgatgaatttgcctatgactttcatagaagatgatacccgacatgtgcatttcccgcataatgatccgttagtgatagaagctcaaatagccagcaagagagtttctggaatcctaatggacaatggaagttctgtgaacatcatcttcaaaggagccttccatgccattggtctagtagaagccaatttgttaccctgtctaattcaactatagggtttcaattaagatacgttaattcccatggaaaagtacaacttttgatgactataaatggggaagtccctagaagcaacgtaatgtcctccttcaagtacaacacgttcgtgatagtcaactaccctactgcttatcataatatcttgggaagaccattcttaatgaatttcatagtggtgacatcaatccagcatctatgcttaaagttccccaactataccagaagcatagggaccatcaaaggagatcaatgaagtgtgtagagttgctacaacatttcaactagaatagtacttatggtcacagaaggtaataactttgaagccaaaacatcttctcatccagcactaggggtaatccggaagatgagcttgacccgcgaatcggcgtggagcgtgttatagaactaatggaggaagtggaagaggtctctatagatgacaaagatcccaccaaggtcatcctggtggggaagaacttgcctcctgtagtaaaagaacaagttgtctccacaatcaaggcaaataatgatgtcttggcctggagtcatggtgatattaatagtattagtcccaaggttatttaccatgcatcgaacatagatcccaacgctaaactagttcggaagaagcaaatacctttatatccagcaaggtcggaggaagcaaaaacagaagtggacaagttaacaaacgacttccttagggaagctctgtatcccgtatggcttgccaacccagtttttgtcccaaagcctaacagaacatggaggatgtgtatagattttacagacctaaacaaggcctgtcctaaagactgttttcctcttctacacatcagatggttgatgctacctcgggattttagttattgacctttatggatgcgtactccggctacaaccaaatgaaaatgcacgtagctgatcaggatcacaccagtttccaaactgaaaaaaggatctactactacaaggtcatgccattcagattgaagaatgctagagccacttatcagtgaatggtgaataagatgttcaagaatgccttggggaataatatggagctttacgttgacgacatgttagtaaatttgaagacgtttggaagccattaccaagatctataagaggcttttgccatcatccaagagaatagaatgaagttaaacccaaaccagtgcacctttaaagtttctttagggagattccttggttttatagtcagctctcgaggaatcaaggcaaactcagaaaaaatcaaagcctttatagacacgccctcacccaggaaacataaagatgtctagaagctgactggaagaataggagcacttagcagatttgtctccaaatccacatataactacatacaattattcaacgtactttgaggaaatcacaaatttgaaaggacaacagaatgtgagatagccttctagcagttgaaagaacatctagtgagggccccaatactgtccaaaccagtcgacagagaaccattatttttgtacctggcattgtctaatcatgccgtaagcgctgcactagtgagagaagaaggaaagttacaacttctagtatattacataagcaagatactgctgggtgtggagtctagatatcttatgattaaagaggtctcctttttcttattgataacttcacgaaagttaagaccgtactttcaggcccacaccataagggtactaactaaccaccctctctgtcaagtgttacaaaaactaaaatcatcgggaagactcctcaagtgggcaatggaattgagtcagtttgacatacaatatcagtccagagttttgattagaggtcaggccttagctgacttcattgtagagtgcactggataaagatgatcctaaaatgtcaacaccgaaaagagaagtttggagaatatacatcgatagttccaataggtctgccaaaaatggcaacacattggtcccaacgcgaggacaaagcttcttcgtcaactcaactctgtttataagaggagggacagctttgttccacctattataattggcaaactcggcattacacttggaggataaactggtggaaagctttttcatctcctcaacttcattaccatgccttttttggtagaactaatccatggcttataggcgagtttcgtcccctaccgttaaccataaagacctgaccagaagagtggaaggtgctagagataagggacgcagttcagtcctttccctacacagctgagttgaggtggctggaataattttaggcactgggggtggcacagaaggattctaattgttcttttaattccaagtgcttcacctaggcagtcttctgccatcaggagtgttagaccctttctgggactaagtatctattgtttgtcgcctcgagactgccaactgcaagaccttctctttggtctctacccttgcctttttgttggcaccaccatcaaatgaactggttcgcttcttattgatcactacaggcccgttgtagttcgagctgtcccctctagagctctctaaagaaacctgattcaaaggctccacgaatagggaaggtgttgggttttgtgccctaaataaaactcatttcgatataatcagatttacttattaataaagatcagaaataacattttatgttgca

SEQ ID NO: 217985 - DNA, 6387 bp, Cannabis indica
aataaataaaaaaaaaatgtttcatacgacctttagattctctgaaaaaaaaaattactgcaaccaaaaagcataatctagaaagtgtgaaactattaccgccagaaaggccgtatcgttccaaacagctctttcaaggcttctctttgctttgcttccgagaaatatgggctttgtccgaagggtttccaacaaattcatatctagaagtactttgttttccccagttgtatcattattgtaacgtgaacgagcggagcccttaagatcgtagacccttgatatatttctcttgaagaaaaggttctccatcaccatcaaatccatccttgtttcctttccacctttcatgtgtttactagtgacctgccaatgcaaatcaagaattaagagaaaaaaacaatctgatgtccaactaatctcatatatagccaccaatttacaaacacattaacaaaaaactaatacctgatatataccgagaattttggctagacaagtcggacttcccgagccaagggagtctgtcaggtatttaaaatatgcaggtgcaaattcttcaaaagaatccagctctgtctttgtgacttgctttacaatgaatctctcatccaatgatttggcaaaatacacattgcttttacccccttgtgcactccatcgcttgcagcggctcaatgatcgtacaaagtctacttcactaggacaacatttctttctaagagagtcgaacaattctgcaaagtagcatgtaacagaaaacttcactttgtcatctccaaatgagagcctcaaatgtggagattttttaaaatccgcaaataaggaactgatggatgacggagtatcttctgatccacttccataacgggtataatccaagtccatagagccaaaagattgccaggctgaaatagtggaagctgcagtattatctttgctgctctcatgctgactacaagatacctcatgatcatttgatttattagcaacccagtcatcatattctttggaactaagcgcatatgatattatactggtgggttcattatcataaacagcaacaactatatcactctggcacgtctggggtaacaacattcgtacaccttcagtcacatgggatgcagaagagataaatgaaggtgtggaactcaaaactatatttgacttctgagcctcctgaggaaatatttgggagtaagttctcattacgctaaccggatctctgatcatattcctgaaatctccggaggcgtggaaagatctaagagttgacacatgcaaagaagaaggaggcagtccttttcgaactctttcttgaactcttaaagcagaatcaaaagaatgatttcttgctgacatcgccagccttctaataggtacagtatcactttgacttacctgcctcacaataccagcttgaagcccactttgagcactcaagggaagttgatcagtacctgtccaagcagaatctattctctcagaaagagtagattcatgagaaggaaagctttcggaggaattcatatctttagaggtttttccatctgcaagtgtttcctcctgcttgtcatgatgacacaagttcagttcagagtcattagggatgcaaggctcactccgcggcgacaatacatcatttctagggaagtctaaccaacttaatgattcagacacatttatttcatgtccatattcaagcttgtcttccttacaaaatgaatcactaatcaactctactggatgaccaaataaatcaccttgggcagccctggaaaatgaattacttttgagaagagtatccagtgaataaaatcggcgatcccaaacatgtgaaccaattaggagagaacgccttaagcgatttagttccaaaacatctacagctacttggcccggttgtgaaatctccataaaagcaggttgcaaaatagcctgtttcaagtagcaaatgaaaagacaacaaatttgtgatatgaaggatgattgaaaattaaataactacaaaagcacaagtatttatgaattgtcaatttgaggacttgtcacaactatgctccatttccaacttacaatgtattcatttctttcttttttcacaagatctttcagctccaatatacagctttgtaaatccctagtgtcaaaggcttcatgtccaaaagatcgagttttatcttccataccatcgagtacatcagatatttcagcatacaaggtttccatttttcccatcaactgtgaatgtatttaattgttaggacagtcatcaacacactcacaaaagaattaaaccagttccgaaattagtagtctaaacaaaaaatgctaaaaagaaaaactctgattttcaaacctcagttgcctcttttctcgtccactccggatggacatagccattaaattcaagtaatgatggcggcaagcgtacagagagaatatctataggggaataccggaagaaagcaaccatacttccaaacctgttaattaaagtcttcaatatcaaaatcactatattacaaactattcttataaaattatgtattagcacttacccatagtagcgaagacaatccttttgcaacgaatgaccacaagttgcaatgcgattagcagttgcgtgatttgagaaactaagttccaaaaacttcccaaaagaaagtccccaagcagcatctgacataaccactctgcgattggctggtggaactccatctatatgagcacatctcaggcaacgatgccacatccagattttaccgtctcgttctccaggtagttttaaagaagaaagacgcctgacattaatcgtaagatttccctgctgatgggtatagcataagacatgggcttcagctgattctttgcaagacctacaatgcgatgtctgagaatagaaaaatagttaattggtcctttcaacccagagtcacaaaatatgaatagggaaacatgtaaacaattaccggatcaaacaagtcgtcacgaagatatctccctagaggcttgtcaaaacagccataaaacttaatgcgcataagtcgggagcgttcacaaacaattcctttaagtacacaatgactagaaaaagataccaatatgctttgatgactatcagcagctgagaagtactcacttgaaacctcattttcatctatcctttcagactttgtcagctcataaatctcttcaggttgtttctcgtcttgtggtaagtttaccattaaatcttgttgggaaaaatttctggcattggaaaagatcctggaatctgtgacataattggacgggttcaatgaagtgtttagaccaatattagattcaaaatcatcattgtacgcatctggtactatgttttccatggaaggagagtccacagcatcaactagcaaaggaaagtcattttctaggccaaaatgctcagacagagagccacatccttccaattcaggattgatatccaaaatttcctgatcatgagcagaaccctcagcaactgctacataattagctgaagcaattgaatcaaagttcacagaaaccgtaggatcagctgtttctttctcttgaatagcaattgactgtccttgtgccatcttcggcagggtagcaccctcatctgcaagaaaggaagtctcaagggataaatgataagcagcaaaaactgcatattgaacgacatgtttaaccttcttcagttcttcacgacttttgcccctcaacagaacctacacaagaagccccaacaacctagttagacgtaatgaaatatccagtctgcgagaatagtaaaatatagtgcagttcccgaataaatgaaacaaaaagtactggaaataaaatgtcagccaaagagggtagaaactacacaagcaccaaggaacattaccgtgcaacctaaacgtcttggacacccttcaaaaaacatcaaggtttttgttggcttcttgtttaactgattgctattctcatgttcttcagaaactttttccaagcgaaataattcacagtgccctaatcgagttgttgatatattatcaattgatggcgtgataagagcaccagtgcaccgagctatacgctccagcaaaggctttttaacattcagcactaacgaaatttccttcgtgagcaaataatcttgggcatatgaagaaacacttttttctactaacagaacatttggacggagagcttcaatctttgaaatgatagtcttcagatgctcattttcctgcacaaaacaattgctttaaaagtttatgataacatttcattatacgtagcttaaaaatcagcaaattatccggaaatacctgctgaagtaaagtatcaaaagaagccaactgatttggaactttctggtattccagtgctcctcctaaaataagtaacctagcatgtttgtattgtgaggtcatgcgcttgtgctttatgtttttggtacaaaccactccctttacaagggtgctgcatacacaacaacacggtaatattaagaatgcatccaggtatgagagatctaaaatgttgggatatcaaacatctcccgaatgcaaaagacatatatacctatcaactggacttcctgatgctatacatttgacctttacataatcaccaggatccatactgcctcctctgctagtatctggcttcacagaatttgcagcttgccatgcaactgttgtaactatgtcaagccaatcctcacttccattctcttggccaattttgataccttctccttgtagcagctgtgaaacaagagccctaaaatgcccctggaccacagctttaagaggctccttgttatcttcattaggtttctctttcgctggaaagatgctagaaagactaccacttgatgagaagaatgcacctgagtcaccaaaatcatcatcatcgtcatcatcataagcaaaagatccattctctgcctcatcattttcatcttcagggggagggggaaaccagagaagaccattattttcgaagtccagtggtctttgtgatctctcatattggttacgaaaaattgacaagtcatctgaacagtattctgtgttttctggatcctcatactctaacacgggcctttttaaaacaggctcttgaccaaaatgactatttcgagacacactttccaccttctgtacagaatgcccaactgaaaaattaatcctagaggggttctcaaaagaacttgatactacagacttagagctatatctaacactaacagtatttgaatctacatcggcattgtcatgacaatattcacttgaagggctaagaaggtgcttccccgaatcctctgcatcttcttcatcactcctgcattaataaagatagatttactgaggcaggcaatatattaaaaagaaaaaacgagaaacaacaatcaagacaaaccaaatcatcaaaaagtatatcatcgatatgacatgaaccaagaccgggagttataccagctttccatttatttatttaatgatttatttttatttatttaaaaaacaaaaaagaaaaaaaaacaagaaagagaaagaaagctttccatttataatttgtaacaccaattataaccgtacaaaacattgaaaatttggactttaaacagtttcatatggtttaataataaacatgtcatgtgtgaggaaatccaagagaaaaaccttcaaaatctgaagaaaaacatctaccaaaactacacccaacctgattaaaagcttacctactagacgaggtatgaacatatacaggagatggatgaccgctaaatgaggacataacctcacttgtaatggcatggggagaataaccataatcccgggcttcaagatatcgtgaaaagtgatcactctgaatcgattccgcatatgtagaacacttgattctttcaccgtgaaagcacggagatggtggttcagggctttcacggggagaagcagatgggtgtactttctcattgaatttgctcccaactacccctctcattcccgtctcagaacataacttgcagaacttcattacaccgctagattcaataacaagtgactcataatcagggatacatttcccacaaaaccacctaccacaactttggcaatggtatctcggagaatgactggagaagtttgtatggcattcacaacacatattgttaccgttttcgggcatttcaaattcgccggaaaaacgtatatcgcttgcttctcggtagagccaagacttaacctttactattagatctaatagtgaagtatcaggtattcccatagaatgtaataacccaaccaagaattggaaccacctcctcctcccaaactttttttttcactactctttctaaatttagtatttttttttaacttt

SEQ ID NO: 217986 - DNA, 7525 bp, Cannabis indica
tttgttttttttttgttttttaattgttttcgtttagatttaggtgtgtaatttgaaacagtattttgaagtataaactaatccggtttaacgcttcaccagtcacctttattggctattattatctgttcaatttccgttattgagctttttaagaaattaatgtcaaaactattgcataccaaaaagcttaaaacaaaaatctggtgttattcttcgtagattaagctttaattttagtttttcaatcagaaatttattttagtttgttttgtcggtgaaaccgcccattaatatcatattgtttatctgaaaaaatatttgaattaagactttatgttattgaaatttttcaccatggcgggctagtttgttctttgtagattacattaaattggttttattaattgatttcaatcacactaaaacacattgttttttttgttatattatgtttttgaagaggatagaagatatttctaataatttatatttaaaaaacttaatgaaagctatttttttataagttatataactaatacaaagttaatttggaagggaaaaaaagaaaggtgaacaactaatctgacatcgtgtacgtagatggtgtatgtactttcggtcataaacagtgccgtactaaattcttgacgtgtatgattttttttttaataattcagtttataaaaatttatttatttatttatttatttattgttgttaaagtaaatcacatttatctcattgttaagaaatacaaatgctaaaagatttcaggtatcatatcatttttattcctatcatttttatcctaaaaaaaaaaaagattgcaggtatcatactactgattttggtataattcaatgttatttgtaagacatctcttgttgtgttgggaaaccaataatgcttaattgtaaagtagttcaacatgtgcaatatttcagtgtaatttgtaaatacacatcattaaagaaaatttagattgcttgtattttattcttttcaaaattaattatttacaatatggcagtcgtgtttgaagtgagatacaagaatgttacttttgattaaacatatatggaactcgggtcactttgcaaaaaagaaaaaaatatggaacttgggtttcttcaaaaagtaagttttgactggaaattttcaaaaggctttatatgccctattgtaaatctgttaaaagtagagacattctcattctcatttgaaaattaaatagccaatgcttttcaaattgtctactttagaacatttcagcataatgtaataaaaaaaaaattaattttcctactgtatatacaaaacaacaaaagaaagaaacaaaaaaaatcttctttgtaatgctttggtgggacacttttatgtggtaagttgatactccttgacttgattgctttgctttctagactccatccctggaaattgtccgatatcatgtccttccagtggttgaaactcggtgtgtaacccaagagcaaattcatcggggactccagggttctgaaaatagtctgcaatctgcaatttatttaagaattgaattggacaccaatggttaatcatccatgtttgtggtctcaagtcgcaactactagataaacaccataaataatcatatatcttcttggctcacggtcagactattatgttactgttctaatcaagcttaaatacaaggaaagaaagcctttgttaggccttaggataataaataaaaagggtaaacgggtaactgtaagggggtaggctatacgaattgagccgtagatataggagatgagattgaatgggaggtgtatggaaattgtgtagaattgagctttggctcttgggagagttgaggtctctcaaacaccagtccattgttcttatccctattctatcaactaatagcaatatcaaatctgtccaccattttctaactcaattatcttccatgttttggcctattttctagttctttattctattaatatgttctaagtaatttgggcagcagtaagttcttatcagaattgtgcttacatgattggctagagccattccgcttaaggctgctgactccatacttgagccaagaagccagtcaccacatatgccggctcttccgtaaggatcgaagatgcagggtataccaggtgtattagttgggagagctgcacccctgcagacagacagacatcaaaatataaggattcctatttttagaaaaccaaaagggaggggtacatagaagaaagacaagcactgtttttttatcgtgatcataatttgcatatcaataatcaaaatgcttacgattaatagttggatgtttgtaagaagatcgtatcaggaatacagataagattaccgggaagaaatgaaaataacttgatctttgagagttcatgtattatgtctgtgtctattctatggatattgggcaaaatgtagccactttaattgagtctgaattttacataaacgcaattaccaatagcctcatccaattcattatagtttgaaaatatgcagaagccaaagtcccaataaagtcatagtgatagcaatgcaaattataatgaattatccaactgtacttttagctgttatgttccttaccataattgcagtcgtgtatacgaaggtttctgaagtgagcctctggttaatcctagagcatcttcaacaccctcaagcattcctgcctttaccctctctgcagtagcatttggtatattttcctgatatcaaaacaatctctgtattattatcatatgaacttgattgtgtttggactatgtcatatcatctatttgagtttcatatatttaatgagttttaaatctagagttgaagttgctatatatgttgtaaccaacaggagaatgtatttgagtaaattaaaacctgcggaactttattgtgctttccataagctgcagtacttaagaaggtccaacagtcagggccatcactattagagcctagaagtttctttgtattatttgccatccatgagacagaatccacgccctttacaaatgcaccttcaaaagataatccatccctttcagagacaagaagaggatcatcgaatgctgcaaggagcgcccatatagagctcaattccaacctctgccaacattttgaacaacccaacaacaaagaagtgtaaaagaagggttattttatttaaccatggagaaaagaggggaaaaaaagagaataacatgaacatattttgcaccagatgaactcaattttaaggcctaccttcatctgctttgcaattagtggtaaaccagataatgcaagcaagcgatttgcacatttgcctgtgaatgaaacaaaagtgatgattccaaaagaaacataaatggtaagtgtgagataatgaaatgaatccacaatgaggaacagtttaccctaccattatgagcaataacaattgcatcaaacttccccttaggctttccattctcactcaagtaccacatcccattataaggttcgagtttacttatccagcagggtctcattacatcaaccatgctggtctgcaccaatagttgacatcagaatgagctacaaaattatgggttctgaacaataacaagacaaaactagatttaaatccacttcacctgggacaatattgagtcagcaaggaaacgcatgccattggtggctacatattttggaggagaagaagtaagtggaagaaattgacctccatgttcaagctctcccactgtaccctgccattgttgaacaagacctccatctgaccaaccctgaaccagctcagcaaaccggggatcgctcacagagaagaattgagccgcatggtcaaaaattagtggctgaggatcaataactctggttcccattcttcctcctagaccatgaaccccctagataccaaaccaatatgtgaaattctgatgaaaacccgatcaccaagcccagaaactgacagcaatagagttttagacactaagtcaagaatatatatatataactaatactatgcctccttaataaaaaatttagtcacacgagcgaaaaatcatgcaaaaaatgaaaccaagataaaggctttcaaatttcaacaacattggctgcaaactctgcatttgaagttgtaaatttctaatacagtacattctatagtgttgcataaacataagtcgacattcacaaaagacccaaatactccaaaagctagaatcatcctaaaactaaaaatcagaactagacaatccccaaaatgaggaaattcatagaaaacacatataagacactagaattaaagaaagtcccgaaccgtgtcgaatacagtagagcgtacaccgcgtttctccaaatttagagcacaaaggagaccggccatgcctccaccgatgattccaacaactgggtcatcaggaacgggagtactaaaggtgacctgctcttgtctgagtgtcttcttgagaatagaccttctggaggtaccgtaggctgatttttttcggaatttggaggtgggttttttgccatccatgggtggtggctttctgggtttgggttcggatggggaactgcatgttgtagttggagaggttctgcgaagcgtgtgaatgaaggtgggttttgatgagagtgttgcagggtttaagggttggagaaagagagaggcagtaagattgaagtgagcggagcagagcataactttttcttttttgaattctgagttgagagagaacaaagattgcttgggctcagcttcagaaatttggagattaaagctcagaagcttagaagtctttgtcgatgttcttactacttgctgcaagtttacgtactatgaatggatagaacatgctctttcttggttttaaatgggaaattatatgagactttcaaataacactaatttttttatttgaaaaaaaaaaaagaaaagaaatcactaaagtataaaaaataaaataattgtaaaagtaggtcattaaataatacaaatattgtactaacatgaaattcataataatattccaatacaatacaaaaaatggaaagattggcactttacattgaagttgtatataaattttcatcacgtattcagaacgaaattagttaaattattatgattgttcaactacttaaatatttaagttatttttgtgacagtgaaaatactttctattgctttcaaaaaaaaaaaatactttatattcataattttatgtaaccatttattctattgttaagtatctatagtgttaatatttattataatttaatactttcgccgtaaataaaattataatttagtacttttttccataaatattctttaaattaggtactttcactacaaatattgttcttttcattaggtataactacaacaaaaacagattttagcgttattttacaacgtccaattctaattgaggaatcgatgttattgcttgtaggttgtcaatatcgtcaataataaatcaacgctatagttttccaataactcaattgtatacctaaacgccaatatcacaaccaacgctaaatacatagcaaattattaatttgtctaatatgaagctacaaattttagcgtcaattatacggtagctaattaggttttaacgtcatttataaattatcgctaatgggctaacttgaaaaatatacatagaaaaataaaaggaggtcatataatcactaactaaaaatcccaactcattctctccctctcattctcttaggcgccacctcattcttctcaatactataagggtaaatgagatgagagagtaagtcaataatgaaatggcatatataaaagggcagcataaatatctaactttaacctttaattctaattgtaaataaatttttaagtttaattttttatgataataatacctaaattataattttagaatttttgtaggtagctaattattaagtgttaagtaaattgtcacgtggtaatctctgattaatctaagttattaatttttttttttaaaaaaaatagtttaaatatactaataaaaaaatgagatataaataataacataacttagttacctacagaattctagaaatataacttagttattaccgtaaaaaattaaacttaagaatttatttacaactgaaagttaaacttaaatatttatgacgtgaattactttatatagaacctatattacaactaatacaactcctttgactttcaatcattattatccaatttggtttcatcgagtttatttggtaggaaaaagttattctatacatttgaactcaatagatccaaatttaataagtgtcaatacatataaaaaacataaaaaaatatatatatttattttttttttatttttttaattatattttacataatttttataaaattaaagaaaaaaattgggagccatgacaccctcggcccacgtatgccattgtaaaataaataaaaaaaaattggaaaagcttatttagacaacgtataaaataaacatataaatgcaaaactaataagcgttttattttgtgcctatggcactttcattaatcaaaaataaataaataaaaataagcgttttattttgcaaataactacgttttttattttttttatatgaaaattagaatatttgtcaccaaaatatcaaagttattatgtttatagcatttaagttattttttaaaggcaaaaatatcatttcgtcaatgttttggtgtcatttgtttctatcgttaagtttgtttgcgacgcaacaatataaatatactactagaaaaaaataattaggcatcgatctataaccgactttattgaaattagtgttagttccgcaaccaatgcctattctcgacgccaatggtcttcgcattagtatcagtttggtctagttagtaaccgactttgctaataactaacgttataaagctcattaatatcaatttataaatgaccttgtggacctcattagtgtcgattataaagtgacctaaatacaagtattggcgacagttatacaatgttgctaataaaaaaaacaaattcactttcaaacaacactaactcgaaaatacaaaatcaccacctctgattctattttttgtattacaacaaacaagatctgatcaatatcatcacatagaacctacacaaaacatatataatttaatagatttataatcctaagacaaattaataaaaaaaaaatactaaatctaaatatgaaaaataaaatgagtatagtagaatgagtaataacttgttgtgtggtaggtgccgtgagacaaagagagcacaaccgagaacaagaagagatggagttgtcgtgacctagagctacactaacaagagagaagttaaaaaactgtatttttgcaaatgccaataattatactaaatttcaataaaaaaaaaatacgactgtaacagtctgcaacagcagaatgtaattctatcactgtagaatacagttttgcagaaacaaaccagaaataaata

SEQ ID NO: 217987 - DNA, 7661 bp, Cannabis indica
aattaaaaaaaaagttatcaaaaattaagctcagggtcctatttttataattttagaaaatacagggtcaattttgtcatttaataaaacacagggtccaatatgtaacttttgcaaaacacaaagttcaaaatggtatttaccctaaagttatttatttatttgctagctaatttttttatatatttttatttgttaaagagggtgtggaaaagtattatatttcttttgaaataataaaaaatcctaaagttgtttttttaattaaaaatttatggtaattttgtaccaaaaattcaattatttattttggaggaaaatatttaaaaaaaggtaaggatagaagaaaaaaaaaagagcttccttttccttaaaaaaaaaaaaaactttagacaacataaagtagtggaaatgaaaaggacaaaaacagtttgtatcatcattcattatgatcaaaattgatcatgaaatgaaagaaaacaattggttcacacagataagagtctcatccaatccaaccaaacaattaatttgcgtggctaaaatttaatatagctataaaagaaagtgacaaacaacaatggcttctttcttttttttctctctctctttcctaaactcccatcatcatcatcaccaccatcaaaattgtggctactgttaaaccaatatggcttcctcttctaacatctctctcccaacttttaagtcttactatttccatggtggaaacttcctatctaatcgtcccaataagcttggtttcattccttacaaaccccaacaacaacaactactaagaccatgtgccaaattcaacctctccgaaattcttggaggaagaggactctgcaatggcgaagagggtctgcaacaagagctgagaaagaatgttgaagacataacaactcaaacagatgacaacaaggaagaagaaaaacaagagagcactgttatttcttcggtaccagaagaaggtttcgataaggagttaatgggactcactggagggtttcctggtggtgaaaagggtttaaagagttttattgagaaaaacccgcctccaaaaaagctttcggttgaaaataaaacacaagctataagcttaaagaaatcgaaagcacctgatatgccgatgttactccctggaatgattgccattgtgagtaaccaaaatagtccttactacatgtactgtggtattgttcagaggatcactgatggaaaagctggagttcttttcgagggaggaaactgggatcggttgattacttttcgcctggaggagttacagcgcagagacaagggacctccggggaaaaatcccaagtctgctatccttgaacctctgctccaaaaggattcagagtgattcttgtttaagtttaacaatcaatcaaatgttatgtaaatttttgtactgaatgtgcagtttcatatttatcaaaataaaataaataaaccagtgcaagcaaactctcaattatatttatatcaatcaatagacagatacataagagtatatcatggttttgagaatagaatgcaaaatcacatcttttgtcataaatttcaattatgaattgttacaaaagatcaactttgataccctgtaaaatggttattaatactcaatagaatacattgcaaccttgaagctccatcatatcatgacatcagatcagatcagatgcatccacccaactgccaaaagaaaattataaaaatgagtaaatgaattgcagatagtaaagaagacaaagtaacaaacacaaaacgattgatttcgtttccaagtttaagctcacatcaattttatgaagccggatgcaaactcaacccaagaaaaaaagtttctggtgaatatattagataagagaagaagtaatttttaatcttctgatcccaattgatattcaacctattcatctacctcaaaaaacaagggaaatacatttgtttaactactttattggtggaagtgtaagcttaactatactaaacatttcatcaacaagaaataattggtatcagcatcaccgatcaattttaatggaaaatggaaatttatgaaaatatccaagcaagtttcacataccagaacagcctcaatctcatcattggacaccggtgtccgtttgggctgaagtgaagctttccctcccaaacttgttgaagccttagaacttgagaagaaagtgaaagcagcagttttagttggtgcttgagtctcagatgcagaacctgaaaattaatcctcaatggttggatgacatgtgtgttggtacttaacgatctctcttatgtaagaaaaaaacagatccaaaagttgatatggaaggcaagaaacataaaatctaaatcaataaatcaaagaccaaactagatcagttaaacaaggcaccatgatatagattttgtatcctaaacagttcatagaaacaaaatatgattccttagcagttgcagaatctcaatactatgattctttgagtctaaagatttgatgacacaacaacaaaaaagaaaaatatgagaacaatacaaaaataatattagtgtaattcatggccatactatcaagtaattttacacttaaatcttattgttcttagcttatgaattatctaaatgattttattcttatcattttgctaatgtcaaaattcatgagaagcagaaaactcttaaaagttgggtaatttctgaattaaacctaaaaattatgagttgggaatttcagcctttcgaaaatgaactgaaaaatctgagatttttggcactaacccctttttacaaacagaaaattcttaagacttcaaatctcaccttacattctcaatgcaaaagaaatactttcacaactctttgagactattaaatatttgggttcgttaaaagacctgatttttactaattttcattctcaaaagctatgctaattcgaataaacagtatgaaaaaacataaaaaagaacaatttaggtcaaaacaagagaagaaagtcgatcaaagtcaacaaaaagatacaaagaaaattgattgattgagctaagaagttgaaatgaaatagttcaccagatggttttggatgtctttggggaaatttgattcgaggaatatacttcatcgcttgagctcctcccatctcttcttcttcttctctttctctctcttcttcgtctagactgaggaagacgacgatttcagagattatcaatacactgttattcggtgcacactacttatggtggacccaatttccaacctatctcattctcacccgcacatgttattcatctgtattcgggtcgggtcgggtcgggatttcctaagggtcaccgtcagaaacgactattaaaaaaagaagttgaaaacgacggaagtattggaaaacgacataaaggtaagtaaaggttaaactttggtaactataatttgattttttaagatttgttaaaaaatggcattagaaattttttatttatattttataaaatggaatatagagtaataatgatttatattgtaataattgcataaatatattgatgaaaattttgtttacagtgggttaagtattctgtttaaaaagtaaaaagttagtaatccgtatgattattccccttaaaatagggaagaaaaaattaaaaaaaaatataaattctcatatttttcaaatagtttatttattttcatattttactttcttttggccattaatttcaataagggtatgtttataaatctcttaattatttgattcaaattataagccacataaggagacaattaccaactatgacttatcatcatgagtaccaccacctctttcaaactatgaaacgacaacgtttccaaacttaatggaaatctaacactaacatcgtataagtgttcaataattatcttttgtgagtcattaagatgttcttagtggattatatatttaatgttaaagaaagtataggagagagataagtggattttttttttttttgaagaagaagtggatttttcttttagtaatgagacaagtttaaaaaatacaaaaatttattaataattaacgattaatatagtgatttcacaaaaaaaaaaataataattctagtgatttcacaataaatcaagttaatcaactagtctttttcaatttctatcttaattgaaatacaccatttacataaacaaggattaaagctctatccacttgtgtaaaataaaattaaccttattgaagtaaaaatatttttgtcaatacataacttattcttattactattctaaaaataaatcaaacatcgtaacattattattacaatttatgaccatctccgttactattaccattccattacaccaaacgccaccataatataaaactgataaataattcaaagtcacagtatcaaactctcattcagaagcaaaatgtttcaatcattaatttaaaatctcatggaactaacaagattacatgacgattttatagtgttcacactcatatgaccgaaacagtttccatagattttgaattcctatcaagtccttagcttcttttttacctgcacataaaaatggacccgcaacataactaaggttggaacgaaacagaatacgagccagtgtttggatctttgacggttttgaagttgtcgatgctcattccaaagcgacccaacaaagagtttcccatttcttttagcttccctgttcagaaggagcaatttatgtcttgatttagtcacaaaataagaatttgagaaaagtgtaaataaacatatagtaaattttatgtatgaaagcaaatttccttcattcatttcgtgaacaggcagtggcagtaacagcttacgagctcgatgagttatagtaagttagtgagtgtttggtcattccatggtttggtttgtcatcaaaaaatggaataacaatcccattactcattgggaaccgccattccgaaactaaattgaaacttaagttaaaattaccgtctcactattctacttttctatttcagaagtaaaatgtctgattcccaatatcaaacccaacaaaataatttaattcctagatgtttaaatcttttcaagttgtgaacactatcctaaattttatatgtttataaaatatgcttttagaatattttacgccttctttagatgaaggcgtgttaacttcatctaaagaacttgtaaagtattctaccccttcatctaaataactcgtaaaatattctaacccattagaggaaaataaaaaaataggatgaactaataggtatttcacttattttaccaatcatctcttctttcattttttctcgtttggcttcagctagtggctccaaacgacgaattgctttcctgacttggtcatttgtaggatccagctccaagatttttttcatatctaggagaaaacgggaatgaaagaatgcaaaattagcagagcacaagactattcatacaactttaatatcttttcatcatataaaagaattgtatataatttaacagtgaaatagaattgagaacatccatgcacagtttaacaacagagaatcaaatccgtactcaccagccatagcctcctcaaaatgttcaagcttctcatgagcctctcctcttcttaacagagcttttatatatgatggatttaattccaatgcttttgtgcattctttgattgtttcctcatattttccctatgatacagtaatgaaatatccattattcataagaaaacaaaaaaggtataaacaatatcaagtgacaaaaaggtagcaaagattctccatattaagccacaaaactaagaccaaaataaaaatggttttaacatcccaccaattctctaattctaagctatagctaatctctgaccctgttatgcttacaatataccaaaaattaattctactatgcactaatctaacatattaataaatataaaacaaaaaatattgatgaaaaaacagatagaatgtacaaattaggtaaataaacatataaataaagcatgaaaacaaaccagcttcaaatagcatattccacggtttgaatggcacgtagaacgtatttccacagatgaagtcatctcgggtgcaagttgtaaagcatattcatattttgatagtgcctcctcaaattgcccactactgtagagttgattgccttccaatttagcatcattcgcttgtgctaaggctttctggtttgacatttgaacaaaacgaaaaggacaatatataattattcagaaatcatcatagcctaaaattgggctaactaacagaactgaaagttcaatagatcaaaagtgtagctttaagcaagtgatagagaaattcttctcactttaaggagtatcattagataccaggttagcataacaaagcaaaagaatgaaagataattactttttcatttgaaacaatcttaattttaaacttgatcaacattagagataagtaagagaattatcaatcaggcttggtctccagagacatgtatcccaaaaaggtgtccagcattatatccttatatctaacatggttcaacaaacccgattttttctactggatcttacgtagcctgttcatacatatgacatgatcgagtctgatcatagaaaaaaaaaactattctcttccaacgaaccaccttaacctctatatggaactttcatatgatgaaagttccacttgaatatagaaataatttgatcttaatgtacaatcaacctcatgttgtgtttgtagacccttatcatttgttaggttcccctttggtattatcttgatgttgtactgcaaaaaaacactctctaacatagtgaatttctctcctatgcccgtggtttttctcctttggagtttccatataaaccagtgtgtgattttaattttcttgttcatcttctattgctatattttctacaccctatgagctaattgatcaaacttaatgtgaaacaatgttgtacccctaaatttactcatgctcagacattggaatagtgtcaaagtcatcaaaacctaaaatgcattataacaatttcttcaagcacattctacacactattaaaaatcctatttttcaattacacaaaaattaggggaaaacacgaaaaaatgtattactgctcttagaactttttaatttcaatcatttgaaaatcatgtttagaaagacaaacctgattaagctcatcgtcatcattatcattatcaataggggaaacaacttgttcttggtggtgattctggggttggcgatggtggtggtgttcgtcgtcatcgctgccaccgaattcgccatcgctggcggtctcgaagccgtcgtcgtggttagggtggttttgggaagaagagggttttggatttgggggagtggaaacgaggtcttcgttctcgtctacttcgattctcaccatttctgtaaagcttcaaaagtttaggaagtctctacccaaaccaataaataaataattttttttttttgaacatatatataaataaaattaaaggataattatttcgatttttttacctgaattaaatcattccctctaaattttgaacattattaatttttttttttttaattttacactttaaaataattttttatatatatatttttatgtaaatt

SEQ ID NO: 217988 - DNA, 3545 bp, Cannabis indica
aatttcgtaaatacatacatattacaaggagttgaataaacactggagtatggagtaccaaagtagaatccctccaaaacacaatgtagaccagaaaaaacatactgaactttgaagatggaaatcatccaaaatataatgagcacaaaaaggaacatgaaatggtacatcaacaagtaaacaattttgaaaaaaacaagtaaacaatttattttcaaaaaaaaaaacaagtaaacaattttttttttttgtttatgtcttttagactctatttttactattgaacccaatcaccataagaaagagtaaacggaaataaaagggaagatccaggaggcccttgccagcttctctactctctcctctaattctacagggagctcccactgaaagccagtctttgaaggtgaaatcgcctttcattgccgacaatgccagagattagaaagaatttctatttacaacaaatggttcaattggaatacatgagaagacaccatcttctgttaccaaggccacacaacatagtttctattactacaagttttaacccagttcatcaaagggaacaagaacgaaacggaacaacattttcaacaacttagaaaacacattagaaatacaactgcctacaatttgtggcatctatatcagatggacagtatgggcacttgaaagttctcgtactgttctttgacatcttggttatagattgcttgcaaagcacatgaccacatgacatcaacattgacggattatcttcggtggattgctccttagagactggacatacaaaaatagaatggaactgaaactccttgtccagctcaaccggcacgggcaactgcttcatagattgccattccagcttctttcctgtcattacagtcatgaacttcagaagagggggtagcgcctggccccctgctgatattgttacagtcaatggactttcacaagactgcccctgaagattgcagaactgcctagttagctcctcggcaactttttcccaattagttggtgataataactgcgcgtatggtgaacgatcaagccttccagtccacaagatacaaatcacaagcttttgaatttcagccatatgatcagaagcaaatgaagaaaggtaagttctagcatactggagagcttcatctctgctttggttttgcagtatttctatgaattgcaggctgtgaagtttcagtaataggtctgagccactttgtttgagtttatcagagttggcagcagcccaattcagcgctaggctgtacattccgacatttcatggcatcaagtatctgaaacatttcctgaaatagtaatttcattgagcgcgctgattctggttccttggtctcttccacaaaacagtcaccaacctcaaataagcccatgcctgtagaaatgactggctattatctcattaactgtgtgagtatcaaattcaacgtttctataagccttcgatatatctggactgaaggattttttcaagaagctttggatacttgctggctgcagcattcacttctttatttgtgctttccagctgacttagtggggccatttcttttaacttgattttaagttcagcaagaacagacacataatcaagttgggagttttggccatttgccgattgtagtttttgtaatgcctgttctatttcttggtcaatctggtcaataacttcttgaatcttagagcaggatagcttctgcttctttgtaacacgatcaaatgcatctttaatggaattcaactccattagcaatcacacaaaatgttggtttacggatcaacacagctgcaaaatatgaaacaaaacgaaaataagtgtttaaatttcatactggaatcaacttcattgctcaagaatcacatttgtttccaaaagacaaacatcaaaacatgtcacctcattccgcaaaatgaaaaagacaaaaaaaactaatgtgaagcttccaacagacaaacatcagaacattcatttaaaatcatgccacattgttcttgcaaaataaataaataaataaatcatgccatataagtggaaatctactttataaatgatgtgatatcaattgtaaattaaacttatcaacaaagaaagcaatatggagatcagtataaagctatacaagcatagcattgactactattattcctgatggaatgagcatcttaacatgtgtagccacagtaaacgattatagcatagcatgtggtcataaaatcacaatcgattcagagaaatattctgaacaatacaccaataagtcttatattcttgcaatcagaaaaaagatatgaagggcagtgccttgtcatcttgcttctcaactcgaccaaatctcaaaattatagtgtcaatcgacctgagtacaaggttacatcgacataggtattacagtatcatcaaacctctctccttacagatctttaagttgttaatttatgtcatgtccagaggtatgaaagaatgatacatttaaaacaggaattaagggagacactgggacaacttgaatgtaataaagcacctactggaacttgcaatcaaatgctaataaaaagttttaaaattcgaattcttcctaacacttctatctatctatctatcaatataaactaatatgtgtgctttaagtatatatattattgcttcagacaaattccagtgtaaaaaactagcaaatactctgtacaaaaacaagctgggagctcttggtataagatacaataaactataactatccaccacgaagaaaaaaaaacctatgacctggtaactggtttatgctactgacttaaaaaatgaataatttaccaaatttgagtaatgaactacttcgatttgagcagaataacagtacccaaaaataaaaaaactagaaaaacactactcaatctgacttcttacaagatccagaaaaactagattggccaaaacagattgcgattcaataacaaataacaaatcacaatcatcccatatcaaaattgacttcattttcgtacagaagatttcacttttcacttacaagaatctaaaaacctcagttactacatttctaaaagcaatacctggagaataaaaggaggaagctccgggtcgatgaaattattggagataaagatagagcagagggactttgttagatcaaaagcgaaagaagacaatgatgattatgattatggagagtgaatcaaggctaacttgtcgaagaggagagaagaagatggagtggagactcaacctcaagctaatcttttcatattattagctttcaatttttaattttctatattattaaaaattaaacaataataataatcttaatattaattaatgtacggaataaatccaaattagcttgctagctttctcaaactatccacttaactacaacaaaagacaatattgatcttcaaacagaacagaacacagcattcatcacttcaaatcaagtttaactacataaacaatacccattaatgtgtatatttatagagagacagagagagagagaaag

SEQ ID NO: 217989 - DNA, 3491 bp, Cannabis indica
attttaaggggtgcatcaatataggaaaattctacccatataacatgataatcatattcagaattaaggaaattgttgttgatctttcttagtagggtggttttgcctacccctcccatcccatataaccccataattctcacaccatcatcattgagttcttcccacacaagatcgaaaattgtatctaagcccactgtcggctcatctggtacttcaaccacaagcggtattggtcccctttcagccaccacctcaaataccccctcacttcgaagatcagtaacttcagctagctttctcagcaccattttcccatatttatagctggatttatagttgtttgagcagcaaccccaaaagcatagtctgatgctttcttcagatcctctctgcagcagtgcttgagcttcagtttccatggcttcagccctggaaatccacctctgaactgtatcacggcatgtcaactggtcctcctcctcagcaatcttgactctcctcactaattcatttttcacatctgttaactcttctaaagctttctctagagctttaagattttctttaagtttatgtacaaaactagcttgtgcaacagtggattgatagcagttggaaaatatagcatcaaactgaagagaaattgagtaagataatagcgttgtgaaaatgagtaagatagtttgatctcatggtagagtgttaagtgagaagaagtcaagaaggtacaatccatatgcgaggaaagagagtagtgacaaaggatcttatgtgattttgttcttcaacaaaacaatctgaataccatattgtaaaatatatggttatctaaatttccttttctcttttaattatcaccatgggaaaaaccattctcctgtgggatccatttaagtataaaagtctatacataggatcatgttaagaaaaaaatgacattaaaatcacaacttcgtatccagtaagaaataaatttcttaatttactctctaattctatttttgtacattctgaacaatataatatttttgtgtaatctattgtctggatagacaactagacaatagcattacttacacataactacatttgaattttaagttaatatgctataatctctacatcccagttcaaacatacactaaagtcctctaatatgtacattagagtcagacaaatcatcactacttataggaccaatgacactatatataaacctctcaacttcatcaccaaacatatcccaaatttcttcactgaaaaacttatcatttaacttggagcaagttttctgggctagaatagcacttcaaaattagcaagagatttctaattataaagaaccaaaaccatgtattatggagagaaaagcatagcaaatttagtaagtatatgaaaacagcatattttaaattgttgtattagttcagcccaaggcgccattgtattgaaagaactaaatttttaatcataatttctaataatctaattaattagcatcattatcatgtatagctaaaactactaatttttgctaattaactaaaaatcctcaaaattaaagagttcaattatgataatgagtggcagagtgagtgagttaacaatatataacaactaattaacccaaattcaacaactcaaagaccagtaggataaagtcatgaacacataccaagcttggatttaaactcctggagcctcagatctaggttttgctcgtcacgaagattcacacactctctctctcttacgatgcgacggattcaaccgttaaatccattcccttcgcacagagaaaaagtattctaactccaaataaacaaaaaattatacattggtaagtaaatctatataaagagaaaaataaaaaataaaaactatgcataataaaaataaaaacaccatatcgccggtcaaagtcttcttagtcaattcctttagcaaagtggtcccgtgctttatggtctctgaaaattctccaaaaaattaaagtttttgcttaacgtgtgtattataatattcttcctattagctttttagctcatcattttctaatttcttgaaaactacttttattgtgctatttttcttcgttctctctcaattcatgtttgaaaacttttagttttttggaaatttgttaagcttactttttcttggaacatcatcgacattcttaattatctcttgtctgttggctttttaactcatcatgttccaatttcttgcaaaactacttttattgtggttgacagtttgatgatgtcctacatgctattttcctttgttctctctcaattcatgtttggaagctttcagttttttgaaattttgttaagcctactttttcttggaacatcatcgaaattcttaattatctcttgtctattggttttttagctcatcatgttccaatttcttggaaactacttttattgtggttgacagtttgatgatgtcctacatgcggtgcggtttggttgaaaccgcatattaacaattcaaaaccgcgaaccgcaacacactgagcagtttaggaaaaattcaaaccgcgaccgcaccgcaaagaatttcaaaccgcattttctttgcggtgcggtgtggtgcgggcggtttgagcggtttgatgaacacccctaccctacctaattagcgtgcttcaaaatttatttctttcttgtactagtaattcattactcccattttaaactctatcctcctccacaatctctccagatattcttccataatacattggtaatttaatttcttgtggaattacatcaagacaccatacataatttaatttcaagtattttaatattttcgagttcttcaactttgttgagaactataatatttctaaacttgatatgttgaggtattccaataagaagaaatttgaaatcttcataggcaaacgaagcaaacatccactaagtcgatactcactatactatttggtctgatattttatgttttaaatgtttataaattaagtttaaactttctaatttcttgcacaagatattgttaattaattaaagccttttgaaatatcattgtttagtgatttaagctgcttcacttaatgattccctggctggcttgtataccttatttcctgtcattttcaatttcagctattggcatgaaaattaagatacaatatggatgattttattttcaatgattaatgttttcttatttaaatttcatattctttatggagaataaaaaaatcaaaataatttatagtgatatttagaagaatctctaagtcataaaaatactggtttatatattgtaacgtccccgcttcaagcctccattgggcccttacacccacggactaatgactcttataccatttttgtaacgtctccgtttcaagcttccattgggcccttacacccacggactaatgactcttatacacgagtacggcactctggctacttcatggactgatgactgaccctaca

SEQ ID NO: 217990 - DNA, 6600 bp, Cannabis indica
gttacatacctacttttcttccaagaccagatcgtatgcaacagacctatgttaacatgccttcgtcatcatctggggcacccccaggccgtggtggaggacctggttttgcaatgggaatgggtgctggagctctggcagctggtgctgtgatctttggagatgatttcatgtctggatttgatgttccttcaggtttacaggatccttctattgttgtatcaactgatcctcttttctaaccaagtttgtaaaagagcttcattgtaaccttgtttaatagaaccaggaaaatgcatcaaacttgaacaatatcatgttagtttttatcatctgtctgtatctaattaacgtgataaaaatttacacgagttttccttcatgactctgcaaagcaggatgcttaaaatggaaagttaatggatgctgattatcatcttgtatctaattttgcaaactatgaaaattgagatttctttttgttgcattacttgggctcaaaagagagacaattacaatggtaagattccagaagttctattctataaaaaaagcctgcttttgattttgaatacagtgaaatggggttggataataaagacaattagaagacttaaagactcaaactactgctgccccctcaagagaatccccattaccaaaagctctaagtagaaaattctgaactattgatacaaactcatccactttttcttcgtggggcaagtggccgcagtgcttgattacttcaaagtaggaaccaggtatggcttttgaaagtctctcagcattccacgaggggacaagtcggtcgttgtcacccgtaagaatcagaactgaatttcaagaagagaattacaagtttcatcactacacattactttcaagtcaagtgataatacataagagtgtagaattggataaaagatgctcagaatcagatttgggctgcaaaagttaaatttcctttttgttatgtttgttattgtcatatctttcaattctttagacctttatctattcctaaaaaaagctagactatcccacactagagtccttggcattaaagtacatggagttaggagctttaccaggacatgagatttgaccgagtctttctgatagtggtggttttagttcgggttcagtatcggtaagcattgctgcagtgaactccactagtgccttgtcccagcccttagtccttaatggctgcatactaacacccggttaagaatgatccttttcaatgtcaagatcataaatgaatccaaagctgattaggtaatcacctttgtataaccatcaaggacttcttcagtgactttctttgagtcataccatgaatttttaacagctgcccgaccaaatttatctattatcactcttatctaagaaacatgtgataagcctagtcagagtaagctcattaacaatgccaacacagagcttggaaataccagaagaatagcctagttttagtcttgtgtgaattgtggtgacaaaagctagtttgaaatatatgatcatctaaatagaaacttaccaacatcacacctaaaacagagcgcagaatagctgacaagagtttcttataaacagagttgagcatgtctgacattcccttcattactctcattattgcctgcaaaacaatctttgtaaaattggacaatatattccgaagttggataaatagattcccttgactactgctgtttgagttttcttcattcatctggtttcccttgacaacttttggcttagttagaggagcaaagattgctggagcaacaaggatcagagctgcaacacgttctggggcttcaaaatatgaatttactgctacaagagaaccagctgaatgcctgaaatgtcaatttttttcttcatattttcagaaacaaatattggtactatgaaaaatatgcaaattctagtctttcaagctatctaatgacgaaaagaaaaatatctaagagaagaaaatacaaacccaacaataattgttttctcagctcctaagaattcaatgaaatacaaagtagcaagcactgaaaacgccatggagtatggattcaaaggttttgcatccgcattgccagaagctgactgctccccaaaatttagcctcgatgtcaaaccgaaggctggtctatcaaaggcaagaactttggagccagtaaaatctgccaaagttttcattactctgttccatgagaacacagaggctccaaacccatgtaataaaatcataggaagaccaatctttttaataggttgagacagattttggctctgcaacgacttatctgccacagattcaggctcacatatcttgtggtgtatctgtacccctttaaactcacaaaaacaactatctgaatcagctaaatgagaagggtcaagcagttcatcttgatctattccagctatagtcttcttcaccttctcttttgtcttcccacccaacaattgcccagtggaatctaatgtcagcatcaaaatttacaattaaaaaaacaaaaatctcccatttgctaatttccataaagaagactaaacaaaattaaaacaagagaaaagcgagttctttttagaaatatgtaccagaataatcagcactggagccactaacagaagaagaagaagcagaagcataaactacccgagaagattgaagaagacccacttggcttttcttatctgggttaatgaaatttgagggaaagcttttgtttgaaaacttaatttgaatcttgaagttggaagactcaacaggaacagaggagaccaagtggggtaacactcccatctccattgcaatgttcctcatatgggtttatgtgtttttgagctaaaacccaactgattttggcgccccttacaacccaaccaagcatcaacaaacagataagtaatcaattgaccgaagatattatattttatattattatacatacgggtccgtcgtttccattggttaaacgacatcgtttccaaggacttgctgtgtatttaaataatggattctcctacaaaaaggaaaggaatacaatatttggcctcatttgatatctttatcagtaccgatggaagctctcgtatgcaagaaattgggtgatccaacagtacaaggaggagatcccaatggcccaattgtgctggaaaagaagcttcctatcccagaattggattcgccaacagcggtgagggtcaaaatcaaagccaccagcttgaactatgccaattatctccagatattgggtaagtaccaggagaagcctccgctccccttcatcccaggctctgattactccggtgttgtcgacgccgtcggacatggcgtttccaagttcaaagtgggtgacccagtctgtagtttcgccaatctgggtaccttctcccagttcatcgttgttgatcagaaccatctgtgagtttccgcttaccttcaaaccacagtttcactttttatataaatatatacgtatttatatcattttgttgaattgatctcttgaaaaaggattggggtgccggagggatgtgatctaattgaagctggagctttgcctgttgcgtttgggacctcccatgttgcacttgttcacagggcaaatttgaccactggccaggtacttccacagtttagccgttgcgttatattggatgtgtttttctttttttcttagagtgaggtggtgattgatagcatgaagtattctaggtgttgctggttcttggcgcagctgggggtgttggtctggcagctgtacagattggaaaggtttgtggcgccattgttatagctgtggctaggtatgtacttgtagtactactcatgttctaatattttcacatttgtaatttggtgactggttgctttaccttcaattatagactaaagtttcctgtggtttgtcaggggagctgaaaaagtggagtatttgaaagcattgagtgttgatcatgttgtggactctggtaaggagaatgttattcagagtgtcaaggaattccttaaggctagaaagctcaaaggggttgatgttttgtatgatcctgttggaggcaagcttaccaaagagagtttaaaattgttaaactggggagcaaacattttgatcataggctttgccagtggagaagtccctctcatccctgcaaatatcgctcttgttaaggtttatttcaaatcccaaaatgtatttcttgatttaatgtcctgttaaaacattaaaagtttgataatatgattttgatgatgagaggagaacgtgtttggcatgtttttagttgcagtatgagctttaagcttgtaaagcttaggctagttatcacatgtaattgtttccatttaaattgctgcatctttgattgtcagtctaaatgccatttatttgattactgtgcaccagaactggacagtgcatggactttactggggtagctacagaatacatcgaccaggcgttctcgaagattccattagggagctactatcctgggtggtgaaaggcttgataaaaatccacatttcccatgcttacagcttatcagaggtctgtagctctccacatactatctttatcggttgctttagtttttgtttaaagccatagagagataagcagggatatctctcattttgatatggccttgggatataacattagggatgtctgtctctaaatactagtttgatttatttatttttatagcataataggtatattgtttgaatttaacctgcgacaggtgtgttgctgcaaagatttttactttgtctgaaagaatttatctaattatccaacttcttgtcttaccaggctagccttgccttttctgctatcagagacaggaaagtaattggaaaggtgatgatggttatggatgatggaagaacaataacatctaagctttgaagctaatcacaactaaagttggaaaggggtgtgcacatacattataccacataaagacacttaagttttttcgtgtttgcagtaagtttatagcaaagaggaaaacttaaaaatagttgccaagatagttgtgtcctgtgtgcaatgtctgtaactcaagtgtttttgtcaaataaatggttatgtccccactccatgtgcacatttcaaagctaataaagtcgaaagcatttacaatacattgatatatattgttcagtttgaattttattacatttttagtttttttatacaaaatgatgataacaacaatgccgcaaaataatttgcgtgggaaggacaacccttcatgtaagctgaaaagcggtactgatagtgagaagaaagtgtaatctttacaattatttacactttcaagtcaaattttatatatatacaaaggagaaatactgaggccacgcagttttgggaacatgtctatctgggtctactgtcagtcctcagaaatctaatgtgttcttgctgcaacatatccccgccatttacaggatcaaaactgcaccgatagaaactgcaaacaacgcaaaaacgggtgacatagatcaaaattggctacaacttaaacaccaacattacagcaattaatataagaacattgcttttgacacagcttcgaattccttaatctttggtacattaaaaagagagtgaattgataaagcattgtcactttgttttgcatttcgtactgccccaatatgaaaaaagtagcttctaaaatagctagtggtgctcacaaagaacttctcatctaagaagccttcaaagaacaatttcttattctgaattggaagataccttaataaggtaagtaggaaagctggaacaaccaggataaaaagagtaaacaaaaatgtgaatagaatatttctgtaccttccatccatgccaacaatgatgacagtattctgagatccaaatgctgcaatgaattgagtgtcttctggtaagtggaaccgagcaaatgaccattcagagctaaaatattttggtaagacccctggaaaagtatgagaagattagatagcatatatggtacgatacaaatagtatcattcatttgagtatttgaaactatatgatgatacgtaaattcaacctctcataaaagacagcgatgaactgggattggcaccagagtttgacgaaataagagaatcaagggaagttgaagaattctggtgatccagttgtggtgcttggggggcacttgaattagcatatgaatcctccccaataactcgaactctcaagcggaatatgtgtacagtacctttgtcacttgatgtcgccagccactggacatttgggggagagagtaatgccataaatttctgccctgtccaccccctacgtacctatacgaaggaaattgatcaatgcagcacttcatccaaaaccatcaaaacctcttgaagaagctaattgaatagaaatcatcattattgtacagttcacatctcatatgaacatgagatggggaaaaggggaaaaaagtacaaattagaaagaacacaaaactgctatgataattgaaatagaaaaatcatcattatttagtacagttctacaaaaccttttgataagctcactatgaacatgaggatggggg

SEQ ID NO: 217991 - DNA, 9179 bp, Cannabis indica
tttcttatgttgtttgttatacttatatatattatatataacgttacaagcaaaccctttatttaatcctctgaaataaaagataatatttaatttagttcaaattcataatttaaatctaaatataaatataatataactgattaacagaaatcaattaaatttttttatttgaatattgcatttttaattaaatagattatctaatagtatatttaattcgctaattaaaagataattaattaatttaatttgatttagtttaataataaaataatcaaactaaagtcatgaaaattcttgggattcatagtaagtcaacgagggatagaggctaaccctaaaagcgttgctcgaaattctatctccaaagaaacacaaggatgtgcaaagcttgacagggaaaataatagccctgagttgcttcacctcatgttctattgacaaatgtatcccattcttcaatatattgaagaaaagtcaaaaatttgagtagatcgatgaatgcaaggaagcattcaaataattgaaggagcatatggacaagacaccagttctgtctaaactaatccaaagagaggatctttacctatacttggctatctctgaaaatgcatttagtgcaaccttagtccaggaagaaggaaaagtccatcaccctatctattatgtcagtaaaaggatggtaggagcagaagtctggtacctttcaatagagaaactagccttttgtctaatgatagcttctcaaaagctacaaccttatttccaagcacattcgattaaggtccagatgaaccatccactactacaggtcctacaaaagctagaagctactgggagaatgctcaaatgggcaatggagctcaatcagttcaacatacagtatgtcctgcgtatctcaatcaaagggcaagccctagaagactttatatggaatgtaaggaaactgaagcaactgctcatgaacctaaaatatgcgcccccacttagaaaatatatgtgaatggggcttcaaataagaatggatcaggagctaggatagtgatggtgtcatgcaaatgcttgaggcttcaaacaaatttgcaatttaaattccctacctctaacaacaaggcaaagtatgagctccactggttgggttaagactatcaaaaggcgtaagagctcaaaagacagaagtcttcaacaattcgcaattggttgttaaccaaatacttggagaataccgaactcgtagagaaagaatgaattcttatgttgctgctataagagagctgctttaggagttcaaaggctgtaaaattaaggaaatcgtaagggagaagaaatttcacgcagaccgcttagtgaagttggctttggacaaagaagtagaaagacttggggtggtacccattgaataccttctggatccaagcattctggccaaggcagaggttgcagtcaccaaccaagagcctagctagatagaccctatagtctagtatttgactaagggagagttatcccaagattcggctacctcccggaaggttcaataccaagcccctcactatctcatgattgacaacaccttatactggagaagctttagtatgccctacttaaggtatgtttttaatcccgaagctaagcaaataatggaagaaatccatgaaattagccagtataaaaagataaggatatttttggcatacaatgaaaaaggattgcattgattacgtccggaagtgtgacccatgccaaaggtttttaaacatcctgagggcctcacgaaatgaaatcatgttcatgagaagcccatggccatttaaagtgtggggtatagatctgattgggtccctcccaatggaaaagagtggagtcaaacattctatagtcgctgtggattatctcacgaaatggatagaagtagaaccaatgaactaagaaaagcctagattatgtgatgaaaacattgtttctcagtatggactgcctcataagatagtctcggagaatgacaagtaatttgacagtgacatattcatagagttttgcgaaaagtacagtgtcatgaaaagcttctccatagttgtaagaccataattatatggttaagaaaaattagtgaataatttgtcaggacatggtaaggctatatgggaggaagaattgcaaaccaagtagtatgatcaaaattgacctgaggaaggcatatgacacaatagaatgggacttcattgaggagatgatgagagcactcggatttcctagtaagtttataaatctcattatggaatgcatatgtacacctaagttttccttccttctgaatggtgctatgtgtggattcttcaactcaaagagagggttaagacaaggagattcgatgtctcccctcctctttgtattgggaatggagtatatttcgagaatcttcactaaggtgggagattggccaggatttaaatttcatgataaatgtggccaaataaaactgaatcatttgtgctttgcaaatgatttgttagttttctacaatggtgatttcatctctataatgctgcttcttaatggcattaaattgttctcctctacatcgggcttaatgccaaatgatcagaaaaaaaaaaaagcaatctactgttcaggaatgccagaaaatgaagtatctagaattcttgaggcatccaattacaagagaagctccttaccaattcgataccttgttatcccaatttgttcaaggaagatatctagagctgaatgtcagtgtttgttagaaaaaatgactagaagaattcaaagttggagtacaaagaatctatcttacatgggtagggtcactttgatcaactcagttttgcttgccatacacacatattgggtacagattttcattttgcccaagaaactcttgaaagatattgaagcaacttgtaggtcctttctttggaagggtactctagagggatccggacctggtctagtggcatgggaatttatttgcaggcctaaatctgctggtggcttgggattttgaaataaccaacaatggaatattgcagccttggggagatatgtctggatatagcaagcaagaaggactgccttttcgtcaaatggatacacatggtctacttgaaggatcagaactggtggagttatgttactccacaagactgtagtttggcatgtaaaaaaatagttactgtgaaggataagtttcaacaaagaggagacatggacaactttataaaacagagatatcgagttaagcaaggatatcaagatcttttccctgagcatcctaaaatcccatggtgtaatctggtttgggacagacttgtcattcccaaacatagatttattttatggttagtgttttggaaaagattaaacacaaaggaaagagtaagcaagttcaaccaaaacatagacacaacatgtgtcttgtgtggtaaaggtgatgaaaccattgagcatctgttttttcagtgtgaatacagttcaaaatgcttgcaagaaattaaagtgttcctgcaatggaacacaccagcaggtgacattgtcaaggtgctgcaatcctgccatcaaacaaaaaggttttctgcagcaaggaagagcatagtgaacacagtcatagcaagtcttgtgtatcacatatggaaggcaagaaacgaagcactatggaaccagcaacagtggctcaccaacaagacagtacagaaggctaaacatgtaagtaagctaagaatccaagcatggccgcctaaaaaagcaaaggaagaagacatagattggatactggaaacttaaaattgtacatgattatacttggtgattgaatagttgtaaacattataaaactgtgatgtaagctgtgatgtaagtttggttattcattaaaaaaaaatcgtgaataagatattaaaagtcacactcaaaaaagctcttggcttgcaaaattaattgacctaaagaataaccacgagtactcaaggcttatagaactacttcttggaccaccataagacactctccgttctcaacagtatatagatgtgaagcaatgatctttgtagaaaacaccattccctccaatagaagaaccaaccacaattcagtcaccaaccagccgttgttgcaagaatcgctggatctcatagaagagctccaggagaaggcaaaaatttgactggctacgcacctgaggaaagtggaaaaacactttcattataaagtgaaaaacaaaaaattctccataggagacgtggtcttaagaagggtctttccagcttcacaagatcccttgattgagggtgttgggcccaaatttggaaggaccttatgagattgaagatgaaattggctctggcacctacaaacataaacgaattgatggttccttaattctaagagcatggaatgttgaacatttttgcaaatactaacaataattagaagttcagtatttaatttaatctttaaattttcaattaaagagaacttagtttaaattaataccctttatgtaatacactattcttttatattcatgcaaagtaaaaaatgtaataaaatatttagtcacttaaggggtagtagggtataaacataataactcataaaaatatatattgctcaaaaaataaaagaggctagaatataaatgaatgccaagaaaagagtatatatataataaaaaaaaacgagagccttgggcataggccaataaagtgtctaccctaatgtaaaagaaagcctcaaggataggctaaataaatgtcttccaaaaataaataaaaattaattaagtatagataaatggcagaccagtcggctatgggaggaagatgaggacccaaggtctccacgagcttggcctccaaattcttgttctactatagaaaatgagccaaaatagcctcagaattaggtagaaagttgaatttaagctcataattgttggacctgcaggtcatgaagacgctgtgcttaaagcgccttacgcaattttcacacgtgaccagagccaggagagcttgcttggcagctttggtagccttcaaattagtcttattttgaaagtcacgaagctcattgagctccacagacacgctggctacagtcttgagatccttctggtggagttcctcaagtttctttaccttgtcctaaagctcctagatctcctcctaagctatcttcaaggactctccggccacccgttggtcctgctactacaaagccttcaccaccaggacctcatccttgagagcttcagcgcgcttgtccacatccttgagcttccttagagcctcatcgatgccaccatattcagctaatgcaaacccttgatcaatcaaggtcttggataggcgaccaacttcaacagtaatctggccaatttcacgcgttaagattatcaaaaaagtgttagtggaggaataaattaaacaagcatgattagggacttaccgaggtcaaagccatgctcacatcctaaacctggtaaattaggttaaaggaggcacaaatgatgaacctcttggttggaagctaaaccaattcagaagcaaagtgacccatcatcacagaagcgaagggaaccaagataaacctgaggaagcttgaaaatcaatctttcattgcatccatgctaaggtcatgaattgcaccgctataatccacctagaacagaccatcttggttctccatcaaccacttctgcaaaaccttcaacttggcattccctttggtttttttcatttacaacatagttatgcttagcaatcctaagctgttgatgggacatatccagatgaataggagttaggggaatggatggtacacctgggaaagtatgagctttaggagggattcccgactccctagtactatgggaaggagttttggctgtcttaagtttctttgaagatgcagagtctccagccttattcttcctctttcgctccagtgggggtaactcatccacaacatctacacatacaacctttcggtctgaagctctagaagtcactatgacccttgaaaaattagcgggagggatggcgttaccttctgtgggactcagagtatccatagaggcaaatatggcatccattggtctagctacaaaaagaaatgaaataaatgtaaggaatatttacaaaaggatcataaagataagacatgcaaaaaaactaatcctacccaggtggcctaattctttcctagcaaactcataaataatgttgttggtatcattgtctcctaagaaactatccaaatgaagaaaccagcttgaggtgagataaaatgagtggtcaagaggtatcagtactggaggaccagatcccatttgggacatacctaaaagatgtccaatgttggagaagtaccactctttttccctataaccccaccgggaatggagaatttgcaacctaagtaatcttctatcaaaggcaactggcctagaatgagcataacgtttggcagaaggaacataatgaaaaaatagaggagacttgcggacaccaaaggtactggctccacgagcgacgaaattgggaactaggaaaggaaatgaaggtctgggaaccaccaacttcttcttcgccttcttctgtgtctttcgatctactacactctaggtgtgagcaaaaaggtcctcctactctttcctcctccaataagcttgatatttattttttagcctcttggatatactctgcctggagcttcctctcggcctccttattccatgcattcagacatgttacctttgacaagttagtgtcattgaaaaattcatggccttgaatgagtccgattctctggcagttagtggttgtaactacatctcccacgttgagcctttccttggtaagagtcgcaataacaggagcgtagctcaagaagagttttgtgggagttgtccagagtaatgggggaattttagtccactctgttaagagatctggatgctcaaatacttcaaaattaaaggagaagaagaaccgatggagacagtctttgacgttgttctgagagttgaacaagacagctgtcttattgcccagatgagcttggagggagtaaaaaccacccttccatctatttcccatctttggggcaaaaaagagttcataaaaaaataatattgaagcagggctgggagtaggtcagccccataaagcataaaaaatgaataagcttgacaattggcggtatccttatggtatcaactcatacggagctagtcctacaaaaactaagaaatttacaaggtaatcttgatatgagagcatttcccaagaaatgagatgtgtttcgctccatgccctgaaccctccatagttgtggttaggggttttttttcttagtccaagtagtggaaaataccttgctcttggggtctaattccattctcatccacaatggtccctaaatgatggacacaccccatggatgagtgtaactcctcagcttcccagctagtagctttgtgtacataaggtgtgaccggaactagaccctatatcaccacatctagtggcaccacttggtgctgtgataccgcatcttgagtaaaaatttgggtaggggcttcagggtttgacatcttggtttaggagtgaagttctagaatttctttgtcaaaagtgttgaagtcgtgtttgtggagatccttcaaaatgtcactcatatgaaaaggcaacaattaactcaacagttagccctcacattaaacccaaaataaaaaagggaatgggggtcccctaactactgagaagagaacccctttggatgcaagcaaacccagaaatgaaaattttatgtgttatgcattgggtgcaaactacaccatgaataaaaaatggtgcagaggaaagaaaagataaagggaaaatcccactagccctaacacgagaatatcttgccacaagaggaaaaataaaggctaaactagaaaaatggcacaaaatctcagacgtagtacccattaacacatttgtacaagaaaattttaaattaaaaattacaaagataaactagagagaagttagtatggttagtaacttaccaatagcaaaagactgaataagaacggtcgctggtacaaaatgctggtagtttcaagcttgacaatggtggaggaaaagcaaaaggaaatttgggctccttggaattttggttagattgaagcatctaaaaaacatgaaaggtaaaaacctacaaagaaaaaaagtgagggatttttatacaccagggaggataacatcatcgttagtcattcaatgatcctaaccttatgattaaaagcttcatgatctgacggtttgggtggtaacaggcctatggaaaaattctgaaaggacagttgcactaatcagagtgtttttctaatgccatattgttaatggagtcatatttgatttaaaaactgaattgtttttcatcaaaattaaaggaaattaatgagcagtgtataaaacggtcatgcacaacgtgacgttattgttccaggaggcacatcgcaagtccatcttgccagatcgcatgaaaggacttggaggataaatttttcctaagaattatcccaaaacacatggcagctcaggaggaagccagatggtagtaaacccacgctacaggacaccacgccttaattactcccaaagcctattatttcacaagaataacgagattagtcacctccaaaaggatccaattgtttctcgagcaatcctcgtccctttcgcactacgagtgtagtataggcggagcatagaatgagaggactaacaaaatatgatgtgatattcaaggattatgacgttgtacatgcattaaatgcatcatgggtaagactgacaaatactttactctgacaaacgtgtttaagagtttaaaccaattattccctgatttcaccagccccaatacatcaatcgataactgtataaatgagtcgtgaagtcataaataagaaaaaaattaatcccatcaaactcctatagacggtctaaatccccattgtaagataagtcgttatgtcttacatcaaatttgagaaattatgctaagcatggtgtaattatacacgacaatagtagtcttttatctgttagactttttatttgggcttacattaacttttattggttttaataaaacttgggttg

SEQ ID NO: 217992 - DNA, 8504 bp, Cannabis indica
ttgttttagaaattcatattaggctgttaaacaacatacatggtagttaatctagatcctggtaaaataattccaacagatacaatatacgagaagtttcaacgataccctgataatcttcaagaggtatatattctaaacttttattttatgttttgatttaatgtatataaatctggagatccattgggatacggtataatgataatcagataatacgaaactctttcattacgtaccttatttagtaccataaaaaccaacaaaagttccttccaacttcttggacatacattgtccatccaggagtcccaaccacattgccagaaagacgtgtgtcacctttaccgaaaaaaccttcacaagctgaagttgtagtcactattacacggtatacgggtcaggatcgaaacctgtctaggacaaagcaaacccacagcgcaacaccttcaactgatccctatattgccaaactgatggcaagggagcgggctgcttaggccagtcaggctgagaggcttgttgagcctgaaaaaagggagtgacctgcttagaagctagtcagagactgtgatgtcattacaaacaaccccttagtggaacaaaacaaggccatggagcctctcaatgaagatggtgagcattcacgttttaagattgaccatgtataggaagagctagtggctttggagcctcaaccttaaagaggggagttggaagctgcttggttcctctatcgacacttactcattcctctcctaagaattgaatggtgtggtttggcccttatgcagaataaggagctatttagccgctccaatcattctttaaggatatagccaactattttaggatctgtccagcaaaattaactctaaaagggattaagtacttgttcccccttcattcaaaaaaaaaagtacttgttccctctttttgtttggtattctcatatgggttggctgcaaccttatcccttcgagatcagttgatattttgatctgaaatccaaccctaggcagggccggacaggggatttctattttagccagctaggctacatatagttaggtggcacaaatgactatagcatgtcaaaaattggtggctatgctcaggattacttcatggtctataatgcagagggtgtgcaccactcattctggagggctcccacattcaaccggctagtgcccaccctaaagcttagggatagaactaaccatatcttttctttgtcgaccttaaaatgaaatatttctaagctggcaatgaaagagaacttcatcaagtacgacctttatctatctacgggcaagccttcaggttcttttgataaactttttgagaagaacaaaaggaccaagaggaaggaacctaaggttaatatcccctctgataagctttctaaaaataagagaaaggcaaaagggagagggctatctagaagaaatttgagagaggtgatccgttaggatattttcccattattataagaccttaagaacaagaaatttcccggtctgcccttctaactatcattgagggaaatggaaaaggagtagccaatgaggaaactaaggaggagttctcttacgatgatgagggtttttcaaacaaccttttcgggataatattccccatttgggggagggtacagatttctccaattttcacttgactttttatctttagaatttgtcttgtaatatgtgtgccttgtgccttttgtagatatggcctccaagctgaaatattttatcaagagaaaaccaatggacacttttggaggaaatctctggccaaggctacccgaaaggggagtctagcattgttcactcccacctatcgtcgcctcctccctactctcctccaaccaaccaacctattgtgacaaacttggaggggcaccaaccccctgcaaccaacaaatcgagcaaggatcattagatatcaagtatgacatcccctccacttaaggcaaagaaagctaaggaggtggtccataactatctggacagatacctggtccaggtggatgagcagctacaggaaacgaacaatgatcccattgagtccctagcttctagcatcctagaagttgtggcctttgtaagttacttttcttcccctaactaattaatagctacttaccgtgcagctcaattggacttgtagtttttgtcttcagatggccctaaagtttgggcacacctttgcccatctaaagcgtactagtgtcgccccaacttctctaaagaagaaaatttaagattaggaggccctgctcggtgatgtcaaaaaaataattatttgttgccgagaatcagattgaagatctttagcagtagattacagacacttcgtccacaacaccattagagaaggatttgaaggcatctaagaagtagatgagcgatctatatgaccaaaagaaatgcctaggatggttgctagtttcccaaaatggagagatttccaaactcatggaggagatggaatctgagaagaaaaagttagaggattcaaagtagactcaggctgctaagaaggagtcctatggtggtttagccattgagactttctacgagttgtagaagaaaaaaccccaacgattactatgggtatatggaccctgagttgctcaaatccctgatagcacagggtgaggaattagagatatctaaagcccctaatgagaatacttccaattaagatgctgctcttgctggccaacctgctaatattgccagccaaaatgttgatcctatagtggatcatcttgttgagctggccttcgaacctggactaggccagtgaaaattctaatcctcccactccttttgacattctagagatttgaatctcttattttgttttcttttttcatggtgtttaaggcaactaattttaagacatgtagacggtcatatgagatttaatcatggcttaatttttgttaagacatatggttgaccaggcagccttaaatcccaaatttatttccttttatgttcaacaaagccactttttcacatacttagcctttaattttttcttttaagttgctttaaattttttacttaagtattttcacggtgattattctatgctatgttgatgtaggtgagtgatcaagcatactatgggctttgggtcaattacaattaggtgtgactccttggtcggataaaccatagacgggctggaggcaggggttaaatctttgagctggagccccatcttttcatacgttgtcttgaaaaagatgttggaagaggctccattgtctaccatggttcggctcaccatcttgttagttatctggacttccacgaccaaagggtcattgtgcagaaaactgatattgatagcatcttcatcatttaacgttatggtgggctctcctgcccgtgggatcttcggttacctttcttcgatagccagaactacttcttcttgctcatgttgtactgttcagacacacctttcccgggctttgcctgaatctccaacaatgagcggacctccaataatgacttgcagatgtccatctactggtggtagtagtaaatcttggttgttatcgcccctctgattttgatcggccttgacatacttctgtacgtgtagattattttttcttatcagaaattcaatttcccgtttcagattgttgcaatgattggtgtcatggacataatccccatgaaattggctaaacttggtcatatctctcttgcttacatcttttctcatgggtgtaggcttcttatacggggctaacggctgactagccatgtacacactttatatatcttctgtcagtacagaaaatgcagtaaacttggtaggattctccctgggagtttgttcggtcttgccagtgaactttccctttttcccatttctttgcgtattattgttggaccatttaccacccgagcttgaatatcttgggtattgggggagctggacagatgtctcagcagagggaacttttgaccggccaggtttttgctcaacttctgcctgctaaatcgcctcttcaagctaaataaaaccttccgcgcgatcaaggaagtcactcattgaatctactggtttgttctttctgatatccttcaaatttaccaagaacttcaatgcaattcagtatcacggacagctttctatcttcggtcacccgtgcaaccttagtcgcctctgtcatgaatctgctcatgtaggctcggagaggttctccgggtctttgcttcacttcgaccagatctcctaagtgcaacggaagttaacgagaagaggagaattgtgcatggaattctaaggagaaagccttccatgaattgaactttctgggcgccaacttgaaataccattgctgggcggcttctgagagtgtggcaggaaaaactttgcaacatacatctcctcgtgatccttgcaggtccatttgaattttaaaatatttgaggtgggataaggtatcttctttcccagtttacatcttccaggttgtcatcttaaacttgtgaggaaattccaagacattaatctctggggagaaaggggatcaacgtgctcggtacaactcgaggtcattgttcctctgaccagccaggccttggaacatattttagtacatccaactgtgcctggacatctggactaacttgttcggcctcttggccaaccagagtcgtgttagcatctctttgagcgggattttgagcacgggttccgggctgaacgactagtgcgtcatgctggttgtccactcctatccttctattcagatcatcttggagatcaagaactgttcccaatcgattaaatacagaaacacctggttgtctcacagactggttggtttggcccattagctagccggcaccattaacttggttggaaccgttaggtatgacttgttctgatgaattggtagaccgggtctgtccgcctgccgtttggcccacaggtggaacctgtaactggagattgggcggctgaccatttatagtcttagaggtgttcactgctggatcttcgtctgtttcgcccagggggatgtcggttacaagctgttgtccggtagcctgataggcttttcgtatcaacacagtggcctgtcgggtccggtcgtcaatagctgcttactgagcccttaacgtttccatcttcttgtctttccattcagcaaacatgcacctttactcttcaaatgcgagatttactgcaacacagagttcctcttgatcatggtacagggtgttggtatggccctgcatgactctaagagcagcacggaggttttggatttcggtgtcatctccaatggttgttcgaacattggttacgagcggaatgatagtgctaggaatgcccaggttggttgctgaactggtattccaagtctcttgcacaccagacgcgattccactcaaaggagtcgtcacaccgtgacctacgatcaagggttttttgggatatgtggttggtgtaacccctgtgttcccttggttttgcagtgcaaaatccaccgcctgtggatttgctagatcaatcatgcctctacgagtctttaccaccattgtgttagtgactagattagggataaagaacgatccttaaatctgctctcaatgaaagtaccaaaatgttgacctcacttttagccaacgactgtgagtctaaattgtaagagacaagtagtataataagtatgtaatataacaaagacaaaagaattttatagaggtttagccccgagcagttcggtaatagcctaatccccttagtttgtattgacttaagaacaaaaaaaatgatcccttttcttagagctcttacaatagtatctctgaatatgaattcttagataagtttttgaccctttgcccattgagtatgaatcactatttatagggctataagcttgggaaggaagaatttccctttggattaccattgatataagtagaatgattgcatattaaatatataatacactaatcaagggattcgaagagcttgccatatcgctgtgatctgatcccaaagttatagggatttcttcggtgactcacgatgcgaaagctgaatttgctaagtattggcatgttgtgcggattgctcgctacccgcttgagagggcttcatccgagcgaatatatgtggtgccctattcggcatatttattgcgagcagatacatagagttaattccacttgtcaccatcgtgtgatgccacatcagagtgcaaaaattgggataagaatatatttataattatttttcttattctttaatatagcacatatatatagctatttctctcatacttttcctaatttagagggttgctttaattctcaactaataattcttactaaatatattaaaattacaatcatcaaatggaaaagttaaatagattttgaataacaatattgttgacctcgcttttagccaacgacagtgagtctaattttataagcaacaagtagtttataacgactgaaatatagtaaagcaatctaaagatagaggaattttatagaagttcagccccgagcagatcggtaatagcttaatcctcgttatgtgctgacttaagaacaaggacaaatgtccttttcttataactcttacaatagtgtctctgaatatggattcttagacaaaatttcacgaccaaaatgtttccaaccctttgcctagagaatatgcatcactatttatagggcatgagcttggagaggaagtatttcccttttcgttacaattgatataagcagaaagattgcatagtaataatagaatacactgatcatgggatttggacagcttgccatatctctgtaatctgatcccaaagttatagggatttccttgataactcacgatgtgaaagctgaattcgctaagtgtttgtcgttatgcacgggttgcttactgcttcgtcttgagcaagcatacgaggtatccttttcggcctgtatcttgcgagcaaataccctgagcagattccatgtgtcaccatcgagtgatgccacgttagagtgcagaaatttggataacatttgccccccaagtctgtacgggacttccaaagttgtgtgtagacttcatccaagctctctttgcgtttgaatgggtgacacgtgttaggcgcgtctattcgtatgtgaggctgactgggcgtcccttcagttttcaactaataaatgttgtgacgtaattaatgttagaaatctgattttctctcaccacgttcgacggttgcacttgattgcttttgatttgccatattcgctttttagggggaaccgaagcgtctgaggttttttgatataattactcctttttgttgtatgcctataaataccactgagcatttgttcacaaactcattttcaccaaccttttttgctaagtaagttcagagcgaaaagagaggcttttagctacatgtttgctgaacgattttcacgagttgttcgatcagctttgcgtaacctgaacccagacgttctatctttgagtaagtcttcgatttcaattactttactttgcacatttattttctgaatgcaactttaactttgctgtagaagatatgtaggaaaccctaagtgtttgaaactctgcaattttccttggtaacgattcatgtgatttcatcgctcataatgcttgctttttgaacttgacaatgcctgtctttcatcttgcttatcctaagcttcatgaaattttttgccctaactcacgaaaatttcaaacttctgtgttttaactttcgttgaatattttgattctttagtctgttgagtactcctggtcggcatatttgcctgttttaatttttgatatcccaaccaaacactcatcttgtgtgttgtcttttgtagatgaacccaggtgagttttggggaagcaaacaccaaatcgaccaggatttgcttcagctcttgcacgaggatcatccttgtcttcgttctagtccaccctcttcgagcgacggacattttatcttaaatctcccgtccaaccctaggatgatagctcatacaaaaaatacaatacgtagaatcgacacatatgaccctcaagtggtccggcatgccaccttacccagtgtcgaacaagatctgtccatccaggaggaggaggatcatgaaggggatgccgaggtccaagagattgaggagtagggcgatgtccaccctcgtagtccttctgaggcagaggaagaggaagaggttgcaccaccaatctttgggggatataatgaggctgggaagccaattgacactgacaccaatttcctcgttgaaggcgtggacttcgttactgaggaacttactgtcgcggttcctcagagaaggcatggtgcattgggagccaggtgggtgagccctccatccaaggtcacagaggcacgcttacgggatctcgatcaggatggctacctgggaaagttagactgttacattcccgcc

SEQ ID NO: 217993 - DNA, 10980 bp, Cannabis indica
ataactttatattttttttttaaaaaaaaaaaagagaaaattatacaatgcatgtttcggtgtttggaataactttttagtaaaattttattattgtggtctacatcgtaattagttaatattgagaaattttaaaaaaaaattagacaataattattctaaatatcaaaacatgaatccatttaatgaggcacccaaaaataattattgatgtaataatagtagtgcattatttgtccaacaataaaacaaataattacttttgctataccatgtgatatcccatttatacataaaaaataatatgtatattgtattatattgtagggacaaataataaaaactttatcaggtaataaaacaaataggtgggtagtgaattgcacttttaagttttaataattaagaagtttgataaaggtgagattatttatttattaatatttttaataactttttaatattgcagttggtattatccaattccttacttttgatttttgataaaaaatattttttttaaaaaaataatcaaataagtttaagaacatgtctatggtatgcaaccaaattggcataaggtgagtattttaattctgatttttattttataataatgttctaattgtagcaaatcttttattgaaagtggagtttaaatttattagtttcaccttatttatataaaataagatagacacaaatttttatattaaaattttttaggaaattctttataactacaataaagataatcatacaaaaaattaaaattaaaatattaaatggtaaacactaaaaattatgataagatttatcactccattttttttttaatgttgaattgattaaaagttgtaataattaatagaatttggataaagaatgataaaattgaaaaataaataaagattaaaggattaagagatccattcaaaaaaaaaaaaaagattaagatgagacaaatgattagacttgttaaacattcacttttgcttagttgtcaaataaaatattgaaaagcattacatgatggcgacttagttagatgtaatgttgattgactcttctcctacaactcaaaacaaaattattatgggcctaattgggctaaccaaacatgggcctaaatggcccgaattacacaaatgattttgctatttcaaaaataccatttttttttaattaaattacataaaagagaagaaacactatatcattttaacatcttttcttttatgtttgaactcatgatttacatctttaatatggtcaatagatgcacaatgatatacataactaaactaattaattgtagcaaaatcataattttaggtacatataaataatatcataaatgttacaaaatgaaaatatttcagcatggccaaatttcatttctttaagaagagggagaggcattgcttgaagtggaaggttcttgttcttggttaagtagttgagactcaacttgaatttgggattctggagccgagctctcgggctgctgaaccgatgaggacgacgacgttgcatctaaagtcggtgctgaggcttcaataatctcctgaggcttaaacttgttaatgtaataacttagtgatggtccactgtattctactgtcttcaccaaaggcgcaggagggtttttactaacttgaaggagtatcgatgaagctgcagccacagcgatgagagcaaggcctgcggaaattgctgctgtgttctcagctccatctgatgaggaacctgcagttcctgaacttattgcactttcagcaacataaactgcaggctgcgaaatttaaatgatattagttcctagtttatgccataatccacagtccacactcaatttgtgttacatttctcatacattgaaaatggttcatacaatgtgtccaaaggagactaaaagatctagaatttactttagctaatctaataacaaaacataacttattagagaaatatgcatcatttggtttatcaagtccaaatcagcctagagttctaattggttgtaaggctgctaagagttgtatcagatcaaatttccaaggattactaagaaggaaactcttcttagagaccggtacagctaagtgtttctcaacagcaaagaaagagtctaaacttaaccttttcactctctaaccagctgctctcattaaaatccatttgttaacagcttttttctgtttagtgctctatccatatcagattggcatgaatcaaagtataacctttatgatcttccatatgaatttcaagtctttgttaataaaaatttccttcattcaagaaacattgattctctaaattaatgctgcattccaaaatatgtgaaacgcatgctctaaacagggcttgcaatgtagcgaacacctcgattcggcttactggtgccgacagaattgccaattctgagattttcatggacattattaacttagagaatcataactgtctcttgagtggttgttgaatagctcattgtcatttgtttcattcacccaagtaatcatatcatattagaatgaacaatgagataagccattcaattcaatcttcttttgtgcaacaattaaggtcagtccttagtgacaaaagctaaaaagaacatgagaaaacaatactaattgtaagtaaagtatcaggaaattactaacctcaacggaatatatgttagtctgcccagcagtgtccttctcaacatatccagtccaacccttctttcgcgggggatatgtgccagccactttggtcttttccccagctaaccattccacactcaccttcccaacctatttcaaacatgtactgaaatcaatctttcactcgaattcaacccaaacacacatcaacaatcaatccaaatactataaaaacaagttctctgattctatctttatcaaaacgacttgagattgagataatcatttataaccacttggtatggtgttatcttttcatgggaatagtaatcttcaacattccccggttgtatatgatttttcaagtggatatgagattactccatgagaaggtaatcttaatccttcctaaaaaaaaaaagtgagttccaaacattccctccaatcataatttacaacaatttatcatattcatgtggtttagctaaacaatataatttaattaacaataatctaaccaaatattcacaacaaaacacagttaatattctaattaatcagattatttgcaggttacacaaatgagaaattccactgttactaattatcaagctcatttcactttgggctaaaaaaattccaagttcaattctttctcaaatgaaaaatcaattataaaatcatcccaaaaaataaaatccctcaattcaagaggaaatcttttacctctttatcaggggcgcattcttcgtcattgcaatcttcatcttcagcgacggaagctctagcaataagaagccgggaatttctagggtgatgaaatctgtggcggaatctaccaaagttgcagaagctgctgcttttctgggtaggaaatgcgcaagagaatgcgtttgaagcaatcatggcttgagccacagtactactaaccattgtttgaaattatcagaattttctcgggaaaatagtaaagaaagaaaattttatgtggttagagaattgaagatgagtggattttgagttggctacgtgtccattttctcttcttttatttcttttctattgccacgtcagcagaagccagcgtgtccaattctgccacgtaagaatgttcatctatcctacctggctccattttgtacttttcttttttccgatgtgggactaagaaacgagaaaaattcaatctttttcctgtctttcttcttcttcttctctttcacagctctaactgtaaagtctgtaatggtctcccttttaatctagttccaatattccgtcgctctcatctaactagaaaggtttattttttgctctctctgtaatgtgtttatctctgtttaatattctgatagggtgttttcttttttttggttaatttcacttggcttgtgttctgtgatccttgaatgaatttcattgtctacggtgcttcaatggattaaaataatcataattacatctgggtttgaaggctttttaggacttggagatgaagaaggagcttctgaggtccttctcggtaagtattttgtgcttgagattatacccttttcctctattcggtttggctgtgaaatttgattattttgcatttgaagaggctcggaggtgttaggggttatcaggggacgagaagtaaggagcttaaaattgagggaattaagcatgctatagctgttgcttctggtaaaggcggtgtcggcaagtccaccactgccggtaatttggccttttttcttataaattaggctaattagaatattttctccccaactttgactaccaaattgtgccccgaacttttgaaactgtgtaaaattttcaagttgcaaatatttagttacatagatctgattatgagtttttaaaagggtaatgaaagttctcaatttgagagtatgttcctaaagggcctaacaaattccaattaggaatttgtctaactcactttcttttttctttgagtttcgggaatacccccattcataggttcaaaatctacgtctatgaattgaaaggtctgaataatcaattctgctgtactaaattgtgttcccgaacttttcaaattgttaaaaatttctccaaaattaaatttggaagcacaattcaatacatgtcaaagttcagaacatgatttagtacaaatttacgagagaaaatcctaattagcctttaaactatttccattgttgttttttttataaagaaatccatgatatgggctcttgtttaaattgtaatacatgaatgaaaactgtactgtgttaggcacttgttcgaaagatgaataatttataagtcctcaaaccagtttttttttgtagtgattatgagctcattgattaattatgcatattggtggtttttgtagttaatttggctgttacacttgccaacaagtgtcagttgaaagttgggttgcttgatgctgatatttatggaccaaatgttcccattatgatgaaccttgataagaagcccgaagtaactgaaggtatttttgttaatttctctaagttcactattgtaatttccaatgtttgaattttgttctaagttggtattgtccattgactgattgtgttagaatgtattgaaagatgcttttgtgagttagaataggttagtatatataggagagtaagtaaagaaggagggtatgcaatgaattgagtgttctctaattgcatcatggagagcgtaggcctctcaaatgcctagggtccctgctctgtcattctctttttactgcaatataatttcacagtatttctttggttttctacttgcttttgctactgttatttcctaagtttgatctatcgggttacatcagaattggactatagaaagttagctgagtgattggttttcaactagaatgtcattaagatattttatcttcagaatttcttttttagttactttctagtaattagatcccagctttctgggaacaatttatcggtttagatgttcgaaacatactcggatacttgcattctttatgaatctaacatcttggtccttgctttttctgtccctgttgcttaaactaaccaaaacaagcctctatttctgtcaaatcatttctctatgaaattaacatttgctaattttttcctcacaataactggtgggagcttgttgttcatatcctaattttcttctttttgtagataagaaaatgattccactcgagaactatggagttaagtgtatgtcaatcggacttcttgttgaaaaggatgccccacttgtctggagaggtcctatggtatctttttgaagcattctagctcttcatttattctctttcttgttttctgttcattactgtctttttgtacttatcaaaagaagaccaacattatgttctctcagaaaacgcttaacgtttttatagaactgttaatgtcgattcttataggtatcaagcgctcttgaaaaaatgacaaggggagttgagtggggaagccttgatattcttgtagtggatatgccccctggtactggcgatactcagataactttatcacaaaggcttcgactgtcaggtaattatggaaattatgctcaaataggagccatctcgtgataacttgtgcgaatgtacccaaagtgaagctttggcaaagtcctttattaaaagctaagaatcatatcttgtgcttcgaagtctttcctgaacttttgctactaaaataaagtcaggattcaggcgtgcatctatcttttaatgcgagttttctatgtttgctaaaactatagacgtttcactcgcaggtgcattgattgtttcaacacctcaggatgttgcattaatggatgctcgtagaggcgtaaatatgttctctaaagttcaagttcctgtaagattatttctccttgcactattttaaaaaccttatgaaactaccttcttcacctcttgctttgcattagtaatgtttttaatcaaacactgattacttttttgtagattttgggactaatagagaatatgagctggtttaagtgcccacattgcagtgaaccctcgttcattttcgggaagcatggtactcggaagacagctgacgagatgggattggagtttcttggcgaggtatgctgctaaaaatcagtaaatatcattagttgagttcacgataagttgtggtctgatctgtttttgtttaaatgatgttagataccgttggaaccagcaatccgagaaggttgtgatgaaggtgttcccttagtaatgtcagcgcccgattcagcagtgtccaaagcctatgaggatttggcccataaagttgtcaaaagacttgaaataatgtctaatgaagaacaaactcagccagagattcgactgtgatctctttcttgtttggtctgtttctgaatttgaagcatccttacatgtctttggttttgctcatattgtttcttcatcttccatagttacataaagtaagacttttgattatgctgataacccttttattttgtggggtttgaggtattagattgattggttttcattttgaaaaataattattttggaattttataatttggaaaaataatgactagttagtgaaaattaacacattgcacaaaagatggatattgatgcaatttaatgtgcatataatttttttataattcattatggagatgaaggcaaggttggagatgttcatggattttgtttttctaagttaaaaattatgactttagaagaaaaagaaatgcaaaaacaattaaccattttattaatgaaaccattaatatgtgaaaagcgactttgcaagtgagattatgaaacgaatgttatggccaggactttgcattatatagaatagaggtggaaaaatggtttagaaacgataagtaatttttcttaaacgaatttttacatttatttataatgtccaacccaaagcccactaattattgtattatcttaaatatatatatatatatattttcaagccttatgatatttttgacaagtgttgttcaagttttattgtatttgtgataatttaattattagtaatagtccaaactgcagaaaccgcaaaaaactgcaccgtaccacaccatttattgcggtacggtttttatggttttagtttcccggtgcgtgtgcggtttgaaaaattctaaaaactgcatgtacaagttagtttgaaaaaattgtcaaaaaccgcatcacttggacagcaaacacccttatttgagaattttcatcccatcacactaagttaagttatgaaagggtttccattctaagttagaatttttaaattagcatgttactaataagtaatgaaaatcaataataatgtagtcatttctttatatttatatacttactttattaaaattaaataagtgaaaaaaaatactattctactttttaaaggaaatagattttatttgtttttgtttttgttttcagatatgtctgtataaaataactctacgtattcagattacagttttttaataaattaaacaaaataaatcattattattttatttttaaacaattttaataaacaacatatatttaatattaattctaattattttttatttattccattatatttatatttttttttgtcaattgaattccattaccaatatggtgtaacgttagcccctgaatagtaaaaataaaaaggctatcttttcctataaagaaactataaaagggttgtttttaagattttcttgaaaacattttgattttcagtttgattatcaaattcttgttctttgctctgttccttcaaatctgtctgaatgcatagcttcgccgctaaacccctcaatttcaaaaccccaactcccttccaccctaaaccaccattctccacactctctccttcccattgctccttcttcacctcatcccccaacttcaccctccaaacccctcttctccaagttcacagccttaaccctaactccatttcggcgacttctctcaatggctccacctcactcctccaacatacaaaccccaagaacggagtcgcacttaaagccgttgacgtttccacccttggcaatctctgcgtcgatgttgtcctcaatgttcccactttgcccccatcaaacaaagaggatcgtaaagcttatatggatagtttagctgcctcggctcccgataaggtttgctttgtataagattttttattgtttttatgccaaaaatgtggaaatgcatttgacccattttagatttgttgtcaagaccgaagaaagttttggtctttttgaaatcttgataagattcatgcatttttgtagcgatattgggaagctggtgggaactgtaatgtggcaatagcaggtgctagattgggattaaactgtgttgctattggtcatgtgggtaatgaaatatatggaagttttcttcttgatgtgcttcatgatgaaggaattggatttgttgagatgaatgaagataatgatttggttaagagctctgctggttcatatgaaactcttctgtgttgggttttagtggattcaatgcaaagacatggcttttgcaggtatgcattatagttcttatgttgtagcttgctgcttttgtatgattttgtaaagaatgtaacgtgaattgaattatttgtttttatcagtcgagctgatttcagtaaggaccctgcttttagttggttgagaaaactatctgctgatgtgaaaatggctataaaaaactcaaagattctgttttgcaatggttatggctttgatgagcttccacctggaataattgtctctgcattagagtatgctattgaagttggaacggcagtgttttttgatcccggacctcggggaaagagtctttctgctggaacaatggaagaacagcaagcacttaatcatctcttaatgaagagtgatgtccttcttctaacagctgatgaggtcttggcttaaactcttatggttcttctctattttatggtcaatggattcatctcttagttggtcaatcatgccttggtttgatagccaaagatattataatctttttatctaataatgttcttgatttttcaggctgagactcttactggcatagaacatccgatattagctgggcagcaactactcaagcaagcagtgcgcacgaaatgggtgattgtaaaaatgggctcgaagggttcgattttgattactatgtcaagtctatcatttgtaccttcgttcaaggtatgatatgttttttgttcagcttgttgatttgtctgttttctaaatgttctttgaaaatttacttgaactggttttggcaatagtaaatttatatgctctattttgtttatttgttgatacttgactaatttcatatggtgctgtggaaatgtaacaggtggatgttgtggatacagttggttgcggggatagttttgtagctgctattgcatctggttttataaacagtttgccgatggctagtacgctgtcaattgcaaacgcagttggtgctgcaactgctatgggttgtggtgctggtaggaatgtggcaagcttggagaaagtagtaaaactaatgaaggaatcaaatttcaaagacgacgatatgttttgggaggagttgtttaatgtaaatttggatgtagaggaagttacaattctttcaaaaatggctacaaagggaaacaacaataataagatgatttgtgtttcgcctcaaagcgttgtctctgaattgcttcctacttttgaatctcggcttttagaaggtaaaggttccatcttgaaggagcatatgggagtataatgaaagaggcacatttttggtatagctcatttgtgattgctcatttttagaggacagggggaaagcattgattagaggtgacgatatcatagcggttttgcttagtatttttcaggagatagttttgcttcggtgcttgttgaagccatggcagagagcttcttcttcttctaagtgggtttcagaaagtacttgtattctttgcaccattacaaccttgttggtgtagtctattatgattgcgtaagcaaatgcgatttcatatgttgtataaaagaaagtagtttcactaaagaattttacatctttttctttttgaagagaaaaataaaaattgttaggaatgaagaaaatgggttcaatcttcttttatatgttgtattagtattaatgtgtactaaaattataagtgattgatccactcccacatatatttttaaaatcacttaaaagtcattaaaaaattcatattttaaaagaaaaatcagcttaaataatacaaaataaatt

SEQ ID NO: 217994 - DNA, 4897 bp, Cannabis indica
aaataataagcaaatatgtatgtacgtgttattacaataattcaatccaatctgttgtagtaattttgtctatgcccaatttgtggttataatgcttagatgacttcccatgtccttatttggtctagctcctagttgtattgagttgaaaaaagttggccattgatgatagatgtgagcatttaagaaggatcaaatagtgtgcacgtgtatagtttaatattttcacatttctcattaaatcgagtttgtaaaagcgaaagccaattattaacaatatctcttgattctttcttttcggagtctaattctttgggatctttttttttattctacatccgtacgtaagcattcaatttaaaatttagtcatatctatcttaatttccttaaaaaagttaatatcaacttacgtagggatcatataaacataacttaaaagattttcttcttttcttataaggaagaggttgcaatttggattcttcctctctaatatctaaataaattattgtaagagtagagtttgtgtacataaataatgtgcataaatatggaaaatatataacttgtgttcactccagaaatttgatttggaaatctgattatcagtttcgttaggtgggttatagttttgtataaaataaaaaaagaaaattgatagtagaagggggatacgtatggggcagttggactttattagcttgataataacggcacagctaagcttattaaattcggcgcaactgccactgtcccattttgttgagtattttatgggtacttggtgtaaaatttaccttaaatttgactcaaaaaataatttaatgttacattttattattgtgctttaatatattaaggataaaattaatttttcttttaatgaaaaagtcaataaattttttaaatttttggataattttttagtaaatgtattaaaaacgattttatgtaaaattatttttttaatatatgtcattatctctgtgtttatatttaaggttatttttttttatttacttatttttttaataattatttattaaaaatactatcattcttctcacacaaattttaacatgtgtcaaattatttattaaaatataaaatttattttatgccataatatttatgttaaatttgacagctacattatactccactattagtttaattttataaacatagcttgaaatgtatatatacaccatatttatagcacttttttaaagatacttttatactttatactttgtggatttccaattttttttaacctctaactaaattgattacattaacgaaaattttaatctaaataacctaataaaaatctaatacacaattaatatatatgaaatggtaaacatttgcttgatatttagagtagtgtctctttgttgtttattgttatgctaatagagtggttaataaagtttttaaaacctctttcttttttccagatcacttttttttttttgaatggccagatcactttttttaatatgaataatcttcctattaagtttgtctctatagtttttaaatgattgctcttcttaatgaagtttattcttgaaaaaaaaaaaatgcaaaaatgacatatataataagcggattaaatattattccaaccatctcaaaataatccaaataaatcagtttacatttattttaaagaaaattacataaattatgcttaatgattaaattatttttttatttaaaaatttacgattaatggtgttttatttgatttttagattttaaagttattgattttgattttattctatttgagaattaaagttaaatttagaatttagactatattataatatttttttttttgtattttaaggatgacagtttgatatttttaatattgatttaattaatgtttatctcatatcttagtttttaacattaatttaaactagatttttaaacttgacatataagtatattataattttattaattttaaatcgaattatttggaccctaaaatgtcctaacagtaataataaccataaaatatataagttgacttgatgcatttgtcacttgaaaatttatcgaaaaaattagatttttaaacatatactacttaagcaacattttaattttatggtcccaataatcgtacaagaggtaatttattattattagtataaattaatattgaatctcacctaatttattttcataagtaatacaaaaaattactaactaataacaatgctcatttaggataaataaaccaaaactaatgaaagaagcaaataaatatgcaaaaatcaaccacattcatagtttttctcccaacaatataattgatcacgggtccatttttaaacatgttggattcaagattgagtttaccatgaataaaatgctacagaaatgttgatgaatgagttttatacatatgtatggatgactttgcaaattttatgagtaccactgctcaattaaatttagggaaagttgatttaaggccaactctaattgaatgatgacaaaatgtcaaatatagtgtggtcttacacggatatttggagaggtgtagtgggtagtgtatgattgtggaagaatttgtacacattttattatttggtttaaatttaaatgtggaaacatgttaatttttggtgggttgtacatgattttaaagggtaaaaataaactttttgtagagtcgctagagttttacatgtcccactaagtaaactctgttttttttttttttttttttgagaagcttaagtaaactcttttcaaccgaagaaaaaaaaatagtaaactcatttcacactttctcatgctagggtcccactatctttaattagtgggtattttataccagttaatttttttttttaatttttaataattatatattggttgcataattaaattttattgaatatatatgtaaaattttgataaaataagctttcaaaaacaaaaaagttaataataataataaaatttaatcaaatatgagtatggtagggtcccactaaatttagtgggtactgtataccagataattttttttttatttttaataattatataatggttgaataattaaattttgttgaatatgtatgtattaaaatttaataaaataatataataataaagtgtatttttagtattgtagttggaataaaaaaaaaattagtgttaaaatctttcatcaaatttaaattttagagtttggccctaaataaatgcatctcagttcatgaattgtgtagtttccctcatttaattggtgaaaatgtttaatcttttctcattaataatttgtctatgaaattgggggcacagtgttttgtttggatttgatcaagcattttgacaataatatagtagctatatattagtttgaaaatgttgtatctcatctcaaatatgctttggatggagcatagttatttgcttaataactttataattaattaaaaaaatttataatatttattaaattaaaatgtaagagaaaatattagaatgtatggatagtaatataccatctcatgtagtacttggtgtgacttatcatttcttgcattgatgtaagacccactgtgcaaaattaaagttcacttattaggatggtactaatttttcaaatcatgagattaatatcataaattctcttttttctttaaattcagttcaagtcaatttaattctacccacctcatcactgctacgtacagctacatatactactcttcttattatcaattcacataattatataaatagatatctcttccttttctctgtggatccaaacgaatacaacaacacatatactgatagatatggccagtttcaacacaacaactactactactaataccaatgagattgatcatcagattaaaattagtagtactagtagtgtaaaagaagaaaaaaatctagaagaagaagtgaaagttgaaatgagtgaaatggagaagagcaaagtggggatcatgagggctctagtccaaaaacaagatccttcaaattgtaaggaagtgaatgatgatttgatgattcgaagatttcttagagctcgagacatggatgttgagaaagcctctcaaatgttcctaaagtacctaagctggagacactctttcatgccacccaatggtgggtgcttcacaaactcagatgttgccactgatattgctcacaacaaggtgtttatgcaaggccatgacaaacaaggacgcccacttctcctcgtctatggcggcaggcataagcagcataaccctgatcaccttaaacgtaagtaaattatatattttttatatatcttattaatagttatgactttctcttcttattattaataatttcattatgatgatcatcaggttttgttgtctattgccttgaaaaactatgtaccaggtaggtcgtacattattacatctctcctctgttttggctcagtaattgatcatagacagtatacattccatcccgtgaaatgggaaaacgtgttatctagctatattcttgtgttaatttttagtaaaaaaaaatacataaatccttgttaattattcgttattgattaattattattattattgtagaatgccaaaagggcatgaaatgtttgtagccattggagatcttaaaggctggggttatgccaattgtgacattcgtggatacctagcaggtctatccattttgcaggtagttataaatataaatatatatataaatgcatatttcataattaattattgtttatgtacaaaatgtattagtctattttaacatatttttgtaaaatatttacatttttacgtttaaaaaatgattttttttttacatttttacggttttccaaaaattaacacgaa

SEQ ID NO: 217995 - DNA, 5648 bp, Cannabis indica
acccaaacagacataagttgaaacatccagagtaatgtaaacttacccaaatttatttttcgtagtttgtctttttgagaagaacaaagtttcattttattgaaattataaaataatacgacaaaaaaaaaatgtgatcacaaatataaatcaatcattattattcagtgtcattcattcttttcttgaacagtggtaagtactcacatactgtatttttgtgaaaactttgttgcaagtgattatgacacaacatttacatcgcctttatttgttcaaagaaatcataatcactctcctcgacaaagattctaatttcaaagaaccattataacaggataagaatatttgcaaaaatatacacatgtatcacactaaattgtagaaagtattaagtaatagagtttgttacttcttatcaactgatgtaataaaagaatataagagaatcatttgaattaatcaatgataattattatgagcaagaaaaataactcagtgggtgtaaataatgaccgtatatcttcctttctaaaaaagatttaactagattgataaattattttaaggatgatcataatcaatccaaaaacacatcaagtaacattattttttatcacagagcagttctttttcctggtgatcataatccatagttttcacaaacaagcgagtacgttgcgctaagtcatagaaagtcttaagtatatgaaacgttaaaatgtctttcgagttcaacaagctaagatcacatggaaataaacgctaaattaagcaaactgtaacgagccaaggatgacttcccattggaacaccagcacctgtattcaattcgaacaccaaacacggattgctaatgttaacggttgaaggcaagatctcttaccgacgggtagagttgtgatgttggttcacacccctgcgtgaatcaacatcgtgaccatgcatagggtagccagagaaccgaaactcctgctgctgaaagatgtcgtcactgttagaggcactagtgacttcagagcaagaggtggtagaagaaccatctttgtagttctccagttgttgagcttcggattccatcatttctttattcatatgacttcgagcagagctggaagaatgaagatcatgtccagtagtggcatgatttgattcttggacatcctttgagttcagaaagcgtccgccagatcctctagctctcttcagtgcatgaaggtgcctagattcgtgaagatacggctgcatatgttttaaacaataaaaaaatagtgtgaattccctttggaagtgcatagaattccctttttaaaaaatgtaatgtcataaaagatagaacacttaaaagggtgcaaaacaaatgtatgcacacacctttcgaactttgagaaatttgttctgagcttcaagcttggctcgaaactttctcctccttaaaattgcacggtattgttttgcattgacataaatgggcggctcatcctctgtaagatcaagaggcaaaggcactcgggcgggagccaaccccacaacctgggaattgtgaacctaatgccatttcaacattaattatgccattggatgacaaaagagaaaatacattcttttgtaaaagcaactcgtttttctttcaaagagatgaagaaaaaagagttcgccctcaatcccagctggggatcgaacccatgatccctcacattcttacccaaccacttcgcctagcatcaagtggcaactaagattgctttataaattgcaggtaacaaagaaataaagagcatggcaaccattggatataagagtcatgggctacccataaaataaagtactacattgaaaactttcgcagtttttctttgctaaacaataagaacaacattagtttattataatgatttgcattacaattaatcccttgaacaccaaattagcatttcaatcaaacaagtgccattttttaaatccctttctccgctaaatataagcaaataaataaaatgaaaaaatgcattgaaaagctttttatgcaatgaaacttagtcctataaatgatcataatgatccattttatgcttgattttaccctagttaaaaaaactaaatctcataaaaaaatgaataaagtataataatggttacaagttctacacgctttttgagaggatctatggtacctaattacatcatgttaacaacatagtaggatctcaagcataatctaagttcaaatatcaatttgaaatctaaaatataagttaagacttttgttcttcgcataagacaaacctgaatttaaactagagaacttaccacagcatgtggcccgtatgctgcagcagccagtaagccaccgaagtatggctcagcatagccgtacggaatgtgagcctaaaaaagaaacaaatataggtatgattcattccagtgacttgtataaagcaagagaaaggcgggtttcaacttacaattggttgactatactcaagttgtgaagggaggacaaagtcttgatttcccattaatgagacttgtttaatatggcttcccatagtcttcccctgattttcattataccctgagcaagtacaaggctacttcaattagatgtagttgtaaccaacaaatatgataaattgataaacccaaaaatccaagggtataatacatattatcatacagatatgatggttaaaccaaatcaaatcaaacaattttagtactgacttaggcaaagaagataaagagcttacgtttaatctatacatacagcattaattttaatatctagtttatagtgtctgtggaatcaactagcccatttaacattcttatgtctctgtcatgtcatgtcatgtctcaagcttatcagtttagtctgattatcaaaagggttcctatagacaagaacagaaagattcaaagatacataaaatcaccataacaatcaaaattactaactaactagtgcacaggcgtagaaaatttatttgaaaaaagtaggggggcaaggagtgaggaaagggaggtttattattaacctgataaagttgaaatcatgtcatttccatacaggttccctttcatactagctccttcagagtaagattgacctgtagattgagttgaagatgaatcttgatcttgaaattggaaaatcaattgcttggtgttgttaaattgttgtgttgaaactcccatattcaagctcagacttttggatacagatgactgttgggcatgtgactcagttgaaccgtcctcccacgatgaacaaccaacaaatacttgtgattctgactggacggaatgaacaccagaatcttctttaggcaaactctgcattctctttaagctgacacttaaagcttctaaattatgatgacaaacttcctatatcttcataaacataaaaacaggagatcctgaccttatatttaggatgaacactcattggcaaccaggaaccgaacacagcataaactgccacaatgtaccagatgtcagtcctaagcaacataagtaaagagataatcctatattatataagcactgaaaatgccatattggtttaacataaaatatgggattttattctaatttaatgtgccggtggtggtaaacaagaatcctaactaaaaaaagtaaaatgattctgagaatttacaaaaaggtaagttaacaaaaggtaggcagcaaacgaaagcactttataatgccacaccaaactctattatttgataaaaagagcagtggcaatagagagtgtgccgtagttgaacttgagcaaaggtatgaagtaaagttgtattgtatattacaaaaaagcatgcagttatttgtccttttacacaaaatttaaatgcaagttatgccctccactccactaccatggccctagcttatcatctttattatactattcctcagtgtttcagttgcagatctaaaattcttgaacagaagtaggtataaaacaaagaaccaaaacatgtatcagcagttatacaacatgtggttatatccaaatcatgaactaatttgcatgtttattcacttctgtccactaatcatatattcatgtatatcattttctggtgaacaaaaagtaataacacactttcaaaaacttggttgagcagagcagtcttacatacgctgaaaaatagagacaaaattcccagttactaaaattgtcaaagaataaatgaaaagtgaagaacaagcatatatcatcatggtcactcgatcagaacaagtaaaggaaaatatcattgaactggaccatttatgataactctatattattctctctagtctaaatggggaagaattaggaacaaaacaaaagaggaagtcaagagagaccgaataaattgtgtccagtaagtcaacctttaaaatcagacatgcttgaaatggaaccgtggaatcaaagaagctacccttaaagacaagctatttaactcaccaaagctacccttttcccaaaacaagaaacccatttataatatttatagagagccactaaaaataagccttaccatctaaaggctccacatgcaatcttataaacatttcacggctctgccataatatgatttacccaaaaaaaaagttagcagatataaaatgaagaagtaaaaaaagacacattcagaaggacaccccacccaaaaaaaaaacccagtttgagaaaaggcataaaaagtagaaaaagaggaacctttgagtaaaatgatttaataaagtgtagtgaaacaggaaatgggattgtgcatgtcttcttcttcttcttctttcttgaaccccttctttctctctctctctctctcgctcacttggcttttggtatcaagtctgaggctgtatctcgttaaaagttaatatattttgcaataaactcacttagctgaaactaacaataccagtcttcagcggcagctccaccaccttcccaccttctccatttcatttatttatttatttcatcttcatcttcttttctttttcttcttcttcttcaaatttttatcaataaaactcagtcttgctttttggttttaaaacatgggattttttatttttgaaaaatatatattgtttaattgtagtttagttttgtcgtgtagcagaaaatgattatcgactatcaacttatacttttcatttatattaattaataaattcactatcactactaataataataaattaatccaataataatattaataatactatttgattttgtaacaagtcaaattacctcggcggcccttgaagctttgaagtgtaaaatctaacctcgccacgcgccaatggtgcctccagccacactattcaacatatttagttactaatattttaactaagtataaatatttaaatttaatttttaattataaataaataattaagtattttttaatagtaataatacttaaattaaattatatttatgtaactttgaaagtacctaaccataaatttttattcatgtgttattttattattaatatatttaaattaattttttcaaaaaaataaaaatttaataacttaaattaataaaaaaattgcacatgctagtttacttaacatatactagctaagtaactatagaaattacagaattataatttaaatat

SEQ ID NO: 217996 - DNA, 9777 bp, Cannabis indica
aaattttataataaaaatatcataggaattatacaaaatatttaaacttgttattattagtggttgttttttttttttttgaaacggaaatcttaatattactcgtgtttaaagtttgagtattaatactataaataaatttttatgaacgaaaagagagaaacaccaaacatatttctaagtcctaaaatatcaataggatttttaaaattaattttgattaaaaaatttattttcttcttctttttttttcatctttatagttccgttatttataatttataatgataaatatcaattaataagaagttataatttaaattttatataaaaatatctattatcataaatatcataaaaattatacaaaatatttaaattaaaaaaattacaaaaattcaaaaagtttgaattgcaaatagtatttaatgtacaaaattgtttaaaatatgttttttttaatctatatattaactaaaaaaattatgattttaatacaaattagatattgatttatatatttaattataaataatttttataaattaaaaataatgaaaaagaccctctaacaattgaaatggtaaagaataactttgttgtctattgttaataattaattttttaaattatctaaaatttagtttaagctcaattaaaaaaatatatatttacacttaatcttttttatcattttaataaacaaaggtcattttttataatttctaaaaacaaaaggaccaaattataatttagttaaaataaatgtgatctttttttacaaaagatattatttattttaaaatgagatgataattattaaaatgagaatataatctaaagatgaaaaaaggaaaggaaattcagatgaattatggaactaataatgcaatattatattatttctaaattacattttatgtatgtggcattatgtaaacttgtaaagaattgtatcaaactatgtagcttttacattcaaagaagggttcgattcaaaaccgaaatttgaccagaatcaccattcaacaagaaaacctccaaaggcacatatggagaagaggctatagatgacccgaaccggtatgtcggttggagtattttgctccctttagcacaccgaattgttcggagtcgcggtcccgttctcatctgccaaatctgcacaatatcgccaatgaacttacacatgttttgcaagaaaaacaacattaaatcgaaataacaagaacccacaatttactcgaataaagaacaaaagtagggtcagtcctgaaatttagtggccgtaaaacccttattctaaaaaaatgtagattttctcatttttttcgcccctggactaagtgggccctaaccacaagcctagcctgtcaagcctgatgatgagataagctctagatgcatacctcgattattccttttcgaggggcgtgaatagccagacagaggcaataatcactcttcacaggttcatcataatagctagaactagaagctacattgttatctttattgactagcatttccatgaataggcaactcgcatcgcgatatccctgcaaaacaacttaagttcgttataaggataatataaggtgcgggctgaactatgatcagtgtcgaaatgttaagggcgaaccttccatagccgcacgaccacaagtgcctgagtgtctaaaagcaaaatacgaccgagcgaatctgttattgcagctaatgtgccactaggtgataaggtgagtttctcgccctttctaggaaaatcctttaaagatgtcaatggagaagctgatgcaagacaaacaagaggattagaatttatcagagtttctctactatggccttgaagttatgttcattacgaaaaaggggaccgaaaaaatcaagttgaatatgtagatgactaaagaatataaatagatatgtgcgccttgacatgaaatcatactgcataaacaattataaacaaagtaatcataagtaactagtctacatgagaaccgaaaagaacacacaaacgacagttcttacctcgagcaaaaggttgaggcttcacatttgattttctaggcgctttttgttcgctgcgccaaatcattttagagaaggaggatatggtagaaaatgttaccggaacgactttagataagatagctccaaccaacgacctacttttatcctccgataacctaattagaacgaagtaactctagtcaattacatatagaagaaaccaaaactcaaaagaagcaactttgaactgtatagaacatactaacctgaaggctgagatgacagcatcgtctccaacggttactgcacagaaataacgctgacttgactgcccaacaataaaagtagctgaattcaaaaccaaaatacttcagaaaattttcgattttgtgaagagcaaagataaatgttggaaagaacgaaaagggcattaacatgaaaatatactgtaattgatgcataaaaatcaagcagctagtgcagccgtacctgtagctccatcagcggtggaggcattatcccgcttatcgctgcatctgcacaacttccatacttgctgacattccatagctggtaagataatcgtccataagaatttccaaactcgtcattatcttgatttcttggttttctatcccaaaaccgagaatttgtatcgtgatgccattgctgcagcatgttctatattccaaacattgaaatcatggtgtaattagtaggattaacttaatagatttatattcaaatatgacacatcaaagtaattaaagcttggtagtaattcaatacctgaatttcggagccatcaaaacgagcaattactccttgcataacaacacaaacctcctctgaggaagtttcttggatcaaatctctctttgttccacggactctcaattttaaaacgcgtccaggatgtataaactgcgtgatcactagagtataagtctaatactaataaaagagacgagctaattacaattcaaaatactactaaatcaagatttaaaccatggtaactcaatactcaatagtgtatgttcatgccaacaaaacagagacaaaattgttcattttgacaaatatatatagaaatggtataaacagtcaaatcttattaatcaaacaatactaagaattaggaaaaattctttcaaaccaaaaattaatcacttacatggaaattaatcagttacacaaagaataacatatgtcaactccatttgttcacagagagaaaaaaaaacaccattatccaattctaagaaacaatttcaagggaactaatagtttctctcttctcattttttttttctcattaacactttgagaactcatatgaatacccaccctaacaccaatatcacgaatgtttaataattcaaacagatcagagctaaatctataatgaaattcaagagaaagaaaaggctaattaagatttttactcccctgaactttaacacataccataccactggaacttttcaagccactaaaaattcctctggaactattgagattgttggatttaacgaattttgtccaattttactaatggaaatctaacttggatgaaagttcaagaaacacaatttgatacatatgaaagatcggaaagtacgatttggtagatatcaaaattcgggacatgactcattaccagagttagtaaaattgaatataattaaaaaataaattctcaaattcaacaatcttactagttcagtgaaagacttaaaaagttctggagcattatttggtttgacaaaaatcctaattaagaaaaaaaaaaaaatgaaactttttcaaaactaagacataattagtacaaaaaaacacacttccaacctctacaatgacataaattcacagtaaaattaaagaaactaagatcaaaatcctttaaagattgataatttccacaaaaacccaataaataattccatataatcaaaataaccaacctgtttatgaatcaagtgaccatcgagagagaaaagcagaaggtacccacaagaagtcccgatcgcaatcacccgaatttcatcgaataccaaccattcgatggcggagatgtactcagcttcaatgggtgataattcaggacggatcttgactttggaatcatctgaatcggaccagctgagagtgacgattagggatcggttagcaagagcaatggcgtgtgtgtcgagagcacataagagattggggttatcgataagccaaccctcttttccggcaccaagttcaccgaggtcttgacaagctatggagcctaaatcggtggtgtgggttcgcttcgccattgttgggtattggaatgaaggttcactcacgccattctcttcttcccacttttttctctttaatattaaacttttatgttataatataaaaaattttatttttacactatttatttatttattatttttttttttacatttttacaaaatttcaaacaaaaattcctatggtaaaatgaacaatttaaatcacaattaaaatccatatacaactacactcaaaaaaaaaaaatccatatagcaactcacgtggaaactaccgaaacaaactaaaccataaattttaaaaaaaataaataaaaaataatatataaagtaacttttgtaattttattatattattattaaaatatatcgaatgagaatgagaatcattattttatttattacacataaaaatggggaggattccactatttttttttccaaaacttaataaataattgtataagaatcaatattccacgattaattctcattcttttaagtaaatatgcaatgagactgatacttaattaagggtgttagcatgtcttttaacatttctcttaattttatatgatatatagttttatttcaaatgtaagatagtgatgagtcagaatttttaacatcacattagcatcactcgatacatgaaataaatataatattgaatacgacactttgtaatactagtaaaattgaacttaaataaaattctttaaatctaaaaataatctaatttgcaaagataatggtgaggaaataaaattttaaaaacctttaaatatttaaaattttgtacattgtatttttataattttttatttataaaaaagtattattatcggacacccattttataattggtgcactaccatatatttttgcttaaaaaactcaatgcattcacaaaaagaaaattgatgcttacaaaggaagcatttcccaaaaaaacaatctagtttgtaaagatactggtgaacacatggaaattcacctcccagaagttaaaaaacccgaacaattattacttaaaccccacttagtaagagcatgagctacaatattagccgatctgggaatccaaagaaagagtaatcaatcccttcaatagccttcaacaacttagaaaaagattggttagcgatattctttagctattttcttaaattatataaaatttaatatttaattacactaataataataataataataataataataataataataataataataaggtaagagggataagagtattaagtttagcaatactctttatgaaattatcccaaggaaaaatgaggttgtattagtactagtctcaagtttaccactcaaagtgagttgctttgctcaaaaatggcgggaaccatataaaacccaaagaagaaaaacccttattcatcttcatgcgaaccatcttcactctcagtttcacttcctctactgcattcaccatctctaaaaatttcacctttttccgctttgcaacatacccatactcaataatggctccttccacaaaaatcgtggcagagtacgccaaatccaatcgctcatcttgcaagaagtgctccaacaccatcgattccaagtctctcaggttgggtttggtgagccgcgattctcggggtttcgacatgactaaatggcaccacttgggttgcttctcttttggctcggaattacctctttcggctgaggagattaaagggtttgatgctttgaaggtgaaattgatttttgggctttatgggtttgaaaaagattggatttttattttttggggtaaatgaatgggtttctttgtttatgatttcagagttctgataaggaagctttacagagattggtggagacaatggataaaactcaggacaaggtgtgattttgttaacagtaataaaattgatcaatatatatatacacgtataatatgtatgcatttgtgtataaagttataagcatatatttatagcagtagaaggactgccagcctgccaggaatttatattgaactgtgtagatgccaaaatccataatcaatcgaaaatggtcttacatcttatgcgggcatagacaacctatagaacaaagaagagagtaatcggaaaacctcaggacattaggatagtgctggctgaagggactccgatgggcaagtcagcaagattgttaacaatgtagcaaaaaagaaaaaaataaatgactgaactaaattaccacctatcttgatagtataaatatgtagttttagagagaatgaaagagtgaacgataagtgagaagtattgagataaatgagattgatttgcctctctcagtgactgagagttgcttttataggcattcatggaagaacgttactcatgaccgctcacccctcttgggaagcgctcattttccactttagtagggagattgttatttgcgtgatcagtttgactgaccactttagagatcgttagatgagtaataagacttagtttcatatacgtgtcagatcattgtgagctcagtgtcgtgtcatgagtaatgttaatgtctgacttgactgtatcgttttgggtctgttaggtttggtattgtgattgtaccatcataattagttaaatagcccaactcaattttatttgagcattctttggaaacatcacatatgacattgagtgtgagcccaatttcggccactacagactgtgaagcatattttactcattatgatttaagtttttcttgtaccatatgttttatgttctccattattaggttgatgagaaagatagagagggagatgaagaaaaggaatcagaaggaaggaacacaaagaaagcaaaggtatgacaaatatatatataatatatattcttggatgatgataatggttgatcatgttggtgctgagttacttccatatgttatgatcctaagatgtgtgtgtgtggactctatattaccttccctacatgttgacatttacttacattgtaattactatgtcatcatcattatgcttattcaggaatcattttaagcaatgatgagttgcttgtgaaatccttagtaaaataagctagctatctttattttcctcattattcgtgacgttccttttttctttgtttcccaatttgtattttcttcgtttcgtgagagttcatactattatcagtgccatctgatgcgtgagcattgatattcgatttctatgtaacacgagtccagttgatgtcttttgttttgcacaattattcctgtgttcggtgtaccacttcttgaatcttgacaattatcgaattctgttttgtaatcttgccattattgcttgcagctatctatttcaaagggtgaagtcgtagatgtaacattttcggtttctgatgtcaagaataagtacaaggtctgattcaatcttattacacccttctaaggttttctttctccctctaccacaacagattatacaattttcttagcatgatttccttaaccgaaattgttttctaattcaggatgcaacactatcaccaaattggaaggcatttcaaaccgttatatttcttgagcgggtgagatagttcgttgtattggtgtgtttcttacatattgtgaagagaatttcgaacctaacattttatgtgtttcgctcttctaacaggatgaaggccttaatgattcaagcaaaattgctgcttttgatttcgatggatgccttgcaaaaacttctgtcaaaaggttgtatgctatcctttcggtactgatttcattgaagtgcaaattagcagaagaaattaaaccaaatagaagtaaaatacatttcattccaatacatagtttttaaaatctttcttgtgagttaagatgaccgagacattttcatttgttggaagctttacacaaatttcgctcactaacaactcgagttgcttcacttatcgcagagtaggtgccgatgcttggtctctgatgtatccttcaatacctgctaagctacagagcctgtacaatgatggctataaactggttattttcttattcctcgtttgccattgtacatacggtcagtgattcgtaagcttctagttatttgcatcgttcacctgatttccatttctaatctttgtcaggtaatctttaccaacgaatcaaacattgagcgctggaaaaataagagacaagttgccgtggactcaaaaattggtcgcttaaacaaatttatcgagactgtgaaagtcccgattcaggtagttataacttagaatcaaattgtaaacgcgtattgaatttttattcatataggcctcgaatatacgagcacaagttagttagttagttagttagttagtggtcgagtctatataaaggctagtcctatcttacaagagtatcaatgagaatttatgtgctaaagaaagtaaaattagataccaaactatctcgaaaagtttgatttcaatgaaatgtgtatattctaattctttcaagaactgaacttattcaactgtatatttcggttgcagttcttccttggcctgccagtggccaccattaactgaaaaattaggatgaaaaccgagtttcttgtttcgttttgttgttttcacatttatgtagaaaatttaagagaagttagtgaatgagatttgcactgcaattactattattgtaggttttcgttgcttgtggagtaagtaaatccgatggtcaagcagacgatccctttcgcaaaccaaaaccagggatgtggcgtctcttggaaaatcacttcaactctggcatttctattgatatggatcggttattcaacttttcatttgctcacatgtccttctttctttaccgctcttaaggcttatcgctcgagaatactagctaacaatgtctctctgtatttgcttttttagatccttttatgttggagatgctgctggaagagaaaacgatcatagtgatgctgatataaaatttgcagaggtaccaactttttcttactcagggttataattgcaatgttcctactagtttttcgagtatgcgtttagtattactcagtttaaactgcttgtgttcatcaaaatttttatgcttttcatgttttcaatacaaccaatgccataataaataagacacactctaaactgttcgatttcaggctgtcggtcttaaatttcatgtccccgaggaatactttgtcgtgtgaggaactcggtggcctcgggtggttgctgctggtgcaaaattgacagtgaatagttcatgagattgtcttgaaattatgtttttacatgaatgatttctctagtgatcttaatctaattattgtatagttaaaaaggactaaaaagtttaattatcaatgagtggatttgttcgagttgactgaaaatgattattacatataaaccaaaataactcaatatattataataggagtgttaggaattatattcagaaa

SEQ ID NO: 217997 - DNA, 12257 bp, Cannabis indica
gtatccattaatactaaaaataccttcatatcatatttcattaaaatctagctgggttgtctaatatatcattgccttctatatagcacataatttacactaatctaatgggtataatagataaaaattgatattaaaacttataaatataaaaatgaagataaaaattaaaacagataaaataaagtgagtatacaaagtaatttcctaacttttttaatattaggaacgtctccaattataaactctaaattaatgaatgtgttatatgataacctcaatgatataaatgacttctctaaacacaaaatcgtgagattttacaaggcaaaattgtgaagtgaaaataaaaacaaccactaagagaagaggcaaaggaaatatcaaagttgtaccttgtgcatcaaatcaaaacatccagttcctcccttaactggcaatccaagacaaatcctggcagatggagtgtccaattcatccacctccctatgatatgctgcttcaacaataaacttagaagctgtctcgaaagacattttactgaaaggagataccgaatctgagattcccccgagtctgttcattggccgatatccaccggtgtgagtcatgaagtcagcgatcagtgtcaaatgccggatattgacagagattccgtatgacttgaaaacatttgtaatctctctaatgatggtttctctggcagcttctactccatatgtgtttagcatagcatgaatgttgttggagtatacatacctgacatcaagaacttcattcaactcccaaaatgtattgaagtctaccccagttgcctgcaatgctggaattttgtctttttctttgagaggaatatcttccctgcttctaacatctttcccataataaataacttgattctctttgcaagtgatttgttgacagtgatcgaattttccagagctttcaaagtgtaccttgttggctaccttctgagcaatctgcataataagatcaaatcgaacgtaaaatggggttagagtcagagatatgcaaagggcctagagataaagcctttgaacaatactccaccacaacctctatttattttagtattttctggaatggatcaggggagaagaaaaaccaaacacaaaaccggaatactgtcaagagtgacacattttattgcaggagcaactggcctatcttaaacatcagttttctgtttttttgcgtaaggacaaatacaaatgtcttaagtagaccgagaaccaacactattttctaaagtgggttttactggttcagggtttagctatgattgtaagattgatggaattgaacaaagtaaagcaaaataacattaaactaacatatagaagcagtggacatattgaagaaaaactgtacatcctcctttgatcaagaaaagaaatcaggtttatgtatttggttgtcacattaagattattagacaaagaaatgaatacttgtggtagagggcaaacgtggaagtacctgggccagcagaatatgggcttctataattctgaaatggatcttaaagtcctgtttcgtaaccttcaacttaatacgtcggtccgaatcaattttatttagaaatctcctgttcctcttgggtttggctcttgctttgaccttttctttttttgattttgacgtcgacaagtttccaactcctgaaggacttccaggtggtccattttcagattccagaatcccacttttgtcatccttgctaaattcaactttgttgttaccatcatcattttcactttcagaatcatctgatacatcctctttattatcctcctctccagagctaccttcataatccatctcatctgtaacttgtcgctttcgtttttgtgcatccgaaccaaaatcatccaacccttcaccatcatcctcaccatcatcaccatcctcttcctcacgtcgagatctttcggaagaatcttcatcattctcatctggaccctcggattgagattttacttcaacatcttttattcccttaatttttttgagcaactttatatgagattctattgcatcctccaacgccctaacaaagtcaacacttagggtgtcttcccagtcagctgtgtcgataccagcataaactggaggtttgtaaagcttcatcttaagcttataaatacggcaaattctattatcttcaagggcaaatggcttaacagttactgtcatactctcaataatgtctgccacagtgactttcttcagaccattagcgagacttttcgcatcttccctgcagataaaagataaaaaataaataaagtgccaaccaatgcatccatattgcaggttatgttcatattcaacaaaagaagatgaaatgaagcagctggcacattatcacaaataaatttgattttcctcgattgatttctttttccttggaaatggtcagcacgcatggtgccactacaagaacactaacaaggaggtcccaggttaggttcgaacctaggacctccacccttaccctatccttccctcatcaccgagctagcctcagtgaattgagactacatgaattctaataaacactaaacagcctgtctcctccatttctctaactcaagaaatttccgcactacctagttacttccatgcattaaaaaccattaataacttgaatacttgacatgcacattgctgccaattatcacacacaagggaaaggaaaacatctaggtggcatttgattggaggtaataaaatggaatggaatggaaaggaaacaattttcattctatttctttgtttggttgcatttaaaagtatcggaatgtcattccaatggaatgtcttttccactattttgatggaatgactattccattttaaaatggaaggaaagaccattccaatgtaacatgagaaaaaaattaatgattcttttatcaatttttatgcattaaattttatttcattccattcccattcctatgttttcattcctcacaaccaaacgccaccctagtgtccaaaatcaaataaattgtaagctacttactctgatctgtcatcttgcagtggacatgtcataactggagtcttaatatctttagaagcggtcatcaggatttcttggagacgaggaattccaagggtcacattcatctcacctcgaccagcaaggtgaaaagtgttcagcctgaagagaaaattcatatccaaataaacaaagttattcaaaaaaaaaataataataataaacaacacttgcaatgaaactctgtaagtggatagatacaatgacttagcaagagtgtaagaagtcaatgatatgcacagacctaacaaccacatacataagagccttttctataagatcaaattaagtaatgagaaaataaaacttacgtcatctgtgttgatggttctcctactgactgagaagcaagaacaccaaccggttctcccggttgagcaagacttgagagatacttatgctccattaacttcaataaatcctgatttgagccattatgatttttctccaatgataacttttttataagttttactgccttcttttcaagaacagatggcaaattcttaatgtaaggatttgatttttcaaattggcgacaacacttcttgaagattgtttctttattctgaataaaaatcaataaaattctatttagcatggaaattcatattatcaggggaaaaaattatacataaaatgaacaaattctcaccactgccagtgcttcaaaatttgcaagaaagcttgtttgatgaacatctacaccatcttctccataacgaaattgaacaattgaaccatcagaatcacgaacagtatgatcatagttcactttaaggccttccatattttttaccaagcaccgttgcaggtatccactgcgagatgtttttactgctgtatcaaccaatctacacaacagcaaattcatcattaggaaaataaagctgacagagggtacacgcaactgaggcagggtaccagataccaattaactacaaattgaccagtttgtattatcataaatcatgccagaaaaaaaaaagaaagaaagggcttcggttcaagaagactatacttctgacctggtgcatgataactccaatatacaatttagacaaaaacacaaaacaaaacatagtttctctgcttaagaaattcaaacaaacattacccttcacgaccagccatacaatggaagtaatactcctgagggcgaagaccagaaagaaagcgatctactacaaggcctccagcacgagatgcccaatcccagggaggaaagcaaggtaatgtttttccagaaaccattcgaggaactcgctttccttcaagttcttgttggcctaaatgtgaagatatttgctggaaattcacctgttcaaagcataaattggtagagaaagtaaaaatccaatacagtgtttcgactcttaatatcaaggcacatacgatatcatacatcctggtcaattaatatgatactcgtaatagaaattttttcaagctgaaaaaacttaaattatatattatatcaagctaaagttgataatagcatactcatataatacaactgagattaagaagtaagcctaaggctcaattagccctatactcaaagattgacatctctcatcttgaaatgcaatatcagcatcaccgtccaataatgcataatgcaagaaaaaaaagaaaaaaaaaagcatcaaacacatttagccacacaatgaacaacaataaagacaagaaaaatgttaaggaaatcatatcaacttcataaagaaccatctcataaaaacactccaggacgaaagaaacttacagcaccacctttggccccagatgttgtcataagagaaatacaattcttgctagggtgttttagtaatccaacagacaacaaccctttgatctcctcagatttgcttgttatatcattaagtctactaatcattttccgatccaaggatgccaaggcggcttctccatttacacgaatagttttttcaattttatgttgcagggtaaagggatctgcaacccaaatagattaagattattcatcaacccgtacaagtaactaatgaaaacagtgataaacatggagagaagataaatgggagcaaacttatatttcttataaatttcaggcgacaattaacagcatgctctgaaacaagactcaagataacatagggttcaaaatcacaacctacatgaaatgcctatttggtgaagtttctcctagtataatatatttaagtttgaaagtgtaatatccaaatagcccttggtcagcttctgcataaagaactctagtctgaatttgaaacttcttatgaagaaatcaatttttgatgtacctgtacaaacctttattttttggcgcaaaagcaatataaaccatttacgcacctattttttcattatctttgaccccaacaaactcacggtgaacttcttcaccaacctcttcacacttttcaagtaaactcttcctttctctgtctttactttccactagcaaaagatcatcaactccacatgtgaatccatgcatctgggtaataaacatcacatcaagcaagcttatgtaactaaattttctttatttgaaagacaatgaaagttatactagacaaaaataggtttcaaaataaacaatgcccaacctgcaagaaaacagtaaataaacgactcaatgcagaaagcaaaacaccagctgtatttgagccatagagttcatgaactatatggaccaaaccataatcagcaaattgagccttgtcaatgacaccacggacaaagttgtttttatagataaataatttgtcctcctcaagctcttcattcatcttcaattcatctttatcagattttttttcttttatcgaatcttcttttctctttgattcagaatgatcagcttttctctttttctttgatttcttttctccatctttatcaacttcttttttcctatttgtttcatcgccaattgctttactgttaaaaaagtcacggggtattttcccactcttttcaacagtaaatggtagaaaccccttagtgatatggtttagcaaggcagtaataacctggaaagaggcaaataagaaataaaaacatttagtcagtttttcaagcatacattctaacaaaatgtgattaaatacttcaattgagaaactggaaaatttttttagccaacatctaagccagaaattgttatgcttcacatggtcgaagtttccagataaacttgcaatgctgaaatgaaaagattgtatagaaaattagcattaattacctgttttccagtccagaggggctctggtttccaaatagcaggcataagggattgaatctcaacttcgaaatctgccagaaaaactttattcccagagtttttggaggaagcacttgacctagtagttgaaagaccagtactataaagaagctggttaaacttgtcccgatttagaaaagtatccttctttgtgaggagaacagcactcacaatatgatcctaaaaaattgtaagattgttgataagctgatcaaaaacttacattttgtttttcaaaattaaatgtgtaaaactaacctggatcaaggctcgaataggttcaccactagtaggcttgacatattgattgtttgcatttaagatgttatatccttctgcacgagaaatttcatcttgcggaaaatgtacattcatttcatcaccatcgaaatcagcattataagtactgtagtggcaacgaatacattaaaaaaaagtactagttggaatcggaaaaagaactctgagtatagatacacaaaaggtgctactacagtaattctatctcattattgataggtactagtaattaatggctttaaacaaatttgtgaggccacccaaacaacctaagccactaaagatcttatgattcagcatgaagtcataagaattagtgattattctagatcacccccaaaaaacctccatatacaaatataaatataaaagtaggtgtagcaaacagacatgaattaaggacccccagctgttaaaattgacatcattgcgtttagagactaattagatcatccgggaaactttccatgtatatagatataaaaagtaggtgtagctatcgaacagcctatttggcatgactttgaaagcactttcagagattaagagctaccgtagagaggtaatgagtcaaccccagtttctcaacgaagctcttttgaaaaaaaactagggatgctttaagttttaaggaaataaaaaataaataaataaattattgcccaattttagaagtagatttcctattttatccttattctaattaaagaaaacagttattcaatcaaaacatatttttgtgattttaaatgctcttttatagtaaactatccaaccaacaactataaaaacttcagaatatacttctcttcttctactctctagaagtagaagtaaaattatgccatacaagcatatatggatagatacaagtataaatggcgtttgtatgcatgtccatatctataacacgtatcatgtatgagttaccaacctgcagtttgcatagtgcattcgaattgttttctctcccttcaacacacgaactacatgggccattatactgggcttgtgaagtgtaggctgcaacacaaaaatcaaaactaacattgaaatataactatggattttaaaacaaaaatagaaaaactcatgtttcatgtcccacagagcaatcaaaaaacaaagcaaaaacggcaaacctataaattaaatttcaaaaatccaacagaaagcacttttttttaaataggaccgcaactaaccatcaaagagaaaccactttttccgctgctctacatctttatgttattgaacaagaaagaaatagtttaacaaatagatattatctgcagaacacctccataggtctactgctaactaaacactatgatccatgagacattatgcatttctattactaagtctttgactccaaattctctgtaacaataattacagtgcctaaagcaaaattaagtagggaacataaaaccaatgaacacccaaactttttttagtagagaacagatgggaggccataactcgtggacaataatgtatgatagagacaagacttgcacatttgcttctgaagatagttaccgaaaaaagtaagtacatgtcttgctggaggcacacatccataatagaaaaggaaaaaaaaaaaatcaagacaagttatacctgtcgattgacaagcacgatatcaccatcttgcaagtgacgatgtacaaacttgccttcagattcattatcaaaactacttccattttgcacaatagcccctctagaagaaggtaattttctcgatattgaaatacgtgctcttctgcttggtgctaatttgatagtagacatcttgtctacatagtgtgtagccccaggatgaatttcaggaccattgacgatagcatcccttaacttcgctacattccatggagtaactctctgcaaaatttcaaaatgtataaataaataataattaagaaactatacatcatgacccaaaaaaattatagctctacaaatttacttaaaactaaagattgaaaaggaaaaaaaaaaagaagcatatacatctaattactctaaactatcttccaacacatggcaaatcattgccgattgagtataaatagcaagagaaaaaacacaggcaatacagaagccctcttgtaaagcttacttcaggatatgttaatcttagagcaaagtaaggaggaattccaatttcattgacagccaaatagggatctggtgatatgacagaccggcatgcaaaattaactctcttccccatcattttctgtcgaaacaagccttctttcttctccagtaactgaattattcctggagcagcattttttttccctgaaatcaaaagagaattgctaagtgaaaatattagagatttcatagccaagcaaattggatttggttggacaatcttcatgaactgatacccctcaacaaaatggaaaagctgagagaaaaaatacgcactagcatgtgtgaagagactatcctagaattatgaagactctaactgcttgcctcaaaacttcttttgcaaatgtaatattttcattgccccaaaaggaaaaacgaacgagattctagaaatttgcaccaaaagaaacatttccaaattcatcctacctaaacctttaaaatgtgtgtgatatgtttcaaagctttatcatttatttatttatgctttcacatgataggttcactttactttctgaaacaaaggcattggtgggatctaataaataaaaataaactgtggctattctttgcaagaagaagggtaacaaatcttatctcaaacacaacgacccaataactcaacaatgatgaatttgccaccaaaaaaaattttaactgcagaaaacaagaaaaaaaaaatgtctttgtggttttgaaagtgaagccggacagagattagtgtttcttatatgattgttttaatctttgtttttttaaccctagtatgctcacttcctgctgttctacactgctttccaccatatagtaaagcaaaactacaaaactatgagtacattaaacccaaaaaagagggagtctaagggtgatttaccacttaatagtaatacataacttaaacaccaaatctgaacagtaaggggaaaaagaaaaaactcaccagcagctgttttgctatcaaacatcaaatttatagactgctgaagatccatccacctgcgtacaatcttcgagtattccaacttattaatatgagcgtttcccaaatcaatattggcctggagaaccttacttaacaaaacagtttgaggatgttccatcacctacattaaacagaagccgtaaggaaagatacatctaaattgtggcttcaaaaatgtgaaagtgcaccgaatgcatgtctaagcattgaaacagcttactcataatctatatagaaaaaacttataaaaaacagtcatatgttaaggttgttcagaatcttcttaagaaaagttctaatagaagcaaattttcatgaactcaataaactggtttatttgcgaaggtaagatagggccatctgtatagatttaaaactacttacagaatcaccacccttggacggggggcggaatttgattggaggtacaagaacagtctctaagaaaaacatagattgatctgctttatttccaactcccagactctggatgtcactaattaacgtaaatagttcaacctcatttttccacaagagcttcataatctctttaacctgtcacaaaaacagagaattcaattcatccctttggaaacagagcaaaatatttaattattaataatgcagaaattaatcagagtaggtttattttaacgcttacagagaatataactaaggaaaagttaaggcttaataattaaggcagccaagcaagaagcacacctcttgtggcaacagaggtccagtaaaagcttttctctgtttgaattcctcaccagtgttgttgcactcttcactttttttacgactctttgtagaggtagcttgagtatccatgataacatcaccaccttcagttggtgaatcatgaatgatttcttcctcaggcaacaactctgcatctacaagtggccattttaatttttttcccgccataacattacttctaatatcttgttcattataaggttcctacagccatcaataaaataggaacctatttagaaactaagaaatgtgacaatgatgtgactcccctgccacaaactgtgcaattctaataagccaaatcaaatgtgtgcataaataatcaaaaagaaagcaatcacgatcgaatttcaaacaccaaagattaaaggagattaccatgtgaaaccatccaaaagtaggtttgactattttaggattatatgcatcgcaagattcacatttcttaggtttaagcttcataaagttcttcaaaacagtcattgcttcagtgagctcaaaagaggtccatttgtgctgctttatattcttgacaccagcatacttgctcttcctcccaacattgtcatttggatcagaagacttgtcaggcaaatcagaatctaaggcctttgccccgacaacatcacctttcaagataagttccaactgggaaacacatttctcaaccttgattgacaaacaaaacatgtcaaaaagagcgattttaggaagatgtgcaggcttaaaaatacataaaaccccataaaataatcatagtatactcacatatcttaatcatcacattacacttaccgctattggacccgacctatattgataacagaagaaacaagttctttgtaagtgactgtaaaggatattgaatagcatgggattatagaccggagaaacgagatcaatatgaccacaatgacctgggcagctaaatgaacgctgaccacaagatttgcatctgcattgaaacaggagcaaagtatatttacttagttaacatcattagtaacaaaacccaacaacaagtaaaaatcaaactactgcaatgttacagaattgtttcacttaataatatcttttaggtgacagtgtgaacctttcaaaaaaaatgtttaaaaataaattaagtcttcacattaaagcaatttgcagctccttctacttcacccaatccattcactttaggtcaaaaaaaaaacatataaacaactcacaaaccagagcagaattaataatggaaaccataatagtaagtaataacaataacgttatccttataagcaatacaatcaaaatcaaaatttaaccaatatgcacatgaagaaacacttacagtgttctttcatctaaagatcccaaagccggatcatagagtccaccggggatgggtctctccacattatcaagcaaatttgggcttgtaatttttacaaaactctgcttacgaacctcttcatctgtatagaaactgaactgaaccgcctcgactgactccgtcgcaccctgcaaaagaaacagaacccaaaaaccctcaaaacaaatccactgattcaaacctcaaactgactaaagcttccatctttcaccaaaaaaacctgaatcaaagaacaggctcacacccaacgaaaccacaaaaacaaaacaaacaaaaaaaa

SEQ ID NO: 217998 - DNA, 5902 bp, Cannabis indica
ggtaaaatatttccaacacaaggaccaaagtaagaaaaatgcctaagtctaaggcaattgcagacatcactccgagaactcaatcttgtaaaagaaccagaccctgaagaggatatgggaaatcgcaaaatatcttatctcgcagaaagaggccacctcctggctaactctgaacaagtaaccttccgaatgaagcgagctaaaaaccatcacagccctaggaaaaaaagggtcaaataaaaaagtagttcctgacttgaccaggagataattaagactaaagggaaaaggttgaaacactggctgttggaaccaggtgcttcaataacacaactagcccctgaaaagtctaccacaccaaatctccaagtaagggacaacaaaaaaagaccctattttgctattatagccccctgcagccaaggaaaaattttaattgtctctgcaaattgaaaagtacagctaaagggaggatatataaaaaataaaaaataacaacaaatttaaagtggcctactggaggttcaaagttgggcaccgcctgactgagaagacagacctgcactggatatctgccccacgatctctgtataaaggtcgtgaacagccttaatactctgtatgaaacgggcctcgtaggcattctccttctccaactgctggtttgcctactagaggcccccaatctgaaacctggcatcagtaagcttggcccagagagtctcattgacaacatacaagtcacggttattagtcgccttcatctgttccaactccatcaccagtacaccagcctctgcgaaagtccttttagccaacaaggcctcttgtcaaaaaaggccaagttagagaggttgaagtttcagaacagcggacaaggcagacagacataaacaaagagaaagatagaggaaagtgtctcgaggccttaccccaattatttcccgcttggcaaaatgggccaacgggaaagcattcgcgttgctgcaggatgcccaggtctccatgggcagttcagaggcgctcccgaccacttggtctaagagctcagcagcaaaaggtgtggcccctcaccctaacttgaaggtcaattatttctcttagggcctcgacttccacggtttgcctgatcgggggcacatcgtgcatgtcatccataatctcgactttgcaaattgttgacaacagggctgccctttgacaaacctacagtttttcggcctctaaatgcccatttaggtccctgttcgtttccttctccctctacatatcgagaaggttaggaagaattgccttcttggggaaggtaaactccaccgagggaaccctaggcagggccatccgaggttggcctagcctcacttgcaggtcgtggcactagggatggacccctgttttaaaggctgacaccttaagcctctgcctttttctagaacaactgctaaaaaatgctttgtaagaacctgctcactccattatatattaatttcaccaaccaaaagttgacacagtatcgaaaaaaggtcattgtttaaccctaaaattttcaaagacaacaagactgaaaccaacgtcaatgaggaaaattcacccttgcgactccctgttaatctctatagcaaagaaatggagaagaaaacttaccagttggcggtagatggtgggttttggcagttttggtgcaacgtccttgacaaaagaatcagtgtctgaatgtaatggtaataaagtcttgtgcgacaggaaagaattggaactcaagagctctggttcgacatgcaaagtgaagagtggaacgattgctgaaggtatttatgggatacttagaaggggtgccttccacaagaagcagatgcttcagtttgctcgcccaaaaggcatctgacgattggatgagcaaggagctcagaaggtatctcacctcttaacagccgactcccatcattacatgcatcgaagagagtactcgccgttgttttaagcttcccacagagcacgtgcccattatgcgcgtaaaacctataagtcagcatttaaaatcctgacatgaaaacagaagaaattatgcctccctaataatgacactttagtttggcgactgatgacgtagtgcattaaaggacttgccatgagtcccatgtatgcaaaaatctctcgagagaagatgctgtaagatcaatattggtcccaatccaatgtatactccatacatccaatactagcatactttgccaatgtcctagaaagaacataacacttaggggtgagcaacagtcggtttggtcggtttcttacacacaaaaaaatccaaaattgagttttcagttttcatggttataatccaaaaattgatcgaccattatacaaatgtaaaaaactgactattttaatccacggtttggtcggtttaaaccgaccaaaccaaacttcattttttaaaaaagaaataagtctttaaattttctataattatttgaaattaaaaaaattagagtattgtatcaaatatcatataatttaagaataaaaatttcttagttaaataaataatgtaaaataaactattttaaatttgctcaaattatttgtgctactaatatggtaatgagttatattaaaaaaaacttgtattattttatgaataatacatcaaattataataaaataaaataatgaataattgagacttttaaaaaaaataagaagtaaaactagtttaataaaattgtatattaaatatgtacaaaaatagttatattatatatgtatagtgtataatatatatgttcggtcggttctcggtttaattagtcagttttccattgacactaaaactgaccatattaaggcagttttaactgaaagcacatttgtttggtttagtttttgcggtgttagtttttttggtgttcggacggtcggtgtattctgtttggtcagtttcttggattttttgctcacccctaataacacttatccaaggtgtaagtaaactttatcactgactatcacatcagtgtaaatccagtggaatgatgaatgatgagacataatcttttgaagcatataatcataattaccttcactgtgttaaaatcactgtaattgtaaataactatatgttctagatttaacagaaattgtatattaaaccataaacatgaatgatacatgtaaacataaatgatttctaatattttattgataacaaataaaattatattgaaatgagttttacttagggcatgaaatcccaacatggtgtttcttctagggtggttgttgagttctggttgtcaaaggtgtgggtgggtgggggaagactagtggctcttatgctttcctcatggcttgtttgtggggagcttcaaagctatggcaacagagttaggcaaccgtgccgtgggtttatgggaggatcccgacggttttgatctgggtggcagactttggattgggctcagtgatggtggtgtggcggtgagggggatgcaatgtgttagtggtgactaatttttctagttttttgttttattttcaataatggttctgttgttatgggtttagtttgtccatttttgtgtggagtgtttgctgtctatttttgatagtatggtgctttgttattttgtcacaatttgttcatgtcactggtccattagttcggcaaaggttgacacccatcgtacttttgctttgggtttacaatgcacatattgtagcgggtaaataccattttagaccctgtattttgcaaaaattacagattagatcttctgttttgttaaatgataaaatagacctagtattttctaaaatggtacaaataggattaaaacttaattataatttgacctagaagcgttatgataaaattggttaaattttttacatctgctcgtgataggaattaccttcaagttggttatactaaaaaaaattattgaaaattgagttcagggtcttatttatattattttaaaaaatataaagtctacttttttatttaagaaaaacaaagtaaaaatgatatttaccgtagcgctgagaataccaaatatattgtttcaccttttaggtttcgtttggagtcctgtgtaaggcccttgtattgtattaaattataataccacaatgtttgggtgggaccttgtattgtaataaatattacatccctaatttttaatacaacctattctgtattattgtatagggaataaaagtcatgtataaggttgtattgtcttattagcccaaactctctctctctctcaccactaccatcgtctcactggttcagtcatcttctttgaccgatttggctggaattttagtcatcttttccgatttggcccaagtacttcagatctatccctcttcgtattcatctctctctatattatacataattgttttattattattattattattcttaatttaaatctgattttaacttcttctccaatactctcccctctcatctcatccaaaacctatctctcttttgtcactctctcctccaaaacaacccatttctccataattccatctcggcttgagcaggtcccgcagttctagccctgatcaggtcagagcctaagccaacttccttagaaagagaaccaacggtgtcgcctttcaacgttctcaggttcaaccaaatgtactctctctctctctctcatttctaactgatattgcagctctttttcttccccacataggttacattatttatcattaatccatgttcaaattcatcattactcttattttgtttttcctttttcacttggctcacttttatgattttttggttgggatttatgttgggttagaattcaataactagaaatggggtttaatgagtgttagcgtagatttttgttaaccaaatttaagcataacagtgacagtctctcacaaaaaaaataaaggctgtaaaataaaaagtatgaacactaaggatttttacgtggttttgcagttaaaattctgcatggtccgcgagtcaatcttattcagatttttgatagtttactcagggcctcttttgtatgatttttttgtcccattttttgatcttacttgccactatttataatcacatagtgggcagttaattaaaaagttgactgtaatctttttacaattatcatcccctaaaattatggggtttgattacatatcacgtagtgtaaatgcaattattatttgaaaatcatatagttgtgatttccccacttttattgggtcaaaatgatcgtgtatttaaaaacgtctttaactgttgtatccggggatgtctcgatagaagcttggttctagtgatcataatagcgagttggggccatttttccttccaaggtcgatgatgcacgtcgtgttgcttctttgtttaaaaacttatcgcttcatttaggacaattgtaattcttgttaataaagtttctcaaggctcaattaaatgttagcttctgactcgtcaggattgtaaagtctcactgagaagatgtctgaagttaactgggtaaagttataggaagccttcccatagcgagataggcacctcacttattaggtctcgagccaacccgactgttatacttagtttgtacattatacactaagtgcttccacagtcgatatgtgtcgcttttgtcttcctagatgtatcatacttgatgcctcgctattcacattcaacaacatatggttcctcgtcaatacactaagcaacagtttgtatatttcttttctcgcataagaccttacagtcagcaggctgcaaatatactctgatacttacataattaatgagttattccataaaaagcgattgtatagatccatattccttttatcttgatacgtgtcccccactgagatggtagccgaa

SEQ ID NO: 217999 - DNA, 3038 bp, Cannabis indica
tatgaaattggaaattttagttctataaactgtaatgatgagttctcacaaaatagaatttgttccagacaagagtatgataactacgagtttatttatttaattttgaataaataactaagggttaattaatgaaaaagaaaaatcttaatctctgttaaaataagtgttagtttaaatttttcctcagatataatttatcattcgtacttgctcagaaaagcttgaatatgtatctaaaactatagccagattgatttgatacaaactaaaaaatatccaaaaaggcacatcaaaataggaatttgaagagactgttcaatgttcatgatattgatttgaagaagttagtcataaggcatacttgcaattataatttatccacacgtacattgtacatagaagaaattttcattagagttatgagaaagatcactgcaaatatccaaaattataatacatttccaacaatattagaacaagattgttataaaaccgttagttcaatctttatgggctctgtagctcgttctttatgcacttgacagcctccaagaccccatcctgaaaaaaatttagtctgaataagatttgcaggattattgatcataagctctacatattattcatgaaacatttctttttcatatttacaaattcgaggaatggagcatcaaccagtatcaaatgatctttgaataatgatatgaagacagtattgaagtttaagtctacacaaaatatataattatataaatttgcaatcgattagagaatgatgttacaaaagagataaatgacagattcaatccaatccaatccaaaaaaggattggatatccaatcttatttggattgcatacaaattctgtgaatccactataattggaagggatatgatatgagttactgaaatctaacaataaccaatcaaattcaataaatgtgcacacttaataacatgtgattttcattccaattagtaaaagtacaccatgtaccataaaatgtgtacaaaacaaatgatcatcgaggtgtatacagtgatctccacttccaaaatgaattgaaaatgcagcccactaattgaggtgctagtgatcaacagctttagtctttacttactaccttgagatttgaaatcttaaccaacaaaagtttgattttgaagtgtcagattttattttatttttgctgtgtcctagtattctctctcagttgtttctcttgtcatcattcataaataaaataaatagtgatgcaataaacaatgcagataatgtaagcatggaattcatgacaatatgcagattgtggatgcaataattaatatcaagatatatttggcccttaaaaatgcaatcaaataatacaatatacactatcaagaaataatcacctcaagagaaatttttccagaaatttctgtggcgcgtgctctgacatcaggagataatgcatcatttatggcccttgatagcacatttgcagctgcttggacgcttgcctcatcattagtttcagggaataagtggttccttttcaatggttctggtgcaactccaagccaatacattctctcagcccaatagaattgatcgtgcataaatggacataatacctgccctccaacattaaataattgagaaatataatttcattgaaccaaaattaatacagtaatagaaataaactaaaatggaaaaatgtccaaaaatgctatgtataagattttcaagtagttattaagtgaatcacttgtatccatgaatttcaacacatgcacagaacagatcttttcgcaaagactcgcactcaagcacaggaaaagcatggcagtgacttcataaaaaagaactttgatatcatgaaaagaaaattctaatagatactaatgtcaacaggtcccaactgtttgaatgagacctccacccttaattaattagcaatacgaatgtgtacttattttcagtatttaaacagccccttgagttgctacctatcttttcttcttatattcccaattagtctaaaagcaaagtaaaatcactaaatataggatttggttttaggacaaaacgagtaacacaactcgcctgtggaattccagcctgaagcgcagctgcagtacttccactatttccaatattccaaatatgaaactatatgttagtgaacatccagatatcttattcacaaaatgaaaaacagagtagttctctcaccttcccccgtgatgaacagcggccgcacagtgagtaaagagccagttatatggtatcgtactgattgacagatgtgaagacatgttaatttccttagagaaaatgaattcaaaacccatcaccaagttaatggtggccagcacataacaatggatattgaaatatatttatataactaaaaactatgctgataaagattttattttgttcttattcttgaacgactttgtctttttcaagtagaataattatttaaaccttaattaagacatatactttatgcattagtatactcagcaaacagtttttgctactttaatttctttcaaatttctagagtcataattgtcatgtgtttttgcaccatacaaaaatagaattcaaaatctcatacaaatctgatagtttagtggatatttacatttactgtatgatatccaatcatcttttattaatacaaatattgttgttgtatcaaagtctaaaagaggatatttgactgaattttttaaaaataagagatgcttaccctgaaaaacagaagagtcggctattatagagcgagaaacaatcttcacttaattgtacatgattcatctccaacgatgcttctgcattggctacttgtattgccgcttctaaaggtttgtagtcagctgtgaaaagtataatcctgtaacttgtgatatctagaacacctcgaagaacatgaagaaatgctagaggatcttttaagaatcccatgctgcaaaaatacagtaaaactcagttgaagtacaggaaagatgataacatcatcatattattatttttt

SEQ ID NO: 218000 - DNA, 8846 bp, Cannabis indica
agttgattgagtttgacagctttcggatctccacctcgtggaactctaccaaatatcgtgttaaaattatacttagtgttaatttaatattaaatttagcttttagtattgaagttggccttagcaggcaaacttttccttcagtttcccgtttcccgtttccgaaacacttgccttaagtttattttttattacagacacagactatctaaattctgggtagtatcctccttgactctaatggcgccccccaagaaatcaaagaaaagcaagaaggaatccagaaaagcgaacaactctcctaatgaacccaaacccatcgattccgactggtgggactgtttctggcaaaaaaattcttccaccccaggttgctcttcattccctataccatttttattttcatccaagtttataattctttaggcaagcattaatttttattttttcccttaaatttctgctgtgatgctaatttgagagttcccagattatcttttaatcattcattaagaaagcatagtactataattgcttatgttttggtggttttaatgattttacttgatgaaaattccatgaaatccagctagtgttatttttgttggaggtgtaactgtaaatacaaacttgtaggttattcagttccaaatgaggaagcagaagggtttaagtatttctttagagtctctaaaaagacttttgaatacatttgttctttagttagagaagatcttgtgtcaagaccaccatctggactcatcaacattgaaggtagacttcttagtgttgagaaacaggttgctattgcactcagaaggttggcttctggggagtcccaagtctcagttggggctgcttttggtgttggccaatccactgtttctcaggttacttggagattcattgaagccttagaggagcgagccaagcaccatttaaggtggccggattcaactagaatggaggagatcaaatccaaacttgaagcagattttggattgcccaattgctgtggctccattgatgcaacacacattattatgaccctgcctgctgttcaaacttcggacgattggtgtgatccagagaacaactacagcatgctcgtgcagggagttgtcgaccatgagatgagatttcttgatatggtcactggttggcctggtggtatctcagtatctagagtgttgaagttttctggattttataaactttgtaacagcggagaccgattagatgggaattcaacaactttatctggaggagttgagattagagagtacattgttggtggggctgcatatcctctacttccctggctcataacaccttacgagactagtggacttgtgagttccatggccagttttaatgcaaagcatgaggctgcaaggttgctagctgtgagggcattctctcagttaaaggggggctggagaattcttaacaaggttatgtggagaccagataaacgtaaactgccaagcattattttggtatgttgtttgcttcacaatataataattgactgtggagataagttgcatccagatgctgctctatcaggacatcatgattcaggatatggagaacagtactgtaagcaagttgatcctttgggagagaatttgagggaaaatttagccaaagtgtttacaaaagcgcatgttgaacaaacttcactatctaaataattttttaatttttatgtcctgtaattcttgctgtgcgtatcttgtttcgatttgagttgagctgtaggttaatgcaaattatcacttaagcacaatgtttcccaattaggcgcagatcaaaaaatgtctatatagattaggaagaagttatcctctaatgctgtaaagaagcaagatgatactctttcgaaaattcttgttcaaactaatagtatgaaaactggcaagtgcaccaaacaattagcagtacaaaatcaagttagagaaagagggtagcttgaaacatatgacattgagtttcccacatagaacctgcttcatttcttgcaaaacttattaaaacaatattgtaaaaacaactccatgatccatgagagtgtcatcgtttgattaagatagggggcctggcatgtacatcaggatctcaaatctaaataccagaaaaagaaaaacatttactgtctacataaaattctaaggtaaaaaaagggaaaatttatggacaaaggaactagtctcattacattttataactacttatgagccgatacatgatttaattgctttaatctcccttagttgggggctgcacacatgaacagaaaggtgttttcttgtatttccttccagttctaacaccgccaccgtagagataatcacgcaagagaactcttgatttatgctcagtgatcctggttcttctgctactttctctctgatcaccatcaagtttcagtagcaagaattgtaatctctgaatttccagttgcaaccgaccaattttctccgaaccccttcttgcctgttctgagattctccttctcctgacactaccactttcatctgaacctgttgcagccactgatccatctgaggattgagaaacatgttcatagttcttcgtcagttttttattcacatcaactaactttgtgattgcttcctcagcctcttctagttgactcttaaccgaatcatactccataactttgccttttttgctcttctcggtagattctaccttttgcttcaaatcttgcactgttatttgaaggttagacaacttctgagcatcagaatccagtctctcaagaacccttcttttgtttccttcttggcgaggctctgaaaatctccttgatagctctaatctgtcgacaccaagctctttctccattaatgattcaatagagggattttgcttcttgtgtgctttgcttgcttcagcttgacgctcattcaatgccagagcaaccctctgagatttgccaactttcaagtcaatgcttccatcctgctcagtagtctcccataactcgagcatctgattctcagcctctactgcttctctcttgcttctcccgtaagaagagcagtctgatatctgatcaaggacgatgtcttttgttaaaacttcagagatttcatggctccgtgtccgcaccctcaggtttttgttaagtctatgactacccctcaattcatctgcttcctctgttgcataaatatgcttgctagattgaccattttctttgcctctagcctttaactcttcaatttcctgcattgcagcatccagtttggtaccagtatttagaaattcaagcatcacaatcttttccttctccattagggccatttcaatatcttcaatcctcgattgaaagtcctgtaagtccgaaattccatctggtaccatggtagcagaatgaacttcatctgattgagaggtttcagcattctgggacaccaaacaagtatcctaaaaacaaatggataacatttcagatatattcataactagatgtaaggctgccgtacatggtgacacttagagaagattacaacttgaaaatttaagaacatttggagtaaatggtggatatgtttagtgagtgcgtatgaacaaacagaaattacctctatttcactgctttcacgtttagaaggttctccttccagtactacatggttttcaagagatgtaatacttttcttcaaagatttaatagctgaggtatatgcagccatccgagcttggagtcctctgtttgcatcctttactgtgccaacttcttgtttcaaaagttcaatctctctatccttggaattacttcgatcttcgagcctagcgaattcatcggtgaacgcgctaatctttccttcgagtactacattacaaacattggaggtttccaattcagcaaagaatgtattcgctttgttctcccacaataaaacttcattttccttctgagatagcagatcctttgagcaagtgatttcagtttttaagtcattattgaaagacgtaacaatgttcagctcaatgtctgatttatttaaacactcctttaggtgtaaattttcaatctgtagatcttccaacttgtcctccaacgttcttgccttctccttaaggtcgatatgattaagatgaagcttgttcaatctttcactaagctcgtcaagatctaccatattttgggagacaatatctttgaaaacaagagaaagattactatgataaattgtttcaccgatcataacaaggttttcctcttctaggaagctcttatgttctcccaaatctgagaccgtcttcaccaaggtttcatttttctcaagcacctcgcagtgttctttctgcagattttggtactccccttgcaagtccgacagctgcttacaaagattctctgatgtatatgtcaacacttcctctctgtgatcaccctccacaattttcaattttaattcttcagtggcctgccaaagcttctgcttctctaactgtaatgccacaaactgctcagactggttcgtatatttctgatcaagagtatctctttctgtcataagattagtcccctccaactgcacttgctccaatatggtcacaagaactaacttctcaattaccagttgtagattatcatcaaaacttctaaacaaagaattttttgtatcttgaagtttgacaagtacaaggttaagaagtctctgatcctgttcaaccttacctgcacacccaaggttatcatcaatatccagggtcttcaaaaactgacaaagccccactctcagtacattattgtgctcagacagatatttattttccacgttttgctcatcattttctttctccaactcgagatcagcttcttggacttttctgaggcctccaggagcttttgatgctcaatgatgagagacaaatacttctcttctaggccttgtatgaactttagtaaaattaagatttcaatttgagcattaaaagctttatcttgttcgtcttcgtattctctgttcttccgaagaccttcctcttgtagatgacagatctgcaactccataccagccaaccgggtttcacttaactgtgcaaaactggcacgttcttgcttctcagtgtccaagcaaatgcgcagctcttctaccatgccaagtgcagtttgtctctccttctccagagcagaaagtttgtcttctaatgctgcatatccattgcccagatcttccagtctttgatgagtaatacccaactgagaaactaagcattctctttcagtgatgagaccagacttctcgccatcaagcaccaggcatgaatcttctaagctcttcgaccttatcctcaatccttcaagttctgtatttgcatctaaaagagaaccttccaaaaaagtgtttctccttgatatattctctaaattctcagttgcaatctgtaattgagaaattaagctggtcttctcagcaacaagatttgacttctcttcaagaagtgactgacaggtttcttctaatgccttcaccttttctcttactccttccaactcgacattcaaatcatcaagagaattctccaaaagagaatttttctccattagtttctccatgatcttcaattgttccaaaagagccactttctcaatctgagttgtatcatgaatcttctttagctgcgagtgttcatcctgcaagtctttcacagatgatccaaagcattctggatcgaagcctactgactccacctgctctagcatagtctggtttttcttatttgattcattcaattcctctttcaaacagtatatctcttgctgaagagcatttctctggtccactcgaagttcaacctcttcttcgagtttctttattgtctcccgtaagttcaagatctcatcttgcagattttttattgaaacagctgaagacaaattgagctcatttacacttttgttctcctccttgactctctgaacttcctcttccaaaccctgcttacgcatttccatgtcctttaggatttcagccctgttctgaagctcagaaactagtgatcttagatcttcctgagactgagagtgcaaattctgcaatgtttggaaagcagtttcagcttcaacaaatctcatccgctcttcttgtacacaagcccatagtctacccaactccttttgcttctctgttagttcctcaccctgagttcccaccttatgaactaaaccctccaactctgattgcagagaataatttgatttttccaaaagaagacacttttcttcagcgccctttaactttgcaagcccatcatctatctcattgtgtagtctccgcgcctcctcttgagcacgagagagttcttgttcaagataagagattctctctaagcactgctggtattggagagcagcagcttcctttgcttctgttaatttggcaactgcttgtttcagggtttcaacctcgtgttcagctttatatgcacgctcattaatttgtctagcgccctcctcagcttgtagtaacttgttctgcagatttgacataacctccatactctcttcatattgtgcaagtgcagcatctttttcagttcttatccgagcaaggtcttgttttaaaacatcagcttcagtttcagctctcctagcacgttcattaagttctccagcatccttttgggtagaagagatacttttttccagaatggatatcttttccaagtactgctgatattgcagaagactagcttccctttctgcctgtaatttcgtaagggcgtctttcaaattttgaacctcagtttcagctttgctagctcgttcattaaggtccctggaatcctcttgcgcacgagagacttcagactccagattgcttaatctctccagactctgttggtactgaaccaagcctgcttccttttcagattctaattttgcaagggctttcttcaagttcaaaatttcttcctcagctttgcccactcgatcagaatctgactcagcctgagcttgaagatcactgctgccattgctctggacacttatatctctctctccctccaaatcttgaaaattaaggccttttcttgctcttccttgtgaaaacttcgcatggcttgctttctctccagatccaaacaggtcattgagctgttttagaccctttcttcctgttactgtatcagattcttctccaaaaccaccatttctcttgccagcatgaaagttggatgatgagagtcccaaagaatccttttgcagttcatcagggtcaaagaatgcccgtattgaatgtggtatctcaggtgtatgaggatcaccatcagtagcagaaccaggggactcatctgacatattgaaaggaacttgattaggaaatgcttctgccatagtccgatgagcctggcggatgacaccagttgcatgatcatatctttcagctaatgcacgatatgctcgatagaactcttcaaccaatttcataagctctgggcgttttttgtaatacatctctgccctccttgcaaaagaatctgcatcctcttcaatgagctttatcattagcttcacttttgaatccatatctgttcaagcagtaatgaagtaattgtaactggttagtagggaacacgaaactactaaatcccaaaccaacaaaggaaaacataagagttggaaacaaagagaataggcacattttaagggagtaaagaagaatttggatttacaagtgtgagcagaattttacaaaaacttgtaaactgtaaactgtgttcaaccaaaattagtcagtctaagcaaggacccaagtcaatatattgagcaaaaactgcaaaggaatgcagtactatacctgtaagattttcctgaagccattttgaattcttggggcttacatgactatcccaccaccaagaatacatacgtctagaatctgctttggatgccataactgtgttcaataacactactcttcactatccgatctagaccagattccgacaaaatcaagccagaaccagcacaaaaaccacctaaacttgaaaaattctcaggaggatgaagctgtatatctcttgctgctcgcacctatagcaatcaagccaagaattcagaatttaagtttagaggattccaagctacccaattgatgaaatcagattctgaaatatacaaagatctgaaaaataactctcaaaaaacctacctgatcaactgagcccagtttcaaaaattatgaacccaagtcgtcactgctaactttttatcttgtacaaactacctaatcaatgataaattcaatccagatgatcaaaaccatagaattataaaacaaaattcaggtatttcaagataatcacaagtttacattaagtgcttccccatcagcgtttagaccacgcaagtttatgatcatgaaaaagacataaacaagtgtagaactagtttttaattttacgaaaccagcttccgaaattccatgaacatagcaaagaattaaaaaaaaaaaattgtacctacccaaaaaccaaaaatcgaaaacaaagttgtccaccaactacaaaagtcgccaaaaacattatgacttgagaagtaaacaacacgggcatggattctctcaaaaacatgagtgaaaactacaactataacaatcaaaaggacacacaaggaaaaaccatacataaaagtatataatacaacacttaccaaaaataaaataaaaaataaataaattgattttgattgtttttctcttttgctttttgatttttgcagcagcttcagctgctttttgcttttctctctcaccccatgtgagatctctctcttctctctcttctgaaggctctct

SEQ ID NO: 218001 - DNA, 3978 bp, Cannabis indica
cttactcttgaattagttaatcctaacgattttgcaccagatggtatctcactagctcttgaacccaaaaaatcatttgcatcgtcaataaccaaacttacttttaagcattgaattagttagtttaatcctaactctgatcattaatttgcagctttattcaaatggggaatggtactacaacaaagatcccggttgcggccaagtagtagtaaagaaaagatgaagctacttcagcaagcaaagaggctatatgaagacgccctcgatatgaactcgaacaatctccaagtaagacaagccttatcaacatgcatatctgagcttagcagtaggcgattctaatctttcaaaaacagattagaataatccaattttttgtttacaaaatttcccttcattcaacctcaaaaggctttttcgggttttctttttcgatctttttcccatgttttcgggatcatactcaacaaaaaaatcctccttgataggcacccaataaatggaggaattgaaattttcttgttaacttactaggcatccactcaatcactatgcataatacttgttaatattattttgagtattttagattcaattgtaatatgataatacttgtaataatgtattggattagtggtataacaccaaataattgcttatttaacacttctatggaataaataatgttattattctactctctgttttgtcgaaatacttagtattcttaatgcgttttaaaaatattaatattcttaaactacctcttctaatatttcatatgatcattgtatatcctatttatttaataataacaaacatgaataaagaaaatctaattatgttgtaatttattttagaaaattttgtaagttttatcatctgaaatctgaaggtagtgttaagtaccattgatatcatataataagactttaaaaaaaaatgtaagtactaaagaatattctcatattcaacaatattaatttagtactttatatttatattttaaaattgtacatgtttaataaaatttaactaaactattgtcaattatatgtaattatgaatttggaactcattgaaaaatgtttgtttatattaataaaatttgattgattaaataaagtactaaacttatattatagtgtgccaaatgaatacaaactctaaaataaaatattaatttctcaattattttttgataaatatctacatgtcctaatcaatctataccaacaaaacacaataattccatgatcaaaaatacatttttaatggtccaagtcaagctttgttttttaaggtccccacattttgaaagtgtccaaaaggaacatcataagaatatccaaaaagataccaccataaatttatacttctctctttagttcaaaattctcaaaaacaatacataataataaacaattaattaattaattgggtaattttagcttaatttttctcttgaatttgaatctcttaggccattgtattcaaacgttctctaaaaactttcaacatagaagcaaatgtaacaatcccaaccaaagttccatcttgttcaacaacccaaacatagctcaatctatgagccaatgcttgaatcataaccgccactaaagaactccacggataacaaacaatagcttccgaactcctcaccgctaacctcccactctttccaccacacccgaacgattcatcatccgacgacatcatcatcgttgttgttgtcaaatcttcctcgataaactccatcaacgccttatacttctccttctcctcgagcctatctttcacgagttgaactaaatcctctggtggaccaccgtagtcaatgtaggccattagatcaccagccgaaagcgttgctatagctgcagccacggtttcatcacacaagtttagtgtagagggcgagatttcgcctactaatctaccttccccgtcgatcacagcaaccgaggtttgactaatgaggctttgtgttatgaggggcaatgcagacgatgcaggatcgtcgtagttgagggcgaggatattctggttatcgattaggtttagggagttgatggggttggccggagtgggactaaagaggcctatcgagttgagtaggtatcgaattaggtcttcttgggtgatccaacagtattccctgttgttgggacgatttgaggttggtttttggtaaagcttttttcttgaagtttgaattgggattattaggttttgtgcaccttggagaattagatcaaatgcctctgataaactggtaattaaaattatcaaaattcaaaaacaaaatcatttagattcaatccccacattattaaaccaaaattataaaaaactgtaacatttaatttaaacataattttgtaacagttaacaacagttctttgaattgtattttgtaactgacctaattatatgagtttaacaacagtttagtcaaattgattaaatttgaatatattccctaacaaaaactgaagagattcattcaatcctattttatacaattttgtaacatcttcaatttattactcaaaattatcactcaaataattatatattctttttattactcaaaattatactctacaattaggaaatttacaaaatgtacttaaaattgaattttcattacatttttactactctttttttacatatggattctattttttttttttttttacagatttttcacatttcttacattattttgaaaacaacaaaaaatcaaccctccataatttttagtaaaaaaaaattaaaatccataaatatataattttttttttcatttatggttaaagattgttagcgatattttcttaatttataaccttaaattatatgatacaatataattaattttactaataagcatataatatcaatatctttatcatttctcttaaaaaaaattccatatagaaattcagaacagttcatttaattatattttataatttttaaattaattattatcaataaaataattctaattaataaaattttagccctgtctatcaatttcagaataattttttattctatttttttataaaatcaaaattaaaataatttacaatataaaaaatcaacaataaattaatgaaatatatcttttcttttttcaataattatatttatattatataatttttaaatcagttcattaaaatataaaaataattcaaaaaaaatcaagattgaagattacagagtcacctaaatttgacctaaattttaacctaacacacaaaccaaaattacagtaaatatacatataatatatatatatattatatatacaaaccttgcatttggttctaaatggcgaacgagtccaggaatcttcggaatcaaaacagagatatgagcattcaaagcattagccggagaagctaaattctcatccttacaaagaaaacagatgacatcaaccatacaaacctttccaatacaagaaagatcagagcctgaaacgtcgccgtttgttgtccaaacgcttaagaaagtttcaccgagtttcttgaaagccgataaagcttcggcgatggttgctgtagctgagagtgacctaagtggtggttttccgagacataggtctgatacctcacgcgataagagattactactcactactgccatgcactgatgaattgaagatcgaagatcgagtttcagagaaaatggagtatttatatgaggaagaagatgaagaagaaggggggtgtttggatgattgaataggaaaagattgtgtttggataattgaataggaaaagattgtgtttggatgggtttgttttgtgtttgggttatggtggtggaagaggagtgtttggatgcgagaataaggaggaagaagagaattgagacttattctttgttaattttttttgggtatttataggctgttttgggtttggaatgggtcccactctcacgcgtgatttt

SEQ ID NO: 218002 - DNA, 6097 bp, Cannabis indica
tttttgtagtagtgcttccaacattttcagtactctattagcagatgattgttatgtgattttgtggtcccaaaatcataacaaattccttttgtaccgttagaatattttggccttatcaattgtaaatgatttgtatgagttatacacatttagcatattcttttgtaattcacactctataaatacagagttcgccagcctcaaaagtatgagctgagcattttattcattgggcagctctctgtttttataagttctcttcattttaagctggttccattttcattatgtacatatttgtgatatttgtagtcatcttctttaaaatcaatgaaattaatatttagtaataagttcaaattgaaaattcataaaagctctcggatatacatgggccaggcatggtggttgcaaagggtcttacttgggtgtttggcggaatttcccttaccgaatggaaattattgtaaggggatactttaaacataaactaaaactggaattctatggatgcatgtgggtttggtacaatgtggtcacgtcaagattgaatataaatatataatatataaaatttaacaaaaaagcaataagatatgacattatgatgggctgaatacttattaattgagtattcttcacgcccaaaacttccacacgtaatctaaagatacagagcccaacagaaataatttgctatcaaaatcctaacgaccaatctttattcccttcgcctgcaatacgaataacgaacaaaaaaaatatatcataaatgtaatatattttttgactctcggtctcgtcgaaagaataaaatatagtgatgaagcatttgtgtccgttagatgtaacgcagcttgatctaaagcccatgttggattggtcgatattactactcatgattcttgcagtaacacctataagttttgggggctcatggttaaaataatgtctatttccaaaactaaccattatttatagactgaaaacaacatatgtttagagtcttaatcaagtactaccgcacccttgtgattatactatatgtttgaatgatacacgaaagaatcattgacttcttatgtgtttctttagaattatgttaacaattcatttatttattctaccaatatatagcatgcgacacaatatttaatattttatgtcatgtatgccttctatatatcataaaaaaaaaatgtgtggaacggtctttaatagtaaattctactggtagaaaatacataaaaatacattcaaataatagaatcaaaggtagtttttctttcgatttcattaaacaaaaaaatatcaaactaaacatttttaatcgcgtaccaaccatcaaattaagggttggcctactattacagagtcaaagaccaacgacaagttttataattgaagcgaaaaagacaggccaccactttagaatattctctatataaatcataatccctgccatcaaacacactagtatagacacacttgtaacatataactgaatgtactatctaacattcatcttatatttaaattttagagaggactcattgttaatgatttgtgaacgattattaatttgacccttcatttaaagtcaagtttccctccaaacgttaaaagcgtcatcagaaccatgaatcactctctctccatctctgccatcttatattttcttatcatctctccaaaatgccttccagctacagtaatatcggaatacaagacattggaagaccgacatagcaaacttgatccgtcggtaaaaacctcaagcgcagcctcaccaatcatagagaattaccaagtgagcttcctcaattcaaatagagaaagcgacatcattggattgtcaaagaattaccttcatcgttttggttatctccgaccacaacaaaaggtaaccttcaacaacgaattggatgatgagttggaatcagctataattcaatttcaatcgagtcatggtctctcagttacagggaagctcgatttcgaaactattgcacaaataaaaacaccaagatgtggtgtggcagatgtaatcagtacgttgcatggatcaaagcggtaccaatactttcctggaagacccagatggactcgaagaatgcatatgactctcacatatgctttttcaccagactatatgatccgttacttgagtttttctgacataagagcggtgtttaagcgtgctttttcccggtggtcgtctgtgattccagttggtttttctgagactgaagactatgtctacgccgacattaagatagggttttacagcggcgatcatggtgattctgagccttttgatgggatccttggggtacttgcacactcgttttctccagaaagtggaaagtttcaccttgatgcggctgaaagatgggccgtagactttggatcagaggaatctaccattgctatcgacttagagtcggtagctactcatgagatcggacatttacttggattgactcacactccgatcaaagaggccgttatgtatccgagtttaaagcctagagagaggaaaacagatttgcagcttgacgatatacaaggagttcaggctctttacggatcaaaccctaactttactatgaattctctattggaatcggatatcgctacaaatcacgcttttcattatccaattactactactaaattcttcaatatttttgttcttatgcttttgcttaaattgttatatttttgaaattgtcaatagatatactcaagattttttatacgctctcataatttgaaattattctttaattataggctgttaaatttcattcgtaattagtttttcaaagattgattctcaaatatatttatgaattggtttttcgaattaaaatttctccaagaaatttttttttatgacattatagaatgatgattgtttatataattatactgaaaaaccactttctactaggttcagcatgcaagatcaaagaaaaagacttaaaaactaaagagctccaattgctcctaaaaacaagaaagtgttaacctatatctataagactattgatggttacatatcaaatattatttatggattgtttagacttttatttgtgtttaattaatttttattggttttattaaaatttgggtttattggatagttacttactgtgtgttagctcattttatttgtaatcaatagtcaatggacttgacatctatgtgtataaagtctagttaaaacatttgatgagccggtccaatccaactaagattatgtaggtaagtcgtctcattgtaattgtatatttttttgataatcacataaataaacttgcttctaatttagggatctatggagtaagacttagggtacatttattttttaagatctatacatctgaatctgaatgcacatctgaataataaaataacatatctgaatttgaatacagaaatattaagactgtttgttttttcacatctgaatgtaaatctaactaataaaatatcataccaaaattgttatttatatattatgaacaaatttattgtactatattttaaattttaacaaaaaaagtattcaaatattaaaaaacaaatataattaactttaagaatttatagtatttattgtttccctttctttgcattaggtttagtgcaagttcattcctcaaattgtttatgaattgtgcatcttctgctctccaaatggattcataattagtttcctccaatattttctcttcaagtccttcctcgaagattacttgaggttgatcaaactaattgaataagtccatcatttatgcgctatttcttgataaaattgttaattgcaaaacatgcaataacaacatctctttggacatgaaactcatatggggccatcttatctgttatttgaaatcttgcttttaaaactaacgtttgataacatttctatgttgagcatgggcatggtttctccttcgttagagcacacctacgacgataatgtcctaactaatatcgaacattatggtaaggaggtaaaaatccccgagtggatggatatgctgcatcacatagataatacttatttcaagtttatatgcataaaaatgttaaattagttgaaatacaaaattaagtaattgtactagcaaattacatttcattaatcacttacttgtagaaggaaattgaaaacaattatctaaattggctactatctcttttagaactcgcgaatcatttgctactccttcccatcctacataaacataaataaagaccatgttgaagtagcatattgctagcatattttggtagcagcactactacaaaaatggttttacccgacatttataagcagtcgtttaaaagtattcacgtcggtttctataaccgtcgcctatacgaccgtcgtaaaactaacaaaataggcgacagttaaaaattatcgctactgttgacttaaatgtaaaaaaaatacagatttttttgccattaatggtagaaaaatctgtaatttcccccattattttcctgcatcacactactacaaaaaaggctttttgtgtcggtcaacgcgtctggtcaaagtcattgaccgacgcaaaagtcaaccttaacttttttgcttcggttggtaaccgatgcaaataatgattaatttgcgtcggttattactccgacactaaaacaaaaacagatgctaaagataaaaattaaaaaaaaaaattgacatttatcttcggttagaatttgaagcaaaagtagttagcttctacgttagcttctttggctaactgacggtaaagggcatcttcttttacaaaatcccaactcaaaattaggttttcccatttagaaccagatacccattttaagtcctcttcccagtttccacagtctccttcgctctttctctaggttcgtctgcccaagctgcctctccctttctcgcaatatctctctctgctctctctgtgagtggttttcaggtccgttcatcgttgtttgaacggagcttggctaccaccccattcggtgttcgagcttctccttctccgtctgctccctccgctcctcccccctctcaaaggtaatgtatatatatttatattttcatttatatatatatatttataacattttgttcttgatgattttgttttgaaaatgttttgacccattttttgttaaggatttttttcatatttttttagtagttatatataataggatttatttataataatggtgttagattctcgtttgcacaggatagggacatcgggaccatctctactctgctcactgtggtggattggactgagattgatcatctcttctctaagtcaggtgagttcaaccatagttttttataactccatgtaatctcttctcttggtcactgtagtgttagttttttccattttcattgtgtttttttggctataagagaataattattgttaataattcttgtaatagcacggtaatgttttctgggttttctttagtttaaaatttggatgaaattgatgaattatattgtcactatttggtgctcttcatcttctattgaaacgtgtatcgccctaatttgattgtttcagtgtttattgaggctattgattgttacgcaagagctattgatgagaaagttttaagtgattccatttaaagataaagagttattaaagctgtcaaattgtgatacaaagtcatcgggcttagcagctggtaataaaaatttttaccatgaccactatatgctttcgagagactctctctctcatctctcagatttcttttttttttcacttcaatttcagatctatttcaaatcagaatatataatcgagacaataaatttgttttagagacatattttctgctatacatatatgatttaatggtggcagcggcttgatgtgcctttaacatgatttgaattccttcttcattcaaatattttatttattttgaagggtgcttgctctcattcatgatttgagattctattagatttgcttaattctgatttcacttgcatttatatttaatggtgagaagtatggacaagaagtcataggtcgtgtagtat

SEQ ID NO: 218003 - DNA, 7882 bp, Cannabis indica
aacataaagaaagccaaagatgaactagtgaaaaataattttatccgttagtattagcatctttggacttcactcctcatggtctgcagccatggcgttcgtaggagttctggcctcatcttcttcttcacccattattcactccgacacattctcttcaccttcctcttctaagctacaaaagtccaattctttttcttgctcttctaatcccacttcttcttcttctactgcgtctactacttccaactctaattctcaccacccaaacgacagtgacagtaccaataccaaaccccgaagtttcacatacagtcgagcttcaccatccgtgagatggcctcacctgaaactcgccgaaacccatgtcgcagttgcttctcctccgcctacccatgttgtaaacgacgtcgttttgccgaaaaagcctcgtaattccaagagatacatagagcctgtggatgtaaacgatgaaacccaacaaggtttggggaggcctagcaagaacacagctaagaaaatgaacaaattggctctgaagagagccaaagattggagggaaagagtgaagtatttgagtgataggatattggagttgaaatctgatgagttcgtggccgatgtgatggacgaacgtaaggttcaaatgacacctactgatttttgctttgtggttaaatgggttggtcagtcgagctggcaaagggctatggaggtgtacgaatggctgaatatgagacaatggttctccccaaatgctcggatgcttgccactgttttgtcagttcttggaaaagccaaccaggaagctttagccatggagatttttgaacgtgcagagccttctataggtaatactgttcaagtttacaatgcgatgatgggcgtttatgctagaaacggtagatttaataaggtccaccaactgattgatgtaatgcgtgaaagagggtctgagccagaccttgtgagtttcaatacattgattaatgcccgtttgaagtctgctgctttggtacctaatttggctgttgaacttttagatgaggttaggagatcaggccttagaccagatattattacttataacactcttcttagtggatgttcacgggaatcaaatttggaggaagctatgaaggtttataatgatatggtagagcatggttgccaacctgatctttggacttataatgctatgatttcggtgtacgggagatgtggacttccaagtaaagctgataagctctttaaggagttggagtctaaagggtttcttcctgatgcagtgacatataattctttgttgtatgcttttgctagagaagggaatatagagagagtaaaggagataggtgaagaaatggttcaaaatggttttggtaaagatgagatgacctacaatacaataatccatatgcatgggaagcaagggaaacatgatttagcattccagctttacagggacatgaaaaatacaataggccgggatcctgatgccattactttcactgttttaattgattctcttgggaaagcgaacaagatgactgaggcggcgaatgtgatgtctgagatgttggcagctggagtgaaacctactttgcgaacctatagtgctttgatttgtggatatgcaaaagctggtatgcaagtggaggctctggaaacatatgatcaaatggttaagtctggcattagacctgataatctagcatactctgtaatgttggacatttttttgaggtcaaatgacacgaaaaaggcaatggctttgtatcgagaaatggttcgtgatggtttcatgccagataatggcctttatgaagtcatgattcgagtgtttgtgaaggaaaataaattagaagctgttgagaaagtcatcagagatatggaattagtttttggcatgaatccacaaatcatttcttcaattcttgtcaagggggaatgttatgaccatgctgctaagatgttgagattggccataaccactggatatgaattagaccgtgaaaatatgttaactattctcagttcatatagttcatctgggaggcactcagaagcacgtgaattgctcgaattcttgagagaacaagctcctgcctccaagcaactaataaacgaagcattggttgtcatactttgcaaggctgaccaatttgattctgcttttgaggaatacagtaatacaaagggattccattcatttagtagaagctctaccatgtatgaatccctgattgaaggctgtaaagagaaagagttatttggcaatgcctcacaggttttctctgacatgagattctttggtgttgaaccttctggacctctttaccagactatggctcttgtttactgcaatattggtttccctgagacagcacattctttaatggatcaggcagaagcaaaaggttttgcatctggcaatctcttcgtttatgttagtattattgaagcatatgcaaaattgaagctttggcagaaagcagagagtttggtaggacatcttagacaaaacaattcagaggtggataggaaggtatggaatgctttgatacaagcttatgcagaaagcggctgctatgagcgagccagagcaattttcaatacaatgatgagggatggtcctacgccaactgtagattccatgaacggtttattgcaagctttaattgttgatgggagattggaggaactttatgtagtaatccaggagctgcaagatatgggtttcaaaataagcaaaagttcaatcctattgatgcttgatgcatttgctagagctggtaatgtctttgaggtaatgaaaatatacgacggaatgaaagctgcaggttattttcctaatatgaatctctacaggattatgatcaagttgatgtgcaaagtaaaacgagtaagggatgttgaggccatgatatctgagatggaggaagccgggtttaaacctgatatctcgatatggaattcattgttaaagttgtactcatccattgaggacttcagaaaaacagtggaggtatatcaacagattaaagaagctggcctcaacccagatgagtatacctacaatattttgatcattatgtactgcagagatagtagaccagaagaaggtttatctcttatgcgtgaaatgaaaagccagagcttggaacctaaattagacacctacaaaagtttgatttcagcatttagtaagcaacaactctttgaccaagctgaggaactttttgaagagttaagatcaaacgggcgtaaattggatcgttcattttatcatacaatgataaaggtatttaggaattccaaaaatcccaccaaagcagaaatgctagtgggcatgatgaaacaggctagtgtcgaacccaatgcagcgacaatgcacttgcttatggtttcttatggtggctctggacaacctcaggaagctgagaaagtgtttgaaaatttgaaagtcactggcttaaatgttgatacactaccatatagttctgttattgatgcttacctaaagaatggagattataatattggaattcaaaagctcaaagagatggaaaaagagggtttgacaccagaccatagaatatggacttgttttatcagagctgctagtttgtctcagagcacaagtgaagctattattctcttgaatgcactaaatgatactggatttgatcttccaataaggtatcaaactgaataacttgtgtttactccatattttccccatgaataatccttttataagccttcattctttttattttctttttggtaggattttgacagaaaaatcaggatcactaatttcagaggtggaccagtgcctagagatgctagggtccctagaagacgatgcggcttttaactttgtcaatgctttagaggatcttttatgggcatttgaactccgagcaactgcttcatgggttttccatttggcaatcaagagaggaatctataggcatgatcttttcaggtatgtgactatttatgatcactaattttaatcaaggctatggtgtggtttttaccaaacaaacttgaaactttagaactttggtaaatgactgtagaactgaataacttgtctgtggtagttccttcttttatttttcttggtaaactggtaagtgcacatcttttcatgccattattacaatagaaaaagagtagaaaataaatatgtggttcatttctttaccgggtagaacttgtacatcgttcgatgaattccttattgcagtcttctgaatacagggttgcagacaaggattggggtgctgattttagaaagctgtctgctggtgctgctcttgttggtcttacattatggcttgatcatatgcaggtaatttcagttctgtttctctctgttttctgtggaagtgaatccgtttttatgttataatttgaggcgcagccatttattctgattttaattttagccttttactcttcagaggtaagttacttataacaactgatgggagtaagtgattatcgatgcaccatattcatcaatctctcattcccaattttctaacaactcggaaactgttcgttgactttttttaattaagcatctagatcactctcaatgactttttgtagagttttcttataaacaactgttgaaaaatacataacattttgacattattgttatagtgaatagtaattctctacatttatagaacactattcattcctttgcatttctcttataacaactgttgaaagtgaaagactattcctgcactatattcattgatatctcatttctaattttctataactcggaaatagatcaactcttaagatgtttcggttttctaattaatcacatggttaagcatttgtgaatctgacatagaaattccaatcttatgcaggatgcatcactgcagggatatcccgaatcaccaaaatcagttgttttgataacgggaacatcagagtacaactctatttctcttaatagcacactaaaggcctgcctatgggagatgggatcccctttccttccttgtagaacaagaactggcctccttatagccaaggctcactccctcagaatgtggcttaaagactcgccattctgtctggaccttgagctaaaggatgttccatctctccccgaatctaactcaatgcagttaattgacggatgttttcttcggcgtggtcttgttcctgcatacaaggagataagtgagaggctcggactagtgaggccgaagaagttttcacggttggctatgctatctgatgaaaaacgagctaaagttatcgaagctgatattgagggaagaagacagaagttggaaaagttgaagaaaaacaatgatccttcaaaaatcaagaagcttgacaagggaaaatatgaacggaaatccatgctgttaaataataatgatgagattggactaagagggaaagctttgaagtaagtattccttccataattccattaaaatttagattttgttaatttgtgtaaataacttgtaaatatagtcaaaggactaggactataatgtaaattgatttcttacctcatacgttgcagaaatataacaaaaagtgtaatgtaaattgttttcttgtcttaccggtaacaattgaaaattttgagcatttttgccattaatatccctttagctatgtatgttctattttcttgttctcctcataaaaatcacattactcaaggacaaacatgttgtaattctaatagagataaacattacaatttacagacatgtagtaattctaatatagattgtgggaaaagtagaagaatgatgaaaacagaggagaaatggtaaaatggctctaaatgaaaatcagagagcccagttcctatttatattgaattcaatattaagatgagtagttacgaaggctggccacagcttagcacaagaaagcaagactattataatagaaaacaaaaaagttaactaatataacagactataataactagcttatcctaatacttcccctcaagttacactggggcattgaagtgttaacttgtccctaaaatattcaaactgagctacaggaagaggcttcgtgaggacatctgcaagttgataggcagtgtcaacatatcgtacatcaagtttgttttcaaggactttgttgtcacggacaaagtggagatctatctctatatgctttgtgcgggcatgatagacaggattcgaggcaagggatccagctccaagattgtcgcaccaaagaataggacattgaggaagagagatagatagtttagtgaggagagattgaatccatgtaatttcagatgtggccagagcaagggctctgtattcagattcggtgctagaccgggcaacaacactttgctttttggagcaccagctgatcaaattttggcctaaaaacacacagtagccggatgtagatttgcgatcatcataggaacctgcccaatctgcatcggtataaccttgaagatccaaatgaggggctagagaaaagtacaaaccgagatgtgtagtgcttgctaaatatctcagcacacgtttgcaagctccccaatgatcaatggtgggagctttgaggaattggctgagcttgttgacagcaaaggagatatcaggccgtgtcatggttaagtactgcaaagctcctatgacacttcggtattgtttaggatcttcaagaagttggccagaattgattgataactttgaagtggcacacatcggtgtagattgaggtttagcctctagcatgtttgttctattgagtaaatctcttgtgtatttctgttgagtgagataatatgtgctgccttgtctgaaagcttcaaacccgagaaaataatggattgatccaagtttctttagatcaaattggttatgtaactggtgaatgaagtgttgaacttgctgttgatctgcaccagttattagaatgtcgtcgacataaactagaatgagcattagttggccacaattgttgctgtaaaataagctagtatcagccttcgaatttttcaaaccaagttgctgaaggtatgatttgagctgatcaaactaggcccgaggggcctgtttcaaaccatatatggccttgtttaacttgcaaacatggtctggtttttcgacatcaatgaaaccttggggttgttccatgtaaacatcttcggtgaattcaccattcaagaaggcattgttgatgtcgacttgttgtatgtcccaattattttgagcagcaagggtaaagactattcgaatggtacatggtttaaccactgggctgtatgtttcaaagaaatctacacctggagtttgctgaaaacctcgagcaactaatttggcttttagtttattgaccgagccatttgcatttaattttattctgaataaccatttgttagaaacaataaccatgtctggagttgggggaaccaagacccaagtatttttcctttttaaagcagagaattcattgttcatagccttattccacttaggattagccaaagcttgttttactgaggtaggttctttttcaatttgcacatctgccaagtaaatcgtgagtttgaaaattcccattttggaacgagtgaccatggggtgaagattatgtgttggtaggggtaatgtggcatgagaagtatcactatgagagtctgtagtggactggttattgtgatcaggaaatggctgaggtggaggtggggatatatgtccagaatattggtcaagagaagataaactaatgttgttgttggaagaggaggtgggttgggaatttggggagttatgagtatcaagtatgggattgtgagatatggtatgtatgggaacttgataatcat

SEQ ID NO: 218004 - DNA, 8861 bp, Cannabis indica
accaaccggttcatttccgggtcaataacgggttcggacggcgacagtgagagactcaccgaaggagacggtgtcgaagaagtgcaggatgaaagagacgacgtcgctgccgcagaagacgagttcatccacggcggaaccacggccgggacggtagaattcaccgacccgagtgataaaaccggatccggatcggtcaccaccatgttaggcatgaaagctgggctgacgcagccggtagcggcggctgcatacagcttgggctgtacgtatttctcggcgaaagtctccagaatgtggtcgtatggtccctgggcagcgttttccggcgatccaactccagttatgggaatattaccttctgggtataactgatgatgatgggattgcaagctattcgtagcactgatcagcagggaagaagatgatgatgaagatttgttgttcttattcaactgcttgagctgcttttccttaaagacctcccaccactttccgagtctcttggccgtacggcctgggacctcggcggcgatcttcttccacttgttgccgtacttagcctgaagagaaatgacgagagactgttcttctggggttagagagcctttcttgagaccgggctttaggtagtttttccagcgctcgaggcaagattttgggtcgcgttggagtggctttcccatgcgctgggagatgagattccagtctttggggccatattgcttaacgtaagctcgaaggagtgagtcttcttccggttgccaacgctgacgctccttcatttcatcaccattttcgcacttgaaatcttcttcttattatgggtgttgtggctgatgatactcaacaacaacatcatcgtccatgataatgataataataataataataataaaatggtcacattcacagagataagaaattgatagacattaataattttgaagacttataatctttatatataacatatatattatgtatttatggggcgaggggagaatgggatgttttgggggtgtttttataagaagtggctttaggtggacacgcggtgcgagtagcgtgtagagggaaatttatgaaaagaataggtaaaaaaatcaagggagtgaatgtgcaataatgttttatttcaaggggtgtatattgtaaaattaataggggtagggatgggatttatcattagttttgtttttgttacagtgagagactgaacgttgaagagagtgagagatagaagagagtggtgtggtgtttgtggggtttggagtggcagattgagtcagatatggggtggacaagactggacctttgagcctcttttcccctccttttattatttggtggtattttttttatttctgctcacttattactgcatgtagacattgaaagatgccaaaagaaaaaaggaaaagaaaaaataaaataaaataaaggagatatggagtatagtcctgctagggatttttcagtgagggaaaaagcatatgatggggaaatgtgcccttcaaaaagggagtattgtattaaacttagagctaaaactatgtgtgcatgttaattaggaatgtaatatgtacggactactctcggacctttggttatctttacttcctcttctcattttttgggttatttgtcttttggatattagcaaaatcgtagggtttttaaccactatatttggcctccttccacttattttaaggatgaaacaaaaatgagtaagaaagtagcaaaagggttttcttaatttttatttttcttctattgttatataatatataatattaaaaaaaaaagttatatatatagtggtggaatttggtatgattgtttgaatagtttggggccacagctcatagctcatttttgaattgtacatttgtacagaagcaaaacgcaagacgcatcaacgcatttctcggatctgtgtgtgggggctaatttgtctttttgctgcactctcccttatcacatacacatagggctgccctgtttatgtgtgccaaccaaatagcttaagcctaaacatgtcacaaggactatagcctcctttagggacagtaaagaataaagatccctttcccttaacatctttttaatttttgattattttctattctatacattttttttatttataaaggcagcatctaacccaatctccatcttctccccaatctatacagattgaatttagtttttttttcctggtgtgaaacactgttgcccatgtaactaattgtctattttttcttcttaaatgaaaaagaaacttataaaataaaagagaataaataaatacaacatccataaattgaccctttcaaaaaataaataaaaaagatccataaattaaccatcacattgccatactttcataaattcaaggcatgaagtaagatagtgcccatcaaactcaatctaatggccctaaaagaaatatataaaaaagagctttatcttaaaaaaaaaaatgaacctcattcatttaaaggttaaattggacaaatgaaaacaaaattacacaaatttgtaatatatacataaataaaatttttctttactatcacaaattgtacatggataatggtggcataaagatttaaaattttaaatttgtaatcggcataaattttataattttgtttagcaccataaatctaatattagtaaaattataatttttgtggtagaaattctgttttaaatttattaataggagaattaaaagtaattggtactacatatttttgtctaaacccaatgattaaaattcgggtgttacatgtgtcttgtttaagatactcaccttgtaataccttaagagtcgaattagcaaactcttaacccaatgattaagagtcggattagcaaactctaattaggtaaatgtgtattaatgtggaaattgtattattatataatttaatatatatgagctatactaagaaatgacatgttaagacctcgttagtgagtcaagagcatttttcgtaattttgaaccgagaagggtaaaatcgtaattttgacctgtaggtgttttttgacaagtcgacgcggtatagtcacaactgggtattttggttcgaaccgagttcgggacccaaaatatatttttggaatttatttatggcatttatatgataaatggaaaaatataatttacatgatttgtatgtgtgatgaaatgacaaccttgcccttagttatgtgtatatggttatatttggctataagcgtattttggacatttgaccatgttttgtattttcaaagaaaaagaaaaattggatttttgttaattgagaaaacccatttcttggattcagcctctcttagccgacccctctccctctccctcacatctcttgttgttttttcattaaaattggaaggaaagcttgattaatcttgggtgattgctgtactcggagcttgagaattgtggtaaagctttctaattcctcattgataatgttaaatactgttagtgaatgctcattgaatgtgttcttgatgttcttataaattattgatgcatattgaagatttgaagtgatatcttgatgagttttgtgtgtttaaattattggaagtatgagaattgcatttagtatgttttgggggattttagggctaagtagtggggtttaatttttatggttttgactctgattttctaggcaaatattattggtttgaatattttgaagattggaatttaagcttgattatagtgaagctatatggcatgtccaatttgtgtatctttagtgttgtttgagcttggtttgatgctcaaaattgttaccaaagttagtttggtttgtcttgatttaaaatttgagtttatgaatggttttgtttgagttttgggtatattttggttgagattcgaaaatatggaaaagttggcatttttagacttcaaaaactcgttttcttagttttttgaacccagtggccgcgtccaaaacctagcagagaaccatcctatttttctgattttattttggccataacttttgatttgggactccgttttggacattttatatatcgttagaaagctcgtttcgagctctatatgttaatttttaaatggaattctaattacgtgattattgaaagtgaatcttggaattaatcctatttgtgaaatcttgagaatgtgtgactaggactaccgacgtttgctcaagaacactaggggatttggaatctccacatacttgggataccaggtaagacagtagttagtacgtagagttaagcatggtggtgctcgtgattgatattatagtcagggcgggccctgaaatttagtggaccatagaaaaaaaaatatttttgggccctcatataggaaaaaatgttgtatttttcaaaattgataaaaaaaaatgtgtaattttaaaagggaaaaaaaatttttgggcccctgagctaggtgggccctaggcacaagcctagcccgcctatgctcagggtcggccctgattatagttgtgattaattggaaattgggattagggtcattgccctaaagtgagtggttatatggcctagggttattaccctagtgattatatgattttaaatcctatgacatgttttatatatattgattgtatggattatgcattcaagacataatttggttggactcagtaattagaatagagataaactgttctaaggccttaatgtaattagacgtgtgagtgtaacacgcgggtttatgccacatagacataaataggtgtgtgagcgtaatacgcaggtttatgtcaaataggcaataagtgtaatggcattattatatatttgaaatgttaattacgtttattgatatttatatttttttactcggcttggctcacgggtgctctactgtacacgaaagggttaatttgtttgtaatcaaccatgagttcgagagcttggcggtgcttgtacatgttcgggccacactagaccaagcgagttgggtctactagggattgtattttgtaatctcagattttgccgcttaggtcggcaaatgaaacaacttgtaatattttgtgaaaagttttgtgcgatcccaaaacttgttatcttttggtttgttttctaagttaaaagttattgcaggttttattttcattcatttgcaaataaagtttaaattttcccgctcttatctctttagtaatcacagtttagtgggattagggtttattattgattggtgtaacgtgcctaattttagggctttacactttagtattagagtgccaaggttttttaacctcctgtagactggctgaacatgtacaatcatcgtcaaagacaagctcgactcgtggtgcaataagtgttgagagtaaatgcttaactacttatgtgattatttatttaccgctttctattttaagcagtatgtgggcatctaatatatttgtgatatgaaagccatgtttagtatattaaattgataaatatttattttatatgaaatgaaatagtcgagttagggtttaaggcaataagtgcgtaagtgtggtattggtgcctaactcgctggggttgtttattacaaggttatttgtggaaatggaccctccacaattatctagaccactaggtgagcaagtagagcctagtgtataccaaaccaatccatcggcaccgcctaggcctccaccgaatccaggggataacacgagggttggcaatgctaaccgcctactgattggcagcagatgtttcaagaaatgtgaagtataatacttcgtaaagaatatgtattgtgtcagttgaggcaaccggcaccgacagctcctgcagaacaagtgttaccactagatccagtgccagtggtgggtaaccagggattcatactgccgcacagagattcaatatttgagcgctttgtaaagctgcaacctctaacgtttctgggaggtactgatataattaaagctgaacaatggatgagtactatcacctgcatcctagataatatgggggtgacgggaacagggagagtgaattgtgctgctttcatgttacaagatcatgcccgcgtctggtgcgacattgtggggcagactcgagatgttataagcacgatgacttgggatgagtttaagagtctgtttgaggaaaaatattataacatcgctctgcggacttcacatatggaagactttgtgaaaatgactcaaggaaaaatgattatggccgagtacacttaaaggttttatcagctatctaaatttattggtgatctagtgccaacagatttcacccgaaaacataaatatgtgagaggactgaatgccacaatgagtcgggacttgaagattaccactgctcacgacactttatataagaaagtggtcgaattaaccttgattgtcaagaaggctgagaaacatgtgattaaagagcagactgcaaaggatgtcgccacgacatcgaatcctcttataagtggtaatatcagtaaggggtaatagaaagttttggggaaagaaaagtggccgtcaaggccgcaggtgcacattctaatcatatctgaagtgtcccaaatgtaagaagcaccatcagggtgagtgtcgggccaagacttgctttcaatgtggcatggtgggccactttatcagagattgtccataggctaagaaaaagaagagccaaagaagaacaccaaccagaactcggggcgtctatttactatgactcaggcttatgttaatgctagtccgtctgtggtgacagttcagtaatccataacggttgttcttattccgtgttatttgattcgggagctactcactcttatgtgtcgagtagagtaattgaaggttttcataaaccatgtaatgtatatgcttcaaggttttgtaccctattaccttcgggagacctaatagtatccactcggtggattcaatctttgtctttttgggttgacggttatgagttggccgccgatctaattgagttataattgtcagattttgacataatcctgggaatggatttcttgtctaagtatggggcaacgatcgactgcaagcggaagatggtagtgtttgagccttacagtgctaacccgacagtgtttgtgggtaaagtacaaggatcgcgcatacctaaaattataacactcttaaaagctaagatctgatgcgcaaatattgcctaggattcttagtcattatggtggatactagccaatctgtgtcatatggacctgaaaatatgagattggtgtacgaattcctgaggatttacttggattaccaccttcctgtgaaattgaatttttgatagaattagtttcggggcagaaccagtatcgaaggcaccgtatcaaatggctccagtagaattgaaagaattaaagatccaactccaagagttacttaacttggaattcataagatcgagttattctccctggggtgctctagtgttgttcgtgaaaaagaaagatgggtcgttgcggacgtgtatcgactatcgagaattgaacaagctatgtattaagaacaagtatcctctaccccgaatggatgacatatttggtcaactaaagggtaagatagtcttttcaaagattgaccttcgctcaggttacaatcaactggagatttgggaagaggatatcccgaagactgtatttcgtactcggtatggacattatgactttctagtgatgtctttcggactcaccaatgccccagcgacatttatggatcttatgaatcgggtattcaagaattacctggacaagtgagtgatagtgtttattgatgatattttggtctattctgagtgaaaagaagaacatgaactacatctcaaatcagtattgtaacagttacgagatcacaagctgtatcctaaatttaaaaagtgtgagttatggctatcacgtgtttcttccctagggcacatagtggataaagatgggatcatggttgattcggccaagatcgaagttgttcaggattggccaacactaaaatcggctactgaagttagaagctttttgggtttagatagttattatcgttggtttgttgagggtttcttgaaaattgaagcacccctaatggaatgacccaaaagaatttgaagtttgtttggactgattagtgtgagaaaagtttttaggagttaaagcagcacttgattaccgcttcagtattaactcttccttcaaataagaaaaagtttgttgtttattgtgttgccttgagacagggtctgggctgtgttcttatgcaaactggaatggtaatagcttatgcttctcgacagttaaaagagtacgagcagaggtaccctgctcacgatctagaactcacagtagtagtatttgcgctaaaaatttggcggcatcacttatatggcgagaaatatgagatatacactgataataaaagtctgaaatacttctttacctagaaagacctaaatatgagacaaaggcattagctaaaactagtaaaggattacgactttgagattctttatcatcttgggaaggccaactttgtagttgatgccctgagtaggaaaggacagagtcatatgattctccaagcaagtagtagatgagatgacccgaactaagattgagttcgttgtggggcaatgggctaacattaccctgcaatctactcttttagaacgaatcaaagaagcacaactacaagatccagagttagtgaaatcccaaggcaggttttggctaaaaagactagtgactttacagtgtatgacacgggaatgttacggtttatgaattgtatttgtgtgcctatggatgatgacattaaaaga

SEQ ID NO: 218005 - DNA, 2326 bp, Cannabis indica
tttttgctaagttgaaaagtgatggagtgtgtttgtcgactgagacttggaatttggctttggtttgttgccttagaattaagaggactgatcttttttggcaattgtaccaagaaatgattgagtgtggtgttagtggggatgtgaagactgttgagtatctcattcatgctttctgtgatgagaatcaaatttccaaggcttatgaactcgttaggcaggttttggaagatggtttggctcctaaaaatgcttcttttaataaattagtatctggattcagcaaagagaagaactacgaaagagtttctgagcttcttcatatgatgattgcaacaaatcgtaacccagatgtttatacatatcaagaggtgatcaatggactttgcaagaatcgaaaagttcttgagggttttcgagtttttaatgacctcaagaatagagggtatgctccagatagggtaatgtatacaacaatcatacatggtctttgcactggaggttggattggagaagctaggaagctttggttcgagatgattggaaagggttatcttccaaatgaatacacttacaactcaatgattcatggtttctgtagggttggtgaatttgggaaaggcagagagttgtacaaggagatgtgtgataaaggttatggtgataatgtggtaagttacaacataatgattgtattgctttgctcagaaggaagtgtaagtgaagctgatcaaatgtttaaagaaatggccaagaagggtatcattcctgatttgagtacttataattgtctaattaaaggcttttgtaaagaggggaagatagaggagagcattgaactattaaatcagctcatgtctcgcggtgtcgaaaaatcgtcttcctcttatactcctttaataaaaaagctttgtcaggtgggagacatgaatgcagcaaagatgcttttggatgagatgattaaggcaggtttggagccgaggatcgacactcttgatgctttcgccataggatattgtgatgtaggagatgtagatgagggtatggagtggttggtagagatgttgaggaataagctaaaaccaaggaagcaaacgtttttgagactaataggaagtttcactcgaagagataggttaaatgattctttacttgttgtagattatatgttgaggacaggttatatacttcaaaaagacatgttgagatttctggttcataacctttgccaaggaaattctaattttgttgaaacatacttagagatcttagagagaagttgattcatcaagcttttttgggtacgttttttacaactttgtacaatttattggtgagaaacaaataaatggaagagggttggttcatttatttttttatagttgtgcttacaattgattatatatcattttctatttttcttcttgggtctctaggctttatatggacctcatcttttattattttatttttttgaaacaaaagtccaattagtaaccattacaattacaaaggatttggcgaatctcattgtaaagcatacctcgcacaaaggggattaatctcaatttatattgcactagctttgtttgtcaaaatttgattggctaaactatagaatagtgcacacaatattataagtacaagggccatgcgtggtggtgaaagaaaggaagacgcaacgactagttgcggtttgggttacacctacaaaaggtacattaaagttgaatgtggatgctggagtaaaaaggggtaaggtttgtactgggatcggttgagtgggtcgtaatgagggaggtcaggttatgtttacaacttctactgtgctgcagcagaagtattcaccattacgagcaaaattgttagctgttcccgctggtttgaagatagaaattcaacgatattttcaaaggtttagtatagaatctgattgccttgaagctgtccaattaattcatcgcaaggagaacggctgtaaggatgttgatggtatactagaatatattagaagcttattattcaatgtaaatgttgccgagatatcatttatatttcagaaagttaaagctactacctcccctgcccgtggacatcttccccatgcttagtattatttctaatgaatcacaattccaagatacaactaagaaatattcaaatacatcttgcacctgttgcttgaagccccacatctttcacacacccttattcaccttacaaccccacaaatgcatgaaacacactctcatttgcaccattagagcactgttacaactttgattaatctgaagccctcttgacgattacgtcgaatgagtaggga

SEQ ID NO: 218006 - DNA, 1921 bp, Cannabis indica
tttattttttatttttaatttaagcttttaaattaatttaataatttaaaatttgtttaattctaaacaataatttaaatttctttaaaatttattaataaagaacaaattttatattataaattttttaaagtttataatttttttttatgaatcagcaagattatcattactccaaataaaacaattacatcttaacagcatcttcaattggaagagttgaaaaacaattaactatacgaaatctttcttgggtatgtaatgctcattctaatctctattacaaagtatcaaactagatcctatctttagtattgacttttttaggccacaaactttcaaccctgctaactacctccatttttgttttggtgactactcaggtttttttgagcatattttgcattccatagtattccattcttggcttgccatatgttgtatgctagagcagtaatagcagcagccagaacttgctttttgaagtggttttggctcttttaacccatcgaattagcctatacagagaggtcgaaacagccctccattgcagccactcctttaattgctgatggcatgctacagagaaaagtttataattattgtggtgaaaagttataaatttttatttgttaatatgtattgatggtaatattacataaagtataatagtgaacaataaaataatacattcacatgtactaataattaaatgaaaaaatttgtcaaataaaaaaatacttaataaatagataaaaaatttacactaaaaaatatctgaacaatctcgattaccgtcgttctcatccaaatttgatagtctgtgacaactttagataactataagacatgggataaggcattagtattatccaaatataatagtttattgttgcaaaatttatttactatgagtatacacagtgacaatttatttgttatgcaagtgcacacaataaaacaaaactaaatatttctttatacatacaattttctttctttccttgtgtttattattttttattttatctattataatttattgttggcgacataaaacaacaataatttattttattttgttattgttagttatgtaaaaaaaataataaatattaagtaattcaatattaaaaactaaccaatccaaaataaccgatccaatctgcttttttgtaaattggatttgagttattatgcggattagattagaacaaaaatattaaatctgtactgagtacgaatcgaatgcactatgagtaaaatagtgtgaaatagattgaatgagcgccgctattgagaatgataaagagatgagataaaaaaaaattacttcaaaaaaaataaataaatgaaataaaataggtaaaaaaaaatggtataaaattatcaaatgacggtgtcaagaattgaacgcatatcacttaacaagagataggttaacttaccaaacatgttagaataattttgttgtgttttctaatgtaataatgtacattactctttccactatatatgtgtactactaattagttcatgcatgatttatatagatagtgtaattaaattaaataattaattcaatacataaaatttttaaatacattcaacatttaccttaactaagttgaagaataagcatattatgaatatgtattattttctatttcatgcataattatatgaataatgtaattaaaataaataattaattttatatttaaaatttttaaatacgctgaatattataatcttaaaaagtaaattagttaatataatattataaaattttgaaattattgaattaattaaaattttaaattaaatataaataaagaaatattacttctaaatgattgaattcatgacgttttcattattttaataagagtatataaaattattataaattgaacatgtt

SEQ ID NO: 218007 - DNA, 35272 bp, Cannabis indica
ttttctttgctttggtcgagaataggtctcctccgtttcctccttccatacagaatgaactccttcttcatgtcctgtccttcatgaatgcgagttcagcgaactgcaatgctgttgttgttccccttgaaccgtcctgggtccgcccatctcgccgactggttcgtgtagaagaagttatacccccgaattctgaatctcccattgtagctactatgtcagattcacccgaaatcccggttccgcctgaaccaaccactcacgacattctcaaggctctgttggcccaaatggaaagcttgaacagggccatcaataagtaagaagtaagctccttctactgcacctcaagcacctccggttcaagtctttgatgattgtgaccaatatgctgaagactctcccgaccctttttaacagttacagaagcggataaccgctttaaaatattagcccggattacgctttcaaatcaatagttcactaccgtgaactcccccccttttgtttgaacaagccttgttactacgttactaaagaaagtgccatactatcgaactataggcgagatgaagtgaagcaagcaagggaagagttccgacaaagcgattgatccagttaagataagatcgatagatagagtacgggacaggaccaacactaacaggggacgtagaacatatttatttaaagttaaaggaatcgccagacagaactaaaagctagaagaaagatgaccgggggccgggaatcgaactattaaattcaaataaggaccgatgatcatcaacagacctttataatcaactaaaaccctgactataatcgattatttgcacagatccgctgaaataaggcctatattcgcatttgaattgacctctcgtactgaggacgacctatgagatggtttgaaccgggctttctactaaatcaaagaagcaatagagaagaactaatggacagaccgcataatactctttactggaatgaaaagaaagagaagggattcacgaggagaaagatactttttaaagaagcgattcgttaaacaagggatgagcgttgaacaagcagtttaaaccgattattgtacagttgacctcagacctattcccgattgcagaagcggaaagggtatttctttagtaaggaaggaaagcaagttagttacatctatcttaaagtctgattcggattctgctctcgctgttctcaaagtagcgaagttaccagagggagaagctctgattcctcttgttgaatcgactctttacaacgtatcgtattacttaaaagcaaatacgttataagagttgtaagggcgagaggaaagagacaacagctgtttactagcaagcattgaaagcagatgccagaatgactctttgaactgaacgacgtaataaataaagaaactagctgccgcattcaattggtgggacgagatgaggtgcggagcgaactgtgataacctttgtttttaccataaaagccgaaagaaggaaagagaacagatgaaagttcgcccaaaagaagcgagtgactcaagatatgccatcgctcttctctcttgacctgagatttgggggagttctgtgagcgaggagcgaagcctttcggtagctgttaaaaagaatcaattcaatcagctccagagctaggagttctatgtctaggttgagggttgaggagagtccttttagttaatcttagctgctaccctacttatcccagctctaaaggcagctactgactcgtcaagttgagtcgactgtgattcttcttgttccgctgtgaatggtatcgttatcgtattcagtagttttcctggctcgctaaaacccttcttcttagtcttcggctttcactggattcactactctaagcggggttgactctatttctttctatgctatgagttagcaggtgagaagggctttagcgctagtgtttagcaatccggctgacattgaacttgaactagctgctgccattgaaagagaagagagtgaagtgacttccgggcttagcgcttttccggtgcagatgaataaagcggtcttttatctttatgttgctgtttcggggaatgtagttgaattcgctttgggagtctcttacgtattataaagaagaagatccccgctcgagggctttagcgtttgattgcgttcccggctctccgctaaagccctttatcccgtgcctgggtgaatatgaatgtctttctcccggcttactacgatttccgggtggtgggaagaaagtcattgctagctctttgaacgaatacgctcttgggccgcaagaagagcatctctctctgtctattcaaagatccgagacagctagttcagttggtgacataggttctccgtctctactctcctatctctcaccctggttgggctctggcttagtgtgattaaactgtgaatcgagtcaggaagaagaagtccagctccaggcgataaagaataaagaaggctatggggaaagatcccagacctggctcgctccaggcagattcaattctttctcccccagacccggcataagagaagggctttagcgaagaaagagatgcggatgaaagtgatctaaagtaagtagccgttacttctgatcctagtggctatggctcaggagcgggataacaaaaagtaaggattcgactagctttctcacatagttcaggttgaatccgctacgcacctttggttcggtggtatcctgtatataggagcaaggcagattaaaggaaggaattgataaagcgtcagttagttgaaatgtcagatctttcactcacctcaccttatcccattgcggtgcttcgtggaagttttatttggcagaatctatcccaacagatcatagaacttaccatctccaggatgacagaccataagttcaaaaaggtcacgtacgggcactgatcaaaagcacatacattcattaagggatttctcctcaatcaaagtagtgtaacctagctcaattcgcctcattgattccttctacaagcctgaaatctcgactcctcctttctttctgagcccagccacatttctatttggttatgctatatgctagtacttgttgcgggggcaggccatagacctactaagtcgctagctatatatatataatttgctcaagtgtgaaagcggaaggtcctgcacataaaaaatattccactgcagagaccttttaaagcctttgattacgtggtcaagacccggtactagggtatgagatgtggcagaaaataccccgaatgggtgtagaatcaactcgcagaaatgcccggtcaaagaagggcttgctagaactctgaagaaaggcttaaagcagagttttctcactaactcaggaaaggctcaatcatcagaaatggttcgaggagagcttcaatcgaaaaagcctacttattctactcgaaaaccctattaggcagtagtggcaagcacagcagaaaggggctttcctagatgtcaggcggggaatcctcattgtgtactacctagccgactctcttagtgtatcaccggagtatatctaatgtctcctaatgcagctacgaagggcaatgctttgtggaaaccgggcactgaaagagagatttcaatggatacttcaaaagcactaagacagtcggaagcgccccaagcatgatctgaaatcataccattaggcttccttccagtggttgctccggttccttcctcctgcaatgaggcgctggcgctgaggtctgtaagcctaaccagaaaacgagaaagggaacctaatgttccacccattgactggtttactactggattgaatggaatgagaccccatttctttagcaaagaatgaacaacattgagctagcacgtcagacttgcctgtctacttgagggaaggtgtgaatcctgtcttctgtgaacagcaatcgcgtaataattctcgcctgttattgtcgggtttggctagcccatttccaatccgggcttgggttgttagtttgctagaacagggctttttgattaggaaaacctataatgaaccggatatctcctcagaagttagatttggaactactatactacaacctccgctcctgacctaccaagcgctaagcgtacctacattaatatactttcagacatagctccagatggtgttcattctagttcttttgcaactgattatgaaactcatttcgcagtatagggaggtgggtttaaagacggaaaggaagaaaaaagctcaacgcgcgccagagactgatgaggcataggatggagtcatgccaaagccagtccattgcctcaacgttggattgatgggttgaaatcgcccattcccgatagcctaatctattttcttttatgcccatctcaaaatctctcgtttcaagcatttcatccccccggccttaaaacgtcttcaaacggtcacaggaacaacataacgaaacaaagaagacgagcccttgaactgccaggcaaagacggagacctgagattgagcctaagaatctgtcaaccgaggccttcgttctcaaacactcccttatttaagaatcagctttccccggtgtaaggatgaaggccgtaccccttgtgggaggaattgttttagtcccagctcccagatgagaagaaggaagcccaaggaactgccattaatatgaatgagaaggagcggaacccgaacccagggacgtctgatcgctcagattggactcttcttaatggtcacccttgggaggactaaatcaaaggatcaatcacctagcctgtcactgctgtaagctaattccgattggatgcttcttccggacctctgacagctcaaccaaggcttcctcttcaagattcgacccattgctagatgcgagatcgggcactgcagccttttcatactttcctcctgagtctgatggaagaaaaccttgacttctacattgcgaacaacacaaaacatccggaaatagactactcccatatcctacgctaaaatggaaatatcctactctgaggccaaagagagagactcaacctggtgatgccaatccttgataacaagaacacacgagcaatccaacccgttggatttccttttcctcttcccattcttacttctgtaggtttcccggttcagcaccaaggactaaagcgcctagtccggggcacatatagtgctcttataatcctcctcctcccgtaatattagttaagacggctacggcttgtaggtgaaactcacttgtgatcccattcacataaacatctctgattgcattagagagaataggtaagctttctgtatcaatgatctcatcgcaaaaagcggggagggtccgggtagcggataattccgaaggtttagaagttcggaaacttgtgcatagaggcagttcttaccagaatctacagcacgctgacacagggcatgaatttcaggggtttcttccctatgattccacataaactgtgctaaagcggaaaaagaatcataaaaggaaattagtgcttgttgtctgtccatcttcaaatttcttcctttcttgctccttgctcgcggagcggcataccgaaaaaaagaaggctcgagagaccagcccataggttatccctacagctaccttgttttgccaccgagaccaaccacacctataattctacacactagccctctctttttacctctttcatccactttacaagttgacggaaaaagtagctatcgacacccttatctgacaattcggacagatatcccaataatggaaggggatctctgccatcgcttcccgttacttcggtaatgacccacgaccactgttgcgaagactggggggatacgtatttaccgtcagcggtcaaagagcggataagggtgataagatgcctacgaaattctgtacactgatccctttccggatctttcttttttttcggtttacccccaccggcgtcactcgagcaaaaggtgtcgggcttctgtcatcacttacgagaattcaaaactgactgaaagatcttaaggaaaaagagccaacccttctattcctctcccgagcttgagctttcgcaaatctctgtctgtctagccaaccaattacgcttaccaatgaatgatatgggttttcaaaatgcttaggcctccttcggttcatcaaggaaaaaccctaccctccctttctgtccttgaggctgggttaattgaactaatcaaagtgtcgcggaagcccctactacaacctttgctcaggcttacaggagctaacgttgaaacgtctccccggatcgagattcgaatcttccgctctcctttcgctcctctcacattcgttcgagtggcttcgctcctgaaacatccacttcaattgattctacttcatctcccccaggcacccctttctctccttaccagcctggacaagacggatgggatgaaggatagcggacaaagcaagccagccaacaaagattgatccagttgctgttggggactttcccggggatgggagtccttcatatcatatgaggattcacctctgaaactcgaaagagtaccctacgcccgacaacaagaatcgcctgatccaattagctgttgccgactttcactccacctcgcttccttccccagatgattttgcctactcattgaccagtgacttcggcatcgagacactgactcccagatcagctaaccactctttgtaaggcagagctactttctgatcccgatccccaatgacaatatcgtcaccagtgggattgggggctatgagttgaactgaactagacctgtaatcaaaactgtggacatgggttaactcctatcctgtaggaactatcccacattgaatcgacaacaagtatctttcctttcaaagattgctgcttgaaacgaagtctgactcttccggatacgcaacgccccttctggaggccttacgacggctacttttattgaagaattcggcgtaacgactgctttcgatggcaatccttgattgatttcggaaggggtgcgaaagagttcaacactacgctcatttcgtagctctacgatttcagggtaaaggatttttgcttagcgaatccccttgcttttatgaaacttttcacattatctttgtttttctcgatgctttgaatagctatccggatagcagaagtgcaatcatttgcgaaagctctttcttcgcgctcttttgaatctaagttctattcgtcctcgggcactcttccaacttcaagaaaacgatctgatgtctatatgcttaacacatgaaattggccttggctagaatagctaataggcgggtagattgcttcgcacctgtctttcctctttcttacttccgagttggtgagtcacttgctagtgtcgacagcctcggttataactgtctctagaatagctaataggcttgcttccttgctagcatgccttgtggcgaactaaactgaaaattgattatataaagaggagttgtgtctttcttcaaaagagtcagatagtggatcgagaaacctccgcccaatagagcctagcccgagagaggtagggtacaactcttacctttcctgtgtggaccgaaatggtcccgcgaagccgatcaccggtagcctaagatcctttcttactattgaagaaagatagaacagagagtacagtagtggataaattgtggatgtctatccaggaagatgaatcaaaaagatgtgaacatgaagaaagaagagagagggaatgctttgccagcgaaccagtagcaatccggtgaaaagccagtagcacgatagcagttcctcggtctcagtccattcaatccattcagtcaagccagtcgcaaaccggtctgtctgtcaatcaaggaagaaagctctagttcaaataggtaacccacgaaggaagacgggcaaatggttgaaagctagtacggtaccaataccaatgctttgattcaactagtagcgaaggtgccaattggtatcattccaatagctgtccaagggtcaaggggtacacagccggtaaaccaatctgtcctctcactctttcttttccattcccatcgggatgtgctaaactgctttcggttttcgctttatgcttgatagtttactttctagggcatataaagttttgtatcatacgagatttagtgcaaggagcagcctaaggtaaggcaaagaagtcaaagaagaagaagtagcgatatgccgccttattttattattataaaggctaagagactctctttcacttgacgagctatcatcatgggggtataaaactttctcagtgctacccaagccggcagctgtctgctttgtaactgggcaacctctcgtagactactgttcttgtcttggcctttgttcacactatcacatcatatggtagtgtggttggcagcggaagtgaatctgattcagaaagaaaagcctagtcgtccaaaggccctaagtgagtaaggtgacatacgagagggaacttctagaaatggaattcttccccgaaaagaggtccagacgatgcgcactcctgatgggctcaccaaatctatagcaaaggaggtatcggttgtgcaagacctgaaaactgtcccatcctagttggccgggaggcatgggaccttgttctaccagtcgactgagcggggagaagaccagattcataaggaagatccaaccaaagatgccactgccaccgaaccggtgaagacccattactattcaccgaaggttaaggctttcttagagaaggcgggatactacttctggttcattttgaatatgtaagcctgagtcaatctactattttccgttaaaaaaacgctttcctcatctaaactcgcatagaagtagatggaagcggcgtggttaccatagctcatgcatttctttcaatctcaggaacaggaagaagatggttttcaaccagttaaaccgagaagaaccagaaagaaaaaggatgactccttgatgcccccaggcccggctacgagatccagggtcagaccttcgagtcccaaaggtaaaccttccgatccttccctttgttaaagaaatgccttgttttggaacgctagaggagctttgaagcccttccttcagctggtgcgcaggagcgcccttactttactatacaaggtagtttacttgcttacttgttagaggaaggtcttgaagaaccttactatacaaaaggggctactgatttcatcgttaggcttcttcttgctgtttggatcaagtattctctgctggtggaactactagcagctctctcagtttatttccaggactgagaaaggaggaatcatcactgcttctgaccagtaattgtatcgtgaacctgctactcttctttgttctctggtttaacctgtaagattcaggctgccgtgagctgcgttgagttatttgctgctgtgtgtccctgcctgcatccttctctgacgctgccgcttggagtcaacttttgaggctctgctactcttgtctggaaagtatgtcctaaggcaatccagactttcgcagcagacaacctggaacaactcaatcactactccgaacagtctggacccccttagggggttagggggaataactaagacaacacaaaagctgttacgccattgtatgttccatgttgaccgtcaacaaactcgctgaaaaacggaatggactaagacaaagcaaagaacaactatgtaagtcagccaacgccggtagtaggatcaggagctggaagacgagtgggtttaacacctcctgctcctcgtattagcaatcgaaagcctgccagtaggaaagcaaaggttatgtaaagttaccctaaaaaatgactaaaggcccccccttactagaaagccctgaagaacaagaatctgaaagagaagtgctggagtagctgctgacgctatacgagttgtctggtgcataaataatatacatgttggtgaaaccttcattttctttgtgacagatggtgtgctgttgaactgttgcaaggtcatcttcatggccaaagaagagtcaaaatcaaatggaagaaaaagagaagagagattgaagagtatagaaaggagttgctgttcaggccactgcaattatgttatgtctcgatcggatatccaagaggttacttatacaccaactgtactgctgctagctcagaagcttttggatcaacaatggtaactcgaactggcggaaagggagtatagctttgttgagggtgaacttactgctcctggctctacctcatagagaggcatatttattggtttaaagtcgaggtaaacgactgattcttagtcaactcggttagcttcctctgcttccggtggtgggaccaccgctgatgcggaaaaaaaaggctaggtaatgtatctccaactagctctaccctggtcaataatcggcccggtggtttttcgactggaaccggaatagatcttgggcgaggtggtggtggggaagctgctggtactagtatcgaaaccataaggggcgtttacgctggtactgaagctttgatactcgtgcctacgcagcctttgttcgcatctctcatcgattcccctatggagaagagtaaaaaataagagcattcattagttggacctttatgctaccagcctctgctattgacactctttctatactatacgagctgtaggatcatgagcatcacccacaaaaaggcatacatagaaagcggtttctcatccgggtcgagatcttaggccggtgcggcaacccattgatccaccggaataaaagcgagctgcattggggttagcagcatttgaaaccaaaaaagcgattcacttggtttcaagctgcgtagcgatcctaagagatcagatcagagaattgaagagcggagccaatcacagattaggatctcgtcccaccaattgaatgaaaatggcgttgaaactacccccagaacgaccgggttatagttaaaccatctccggtgagagactcggtcaaccgagtcgaaaaagaagcaccttgcccatattgataccccgtttaaggtattccaattgcaaatcggtatctatacgcctctacttcggtttgatagcttgttaaggagcaccccttagcccggtaggggggagaaagcagtactaattgtgggaacatcagtttatgccggaacaggggtgaagaaagcagcatctccgccgccatatccatattcaatccccccggccctcctgtttacctcattgcaggggtgaaagctgcaccatcactagcgacagagtcattacgctaaaaatcttctagttacggatcgctaaggccttggatgacttgttcctcatattgcctcaggatcatcaactgaaactactgatgcttactcatatgctggccggtccggttaaatccaatggaatccgccttagtctatacctatacgggtagtgctattcggttcaaggtaagcagctgaagcaactgcagggggtacctatccaactctctctgccgctggcattccttgtttgaggcatatcgattatagaagacatatgggttcggacgcgagcgaagggaagctaggtactatggttcaatgggtgaggatgctaggttacctggttctcaaatcgggtattgaaccctctctccctgcaactcaatctgcttctatatcctccttttggggtctcgatctcgaactcaaactgatgcctagctgcctgaatctctgctttcttctactaccagcgggctagctgccttagttatgttatatcgatccctttggttggaggacggatctcgctacatactagaaagatgttaatcgccgcattggaactacctaccatgaaccttctaccccgaaatcccaccacttagagtccataggaggttgcgggatgggaactatcggggcaacaccctaccattataccaaggggaaggggaaatcacagtaggtttctatggtttttattcctcttgctctaagtatatgggacaatctgccctctggtatcgggcatccggaatcagtctcgttaattagcaatttctctcttgccattagcgaatcccttatttccttctggtaaaaggaatctgtccaacctctatcgggcatctagaaagggtcatcccttgcaattcaattgggaaatgtttcacgcaatagcgtgaaagaagtcctactaagctaaagaagcagatgaagcatcgggtcttggagaagaataagatcacagagcatagcaaaccgctaaaccatgtgcgcgtgattgctcgcctatcatgagtttgacttgcgctctaaagctgtctttttgagaaagaccggagagaacctttatgacattcttgtggataaagcagtcggtgaagctttttcttatgttgtttaacagggaaactctggcaaggtctattattcctttttcccagtgggtgcaggcttcatcgaaaggctctccgcctcgtggcattcttggattcgcttgcaaacaacacttctcctctcgccccccttggatcattttcaaaaggctttgcccgactgacttaagagttacacctttattgaccagatcccatgagtgctactaaatggcacgtcagagctcccctctcgtatcatgatttgccgcttgattccgaagaccaaatttccttgtgatttgttgattcgcatcgatagaaccagttgtgtgccacatacatggcgcaaatcccgagcttcctgttaccgataggcagcaatccaagtcgctgagggacctaactaagagttcccctctggacctgagagaagagaaggccgatctcctgcacagattctcaatcaatatgcattgaatgaaggaattggtccattccctggccaatattgggtaagcgcgttcacggatcaagtcatttcatatatgatgttccccatcccgatgacccgcatacgatgtcaatgagcgctaggagaaggaaggggacaatagcaccgctcgcctcgctttgaacaaaataaattatcgcaaccaaaaggagacaaccatttgtagggaaatccattcgataggaggtataggatggaaccgaatccgcttcgcgagggtctcgttcgcacgactaaaagaaatttagctaattgacggcatgctaaggagtaggaaaaggcacgtacgcgggaaattcatcgaagtaacgcgatggattcgcaggaatgaacgaagaaaaagccttcagacaattcaacatcattttttatttatgttagaaggtgcagaacgttagaagcaagtgggcctccggccacactaccaaccctcgctacggcttcttttgaagctctagttctcacgcattctagcttcaagatctggctttcgctttgagcgcgaagcggcttgctgagatcaaatgagatatcccaacctttgattgtcaaacttgcagttcccatgaaccaagcacaggataggatggatggtgtaccaatccatttcgttgggaagatggcgaggatgaaagaaggatatcgagagagaaataggaaaaagagtacggaagctagagctgagatataggctagctaaatgccctaaaatccgtgtacgaaaggtccgcgatcctgggcagtacatggataacccgactcaccaagcgcttaggaacgtgtggtgaaggcggaatagagtttgccgttgaaatgaggacttctggtgtaaccaagtttgaagggcggaatgctaacgaaccggggctacagcacctgtttatcccgaatcctccgaatcagatgtggggaaaggatgaaacatctggacggggtttggattcgaaggtgggttggaccctttactggagaaaggaatggttttctcactctgggaaaaaagagattgcattccttcccgcttatgggccgatggcaacctacttttcgagaggatgcaaaaaggtagcaacatgcattccgttcctcgtcccaggacaggaatggatatttgggctttgcagggggggtttaggacagagaaatggaatagaggaggtactagccagcggagggagaagcacctagctccaagtgatcctattcgtagctcttctgctctttttcttcttccataccggacctttgggctcgatcaactatctgacttgaatgaagaaagacagtaaaccataagctttttcttcttctcttatgatatttctagtttgtgatcgtctccccaatatgagataggttgcagctatagtcagaactccaactgggacaatctagtttaaaccatgaccatctttttatctttctatcatatcgcgttatatattaaggcttctaccgcctccactaatacagtacaacacgaatttttgggggtttcttcctctcttagtattaatgcctttgtccggaggccttcttgcaccagctcttaaagagaaaagactgtcttagtgtatgtcccacgacctgtgggaccgacagtaagtagttggaatcatcaactttctcgatcttggcgggtcgcttacacggaggtagagtcagctgaccgttagcgatcaacatgtcaaagaaggcgtataccttgctttcatcgaaatccccgactttagagagtcgttctttgagataaatttgcccgcttcttttcatccccgttttcgttcttttgcgcaggggtatgaggcctcagagggacaactttttggataaggcgttaaggcggccttctaaccctcggcctatctggtcccgtgcggattaacaccctttcgtttctatcgaaggcagccaaccatatgaaagcatttgatcgtcgcgaccggtcagggtctagcactagacctgaaaatggaagggctgcacttcacgttgatgtcggctatgctttgcatccgatgactcagttcacagacctagtaattcaaaggaagaaagcagatggccggcttccctcctcctagtatccttactggttgtctgtcttttcttttaggccgaataggggaggtccaagttttcacctgatggggcactaatagcgagacacattcccagtgtctcgatagctcataggcgttttaggagccctattgagctgcgcaatcgcgcttctttcgccttacttaccgcgtatccaaacgaatagattgaagaagtaaagtggtttggttgttgtgcgcgccggaggcctaaggggtagtcgagttgcttacgaggggtgctgtacgctaacggtaattacctcccaggaaggagagccgcataaaaagagactctaaacagactgtattagagcagcagtcggacttgttgcaagaaaaggtagttgaatgtgttaggcgaagagaatatagcacgtagaagcttattatagagtcggtagttcgacggcttaatgcttgccaaagagagttctatagcccttaagataaagatatgaccgtaatatttcatagagagagccttttggctcctctgaaataccccaaaaatggattgtattcatgtggttaccacgtcagatggttgaaaaaggggttattgctaccggctgtataactcgttttagctctggacaaaagatgggaaccagggagtcagaccaaaaagaattagttctttgatccatttggtgtccggaaatccctcattgatagatataaagagaacacagctattgaagctattgaatcaactgtgggacttgagctagttggcatatcttaactttttgaatcttcctctatagcatccgattactgattcttaaactgacacaaaggagatagaagaaaatctttgcactgtattcgcgacagaagggctttgtgcaagtgaagaagaaagcttgagattccaagtaaggcattctccccgctaggggaggtaggaaaaacctcagtaaatatatcacccacgcggtagtttacttgcttactctttatttattttctctctcaatgctcgtgcaaagaagattgactgatgccatactatactcttctataaaaaatagttattctagtgcagctaggagagctaactaagactaggagctgttcgggagaactccgattgttgacgattttaaatagacgagatcagatcgtagaatatcaaagtctgttcccgcgtccctggttctatcaaaccagactatttcattccagggagcgctaagaagcaaggccggagtgagatgagcgtaggttaggtcagctaccaactaagctaggaagctgggaagagccggtacggctaactttccggtgtgttagtgtcgttccgaactcttaattgactactggcatgctcaacggcctaggagcgattgcccgacagccataagacctgaccgctatcagactgaggagtagatttctttcatcgatcacccattccccctttacccaatgccctcaatcgacgggagaagaaaccgaacgtactgtcaagggcttactgaggccccatctgcattccttcttgcactagaggccaccacaaaaagccttgtgccaatcccgcagcgtcgaaacctttctcttgaaccacgggtcgtttcatacccacctgcacttgcaaaggcagacgcatccctggcttcgtacggatagatacacgtcttcgaatctctaaactcccaccctctatcggaactcccatacactcatctccatacaacatgtccgcccgtataagccaagtctaactcttctgagtagtcaaacccccacggagcggtaaaagggctgggacgcttgagcaggggctaaagacaggtacaggtgtgactataagcgagcactttactttccttggtctgcttgttcattcggaggattgaccaagagcgctcggtgtgatctaccgacggcccatacgtccgtttttcgtacctcacaggtgattcaccctaaaacacaattcttgtgcgtattgagggcctctgaatcgatttacctaagactagaacagtccccccgggaagtcgggttccttctcttctttctacccgcccacggcccgttccccggaagtgcccccaacctctaaaaccttacgcggggggatagcatagcacagtacttcgggcctggagtgaagcagtctggttctttagaacctggggcgaacgaacagctccttcatctcggaaggacaactccttcacttttaaataaagcgacgccccaccgtgcccacccaacaagctaggttgcttgcaatacaatccgcaatgcaatcattcagaatgaaaggatttaacaactctgggtagacttccagtttcataacagcaatagcaatagctaaattgcaatagctgtagctgagctacctaacaagaccaatcagatcattttcagtccatcgctcataaagaaccaataatctttccgcagcccaaaagaatggcttttatcctaaagaagcaaggcccttgcgtgttagacgctaccattttcttgcttgtgcatgccaacttccaattaaaatctaatagaaaagataggtctcccgctagtgatgcggcctcgctagctttctgataaataagatgaaactctataaaatgaaagtaatcacacgactatctatataaaaaagaactcgcgggaccaaaagaaagattgataactgatgtcaggtaagggataccgccaccagagaagcctgccgttgagccggcttactcgcccaccatgtcagcgccttcgggttagttctttatggagtgctttctttcataacaattctccttatggaagtcccccacaagatcaagaatgcttgttgccgcggctttcttggtttggctggctcagttgctattgctacggttgcttgcaagacaattgcaataagccgcttaactgatttagtttaggccaggatattgaatatctgggataaaaaccaggctgcgacccatctttgcaaagcaagagcgaggccaagaagcagcaaagcagcactcgtacactagaaggatggggcatggtggatcgcaaccatgctacagcggaaccaccgggatatttgtaaacaaccgtcgcaagcaacctctcatcggtcttgactttaggagtatagctctccgaatcagcaataatttgccttcgtcggcttactattcaaaaaacctcttccttgcaagcaacatcgtcatcatagatagacccctcgatatcaactaacctcttgttctcctggctcaacgaaatgagcttgtgcgtcgaatctccggactcgaaagaacgatgtcccgtttccaaacacacaccttacttcggaaaaaatccttcttcctgtcctcagccccccctaacccgacggctgccccactttagtgttcacgtagcattgtaaacaacctcttgcaagcaacctggttatgtcatacccatatcaaaaaggtaacaaggtttttgaacccctcgtagcgttagctatagctacttttggcaaagaagccatcgagctgagagagatcctctctgctcttccaactcgatcttcggcgggatcgaatgctttcccggtagaggttgcttgcaatatcggctaactcaaatgaaatagagacatacattcttcttcctaaacctgaacagcaagcagttcttgacggaaagatccaatcttctaaatttcgattctttttgagtcactttcatgacttcacacaaacctaatcacgcaatcgaagtgttagccttttgcaagctcacgcttcagagggattagctatctcaaagcacgtgccctctcttaccaaagctgtcatccgaaaggcttgttctcactataaactacgcaattagctgttcgcaggagacagataaaaaataaatggacaagaaatcccgtcttttgtttaaagaatagaaatttagtacgggcgtcatgtacctcaccgatgatgcgatgctatgcgacgacagagacatagaggcgggacgttgcactatcaagattagggagggaagagtggaagcttcagttccttcccgagaacgtagagtaccttgcccgtcagagtataatgtgtctcaacaggctcggttcgggactatgtgaagcagttcacaaccgtcgatgttggacgtcaccgagatgggggagaaggatcgactcttcttctcatggactcaaaaagtgggcggagctagagttgccaataagtgaaggactgggcttccgcactcgctgcagccgagcgcctcgaagttcaggcatcaggttggacaaagaaaagagaagtcgagtgggcctatataactccaacgaaaaataaaattggaatggatacgggactgtgatgcggcactcgaacgagaccgtagtctcgggaggaacccctaatcgtacatttccgtttgctttttgtttgtagtaaggggtagacgagacaaggttacgcgctgggtagcgcgtctgtttcgggtacagaagcgacgaggggtgctaacccggccacccaacccagcaggtcaggggcgggccataggttcgaatcctgccacctttcttgtggatcatcctgtggttaccggataatgggaataacaaagcagaaattttgaaatgagcacgagatgtcaatatatgaattgtttcattatccgttatttctgggtcttttcgttgcattcacttacaacaagaaacaaccacctgcgtttggtgcagcacctgcattttggtgcattcttctttctttccttggtctttcgttccgtcatattcctaataacttatccaattacaacgtattaaccgctaatgcacctttcttttatcaaatctcagggacatggtctaatcatgagggtagtattttatcatggtgtcggatcccaagtttttatggattccttctttgttaccggggtcgaccccaaagccataatgtatcaaaacgaggaggccatagagaaacttttttttattcctttgtctcgaacttcgtgaagaactccattctatctcgccctcgttacgaacaaaaaagtggggctgcgcaccagttgtacactcccttccttacatcccttgttgattctgaacttcgttcgcgaaggaaccggacttttgacgggccagcccttttttatgcgccgctttcccctgaaaggaaaatgagctttgctcctctgggcgctaggcgctcccgtggttcgcgagaaggaaaaaggatgagtcctttgttgcatctgacacgagatgataaagagagagcttcgtctatcgatgaacagcggattgagggagctcttggcattgctttgtttttctctcctttcctatcagcgagttccgatccttttgttcgaaatttcttcgttcgtaccgaaccgcttgcagaatcaaatcctgttccacaagatcctatatcagctatacatcctccttgcatttatgccggagccgtcgccagtgctatggcctttggcttatgtagatcaaaaaagatgaatgggattgtggcactccactcgccgccaatgcggaaggatgccgccgaaaagaatggaacgctgcttcgctctgctggatgcgttggatcccgtataacaagcgagctttttaccctcaaattcaaagatgctatttgctgctatcctgctctattgttgcgtagcaatagaagcctgctcatgttgcttcggcggcgctttttcgccttctcttcgctctggacaggagcgctagtggacacggggaaggagcaggcgaagcgtgtcgttcgtaatgaaaagaaagagaccactacttcgcctctttgttggaccgccggcgcgaacacagtggtctctgaccaagaccaggaaccaattctaatttggatcttgacatgtcggtggtttttaaccgtaggcatcttgccaggaagttggtgggctcatcatgaattaggtcggggtggctggtggtttcgggatcccgtagaaaatgcttcttttatgcctcgggtattagccacagctcgtattcattcagtaattctaccccttcgtcattcttgtacctcccttctgaatattgtgattcttccatgctgtgtctcaggaaccttttcaatacggtccggattgctagcttccgttcatagttttgctacagatgatacgcgaggaatctttttatgttggttcttccttctaatgaccggcatatctatgattctttgctgccagatgaagcagcaggcatcggtccgtagaacctataaaaaagagatggttgtggcgcaaagtactcttgtgcatctaggtcactcggctcgcgcgcaaccccgccccgttatggtatggaataattgaacttattgctgggctggttattcagagccagcaattggctgccggatttcgctccgcaactagaagaagatcgcttcggggggggaggaagctgggccatctaatagagtagtcccctatccctatcagcccgatgaaatgataggggagtggtgaggtgggcctcttccaccagattactttacttactttcattcatgaaaaaacagtacaggaactgatttaacaaaaggggccgagaactacatagatctgagactttcttccctggtctggggggtagtttatgtaggcaacaactgttcctaggtagctcgatcgcaaaaggccaaattcatcgttgtcaaagcacttatccaatctggctctttagtggagtccgtgcccctccgttccaaaggtcaaagaggagtacaagccaaaaggtgccatagtcgtcgcaaaggttcaagcaaggactaagtcgaaagcaaggaggaagtaggtctcaaaagaaaaaggaggcggtttaagaattcccaagcgcctagtcagttgaagggtcagttcaaggttagcgtccgattgtgcgcaatgaataaatcaatgtatttgcggaaaatgggacgctgaaggtcaggggtagccgatgttagcaacttcttaacctggctgcaccaccttctttttagtgaaaggtgagctacggtgccccaaaccacaagcaaaggcacgaagtgtctcgtctctgcataaaatcctatctccgtaccgagcaaagcgcaatgtggtaataaagaaaagtctgggttcggtcttccggtggacggcatcgatcgtaaggtggatctacagtcttgaagctccttctcctgagtcgacctttgcttttgggcaaaagggggcttccttgcctgttcttctagttgactacgttgtggttccttctttccattccttggaaatggtgtccgtgctactgaatcccccattcatccgctttctaaggtctccccctttcctggtgagagaaagccaacctcagctagatggaatatcataccattattctgatgattctattctgcattctccgttcaaaaccgtctactctataactaaagaaagaaggaacagtagatagtacactgtgcttctagaagacattcttagcccgggtgaccggatttgagtccttgccttcgaaccaagggcttttttctccattttcaatgtttcactcgtttcactcaccttattcaactgtcttgcatggtattttgggaggacctttttcttccaataagactattggggcctattaatcaacaccccttggggacccccaggctctggatgacaaagcagcaaggaccttccatcaacaaatctggtcaggccaacagccaacaaggggctgttgatgggacaaactgattgatgggagttatttttgttgttttacagagtagacaggcttggaggggaggggcatcggtaaagcatctgtagcaggcggtagtaagctcacattcctgtttttgttaattaaattggtaagcgttagcgcccctttctcaatcaagttctttcgcgcccttgcttcttgctttcgagccggaaacaacgcctttctgagtcgactaactagaagaaaagaagcccggacatgtaaacctcctcatttagttttcctttcagaaaagcattccccacatctcactggaacgaaggctactttctcaccgtggcaactgcaatcagagccctacaaaagtaacctttgccagtgggggttttctcagaatcgataccaagtgagtctgaatttccctcaatagtggtatttccgtcaggaagaggtttgaacccctctctatctgataaggtaatgaacgacgtcttctgcaagactggcaattcctcagacatggcctgctgctactgaggtctgtaagcctcactatcattttgcggcttcaaagaagaatgaacaatggcaagaaaagcactatgctgggtcagacacaaaccatatgggtgtcacaaataagaacaacgtacctcaggcaaggacgaaaggccaacgggcaacaccatccaatcatcttttgataatacatataatcttccaaacaatactgccgacaatcagacggagcataatcttttttcttttaataaagacacttctcagcacatacagatttcttccgggtttctgcttcattcaagtcttaattcaagtaaggtctctcgagcctcccgctacacaaccggctagaagacccgagtacgaagtgggccctgacggaacggaatgaaacttaagaagagaactcaggcgctcattgattcttttctagtgggtgaagaaggctcgagagaccttgggttactacggcatgttcagtagctattcgcttacgaagtggctctctctcttttaaagtaccacttctcgcagatcttaggatactgtcttccctatccttgctaggctccgtctttttattggatttatcacatgatatttcaaatttacctattcattgttatttgatacattgaggtcggtaacgttggtgaattaggtgttgatgggggtacggaaagagagggattcgaacccacaaaagcctacatagcagttccagtgctgcgcctttttccaaatgtcccgtaagtgaatcatctcatcgattggacccatggaccaacatagattgggctgggagtaagaggtcgctgtccgaaggagtgatcctggctggttggtcacgcaggggataaccattgagccaagcagattgccataggttggtgtccttgccgtcaccaatgacacgtactattccgctttggagaattggctttttggcataaatggacttccaggaagagtaggccgagtatttaggctccacatctagtggacagctctcgggaaagttttttgctttcattattcggcaaatgaagtcgcggtacatgtgagaagtctccagagcaagcttggaaggccgagtttttgagtgcaagagaacgaagggcaaggcctccctcctgccagggttggcagacggaccaccaattcaccgcatggatttttttactttcaccttgggaccaaaggaagtcacgttgcaggacttcaatctgattgattgtgtagataggaagcttgaagttgctcaacatgtgattgggtatccctgtacttattttgtcggggttttgcgcccaggtcagtagctgacttttccaaccttgcagtctagaacccggttgactatatttctcatttgtgcttttgtgggccttccagtgagagggagaatgccctgctagtctttacttacacagaagaataagatggatagaatgggatttcaagggaaaatagcctatataagagaaagagttccccagcttgaagtcaaggcaagtaacttcttccactagtgggacatgcccagaaggagctgctagagtaggttgctcaagaaggctgttagggtaatcaaacctgcaatcgaatccccagcgactgttctcgctgttgtcggaataagcgctgttaggagtagcactagcattagcaggagcaggaagagtaagtagcacgtagcactatgactttcattttggaagaatgggttgtttccaggacaaatagcgtatataagatcggatgcagacgcttttgggacatgaaacggccatttcgcctagctagtacaatcttgatgccgagaattcggaatagaatgccctctttggaactggtagtgtcaaagaggcgattctcaacgcatctgagaaggcaagtcttttacttgtttactgtttcgaggtttagcaagaggacaggataggctaaagagaggatgaggctcgagagaccttgctttgaatagcaggaattcgtaagtggaaagacctagcactttttttgacactagacataggctgctaggaaggaagactctgaagccgattatcccattgtagcaggaaaacaaactataaggtaatcgggaaaggcagaaagtcagaaaagtattcacttcttgcaaagatgggcctagaatactttaaaggactaagtagggaggaggggtaagcgtgatttggaagctttcaatagagtctgagacttcatatatgcaatactcctcaaaagccaaagccagatgcatcacttacagttcgtcggtatccccataatacggatttgggtacccaccagcagtcacttaccagtagacccgaagcagcagcaccatctcgcctagtatcctttggtgtcacagcttcccttcaagttacggttccaggaggtgaagataaagcacatcgagaccctgacggaacggaatctagaggcaatgtagcaagagcgagacccgtaaaaagagcaaaacccagcaggataggcatattttgtagccatgatcgtgataaagatcaagccagctgtgtacccaggcaaaggacacagaggctgaggccgccccttaccttatatgctgaaaactgctagaacaagcgtaggatgctgactacactacatctatatagaaaaatgaagctctatcttcctgtcttgccttctttacaggactactatcatgaacaacccgaagaaagtattcaagtaggcaccttctattagggtagatattgtttataatatggcttactaaagaatccgtactagcccccttctccaccttttcttctccctactcttttatttctgcttaatcccccaaaccgggggttctcgcattttggtcccctctccaaaggaggataccgtcgggagagcgctgctccaaattattctgggaaaaaaaagaaccacattcagacccagcccgaaatcccgaactttttggcagaaatcgacctgtttaggtttcggataaaggtaccttttttgttgaagggtcgtgggggagtattgcatgggtgacttccacgccgtagcgcctccggatattgttggctctaggcatttgctattaaaatcccccttttgattaccctgcccctttctaaaagcggaagaagacaaatgggctaaattaagaggagggtggtagtaggtctttcttacttactcactcgtaagtccaagcaagcagccaatccagtaagtaagtggagcctagtcaactactgtagagcccattgatcgaactttgacaactctacccacttctgattccggaaaatcccatagcatagtacatttgtagataaataggcgacatcattgtaaacatcaattccaggaactagatagaactggtactggaagtggctcaggaactatttcaggttattgctctgtcaaattttttttggtcactccaaaacttccatgacagaatctgtacccccctatactgaaccacggatgaccgtgtctgacgaattgtgcatatcttctataggagaagatattttatttctctgccgcggagagacttactcttcaattccattaatacaaagtagatgaccaaagccattacaatgaattagtccatgcaaaagagatgggtttgatgaagatcaaaaacagcatcatctagtggaattatcatatgagactttcgtttcgaaacaaaatggttactccaacctacagaacaaaccctactatactaaaaaaacccaattgaaattcttacttaattttaaaccaataacaaacaaatggaaatcagaatggagccttaccagtgcaacggcattgatcccagacgaaaagggtcgcagacaattctggacgctctattcaatagtagaaagaggagccacaatgcttctgttctcgtgtacaagcacgatgcagcaccatgtgggcatgccgtcgacgttgtattcttcaatctcggagaattcttgaaggaggatccttatgtttgttgtcgcgaaagggacccgaggggttgatcggacaacctgggtcggaaaacaaacgtgtgtaatccgaatagcttcggccttcgcttccactttctgcaaggttcaatatttggattgacatggtggtattagtttcttccttcttctgcagcatggcttcttgaatcttattttaaacagggggagaaagtcgatagctaaaaccagatttcaatttcatttcaaagcatagaatattgtgttatttttcatcacagaagtggcgttcggatctgatctcaactccaagcgcgaaaatcccttttaaggtaggaatataataagcggagaattggatatcctgaatcttttttgtctgtaccgtgccagttctgccgctcatggatatactatactataatataattatattatagtaaacaagtaaatgccctagttctctctctctctactggaattgggcggagaaagcgggtttttcttatatatttttccaccccagtctaaggctaagttcctttagttcaagcaatcctaatagacttctttttccccaccagccgtaatgtcttcctaatctaatccatagcgatctagccgagtgaggtaagatgtttgagtttgatattaagtaatatcaagtcttgcttagtctaaagagccagcttagagcttagataatctccctaagtaaagtaaagaaaacaggcagccccacaatagcagactaagcctatacagtagttggagttcttattccttttagccatttaataagaataagaaaatgacaaagctcctgtgaactgaactaattcaatacccttgaaagccgcagttccttttcctttttttgtatgcaaaaaggtaagcagggaagcgagtgaaagattatcatatgatgagaaagccagtctctttccatccgtcccaattatttaccgcagtcccgagggttaggatcaagggtacggtcgagttccttcgccccttgaatatcatacctagaaagagtaaaataaaagtaaagccagagctagtataagaaaaaaacctcctgtcccgagttggcttaagccatgcctttactaaactaaacaattctcgccatctcagagcagagggcaagtctcaccccacgggcacagctttactacttccaatctcctaactaagggccttaccaccaacatcgcttcttccttcaacgcaacggcgaattcaataccagcttcaccacgcccttaaagcgcttaatctagttatattactggttaagttaaaggctaggaaaagataatctcttgtagctagtctttttaattcgctttctgctatctttcaaattgaagttgaagtctgagttgcagcactagttccagcgagtgggagaacctagggagctacccgggattaaccaagaggatactaatataactatcaatttactatggatactaagtctttgccaaatcatgacgagtaggtagttttcttctatgtggttgcctttgttttatcttcaccaagcgagttgaataaaaaagcgaaagatttttagcagggaatcgtttctgctattgcccttaagtagttgataatggggactactatgactacaagggtatcctccttttaaacagtctattcttatactagggatttttggttacaagagcaggttggttataagctagtaagtcagccagtgagatcaagtccttttggataaagtttacagcctttgggggtgtctttacaggcgatttccttggggtttatgggtatgcttacccttttaggttcttttctccgttttaactaccctcagaccggacctgtagctctggcgttagaacttgggtttaaggccgatagaaggccttagctgttggttgaaagagtaagccaagccttctttttttcagagtcaagtagactaccttttctgttaggagctagaagcttagaagcagctaggggctaggagctaggagttagagaggaggaggggggaagaagtcactcgtatgaattgttgttacggttacggtatgtagtgctcaaccgataggaacgagctacatactttcagtgagaaggagatgggctaaaaaaaagcgccttgcgcactaggagtttgaagatgcccagagtacagcgcaacttagaccttaatggacgagaggctctttcttattctcgaattccctgctcttaaagactcgtacaaagaagaaaagaagttccatgccatggcacttgccttcccttactcttactaatactaatgtgcaatcattccctccctcacatgcatttgcaacagattctaactaagaccggtaatctccggccattcttggcatcttcactagttgcccctcttctcaaagggctttgagaagaagatgaatgtcaatgtgccattttattctttcttcgggatactgcttaatcttcttttccttcggcgaggataccctagttcaaatcgttttaggaaagtcggcatttttagtggaaaggaaaggacttataccatgaacggactctttgccttgggtcaatcagttccttggcttactaatgaccacttcgagaagaacctatttgaaaacagtttaatgccacatctgactcaacagctccttcttccttttcttcttcatgtgcacaagccctttatatgcaaccacttcttgaacaacctattcctattcatgcgacaacagcacattctatgccatcttccttatactattgattaaatcaagcgattcgtgttcaattgcacaagccattctaaggaagattagaccggcatctgccttagccctgtctccctccctagctaattgaataccagcttcctcttatattagtattatatgtcacttccttgtcctattcttttagtatgctatgcatggggctgtaggttgctttctttgatcttatctgctcacgaatggtctgcttaagccaataagatcgaaaaggctatctccgagtggcaaaaaagagtgcggcacttcaagcaggaaggatgcaaagtaatccaagggaaagctagacctcgagtgaggaaagacgggagccactctagtgacctttgggtccgtactaaccttaccagttattactgcctagtgcccaaactgattagagagttgttgaataagcaaatcggctgtttacagttacagcaaacaggaaagaagagcagtcgtgtggaaggtctttcttcggcctttgcttcctcttcttagcctagccgcttccaggtaaggagaaagaagtgaatccgaatttggcgggggaaggaactgaatataacaataacaagcaagaccaaggtatatgaccaaaaaggccttgtcacgagctggactcgaaccagtacctctgggagcaaaagacatacccagcgaactacctttcattctgatcatgactttgaaaaaagaaagaaggaaaagtttttttacggatagataacacactagggtggaaagggaaggctgcttctcgggcaaggttggttgctagcgaggaagcatcaacatatgcatacgcgtacgcagatgaagctagggcaccaagaggatctagctagcctcatttcgtcgctcttgggctctcgcttactcagccctcaatgaacagagtcgggaaagggaatcaagcaagagcgcgttaagggaatgaatgctagcttaagcaaagcagttgcgcggtcatagaatctaagaaggaagcctttgtgcgtagagcgctcaagaaagacaagaaagaagacaaagtgccgttagcggtcgtcgatgaaccgagttgtgtcgattcacagaagcggcttggttacccacccacggaagcaggccgtgcagtgaagcaattcagttagcgtgtccggtcagcgattaacagactcgggaactttcatattccttccctctgggtttctagcttatagctgatcccttgattcaccgagtcggcaacgggatagataaacagagtcggcttattaactcgacctcgctcctcggctcaggttggcaataaagctgctagtggccatggcatggttaatgagccataagccaaacgagaaatgggcggtgactctgatggtcagcctatcactcttccttagcgctagagagagaaagagaaggggagatgtaagctatagcgcgatagccataccaaagcaagctaagcccgggaaggctttaaagtgagtgaaggacttcgtctttcaagacaagaatgaagtctacagacccggtatcaacagagaaagtaggagatcacttcttgtcgacttcgcttgctagcgttaacgacttcccttcccagtgttgaggagttcaaaggtcagagacggacattgtgacgagtgaaacttaacaaaatgccaatgttcaggaccctcactttaattaaacctgttgggtaaactaaaccaaccattaaagcttgaaaactctctctcgcattaattgctaaggatccaataaggccaacattgattccttcagacgtgtcaattggacaaatgcgtccatagtgactaggatggatatctcgtatccgaaaactagtagttcgcccactccagggcccaaataactcgattttctcccatgaactatttgcgttaatggattcgccctatccaccaagcgttaactgctacacgagagtacagctaacctaagcgggaagagcatattgaattaaaggaagggaattgcacaggaatgctagactcaactaattgtgccttccgttttgtttactctacttgaagagagtccctagcgtactatactttgagaaagtgaatgctaccgatacttgatcatcctctggcaaaagctgttattgaaaatcctgctcctttcattaagtgaaagcgctttcctcgaccaaaaggagtatttgtttgtacagctcgctatagatagactttaaaatccatactacagaagagcagcaaaggaagaaaaaaggggataggctgactaagagcagttggaggaaggaactgacatatgtttttttcatatggccataattctcgggtttccatggatggaaatgaatcaataggggaagatacccacaccgacgcacagaaaataggcgaatacatgagaaagggcaaggccaaggagaatcctaaagtgactgttcgagaatgtcctcttgcgagaataacctgtttgttttccggacaaatatgccaggaagcaggaaaggaaggatcaatagtcaagatagccacggacagaataggtttttcaattcaatcagaagtagcggcacattcatctgcttctttaacttaacagcggcccctgcttctattagtgaaatagtgaaagcggaatccaatacctgtagcaggaaaaaaccaattgcaatttataatgttagcatgcccccatgtgggacttcttaagtaagatgagcgaagaagggaattctccgatctaaagccagaactagccattggatttgaatgcccacctgagaggataagccgatcttattcgccgacattcaactagaggactgcgtttacgctaggaattgatggcatgaataggctgcctattgaatccgcagcaggagcaggaggagtagcacgttttcgaccaggaacagcagataagctaacagaaaacgatctttagcggaggattttggcacattcaattcaacacgattatcggcataaagcctgtttgccccttcctgacctttctttcggatcaattgctattgaataggcagctagaatagaagaagctgctgttgaatcaatcagctgtgaacgaatcgaatgttgcaagaagaagagctttggttatatcttttgtcttttttgccaggttagcctttctttgaaagaatacggggttagagccgaatctaatatgaccattttgaaagaaggagctgcacatgaagaagagagaaggaggacaggagtaggggggggtgtgtaatcaatattgcatcgacgtttatgtggacagataaggttttgaccgcttcccttagaatctttttggactgaacttgatccctttcgagctaaatgccaacaagagaaagaagaactagcgactctccttctcgacacgagaaagcttgagttttgtttccagctaagagtgattgatgtcataccagtagcccttcttccaacaaaggttattccgcctgcgggttctggaacaactccaatttctcttctttgctctgattcaattccaaaaaaccttcttgcaaacaagccattcgcttccggaccaggggatttgcccactgctcctcctaagaccggtaatctcgcatctattgatttcattgggatcggtaattccatcaaagcaccttcgaccttccctagtttcgaatctagtctcggcagcaatcctcttcggggatatctttcatatcaagtggatagcttttgaatcaaaggcatttttcttttttgtgcacaatctcttcccgctatgcaccctctttcgtaggaatccatgtggtgtgggctttatgctttggatcattcctgcttcattctaataggatagaatcctcctcgtacattaactatgccagttgcttgccttctccttcaaagcatcttctcgaaataaagtttagtcatccagttcaatgatccgaggcaagtaggcgaaaaagacgggcttcactttattatgctactttttctcctcctgtgattcttgttcactcggagttttgtctttctgatgaaagataaatgccctctattcttgctaatgcccttaagaaactctctttagattgagacccttttttcgtcatgagctgccctaagcccggaagtgacggaactcgacgcccttcgccccttgaaaaccgactccattctgcctgtactttcattaaagacggatactcttttgaggcctaaggactatggttccacagcccgactgctaatgaaagtcttcctagcctagcagagagggattgggtgcttcttgctttcaggaaagtgaggcatatttatatgttcaaattatcccataggtgtctgctctgatcttcctctctacctccagaactcggaggttctcaggcctcggacgtactttacattggagaggaagcgagttagtaagttaaagaatgaaaaacttggattccattcattttcatttccgggtagaggagcgaaagtaagtatacatacaactaggcagccaatagctaggacggacagtagcagtaagacttccaaccgcaagttaacttgaagcaagaactcttaggcaaggaggctcgagagacctttcgagattcgaagaatagcgtataaaaagagtagtcagaggcaattcgctaatatggagctgtttatatcggttttctttcctctagcatgaagcggggttgaggacaagagaagagtaggggcaatcaaagccaatgccacggggaaggaaaaaggaactgaatataacaataacaagcaagaccaagagatatgatcaaaaaggccttgtcacgagctggagtcgaaccagcacctctgggaaatgaatacaatcccagcgaactaccattaattctaatcgtgacttgtaacccggttcacctttcagctacgtccgggggcgctcggtccttctatctaatctacgccattcccatattttcttttagcagcatgggaaagaggccctgtgggcccgctaacagattcgccccccctccccattattgcacgaactctcctttggcaaggagcgaaaaataaaaacaaagatattaatgaaggcaacttgaagaaaaagagtttccgccaagcgcacccagggttcggacccataaacaagcaaaagctggaaaagaaggccaaagaaaacgaaaaataatttcacttttccttctaaaataataaa

SEQ ID NO: 218008 - DNA, 5762 bp, Cannabis indica
tcacgtaatacgcctatgctagatagggtgttacaggtacggtgcggtacgatctagacaaaagatgcttcccagatgggtcagagtggaggttttggaacagaattggataaacccctggtacataggagaagagacattctaaggtagagaaaaagcttcagaaaaggtccaagaaagtatatagactgaggatgcttgaggagagatatcctcgaagggactcagagaaacaatgtggatactgcgtagagtgggacatttgtccaaagagtggtcatttaaaaggcgagattaggatgttggttagagcgggagatttaagatagtgagtccaagttcctatacaccagagagggggttgctctcagaataatgcctattcttggattgcagggtatcgtaagagctctgtcaggagtaggtcacccttgagatctaggaacacatctctcgatactccttgttctgttggtccaggatgaacccggagccctatgacctctaggactaactttgttgcctacagatggccacgtggccacaatctcaaagatgtctacacacagctggaagagccaaaaattcccagaagtgatagtaaaggataaaatgaaacatccaccaatttaacatctgtgaacaaaaatgttactagttacatccgcgaagggtacaagcttcaatggcaacgaacgatatattcgtcaagttccccaagaccagtgtctctctacgtaaacatcagtcaagcttgccctatacctagaaatcattcaacgtggggtagcattcgaagattgcttgaagatttcgagaattggtacacagtgggtaaaagccatcgcggacttgtctacaagttcacggataagcagaagtttctagctaacaaggccattacccggaagaccatacctccagactgagtctttccaagtgtattcgtaaccgagaagaattttggcttgcggtgaagaaggattgtaccgtgcgtgttcagaagtgtgatccatgccaaaagtacgccaaggttctgcaagtactacctactaaaattacgtgatgtttcagacctccactcaggattgtctcaagcaaagggaatcataggaagatcctcatttatgtctcgaacgtgagcgatgacacaaattgaggctacaagtaagatgttgaagatgaagttgatagaacttccagctcgtaaagcccgattgctagaggggcatctacaaagcccattaagcccacaaagttgtgaaaagaactccaacgaggcacacactacgaataatgactgatggactcgaagtggtcatcccaaccagaaaaactattccctcacataaatgagacatttgtgactcaacgaggaatcactcttcgctcatagaactgtagatttagtcgaagaattctgggaaacatcacaagcccaactcaagatgcacccaacccatttctacatgctgggagtaaaatttccaagcattttagttctaaagggaaagtggtatatttggagttggaagttttgtccagaaaagagtcttcccaactttgcaagaaccagaagtgggggtcttaggacttaagtgggaaagatcctgcaaaatacagcaaaaagcaggaaatggagttttccaactcaggtgaatgatctaattagggatcctttgtgcctagaatacagaccttttccaatgctatcaataggctgggggtgtctaaatcataacattcctcagagatgtgtccaatccttggtaaattctctctcttaatgcaagcctccgagtacaatgaaatgaaaacaaaagaagttcacacaaaaatgtgataccttttgttgccggcacaattaatgttttaaataattgaccaacaatttagagacgtccaaacttctcagctcacttggcggggggggggggggtgttactatacctagctgtgtatgccccaaaagcttaaattcctagcttgctgtttttatcttgatggtagatatattttcaagcttttggttgaaaatatcacttggggtttgatacgtcttcaaccctccctcccaaaaggaggaattgcttgaattctattgaatgcccatcttagtttttaactttagtcttaaaagtgaaactgtctcttaaattttagtgcgacttcagccttccttcacgaaagccaaaggttgacgcataattcagcacacttttgacaagcacgtgtatttttactgtgcattgaatttttcttactttttaagcttttggttaaaaatatttcttgggggttcaatacgtcttcaaccctccctcccgaaaggaggaattgcttgaagtctattggatgcccaacttaattttcacctttagtcttgaaagtaaaaccatcacatgattttagtgcgacttgagccttccctcatggaagccaaatcggccgcataattcaacatggttctgacaagcacgtttacttttatcatgcattggatttttcctatatttccaagctttgggggaaaacaccgctcggggtttgatacgtcttcaaccctccgtcctggatggaggagtttcttgaagtctattaaagccaaaggtcaacgcataattcaaaacaattctcacaagcacgtgtatttttactgtgcgtttaattcttcttacttttcaagcttttggttaaaaatattgcttgggatttgatacgtcttcagccctccctctcagaaggatgaattacttaaagtctattgaatgcacaattggttttcacctttagtcttgaaagtaaaaccatgccgtgaattttagtgtaacttcagccttcctttatggaagccaaagtccaccgcataattaaacatggttctcacaagcatgtgtatttttatcttgcattgatttttcctatatttccatgcttttggggaaaaacaccacttaagaataagttttcaaccatccttcccggaatgaggagttgcttgatgtctattgaagccaaaggccgccgtacaattcaacacggttctcacaaagcatgtgtattttttaccgtgcattgaatttttcttacttttcaagcttttggttaaaaatgttgcttggggtatgatacgtcttcaaccgtccctctcgaaagaaggaattgcttgaagtctatttaatgcccaattcggttttcacttttagtcatgaaagtaaaaccatcgcgtgaattttagtacgacttcagccttccttcacagaagccaaagttcgccgcataattcaacatggttctcacaagcatgtgtagttttatgcggcgttggattttcctatatttcaaagctttttgggaaaaacactgctcggggttcgaaacatcttcaaccctccctcccagaaggaggagttgcttgaattctatttaacaccgaacttggtttcacctttagtcccgagggtgaagccattgcttgagttttagtacgacttcagtcttccttcgcgaaagccaaagtctactgcataattcaacctgattctcacaaaaagcacaaacaatacgctttcaactttgtccttggaaagggaacattatttgaacaattattgtagtcgcttagatcgttgaccatgattggcagatttcccagaaggagtgagaaaaataagcatgtcaggaagccttccatgttttcagctgctctcttgtcactaattgggaaaagcttgtcacgaatgaccctagttctgttgctatggatagagagggcatgattcaggtgtcaacacaaatccaaccttgcctccctaaaaggagcccaactaggactttgttgcgcgattaatctcgccctcattgatctaagtattgtagatctatcacaagctatgttttaaacatgtcaccgaatatttggagacatccaaatttctcaattcactttggggtactatgcctagctgtgcatgcccccaaaaacatacagtgcgttatgtttgcttactttatcaggccttttattgaactttgcatattaaaccaaaaaacgagatacattttcaacaaaacttcccaagggaaagatgcgctttaatcccttctcgagattaaaaaaattaaaaattagcgtaaatatcaaaatgagatgcgtcttcagccaaattttctaggagggaaaaatttggctgaattccttcttgataatttggtgggtttcctaaggtttagtttgttgatttgttgcaaagtaagaatgagaaggcctcgtctgaaccccctatgcatttttagccctgtcttgatcacaagatacttcctaaaatccatagcgtgtaaagcttgattcatgtgtagccccaggagctaaagactcttattgataaggtttgggataagaaaacctgcttgattgttgttacaatttcatcccaattcctagacaagggatgccgcttggaatctataacattttcaaacatttctcctgaaacccgactttacaaagagcaagaatcagggaatgcttggaacacgaaagctcacccttccatgaagaaaaccatccttaattagcactccatgagcaatattctaaaagagtaattaactatttaagacatttgaaaagcgctaaggctccataactatttggtggtctagaagtagtttggaagcgagtttgtaatgttagaatatttaattaaccaaagtttgtaatgactaagaaggattataacagttacgatcccaactaaaaatagcagacaagagtatttgaatgcttcctaaatcaccaaaaggattaaaaactgagtaaagtctaaagtttgaagtgttggccgttggaaccacaaacttcaaaacatcctaaggcgacaacccttaaaaaaaagtctagcaagctagcggattagaagtaaagctcaaagaaaaaatataaaggcgtaaagttattacaaatgaaccacaatcttcaggtgtttgggtactattggattattaccaaaagatttctctccacatcctctctgtggtctccctgtgaagaccaccgattattctcatacctcacatgagacaagtttgttgggtgtagttgtcttccagtatcttcttttccctcttcaagacttttagttgagctttggcttccaagatttcggtaagaagggtcctattggcagcgcgcaactcgcgattcaagcattagattgctcaagatccacgactaaagtgcctacttccttagtggccctttctgccagcaaagctactgttagaataaaaaaaaatgagaagactagatatagtggcgggacaaaagatggaaaggtaaaaaaattaccctaactacttgttgtttggcagcatggcctaaggaaaatgcgtcgacactactccaagttgcccatgtctccaagggtagtttggatgcactactagccacttgatccaatagttctaccataaaaggtgcagcttcactccccactttgggtgccaggagcttttctaaagcctcaacgtcaattattggcccagctgggattgaggcgaagaggccccctaaagtctcagccctcttcacggtcgaaagcatgttggtttgcctgtgcaaaagcctcctctcttccttatgccattctttcatggctctttcaatttctcgttctctctacatagcggcaggaacgagaggaacacttttcatgagaaatgagaaaggggtgggcatccgatccaatccaacctttttt

SEQ ID NO: 218009 - DNA, 2040 bp, Cannabis indica
gggtatagagtctaatttcttcattattttttaccatttgaaaaatataaaatttgaattgtcatttcacaaaatagatagatccaatggataagttttagtatctcgtaatatttgtgtgatatctcattggagtaaaagcttgctgtctccatgtgttaagtttgtttgtgttttgtcagtttatccttgagcaagtaaaatagccagaatttcttcattttaaaaaggagaaaatcgttttcaggcgaacctttttttctttttatatatataaaatattatcactttaaaacattaagcttacaagctgattttaattaatctgtaaatttttgtatctttcatataggctatatagcatatagtattatatgttactaatatacaagagatctcatcttcatattgtaatctccggttgaatataaaatatctgcttagtcaataatcactatgatttttatataaatccaaagtagttcttcttaattataattacaaactagatagaactttgtttttccacgtactcgtgataattatgtttatgctttgctcacataacaaaagtgaaaaaagcaacaccttttctttatataaaaaatgtattaatataataaagtgttgaaaagtaataatataaaaatttgcaaaacccttttcaccatcctacaagataataatgttgatatatatgcgttggcatgcagcaaaaaattatataattaattaatttctccgatctaggaaacagatcaatcaccttaattgataggtatatttatatatatagctcattataattgtcgtctttttcactaaaattacatatacatatacatatatatatagacgtaacgtcaccgttaataatcatgtaaccctagatattatgtataaagatagcaaaaagattatattattgggttcaatattgtaagtaaaacgatcttgtttaatttgattattttttttttatctgttttggtattttcaagagttttctttgcttaatttttgtatgtatgctataattatttacaattatttaaaatttttaaaaaagttataactaatttataatattacttaaaataagatttaaatattttattgaaagcatgatataattttttttttctacttatagctagtaagcaattatttttactttaacaccataagttatttagaatttgttaaaacttcatgtatgatcctaaaaaattagaacatactcaatcattaaaaaaaattaactaaaagattctccaaaatactaaaagtgtcttttgtgagaatatatctatactacagattttatatagaagatgagattcgcgagaataggcatgtcaaaaaattcatttagttggatcaggttgaagtttcgatccgacggatcacttctgattcgaagcatttaaatacttattggattttccgaatcagatctgatttgatccaatttcaatatgttaaaagaatcttaattcaagactcgaaccaggaccccctggcacccataactcgaacctgaacccagactcggatttgaacctgcaccaaacctagacctgggacccgagatcgatccaaactcgggcctgggcttgggcccaaacttggattcggaccttgacccggacccgagacttgaacccaaacccgaactcagacctgagacccaggactcggacttggacccagacccgaacttagattcaggacccgaacctgtactcgaactcagatcgggacccaaacctggacccgagatccgaatcttgatccaagactcgaacctagatccaaactcagaccggaacccagtattatattaaataatactaaaaaaaattaaaataaatataaaattatatgtttagatataaattaaattaaaattcttttttttttaaaaaaaaaagttcgagtcagatcagatttgatccgaataagtcagattagattcgatccgaataagtcgggccgggtttgatccgattcgtgtatgtacgtgatctagcagggcgg

SEQ ID NO: 218010 - DNA, 2556 bp, Cannabis indica
atcactggatctagttttttgttttcactcataatttcactagcagtaaaaccatttatagagttaaaccaccagcaaattttggagataatggctccgagggaattgcatccttcgcaccaaaagctgtatgaagtgtatcaccgtcaacagataagtgtccatctgatttgtcagtctctgttgaactaatgctctcactgatagaaacatcatcagccatttcactacttggggttgaagtagaaaatccagaaaatgatgttgagcatgattcagagatagaatttgtccctttctcactgtcaagagactcagtttcactaccatcatccttctcgtgcggcacttcaggggaaaaagcatgactagggtgtgaaggttctgaaggaaatgctttgattggtttatcttgttttgtgccttctaaattgtcatcataaacttcagcgtactcttctttgctcagcttttggtcagaatcactttctacatcagaattattctgagttgggcatggagggtgacattcctctttgtgtcctagtctccagtgaataatttgacatttaccagaactgaaatataaatttgcagtcagttatacatggatcctcataggtaaaagcatcaaaacaaaaaagcaaagtgaaactttcatccctactgctcttaaggaattaaattcaaagtaaggagttgggtggttggtagcaattaacaagttaaataacagggagaaaccttttacggaaaccttttataagggcttcgctgaataggtgtgtgatgtacaaaatgaaggctactgatcgtatattcccacattctttccatattgatgctatctaggtcaagctcctacagcaaatggaggttgtttggacgcgacctggctctagtcgcaacatacggaaggcactgggatgcagtagaaaaaaagaatatggaatggggctgtcctggttgttctatggccagtttgattggaaacaaaaagtagcatatgtgatggaataaggttaaaccttgggtggctatttggatatccaaaagtaataaattcaaagaattatctttttctgtgctactgtgattcgcagctgtggctgcaatgagctttagtctaatattatgttggtttagtaataataccttaacctgatattctaggatgtaacttaaatgatttccttggtcccatgaaaatatggcctctaaacccaaattattcctgagaccatcgtcacaacatcgttatgaacatcgttttgcctctaaaatcaagcttttgtgggaccgtcattaaaagcatcactttggcaaaatttgataaacactttggtgagacacatatataggctttttttctttttttggagaactacatgtttgtttagatgtgtagaacctcaaattttgagatattcgtttgaggctataatgaggatcgaggttcatctaagcactccaaatttaaggcccagcacattataaatgtgtagatctcaaaaaaatacccaaaagataaatcacatagaactaacaaccaaatgaaaagttatgcttgcggttttttatcaaattttgccaaaacgatgctcataacaatgcttaacgatagctaacgattgtcccacgtaaaaaaacttaattttagaagccaaaactataatcataacaatagttaatgatggtcccacaaaaaaacttaggtggcgtttggttggaggtaatgaaatggaatggaatggaaatgaaacaatttttattccattcctttgtttggttgcattttcaagtattggaatagcattccaatggaatgctctttccaccattttggtggaatggctattccattttaaaaataaaggaatgaccattccaatgtaacaagaaaaaaaaattaatgatttttttatcaattttttttatgcattttaaattttattccattccattcctattcttattcctactcccattcccattcctatattttcattcctcctaaccaaacgcctccttaattttagaagccaaaacaatgctctaaaatagtatatgattttagaagacaaaatgatacaatcaatgatggtgaacaacaccaaatttcataggaccatcgcaaactatcattttggccatctatgaataggtcagggtcgatgaagtatttgggcttggcttaggatggaaccctaggaaaatattgttttggggaccacttttaattaaatgtacacatcgattatatagatggaagtgttattttctatccaaaggtaggacattgacacttattcaatttgttcttttctcattatgagtacaatatcgtcactctttatagcacctaaaaatagcataaacctcttacagaagttgatggactatttctcttgggaaggagaggatctttcagggtctgaacaactagtagtagaggtgggcaacatccaatccaattgaccgatccagtccaatccaattacaaaaaattggatgtccaattataattggattagattggatcggttattgaatgtc

SEQ ID NO: 218011 - DNA, 4247 bp, Cannabis indica
ttttctttcacctaatgttagagtcaataatcactatctccgtaattgaagcccttttttttttgcactacatacgcttacttgcccatgtttatttttgaaaggtgcaagtatcttcattgttattatatgttcatgtttttatttattaaagcaatctttttcagtttgactttagacccaatgaggaccacgcatacatggcagacaaaagttgaagtacagtccacaaacggtgatactctactgacccacttataatattctattctgaatccatttcccagaatttttctttttcacgaataatccccatgactctaccttaattaattgatagatatattgaataatatatgctaacattacaagataatgtatatggaaagtttcaaatattgtagttgttgtcctatctctatctgtgtagtttgccatttatggagcaattaatgttttttgatatgaaaaaaataataaaattaatatgcgtatgcatacctgataggtcgattgggaaatgaccgttttgctccacaagatcaaaatgacggaagaccgaaaacacggaggccgacatgggccaaagcgaagccacaggaatgttcctccggtttccgacgtcggtcatccaaatcaagtaggtgtcggctatgatgacgttgactggagtgtcgaggcgatcgaggagctcctcaaagggagctttcaagttgttggtgacggattgaaagaagcctgagaagttcttcgctcgaccatgctcagatggtatgacgttcggcactgtgcggaatcggactctgtcgggtttcggatccgacccgaggaggccgagccactcttcggtgattacgaatgtgacgagtaatcgggcatttcgtgagacgagctcctgcagatgttcatcaagggattgatatgtcctctgcccggataaggcatcgccaccacgtggcgatcggttgttggctcaacagtttggagagtcccatggaggtgctttgggggagaatgatgcagtgttacgaaactcgatgagaattattacatgattttacatcaatattcggactatatatagactgctctaaatacccgtttagatattttttttttttttttttttgacacaatacaaaagatctttcctattaggcaatagtggtgcttagcacattgtcgacatgtcgcgttgtgattggttagcgatactccttaaaagctattatattaaattatatgggacttgatactgactcgatacttagttgaaccaacaacaatattgacatgtaggagggtgctagacaacactggtaccctttagcatttctcaatacaaaattggcacaagaggagaagatacaacattaggcaaaacaaaaaaaatacttttaaagcatttttaatagcagcaattatttaaagatgctaataatttacatattatttaaaaatataatattttattttatctcttttctatatcttatttgatactctaatttatttatttattttttttatgaataaagcttcttttatgattacatcgcgaatatcaggagtaaactcattactcctaatgacacgatcagcgacccaagatgaagctcgagcaattgcatgagcaacactattggcaaatgtttaacaaataaaatagacacatcattgacatcattccacaaagccttacaatctgaaattacacttccaaagtaggaaaacatagaaagagggttgcgaagagcttgaaccacagtaagacaattcgttttaatggtaacctgattccaatctttcctctttagccagcttaaagcttctctcacgcccatagcctccgctaattctggagtaacactgccttgtttgcagcaaggaatagcttccaaaacgtgacccgattcatcccttacaacacatgcgaagctatacatgtttgcaccaaaaaaaaaaaaattgcatctacatttattcttacctaccctgctgctggtttctaccacaattcagcaccatcaactgctgtcaaaaatgcagcagtcgaaacttgaaacttatcttgtgccttgctccattgttctagcatgcttttagccaaaagagtgacagatgccacattagccctcctctctttccaaacacaatcatttcttatttttcatatagcccaacaagtcatggctatgatttttctttgttccccctcaaaagttttaaaacaagagtcaagccaacccgtaaaagttccagcataatccatactaactccgattcttgttctgtcctagtaagactgagcaaaagaacattcaaccagtcgatgcaatattgtcttactatccgaggaacacagagggcatttagagtcgatattaacatgtttaagccacatctgaacctttgttggtagacaattcgaggcagctctccacagtaaatctttcaccttcggaggaactttcagacgccataatttaccctagaaatcagaccccaacagttgcaaatcaccttcctttctttgctgcaaatgtatatacatactcttcactgaaaaattccccgagctctcaaaagaccagaaccaaacatcgttaatacgacttgaatttaagggaatacttaagatgagttgagtatccctagtattaaacaaatcacgcaccaagtcaacatcccaggccaaactatcagtgaccataagagcagtaacattttaatttaaaaaggcaggatgattcgaactgattctcagattctcatcacatagtagccaatggtccaaaataatactaattgcagaaccatttccaactcgccgacgtgcccccatccgcactagctcctttgtttcaaaaatacttcaccaaacgaaactaggattacttctcaattctgcattcaaaaaatcctttcccacataatatctaaccttaaacattcgaccaacaagcgtgtgaggcctacagagcaacctccatccttgcttactcaataaagagagattaaaatcatgaagatttataaatcccatccctccttttgatttatgaaccgttaacttatcccaactcttccaataaatccccttattattcttagaaaaggactttcaccaatatgtacacattaactactccatttcgttaacagttttcatgcatagcaagaagatagtcatagcatagctaggcaaagattgagcctcagttttaaaaagcatctctttacctgccttagttaagaatttcccctcccaacgttgtatcttttttctcattttttcttttaagaagcccaacagaacttttttatttcttcccaaaatgttgggaagacccaagtaagtacttgactcccctgcctcgtgaacctttagaatagaataaattattgcacgaacatccatactagtattagcactgaagaaaacaaatgacttattcaaatttacctgctgccctgaagcaagttgaaaataatggagaagctccatcacattattggcttcctcctcagtagcacggcaatacaaatagttgtcatcagcaaaaacatgtgggtgataacaggagccccacgagccaccttacagccccctaagtttccaacgcctctcaaaatttaaaattagtgctgacaggccctccgcacacaaaagaaaaagataaggtgataaaggatcaacttgctgtaagccttgctttggcacaatcggacccaattccgttccacccgaaagaatatgataagaggctgagctaacacaacacataaccaactgaatccaatgatcactaaactccatcttttttaacattgcctgaagaaatccccactcactatcatacgccttgctcatgtctagcttgatagccataactccctccttacccgagcttttccttttcagacaatgcataatctcaaaggatattaaaatattatcaataataagtctactaggaatgaaagcactttgagttcctgaaatggtatgatgaagaacacctttcaatctgttggctaacaccttcaagactatttgacactcttacttttaaaaacactccaatatataagagcatctccaatggtagcatcatttaaggatgttaaaaatctccatatcatctaaaaatataatattttattttatttctcttccatattatttttggtactcttacttttaaaagcactctaatgatgtagcactcttcaaaaatactata

SEQ ID NO: 218012 - DNA, 3474 bp, Cannabis indica
tcaatttggaatcgatgcttatactaattagtctcggttataaactgagacgaaatggaaaaatatatatgcacactttaagtgtcagttttaaaatgacactaaaactcattagtctcggtttataaccgatacctaaactctgactttttgtcactgtggaataggtgtcggttctatgaactgatactatatgtataagtgttagtttaaaactgacaccaaaagtgcagtttgtaaaagtgtacgagtaacatcatgtctagtttgattatattgctgcccaaacatgtcctgcagagaattcattattttagatacattttgcgcataacatcatccatgctcacaagcatgaagcacttggtcttgacatttttggattgaattcatgtatcttatttgtcccaaacattgttcagggcgttggcagcaagcttttcagggcactcctcagctaggacaaatttctagttctcacaaactagtatcaaattcatattagatttctaaaaaaaatttccaccattcaatttttcaagtgctagtaaagcagtgagggaatttgacatagtagacatgactgaaaataaataaaaatagcaaatcaatatacttgaataaataaatatcatcttgaaattaatgtagatgtgatgcatgagcgcatacaattaaaatacataaaagaatgtttaagctattctacgataagacattttgacaattaagcaccgccttagggtcggtcaaattaatttcaatgtgcctatgagacgaattccatctttattattttgaaacctaagtatctcatattatccttttcaaaatataaagtatcgttgttggtgaagtgaacaactaactgcatagaggcatagtttcattttgtgagtgtaacccattatttcagatttcatgacttcatttagtaatgatgccttagggtcgcccaaatttatttcattgggcctatgagacgaatctcatctttattattttgaaacctaattatatcatatttttcttttcaaaatataaagtaccattgtttggtcaagttaacaacgaactgcatggaagcatagttgcattttgtgaatgtaacccattatttcagattccatcacttaacttagtaatcctaccttagggttggtcatactaaaatacattacttcatcctatcttagtcaagagatcaaccttaagcaatagtatagacaaatacattccttacggagacgaaacaaagccatcacaaggctagtttatactccttcgatgttgaccaataatggagaccatatattatattgacatgtactctttctcccacttactattttaggattagtgtgttttatttatcaattccaagaattaatacatgctaacccttttgataaatgttgatgcagaaatttggccaactcgctcgtatgtatagacgagataaaagttagaagtaactaagtaaaatagagagcacacacaagaatttatagtagttcactccctgtgttgcgacagtaatggaactacatctacttcgagtttttattctgatcattttattgattcaatttataaagtctcactgattttaattaaaaaaataacataaaaactgttaactactttcacatataacatggatagctgaagatacttaatagcaatgcacttttattaaacattaatttgggtaaagataaacgtgtcatgacaagcctttgcaatctaaaccacagttcctaagatttgatccatgtccatggtttacacacactacacaagagaattcttttctttcatataaacagttttccctcttcacaattgaaactaattttatacccattttaagccttaagtcttttattagaactaccattaatgtaatgttaggaagtagtaccattaaattttggtgctacttttagcagcattcttcaacattccagtggagacagatgaagctggattaagagcttttcttattttgaagatattccaggcagtaccagcgcaatgaccaacagttgcaagagcatcagcagtggcttcccctgcctcatctccatacctaatatataatatcaaaacttattattacttataacttgtttcaatgcaatgaagcttttacttttatatattctcagtctcacctgttgctgaccattcttgttgcagcaacagaagtggccgaaagagcttgcttttctgctacttcagctgcatctaacaccttatctgtttttgtttttttagtttagaataatgcaccattgctttagtatgcaagttcatataattttcaagtacgaagaaacttactaactgcatcaagtgtagccaggatgacctctcccggaaccattgtaaggaatttcttccctgcttgagattttaacatgggtgccatcactgctcccgtggctataccaactccattcagcattgttttgcttaatctctctgtcatctttgacatctttcttgcactaataatgaaatcacttaaatcagttcatgtccgtgcatgcatgtaatgtaagatagtcttttatttatatttaccgtttcaagcctttgttgactccactacttttcttaacagaaccaccactttctttctttgtgacacaacttttcacctcaaccccattagctagagtcatttcccctcccttttgtacctgtatttttattttcccttcactttaacttaggttgactatgaagttgtaaagaacagaaagaaaaaagtgttccgtgatgtcatttctcagtgtttaacaacaacaaaaattaccaattatgagaaagaaaagggacctgattggcataagcattgctcaacttgaacatccctttgacaatatgaccagtccctcctgcaattgccttagccaaaaaattattgtagttttcaactctgggagcaaactccttccagtcaagacctttactttgagtcgttttaggagtggttgttaagcctgaaaagcaggtattctccttcaagaaagagtctagagaggttaaaaagaaggcgcaatcatccggaaacgagacgccgtaactgagaggaggatcaccatctgtcatgggcaaggagaagagatagttgagagaatctagcttcactacgggctcatctttagtcaaaggccatgtaagatcgtttcctacacttactatggtggcaagagagacgttttcgtctaagattcgagtgagtttgaagtcgccattggcgagctccagagcttcccctgcttccaccaagtgaactctgcatactgggatttgaagcaggatttcgtgtcttatgtttttggctatttctgggttgttgtaataactgttttcaagaggagcttctttgatggcgggtgaagggttttttgagttgcaaaaattgaaacactccattattgatgctgctgtgtcttttctttt

SEQ ID NO: 218013 - DNA, 4719 bp, Cannabis indica
aaattcaaatatgattatgaagaattagtttttttttttggaaaacattatgaagagttagttcaaatatgattttaaagcgcaaataattgtttggcacttattttttctccaatttaaaatataaaatttgtgttaagtttgacaaaaaaaaaaaactaagtgtatattatatttagctcactatttacaattaaattgtaaaaaaatataattattgttgatcatcatttaatatcttattgaaaatatacaaacattgtaattttttaatttttttattgcttaaataataatggtagtataatattgtttgactctcaataataaaattggttattaatattcaaaaaaaataaataatggtagtatagtaaataaagaatataagttatgtaaaagtcaataaattataataatttgtggcactatagtaaatcaaaaatgtaaaatttattgtgggtcaaatttagcacaagatataacacagtgttatatcttgtgctaaatttaacattaacacaattttagcatgtgtcaaaattgacacaatttttaaaaatatcattagagtaatattttttttaattaaactaaaatttagcaatgtactacttttttaacactccattagagatgctctaaaagaccatctctattgagtggtacaaaatttgactaaaaaatgagttaatgtattatatttgacttcaatttttacatttgtgttaaaatgcatcagggatcaatttaactttcttttaaataaaaatgtagtaaaaaaaattaacaaatgcattaattattaaacatataaatagaatgttaaaagttattagaaacattaatgagtggtaaaaaagtaaataaaaaagtaattttttttgctaagaaaaattttaaaaaaatatatatttattgcggtgtaaaatttgacacatgctatattttgtgctaaatttaatacaacttttagcacgtgttaaatttagaccacattatacactagcattaaagttgaattttatgaacataaatgcatttgcactatctttataacactttattggagatgctctaacattctatatttttaatagaaatgctaagacatgtttaaaagtgtcgccctataagagttagtatactattattgatagaattcaatatcagttctcacaaattttaatttaataaataatataagtattagacacggtaagatgttaataacaatgctctttaataatagtgtgaaactcataattaattttaaaactttattaattactcaactgttggctttttttaaaaagaaaatttaaactcttattaagctaattcaccatccatcccaagtgcatgcgctgtacatcaaacatgaattatggatgcctccaaaaattaacatccctaattttatgtaaatattaaatttgaacttattaatatttatataaataaaataataaaaataatattgaacaaatttgagtttacatattgatatgtatgattttaaattatagtatacaaatattattaaaaatatagggtatcaattttaaaatagtgtaatttttgacataaatatttaagtttaacttctaattatgaataaatctttatttaatttttaccgtaataatacttaaatcatattttttaaacttctataggtactatttaagtagaaagttaatatctatgtgtcatttttttattggcatatttaaataaatttttatataacaaataaaatttaatgatgtagaccacttaagaactattattagcgtcaaaaattaaatttggttaaaaattaaacttagtaacttaaatattataacggtcaaaaattaaatttagttagcttagaaattataatagttaaaaattaaatttaaatatgtatttataaggatgagttaaagttaaatgcttacaccacaaattatactttaaaatataaaaatatatttttgattgggtatccctcttgaattatagtgtctttcactgaaggtgacttgatttggtatataagactaccattttttaaggttagtgtttttttatttttagaagcccattatcactcatttcaggttgatttctaatccatatattgttttgttgtaacaattttataaatgtatctgctaagttttgtatttatgaattagcttagtgtaacaatatttccgcatgtttgttaatgtacttaacagttttttttttttgaaatggattagaataatgtacttaacagttaacaaatgactcaatgagcattcatcttttgtctaacaataaaataaaattaatggtcagattataaattaatctatttattaaatgtggaaaaggtttctctaaaaataaatttatatatacgaaagaagataaacggcgcgaacgggaatgccgaaatatgtacgacaacataaccctagaaaacttcatcacatcgaaaatcgaattgggtttagattgaatttgatttcgtatttcttatttgggccactgagagttattgatccctcgtaattttctatgttttgttcgaaaatttggttccaagttgcgattcatttccgtctaatgtgatcggtttcatctggtttctatcggaggagtgatttaaaaaggtgggttttgcttggaatgtgagtttgaattgtatagcattgatcaatttctttgtttttctttgttgaattcctattacattggccattgatagcgtttggaaacttaaatttgtgtgatttcggaactgggtttgattcagttgatatattttgcttggttgcagattgagttgacgctttttctatggatttatttgggttattagcaaggataaattctgggttgtggatcatttggagttagaagacttcgggattttttatttttttttatatatattttccgatatacattttgaatgaaagacccttcttctacgagaagaaggagatgaaaggtgggtttatcgttttgaaggtataatgactggagggccattaggtttgcgtactgggagttatggatcactgcaacaacaaaatggtttttcgaattatcagtcaacaccagttcttgtgcgcaagtcctcaaagctgctcctttcgagttcaagagagaaggaaaagcttcggcctttgctttgtcgcttctttggtcgaaggaaggttgccatgctccttttggtcttccttgctcttcttgtgtttgtatttggttcctttactgttaataaaggtgcgttttttcttcgtcatatgtatgtaaatatttatatatattatatatggaatagcccctgtgatgtgagaatgattataattggtaattagtcactgtgatatattcagagcagtttttaactactaatgttttttctttgagagattttaactactaatgttgaaccttcagacttatgtttcatttttgactcagcaaccgaggtgttggttggggattgtgattgactatgtatgttgaagatatccatgttttattttaagaagaattcatgttttaactacttcacaatattaaataattaccatctgatggagttcaactctttgtatcggctgtttgcctttgtggggcaccatttaatctgatttttttgtttggattttgctttttcttttcccggaggccggagagaaatagtataacagcatatttctcatgctttgttttctgtaatgatggaacagaaaacgtcaatttgagcatcacacaccatatcgaaaattttatagctgtgggtgaggaaacatcatttaattctagaactttcccgggaatgaaaaaaaattcctcaagaagtgatacaagtagtgacttgtttcttcgtcatcaccaacgccacttccatccaaagctttctactatcagagttcctggaaaaactcatccatctttccatcattgtgaaaaatttgcatttcctcctcctcctccagctaacccaaaaaggattggaccacgtcgtgagtacccttcttcaattttttagtgacattttatacttttatttaattgcctttttctttaactttctgtgacatttctacttgttcgcaactgtaacctgatatacatttgtacattggtttaacaacttcttgaggttgatataatatagcacatcaattgacatattatacatcctacaaacggtattgattatgttgctacttatctttcagcatgtccagtttgttatcttcccgtggagcaggctgtagatatgatgccaagcttcccatcagtatcaccggtagttcagaatttgacttatatgcatgacgagaatccaactagtactgagctttttggaggctctgaatttggtggatatcctacactaaagcagagagaggattcttttgatataaaggagtctatgacagtgcactgtgggtaagttttagtctctttgttcgttttgcttggattcttatcaaatatagcttggactttaacaaatttctaatgatatgccaaacctttatatttcctgtgctttggttatcatttattctcagatttgtcaaaggaagtaaacctggttatcagactggttttgacattgatgaagctgaccttaaggagttggagcagtttcatgaggtcattgttgcatcagctatatttggtacgtacgtctgagcttagaacattgcaaaa

SEQ ID NO: 218014 - DNA, 7752 bp, Cannabis indica
aaaaggaagaaaaaaaattaagaaaatgatggatggttgattgattgatagtggtcacacacatgcttgatgcatggaaagagtgtgcatgtggtaaaataataataaaataaaaatgaaggatataaatgtttagtttaccgtgtagtggtatttaagtcataaaattatcattttatatttttgatgtaaaaatttcttaaacttaaacttaaatatttatttaatatttatgccgcgaataatattaatattaataataatccttgtcatccactgccaatgaaaacaaaagatttttttttttaacaatattgtttttttctttctttttcagtgaactttcattgaagaacaacattggatcttataatcatagatagtacccaaaaccaaaaacctctttccctccattaattcctaaccagagacaggaaaagaatccttttccattttctctcctaccaaacgttcaaaacccttccattcagattgcgaattagaccaatctgaacaaatttaaggccaacccatttcaattctcaatccaagaagtcaaaccctaactcccaattgttttttgtggaaagaaaaattgggaatttcagtaaaattggcaaatgtcccagttaaagccaatctcacaccttgatagcgtgttgccatccacgccgggaaagtttaagtcggaaaagtctccgtcatacattcaccgtctccgatttcacacatccatttctaaactcactctctggtcttctttcttccttgcttttatactaatatactacctttgctcttcgccttcgccttctcattcgcctcgtcgagccctcggtgtctcttggggcggcaaggagtgggaacgacgcgttactcgatcgacccagaagcattcgaaatctgggttaacggttctggtcaccggtgccgctgggtttgtgggcacacacgtgtcgatcgctcttaagcggcgtggagatgcggttcttgggcttgacaatttcaatgactactacgatacgggtctcaagcgcgatcgtcagaagcttttggagcgtactgggattttcgtggtagagggagatattaataacactttgcttatttcgaagcttttcgaggtggttccctttacccatgtgatgcatttagcagctcaggctggagttaggtacgcaatgcaaaatcccgggtcttatattcatagcaacattgctgggtttgtgaaccttttggaagtctgcaaggcggcgaatcctcagccggcgatcgtttgggcttcgtctagttctgtctatgggctcaattctaaggtacccttttcagaaagggatcgtacggaccaaccggcgagtctttatgcggcgactaagaaggctggtgaagagattgctcatacttacaatcatatatacggactttctattactgggttgaggtttttcactgtgtacggaccatggggtcgtcctgatatggcttacttcttcttcactaagaatattctcaagaggaagacaatctcaatctttgaagcgcctaatcatggaacggttgccagagatttcacctacatcgatgatattgtaaagggttgtttagcagccttggacacggctaagaaaagcactggaactgggggaaagaagaagggcaatgctcagtttaggattttcaatcttgggaatacttcacctgtgccagtgacacaactggtgagaatattggagaagcttttgaaggttaaggctaagaagaagatcttgtccatgccaaggaatggagatgtgacttttactcatgccaatataagtttagcgtacagggaactcggttacaagccttccactgatttggagactggtttgaagaagtttgtacgttggtacctcaattattacccagatgcaaagaggaattcctggtgaatttgtctacttgactttttcttactttgaggcatcaaaatttgtcgcttgcatttgcattgattgtctatatctttcaattttataattttgatgagcagtctcagctttgttacactctcatgatactgtcataaacaaattaatcatctccctcatcgggttttagttcccgtttgcagtgaatactcgatctatatcatcaagtgcaaaccagcaggatcttcattgtttttatgttcttacatgtttttttaaggatgtcatttccagtttaggtgatgtacagttcatgactgatagacctcaatgatatgctctgattggtggagtaatttttatctggagctcactttacttctaaactttcatccttattgttgtggtggtacaatttttaattcacatgactagacttgttgtgacttggaaggacattgagtttgcctttttattataggacaagtatgcataagtttctatttttctttaatgttgtcttgtgatgcacagattatgatgctggactaaaaagagtgatgaagatagtaataaacttctttaatggatctttctccattgtctactttagttgcttctaagttttctgcaattaacatgcttggctaatttatgtgttgacttagaagttagaagaactccttcaaaacaaactctctttggttttcccaagtttcattaattttatttgggttaatgtacatatggaaatagcggttgttgatgttgtatgatttggttttaaagtaatagatatgacgtacccatttggatttactttagatgcatgtttctgatgagtccaactttacttgcctttctccatttctttattaagtttagttcgtcatgagtttgatattcagtttgtcttgatgtctaagagagttcgataatgagtagcttactagcttgtgatgtagagttgttggtaagctacgtgtcaatccataatagggtcaataatacgaacatatattaattcatttatcattggaaaatgattaagagagttcaaatttacatgaatgtgaagatgacttcacttttcatatcaattaataagatattcatcttgatgttagtgcaattgaatattgtatagctataacttttgtactagaatgctcatttctactcggaataggatctaagttccaaacccgaaaattgttggcacaaaatttgtcaccaaactcaatttcgagaatatacagttgaacaaaattaactcacttgaacattcgtttaattagtacaatgctcatttgcacctggacagatccaggtttcaagtccaaaaattcttaaaaaaatgaagtcattgatgcgattaagccaatataaagttggttaacttaatcaaactcaattttcacaatacatagaagcattgttttggtaagatggagcgaatgtaacaaggtagaagcaaagattgtcggattgagaaacacaaacattgatgagggagaaaatggaagaaaatgttttccttaatttttctaaaatataattcataaattcatttttctacctgtgctctgatactgtttgggctgcagggatatgagttgtatgcatatagaaagaaatataacgctaatcaatatagttagaatcaacctcaatgattttcctaacattgacttactatagagactttgcttttatatatcttctaggtagtaatctttgaactaattataatatacttatgatctatcctagtaaaaaaaatagcctggagaggaaatttagaaagacatttttggaaagatagataagatttttattatttgaaaacttgtgcctttaactgaaaatgagaggccatatatatagcccccctacaaatagaaaaacgttacaaaccttaattcctatagacaaaaaaatattaatgatttaaattacatcttttaatagatagggaatctctgacaatccaaactctttttttttatatatatatatatatataaatatatataactacaaacagacaaaaattttagatggccaaaggaatctctgtcgtctgaatggttccttgtcgttagttgtcattttgttacgaaaaggagtctctattggtcttgtaagtagtcaccggtcaaggcacacgaaacaatggactgaatttttcaagagtcacatgtccacttcattatttacataaaacaaacacgacataaacataaatgggtatctttgcagtggttagagttttaccaattttgttaatgggttcatgtgaggaactgatattcatatgctcatctgtgtcactatcgtcttcttgccacgctgatgaaggacttgctcttttgttgccacttgttgatgcagtaggtttgttgttgacaggtggagatatacacaatcccttacatatttcttcatcaaggtcattgagtgagaataggcagttacaagcagtttttgggtattacgaatcttgaaagattggatcattatagttagcctcgtttttctcagtgtagtgttttttataatgattcatattttcttccagtctttggagatacttgggcggatgttattctcatggtgcgtcattttcgggtttcggcaagatggcgtttggaatcaccatgttaatggcaaataggtgtttttccaggtgtcttacttctatgctacctatcacgacaagtgggtgttcatttgacatgtgtatttgacacttgccgtaaatgataaatctagattgacatgtagcctaagtagctaaatcgtacagaaacgcaatgggtttgccatgttttcagtggttgggcaattgagtcccacgagtctctaattgtcgacattttcccactcttgtgtaaggagttcatcccattcgggcaaagttttgaaccattacaaaatagccattggatgatgctagacaggcctaaggtcagggcattggatatagctacggacggatgtccggagccctattgtgtgcatttctattgcaatagtgtatgaacttgccagatatcaatagagacctgtctttttttggcatgaatatgtttttttcatgtgtaagaatttgccaaacggatagtctaggcagaagccaaattcttcaaatattatctttccatatcccctgacgagagtggaatgaacttctagggctcttttaattgctttaaccctttggtttttgtatttgacaattattttagcattattgggaaatgtagggatgataagcgataagttggccatgtagattagtgggattggattcttagtgtgtgagtttatgtgaataatgtatattagggtgttggtaaataaattatataatttatgatttatttaatctacatattgtaagatggagatgagttacaactatataatgttaggaataatagaaagtattccaattccccttcaggattaatatttgcagaaaaatacaatggggatttcaaaattcttttctgatgagaaagatcagtcatagcttcaatcacagagcatatttaaaattttaaaatattttctaatgtaaatagtacattacgaataataattaaagcactaaatgcaaaccaaaaaattatctcgtggaaaataaaaattacagtaaatctttcactataacaatagtaatgggtacacaatattacactctcaagttttgacaaatacttgatgaatacactcaaaactctcacactccctagcacggtaatctcaccatctctctacaaaagatttctcacaatttggtaggaactctctttttcctctctcttagatttctctcacttagatgtattctctcaagagcctcactcttcactcttggaatagctcgtgatggttgtgatgtgataaacaaatgaaagcgatgaagctctatttataggcctccttagatgtatgaacaagatacaaaatatcaatcttgcatgaaatgcgtagttgaatatatgcatatccctcaagtaaaaaaactaccattgtaatattcacatggttgaaaaatacaatcccatttttatatggttgaaaatcaactattacctatcaaatctcctcctttttcaatccatgaggaagaattggtcttatgtcttcattatcgagaactcatccgagcaagcttggaacacaactcaagcttatgccgaggaatcacctttgttagcatatctgctacattttttttgtatgaattttttgcacttagaataacttcttttcaagttcctcacgagttaaatgatatataatatcaatgtgctttgttctatagtggtaagtagtattcttgcttaggtcaatcacactttgactttcacaatgaatcacgtacatttcttgctttaaatccaattcttggagaaaattctttagccataacattccttttccagattctgtaagagcgatatgctctgcttctatggtagataaagcaacacatttttgtaacttggactgccatgacacaactccctctacaaaagtaaacatatatccacatgtagactttctaccatcaagatcgccgaccatatctgcatcttcatatccttccaagattggttctcctttctcgaagattggttctccctctcagatatttgaagatccattttacagcttcccaatgctgcttgcctagatttgcatacatcaagcatccaactattgaagagtaaggaatagctaacatcttcctcttttcttttttcgaagaaggacatgacttcttagtgagtttgaactggccaccaagtggagaagaaactcgctttgcatctttcatgttgaacctctcaagtattcattcaaatagttctcctgttactaaccataaccttcaagaaggcctatcacgaatgatttccattcttaggattttttttggttgcccccaagtctttcatatcaaagactcctgatgattctttcttcagtagatttatcatcttacaatcctaaccgactattaacatatcattgacacatagtaataatatgagaaatttctcattaggaaatttcttgatgtagacacacgaatctgcaactaatctcttatagcttcaatccgagcatgatttagaccatacaaactcttacacagtctacagacaagatggtcttttcctttcacctcaaaaccttcaggttgctgcatatatatatatttcttcttttaaatctccatgaagaaatatagtctttacatccatatactcaatctcaagatctagactttctgctagtccaaagattattttgattgatgacattttcaccactaacaaaaatatttcattgaaattgatccctttcttttgaccgaaacccttgacaactaatcaggctttgtactttaccaggtttccatgcccatcatcctttaatctaaagatccatttgttccttagggccttcctaccttttggaagtttcaccaattcataggtgttgttcttcgtaagggaattcatctcctcatccatagaatctatccacttgtcttcctctttatgagccaatgcttcatggtagttctctggctcccccttttcagttaaaatgatatactctgactgtagatatcttttggatggaattagtcctctagtcgaccttttgcgagattgctcattttttggttgctagtactgctccccttgattaatatcttcttatgttggtacatcttcttcaacattagtatcatcaccatgggacatctcagcaacttattataatttatcatctgaccattgttgttatggaggaa

SEQ ID NO: 218015 - DNA, 4676 bp, Cannabis indica
tctttgcttttttgtttttttttccttctccattttcgattcgatctctttgttctgtctttattccgtaacggatttcatattaaccggatctgcatgagttctgtttctttccgtgtttaaattcctggcctaatttaattttctcacctgccaaacagaagcttaaaaagaaaattcttctgagcgttcggtgtggggatttcggagactgagtggttgagagagagggtttactccggtttcatagattcttttactgcttcttttgaggggggtagccggggcctcggcctcggcgggttctaaaacccccagcttcacaaacatacagacacattgaatataaaaaccctaactttctttttcttcttctttattattcttctctaacagttctttcattcttttgatcgtcgcggtatcaagaagagatgccggccctggcgtgttgcgttgacgctgctgccacagctcctcccggctacgctttcgccggggatagctctcttcccgcgccggtcatattttccggcgttcctccggcgacaaccgctactgccaccgcttggtcaccttccttatcgtctgctctctacaaagtcgatgggtggggcgcaccttacttcgccgtcaactcttccggcaacgtcgccgttcgccctcacggcgctggaactttagcgcaccaggagattgatttgctgaaaattgtaaagaaggtttcggatccgaaatctaagggcgggttgggtttgccccttccgctcgttattcggcttcctgatgtgcttaagaaccgccttgagtctctccaggcggcgttcgatttcgcaatccagtcgcaggactatgaaaaccattatcagggtgtttaccctgtgaaatgtaaccaggatcgttatgttgtggaggacattgtcaaattcggatccccattccgtttcggattggaagctgggtcaaagccagagcttctcctggcgatgagctgcttgtgcaaaggtagccctgattccttccttgtctgcaatggctttaaagatgttgagtacatttcgctagctttgattgcaaggaagcttgctctgaacacagtgattgttcttgaacaagaggaagagcttgatttggttattgagttgagcaggaagctatctattcgtcccgtgattggtcttcgtgccaagctcaggacgaagcattccggccattttgggtctacttctggtgaaaagggtaagtttgggctcaccacaacgcagattttgcgcgttgtgaggaagcttgagcaggtggatatgcttgattgccttcagttgctgcatttccatattgggtcgcagattcctactactacactgctcgccgatggtgtatccgaggcagcccagatctattgtgagcttgttcgtcttggtgctcatatgcaggttcttgacattggaggcggtttgggaatcgattacgatggatccaaatctactgactccgaaatctctgtcagctatgggctcgaagagtatgcatctgctgttgttcgggcaattcgccttgtttgtgaccgtaggtctgtgaaacaccccattgtgtgcagtgaaagtggtcgggcaatcgtttcccatcactcgattctgattttcgaggccgtctcagcttctgtttatgatactccgagcatgtccccacttgggcttcaattctttgttgagactctctcagaggaagctctagctgattacaagaacctttctgctgcggccattaagggtgagtctgatacttgtttgttctatgccgatcagttgaaacaacgttgtattgatcagttcaaggaaggttctcttggtatggaacaactagctgctgttgatgggttctgtgactttgtttataaagtgattggtgtttcggattcgactcgtacttatcatgtcaacttatcggttttcacttcaattcctgatttctggggcattggtcaactgttccctatcatcccaattcatcggcttgatcagaggccggctgttaagggaattctttcagatttgacctgcgacagcgatgggaagattgacaagttcattggtggggagtccaccttgcctttacatgaattggaaggtggcaacggcaacaatggtggttgcggatactatctgggaatgttcttgggaggggcttatgaggaggcactcggtggagtccataacctgtttggtggcccgagcgttgttcgggtttcgcagagtgacggtccccatagcttcgccgtgacgcgagctatgccaggtccttgctgcagtgacgtactccgagtgatgcagcacgagcccgagctcatgttcgagatgctcaagcacagagctgaagagtttggtcaggaagatgatggcatggctaacgctgccttggctggaggcctcgcccactacttccacagcatgccttatcttgtggggtcttcttgctccttaactgcaatgaataatggtggcttttattactgcaatgaggatgaatacatcgaagctgttgattctacctccactgaggatgaacagtggtcctattgctatgcttgagtttttagtctcttaccattgtcgcctagggacgtctgttttaaacttttatgtctatcaatttctcagttaaatgtttctttttttatttgttaaaatgataagcaaaggatgtaagaaacatggtagaagaagaatcctttgcgttttgtagtaaagaaggcattgaaccgaatcaacccttttgaaaattcggtatcttgatgtaccttctttcaatgtttcttagtaaatttcagatttagtcttaatataataatacttatctaatagcttagttcttaactattgattgttttccttgttaatctacagctactatcttcaatgatgttggtttgtagttgtgatcctgtgtagggtcttttctagggtgggtttgattgaattgtccaaaaaagaaaaaatgagatagtgccaagcctcttttttgaaaaggttggatgaggagattctgatacaacaatcaatggtttgtggggtccctcattggctaacgtattgtttggatttaagctttgaacagtttttagcttgccaaaattacccaacttggtcaagaaactgaaatgaaaaaacaattttaccgttatctctatagtacaacttagattcccctttcaataaaaaaagatggagttttggctaaatgggtgggtgtttttttgtgttttgtctccttgtatatcttagaggccaaggtggatgcccccttttttattggaggaatttaaaacgtaaagttttttgtttaatgttgaccacaattttgtgaacttgtgtgtgtgtaagcctcaagtaatcttgtggtcaagattggtgtgtaaactcttttaatataggataaacataaacataaatcaatatatatacgtgtgaagaatggccgtttcgacttgtgtaaggtacacaaaattttgttatggggtcatgaagagatgacccttttggtcttttttattctttttcttaaacaagggctttaattcagacttgatttgaaattgaaagaaagtaattctaaatctgaactggattttgtgctgttatcttgtgattatggcagaatccaatatgaattgtatgcactcatcatgccacatcttggggaacataacatgtattcaatttttgatttcatgtctagaaagatagtgttagatgcttgagtgaatgaatagtttaaagtttttctttttatcagaaattttcagattttttttgggtataagatttattgtattggaatatgcagatacaactttagtggtataaagtgaagataccctcttgatgatattttagctacttacaatcacagaaaagaaaagcaccaaaaagggtaatctttatgtatttttgtattaggagaagacacatattgatgggtcctgtagttttgacattttgcccttctttcctaggaataaagatctttaattttgaggctaaaaagaaaagaaattcattttagctttactaaaagagaatataaacaccgtaatttgagttaccttttgttgtggttcatgtaatttttctaattaattttcctttcaataaaataattaaagtaagaaaaaggttgaagttggaccttgtgtgtttcatctatgattttcataaatcttggaatataatatgacccctttgggtaaatgttgaaaagtaaattcagtcatataagctctcaatacatttcttttaagtggttgtgtatttggaaatgcctcattttcgaaaacgaattttgaataaaacattgaaaaaaattcgaagtacactccttaaagggtgtttctgaagccctctatttattttatgaattttaaaaattttttagaaaagtataattctaaataactataacatacgattataaaaaaaaaatatatcttaatacagaactagatagaaagtttatcaaaatatctttttaaaaagtgttataaatttgatttttttattttacattttaaagtaaattttttttatatttttacgaaaatccacataacaactaatgatataactttaatcacaactcaaattcagataacaattgcagaaacaattcaaattgaaaaa

SEQ ID NO: 218016 - DNA, 11611 bp, Cannabis indica
gaggattcggtgtgaggtgatgagtggcacctgagtcgggataccagctgctgtcttgaaccacttcaggagaagcataaagatgagaacattcagcaagatttgcactgcctgagaagccttgaaaagtttctggaccagtgaatgttttatcaaacctgtaaaaacatttttgagccgtgtgacccattttgtggcacaattggcactgaagcttttgtccccaagcagagtattgtccttttgaagacatattgggtcctttattctgagacatgttgccacggccaggctgataaccacgagcttgagcattgttttgactagaaccaaaacctggtggaggatgagttgcagaaaaagtgccaggtggtccatattggggataataacccctgaacataggattgtatggagaagaaactgaagagggataatgaggtgaagagaaagtacctcgaccacctgtgtaaggcttagtgtgagccaaattggcttctggtttgtggatgtccaaatcagtagagtctttttcgagcctgacttcttgagccatgagtaaagcctctatttctgcaactgtgtaagcatcaagcctggtgttcaccgaagttacaaacacattgtattcactcgaaagtccattaaagattgcctcaatatgatcttgagctgacattgggtgaccaattgaagcaagaagatcaacaaggcttttaatctttaatagaaaatcgttgagagacccctgcatctttgagtttcttagctgagttttatacttgccaatgttagccctgtttagtgccgtgtagtagactcgaagtgcttcccagatttgtgctgcagattcacatcccaccattcttgtaagtatcttttcggccatggatgaaagtaaccaagaaaccaatatgctgtcttgttgatcccagctttcgtattcaggagattgccgattgtgcagtcgatcttcattggagagaaacttgggaggagttcgagtaggatcaagatgatgttgaagtcgactgcccttaatagctgcaaaaacttgatgcctccatggaaggtaattgtgttcatccaatctgaccgagagagaatgtgagaaggttacaggagcggagcgtggaagattagttgtgagattttgagtaacagtttgagacgaacctccattatcagccatgaacgaaaggcttgagtaaaagaagacgaagagagcaaagaaagagaaagagaaagagaatgctctgataccatgtgaagaaacaataaaggaaagaatgaattgtttctgtacattactcaagagaagaattacaagagtttatatacagagatagaaagacaaataagaagctgttggagcagctgaaacggttacaaccaaataacagaaaaactgttgtaactaataacagaaaaacaaacacagttaaagcttctcttgacagggtctacaacaaaaattttatattggtcaaaaattttatataacaatatacacatactctattagtatgagattttttaaaaaagtgtgcaaaaataaaaacgtgagagcaaagaagaacggggcaaaaatcttaaccataagggtatttcatatttcgttaaccacagttaaattattaattaatttatatattgtggtattgaaaatatctccatatgttttaccagttatgaaaattagttgtctcccgaaagtatgttcctagatcgctaacttgtccattgggaagaaatcttatggaatgatagttaccacctgtaagggcgttcccggacgactatcatggccactctaagtgtactctttggctagttattcctcccagaagagtgttctggatagtcaactccagttgactctattcctatccaaaagtcccttcagcatttgcttcagtcctttgtcaggaagagtatgtctcatccagaagcaccttgtcttgtgctggcgtggagaatttgttacgagaagattgttaagtttgttacgtcgtaactaacttaataacttatcggttatagccaccgaccttattaggactgaatttttatcctgaacctatatataccaccaacacttatcatttcgtgtacgctagatttgatgaatttcaagagaagactttgagtttgagagagaaaaagattgagaggtagagagacaggtgcagagaaaatagagagattgagtttgtgttttgaatgaagaatcttcttttgataaagaagaatctagggtaagagtgtgagagttggaacactttgagagattctaacagagaatctttctcgactatattgtacatcaataaagatgatttgaccgtgagtagagttatagatcacttcaatttatcaaacttgaacatgtatatatctttgtgttaatttttagtgtttacactcatatgaaaaaaatagttacctgtgcaacaaaatattcataattttataaaaatttacaagtagttcaaaatgatcaacgtacacaattatgaataaaaattagactaaaaattttgttccatgccaaaataagtaaaaaagaaacaatccttcatgaggtatcctaaaatatttatcgaagaatattgtataatttttttttcttacataaagtttttttatttaataaaaaaaggtaaacaaaaaattagaaaacatcagctgtgtctaacactttttttgttgttatattactattggtataattaaatatcaaatctcatcatataccttaaaatagtaactttcatagaatatcgttaaccaatcacatcgtaccgcctctaaataatgctaaataataatagagtattgttattgatcactagtggtgctcaacactttctatagatgacgctccacgattaattagcgatattctctcaaatttattttcttaaattatatgacacttgacacttaattataatactaagaaaaacgctaatcactttttagcaattgtcatagcaatatcacacgattaattatatagtcttctctcacaaaaagtctacccactattatataaaagtttttgaaattaaattagtcttgccttgcgaataagggtaaaaccgtaatataaaccataatttccaagttagttaaaaagggcgccaagtaccgtttggacggaacaaagacgctgcagctctaaaaccccaaatgaaactctctcaattcactcccacaccttccttcttctttctcatcttcgccgccactatctcggtggccagtgccaccgtagacaatgacgccgccgttatgtcaagcctcctcaaggccatatctcctgccccaacaggctggtctcactccactaactattgttcgaaatggagaggcgtatgttgtagctcaaccggccgagtaaccgccattaacttaccgaatctctctctaaccggaactctcccttcgaatctcgcttctctttcacaactcactttcttaaatctcaaaggcaattgcttttctaggcaattgccttctttcgctaaccattctgtgatccaagaaatcttcttgaatcacaacaagttcgcgtctttacccgtcgcttgttttcaaggactaaccgatttgagagtgttgacaatggataataatctcaatctaccccaatgggattttcccattgaggttattgagtcaccaaacttggtcaatctaagcatggtgagttgtaatttaaatggttcaattccagaaaaattcttcctttcctcattccccaacttgcaaaatttgtttctttcttcaaattttctcaatggggttttacctcaaaccttacccaagtctaaaattcaaaaactctgtctttgtcaaaactctttcaccggtccaatcccgaacttatcgaaactagaaaaccttttcgatctccaactcaacgacaaccaattcacgggcctcgttccaatctcattaatttctctcccaaaattaagaagtgtttctttgaagaacaatctgttacaaggtcctctgcctcagttcaattctcatgtgaaaaaggttgatattttaggtaccaacagctattgtagggacactttaggaccttgtgattggcaagtgatggtgttgcttgaagtggctaaagatttgggttatccttctttgttggcagattcttggcgaggtaatgatgtttgtaaaggttggagttatgttaagtgtgattcacaagagaaaaaagttgaggtagtgaatttacacaagaggcattttagtgggaaaatctctgctgcttttggtaaactaacagagttgagaaatttgtggttgaatgacaataaattgattggttccataccatatgagttaacactcttgcctaatcttttgttacttaatgtttcttataacaatcttagtggaaagattcctaagtttaataattcgatggtgaagttaattactattggtaatccactactgttggggaattataatgatcatgggacttcatccaatgctactgctcctgtttacactggtatataaatctttgcacatttattaatgccactttattttttgggttgtgtatgtgtgtgtgttatttttttcttcatattgattaatttaaatcttggttggtaaaaatggtttagagggtagatgatatggcaaacaaagacatcttttgatggtgaaaaggttgacatatcaaattatacaatatcagtaattttttggggggtttaattgtctttttttttttttggtttgatgaaatataagcttattaatccatgatttatgtataggaggaggaggaggaaggaatatcaagcctataaaagtaggaacaggtaaaattattatttgctttgtactgatggagatctatttaactttctctttttctatgtgtagtttatattagtataaaacacaaaataaaaatcaagtgaataaattaaactaagaaattaataatagttcatgggtttgtttggtaaattgtgttgtgttgtattgtatagtattgtgttagattatattatattatattagtattatttaatataatattatgtttgatattgacttgtactaatatattatgtaaaattatactatctttatcattagctcgattccaatcgtgaccccagccctgaataaggttctcaggtcaaggatttgggtcaggatcaagtccgagttaggagttggattcagtttcaggttcgggtgcaaggtccggatcagggttcggagccgaattcaaattcagatccagagccaagttttcgggtcgggtctgagtgtaggttgggattcgggtctagggtttagttaggtccaaggtccaggtctgggtccgggttctaatccgagtccaaggttcatgtttagcgccagatccccaaccacaaaccctttcgtaaatattataatacaagctaacacagattatttgttataacagtttaagggctcgtttggtataccgtattgtattatattgtatagtattatgctagattgtattgtactgtattagtataatttaatacaaaattatatttaatattgacttgtattaatagatggtataaaattatccttaccacaaactcgactccaatcctaaccctagctctggacaaggtgcctgggtccgagtcaggggtcgggccaggttcaagtcagggtccgtatctggtttcagggccagagtccaggtcaaggcatggggctaggtccagatctaggtttgggttcatgatcgggggcgccgtccaaggtttggggtccgaggctgggtctgaatttggggtcggggttggaggttgggtccgtggtctgtggccgagtccgggtccaggtccacaatccgagttgagatttgagtctggatccagagttcaagtttaagccgggattcgggtccaatcataatgttccttgttatttaatacaataaatctaaaatgtagtaaattttacttgtatatttaaattgatggtttattatactgtattgtttattttgcaggaaaaagtagaaatttcatgtttaatgtcacaataggtaaacgtattgccaatgcctactttatgtaattatggtgaaagataactttttttttctcacagttctatggatgaacaaaataattaagtcatacatttcaaatgtgagttttctttaattttcttcactaatgcagctgcagtagcctcttcaattgggctaatcatcatgataatactgttcttctgcctgaggaattttccaataagaaaattaatcttcttttggaagaagcaaaaccctgctcatagaaacattgagattttcctaaggaattgtggaccacttcaagttagaagatatagttactctgaggttaagaaaatgaccaagtccttcaaagaaaaattaggccaaggaggctttggtagtgtctacaaaggaaagttattacaagatggctcacttgttgctgtgaaaatgttaataaatgaatcaaagaccacaaatggagaagatttcatcaatgaagttgcaaccataagcagaacatctcatgtcaacattgtttctttgttgggtttttgttttgagggttcgaaaaaagctctcatttacgagttcatgcttaatggatctcgtgagaaattcattttcaacgaaaatgatttcaacttagattgggaaacacactaccaaatttcacttggcattgctagaggattagagtacttgcatcgcggttgcaacacaaggattttgcatttcgatattaagcctcacaatattcttcttgacacggattttgtccccaaaatctctgatttcggccttgctaagatttgcactagacaagaaagtgtaagctcaatgttgggtccaagagagacaattggatacattgctcccgaaatcattagtagaaactttggtgtgatttcatacaagtctgatgtgtatagttatggaatgatggttttagaaatagttggaggtagacaaaatgtcaatatccaagctaataacactagtgaaatatattttccacattgggtttataggaagctagaattggatgaagaggtttgtttaaagagaataaatgataaagaagataaaataaaagtgaagaagatgataatgtgagtttgtggtgtgtacaagctaaccctgaaaagagaccaagtatgagtaaagtgatagaaatgcttgaagggagtgttgattcattgcaaataccacctactcctttcttgtcttcttcttcttcttcaacttcacctctctcttctgagttttctagtagtgcttttttaatttagtcctaaataataagaaagctatctcaaaaaatttgaatgcaaggacatggctatttggattggtttgctctttattatgtaagatgttttgtgatgtttattgggctcttttatatattcctaaagtgaaaaaaaaaaattcaccagtctcaaatttccctctctcaaccctgtccctccaatcaatgattgccacctatttttatcttttctacctcatttattaacataatttttatatttgtcataacaagtattgtgactaaaatatattagtcacagtaaattgtatttgtgactaatatctttaattatagactttttagtcaacataaaaatgatgtttttcatttttagtcacaaattttattgtgactaaaaataaaattttttgtagtaatatttgggtggccaaattgcaaaaaaaaaatttaagaggggccaaataaattttctaaagaaagctaataaaaagtataaatgatcaatttgttttcatcacgagaaatgttaaaatgttctagtagtacctagcacatttttatgtgaatatcactatttgtgcaattaaatatcatctcttatatagtttaatgtaataatttttagagattatcgctagctaattgtaagacgacacgtctaaaaagtactaagcaccactacaactagtgactaatagcaatgctctttcttaaatcatcatttgatgatagtcaatgaaatcaagccacatacactaggttcaaagttccaaacaaaattcttcatgtttaggaaactcaatactcaaatttcagaggcccgtgccactctctctaagatcgaaagtaagagttctgttgatgaggctatgcacacgaaggcgagaatggcacttaatgaagctttggcaagagaagagattttttggcgccaaaaatcgagagtagcgtggttgaaggagggtgatcgggctacaaaattcttcatggcaagtacaatcacgagaagaagacgtaattatatccagacggttaaagatgaagaggggcagagttttgatgaaatgaaggatatttcttctatctttctggcaaaatttagcaaaatcttcaccaaggcgcagaataggactactcttgggacttttacatggaacgaagctggtgtggacaccgagttgccagaggatttgtatcagattccatctgaagaggaagtcttgaaagctctcctcgaaatgggggcggataaagcgcctggaccggacggcctacctgctgccttttatcgatcgcactgggatactattaaagaggatcttatggctatggtgcgccatttcttcttgactgctaaattaccggggttcataaatgacactaatcttgttctcatcccgaagaaagagaacccggttctagtgaacgattttcgtcctatagctctgtgcaatgtagtgtataaatgcatctctaaaatccttgctctgagactgagacctattttgccaattttgatctcccctgcacaaactgctttcattaaagggagatcgatttcggagaatattgcgatggcccatgaggttgtacattccatggccaagaggaaaggatctagaggatttatgatgattaaacttgatatggagaaagcctacgataagatggattgggattttgtgcttgaggctcttcaatttcatggattaaaggaccctcttttgggttggattagaagctgtattcacttggagagactaaatttgttgataaatgggaccaaccaaggagtgattacgccttcatgtgggcttagacagggggatcccctctccccagccttattcatccttgcggctgatttgttatcaaggttaatcatggaattcaatgcttcggggaagattcggggtctcaaagttgcaagaaatgctaccccaattacgcaccttatgtttgcagatgatgtagtgctctttggccaagcttctatcaaggaagcggatgcctttctccaatgtatgcaaatctattgtgcatggtctggacaagcagtcaactttcagaaatcaacaatattcttttcaaaaggtgttcctaataatcgtgctagcgtcattgctgagaagctaggaatgaaaaagatgaagtcagatgctacttacgttggtttgcctctgtttcggtcatctagaagatcccgagatatgcaatttttggtaaggaaagttcttaatcgagttcagggatggaaatcaagattactttcgaaagctgggagagcgtgtttaattcaatcagtgggaaactcgcttgccttgcactcggctgcagcagacgtaattccctctggtatagctgattctcttgatcgcagtctccgaggtttttggtgggggtgatcttgagactaagagaaccctccatactgtggactggggttctctttgtaattcgaaactccaaggtggtctcggcttcagacagactaaagatatcaacaaagcttttgttttgaaatggggttggaagatggtgtcggatccctctagtttgtggtgtacagttatgaaggagaaatatctcaaaggagaaaacttctgggatgtacaatgtaaagcatatgattccaggttgtggaaagcggtcctaaagtcaagaattcttctcaaggagggggtatgccgtaaaattggagatgggaggagtacttcgatctggtttgatgattgggtgccttttgggaatcatcaacctatgccgaaactgaatgcctcacagggagttaatttagtgagctcttttatcagtaatgagcagacctggattgaaagtagagttcggttttgctttgggcctgaggatgccaaaaatatcttgaatattgggttacctgcactcaaacaaaaagattcttggctttggctaggggagaagaaaggccttttctctttgaaatcggcttaccacttggttactaagcataaatcttctgattgtccggacaggcattggaaagtgatttggaatgcctcaatccatgttcgactcaagctcttctggtggcatttaagaagtaatgccctccctactcgtgagaaacttgctatggccttcaacatcccttctactctctgtcctctttgtgacgaggatatggaatcctctttccatctgttgtggtcttgtcattttgcaaaatctgtctggtttggaagtctgtggggaattaggacagatctttgccagtgtagtaattggagggattggatggattggtttgaatgtaacattcatagaccggttgggcttagttttaatgactttatgataggtgcgttatgcacctttgaggttatttggaagacgcgaaatgaagtgatccatggtgctcagttggctcatatatcaaaagtcattcatgatgtgcgaatgcggttcagagatcatgtctcccgaaacttgtctcctgctgtaaatcattggatcgatctttctcccccggtgggttggatgtcctgttgcacagacatctctgttgtcactgatcattctagaggagcagcggtctttagggactcgaataaccgtgtttgttgcgtgtggatcgagcgttttgctgctactgacccatcactggctgaagcgcaaatgctggtttgcgcagctcaagttgcggtgcgaaaccgcttcctttgtgtgagtttcttctgtgacaatactgaagtggtgtctaccttcttggaagctgataggcaaaaccggaacctgaatttggatggagctgctacgatgttcaggaattgtactaaaggttttcaaagctttaagctgacatcgattggcagggaagccaacttcatggctcacaatgctgcaaagtgggcaaagttcaactctgttgtgggggaaattgatctaatggtgatggacccggaggtgtttgtggaccataaggaatggtatccggagccaggctaaggttttttgttcgtggtacttagctatgtttggatggtggtcagttttgtttttgaatgttggagttcaggaccatagggtagttcagtgttttcttaagtttagaatttgcgttttctcctctgttgtagttgtgtctgttcttctaattctctaggtcgtttttttttttcctttgctggttttttatctagtttttttttgggacttagctgttcttgttgtttcgtggccctacggggtggctgtaatcgttagtttctttgttcaatgaattggtgctttgcaccaca

SEQ ID NO: 218017 - DNA, 3290 bp, Cannabis indica
catgaatatgaaaaaaaattagacgaaaaattttttctatgccgaaacaagtagagggtgcatcaatacatccattttaagggagtgcattgtagaatcacccaataataataataataataataataacaataataataataaaaatccagtctttattctctctctctttcagctttctctctcacttatttattttcccggtaaaacaaacacacacactacccattttcccatctattcatgattaatacatgtttgttagtagtaccattaccaaagaccaagaaaaaacccaaagaccaacaattccaaccataatcgaaaaaatcaaacaattttctcttctttccaatcatcccttaccttccattctcatcaaagtatcaaactttaccctcatttaagtctcatctcaaccgccattgttgtttcaccaagatctacaaaaccccacttcactaaactcctcactaacccttttctcttatgccaaaaccttgtgaagaagaagaagatggatctgattcaaacacactcaaaagcttcaagctttatctcaaatggccatatttaggcatacccattaacccattcgccggagatttcttctcaccgatgaagaatcgttcagttagaccccttttctccattttactccttatagtctttgctgccactctaagctgtagaacagcctttcaagatagtacctttagtcttctcatttcaatctcaactctacaacctccaccgccgccgttgccggtgccggagaaagctgttgtctttaatgaaacattgttgaaatatgcttccattgatatatctgaagctcaatcaaagaaggagattgatcaattattagagggtgatttcaatagtcttggaaggtacaaagcttttaaccgttggagaagatttaatcatagagatattagagctaaaagaatctcatcaaatggggttcctttagttctccattcaccaaatttctacagacattggttgagtttcagaagggttttacatgattggtcaagaagtaaaagattccaacctcaaatcatgtctgagctggttaaattggtgaaacaaccaattgaaaaggttcaatctttaaaccggtattcatcttgtgctgtagttgggaatagtgggattttgctaaagagtgattatggtaagattattgatagtcatgaagttgtgattagattaaacaatgctagaattgaaagctatgaatccaaagttgggtctaaaacaaacatgtcttttgttaatagtaacattcttcatctatgtgctagaagagagagttgttcttgtcatccttatggagaaaatgttcctataattatgtatatttgtcaaccattacatttcttggattacattgtttgtaactcttcacataaagctcctttgatggttacagatgctagttttgatgtgctttgttctaggattgttaagtattactctttgaagcttttttctgagaagaacaaagggaagtctttggatcaatgggcaccagcacatgatggtgcttttttccattactcatctggtatgcaagctgttatgatggctttagggatttgtgataaagttagcatttttgggtttgggaaatcagatttggctaaacatcattatcatactaatcagaaggctgagcttcatttgcatgattatgaagctgagtattgtttttatcatgatttggttaagagaccaaaggtaatacctttcatctcatcaaatttcaagattcctcctgtggttttatatcaatgacacaatgataggaagtgatccccttttttcttgggaagtgtttgctttagattgttttgtgtaatgtgttgttgtgttcctttgtgttgtaatttgtaatatgttgaatggaaggaaggaacaatcaaaggggatagaaagaaagaaattgttgaactactaccatttatttgaccctttgtactatcaaagatagtcattttggggttattaccaaatgtaaagttggattttatgaatatggttctctcatttattttataagatcaagattttcttctgtattctatataatataacactatatttgaagtgaagagtagtttgagaattgtgccaagttcaaaggcaccactttgcattggttgatattctattattccatatcttttcatatactcttttggaataagacattggcatatatttgactgagatttaagttcaaaatcaaaggtaccaactttgcatattatgatttatagtttgatttaaattccaatgcttgttatgtctctctcatatgactatattgaataacttattagataagtaatagctttgatttgaacacatttcaccatcagaatatttcttgcagattcaactttggactgaccaaaaccatctgcaagtctcttcacctggaaagtgctctaattttagttgtttttatctttagttcaaatagaataggttagtaacttattgagttttgtaacagtcagcatttttgtgaagtagttgtaatctgtagtctcatctttatattgtttagtgaatatcttctctcagttggaactatgttgtgtagttttatcttcacaatatttgtacacatcatcctaattagaattaatagttaattcctttggactgttctgttagagttgtgtgttactggttgaggttgttgtaaatagaagatccttgattattcaatttgttgaaacttttgagtgtagagtcaagagtacttaaaatgcattgtaaaagtgcaattaaagcatgtaactaactgatatattacatctcctttgtgtacaagtgatcctaaagcaagcttacacttggtggttagttgtatctttgctcagaactgttggagaaaactatttcgcgccggccaggacagtgtagaaggtacttttgcagcatgatttcggcgagattctcttacttggcttcgagagatgtcgagtttttgttgggcagcttggtttcgacaaagattctcttacttggcttgtttcaaggaagctcgtggcgagaataagatgattgaagttgcatcttttactaaaaagaaaaaatgtacattgtaaagcctctagaattgatttacttgtaaaattcattttcaagaaaggttactacattcattgtgaaaaggttacttgatttaatctatttgtgtccttgtcttataatgtaatactttcttatataataacacaaccactacattcatggttagctctctc

SEQ ID NO: 218018 - DNA, 6859 bp, Cannabis indica
attttttttaataaaatttttgtacttaataaacagtatatttaaaaaatataattacatattactctaaacacagtttacatatattcttattctgaataacctataccaagtgtttaagaatggaatttgttatatttctatctgttgaaataggtttaacaaaaaaaaatgtataaaatctaaataagtagaagaaaatgtatgtttgaattttgtgaaaattatggttaaatttctatttttttatcaactataaagttttttattgttaaatatatatttttaatacttaaattaatttaaaatttatttttagttcaacacaatcacattaatctgctctagagtcattatttgtattttcacaaaatatgaaatttaaaaattaatttcttaaaaataggacccaattaagtaattatgtaaaatatctcaccaaaagaaaataaacgttagttgtggggtgtaattaaaaatacactaaaccctatcatattcactttgcctaacaaaaagtccagtccgcctctcccttaaacccacgaacacaatcagccggaaacttatccgctgctcacgccgtcgccgacaacctcctctatctctttctccttcaacgccgactagcttctgtactcctctttctctctcatcaacgcgggccaggtgagttctgtaatatgaatactttatatgtttttcaatttctctggtgcgacaaaattacagtgctttaaattttggtagcattgccacaataatgattatggggagctatataaattcataatatgcatgttctttttcttccagatatataagtccactctataactgtctgttgtgtccttaaaacctctcggaaaaatttctaaaccctagaacgaaaacaaacaaaaatggcggacgtggtgcagtaccggctggagcgcatggtcaatgagcttgacgatctcgagcgtcgcggcatcttcacacgccgtgagattaatgagatagttaagcagcggcgcaaattcgagtaccgcctaaagcggccgagtccgctgaagcaggattacctggcttacattgaatacgagactcaactcgactcgctcagacggctcaggaagaagtcagtggcgcgacagctgaggaaccagggaactgatgagaataagaagaagatgaagaagtcagtttcagacttcgcaggcgttgtgagaattgttgacatttacagactggcggttacgcgttacaagggtgatattgatctttggtttcggtaccttgagttttgtcgagaaaaacgtcatggcaggatgaagaaggtaaactatattgagtattgttgttttggtagatttatatgcagaggacgaggttgcttcttgtatctttcagctcccatcattgaagtttttggaaaaattgatttcacagggcagaagaacgtactgttatttatttatttttccgttttctctgttatgtttggttactaagaaaatggaggattagtagtgacagtccaaagttaaagtctagtagggttaatcctgttattgatccatattaatcaatttgtcaacttatactaaatttgttctgattaacaaactgtaaaaagctgaattttttgctgatataagagaaataagactaataataatataagatgctaccaactgctaaaattgtctaatttaattaagtgggatttgtatatttcttgctcatttgattttatatttttttcaggtcctagctcaggctattaggtttcatccaaaggtccctggactttggatttacgcagctgcttgggaatttgatcacaacttaaatgttgctgctgctcgtgctttaatgcagagcggtttgagagtttgtcctacatcagaagaactttggatcgagtatcttcggatggaacttacctaccttaataagttaaaggcccgaaaggttgctcttggagaggatgagggaactctggtccgtgataagaaagtggccggtgagaaacaatggagagatgacaatgaagacttatttatgtcccttaatgaggaaaaggaaaataatgaatcaaatgtggaaaacaaggagacacgagggaaagtagatgtttttcgagagcaaggatttagtattttaaaagccatatatagtggggcaattgaagctcttccttctagtttaaacctgaggaaaaagtttttcgagatattggatgcattagatttggctcattctgaagaaatgcacgaacagatactaagtgagatgaagagagatttttcaacagaaccagagtattgggactggcttgcaagacttgaatttgatccggaggccatagaggggatgagtgatgaacttgtgctttctcaaacagagaaagctattcaggtacaatttttacataagaatacttgttagtttggccaatttctcatttgtttgcttaatcatctgacaagtagaattctgtgtttaatttccttcttttctttctttcgtgattaggtatatgaggaggcccttaaagttatgccttcggccaaagtgtttgataattacacaaggtttatgatggatgttatacttctccaaaaaggagaaaaagaaattttagaattgtctggtccatatgcaacttatatatcacatctattaggtatatatgagaaagctaaagcattaggatgtattactgaagatcttgcataccaatatgtttcattttatttacaactgggaagactggatgaagcaagaaacttggcagataagctttgccgtgaaacttttttggactcaacaaggttatggctattaaaggcatctctagaagttaggcatgttacaagagattcactatcgtccccaactaaagctgaccttctatctatctttggacttctgaaggatgttttgccaaaaatttctgtctcaaaagctgagagtttgtggataatggtatgttgtgattcttttggtcagacttagcgtggtgctttctatccatgatgatgttccaaactttttttatttatactgcaatacttattattatatttttctcatgtgcaggcactcaagttgttttcaagtcagaaagagtattttgagaagctggttggcctctctattgtatcaatatctaaagatggagacagtgacaatggtttctccctatcctcagctatcgtgaattttgttttacaaaatgatggaattcaaagtgcgcgagaaatgtataaacggtatgtcgttagatattgaactatgtatctagtatctacttcttgtgtgataaaatgatcacctttgcatgtgcaatgccacctttagtgtattttcctctgttgttctaagtattataagcttttattttttcttccactgcagctttcttgcattaccacatccggggctagctatatacagaaattgcattgatttggaaaccaacttagcatcagttggtgacaaagatgggcttgtaaatgcgcggaagttatttgaatctgcactttcaacttatgggcaaaacctgagcttatggcaaaattaccatcgactagaaacgaaggtgcacttttcattactcttgtactttaagaaccctgatgagattggggcagtgccttttgcttttatgtggaataccatttcaatggctatggtctttatgaaattgtaaaaaaaaagggaaattgtatgggattacatttcacaaacattgtatagtctctgatgatttgggttatttgacatagttattatatgccaatccagagtttgaaaatatttgtttccactcacaagcttatctggttttgcagatgggaacatctgaaaccgctagtgccgtccattggcgtgcaaggaagatactaaaggattcgactgctctctttacttcggatttctaaatgtgtgtacatttgattcaattttgaccttttactactgttagactgcaaacgggaaagatgtgtaacttgcgggtgatatcaacattgtttggtatgtaaacttttccctctcaaagttggatattagtaagtcatcatcatcactgtgttcagtgccaaacgagaacgtgttacagtatttatatcactaaaattgcctcgtgagcagttgtgatcatttacattaaagccttatttacatgaaaacgtctaaatttacatattttagtacatgattttcgcataaaaactttgaaacgatactgtttcgaaattgctaccgtagggtactcctaaaccccagagatggtgtcagcagtagaaaaagtctctatggacgcagaagaggttatactctaggccactgtggactcaccacctgcatatgcaaacaaatagcaacacgagttatattggaccattagattcgagtatttctaaattttaccatctgatttgaatgtatgttttacattgaactaaagctaacctctagtgtgctaaacactagtagcattcgactagcaaccactgagggctcctcggctcgacccaccactgccatttgctccagctgaagagtcttcacgggaagcctgcagcaaacgaacaaagcgaaaaccgtccagtccaaataaataatgacagaaaatgagcacttaaaatcatcaaattccatcatcaaacaaaacaaccttaccatgccattcctcggacatagtatgcatttgctatgagggcacaaaagcccttccactgaagccttatttcgtctgacactggaggagtagatgaccacctaactacagtgggttgtggcgtacataatatggttatgaatataatgctcagccataatatgcattcttcaacctgcatcatcgaaaagaaaaaacaaatgaattttactaaccagcttatatgataacagagacgtaaatgacattgctgttgatgaaattgccaatattcttgtgttacggtttgatgatatatatgccacagaatatttattttgaccaattagattttattaattaagaaaaagtttctcacctcctctgatgcaatcttggatttcaaactggtgtttccaccacaagtttgcattgcatcaatttcaacaccagattctttcatatcagcaagttctttccttaaaccttcatcagtgcatcctaaagcataagcattcaccccagcactaataaactcctgattaaccgaaatcgttatttgagtataaacacaatttagaaaaacctcacaagaaaagaaaccaaaccactgaatatacttttaggttgtcacctcctccacgatcaaccacattcctgtacctcctgagtaaactaattgctatgttccttgaagaacgatactcttcatcagatggaattgaatcatccaaccggcactataaaagttcaaaactgttttaaacatactaatcattcaaaaaagttaatgtataaagtttaccaaaaacacttactagccatttctttgtagctacatggtgaggctgacccacatgattggtgttcagctgaaaacggtttttccatgaaaacaaggaagatggttgtgtacaattacatgaggtcctaagtagttttggggttgatgaaacattgatcaaggaattgagatgggtattcctagatggtggcaatgcctcgtgatgaagggtattacaatctgggcttgtcaggcactttgtagtagctactgatgcatacaccatcaacatgtttagaccatgataagatttccttcaaacaatccaatattaacaccaaaaattagatgaaatgaatttcttataaaagatagaatcataatactaactcatatatatactaaaattgcagataaaattagaaaagaaaaacacaacagctatgctcaatcatagccagataaaaatatgctcaaatttactagcttccaaataggcaatcttcaaaacatctatgtttaaggtatattgataatttccaaagttcggctattgagacgaagattaaatagaacagagagagaaaatttcagaaaaacaccaacctggtcagaatatggatgataatttcatccacaaataaaaggacccaacaagaaacttcaagttcaatactttttgagtaagatagataatcaattaacgagaactaatataaaaataaaataaataaataaaaatctttaggttcttattaccgaagccaccaattttatgaatggctccagagattcaaataaattccaaaaaaatattttctggctgttaaaagaatccacatacgtgggggacttccaagtttgccatttccaaggcaaccctgataacgacgtcgtttccttgatgatttctcccaattgtttttagagtctattcgagaagaccaatgaatataagagctaagttactccaaaaattaccaacacatttttttattattttatatatcatttcttttacaaatttaaaattagctcattaaatagataatgataaattgatgattaattaatctaacataataaaaaaatatattaatttaaactatttccaaattcgacgatgtggcttctctttctttcctaccatgcaaagctattcccaactaagaatttatcgtaatatttatcataatagtcattgattaattctgaaattaagatattgtcgagactcatattcttaggagggattttgtgaattttgtaaattcgttattgaatttagagtgaatgatatttgagagtttaagaagaattaaaatgtaaaaatgaaaaatggaaaaaaaaattgagtaaaatgaataatagaattaatagagttgagaatactgaagaagcttaagtaaatgaagaataaatga

SEQ ID NO: 218019 - DNA, 4142 bp, Cannabis indica
ttttttttttttgtaaaggggaatttccttaagttttcttacataaaataatatcattaaatttctgacatatatacaaatattaataataaattctatttcctaaaaaataagtaaataataaattctacaccgtattttccctaaaattgacaatatgtaatttcgttcagattcaactttctctaattgattggttaaaacctcttatttattttagttatataatactcgacactgagcctgtcacatatatgtcatcactctgtttttaagtgaacaatagagatttgttcaaaaagaaaagtaaaaaaaatgaactgtacgtggagatctattacttgctaaagtaaaaattttggtgtcgattaacaccaaatatcatttattttaaatattttgtgtgtggatattggataatgatacactgtcacaaattttgtttacatttttgtcacaggtaagataactgatgggagtaacgccgatgttgctgttgatcagtaccaccgttataatgtatgtttacatttttttttcttttgagagggatttaagtttacatcttaatccaggtgttattaataattaattactatcacactcatttttcttttcattaaattattaatatttattttttctttaacaggaagatgtacaactaatgaagaacatgggaatggatgcttataggttttcaataagctggtctaggatttttcccagtaataagctttctctttctatctctccctctcacacactcaacatacaaatattttgactgattatttactgtgtataaatgatcagatggaagtggccaaattaatcaggcaggagtggatcattataacaaactcattgatgctttactcgccaaaggtttgaagtttgtaaagctattgtgtatgatttcatatattctcaattatattaattaaaattcattctaaacagccttgtacgttgattttgatcaggaattgaaccttatgtgaccctttaccattgggaccttcctcaagccttggatgacaaatacaggggatggctagaccgtcagatcatgtaatagtactcttctccatttctatatatatatatatataattaaaaaaaaaaagactttagattttgaatattattgtaataataatgtgatgatgacagccaagactttgtgaattttgctgagacatgctttgagaaattcggagacagagtgaagcactggatcacattcaatgagccacacacattctccatacaaggatatgatgttggtttgcaggcaccagggcgttgttctatcattctccacctcttctgcagggctggaaactctgccaccgagccttacattgttgctcataacgttctcctctctcatgccactgttgttgatatttacaggaaaaactacaaggtattttaatatatatatatttataacaacaccattctaataatatataagttttagtaaccaacccctttgacatgcttatttgcagtctaaacagaagggctccattgggatatctctagatgttatgtggtatgaaccggcatcaaactccacagcagatgttgaagccactaatagagcccaagattttcagcttggctggtaataattattcaaatttcaaagctactcctacattttaatttcgcattatataaacttgattgcaatttgttgtaataataagtgcaggttccttgatccattgataattggggattatccaaagtcaatgagagagagggtgagaaacagactgccagtatttacgaaatcggaggcttcactagtgaaagggtcattggattttgtgggaattaatcactacactacttattacggttccaaaagttcacttgccacaatacttaacgatactctcgcagactctggcgcactaacagttcgtaagtaaaacatgttgaatgaatctttctctttgaaatctcattggattggttttgtaactctagtcattatttatttccccatctttttcagcattcaaaggtttaaatgctattggagacaaggtgaacaatctattcaactatttcttttcatcttattattttataaccgttgcttagactattcgaaattcagggccaagtttttgacatttttaattgattaaacactaaacgcacatactataactatatacttaaatattcatatatatgcaggcaaactctatatggttgtacattgtacctgaaggcatgagaaaattaatggtttatatcaaagaaaaatatggaaatcctccagtcattataactgagaatggtaattaatttttacagctgtgtttttttttaataaaaacttttgttgccgttccactcttaagaaagattttaaatgtttaatctttttctttttacaggaatggatgacccaaatgactcgggtattcccattaaacaagctttgaaggatgataaaaggatcaagtaccataatgactatttaacaaatttgctagctgctatcaagtatgtatatgtaatattaatatataaggcgcgttatttcttatttctcatgtagagttctaaataaagagatacatttaatgattttgttatctgttaaaatgcagagaggatgggtgcaacgtaaaagggtattttgtatggtctttgctggataattgggagtgggctgctggatacacatctagatttggtctatattttgttgattacaaagacaagctcaagagatacccaaagaattctgttcaatggttcaccaactttttaacttagttgatgctactatatataattacctcgattgtaccagagtttctttattaatagatgatccattgctttctcagaaataataataataataataataataataaagggtgtacaattagttcttttcttcaaaaggataaataaataaatagaattcataaaatgtttactttttattggccaaattctctctattataatcagtacccaaatcaacaacaaagtatcccaggaataaaactggtaatggccatctagtcggttaccgaattgagaaaaacaatgactatcgttttatttattaactaatatataaatagctcttcacgagcgattatttgttattagaataaattatatactgaaaataaaaatataagtcagagcagagcagaaacataacaatcgctgaaaagagttgctatacgaaatataaaataatgaaactgaaacaaattaacgataaaagattctacctgagttgcgaacaatgtcgatttctttaagacatttcgcggctctgcccgaaatgtgcacgacagtctagcaactacgatgttctcaggataaaacagcttcaggatacgatatgttctgcaccgaacgacatcgttcgattacaccctaaattattgctctgagaaaatcgtaaggaagaagaaaaaaaaatttgttgtagaaaggatgtattcttccgttgttctgatacgacttatatagagaagtcgatctaagattaatcggtaagaaaatggtaataaataaataataaatttttatttattaaataattttgctttaaaaaattaagtgacacctcacccgccaaaccggctcggtcggacggcggtggcgcgtgtggtggtccagtgtgtgagtcctcacccatgcgcaaaaattgggtaccccttgggcccaaacccaaatctcaaacttgcacattatatacacttctaatgaagtgtttctatcccatgtgggactccattaactcacacacttcacttttcatttttatacaattcacaaagttccaacaatcccccacttgaaattttttaaaaatattttctcgagcaataacagacaactataagacactgcttaagcaaagatatctttcgatttgaatcttgcgtagtgaatacgatttagattttactagagtgactcgaagtcttgaactctatctctaatatcgtaccacacactaatctttcaagaatgtattcaaacaaacctgtgcgttaatggccatgcacgtctatcccagtatagtgaacgctctagaaattttgccccaaattctataggaagcggccccactccca

SEQ ID NO: 218020 - DNA, 3459 bp, Cannabis indica
taccaaatatactgaagggcttgattgatccttggttaaagaagtattgatgtagtcatttagccttgcttaacggtagttttccataaaacaactagcctcctcaagaagattatgatggtgcgccatagaacctttatgagtgaacttattcctgtaatgccaattcaaccaacacatacaaacaaacaactccagctttggtttagttaaaatattagaaagatgcattattataaggttaaaatatttaatgtttggaaagtttgaagatgtgagtagaataccatacctttccaaagctgtctgacattagtgaaaacaatagggcatgacaaatgttttctagcccattgttgcatatggatcaaattggagaatccactactttccttttaaagagatttgagagagtaggaaatgtgtttttggtggccctataggcgaagtgttttagtttggagggtaaggagaaggaccacaaaatggaccaccaatctgagggttgggaagatatgggtgagtgttggtcattattaatggtgaagctaaggtagaatcctgatttgacaatgtagtttcccgaagtggtgtgctgccagatgagagaatcctgagattaggctaagggaagagggatgtctagaatagcattaactatttcaataggaaaaaattagttgagacgaagaatgttccaagtcatgtttctgctgataaaataagcaatatgggaaggagaattttggattgtaggtacaagtctaacattggggatccaataatcatgtaaagggtgtgtattctgcccattaccaatttttttaatgagccttttttccaacaaagatttctcccaactaatgcttctccaaccgaaagatggggcacgaccagtagaactgtccaagaatggagaatggggatggtatcttgccttgagaatttagagcaaccaaagaattaggatgagttaagagacgccatgcttgcttggcaagcatggcttggttgaaatgaaccagagatctaaagcccagccccccatttttcttagatttgcaaaacattgtccaactatgccaatgagtctttagtctcttgttggcattagtgtcccgccaaaaattggtgctaatggactcaagagacttgcagatactgacaggaaacttgaaacaggacatagcgtaggagggaatggattggaagacaactttgataaggattttccccccatttgagaaaaacttgtgagtccaattggagatgtggtgccaagctctctctctctgatatagttgaaggcttgtttctttgtactttcaaagcattgtgggaggcccagatatatttttcaaactcgtttttaacaagcatacccatgtaatctgagataagagttcgatccctcagagctgtgttaggagagaaataaagagaagatttttcaagattaacacattgccctgtggcatgctcatagtgaagaagaatttctttgacaacgctgcaagaatggatacttgcttgacaaaacagaatgttgtcatcagtaaagaaaatgtgagatatggtaggggctgtataagaaattttgaggccagtgaaattgcccgattgttcattattacgaatgagggaggagaagctttcggagcacgagagtaaaaggtaaggagaaagtggatctccttgccttattcctcttgtaggggtcacatttccaaccaccctaccattaagattaaattgataggagacagtggagaggcaacggtgaatcagatttgagaaactttgggggaagccaaactaatccatgattctagaaatgaattgtcactcgaccctatcaaaaactttgccatgtcaagtttaatggccatccaacctttctttctgtgtttcctttgtttaatggcatgggctacctcttgggcaaatataatattatcagaaaggagacgatccgagaggaagcgctttggttgagacaaatgaactgattgataacaggttttagtctattagcaatagtgttttagccaaaaacagtcataattttttgtgtgagttctttctttttcagttcctaatcttggccctattttacgtagtctatttcctatatatatggtacgtcctttgattgcatggatgatctatcatcagcctattcttttcttgacgcgtgttctttctccctattcaccctagtttgcctcacgtcttgttgttaggtgatggctgcttttttttgtcccttttgggtccgacggcattgtgtcttattcctggattgtttatctcacttctttggactgcggtctttcttccatcagaacttctttttactattcatggtgaacaggggaatcacaatgtcaaccttcattttgatgccttttctcgacggaggtacttgtttgttgtattccaagatgctcctgttctatactgctcaattctctcaggaagtgagttttcgtcggtgagctagatggaaggtcctctttgggtccctcttgaatttgtccatcatctgggtcttcctccgtcggtatgaggtgataggctttaaaccctcacttacttctttctaaattttccgtcggcatttgtacgtcttcctagtttctcttactgttacttcctcggggaatggtccctatttcgtctttctcacttttgtcgtttgtactttttatttatttttatcctttgggtttccaactgggccgtccagtgttgggcctttcttattttcattaattatttgggttttaggcttttgagaatctgctttatttgggcctttgcactttttatgctttattgggccttcattttttctttttgtaattttcctccaaacaaatagctttagaaatgattttataaatgatgttacagaggctaataattctaaaatccttcattgttcatgtttgactttggggatcaaagtgagttttattcagggaagctatatcaccgccaaagttgaggaagttaagggttgccttcagaatatcagacttaaccaaactccagtttttatgataaaaatttgtgttaaaaccactagtccctgaggccttattaagtggaagctggaaaaaagctctttaggcttcatcctcaatgaactggttttacaacatgagggtggcttgaggactgacaggtcaataccaacaaaagcctggttgatggcttcaagataggggttagaggttgtaaaaagatcacgaaaatattgttcaatctctccaatgatatcagtttcttccacaagagtttgaccttacacttaatgtaataggattatgagcataaaatccaaaaaactaaaaaaccattcaaaccgacctaccgaacaccgttggagccgaaactgatgaaatcgaaaaaactgctaacggttaaaaccgccattgaatgatcgattttttt

SEQ ID NO: 218021 - DNA, 4990 bp, Cannabis indica
catagtgtgtaagactgtgaagaatccaatcaactgaaggagaatcggggtcagatcttggtgatactttgctacagaaaggatacaagtgttagagatctgagcggaacgagtcatttaatttcgctgcaaccaatgtaagtttcttgaactttatatgtgtttaaatttcattgttttagaaattcatatttaggatgctaaataacatacatggtagtaaatctaaatcctggtaaaataatccccaacagcatgttatttgtgattcgtgcactaccaacactagtacagtagtaatactgagtgcattggtacaatgtatgatgtctaaagagtatagtacggtgttaccaacactagtacgaatatagagtgtatgtggtagaacacttaggggtacttgaggtacagagtaaatcctaccaacactcatacagtggtatgtagtgcatgtggtacagttgtcgtaccttggtaaagaacgctctttcttatttgataagccttatggataggtgtatgggtgcctaaatacaagtcaataatatattatatgttatttgcttttcttgttatttgcttttcttactgagtctgttgactcacatatattatttccatgtgtaggtaaagaaaatgcaaaatctgaacaagagagagttcctagctcgggtgatgattgtacatgtcaatacggtgcgacctggagggttcggtctcgggacaagttgggctgtattttatagttcattgtgcaacatagtttgtaaaaatattaatattttgataatgattattataaaagtttaaacacgggatctcggcttatgtaaatatatatatgttcataaattttaatagtttaaatcaaaattttaatttggcacgattttcgaggaaaactctttgattagcaaaggtggcacattaagtagaaaattactgtagcgttcctaagtatcatcacgttacaattttggtataagagctaccaagtttgtttatcgaagatcgttaagacatgtacaatcatcgtcagagaaaagctcgactcacggttcagtaagcctttacttgtttagtaatttatgtgattagaaacaaatgttaggaagcataatagtttataattgtttaaatgcattgccttaaaatccataaagtgcggtacatagagtatatgtgatcgctaactaacctacctaaatgatgggtttacagactaagtcctattacatggatgccctgcaaaatacgaagagtcagggtaacatggttgagactagaggcggtcggggatgtcaaaaatcccccaaatcctcgtggatgcggcagaggccgtggaaggtttcaaggtggtagacatgaaaatccaccttaagctcctccagattgggagcaaaggtttgaaaagatacaagcccgaatcctctagcaagagaaagaaatttagaggctgagacagtaggttcctcttgtagtgcctttgtagcaagcactgaccgtcatggttctagtggtgccaggagaacaacctattgttcgcaaccgtatggagccgttgtatgagagatttcataagtaggcggctctagtttttttgggaggactggatgttatgaaggtcgagcaatggttgactgtaatataaagaatcctaaatttcatgagagtcgtcaaaatgaccgagtgacttgtgccacttttttgttctacgaagacgcgcttgtgtggtgggagttagtctccctcactcgagatgtcactaccatgacttgggaatagttttgggatatgttcaatgacaagtattataataaagcagtttgcggtgcaaagcagaaagaattgactgatttggttcagggagaaggcatgtcagtaacagaatatacaacaaagttcgaccgtctagctaggttggcttcgggtatagtacccgcggacttcagtaagaaagaaaagtatatagcgagtttaaatgcaaatattaaacatgacttggtgattaccacaagtgatacaacgacctatactatgggccaagtacgaagcccccgaaataatccaaaaaaaattcatgtatgtgcacactcaatattagacaaacattaagtctgtctggagtgataatgctaaagaactcaacttacctaccttttacaacagtaaaatagttattcgctacaactcttgtgtaggaagaccccaacaaaacgttgtagttgaatgcaaacaccaacatattctcaatattgctcgagcattagcctttcaatctaatctccccatcatatattggagttatatgattaaggcaggtgtttacctacttaatagaaccccctctataactctaaatgacaaaacatcttatgaaattttgcataattcacaacccaattactcccatttaagaagttttggatgtcttgcttatggatcacatgtcactcacatccataatttttctcctagagcaagaccctgcatcttcattgaatatccagaaaacatgaaagcttacactctccttgatatccaaacaaatcacatatttcattctcgagatgttatattctatgagtcaatatttccttataaaaactccaaccacaataccaacattgacattttttcccctcaaattctacccctacagtcaacactgacataaatcaacctgatgtcccaggtttaccacaatctggtacaaaccagacaccaaaaacatccaaatgttgaagaacaataacaagacctactcatttaaatgactatacatgtaccaccacttctagcacagcctgtcccatcaccaattttatttcatatcacaggctgagtccacaattttgaaatgccatccttgctacagctgaaataccagaacctacatcatatgctgaagcaaaactccataaaatttcgaacacatccatggatgatgagatagatgctctagaacaaaatgatacatggatcatggtgaccctacctgatggccaacatgccattagcaataaatgggtgtatagaaagaaataaaatcctaatagttccctacaaagatgcaaggccaaattagtagctaaaggttacacacaacaatctggcatcgactactttgaaacctatgcccctgtggccaaatttaacactctgaaattacttcttgcccttgccgccatcaaaaattggcgctacatcacatggacatctatagtgcctttctccatggtgaactacatgaggatgtttacatgaaactacctcaaggctacactccaaaaggagaaattcccaaaaatatagttcgcaaattaaagaaaagtctatatggcttaaaacaagcctttagacaatggtatgaaaagttaagcaacacattactgcaacaaggtttcaagcagtcccacaatgatcattctttattcataagacagcaatcaaacaatttccttgccatcctcatttatgtggatgacataattgttgctacagataacacttcagcactacaagacatcatatccactttagatgctcagtataaacttaacttggcagcctccatttcttccttggacttgaaattgaacgatgccccaaaggcatatgagtcacacaaagaccattcactctccaacttctcaaagattcaggctgcctcgaatccaaacctgcatcaacacctatggaacccaatataaaactcagcaatagtgatggagatctcttgccaaatccaactcaatataggagtttaattagcaaacttctctacctcaccatcacaaatcctgatattagcctgtcaaaactcagtcaattccttcaatcactaagggaaccccacatgactgatgcaactcgcatcttacaataccttaaaagcactcatggccaaggtttaattttctatgtcgaatgccctgccattcattttcaagcctttgctgatgctgattggggagcatgcctcgacactagaagatcaatttcaggatattgtgtttccttggtcgatctcttatctcttggaaatcaaagaagcaagccacagtgtcacgatcattcgctgaagctgaagacaggtccatggcaaatgcaacatgtgaactcacttggctccacaacatcatcaaagatttcaacattcaaccacaactcccctccactctcttttgtgacaattctattgacatacatattgcagaaaacccagttgatcacgaaagaaccaaacacgtggaaatcgactgtcttattgtctgagaaaaagtctcaaatggcagcatcaaagtgaaccatgtctcctccaaaaccaacttagttgatgtactaactaaactcatgtttccaactcacttcaatgaaattgtatccaagataggtgataaaattttttacactccatcttgaaggggcctattaaaaccgttatgttagttatttctgttggctagttagttgggttagttcggttagttcaaaactcctattctgatactttgctgcctatataaacaacaacttcattctcttcattcaattcagtacagaaatcaagacaatttccttttctctgttctaataaattccatgaagctgagtttatataatatgagcactgctatttttagcatttctcatataatgtatataatagatttgtaagaatattttctaggttaattagaattgttatagtgagatttttctcacctagaaactcgagactagacttctatttgaaggacacgtgtactcaattgttagaatttattttaccaggatcttagatctactcacaagtatgttatttaacaccctaaatatgaactttctaaaacgataattaaacacttataaagttaagaaaaccttacattggttgtagcggaataatgtctccttccactcagatctttaacccttgtatcctttctgtcgtagagtactatcaagatctgagcccgaatgt

SEQ ID NO: 218022 - DNA, 2053 bp, Cannabis indica
caaacgtagtgttagcgcgtggattacactggccattaatcttctcagttcttaccatagcaagattcatggccagccagatgaatctggctatggtgagaactgagaagattactggtcagtaaagagaagaaataacaatgcagtcttcactttccttctctaatggcattagacccatcaaacttggagaaaacccaaaagccattatcactacccattcacttaaaagagctacgcttccctttactcagtgctcctctcttctctccactagatcatctctttcttgttcttcttctcgattcgattttagatatccatcggtgtcattcgtacagaaggatgagctgtgttgtaatctagtcccgagtacgacatttagaaagaaaaggagcttcgaattgtctccagttcgttgcggcatttcgtctagccataataacagcgccggtgcgaaacgaagtttaagggaatggtttgagcttatcggggaggccgtttcgacagcgtttccgttatgggtcgccttgggatgtttattagggcttttaaaaccgagttcctttaactgggttcggcctaaatggacagttgctggtttaatagtgactatgcttgggatgggcatgacactcactctcgatgatcttcgtggtgcgttggctatgcctaaggaattactagctggtttctttctccaatactctgtgagttctgttatgttttaaatagttagtgtcatttactattatgaaatttttcttaatgggttttaaatagttagtgtcatttactgttaagaaatttttcttaatgggttttaaatagttagtgtcatttactattatgaaatttttcttaatgggttttagatagttagtgtcatttactgttatgaaatttttcttaatgggttttgatcatatattgagatgtgcctttatttttttcaaaaaatgataaaatgctaaattaagtaagtggatctttgtttcagtacgttattagtgagattattcaaatagaaaaagcatttgtaacttgttgcaggtgatgccattatctggctattttgtgagcaagcttttgaacctgccatcccattatgcagctggtttaatattggtcggttgctgcccaggcggtataccccccctgtctttcttattttgttattccaatacttctctcactaccctgtttatttatctacgttttgggtgaatggtttcaggtacagctagtaacattgtcacttatattgctcggtaagtgaactctcagatatagcattagtttcatcatcaaatataagtttctccaacaagaagatttagtgaccaatctgttttttcagtggaaatgtggcactctcagttttaatgacagcagctagcactataacagctgtggttggtaaaccaacttttgatatcttttcttgcagtatcttcttttccttgattcttagattgctgcaattcaacataccttcatttacataggagcttttatgttcatttaggacatttgcatattataaccttttcattagtgtatcttcaacaaaactatggttatgaagaaaaagagttatagatttatcaacttatatagtaccaagccaatctgatgttgtgaacaccttctacaaagtatagttcattttcacccttcacatcaaggcagcatcattttcttttgtcctcttgccttaaattataacgccctttctcaattacaaaactgttttacttattcaactgtttcctttcaacaaactgcatttctgtttcaaattggtttagttcatgcatcattcaatcctggcatctgatctgcaaccaaaaacctcttcgtaagtttatttcactttccttattttttgattaactaaccctacttttaaacctttctgttgcagataatgaccccctttctgacggccaaacttgctgggcaatatgttgctgtagatgcctctaaactactattctcaacactcgaggtaagagcttttggtactggacgtgtgctacatagttaaacc

SEQ ID NO: 218023 - DNA, 2440 bp, Cannabis indica
gacgttggtggtatgcatgcggctgctgggatcttaacagcaagaggtgggatgacatctcatgcagctgttgtagcccggggatggggaaagtgttgtgtttctggttgctctgatatccgagtaaacgatgcagagagggtaaattttcaatgctgttattatttttttgcactctagctgtctttcaaacagaggaaaattactaattaaaaaaggcacctcaattattaataatggcaggtacttataattgggggacaagtaatcaacgaaggagagtggatttcacttaatggatccacaggtgaagtgatattaggaaagcagccactttctccaccagctatgagcagtgatttggagactttcatgtcttgggctgatcaaataaggcatctcaaggtgcagcatttgttttgattagggaatcttaactttatagagcttgttcaaaatctttttactaatttagtacattttgttgttacaataggttatggcaaatgctgatacccctgaagatgcactagcagcaagaaacaatggtgccgaaggaattggactttgcaggacagaacacatggtaatatgtttatgagaagtgtttgatggatatctgaattcaattcttaattggattccatcaaaactagagctattaaattaaatgcttatttttataatatggttcactctttggatgcttcagttctttgcttcagatgagagaataaaggctgtgagaaagatgataatggcagttacaaccgagcagagaaaagcagcactgaatctgttgctaccttatcaaagatcagactttgaggggattttccgtgcaatggatggtactaagataaacataaataacatacattttctactacgtatgtttggagtcttctttcaacacctaagactttaccttaatgaatttcaggtctcccagtaacaatccggttgttagaccctccactacatgaattccttccagaaggtgatcttgaacagattgtcagtgaactaactgcagagactggcatgactgaggatgaagtttttgcgagagtggagaacctatcagaagtgaatcccatgcttggtttccgaggctgcaggtttgtgtccctcttatgataattttggctggctacattgattgctgcaagaaaaaaaaattgtgctttattgttcacaaatgggttctggtctccaacaggcttgggatttcatacgcagaactcactgaaatgcaagcacgtgcaatctttcaggctgctgtgtcaatgagtagccaaggatttaaagtctttcctgagataatggttccccttgttggaacacctcaggcatgattccatgcttctttcttggcaaaacttggcatgagaaatttccatcaaacttgaaagagaaaacattttttttttttattttatgcaggaactgggtcatcaagcaagtgtaataaggaatgtagcagagaaagttttctctgagatgggctcttccttaagctataaggttggaacaatgattgaaatacctagagctgctcttgttgcagatgaggtattgaaaattttccaagccagaagaagaaacattcataatttcccttcctgctaatagtgtccaagctaatatttttggaccaatgatgtaattagattgcaaaagaagcagagttcttctcctttggtaccaacgatctcacacaaatgacatttggctatagtagagatgatgttgggaagtttctacctatttacctctccaaaggaattttgcaaaatgacccatttgaggttagtcattcttcattgatcatcgtgcatactccccctaaatcagaactttaacaccaaataaccatttcatttaattgtaggtacttgaccaaagaggtgtgggacaactcattaaaatggccacagaaaagggtcgagcagctaggcctaatttgaaggtaattatggcaacacacctttagtttactcttttcattttagtagatttcggattgtgataatgataaataatatactcaggttggaatatgtggtgaacatggaggagagccttcttctgtagctttctttgctgaggctggacttgactatgtttcttgttcaccattcaggtcatacacacgtaaaaaaatcttttataattgactgaaaatgcttattgatattttgcatttggatactaagcaaaaaaatattttgcatttggacagggttcctattgctcggctggctgcagcccaagttgccgtctgataaagaggattgtaaactatttataggtgatttttcattgttgtaaatacaattacatatatgatatatctattctatataaagtgtgcctatataactaaaattcttggtttatgagaaattcatgggtaatttttatttttatttaataa

SEQ ID NO: 218024 - DNA, 9043 bp, Cannabis indica
caaatatagtattgtattaaaaatagtaataaaatattgatacaatcctagacaatattatacaatataatataatataatataatataatatatcaacctgaatgactattaagtttattaatcaagtatttataaattaataaataattgaataattttgactcacatgcatgcatacaaaaaaataaagtagggatttccaacgatgatccctaacaaaagcatgaaaaataattttatttgcaacatgatgcagtaaatctcgtataatgatctctactttccctaattatcatgatgaaaagaattttgtttttcttgagaaactcataaagtaaagatttggggtcaccataaattataggagaaatgaatttttgagtttagcactactataaaatagtactttagtgaattatttataatttttattaaaataaaataaaagatttaatattatattttattaataataatattacacttagaaattagttatttactttatttttatatgagaaatgctaaagagtattagtggtgtctgacaccttgttatatatatattaatattattatcggatcaactaagtatcaaattttataaatttaatataatatcgttaattaatcataaaacgacgtgtttagaagtattaaacactactaatgtacaatatcaatgttgttttctatgtatatttttgcttagcttaacttagggagagtagataaagagagagaggcgctcacttccatataggacaaatttacaaaaatctgtcatacttaatcaaactaataatcaattaattaaactgaaactttccgtcagaaaaatgtcttttaatttcaaaatccaaacaaaaaatcacgcctgcttaatttactatcttcatcccatctttgattcttcttctctctttgtctttgtcttggtcaagaaaatgcaagttcacacttcccaacgtgggcctcacacataataacaaaataataattttaccacttttaaaaaaataaaaattaattagtttaattaggagattctaaactaataatcgaatagggtcagtgggtttcggccacgtggcacatttttcgatgaagatggttaataatatatgttagtggagtggtggtgttgggtcggcgtcaaggctgctagatggggaattggcagttgggagtgttctttcaagctgagctctttagtttgtttcattaggttcaactgtgattttccttggttgaactcctcaacttaataattcttattttatatatataaaataaaaatatgagaaatactaagggatattagtggcgtttagtattcttctatatgtcaatattgttattaattagttaaattaagtatcaggtcttatgtagtttaataagaatcgctaattaatcgtaaaacgatacgtttaaaagatgtaggcactactaatacttaataacaatgctctaaagatagagagagagagggagaaagagaattaagggtcattaagctcagagttgttgttgtttgttgttgttcttattatatttattaaataataattatgtgctaaaatattaggacaatcaaatcaaacccaacacttttgttggaaattgttattatttgtcctttaatataaaatttgactcatatttcattatttgtagatgtactaaaaatttgtcctatctttcattcttttgtgattatttattatagtgaacattaaaaacataactaaaatatttgacatttttctttaattcattacatgtaagattagtaatgtatatataataacattacattcttgattggataaaattcttggttgaatacttcattgacatctttcaattaatgtggtaaatacttagtgtaaattatatgatgttattagatatttatcaaaaattataatgtgtactagtatctaatactatcacgagatattatatttctattaatataattaagtattgagtttaatatattttaatttattaattattttaaaaagaataataaattattcatcaagcgctacctcataataatattaagcaccaatgacatttaatagcattgctctctatcattttttctttagggtgaagatgccctatgaaagaagaaaatcaacaaggttgcagggatcatcaccgatccaaactaaagcttcatcttaccccaaagaaaatttagctagattatgagttaaggtgtttgttgaatggctcatatgcttgaccatggcagtggaaaaatgagataaagtgactttgatatgagagattagctctctaaaaagagagtaatcttctttgcttgattggactacatcagtaattgccttacaatcagtttcgatctggtgcaacgagaaagcttcttcatgacaccagataaaggtcttcagtggggactttacttcaagagtggttgcaccacctcctccatcataggggaaggaaacaactacaatgacttcattgttgcatttgcaaaataccctcgccaatccggctttttggctgtgagttgatgttgttgcatctgtattagaccaagagggggagggttccaatgttcctctgataatggcctttgcgctaagctactgggactgctacaatttttcacatcatagtactcctacaaaaaagctttggccaagttgagtagggcataatcctgagttggcagggttgatcgttgtgcccttgttcctattgtgccaaatgaaccaagctacacaaagaaataactccacatctcacacatataaattagaattaatagcgaaaaaattcatggaaaggtatatacaaataatgagagaaaaaagggtagaaaattgtacctttccagattttcttcacacagttgcaaaacaacaagccactagtgatggtttcaacctccttaatgcaacacgtgcataagggtgatgagttagttattttgtgtttaaccatattttcagaggttggtagagttcttgatgtagttcgataggcaaagtgcttaatttttaaaggaaggttcatatgccaactaggaagagggagataatgaggcaaatatatcatggttagggctggtggaatagctcaagtggtaaccagacttgacgaaataggtttctgatctagtaagagtactccaaataagtgtatcttcagtgggggttaagggcaaacgaatagctaaaatctcttggaaaatttgaggtggaaagtgttgttgcagtcaggctatgtctcaagacatgttatcaactatgaaaaaagctacagaatttggagggggttggaggggggagacatatcaaaaagaaggtattcaataattgggcattagtgaaatattttgtccattgtcgatctttgagatgagacctttatgcagtagttattttctccaatgaatgcttctccacacctaggagaatgaccaatggagttgtttatgtatggggttctaggatgatatatgtctgctaagactctagccactagagggtttggatttttaagtatatgccacgcttatttagccaacatcgcttgattaaagtgggtgagggacctgaagcctaaacctccatcttgtttcgatttgcacaacttttttcaactttaccaatgggttttctgcctattctgagcatttgtaccccaccagaagttagccatagtggactcaatggacttgcaaattgcgacatggatcctgaagcaagccatcgtataggtgggaattgcttggatgaccgaattcaataagatctccttaccacctttgcaggagaatttatttttctaattgttgaagtggtttcaaacattatatttaatatattgagaaactttcttttttgattgtccaaaatattgaggcattctaagatatttctcaaagaaagatcttacatgaatatcaatatagtccaaaatgagagttttatccttaatgtttgtaaggagagaaatacaagaatgattttgcaaattaatttgttagcacatggatttttcatagagaatgaaaatatcttttatggcattgcaggagctgatggtggctagatagaataagtattgtcgtcaatgaagaaaagatgagaaagagatggtgcagttctagccactttgataccaaaaaggttgccattcaattttatcaaaagctttggccatatctaatttcaagaccatctaaccctttttgccacaagttttgagcttaatggcatgagtgacttcctcagccaaaatgatattgtcaggtataagcctgccttgaaagaaggcactttggtttggactgatggtttttttttcaatacgggtttcatcctattggccaataccttagaaataattttataaaggatattactaaggctgattgggtgaaagtctttcaatatttttggctgcttgactttgggaataagggttatgagggttttattagcaacacttatgtctacattccattgaggaagtcaagagcggttgcgaccacatccatcttgaccttctgctaattttttttggtagaagttgatattgtgcccatcaatttttgggtaaactattgtaaatagatagcctaaacttaaagatgggaagaaattaacaattaagtatgtgcgaatggcatgcttcaaggtgaacataaaatgcataagtctaggattaaaggctgcttagccaactacacattcaaaactcaaagaagataaagtcatgattaaagattgtatgatcggtcactagttcaaatgtaaaagttcttatggccatacaagaacaaaacaaaaatgtgtaaaacaaaagcatgaaaaacaataaaaccaaagcctttaagtgtttgcaggtgcagatgagtccaaagtagctaggtcttgggcagaaacctcatcagtcagaacagcaagaatcctctgagtagaatcagcagctcgagcagccccatcaatagcctgcgcaataaagtcctggctggcatgtgctaccacattgttgatgataacttctctctctatttcatgagttaaattaatcttataaatatatgtatataaagtcacattcatcaatatatatgtattgttatcatgttgcttgtacatttttttttatttcatgaagagggaaaacaacataaataaaacttaatgacagcatgaaaaaaataacatattttatactaaaatttaacacacatgctgcatgttcttatcatactatccataattttagttcggcttttttctttcagatttttgaaaaatctaaaccagaaaaataaagccattaacattaacgatcttttccaatatgaaaaattgttgtgggaattttactcctcgacactaacattacataaagccatttcaattaccctttcttaaaatatatgaacacaagataatatacaactaataagaacattattatgggacacaaaataccttacacctctacgacatgatacgacatgatgtcttataattggttaacaattctatgtaatttttgttaaattaaaataaataagatccaaaattgaattatactaatggcaaaattacattacaccttataagaatgctaagcatcatagatgccctttagcatttctcaactaataattatcattttcctaccctttatgctttccaattacgatgagatattttgtagtacaagcattacttgaaagacaaacgaagcaagttttataacttataaaacatacaaaaaccagtcaactttattgcctaacttattaaatattggcacacaaagacaaccaaccacgaggcacaaaataatatatatggctactcagagctctcaacatatgttggtcggctgtcttctcaaccaaattatccagatcaaaatgacttcttttcatatgaaaccaacccatgaattccaccttccacttgggcagctcctgtccgtacctaaaaacaacaataaaatcatactcactgaattaaaaacaacttaatcctgatttatgaatggttatcaaaattcattagctatagaaatcaaatctaaattaacctgcttctataatgaattataataacagaacatgttagcagattatgctcatctctacagttaacagatttcgaaagtgtgcatacctctagccttaaagtatttgatcttaagaggtcatgagcagactgtagagaggaagcaccgagatcttggaagccttgctttactgcttgcattgtgtaaggtacgaacttcagaacagaacctttatcagcaaccttccccacaaccccttgagcaatttttagtttagctttatcacccaaatatctcgcatcgctgccttttgtcattgcttcaagggagcccattcctcgatatttttttacacggtaaccattctgggaaagcaaaatataatagttgattatcactgaacagtgtaaacagacagcttatacaaaggacatattcaacagaaatacaacagtcctggcaatgaatgtaggaatacttccacactctaacaagcacaatagattatgatgaatactagaggtacggattcatgcttatagagattattataatgtataatgataaaataataaggtaaaccatgtattagaggcatatctcatgtagaggagcatctatacatatcagtacatgtaatgatacacttcaataatctcactgtttcgtagttcaattcttactattaagaattcaataagaaattaaaattcaaacaaaatgcatataaatgtggcttataaagtttcttgttgcatgtttaccgacttcgtttacaaagtagtgaacatgaatttgctaaaaacatcagtaagcaattgaccattcaaacaaaatgaaaataaatgtggcttacaaagatttttgtggcatgtttacaaactccatttacaaattagtaaacatatcatgggagtaatttactaaagacacctaaacactgcaacctgtaacgcactcactttgtttttattactgcagtagaataagttttatcaataacaagtttcttatcaaagaaataataaagataaagccggtaacttgttgccaacttgtcacacactgatgtctccaacacacacagacgacaggcatgcatttatagcagtatttaaggagaaatagaaagctatggactaaaacctttagacacaagggggatggggtcgatgtgtaatcaaagaatatggaatatatatacaaaagtagtgaaaagcatttctactattggcacaactgtatgcgacattttttacaatacaacaggagtcatacctgatactcataagtcccaggagcctcggtgcttcctgctaaaaagcttcccatcatcacagtagatgccccaagagtcaaagccttgacaatatgtccagagtttgaaataccaccatcagcaaggacaggaacaccacattgtgaagctaaagaagcaaccttgtaaacagcagttgcctgtaaatttggggagaaaaccatgagcaatctaagtgataaatagattatagaagagcaaaaggcaacgggttacttgtaagtcaaatacatatgtaaagaataacaaagaaaatgggatatagtatgcagttgaccacgctcaaagacaaggtcttcaattgcttcaaactccaactttcgaaactccatcaccatttaccaattccatgtataatctcgggagtaaaatttcgtaaactaagcatgagccatttcataatttctgacattaaattgccatttcatatcccagtaaacaagtggtcgaaacagagtcaaatttcaattcagacaaaaagcatccaaatttacctaacaaaagttctcgggaaacaaaaattaacatacaaccaagtaagtcctaaggactggaactcacagcatgagagcaagccatttcttattattataacaagagttttataacaagcatcacactattgtataaaaggaacaatacctgtcctctgccaacggcacagacctcctgtgtagtacagatagacccagaccccataccaatcctcaacccatcaacaccagcttgaatcagattctgggcctggctaatggtcaccacattcccaccaatcacatccaaccccgggtacctcaatttgatatgctttatcaaatcaatttggtaaatggagttcccctgagagctatctatcaccacaacattgatccccgccttcaccaaatgctccaatctctccttatcctgctctctggtcccgatggccgcacctaccatccacttcccatcgctacccaacgtcccagaccccagcttcgggtaccctttgatcctatctacctcttctttcgtcgcaaaatcaataacctcatcgccattcacaatcgccaccgcatctctcctcttctcatccaaatacgacgcaagtctatccaagtcaaaatctgacgacactgaatcggacgaattcgacatatagtcgtaaatcttcacttctttgtccggcaacttctcccaatcagacttggacacataccctacaagtttcgaccttccggcaccggactcagtgaccaagatatatggcttggagtcaaaatcatcttcggagttgattcgatcggaagccgacctgaaaacaggattcgatagaatcggaacgcgacgtgccttggcggccatcactagggaagcttgatcaacggagttcagattggagtggatgatgccaataccaccaagggcggccatagcaatggccatgtgtgactcggttacggtgtccattggggatgagacacatgggatattgagagggatgttacggctgagtcgggtggcgagttggacagaatcagtagggaagtcgatgtagtgagggagaaagatgacatcgtcgtaggtgtaggagtatccctggctgaagagcttgttggcagcgaacccatcttcgaggtcagccatggtggcgtagcgg

SEQ ID NO: 218025 - DNA, 7089 bp, Cannabis indica
agagagagagagatgaaatggtagggttgtggggtttagtctcgcaacgcaggagaagaagaaaagaagaaaaagaaaaaaaaaaagagaaaaaagaaagaagaggaaaaaaaaaagaaaaaagaaaataatatatttttttataattttatttattttttataatttttttaaatatttttttataatatttttaataagtacgtggaccactaaaaaatttgtcatgtgcacatttgtgtagacgtggatagtcaaatgtggtacttaattgaaatttttggatagaagtgtgtagagcaaaatggaacttgaatttagtaagttttgccgtcaaaattttaatttttgtgattaagtattaaaaatttgaaattcccgccaatattcttatgcataatttaatatataaaaaaaatcacataaaatttaatttttggtttaaaaaaaataaacgagttgacccgaccaacccaaatttgcatactacgaacttgcgagccccaattatttcacggatagagtttgggtataactttttaaacccgaaactcaatatgtttaatcttatttatgagtttatatatcacaagatgaatttggacatgatcgcggtcggtattcagtattaggaggtaggactgaatgcgcgcatgaaacactccctcactcaactaatcaaatcttcttcttctaataacaataataataaagaaaaacagactaaaatttaataacgtaattaccatcgaaataaaataagagagctttaatggttgaaattcatatttcaaagccaaacttccaaaataaataaataaataaataaataaataaataaaaatggtttcttgaaataaattggaagatatatatattgcagttgcatcatcgaaccaaaaatggaggccccctactaccctgcttcttcccagcacttaaacccgagccctagcttttgtcttttactctaatggcatcttcttccttctctctcaggcattttcctgcctctctctactctgacttcaccgacgttgtaagcctcttctcacactctaattttgttttttgtttgcctaaatagaaaatgaaaatgtaggaacaaaccaatgttatgctgcgcaatgtcatgctactgtgtatatacataggagttgcattcttagtatagttattatacaagtggtttaatggtttatttattttgctttactgaataaaatgtttattattgattgaaggaaattggaggatagaaaaaaaatgaaaaaagtattgacttccagactgagaacttttgtttcagtatttgtttgttgtgtatattgtagaatttgatcgtctgatttcaattttgggttggtgttttttaagggtttaactaccgggcgattttcaaccaattttgggaatttggtgttttgcaaacctgcatcactaaagagaaatcagctgttgccttgggcgaaattcgaattgaattgttcaattgatagagagatggacttgagcacttcaactttgatcgatggtgtttcagattccttaaatggtttgtatgtggttcttgtgtgatggtcctgcagtcatgctcagtatttgttttgtctagtttttgctcttttaaactgttatatatataatccataacagatattgagctgaaagagccgagcatatcaactatgctaatgaattttggagacaagtttgatccttatgaagcaatcagtactccactgtatcaaacagccacttttaagcaggtatatctaaaagagtagaaaattcattattttttattttcatataattcttactttctaagcttcattgtaacttgattgttctgtgccttgagtgcagccttcagcaacagaaaatggtccttatgattatactagaagtggaaatcctacacgagatgttcttgaaaggtctgatttcttttggtactaatacgagtcgaaataattgtggttgtgatcatctcaaataatgctactttttcctttttctgggagttgttttatgctgagctttattctattgtatagccttttggccaagctcgataaagcagatcgtgctctttgcttcactagcggaatggctgctctgtcagctgtagcccatcttgttggaactggtacatccctccccccctctttttccgttggtatcaaaagcatgtcaattctttatcaattttcaaaatattaactgcgaaaaacgctaatatgtatgttccaataaatttgacatgtttttaatgattaatgtagcacagtggatatattattgtctaacatatgagcttgatttggttcctttgctttatataacaaatttaccatgaagaggtatctcttgggctgtggatggtttataatagactagtttatcgtttatgcctttatggcccttggtggaatttgtagctgtcttattgaacttttttcttaagatataataatgtgattttaggtgaagagattgttgctggagatgacatttatggtggttctgataggttgctgtccaaagtaattccaaagacaggggtcgtggtgaagtaagtgcagctcactttccaaatatattatgcagctcaagcctcagagtaaaatctgaaagtatcatgcttataatgtgtagacgagtagatacaactaatttagatgaaatagcatctgcaattggtccccgcacaaagcttgtctggctggagagtcctacaaatcctcgacaaatggtttctaatattcgtgtaagatatctggctactatatttcccagtccttttattttcattcttttttaatgttacttttggtaaatgcttaaaagaaacagagaagtaaaatcaatgcccaaatatggcacttttattcttggcattatatgtatctgggtttgtcattctcaaaaggctgatatataattactcggatatctattgtaacccaggtagagaacaatcttttccggctgtcagatattgcttagacattaaacttgttttttatagaatcaataaaaagaattaagtgcagttattcagttctttgttgccaaaaatgtcatatgttttttaaaagtgcagttatatttccttatttattttgtgcatgttcaagaaatagctaaaatggctcattctcatgatgctcttgtcttggtggataatagtataatgtcatatgctttaaaaatgcagtgttattcttctttaattattttgtgcatgttcaggaaatagctaaaatggctcatgctcatgatgctcttgtcttggtggataatagtataatgtcccctgtactgtcacaacctctgaaacttggagctggtaccaatacaaactgtgaactttagattctacaaattactcttttttcttttcctctttaaaattgctcaatcctgatgcattcatctttccttcagacattgttatgcattcagctaccaagttcattgctgggcacagtgatgtgatggcaggtgtactagctgtaagaggggaaaggttatgcatggacattctttactgttaactttatgatatgttttaacatgtccccaaatcgttattataatttttttctttttcagattagcaaaagagctgtactttctacaaaatgcagaagggtctgggttggctccatttgattgctggctctgcttacgaggaattaagacaatggcattacgaattgagaagcagcaggtaaacacttcatgcttttgacactataattttctaataatcttcacgcttttctgacttattaagatcataactaattaatgtttggttcttgtagttatgaggtacagcctcattgatgatatacagtatcttgaattcacttaacttattcaaaatgatatttgtaactctgttaaatgtgtacaagaatttgtgcagtgcatcttgtgtaagtttgaattgcgttagttgttgatgctttttacttctaacttgacacgagattcttcggatgcaaatatctgctgtaccatctgtgctctttcttacattaatttttaagttgtaatattaatagttttgtgggagtactctactttatattttaatgcatttgttcctttggcagagtaatgcacaaaggattgctgagtttctggcatcccatccacgggtgaagaaagttaactatgcaggccttgttgatcatcctggacatgctttgcatttttctcaggtagtagcatcagatgtaacctgaaattgtttctgcaatatatcaaactaatttagtccaatacttaattggatatgtttttcaggcgacgggtgcaggatctgtgttgagcttcttgactggctcagttgcactatcaaagcatattgttgaaactaccaagtacttcagcatagctgtcagttttggtatgtattccttttgtcacatatgatggagcaaaggaacgtttatttctttattttttctccttataaatgtctaatcctcatgcgattcaagggtaccacactttccttgtattgttattccatcaccatcagtacaaatatcattccgtaaaacaaaattatggttgagctaaggaagatttagctaaggtttgagattgattcaggttcaaggcattttcatcatgcgaaataaagcaaattcctcaggtttagtatatggaaaaacttaaaacacttatttgaaacctaacttatgcattttagaacaattttgctggggcacacactttagtcgaggtgcttgacatgattgagacagagcggggagacgaggcgtgtttgaaaatagtggatataacaatttatactgtctatagttccattccaagcacaatacttcatttattttttaaaatttagctcttgctcttgctcatatatgaacctatgtttatttaaggtcaaactatgttttcaaaatttaatgagcaattacttaaagatgaataaaatttcggctttgagtttgatatatgctaatttcttgaaaattttgctcaccttcagtacttacaatgtagttgccatctgttaacaggtagtgtgaagtctctcataagcctgccctgcttcatgtctcatgcaagcataccagccgaagtgcgccaggcccgaggtctaacggaagatcttgttcgtatatctgttgggattgaagatgtgaatgatctgattgctgatttagaccatgcactcagaactggacctgcatgacaatcttcagtttctggtccgacggttaaagaacaatgacttgcatctgccgcaaaatgcgttcgaatatgatgcaatttatggaagatgggttttagcagcaattctttgtatgatgttttgcagtcatctcccaatttatttttgtagctttggatgacatagcaaatagttttgagtgagattcattttgaaccgacttcatggcttccctaatgtgtgtttatatatgttatcttgctataagcttccatcctaaaaaatatttcctagtcttttgttggtttttagttgcagacttcattattttatattattgttaggtcccccagcatttttaattaatcaattaggtttgaaaagttgattatttattagtttaatcccctatcttttcaaattgtagcaattagctttgaaaagttgattttttactctaatattgtgtcaaattgtgatgcaaatttagtcacataacaaaaagtaatccaaatttaaattataatatagcatgatgtaaaatttgcattataataagtataatgcttttatatttaccaatatgccatttattaaattttagttaacatgcttctttacattaaataacttgcattattattacatatgatatacctttaaattattattattattactattttatattcttaataatttattaagtgatcattaaatgacattaaattttatatcaagatttataattatccattggagcgcaataataaaaattgatataaaaaactactttttgtgctaaatatagttctaatttttatatctctcattgaaaataatcttagttattaaatattagagtttcgattaagaagcgtcaaagataaaataaataaaacaaaaaacaaagaaaaaaaaacgaaaatgataaattttccaatacgttaaattacttttgtgctttcaaaaaaaaatattacgttttttggagatataataataattaagaatttattgtaaataattaaataaccaagatttgggcataatacaccttcttaaagtgaccttataattaaaaatatttttcatattaggcacattacaaaaatatgctattattttcttaacctctctaaattacccttctcataacctcatctatctctctttaactttgcaacccaaaactaaagactcctaatactttcagcctagttcaccggcgcgacacccctggcactctggcagctcgaccacgacaaagcaaagcccgacctgatgctacccatttctttgtcattcgctcactcctctttttctctccttttcagctatagcaatgaaaattggcatctccaaaggtaggtccaaccagaaacagtcatgggctatggccaagataactgtggtatagtccctctaaatgaaaaggtcttaagtcgagtcttcagggaagctagtcgtcgtttggaaagaagttcctttaggctagcttgttcatctggaagaagttttatgaaaagttggtcatcgtccgaaaatgagtttcggaagctagcttgtccatctggaagaagtcccatgaaactagttgttccctccaaaaagggtttcggatagtttgttcagtaggctttgtgcctattagggacgtccttccagattgcgcttcatcagtttgggacatctgttcaggaagtgtgatacatgtctggagagagctcgatgcctaatgctgacttagagatctcattgtaagtagggtcggccctgaaaaaataaaggcctaagacaatataaaattttgggccccttaataaataaaaaaattaacttaaaaaattaggagaattatccca

SEQ ID NO: 218026 - DNA, 4187 bp, Cannabis indica
acttctaaattgataactaatcagattgtaatgagttttatttagggcataaaacccaacagatctgccttagcaagccaaggatccatcaaaatactaactgagaggccatcaccaacactttttcgcacccctgccaccaccaagtctctagcttcaaagatactgcgccagacgaaactcggattagaaccaatctctgctgtaagaaaagaaccagtaggaaagtatcgagcctttaaaatacgtgtagccagcgacgaaggatgagtgaataaacgccaaccttgtttaccaaggagtgccaaattaaaatcacaaaggcttcaaaaccccaatcctccttcattcttgtgtttacacaatcttttccaactcacccccttttgttgaggcttattgaattccaccaaaacttagacgtaattttttgcaactctttacaagtttcaatggaaagcaaaaacacactcatagcataatttggaagagattgagcaaccgttttaagaagaacctctttccccgcttgagagagaaggcgtccctcccaactctgaattctctttctcaacttatcttttaaaaacccagaattgcagtcttctttcttcccatggtattcggcaaacccaagtaagtggtgtgtgatcatcagcttcaaaaatgccgtcaaaccacagatgtagtccctcatatgctcctctgtattagaactaaaaaacacagaagatttatcaaaattaatcttttgacccgaagcattttcaaacacttgcagcaacaaaagcacattagatacctcacgatcattagctttgcagtaaacatagctatcatcggcgaaaagcatgtacgacactcttggagctcctctagcaacactacaaccatgaatcaaaccaaccgtctcataatgccgaataagagcaaataagccttctcaacacaagataaacaagtagagggataatggatccccctgtctaaccccacgactcggaacaataggtcccaactcacccacctcccatcaaaacccatacgcaacaaaattgcctaacgatacccccactcaagcctgtcataagctttactcatgtccaacttgagagccatgaaaccatctttaccttttgtctttcgtttaagataatgcataatctcaaacaaaacaaggatattatatgagatcaatcttccaggaaggaacgcgctctgagtatccgagatgacaataggaagaaccaccttaagacgattagccaaaaccttagaaacaaccttataaataacattacacatcgaaatgggacggagatcacccataacagctggttgtttctttttaggaattagaacaatattagtgtggttgatactcaaaggaagggagcccgtaagagaaaaatcctgcacttgacggacaatatcattcttagcaacattccaacattttttaaagaagcatgaagtcatcccgttaggatcgggagacttgtccgggtgcatttggaagagagcagccttcacttcctcctctgtaactgggcgtaacaactcaacattctgaggagcagtaatattggggtggatacagttgataacatcaagagaatttgtaccagaggcagtaaacaaatccttaaagtagttaaccataactcgatccaatccatcatcccaactagtccatacaccattggagtcctgaagcttaataataagattactgcgtcttcgagccgatgcagaagcatgaaagaacttactgttattatccccaacctgtagccataattgtttcgacctttgcctccaaaagacttcacgttgagtgaggatttcttcaaatttaccttcggctgcccaaaaattattggaaaaaatagtatctctaccatgcttccagagatttatttcggctttgcactccttcaacctttttttgaaatcacccgaataagcttcaccccaatcaagcaaaatctcaccacaatatttaatcttttgctgaacattgaactcagaattaaaatttcaacaatctttaatcacttgatgacaaagaagttctcttagccaacaattctcaaaacgaaacttcttcctcataacaaaagaattattaaccactaaatcaagaaaaatggggcaatgatcggaagtggaaagctctaaatatacagtttagcaaaagaaaaaagagctaaccaattttgagtacatagagcccgatccagtctaacctctatccaatgatcagtacctcttcctttttcccaaataaaaggatgcccaataagcttgatatcctgtagctcacaatcactaactgcttgttgaaatctccgtaataaccaatccgagtaattattaccacctctcttatcctcttgagacaaaacattattcatatctcccatgatacaccaaggcaaatctaaatccaaagccaaacttctcatttgatcccatgtacagcgacgttggccacggttaggttcaccataaagcccactaaagcgccacttctcctttccctccactgtaatttctatgtcaatataagaatgagaaaaacccaacagtcgggcttcctcgggcttcctcctcatttttccatagaaagtccaaccccccactcttaccttgaggttcaatagtaatgacaccatgaaaacccaacaacaacctcactttttctaatttatcttttttactaatagtttgggtctcttttagataacaaaatcctttaagaattgtaaagtccatgggttctcaagcccatggcaattccaaattaaaaaactcataatcctcggtgggtctggaaaccaacacccaccttgttcaagttttttggcccattaacaccattaccattagtaatgtcttcagtaaaaacttcctccacatcactatccacttccccacttgggcctaactcatgagagacaaaagagttaacatccaaccccatttgaccaacacgtgaagcaccaatcccagtcacttcaacttcaattgttttccttttagtatcagtaataactatagtatcttgagtcaactcatcatgttgactatcagtatctaatcccccaacagcctccttaccattaaacccactattatgggcaaaagaaggttgacccacgatcccctccactaacataggaacataatgattgtttccaagcacctccgttgttcttgtactatcatcaccgctgaccttctcatcgaaaaaatcttgaaatgaccgcaaccattttgagcccatcgtagtattcttcctccttggtgtcgcctttatccatatcccatatggtttcacaatacgatccttcggagtatcaaacagacgagggcgaaatccttcggaatgtcccatgattctgcatataaaatagaatgtaggaacgtgttcatacttgaagttaacccaaaactcctctccagctaatgtgcaaatcttctttcgtcgtttgagaggttttgaaacatccaaagtaacttggatacgaaggtaatctctccataaacccataaaattcttttggtctgcctccacaaagttgccaatataatttcccaggcctttgcacacttgagcaattttaaaccccaattgtacatcatggagttgaatccacatatcaacatgggataggggaatgagtttagggtcttctcccttctttaacctttgaaaaactaggaggaaattattaaacgtccaagaacttttttccatgactcgttgaatatccacctcgtgataaaactaaaacaagaaccggtttgaatcaagctatttgacatacatacctttacccggttgccataacgaagctatgagatgaggcattgcatcgaaatctatattacgttcagtcaagaaacgacccactaagcaccatcggtcgtcgatggctaaatccacaaccttatcttcaccgtacgccagcgcctcatcttcctcctttgccagaatcaaataaattatactgttaactctactagacaatgccataatcaatatagtacaagacaaaacactccaaagacaaaacagaggaaaaaacctcggacaaaacaaaacatgtcaaaagacaaaactcaataagtaggcgaagataaattgatagcttgtaacttaaatttagaaaaaaaaaaaa

SEQ ID NO: 218027 - DNA, 6020 bp, Cannabis indica
cattgatgctatttattttttttaaatcaaaaattgaagctaaaaagatattgtagttaaaaattaggatatatataaaataataaagtgtgagatcataattatagcctttttaaagagtgctatacattagagtgttttaagaagtaagagtgtcaaaaataatgtagaagagagataaaataaaatattatatttttaacattcttaaaggatactactattggtgatgctcttattaaacgaggaaataatatataattttcaatttttggtggctatgtggtttttagatagaaaagtttaattttacaaataagaaataaaacacatttttagtgttttgaaatataaatttcatgcactcatgattaaagagttctgatttggtgtaatgagatttttttttttgaaagaacaccaagttcattaaacaacggaaagataatcgggaatcacagagggaactccctccccttgcacaaagccagcattatggctagacaatctagcactttttgctaactcatcaacaaaaccattactacttggactaatataaaagaaacaacaaactctaaataacttaattaagtctaagataaccaaagaaacattaaagaaactccaatcaagtgggcattttcctgctgcaaaagcctcaaccaccatcttagcatccgaaaggacatgaatttcctcccagccacattgtctagcatgttgcagagccaacagtaaggcagaggtttcagcttccatggccgaacccgccttactttgacaagagttgtgaatccagtggcccgattctgtgtcaataagaacttcccccaaaccagccattcccccacaccaggatgcgtctgtcataatcacgtatcgacacgggctagctataccactgtgtagagtgtatgtcggggccggctttaacttatgcatcagagcattaatactttcagatttcccatgtactcttacaaaatttctctgctgccagataagagaaaatacacaaccagcatagaccaacattctatttcttgaattaaccgaaattgagattagattttcttatatttgggccaggtttgctcctggaattgagtgtatcagccaaggctcaggacccgcgaaccagattaaagaagaaggtttgggagttatgcaaaaagttttcaagaatgtggattttctaatacattttttttcttttgacaaattttctaatacattttttagcactttgttttaaactttttcaattctcactcttttcaaacgtttttaatttttttttattttattctttgagaaaacagtctcatttaaacctcaagagtaaacctaataagaaaaattaaggttaagaatctgatctgatccaatttaattagtaattgaattcagaaaatcatcatccaaccaaatccaattagagctcaaaattcaatccaatccagtcacttattgaattgaatcgatttttaattggatatccagttacacgcctaatatttaatatcaacttaaaaatacggaaaaaatacagaaaaataaaatatcaccttttatttaagtttaatacttcataaatatattattcttacaagtttaatgcaactaaaagtttaaaataaacaacactaccaagtaataaaataatattataaaaataaatacacaaaacaactaattgttacaaatttaacaaaaaaaaaagcaaccactataaaaaatcaaaaaaaaaaatattttttttttttttaatatttcttataatatataaataaatgtaaacaatcttttttttttgaatatatataaatgtaattagatttgatcagtgtttaattggattttgggactgacatccaataaccgatccaatccaattagaattcaacttttgacatctaatccaattgtaattagatatctaatttttcgtaattagattaggttcaattggattggattagatgtttctcaccaaagatggaaaaaaagtgcaagacaatatcattaatcataaaaatctgtctgcaaagcaacatttgcagaagcaatacattctggatagccaggccaccaaacatattgatatttaaggaaaaagctaatttagctaaagtggagccacactattagccgtcctaggacaatataataaaatagttaccataaacaagaatatctctaacaatgtaacttagataagactgatcaaccttgttatgaataacaacattgataacaaaaagacagccagagtctaccaccatcctctggtaaccaagatgacatgcaagcatgattccaatatatacccatggccttagcaacatcaggagagaaacaaccatgccaagaccaagtactagaagctaggacaaaaccagtatcatcatgaaataccgcccaaccccaggtacttacccaacttagatttcaaacatacatcataattgattttcaccacctcagaaggtggtttagaccaactaacaatcgacatagactcaagagaaataccatgtgtaggtgtaagattattaatagatgagtaccactgtagataatccatactccagtcatacaaaaggtcaccattcacacaaaatttttcgttcacccattcattttgtcgataccgaattctccaaagacaaacaatgagtttttcaaaataaggcaatagaaaaacatcaagacaagcataaaagaactcatagatatcccaaccaggaaaattaggtacttgaagatggaaggaaatgacctcccagataggagaaagcttatcacaacctcaaacaccatgcaaagttgtctcgaggccttttaaacaaaagaggcaagtaacaactgcatggatagcacactgactcagattagcataagttggtatccagttatgggcaaccttccaaaaaaaatgtttgacttgttgagtgtgcaaccaaagtttcacattggctagaattgggaatgatcatgggtatataaaggtggacaatatctccattggtatgaggccttttaggcaggtgcttaaaaacaaatttgtgagggcttaggctgaaagcaaataatatcataccaatgtggagatacatgatgttcgacgtgatcctaacaagtagtatcagagccaattcctaaaattagccaatgtgaatgaatcctcaaaatgtcaaacaaaggagatgaacctcagtaatctcatgattagatctgtgaatgtgctttagtagacagacggtgtgctctggaggagttggcttgaggaaaaagcaagaactttcaaggtagagtggacggagatggaagatcgtttgaggggaggcaaggtggttctttgtttgaggggaggattgttgggtgtacaaataaagtcccacattggctagaaatggaaaggatcatgggtatataaggatagaaaatatctccattggtatgaggccttttgggaaagtacccaaaacaaatctatgagggcttaggctcaaagcggacaatatcataccaatgtagagatacatagtgtccgacgtcttaacatgaccttcccatattttaaatttatttttacgatatgaattatataaaaccaatatttcgattcgatttcattatacataatcaaatagatatagtttggagttcttattaccttgctctttaataaaatcattatttaattttaattaattcaaaaaatattattatttttaaataatttttttaagctgatattattaaaacagatttagtcaaaagttagagattttctaccattaaaatgtgaattggtttgtgacccaaataataataataagcataaaatgatgttaatattttatcaaatcttaatatactttgacatgtagattatgctgcgaccttttattttaacttatgtatttgtaaaattatttagttattataacatttgaaaaaaaatgtatatatataacctaataaaaaaaactaaatattcgtgccttgcacgaaacattatcgtatatataggtatcattcttgttttgtttcatctaacaatagaatgtaatcagtttgttcatcataattactactattataaatagaactcaaagattagcatataattaattatacttgaaccgaaatgataagtgttggtagtatttataggctcaagataaagattctaagtcggtggctgcaaccgttaagttgttaagttagttacgacttaacaaacttaacaaactctttgtaatagaatctccacgtcagcataagatagggtgcttccgaatgagacatacgcttcttgaacaacggactaaagcaaaagctgaatggacttccaaataggaaaagagctagctggagtcgactatccggaatacccttccaagaggaacaacgtactaactatccagaactcctttacggaggaggactagcttctgtaaagactacacccaaagtggacatgatagacatccgcgaacgtacttccggatgacaactatcattctacgagacttcttctggatggacaagtagctattcgggaatatacttccaggagacaactaactttccattatttagataggtttatggagatcttttcatttaaaggaattatatcacaattaactcacctagtactcatggatcctaccgctcgcaaaaactcttacagattttcacaaataagaatatttttaatccattgaattattttatattatttacttttattaaaatataaattttgaaatttattttgttgagttattagtttttcaatagagtttagttattatattcttcacaagttttgattttttgtttgagttttgattgcttacatatagttcacagataagttgttcttacgttttctcttttcaatatcaaaatatatgtatatatcaataatcttataaatattattatatggcttactatatcatttgttaattttattgattttgtgggtattttattttggtaaagtttggagggcttgttgctgtttatagttatattgtctaaatttttggtgacaatttattttagtaattgttctttgattagtcaattgatctttgatgtctatttggtaaattcttaaaatgattcatatcacttatgaaaaaaaaaaatctgaagctgtaacttatttttgtgtgagacctataacatctcacttcattatcatttctgtcatcctcaatggaaaatgacacaaaatgagacttggtcaaatacaacgcaaaatatcaacaccaattaattggtagagatggaatttgactagaggacacttattaattttgtcatgaattttatctagtgataaacgtttgacaattcaattcgaaagaaactcatcaaaaaatgcaaggtcttaataattagggtctggaatattgacttttgtagttataagtgatttgtccttattgtaagagaaatattaaaaagtattgttggtgtttattacttttgtgaagtataatattactattggtgtaattcaatatccgattttacttactttactttaataaatattataaaaattgttaactaattataaggcaacactttatcataacaatactctctaaaggataggttagtgggtttcatttgaaaaataaccaaatattttttatgtaaatactaggaagtttgggatccttcttacacatatatgaagatgagaaatgctaaaggacattagtggtgcctagcaccttcctatgcgtcaatatcgctattggtccaactaagtatcgagtctcatatactttaatataatagcttttagggagtatcgctagccaatcgcaacacgacatgtcaagaaggtgctagacatcattagtgctatgaagattgagcaagctattaatgttacataccctactatagtgtccaccactagcctatgttgcctgttaggttatttttagtagtaattttagattaagtttagtatattt

SEQ ID NO: 218028 - DNA, 7075 bp, Cannabis indica
gtgaaatattcatgagcttaattaatgtatcaacatataatgaagacccattcaaattaaattgaaccttaagtagtatattctgttcgagacactatatatattccaaatttctctctagctaatataaatacatattaattaatgaaaaactagaacaaattttctctggaaacaaagtatacgtaattaaactttccaactagtttgaaatatatcaaaaaccaaatagctaaacaaaacccacaagcaaatatataatattgtcacaattaaaacaaagaaaagaaatgactggagttggaatgaaactttacaacataccaaagttgttttcctccctcgtgattagtactaagataacatacccaaaaagaaaaggaaaatctcacaatttccctaatggaatgtcccaaaaattctgtatggtaatgaagagacagtcaccaaaccacttaagaaaaaagaaagaagagatctgtaattaagtaataagattctccattcaaaaaaaaaaaaacgtaataagattctttgcataagtgagttacgtgtacgtacgttatttggtatagtcaatgagttgatcagacatggacatgtagcttcctggtggtagattgtactgtaaaggagattatctgcagaaaataaaattcttccagtattattatatatatatatatatctctcacaaaattactttatattcaaacattcttatttcttactagtctagtagtaatgaagagaagaaaagtaatagtcaacgttaattttattttgtaagaatgtgtatagttaaagagtatatgataaggtgcatatgggttccattttattttattttattttatttccacgtattatcaataatctcacacaaatataattccccaaaaaaaaacgactcacccacattattattattattattattagcctcacaataaggagcacgtgatactatatatcctccgcgttgagtaaataatgtgtattaggataaaaacaaattaattaaagtactgtaataggaatgggacaacccaacgactccaagagtagactgaccagtttcttcttacactttatcataaattccacaatattcatctgtagtacttttaaacctcacaaatgatgctcggccgcgttactactactactaattattattaaaccatttagttttgtcaaaaatgaaaaataaaaaagtttaatataatatatataatttaacatatatatttatattttttagtggtaggaaatcaatacccatgttttaagataaatatgatatgacaatacatggcatctactattaactttaaaattatttaaattattattattccgaaggccaagtcttttttgtaaagacaaatattaattaaaaccaaaaagaaattcaaaacacatatacttctcttctctcccaataaaatcatagacatgacaagtcgtccctcaagtttcattcgttattttatgaacaactaatattaacaaaaatataagcaaattatatatatttattaattattgactgaaaaaggaacctctcgtgtctacttcttatcttttgaaatattatcaagttatgatatgaatttttttatttaattacaatatataatttgagactcaaatctaaaatttttaatacacgctaacctcaaatgacatcatcgaatgattcttcatcaaagaagattcaaccttctaagaattaatgtatatttctcacttacaaaaatgtttttttattttattttattttttaaaaatctccagcatgtggtctcaaaacacaaacatatgtttggtggatttagatgattattatactcttgatgagtaaagcatactttcaaactaaggcgggcaattgtgttcgactcattattaatcataccgaaatacgactcgtataagtcgtttatgtaaagagaaatgctaaaaaaccactagtatctagtaccatccaatgtataatattgctatagataaatttaagtataactagtatggaatatataataatttgtaaaacactactgatacctaataataataattttatgtaaatgatcaatttttatttcagttaacttattaacacatttatctgctggcacaagccatttaacatgtttactacatattaaactaattgaatatagtttacatctaataatttaatatttctaaaatttgatatttatagttattttttaagtaaccctcaatagttaattacccattaagtgttgcatatatatacatacacatatatgtaaattctactctcttaaatttgataaatatatatttctacctaatagttagttacactacaagaaatgtcacttttgtcaatacatttttgtgctggcaaaagttggtattgcgctagtaaaatagaattcacttgtgatgtgttggcaaaaggggattggcaaatcaatgttggtattagaacttttgccagcagaaaataaaaaacgctgacaaaaataacttttcccagcgcgtaaatgtgctggtaaaaattagattttagccaatacaaatgtacgctggtaaaactttgatctctttgccagcgtaatttgtgaaatgcgctagtaaaaattacttttaccaacgcactagcgaactatactagtaaaagtgacattttagattattgagttagttttacaacagtttgtagccacttgtattctactgagtatatataaatactcattcaatcaaataaataagttaagcatttagcttaaacattcatacatacactctatgttctctctttttcttcccctattctcattcttcatggtattagagccaattcactaacgtcaatgacttcctccggtgaccactcgtctcaagctggacccaccaatcctacaattgtaccgactcagtcctctttgacagaacaattatggaatcctttttagaattctctcactgtttcttttactttaaaaatcgatcgcacaaacttcctctcttggaaatttcagctcatacctactgtcataggtcatgatcttaatgaattgctcttcagtaattcgactcctcctttaaatctcatcaatggcgatgataaatcctctgttcttgcagcggcgtcgcaaagatcagatattactgtcctggctccgatctttaatggtcaaagaaatcttggtcacagttgcttgctattcaacattgaattttgtttggaaagctttggaacagaagttctcaagtcaatcgaaagcaaagcttcttcaacttaaaggtcagttgataaatcttcaaaaaggtagcttgtctatttctgactatgttgacaagattaaatctgtgtttgattcattggctattgctggacatcctgcaaatgtttttaacttgattttgcatctacttaatagacttggtaccgagtttgattctattgtatcaagtattactcttgaagtgaagttctctctcttgaggaagttcaggctctcttgatgtctcatgaatcaagattgaaagacaggctactgttatggatcttttaacaaggatggcagctgacctctcaatgggatcaagaaatggaccatatagaccttttaatggtttaggaagaggaaatggctcaggaaatgtctcaagatttcctaatcaaggtaatggatttcgacctgttaacaacaacaaattacttgtcaagtctgtatgtgatttgagcatactactgcaacctgtcattataggtttgacagaaattgggttactccaaaggcttccacaactcagcctcaagctaacctcactgagcagtgtcttgactatgatcctcaggcatttatagctcaaactttgctagattttagtgatgatgttggctggtatgtggatactggagcaaccaatcatatagcaatttctatggataatcttgattctgctactccttattttgaccatgaaactgttactattgctaatggtaagaaactggtgatttccaacattattacaaccactcttccctccaattcttcttctttgaatttaaattccattttacaagtttccttaatcactaaaaacttagtcagtgtatccaagcttactaatgacaatgatattttcttagaatttcagaaaacatgttgttttgttaaggacaaggaaacaggggcagtcttactcaaaggaaaaattaaggatggcctctatcttttaggagatgatagctcgagtctttccaatacaacattacaagtccatcttgtaactacaaaaatttagtccatgtccactttttttcattctcattcttgtaataagtgttacactcaaacttataattcaatttctgcttgtactaaatagaataataataaatcctttcttttcttaattagatgtctctaatcctactatatatttttcaaattctgttacctacattaatgtttggcataacaaacatggttatcctgcacctaatatcctaagcaagatcttaactaaaaaaatataccacactctcttaagaatttgaatttttgcaaagcttatcaattaggtaaaaatcataggctgccatttcccttatctcaaactcgagctactcaaccccttgcacttgtgcataataatttatgatgtccctcccacatttcttctaaagtaaactataaatactatattgtttttgtggatgattatagtaggttctgttggatctttcctcttaccttaaaatctcaagtttttgagtatttatcaagttcagaagtcttgcaaaaaaatagtttaatttacctatcaaagttgttcaagaagatgggggaggggaatatggccatttaaaagattattatgtgaatctcttgaatttattttatgaattaatgtagttgttcaaaaaaaatttcttctctttattcaatttcatacaatctgttttaattctgcaattatttactgacaatctataatcgtaatttatgaattcaaatcaaaattctggaatgtgagatttgagtatgctctgattattttggatgtaaattgatttagaatgaaaatgcctaggttgtttgtatgattttattagttggtatgtttaatgtcatctttatgattaaacttaccataggaatatagagagttttcacataaatttggtttataagtcttggccagattataaacttttgactcaacttatcaattgatcaatagaaagaagagaaattgagtaattacattataaagtaaaataaagaataattgggaatcataataatctttgtctttattattgttatttctttaatactttattttctatccaacaacttttattaattaaatagaactaagtaattaatggattgataattgataatcaattctcgtgggaatattactttatttatcattatattattacttatttcgattgcgtatacttacatattaaattttacatatttttatgctgtaaaatatggtcacgtaggataattttttagtgacctgtattgtcatgtgggaaaaattaggacttaacgaggttggacagacgacacctcaaaaatgtaaacgaaacagtattttggagggttttcccaccaaaatatgaggttggataattttttacaagtaaattaatagttgagggggtttcaccacaaattactctttttataatatgtattaaattaaaatgtgtaagattcaacattgactaataataatatatcacttcttttagtgcttgatatatacattttttatataaatatttatatgtgctggttgtatctcatttttaatcataacttgcatgtcgaatttgttatgctcctaaacggaggtgatgacaaagcaatgtttaaaagaaaaaaaaattgcaaaaaaaaaaacttattgtaagcatctttgaacaaaaaagcagtactatttcatattctgttcgaactgcaagtggcactaatatatataatgtgaaaaaatatatgataattaatgtataattctaaaggcttacaattataatggagaaaaaattctatacaacaaacaggtcaatccgtagttgagtaagaattccattttatcatcttttatgaatgtcaacaaaaacgaaatgaagtaacaaaccaaaaaaggcaaatgaaaacaaataaaagtaaaatagttacttctccaaatagagtactaatattgtgcatgccaattcactaattaatttaattatcttatgtctatatatatatatatataagcacactagcaatattaagataatcgtttctttatgttaattgtattacagcttatatatatatttattaattaaatatgaatatatacttaggatacatgatctgatcatgatctctttcggaataaaattttcacatgcatgtatgtaccgtcagtgatgactttcaataaatcgagttttaaatattcacacaattaattataaatagtagttctctctgtaaagtacacaacagaagtagtacttcaaccaattcagggaaagggtaaagttaattatttacttgaaactaaagccattgagttgagtgatatttcgaacactatatattaggataatttaagtactatatattgagatccaaaaaagaatactaacttgacatatgcaataaatatttttacatgggactacgtaacattacggccggacccctgaattaacaaataatttgatttatcttaccaaaagaaaaaaaaattaacatgatttataatataataaaaccatttaaatgcaatattacaagctagtgaagatgaaatgatatcatattaattcttgtttaaaattaagaggtgtatattatggcaagttggcctgggaggaagataattaatatccccggggtccaagtaaattaggtaactgagaatatcttggcttggttgcatgcgtcgtttgtggctcgtaatataacaaatatatttatatatatatatacggatatgattttgtcccgttattgtactttcacggatt

SEQ ID NO: 218029 - DNA, 5256 bp, Cannabis indica
tttattttttttttaaaaaagaccagaagtatccaattccaaacttttgtgtatgcaatgaaatgataagcaaatgcaagcactgaactgaacaactcattctcagtcattagaagcgcacgtgacccaaaacatcataatattgcttagtctcacaatattaaaccctaattttgaaatcaccagcctaatgataaaatctataaattattacgtaagctcgtatttaacattgttttttattttctgccaaaaaaacatttttttttcaaaataaattcttatatttaatattactagtactaataaataaataaataaaatattgaatgggacccttttattaatatccgagcctctcccagtttcctactctctttggcttttgctcatctccagctagctgtgctctgcctcttctttcttctccaaaaaccctttcacctctagggttagggtttagggtttttctttgggttagggtttttctttatttattttcttatatattttattttttcattccttctgtaattggagttactttttcagtgtttatattttatctgtaatttaattccaagtcgagttgatttggatctcgatctggtttatcgagtaatggaatttcgtaagtgagggagacctgaaggtagtttcaactgtaatggaggcttcaagaaatctaagcaaggttagctttgttgctgctgttgttttttattaaatatgggcgtgtttgtttaacttacttcgactactttaggacacaatatttgagtaggtatgtccagtttggttgctgagacagtactgtaagaaaaatgaattactttgttgaaacgcctagtagtactgtatgtaactgaacaagatttgaatttttagactttacttttttatatggagtttgaagttttctttgagtatctttttgtttgtttggagctaaagctttgacccaaaagtaaaaataaacaaaataaaggtattgttttgaacagtgacagtaaaatttcgtacgttgtgagagttgcttttgttgcctgttgattaggttcatgaagttttttgttggataaagttgtcaattgtctgaaacttgtagttgataacttcttaatcagagtttggtaatttaaaatattaacggagattgagtggttaaatatttttaaagatactggattagtatatacacaaattagatgagaaattgaattttaaaatcttaactgaggacaagaaaattaatgttttgtaatagaaatggactccttttcaagtggtgtaggaagcaaatcgaagccatgcaccaaattttcaggttcaaatcttttctcgtctaaataaatattatgaagtgtatccatttttaggtaaataatcggttatgtgtataagaatttaaggttcaactcaactattacaatacaaactaaagaaaatgtaatttcactaataagctgggaattcttagcttaactgtctatacaagtacattgattctgtggttcaatgaagtaaaaactgctacataacaaactaataattttatttatggagcacaaggattgcattcacagcaatgtggtctgcatttgtgtaattacattcaaattgatttatttgttattgatagctgtattatggttcacattttgtcaaggggttgaggttcaaatattttccattggtaatttaaaaattttattgattgcttattgatgcattcaggtgccaaaagaaaatttgtaacattttagctcattgaactgaactgtttttttatacctaagaacaagtttgtgtaaattgttatcttaagctatcaaatttgttcctaatgcttttgttagaataagttgctggttcacttaggccataatatgcatatgtgatcccgaacaatgccaaattgtatgtaatttgatgcttctaaaaggaaaggctcatccctgcctttcatacttttttctctcatggggtgagaaatgtgtgaactgccgatttccctcatatcacaaatgattttcatgttatcttcatttgagaatatatgatatttttctctgtgggatttcactgaaagttggaatttggcaatacactgtttacatttaaagattgaggactttattgtgtgcctgtgcggttttgtttgttgggtttgttatgggatcccaaaatattttgtttgtcaatttacatttaagtatgttgtgagtcacatttaatctgcttgtatttttcatctaagtctaatgaatttatgatatgctactgattgcagcaccgctggttgtccattcggtgaaagttgccattttcttcattatgtgcctggtggttataatgctgttgcccagatgatgaatttagcacctcttgtacctccaccatccagaaacatggggaatcaagctcctacacttaatggctcttctgcatcttcagtcaaaacaagagtatgcaacaggtttaactctgctgaaggctgcaaatttggtgacaaatgccattttgctcatggtgagtgggaaattggcaaggttgttgctccatctcatgacgatccccgacccatgcctcctatgccaaatcgttacagtggtcggatggagccaccccaaccgcctccaggccatgcttttagctttggtgcatcagccactgcaaaaatcagcgtagatgcttccctcgctggagctatcatttgaaagggtggtgtaaactcgaagcagatatgtcgctagactgaagctaagcttgctattagagagcacgagtcagatccaaacctcaaaaacattgaactagagggtacttttgaacagatcaaggaagcaagtgtgatggtgagagagctaattgttaatgtttcaatgagtgccccaggtaaaccctctggaggccccgaccatggacatgggcatggacatggtggacatggccatggtcatggtcctggtggtcagagtcatggtcctggttgtcagaatcatggcccttcaggaaacaactataagacaaagttgtgtgataattttactaaaggaacttgtacctttggagatagatgtcactttgcacatggggctactgaattgcggaagactggactgtgaggctaaaactcagagttgtggtcttggataattccgtgccagaaactcatagagatcttgtatttgtagttctataattgaccttgtgaaatgcaacttattttgacgagaatatattgagtttttttggttctcattctttccttatgcccaaccccaatactctcccatatgcgaaatttgccttattaacaacataaaaaaaatgttaaattagcaaaattactacattcaatttaccttttgtgagtataatggtcgtatagtgtatatttatgcgaccaagtccatgaccgttgtgttatggttgcactgtagtttctggtcatttgtgtcactaattatgattattttgctaataaaaattattttaggaagttattttgttaataataatttttataatgattatatttacaaaacactcctcgagttaggtccccataatttttagaaaaataggatttttctctgaattatgacttttgtaaagttgtctcttgatttttttttagagttgcaaaaatttttctctgcctaaactataaaaattgctgcaaacattctttttagaattgcattatgtttttttactttaaacaatttgttgatatagcactatcgtgtgacgttaatctaaaagaatatgtatgtgcattgttagagttaatatttatatatttaatgttaataaactggatatcgggtagcttaaaattgttaaataggtcattgtactgtaactcatagccacataaccaaattggtgatatttgcaatgattcgtatagttcgaggatgtgaagtttttttttttttacaatttaattgtcaaaatattttttaattaatgtaaatatttattaagaaataaatatagtttttgttattttttttataggaaacttgtcatataaaaaaacgaattctctttatagaaagttacctatttttgaaaaattaactttatctttctttaattgttaatttcagttttactatgtgtataacagatcaaataatcttttttgggaggtattgaagaccaaattgtgatcttggtcttatttgaaaagttttccgtttggtcctgatttgttgcaatagagtccgaacttgattttgcaaattagggatttttttaggaaagttctatacaattgtgaaaacatgtttgtgactatttttagggtttttttgttttatatataggacatagagagcagccaaacattttctatctattctagtctcatttttcatatcttagttttgtgagaagagtgtttcttttgtaaaaacttagagtgttcaatcaagtttttggtttctgtaatgatctcttgctgttcatagaataggttgaagagaagctttgaacaaaagtgggtcttcgggagaagacttttataagtctcattttgagaggaagtgagcatatatcttcgggaggaagtgagcacacatcaataattgaagggagttcactatttggtgtgttttagagatcaacttaagaaggtggattacaacgagttgtgacaaattattagagagagtctaaatttgtttaagtcaattgcttttgtaatcttttgtactttattaattgatttcattctttgggcgtgacctcgtaaactagtagtatttgaaagaatactgataccacatataattttcttgtaccaagtttttactttctgcaaagttgcttctattttgattttgcaaatttgtattatgttgtgacaagttttcaatatgttactgcaaatcgttacagttgtgtttttaattatttgaatttaataaatatattggtatttgtaaaaataaggaatttcaggagtttttcacaaaaaaaaataattaaaaagacaaaactctacaatgatcataatttagggacggacagagatactatttattctaaccctttttataggtgaattactccatatattatttattttttaacttttttctcaaatttactgtttgagtttctaaagtagttgaagcgctagttgcaatatgggtttgtatacgattttttgttgcaatttaggttgcaacgctagtcgcaataggggtttctatgcataattccgtaaaaaataacaaa

SEQ ID NO: 218030 - DNA, 1506 bp, Cannabis indica
agagagagagagagagagccacacgggagggaagagagagagcggggtgaccatttaagttttacttattttttttaaattaaaaaaaaagtaaataaaaagttcatgtaatcaaatgaattaattggtacaaattagtaagggatcaaatttaatatcaatcatcaaaattcaaattttcctttaagaaatgttaatacttagagtacttaattataatagctaatgtaagttgacattgagtattaatcttctgattgatagctgaaattaataatatgccatactgtttaaatttataagagtacttcaaatctggatctttcttagagaaaatcatgtttatataaatatacattatatatatatatatttatttatagtatgtgtcattgaatacaaaatctggaaattattgttacttgtcccctatatggctctctcttaatttgttatcgctctcactcattagtatttggcataataagaaatacacataaaaaattattttaaactatatgtacatttacagttaatataaatatttattaatatctcctcaaactaataaattaatagaagctggaatatagcgatttttgtctaaattttacgcattatatttcacatatgaaaattaaaatatttgtttatatatatacacaccaataatatttatggtcaaagtattcctataaatagatttttaatatgaggtagactttattgtattaaggtaagagtttttcttatatatatataatattaattttaatttaataattttttgaaagaaaattttaatttaataatataattgaggataaattatttgttgactgatctttatcgaaaaaccctccaccacaccatgatgactttatgctaaaacaaaaatatatatatagtcatattcatatacatacatgagaagattattatgactccattacgtagctgaaactgaaaggaatcaagtgtttcacaagatatctaagctatttttccctttattattataattatttatatataaaaaaaatttggatataatactactactactaataataataataataaaagaaaaaggatatttaataatgaatattaattattatagttgtgtgatggtatggcatagtaggtacagtcagcaccatgtgttagatatgtgatgttaagcaaaaactatatagtaaatgtaaataaaatataaaataaaatgtagcactatcatagggaatagggatgcatttatattatatatatactggaatatcatctcaattaatttatataattatacacatgacctatcctcagaactcagaacttttcatattatataatcaataaataacaaatatatatacatttatgaaatcatgcttacgtattggttatattttttctgaaaattgatttatcagttcttctttaaaaaaaaatgtttgtttctggttgtcaagtttttgtatttttatttgtttgtcatcatagaga

SEQ ID NO: 218031 - DNA, 8700 bp, Cannabis indica
agccggccgaccttaaagtgagatgagctaagtgtgcgttttggatcctcgtacacagccccgaaactataaaaaaaaaattattagtttgtagataaaatgttaaagaggtaaataatcaatttcaatctctatttttatttttcaaataaatatttagtatatagctagaggatcgaatctcgtatgagttttaaatttaattttgtgttctatataccttacgaccgtctgtctgtgaagtctacaagtcaaagatggtcaatggataaaatgttatgatatctacaaatttaaaattacagtttttttaagaaagggggcgcttgtgagcattagtgttgagagtactaccacatatacaagatgacacttcgaatatttagctgttttcacaatcatttctcattttgtaataaactattactgggcaaagcaacctcaacttgttcttcaaagctattcttaaaataaaaataaaaaaagttgcacttgaaagttccattaaatatgaatttgctcagaatgcggctttatctcattgctaattaatacttaatagtcctcctttagtttttatatagtgagtggagtacactaaagcattatgtaatgtgatgggtatcattgccttctcattaaattagtctccgaaaaactaatagttaataaaaagtgacaacgtgctgatagttaatacattaaaacagactataaagcacatttaagcaataataaataaaatctcttacacaaaacaatactactctaccttaaaatccaaatgtcatttctttgagacagcatcatctcacgagctttttcctcctagacacttgccacatgcttttgctaaaataattaagaaagactcaacaaagtttaacgttaaaattattgtaataattattaaaaatctaatataataaaatgaatatattatgtatgttctcttgtttttttataaaaacaaggttgttttaccagaaatactcacaagctcagccatgactactgctatagctagaatggaattagtaattctaaatctaatgccaattttcttcttattcttttcatcaacttatgcccaatcaaaggtatacatcgtttacatggaccattcagtcatgcccagatcattttctacacaccacaactggtttaagtccactctttcttccatatcagaaaattcagagctccccatttcctcaaaactcatccacacttacacaaactccattcatggcttcagtgcatccctcactccctccgagttagcttccctcaaaaactcgcctggttacatccactccaccccagatcgtcctctggaactacacaccactcactctactaaatttctcggaatgagcaccacctccggagtctggccggcttcatcatacggcgaaggcgtcataatcggcgtcattgactcaggcatctggcccgagagcgagagctttaaagacagaggaatgagtcgtgtcccattgagatggaaaggaaaatgcgagacagaacaacatttcaactcttctttgtgcaacaagaaactcataggtgctcgatttttcaacaagggaattgtagccaacttccccgaaatcaacataacactcaactctgctcgtgatgatcaaggacacgggtctcacacggcgtcaactgctgcaggaaacttcgttgaaaatgcttcctattacggctatgctgctggaaccgccaggggtatggctccaagagctcgggtggccgacatacaaagttctttggaaaaataaggtatttgcatctgatgttgtcgcagcagtggaccaagcaatcaaggatggagtggatggattgtcaatgtcattgggattctttgcggccaaggataaattttacgaggaagacgcaattgcagtggctacatttgcagccatggagaaaggtatcttcgtttctgcttcggcggggaacgcgggtcgtcttcatgggacaattaacaatggggcgccatggttgacaacagtgggtgctggaacagttgaccgtgagtttgaaggagcgttgactcttggaaacgacactaaacaaattacatttgagtctttatacgcaggcaacttttctggtctccgagaaccacttgttttcttgaacaagtgcaagagcttgaagaagctgaaaaatattaaagggaaagtcattgttgtatgcaaagatggaaagacaacaactttggaagatcaaatcgaggtaatcaagaatggaagtacttcggtgatttctggtgctatatttgttaccaacgatgaatggaaagattactatgattactcatttgcagctacattcgttgatgaaaaagataatcagaaaactgtgatggactacattagtaagaacaaaaacccaactggaattttagagtttcggaagacgattttgggtagagcaacagctccgaaagttgccaggtacagttcgagaggtccatttatgagaagcccaagtgtgttaaagccagacattttggctcctggctcggaaatcttggcttcatggtctccactcaacaaaatagtcgaagtccactccaagcctttgttcagtcacttcaaaatcatatcgggaacttccatggccgctcctcatgtttcaggtttagccgctttaattaaaaccgttcacccagattggagccctgcagctattagatccgccatcatgacaacggcaaaccctttagacaatactggaagtcccattaaggacgccggaaactttgaccatccggccagtcccctagaaatgggagctggattcatcgatcccaataaggccattgatcctgggctaatctatgatgcagaaacagaggactatgtcaagcttctctgctcattgaactacacagcaaaacagatgaaaatcattaccaaaacgaatactagttgcaatgggattaaaccgtcttctgatctcaactacccttcgttcatagcttacttccccagcgatttcgaggcccctcaaggagggtgaggaatgttgggaaagagaggtcgagttacatagcagagttgagtggcatgaggggtttgagggtgaaggtggagccaatgaagttagttttccggcggaagaatgagatgctgagttacaaactaagtgtggagggtccgactaatttggaggatgaggttgtgcatggctcactgagttgggtggaggagtctggtaaacacgttgtgagaagtccaattgtggccactaatatggacccaatgaacctttaaaagcaacgtactcggactaggaaggagtacgttcatttcaaagcaagcaagctagagtttctaatttttatgataggagcattgctggcactttaattgggggttttacttatgatttattaaattaaaatgtgtggaactgaatattaaaaaagtagaattattttgaattttttatttttgaaaagtatgtttgtttgaatttaaccatttatgagtcaaactttgtgctgttcatttcaactaagctctcgcagagggaaaaataccaaattgtactttgctggtgatcacaaatgcacaaataccccacagcaatgcgcaggagaatatataatcacatccaagcagaatcatacaggagagtttcaatgttgaatacaaaaagattatataccacgatgatgatcaaagaaactatatatgaactattaacattttaatattaaatcacacagcaacagttagagccagcaattagcaactaacctgccctaaaacactgataaaagaataattatggacatgaaaatgatactaggtgaaattttttccgcaaaagaaactgcaatagacagcaaaatttctgcatctggtaagtcttggtatgttcatgttttcaatccattcgattcaatcgttttgcccttcgttttcgtttggaacgcttctgactctcagttgaggcatggactccattctcagttacctgcttttataatgaaacttataatgactttgatattctatgttgaatttgataaaaaatgaaagaggaactgagcaactcactccttttaaaaccatgcacttcagggcagcaataagctcaaagagatactcaaaggcacccttgtaaggctcctgcattgaaatgaaaaccttaggaatgacctcaaaaagctacatagcatgagaacaggccaaaaaaagtgtcaaatacctgcaggtgtgagggtagaggaagcccttctatcaaaggagcccttggaacttggagaaattttgttcggcctgtactgttattctccatcaaaatattccaggaaggaggactataaatgcctaacgcctcaaagtcgaccctagagctcaaccaatctggaatattagtttgaggtgaagattcactacttgtatactgcgtgcatatcacaaaagcaagtagagttccattaatgctaatcttgttaaccatgctgtatttaatactcaaagttcttcaaagaaattgtaaggagaaaagcagaaacaaaagtctcctagtcccagatgggcatcaacctactccattctcaaagttgacactcccataacattattaaaataataaatgtacatttaaaaatattgtgatacatttaataaaacagggaattgattagtagataattaatttttttttcaaaaaaaaaagataaagaaaaaagaagctagcaactcacaattgatgtcaaatcttcttcgctggcataactcccatcttcatcagcaacagcctcaaaaggatctatcactatctgtacagaaagtccttaatgttaatggctataacatgagttgcaggacagtcttgtatatttaacaaggtaactattcaaaatgccttctcaggcactttccagtcattcaaatgcattaaaacaaagaaatggctcaaagtcaagacactttctctcctgttctactcttctttgctaacaaatgagtatattatttctggactacatccatacctctggcctttctatggctttgaactgatggaaagatggactttcaaaattaggaggcttcaatacagcatatgctccttcgttcttgtagtttatttcaccgaactgtaaatttttataacgtttaacataggaaaaatgataagaacctgcttcagcttataccaaaccagtaactaacagagaaaaataatgaagaattgcagcaaaactcgatggaacagtagcaatttgagattgaaaaggtgagctactattaataggaaagtagactaaaagtctctacagtaagtgagagccttagctctctattgatgctgataaatatcttaatactaagcatgaaactacactcactcaaacaagcacatagaagcaactcacccacacaagaataaccaaaagcccctctgctcatctaacgtaccaatgtatattctacctatttcccttcctagcataagtaaatttcaagcaaggcctatcatgcctatcaaaaaattcagattagcttttatctttccaacaataaaaatgctataccacagaatttatttatttatttttataccacagaatttaaattgattgtataaaaatatactagaagcaaaagatgttacaaatatggctaattatactagaagcagaatttaatgattgatgaatatgaaaatattgaggagcaaacatacaaaaagagtataggcaaagaaagaaccaaaacctgtggataattgggagcactaataagtatacaatttccctgactcttcaacatgatctgtgctagtacccacttaacatatcttcaaagccatcacgtccatctctagcatcaggaccttcatgtgatctgataatcaactgtttagcaaaaaaataaaagagtcaaccttgccttggcataggcccttttatcttcaaacaagaataactatcacgtggttaagcaatgtaaagaggtagattacaatagagaaatactgagttgtttttgcagagacaatatacaaaggttcatcatgtctcaattgaatcttttactcctaaaaaatcaaaagaaaagaacccaacaaattgagtaccacacttaaaatttacctttaaatttgactgcttcaaaaaagcctcagtgcaatcaggaccccatgttacacctactcctcgaactgcattttcaattataccacctttctttgatggatcagaccatagcacatcattcaatatacttggatcttcatctggaacatctataaaaaatctgttcactctagacaaatcttccaaagaacctaactctaatttttgtggcttgtttctcttagaccttctaacagggccacaactcaagcttcgaaaaaggcccccatgtgcagtgtatacacaacttgatatgattgaggccaaaggaaggtctttgaagcattctaagcatttcttgtagaccaattcacttttatcagcaaatttggtcttgacctcctgcttaaaaccatatattgatgtgcaaaatccagtttcatgatttcctcgcagtagataaactctcttaggcatcaggacctgaagagaatgtggagtaaatccgcacaaacttcataaatgatcatacttaattctagaaattcatataaaaaatcatttcacaatgaaatacaaactgcagtaactacatctattacaaagactacatgctacatattacgaaaataaatatgtatgcaccagcatacataaaaaacatgacaaaaccaataaatactcactacctttcccttaccttccaagcaaacaggacaataattacttccaaaccccaagctcctctgtctacgtaatcaccattaaaaacataaaactgcttctcagatggtaacccagcaaggcgaaaaagattgagcaaatcatgaaattgtccatgaatgtcaccaactacaacaacctttgaatccatttcatgacaatcaacttccacacaatttggttcctgcgacatgattcttgaagccgcatcaaataatttatccaccacagatattggcacgagagacctaaaattagatggtggatcgttctttgaagagtgttcaagtttaaccatcaaattctttacccattcgagggtaattatatcatcagcaggccatataacagagagatgaaggggtgacattgccactgattctttcccttcatttgggtcatcatccctttctaattcagatgatccagtgaaggtttcttccatctctttctgatcctcttttgttcttaattcatctttcactgaaaattgggcatcttcaataatcaactcttctgtttgaacagcctgcactgctctgcaagtagatgaacctccagaaagtgttacacattgttcccctccaactagagtttctccattgcccaaccggggtggctcatccattaagttggttttcccctcgatatgaccatcttcatttaccacagcaactaccctttcggcctggatacccgcattacccaaatatgaatgttcaaccacaatattattctgttccaccgtctcaaccacaatattattctgctcaacaggctgatcatgttgatttctcaactcagcttctgtttccacagtttcatttgttaaaactgtcctttgaatcccttcaagttccacatcctcctcggtcccaacagcaatagtatttgaatcaacctgttaggaagaagaaaaaagatcatgacttttgattcagattcatgttcaggttcagcatgttcataatgccagactactccaaaccttagctcctttagtgacaatagatgacacaatctccttcatccgcgacactgactgcgaatgcggatcatcaatagttccatacccaatattaatcaaaaccttcttgacagccttgcaagaacccacctgctcaattcttgaaaccataagccaaaccaaataatccaacaaacaagaaaaatatgaagaacaaaaaaaaatcacttgccattttgtcaatactatgggattgtgcttttttaacatcactagctgtcacctgtaaaaattagaaatttatcaataaaaaaatttacaatgccaacctttgaattcagtaatacgtaaactttcctctaaccttttcaattttgttatgaactataccacgagctagttcctttatcatcataagagaatacacttgttgatcatctaaattcgcaagagacatcatgtttatggactccaaaatcttcttggactcatttaccattatctctttctgaagctccatctctgtacgcaaatacgtataatattaacggtgtaactgtaaccccaaagcatctgaaattctgaatctttcaatacagcagaacatatatactataccaagaaataaaaattacatacgatattcgtatggcatagtaattgggtccccaattcggtacttgtagcgagaattgggtctcactctcagaactccattttcatttttttttttgcaggcacaagaagactacaagccctagttcgttttgaattcgaaaaggtcacgcaacattttgaaacgatgacgtttaatttttaaagtagtagcgcgccatgctttttttaattttttttcagcaactacagtccaaacatgtttttgactaatttatat

SEQ ID NO: 218032 - DNA, 20738 bp, Cannabis indica
taaagtgtaaaaataaaaattactccaaaaaatagtacttaatatttaaaatagaaagattaaggtagttacacacacccaattttcatcagagtatgagttttggagaattaattaaaatccttcaagtacttctaattgtatagttatgtgattagacaaacaagaagatatagtatataatttatgtatttgatttacaatttgtgtaggtattaaaaacactttttcattaaatgtattatatttttttttggataaaatgaatttttatttggcatgaaaaaagggaaagaaagtatgggaaagttggtttttttaatatataaattgaagttgggtgagattggtatggggacaaattgttattagactaaaaaattgttgggttttctatgcttattatccggtctacctttgatatctgcacatgtttttgtcccaagaaaaaaatgttaaatgttcagataataactactaagccatatcaaaatcccacatcccaactcattccaagatgtgagaataatatgccactcaactcaatttttggcactatttgcttgcacaaactcctttactttattattttactttctaagaagagaaaaactaatcaattttattttcaatgcattttaattgaccaatcttgatgatgatttaaataaattgttattaccagaattctgtcaaccgaaaaagaataaatccactcgagatatgatatctaaccttgctagtgagattcgatccctaaataatgaaaagaaattgtgtctcatactttcttaatgatgatctaaagaaattgttgtcaccggaattcatttcaactcctagatgatcaagagaagaatcttgataggttcatcctttgccaacatgctactgcataggcccttttaatgtttaaactaattaatttctttctcttttgtagtatttgtacttaatctttcattgggaaccataaacactctttaagtactcatgaggtattataaactccatacatcattggacctaatcactactagtaagacctaataaaattgtcttaatctcaattttattaacaataatgagcactagaaaagttaattttatttatatttataatgtagtaaatttaggtggataaacatcaacatcaacatacaagtgtagattgagtctgagatttgtgagacaaggtaggctttatatccaacatggaaagcaactttgcttactggaccctttagaaaaggaccaaaaaacaaaagtgacacaaaagacagcaggttaggcccttcaccaatgggctatcctcattaaaatcaaatgtcatggtaatatgctattaaaaaaaaagacattacctttgtctcatctaattagtgcaacatataagaaaagtcaccatccaaataagaatagtgacttaggccctagttagttgggctttgtcggttaactagtgacttttagcttttagttctgaaaagctcttttaacagaaaccctttcttatggagagcttcccgagaagatgcataagctcagaaaaacagggtctttagtgttctttcgaattccaattaagaataatgacttaggccctagttggttcgacttttaaaagttgggctaagttgggcttacgttgggtaactggtgacttttagcttttagttcttaaaactcttttaacagaatccctttcctagggagagcatctcgagaagatgcataatctcaaaaaaacagggtctttacctttagtgttcttccaaattccaattagaaatagcgatttatgccctagttggttcgacttttaaaagttgggctaagttgagcttcgttgggtaaccagtgaattttagttttaagttcttaaaagcacttttaagataaaccaggtttagtagttttcttaaggagaacttcccgagaagatgcataagctcagaaaagacttaggccctagttggttcgacttttaaaagttagactaagttggataatcagtgaattttagctttaggttctaagaagctattttatcagaaaccaagtttaatagctttcttagggagaacttcacgagaagatgcataagcttagaaaaacagaatctttattattcttccgaattccaattaggaatactgactaaggccctagttggttcaacttttaaaagtttggctaaattgggtaaccagtggattttagctttaagttctaaaaaactattttgacagaaaccaggtttagtagctttcttaaagataacttcccgagaagatgcataagctcacaaaaacagagtctttagtgttcttccgaattgaactttaggaatagcgacttaagccttagttgattcggcttttaaaagttgggttaagttgggcttcgttgggtaaccaatgaaatttagctttaagttttaaaaagctcttttaacagaaaccaagtttagtagctttcttagggagaaattctcgagaagatgcataagctcagaaaaagaggatctttaatattcttcctagtttcaataagtggatcttgcttagaatccatgaaagcaaaacttatgtctaagattgttaactggcctagatttctgggatcatgaatgaatatcttctctagaaaaagtcctgaaaagtttctgatctgagaaatttaaactcaacatgtgatgaactacacatcaaaagcttcaaattccaaggacatcacatgtacactatttcctactatgacacaaatatgagactaaaacacactatttcataccataacaaggcagaaaattacttgattactgaaattatattaagatctcaaaaatgcactagttaatgacaatacagcaaaactgaaatcccaatctcatctttttaaaatgtaataatgtttaatgacaatacagcaaacaattactccaaaaagaccaaaacaaataaacaaatttatactgtaacagtacaagtaccattacaaatgtggtgatcaaaaactgagaaaatgaatcaaaacataagaacaaaatccacaaacaatcatgtagttacctctgcacatgcgcttctcaaaatcgtactcgaagagagtttaacatatttctctactcatactcgaactgcacatcaacatgtataaatcttctcatgagctgaacaatggatgttgtaaagttggcgagtatctgacattcttcacgagttttagcccccgaaacaatcccatatattaccaacttctgaagattaggacaacggtttagtaccccttcaacccaatgtacaaacaaatcggtaagtgttgtccatcttagctccacaacaacaagattctccaagtctacatccccttgcaaaccatggagaagcacccattctttcaagtcataactcaatgatctcagctgaggaaaacagacagcaatggtttccaaatccactatctcatcttcttccccgaaatctatatcccataaccgaagccttctcaatttcgtgaatctagtaatcatctgatggaaattcggccatatgattgtgaagctactaatatcaacaatctcaagattttcatgagtatcaccaatttcaaaatgtattatagtaactttatcaacctcaaaatgtttcaaagtcccttttccaataagttcaaaaacatcaataacacaatccttaaaatgcaaacgctcaatacaatctgcttccaaaataaacttctccaaactaatcccttcaacataaacattcttcaacttagaactagccaattcaacagtcacttgaggatccgaaatcaggatttcgggtgcaacaagctccaaagattcgatcttcggacaagcagcaagcaaataattcaaatccaaagccgaaatactaacatgccccaatgaaagagacttcaaacaaggaaatctctgaaaatttggctcaacaccaataattgaattatgacccaaaaccaacttttccaactgatgttgtctaccacacaactcaagaatatttatattaggagatgtcttaacattataaaacaattgcttaagtgtttccctagtatacattaaccaagccacaagagctgaagctgaaaattcatcatcatcattatcataatactttaaaattgagagcttttgtaaacctgtggtttgaaaaattgtttgggtaatcaagatttcatgcttacttgatgttaaatcaccataaaagggtaaatcattggaattgaatgaaagggtatgaaggtgttttgtgaaagcttttctccattttctacatgtagctgaagcaattacaatatctctagctgtttcaaccctagataaaatttccccaataacctcaacaggaacatcctccattacaatctattctgaagactctcattcatccaatctaacaagaaaaattacatatataatccatgaaagatattcaatcaaaaatgaatcaaaaatcaatgaatttggatttagtgaatcaacaaagatctgggtatgttgagatttgatggaaatcgaaaaaaagattggatttttagcttgcttaccttgaggggtccgattggaagatgaagatcttggtggaatgagattttcacgcgtaaagtttcgaactttgaaatttaactatgtcgtttggaatatataaacgacatttcatttgtttagttatttatttatttagaaaaactaactaaataagtgacatattttaataaatcttacataaattaataatttcaccaaaaaataatgaaatcacaaagcaaataaaaagaagtaagtactaaagttggtgattccatttttaatatattgtaaaattattatattttactatatactatgatagtatatattatagtacgacataccatgtagactttcattaatgatcgattaaaaaattaccaaaaaatttaataaaactattatttcggtaagtaatttaaaattttattttttttagtgttcttcgtgttgtatgtgatttaagtttcttatatttatttttagagacatgttaaagagtatcaatagtttaatattctacttaattaatgtaatgcaacatactaaaataatttttattgatgatggttgaaaaagctttctaaagaatttgataatactattattatggtaagtaatttaaaattttgttttttagtatagaaatctgtaattagtttaagtttttatatttatattcagagaaacgttaaaggatattaatgatatttaatattgtctaaaagtagcatataattattagtgtaatttaatattaaatcatacatattttaattgaataacgattatgaaaaattattgaccactcataaattgctacctcatattgatagtaggcatcattacttaataatagtgctcttatatgttacttattattttgcaattagttagaatttcttttaaagttgtggtggtttcactttttagtatacaaatttgtaattgtttatggttatataatcttcatttccaagtattttttagtatacaaatttgtaattgtaactttgttggtcttttttttaacaaatttgttaattttttcttaaaatatcacgtgttaatattaaattacagcacaagtctctaaaaaaatttattttgatgcaaataagtctctaatctctaaaaaattgtgataacaacctcaaggtcaaaattctcgttagtccgtaagtacctaatttaactgctctatttgttgttccaaaaaaaaaataccacaaaaatgttaattttgttagtccaaattataattttaattgagattaatttaaaataaacaaataaataattaaattattttaaaactgattaaaataaaaccttttttttttttttttttttattctttcttcttcttaaagttcacttctagcccaacatttgtagctctggtctcttctactaaaacttttcaatttgtattaaccagagaggttgctctaaaaaaaatttaagtaaagtttgaaccaaaaaaactaaatggccaccaaaacccaccacccacccaccacccactggagatggggacagagtttcaaggagaaggttggagcaaggtgtaactatttagagttttttggggtttattttttatttttattttacttgattgcttttctgagttttctgcatgggatggaacaagaaagaaagtggagatgaagagatgagacttatcgatggtaagtctccaccaccgagaagggtgggtggcgaatagtagaagtttttttatatatataatgttgtttttaatctttaattaaagaaaataaaaaaaaatattaaagtttttaataatttttttattatttaaattattttttaaataattttgatgttgtgaaccagtagaaattttaagaactacaaatagagctgttaaattaggtactcacgattcaagcaatttttagtaatcaacacatgacttctgtttttggtttggttgttaatgattgtaaaagtttattatctgttttaaataatgtaagtgttcgtttcattagacgatcagcaaaccgcgtcgctcactttgtagctaggcgttcccagtttttctctgatcgtagcattcataggaatgtcattccttctgagcttcatgctctcttgtatgatgaatgctaaatttcaatgaagttgatatttcattttcaaaaaaaaaaaaaaaaagaatatctagggactataaccaaaaaaatttagagattagaacttatctgcatcaaagtaaactttttagggagttatgtcgcaatttaatatcaacacgtgacattttaagaatgaattaaccaatttattagaaaaaaaccaacgaacttacaagaatctcgagcttgagaattattaccgctattttttaaagttgagaatttatctgcatcaaactttttgagaatttttgtcgtaatttttctcaaaaaatatcctaattagctattttagaaaaataaataatataattttttaaaataatgacgtggttatatatgaaattacctttatacccctttcccaacacataattttcaatccaataccccaatacgaacaaaaagaagcaaaggaagcctttctctctcttctctctctctttctccggctgacctgagaaccagtttctcagtccgactcgtcaccgaccatgtggagaaactcactgagtttctcttccaaactcgccacctctcataaaattcacccttcttctctttccggcgtcgttcgatccctctctctctctttccctccatcaacctctccttcctcttccgttgaagaatcggtcaaattaggtttacatccatctcatggagttggagttggagctcaatcggctttgattgatttctcctctaaagctagggaagttgctgactctgctcgacactatggtcgttgctattgggagctctccaaagctcgtctcaggtacctttctttgaaatttgattaattttgtttatttggggcttttatgttagcttgattgattgaatttagggtttgcataattttaaatttgtattgaggaacttagagatttgtttatcaaagtatggatttttgttaattttagtttagggaaatttgcaaaactaacaacttgaaattataacatttgcgtaaataatcacattgaattgatattgtgctactataatatggttgcataatgtaaatttatgatcgcaaaatggaaaatttgcccaactaacattgtgaaatagtaaagtttgtaaaataaccacactcgatttactctatgcataatcgtcgtttatggtcacacagtgtaacttatggtcgcttatgcaccatattcttttgctaataaaatttgttgtagtctatttttacaaaacactcgcaaaactaccattatggtcgtgttatggttggttgcagagtgtaatagcgaccaaaggtggtgattttgctattgacattttttggaaagttatgttactaataaaaatgttcataaagactatttttacataagagttaaatttgctaactaccaactcgaaattgtaataatttttaaaataaccaaattgaatttatactcacaactcactatagttgtgtagtgtaaatttatggttgcagagtgtaatttttggttgcacgacgtagttattttgctaataaaattatttgggaagttaatttactaaaagattattttacgaaagagttagcgatcactcatcacacgaaattcaatattggctctcatccattgaaaattggtgactctgttcttgaagcgctctcctccactactctgtctacttttgatgattgaattatatttcgtattttttttgttctgtaaattctagcaatgtgggcacaagtagcaacgtctctatgagtttggatgttcattacttgatacacatgctccaatcatgcaactcccaccattttatacatcaaggaaagcagctccaccttgtttttctcaaaattgggcttctggaatctagtgtaacgatcgtaaaccgccttctgcagatgtatgtgaggtgtggcagcatgagggatgcacatattttgttccaggaaatgactcatagaaactgtttctcttggaataccatgattgaaggctacatgaaatccggggattgtacaatgtcattagaattgtttaagactatgcctgaaaggaatgagttctcttggaatgtagtcatcatggggtttacaaaggcgggttggatagatactgctcgcagtttgtttgatgaaatgcctaacaaaaatagtgttgcatggacttcaatgattcacgggtttgctcaaaacgggcagaaaaaagatgctttaagattcttcaagcatttgagttcaaaccctttagaagtatcatatagagataaatttgtattggcaacagtaattggggtttgtactgaattggctgctcttgggtgcgggaagcaaatccatgcacgcattgtgattgataacgtggaagttgactcggttttatctagttcattgactaatttctacggtaagtgtggggacttggatagtgcaaataacttactgaatatgaataaggaaccagatgaatattccctatcatcattgattatgagctatgcaaatattggaagaatgagtgatgcaagaagaatttttgatgtgaaaaattatcctagtattgctttatggaactcaatgatttcgggatatgtttgcagtaatgaatatcttagagcattaactatctttaatgagatgagagctaacgaggttagaggggacttcttaactctcgtaagtgttttaggtgtctgcagtatcctaggcaaccttgtacatactaaacagtttcacatatatgcgtgcaaagttgggatgcttgatgatgtaattgtttctggttctcttcttgatgcatactctaagtgcggtaagtcttgacgatgcttgcaaattatttaccgagctgaaagcctttgactacaatattgctaaattgtatgatcactgtgtattcaaattgtggaagaattaaagaagcaaaacaaatctttgagacaatgcctatcagaagcttaatatcatggaattcaatgctagcaggtctttgtcaaaatggatgtccagttgaagccttgaatctcttgcacgagatgaataagctggacttgaaaatggacaagtttaccctagctagtgcgattagtgcttgtgcttgtatctcctcacttgaatttggtgaacagattttcactagagcaatcattattggacttgagtatgacgaaatcatttccaattctcttcttgatctttattgcaagtgcggtcttcttgaaaacgggagaaaaatatttgaccaaataacaaagtgtgatgaagttccatggaattcgatgttgatgggttatgcttcaaatggacatgggcttgaagcaatagagcttttcaataaaatgttacaggttggtttgagaccgaatggtataacgtttaccggggtgttgtctgcctgtgatcattgtggattgattgaagagggaagaagatggtttaacatgatgcagcaggattatcatattgctccaagcatcgaacactatgcttgcatgatagaccttttctcccgtgaaggtttgtttgatgaagcaatgaatacgattgaacatatgccttttaaggcagacatcagcatgttgtcatcaattttgagaggctgtttggtgactggaaataagactcttggaaagaaagtggcagaacgcattgttgagcttgatcctggaaactcaggtgcttatgtacaactatctaacatatttgcctcgtatggggaatggggaggatcagcggaagttagaaagttaatgagacataaaggaatacaaaagaatcctggttgcagctggtctgattgttgaacaagaaaccatggagccaaaggaacttttagttctagagctttcttttgtgacagtttatctgttttctattacttttccgagaacagtgaccttatggaaaatcaaatatactaaattgtgaaagaaagttcttcccaagatgagaatggaaaaggaacttttttggcaaacgcagaataattttctatagagaagtgagttcaaaatcggggccccattgagcaaattcaaattcctcccaaagttgtatgatctcttcatgttagagagatatatattgtggtttcataattgctatcagttgaatatgatcaccaagatgcaaatattccttcatttactgaaatactcttttttaaacttacatgcacttataatcattttaggaaaaaaagaaaaacataacattgatctatagtagtttggtgcttaacttctgtcaaggagttctttctctttttttaagcatactagtggacggagtcttatgacaacgtcgcaataacaactcacaattttacctctgcttggtgctctcatatgcctttaaagatttctatagctttgtgttcaaagtaaatattccctttttagtgatttatttatgtatttgggcttgcgcaatatccttttcgtgtattattttactcatgacacacttttgtttcattcttatttccagcatgctggtggttgcaactactgggactgggtttgttctcggaagcggcactgctatagacttaccgggactttgctacacatgtgctggtaccatgatggttgcagcatctgccagtaccttaaatcaggtttgcactttagttgttttattagcttgctcgggtggctgctgtcactatcctgtactgaatattttcattttgttgcttgctaaggtgtttgagaagaataatgatgcaaaaatgaagagaacgatgcaaaggccactaccttcggggcgtattacaatacctcatgcagtcttttgggcatcctccatgggtttagttggcactgcattattggcgagcaaggtggccatatataatactcgcacttttctgaatgttttcttgacaaaaaagtatatttgaaacattactaatggagagtcctcatgacaaggttgttgcagactaatgcattggcagctggtctcgccgcatctaatttgatcctctatgcatttgtgtataccccactaaaacagattcacccagtgaatacttgggtgggggctgttgttggtgcaatcccaccacttcttgggtaagttctttgtcaaagacttgattcaagtttttcactataattttcgaggcgtggatgactcatacattttgtttttggtttctaggtgggccgctgcttcaggccaggtctcacttaactcgatgattcttccagctgctctctacttttggcaattaccacattttatggcacttgcatacatgtgtcgcaatgactatgctgccggagggtatggatatgctgtaatcagagattcaatattttagaatagtacataaaattactcgaaaggccttgaatttctacatacgaaatttctttcattgcatgagttaggagggacttaaacaaaactggtttgaatcgattcaaatcctttgtacttcctatatattctcattgggaatttgtaattaatttggctatgtacattaaatatttggtctagatgagcacccttgcaaatctagatccatcgttcatctgaagtttatgttctttttgtctttcaggtttaggatgctctcttttgccgatgcttcgggtaaaagaactgccgctgtggctttaaggaactgcatctatctgatccctttggggtacttagcctatgattgtgagtcagaatttcaaagcagcatttctatcttctttcttccctcaatactattatctaatattaatctctatattttggcatcattgacttgtcatggttgattgtctttatcagccattgtttgcctgttagagaatttacaatctttgtgctaaaagcagaccgagcatttgtgcctgattattttagcaaaaccaaatttattttattatcacatgttatctgaatgaactctataattactttgcatttctgaatttgattgcagggggcgtaacttccaaatggttttgcctcgaatccacactcctcactctcgccataaccgcaacagcattctccttctatcgagaccgtactattcccaaagcaagaaagatgttttacgccagtctcctatatcttcccgttttcatgtcaggaattcttttccaccgtctcactactgataacgaccaacattgcaccacagatagcaagttagatacaacaacaaaacttgcagcctccttccaagaaaacagaaatgtggatcggagaaagaacaggggcacacaagggcggccaccagttgcatatgcctccgttgcaccgtttccttttctccccgctccatcgtacgctccttcttgacaagtcggtatctcttagggtttcggtgaacataatacaaggtcaaagggtattggttccactaccttgttacattttctttttggttactctctcgaaatgttttcgattagacaaatgagttttgctttccgcgaattcaacaaaatgagataatgtaataaattaatgcattgaacaattaaatgctgtgaataggtattattcttttgattaaagaagagtggaaattataagccatttgaggttactcttcaagtaattggatggtgaagaaagtatgtacgtttgatggaggtttgttctattttttgttcataacattaaatgtgaacactttatagtttcacttttgacctattaatgattgttgttttggcatccttatgagaggttatttgaataaattatgaataacttaaataataatagtttgcaatccaattggaaacatgatcaggataaaaataaaaaaaataatcagtcgtctaattcttagattgtttgatgaaaaaaataaaataaaaattgaaaaagattacaacatcacaattaactttaaaaacatataatctgtttcatacatagctcagaagacacaataatagaaattgttgcagcaggttcattcaaccttgtaacttgagcactcaactattgtgtaaggtacataactgcactacgaacaattcatttagtcatagagaacttgtcattcccaactactaacagtgatttgatagtgagccatcggagaataaagaagaaccaacaacgaaataaaacaaaacaaaactatgtcacactaacaagactaaaatattcaaaattatattatagagacaagactaaaacactgaaaaatatatcacagagacaagactaaaacacttaaaaccatatcacagagacaagactaaaacactcaaaatcatatcacagagacaaaactaatcgcagtaacaaaagtcgaattgaagtagcaaaacacaacccgaccaaacacttaaaaccatatcacagagacaagactaaaacactcaaaatcatatcacagagacaaaactaatcgcagtaacaaaaatcgaattgaagtagcaaaacacaacccgaccaagctgcacctaagcccaaacccagagaaaggccgacgagcttggctggagaaaaaagacgacttcttacaactttaaatttaggaacgagaaaccctaagtgaatacaattagataatttacaaactcaaacataaccaagattcaatttttcagttggtagactaaaaaaaacttcacttgatatatttaaaaatgctatcataaataaaataaagaagatatttattcatcattcagaggacactatttgatatatgtgaaaatttgatgagaaaattcctagccaactatgaaaattataaataaaataataaatatttttcattttacattgactccttccagtctcaaattatgtaacaccaaaataataaaagtttctaccaaaaaaatgaaaataatccaatttgaaagtaagctaattttatttattaaattgattttttttatattatttataatcatctaattttattaagaatgatttaatttgttctccccaagttttaattttaatttttattaaatgttgtttaatatatatttttaaaaattgggtataaaaataaaaaacaaagtatagaaaatacatgttgtgaagtaattataaataaatgtaaatatatatatatatatattttaattattttattaaataaaaagaaaagaaaaggaaaattgtcctgaggtgagagatctaacaaaaatgggtttggagagagttgaattttgggacgatgactaattgggaaataccttccttttgactctctctttctctctcttctctctctcatcttactctcagttatggcggattctgccacaatacacagtaaaccccttttgaggaatcttctccaagtccaatttctgttaaagaagacatttttaattataatactcatagctcattcagcttcttctttacccaacaatcaccgctacaatgtaggagattctgtacccttcttcgtcaacaagcttggacctttaaacaaccccaggtaaccaatttctttagctgttgaccaatttgttgattttgatttcaattcatgagagtttgtggtgaagttagtgtaggattttcatgagtccctttaatctattcttataataatactaaattgcttatgaagatttaagctttagctcatatcattttgtaatttagaactttgacaatgttttatttactctctctttagtctattgtttttgtgttcttcatgttagttaaacaatcttcacattgtcaaaaatagtggaagaatttaaacaaaagaataaaatgaagataagaatttgcttggtttggcaaataatgtgctaaaaaagctcttaacaaatatcagtaagtggaaaaaatagtctcaagctcacaatacaatgtcccaagtacatccatagtatctctcatacaagagaaacattgctcagatagagagatcactaactttaaggtgggaataggacattccataccatttcattaccctttcttgaggtgtgtatagctcatctatttatagatgttttgtacttgggtacctaagttaatgggcaacttgggcacttatacaagtagctcctaccacaagctagcaagctagcgacttgcaattagcaaacttcttgagggtaatgaaataaggagcttgcaataagcaagtttcatggacaacgcattttggacaaggagcttatccaagaagcatttcttaccctgcttagcaaggttatccttgtaaagtgaagaacaatattacatttggcagactatctctcccttcttgtcaaaggtgccaccattctttagtacgagctgatctgcaacgagtttaagcaatgcttgaactttttactgagaattggctcggttcacatgtcaacttcattcttctatctgtggatctttaatgagtgaatttctctaaaagtgattcattttctaatcttctaatatcttttagatgcatgctatgactttgaccgaaatatttaatttttcgccaaatgtatagcattgtgactagctatctctttgcaattgaacaacaccttgttcaaaattaaggtatttttactgaatctttcaaccgtaacgctttaagattgtgagcttagtagcttcataggttctatgttgttagcaaagcttgttggacaaactccttgttcaaaatgtggttttcagaagtttgcttattgcaagctgtccatttcttgaagctcaataagttttatactccatttacggattttgggctgtgaggttgagacttgagagtattgtagcccacttatttatatttgttagccgaaatttcgatgactctcttgtggagtttgcaaattgcttgccaaacatgtaaattctcatgtcttttttaattttatttttatcaattttaaaaatctattccattattgttgtcattatcgttgcctttaccatcactataactgttgttttttcagaacacatattttcagtttcatgagactgccacagatttttccctcaggaattaagtatcaacttcaatgatggaaatcttgccttattttcacatttaattttaattgttttattctgttgcagtgaaacctaccaatactatgatttgccattctgccatccaggttagcatatgggatataacatgacatttcttcatgtattatgttttggaagaagaatcagtttagattgatataatagatggtgaatttattgaacctttctagaagttactaacataatgtgactccattcaattgggttgttgttctcattggctttttttttttctatgtttttggagttaaaacactgataatttgcctagcaatataaacttgattatttgttttttctctgcagatcctataattcgaaaaaaggaaactattggtgaagttttgaatggtgatcgtttgacaaactcgttatatgaattaaatttccgtgaggaaaaaattcacaaaaccctatgccataaaaagcttaaagttgccgaaatcgccaagttcagggatgctgtgattagagacttttactttcagatgtattacgatgaccttcctttgtgggcatatgttggaaaagtcgaagagaattggaatatcgagcagaatacaaccaagtattatatatttacacatgttcagttcgatgctgtttacaatgacaaccaagttatcgaaattcaagcttttagtgatcctaatcatgttctggacataactgaagatgttgaaatcgatgatgttgagttcacttattctgtcaactggaatgtgacttcggttaagttcgagaacagaatgaacagatactcaaaggcttctttatcgccaattcgtcagaaaatacattggttttcttttattaattcaattgtcatcatttttctcttgatgggatttcttatcatgcttatcatgaggcatctgaataatgatctgagaaagtaatacccctcaacaacacttgtaactattgttaaaaactacttggttatattgcttcaactaacttagattatacatgttttattattataggtgttctaatattgatgaagaagaagaaaaggaggttggatggaaacatattcatggtgatgtattcagatgtcctcctaatatgccattgtttagtgctgtcatgggcactggaacccagtttctgactgtgtaagctaattttcttgctcaagtttttcctctctctcaataagtatagaagaataaataagatttgtcctcctgaacttttttttttgtcgtgaaaatttcccctaaactataaaaattgttgtgaatatccctttgaataatttctggatgtagcaccaacgtgacattaatctggtccagctcaagagtcttaaacaaaaaataaatgtactgatgaattatgggactatatatgtacattcttagagttaatgtttgtgtattcaatgctaataaattagatttttggtagtttaaagttgttaattctcgtactgtaactatacatgtgatctatggctacataagtaaattgttttcaaaatgaccaaaatgtaactgaaggagaatatttgcaacaaaagaaaacttaaaggacaaaactctacaattgtcaaagttcggagaaaaaaatcctatttattcaaaatgatattctgtaccttgggttatctttggttttgcacactattgaagttgtgctatgtttctctgttttcatcatgtttatatatcttctccaagggtctaagtttcatgttcatgtaagtcgatttgcatgaactcgatcatgttctgatcagctcttatgcttattgtttatgtttttcttcattgttataggatttgcatcttatttttgctggcattattcggagtcttatatccttacaatcgcggagcgctcttaacttctctagccattgtatacgctctgactttcgtggttgctggctacacttctgccgctttccacagtcaattttccgagactggatgggtaattgttttatgtcttacatttcaccctttcctttttctcttcacatattcaccactctgttttctgacataagcattgttgattttcaggaaaggagtgttcttttaacaggagttctctacgtgggcccgttgttcgtgacagtctctatcgttaatacggttgcaatagctaaggggactactgctgcacttccatttggcaccattctagttgttcttcttttatacttctttcttgccatccctttgctcgcctttggggggctaatcgggcatcgtttcagatcagacttttcagcgccttgtgctacaaaaccgtacccgagagagattcccccattagcttggtacaggaaaacacctactcaaatgttcatcggcggtcttttacctttcagcgcgattgttcttcaattacaccatttgtatgcaagcatatggggatacaagatatacacattgccgggcattttgtttattacgttcgctatcctcgtcgttctaaccgctatcttaagcattgttttgacatatgttcaactttctgctgaagaccaccaatggtggtggaggtatgttactcgccttttctcgttcgttctttcagagcactcacaatagctaatgtaaaataactacatcaaggtaaaaatatagcgaaaagttaacaaaaatgtagtcgacaaaaatatgcacatactatagatgagttattatagctcaaaaatttaatttgaatagtatttagctaaatgtagctacaacttttataggttttagtatatagttataaaattttataatttttagtgtcttttattgagtttaaagtgtaaaattagttataaatataatattttaatattgtgtattataaatatattatttaatgatctacaaaatagagagtaaagtttcaatgatgtattttgaagaataaagtagagaaactgatgggtaccttagacgatgatatgaacaatttatcacacttttccgaacccgaattttcctttttgtagtagtgtttttacttttcctaactctgtaatccgttgcactctcttatgcagatcggtgttgtgtgggggctcaaccgcgattttcatgtttggttatggcattttcttctatctcaggtcgaatatggacggtctcatgcaactttgctcctttataggttacaatgcatgcatatgctacgcgttcttcctcttgctcggctcagttagttttcgtgcttccttgatctttgttcgattcatatatcgcgctgttaaaagtgaatgaatcatatgaacaacaatttattctacctttccatttccatccccttaatatgttcacatagagattgtatagaagagagagagagagagaaaattagctttagcattctcatggcattgagagaaagaacaaaagaaacagaattttgacaatcaattatataacttttaaaatgcataacacacattttcatttgtgaacttggcatttttgttttttgtttgatgattgtttagtaattattatgcatttaagttattcataataactattgaagttgctaatgtggatgttattaatacttgagaaaacattaggacaagacaaatattaactctaccaattggtatttctatggtcttttttaatcaataaagtttatctatgataataattttccagaaaaaaaaactatatataataattagggtcatgtgcggtgaaacttctctttctttttattttttttttgtagcgaaaccgctttatttttactttttattgcaaatttgagatgccagttgaatatcatcgttaaatactaactgaattattactgtattgacttcgaattttactttcatgtatacacagtggttatccaattagtacttagtgttaatatttaaaagacgtctcaaatttataaagaaaaataaacataaaggagttttgccactaaagataagagattaagggcttgtttggaacgccgtattaagtcaaattgtattgtattgtattatattgaatgtattttatgtaatatttttatg

SEQ ID NO: 218033 - DNA, 7146 bp, Cannabis indica
gagagagagagatctagggttttagacttggagcttaagagctttagggtgcttgagacttaggcaaattaggtttaggttgatgctctttatataggagatcttacaagcgaataataacctaatatccctaaaaatagaaaatataacatatttgttacatgataaaataataaataataaataggttaattgacccccaagaataggtaaatagttgatatttatctcctatttttgtgggttgttgaagctcaattcacaacttggattgctgtctcaaatgcaagttgcacatcaagtgcttgccagggtcgaggttgcataccaagtgcctgccagggtgcaagctggccgaccaagtgcctgccaggatataggctggtcggtccttcctttgctagaggttggctggcttatgctggccataggaccggccaggggggtctggctagacctcttaaggtggccaatttattgtctctttgtcttgcttaagtatttggacttcccgtcaattaatatgttgagtaagatgacttggccttcttgttgacaagttgtactccacgtgtcattaaccttgcccacttggacatgccacatcatgtgtgtaaaaattgggataacatttacccttcaagtctctgtagggacgtctgtacggataaggactttccaagtttagtttggactgacggagcctaaactaggccgatcttgcaatatattcagtcttgaaatatttgctcttgcttatctgatcacattccttaggagaaaactgataatatttttgcatgttgcatggtaaatgagagagggacccaccaaaagctatataagcttggttggtgtaactccctctcattctctctcttcaaaaaagtaaaccaaagaaagctcttcacttcccattgaggccgacgcatccaactcctctaaaacccaagattcttgctttgttttgacgatccaagctttctactttctttcttgaaggtctttactagtgggtaagctttcaaatcctgttctctcttgtttattttgatttgccattgttgtattcaaacttttccaagcctttaacattctttgattctcatgttagattgtagtctttttggtattttgatccacataatagttcataatgtgtgatttcatgatgaaaaagatttagttttagccttcgttgtgattcttgactccttgagtcacgaagaacacgttcaagttttgaaaaacaaatattttgatccaaaactaacactgggcgaccctgggtcttgtttaagacctggccgaccctggggtttttcatgagcctagaaggctgggcggttcatacctgggtctggtggccctaaccgattcttggttgggtcatgggaccctggatagcctaggccttggcaagcggatggccagttttctgtaaatattgttacaaggtcaaaaagttgtcacaatagacaatattcgattgcgacgacaaaattgtcgttgcaacttgcattagttaactataaataagaacgtattataacaatttctttagtctattgtaacgacaaatattgtcgccaaaatagctctattaagaacaataagcctattatgacaactttttagtttattgcaacgagaatatttgtcgtcgcaataaatcatttgagaagtgtgaagctcaaaatgaacaaagaaccaattacagagtcacaagatactctcaccccacctacaaaatgagcatgtgctagaaaattacatttctagcaattgtatactcgagaagagcagtttccctttctttcaaaccttttcatagtttttgtacttcttacaaaacataagtacatacaaaagagttgtagctgtatgtatctagccaagaagcagtaacgatgacacattaaaatcattaattagtatggaattgacataagtatattctctccatttgtgcgaaaagcacacaaatcctattcttgattgtatatgttacatattgcgctctagtatttaagccatgcatatttgtttgaaaggaataaaaatataagaatatgagaatacgaaaataaattgaatggaataaaattttaaatacataaaaaaaaattcataagaaaattattaatttttttctaatcatacgttggaatgatctttccttctatttcaatatagaatagtcattccaacactttaatatgaaaccaaacaaaagaatagaatgaaaattgcttaaacgccacctatatgttttaagttttcaacttgttttcttttgtatctttgatactagtattggaataaaatattcatttcagattcttcatttgtagaccactcgtattggtctcttatctgatgttttaaatgagtgatcaatattaaggacaaaagaaaaaaaaaaaaagtagcaacagaaaagaaaagacatgagaaataaaactactaaatttctgaagatattacattaattaatgaagatggggttttttttaataaagagaaatatagaaaagagagggtgaggtaggtaggcaggaagcatcttagtcttcttcatcgacatcggtgacaaatttaccagtcccggggttgactgctgcaatgaaaaagaagagaacgttgaacaacactagaggctcaatttcattgataggaactccagtctcaatgtttagctgtgccaatgctcccttcccagttatgatttcaccgattagagagaatgcaaatcccagttgagccaatcttccaacgaaaagctcgttcgctttcgtaaatccaaacaggggacctgtacacaaccacatgttcatttataaatgagaattgctaaacgcacttaaaatactaacaccacaacacacaatacaagactgaagtattatatctttcttacatcttttctatttaataaacaataagaaacagttgttaccaatgctctttataaataaataaatgatttttctttttttattatttaacataggcttgttaaagagaaatgaaaaggcactagtggtgcaaatactgtattggtcttattgagtattgggttcaatatagtttaacataataacttttagaaagtatcgctagctaatcgcaaagcgacacgccttaagtcccactagtgcattgctacgtgttaaattaaacatagtcaagtggtaaagtagtacctccttccttaagtcccaaggcagctctgaggcttttgcctggaggaatgacagcgccttcgattccggtgggagggtcgtcgatgaattgaccacggtcacccaaagctccaatggctccgagcagggtgaagaggatgaagaagagaagaagtggttcagcttcataaatgggaattccagtttccaggtttagttgtgataaaattccttttccagttattgcttctcccaatatcgatgcctatacatacaaacaaacaaacttcattatatattatccttttttttttgtgttagtgtgagtgagacacagtagtgaaatttctatactcaccgcgaatccaatcatagcaacacgaccaacaaacagctcattctgctttgtaaaaccaataccccctgaggttccaaacaaaccatcttcaacctttggcttcggcttcacaacctattcaaaaaccaaatcaataagttcctactactaagaagtatttatttatttatttatttttgtttataataaaagaaaaggaacttaatatctagaattctgttattaccttcttggcaggggctttggtctttgatttgaagagagcaaaaacagtggaaattgcgggagagttggaagaagaggtgagtggattgtaagtgagagtttgagagaatatgttaactttgagtctctgaactcggatttgaagtaaagggtctctctttagatcaaccacatgacagttagagacagaggtagagcttagtaacatggtttgagccattgagatttacactgaataatatttgtagttagtaactaacaaataccacttcttgtaggtataattctctcaatttaatttggggggaagggaggaagaagatggagaattgaagaagatgatttctttctttctttctaattaataaatgagtgtgttttggtttcgttggcttaaaaggaaagagtggtatgtgaatgtgatgtggatatggttacttcgatgaaaggccattagagtgaccacgtctctggttgtactgtgtgatgtttgataactaaaatattatgagtttcgaattatagcaacctcaaaatctttttaacccacccactgagctcaatatcattgtgtgatccacactcacgtgattttatgtaaattcatttttcctttttttagtattttgctggaaaatggttcatgtttatactttctactatttacataaatatatttcttttcttaatgaaataaaatgagttgtttttggctaaactcttttaactatcaattaacttgcatttaatcttctaaacttacattttgactataaaatcctccaaattaatgaactattagcagctttcatcttttttccacatttaactgccaatatagacaacttatgtatacacttttatacatgtgtcacatttacttaaaaattataaaaattattttaaaatttataatatttttattttttaaatatttatttaatttcaaaataaattttaaaaataatgtttaaataataatattaggtatactaattaaatgtgtcatgcgtacaagagtgtatacataaacaatctataatgtcaattgatcaaagtagtttggaggattttgccgctaaaatttaagcttggaggattaaatacaagtgacacgatagttgggagcacagctaccaaaaattcaaataaaaaatagtatgctccgtttgagaggggtgggtcttaggacaaaattattttggaacccttttttacacggaaaattatgtaataccacatcatctttttgaggtatttgacgatcatatgtgttatccaaatttttgtcatcatgacgtggcaagcttacgtggatagaacctgtgccacgtggtagtacaactcactaaatggaaggccaagacagcatccgaaccaatgaagaccccagcacttaaatggggatcaagtgacaatccaactcgctctcgggagctggccagccatccctggccgatcctatggcggcaaggccagaaaacagtttcatggccggccaaggattgcttagtgggtcctacaggacacacctacacgtgggcatcataagtgggctgcgaattagggcccaaaagcccaacagacaggctcagaagtatcaagaatctaggggtattttggtcttatgtaaatatctagctaactattctattttcaagggatttaagttgtaaacctatgatttaggtctcctatataaatgccttaacctctagctgaaaaacctaagttgcctaagcctcctctaagctagaaatctcatattctctaagtgtcagactctctctctctctcttcgtcactctctcacacgcccaagcatagtagtacaacactcttggttgtccaacacttgagtttgccaggcatcaatccatacattgtaatccaaagggcactatagcagatcccacctatagcgatctggatagtgattccctcggaatttatagaactaaaaggggagtaggtcattacccgctatcacaagggagctgaacctctataacgaatcccgttgtttattatttcttactcttatttgtgcacacatgtggcaagcattagatctatcgaccctgttgtcggttgatcacttttcaaggtcaacaatttggtgctttcattgagagcgtggatatcgtgatctgatcaaacgccatggtgaacacaagaagaacccatgtcgtaccatctgcatctttgagtctccctcaagacccgcagattgcagatccagacacttgggttccagcacaactaggatcctcatgaataccgcagaggtggtgattcccatcaccacaacaaacgcaataagtctggccaccacacctggccagcctgacgtgactatctcgatggatccaattggcacgcccttgcctccaatagtagatccaccattggcgcccactgaaggaaggacctaggggcgacagcctcctggaacaacaactggaccttaaatccagttctacactggagaaataggctcgagagtgggcgagctagcaattggaaagcctcatctggacctaggaaaagaccttgagttggccagactcaaggaagttgtaggccaggcaagcctaattgaagaaccacacactgctgattgtgatgtattcattcagtagagatgcgaattcctaagatggatggatgaccaggactacatcatttgatctcaccaggcagaattagatcgccgcaactgggaggccaacgatctaatgagacggttcaatcagagaactgacagaagaggtcaggatctcttttgggatccacttcaaggaagattggtgttgtatcctctcgaatgttcaaagaacgacaaatggtgttacagtcaattccattcatgttagaatggctccatcccagcacatcctagttcttttttactgtactcacaatgttttctcttatggacggaagtagattccttcccattatgatggtttttttggggtcttcatgttgcttaaatttataatcactacgcaagtatacgcaatcaagtagtaaactcacacaggtgaggtcgaaccacagggaattggactaattactactaaattatactattgattctatctggtaaaagaatactttttatgaattaaataagacaattcagaaaattaaaaataacaaaggaagattaatcaagataagaaaatagggagacgaatcctgttgttaagttaccaatgttaatgtctaaatgctatccttctcttgaagtgaatgacagattatgaattaacctagctcttttcagatcttctaggttctaaatctcatgctctctaattaatctcttaattaaactaacatgaaatcagcattaagcaataatctaaatgt

SEQ ID NO: 218034 - DNA, 3840 bp, Cannabis indica
aataaaatactaaagactgttagtaccttttataattctctaacaataataatttgcacagcactttattccctagcaagaggaaaaaaaactaatataatttattaaatattattattattatatattagtttaaaggttccttgctggcttgccaataaaagctgttttgatcacatacatacacctttatccaactcttaacttacacaaaaacaaaaaaaaaataaaattcaattaatatcacatattctttattaaaaataaaataaaagtaatgtatatatttgtgtggagtgtgacttataagttattactaataattttgtatttttttattattactaattatcaaaacagtcatacttttattttgagatataataatctgacactcaaaaaaatatttttttttttacatacagattttattattggactccaagactgaaattagttaataatattttaaaatttatcatcttggaatcataatctttttgtttgtttattacttggttgaatcaaaatttatttatttaggtcgttttaaatgtgcaagagtaacttaaataattatccatccaccaatcaaataattaaaaagatatattttaattaatatcatttttaattttctattttacaaaaattattaatcaaattttctaccttattaattaagaaattaaatctcatatattttttaaaatattataaaatagtactttaaatttaatttttgataatattttttatttaatataattaatttaaagataattcctaacataaacagatataaaaaatctaactagtcatatcataacacctttacatataacttattactaagttttattttaacaaaaaaaatcaaaaataaatagtaattatttaatatatatggtctaataatatattacgtgtttctaagtcaacacttaaaaattataagataaggtacttttgttatcacagttttaactagaatcatatgtgtaacaattgtaaatgttaagaaagtttcgtcacaaatatatctttaatattttgttttattttaaaaaatataggttcaatttatcatttaacgaaataaaaacaaatccaatctgtatatttttcaaaatatagtgttcaaaataatacttatccacttttttaattaaaaaaagaatgagagttttatttgcatccaaaaatttataaatggactatattttaataatttttattttatataaatatatatttatttatattagtttattataattttttcttccaattcattttcttaaaaatatatttatcaaacaaatataaattatgtttaaaatattaacaacaaaaaattatgtgaatttttattaaaaaaaaaaaattatacatattttaaaaaattatacatattttaaaaaattattaaaataaattagatattaaatattgaaattaatattaaaattttctttaaaaaaattttaaaaatattttaaacttacttttttaaatattgtgtgggttttacttagaatttcccaaaaagaagtcccataaatcataacaaaataaagaaagtaaggctagctggtcctcttaataaaaaagctggaggaataaccaagggcattatcgtaatttcatcgaagctccaatctctctaattttttcgcttaaaagacccaattttccctttcactctcaccactctcaatttctctctctctctctctactttctctctctaaataatgtgtccaacaactaagcaaaaacaccgtagctccgccgccggagccggccgaagctccagatccgatgaatccacgaccggagaaaccgattggatgacggaatcgatcaatggcggatctctacacaaggttgacctaatcactggaattaacggctgggcttcaccaccaggtaatctcttctcactcagagccaagaattatctcactaaacgacaaaaatctcctgctggagattacttactcactccgatcggtatggactggctcaaatccagtactaaactcgataacgttctcgctcgttccgataatcgcgtggcgaactcgttaaggagatctcaaggtcagggaaaatctcttaagagctttatattcgctgtgaatcttcaagttcctggtaaagatcagcatagcgctgtgttttacttcgccacagacgatcctatctctcctggttcgcttctttaccgattcgttaacggtgacgatgcgtttagaaatcaacggttcaagatcgtgaatcggatcgttaaaggaccgtggatcgtcaagaaaacggtggggaattacagtgcttgtttgttaggtaaggcattgaactgtaattaccatagaggaacgaactatcttgagatcgatgttgatatcggaagctccgccatagccagtgcgattcttcacctcgcgcttggttacgttacgagcgttgcgatcgatatggggtttctgatcgaggcgcagacggaggaagagttgccggagagattagtcggtgcagttagggtttgtcaaatggagatgtcgtcagctgctgtggttgacgcgcctcacgcgccgagtgtagtgcgtggtatagcgaaggtgaatcatcataggtccggcgatggtgactatgacgataattaattgaaccttttaattaattagatatttttaattctttttttaaataattattttaagttttttttttgtaattgtgatttaagaatcccttgtataatgggtcaacacttggacggtggatattgaatcatgtacatgtagataataaaaaaaaaaagaaaagagaaaagtaacacccaaaacatatttgataatggattcgaattttcagtggatatttagtagattatatttatatatttagtagattattaaaattattgggtttaaagatttttgattaattttattcatttttactaattttgttatattaaagtatgttctgttttctgaacttttattcatctaagattttttaattcaacaattttaatagtttaagtataattttgtatatcttaaaattaaacaaaaattctaattagctatattttgttaagttagactcaatataaaatcaaagtatacacttatttttgcaatgtcgtgttcttaatgttcaaaaaatgatatgaaattacatagtacattttggaagtattcttgagcatactattaggatatttgctctttgaattaattttttttttttttatgttaaaattttggttaactaaaatttttgccctcttgtacaaaattatgttccataacttttaaggtcattaaaaatgttcccttgagaggttggatttaaagattttttttttctaatttggagcataatgtagtacatgtcaaaatttttggtagatatcaaagtctgggagcatggtttagtatataaacaatcactgaaatagcaaaattgaatgaaattagataaaagtccttaaatttaacaatctcaatagttcaggggctatttttaacgactttaaaagttcataaagtataatttgatacatgttaaaattcaggggcaaaaatattaattagcctaaaattttattattattagatttaatgatttttgtttaattttataaaattgtactttaattttgacatacatcaaattgttcttaaattttagaggaaaatctataataggactaaatataaaattatatcgggtaaatggcggcaaaacccctaatactttcgttttggtttcactaaacccccacaacccgaatttctgtgggtaaactcccaaaaccactat

SEQ ID NO: 218035 - DNA, 10036 bp, Cannabis indica
tttttattttaaactgatacatttctctcattgattattaaaattttaattacagttttgtaaacgcgccataaaatttatcccatcatatcattgatcggttggcatcaagaatggaaccacttcgacctactctacaaattggtgatcttaagatattggaagaatatttatttttaccatcactaaaaaaattatcgaaaccaaaattaaaattttagtttcttttgtagttaatttgttaataaataagttatcaaactttaatattaccaaaaaatattaatatacaaaacaaatttcataaattataaatatgttttatttaatatttcaaagttattaaacttcatagaataagttaaattaccaacagaattaactttatgataattattattttttgaaattacacatgtatttcctgtcataacaattgactaattaccaatatcctcccaaccatgaatttttctttgcatagcacgagtaaagataaatggctgaatattatttaagaggaaaatatatcatttgagaagaataaaacctgaattatagtcaagaaaccattgcacaagatacttataagatataaatagattttcgagtagaaagaaagagttataggagtggaaggaacaagatataaaagaaggttagttgttaaagaatttatgcaaaaggagggcatttactacaatgatatttttttctccgtggtcaagcaaacatcaataagagtatttgttttcttagctgcagaatttgatcttgagatggatcaaatggatgtaaaaattgcattcttatatgagaatttagaagaaaagatctacatggagattccagaaggcaatgagaatgatgatccagataagatttgccttttaaacaagtctgtttatggtttgaacatggctccaagacaatggaacctgaggtttgatgaattcatgatgaaagttggttatacctgaagcaattatgacacttgtatgtatttcaacaatcaaccttacctcttgttgtatgtagatgacatactaattgttggtaaagatatgaccaacactgataagattaagtttcaactcaagagtgagtttgagatgaaggatctaggcgaggccacaaagattttcgaaaattgagataaagagggaaaaaccccatacaatcatgttaagtcgaggcagctacctcaagaaggtaatatagagaaatttgggatgacttatgttaaaccagttgcaactcctctagctcatcactataaattgtctcaagagcaatctcccaagactgagacaaaaagaataaagatggatgatgtgacttatgctagttggcagtctcatgtattccatggtctgcaccacctgaccttgcacatagcatgagtttagtgagcctattcataacagaccctagagaagaaagttggacatcacttaaatggatgttggcgtacatcaaatggacactaaacactggtctagtatcagaaaaaccaggtaatttcaaggaaaggtgactggttatgttgactcgaattatgctacaaatttaaaaactagaagatccttagccagatatgtgtttagtgtgtttggaggttgtgtgagatggaaatctaatctctaaaaggaatccatttggcttaaagggttcacaaatgagcttgttcattgtaacaatcaaagtgttattcaccttatgaagaatcccatgtttcatgaatagtaaaagcacatagatatcaagctacatcttataagagatatcattggtagtaaatagatttcagtcaagaaaattctgagaactcaattgatatgttcaccaagagtgtaacaagagaaaattttaggcattgcctaaacttgctgaacattaaaaagcactaaaagttctctattttcagaggcaaaataggtggaacgatcaaagctttaaagggatacatggttatcttttaccaagtgactaaaataagtgaatttgtgggagattttagtaacttagtatactcatactgttaatctcatctggtgacttgctagatgttgcaggtttgtccagtcagctcccaagttagttattttagtttactaacttggacattccttttattgagttgcctatataagactttgctttctacttctttaggtgacgatctagagaggaatttagattacgtttgtaatgagtgagaagggttgttaaagaggatgtgtatgtttgatcacatttctctcaagtgagttaatttgtaaggtgcaagacaccccttgttaacgagattgaactctgtattctcctatgtattcctccattgttgaagatcgaatgaagcttagccaaaaagatagtttctcttggggattagtcaccataaaaaagggtgatgaacctcgttaaactttgtatctatttcatttagtttactccgcatttattttctaatttatatcattgttcgttgatttaaccattttagtactttaattcttattttatctgattcttgataagtgttaattcacgatattcaaatatcttacaaaaaattccacagagtcttgatcaatcaaatattgtgatttttccaaaattagttatgaacttacatgtgatattgtctctattacatcaaaattgtttttcaattcaaataattactttggtgttcataggttttcatatgtgttattacttcttcttcttgttttgttttgaaactctatctattatattagcttcttctttcctcacttgtacattgtaccttctgtggtgtttctctctaaatacttcatcttttcattcttcacttcattggctcttttcataatcaacggaaaggatttctactatttttcaattattttatcacatcaatatacttgtttgtgataaaataattaaaaaatagtcttgaggatatttttgtatgttattttaagagtcaaaactaaaaaaaatgaatttgtttgaacatgtattgtcttgaggatttgttacaagagatccaaatgcttgaagacaagaaaaatggttgttagtttctaccaacatatacatctttcagtgtggacattctcactcttcatcatgaaaaatactatccatgtccacaacataaccatcttctttcataacttttatcaagtactccaaaactgcattaatttcaccaaaattgggatgagatttatccccagccataaacagatgtgtcttctgtccaactagaatccaactacaaccaggcaacttcacaacccctttttctctcattttcaacctcaaagaattgacctcattccagtttcctgatgcagcatatatgttagccagcaacacataaggcgacgagttttgaggatctaactcgatgagtttctcagccacacgccgccctctcaactcgtctccgtgcagtttgcaggcagcaagtaatgtagccgaaatcataacatctgactcaaagtttagtttgttgataagttcttctgcctctttaagaaaaccccaccggccaagaagatcaaccatgcacgcaacgtgatccaccctcggctgaactccataattatttaccatactgttaaatatttctcggccttcaattacttttcctgaatggctgcaagcagtgagaacaccaaggagtgtcacatcatctggcatgatatgtttttgcttcatctcatcaaagacacttagtgcatcatctgcgtagccgtttttagcaagcccaactaccatggagttccaagaaatgacatctttcttagttctcatctcttggaaaacttgcacagaacttttgacatctccacatttagcatacatgtcgacaagggcactacatgttagttcatcttgatcataaccggtgtgaaaaataagggagtggatctctctgccatcgatcaaagaagacgagacagcagatgctcgaaggacactagcaaatgtggcttggtctggtagggcattgtcactgtgcattttttggtatagctgcaaagcctcctcactgcaatcattttgtgtgagtcctgagataatggcagtccatagtactgtgctttttggattcggaaactcagagaacagaatttcagcttccactttgcattgggatttcaaatacatgcccaaaagagagactcttaggaaatcacaaccaccatacaaaaggttccttttcagtaccacaccatgaattccccttcccaatattagcatagtaggttcattgcaggcatccaaaagacttgcataagtgatatcagtagggctcaatccagcagactgcatctcttgatataaagttatagctttctctaaatcgatttgacaatacccagcaataagaacatttatggagaccacaccccagtgaggcatagcagagaaaacttcatatgcaacttcaagggctccacacttggcatacatgtcaataagagagctgccagcataaagactagtttcgagaccagatttaattgcggaacaatggacttgttgcccttgattaagtgcttgtacatttgcacaagcactcagtatactggccaaggaaacctcatcaggcatcacaccgtccgattcattctttggacatgttgaaagcctcaacctcattctcatcctgaacatacccaacaatgattgcattccaagaaaccttatctctattcctaatgagctcgaattgtttcctagcatcttctagagcccctgatttagcatacatatctgtcaatgcatttccaacaaacaaattgagtgcaactttgttcttgataataatcgaatgcaattggcgacctagttctagaaactccaagcaagcacatgcactcaaaatgctagtgtaggtaaattcatcaggcttaaagccacattctttcatattggagaacaattcaatgacctccaatgcataaccattatgtacataacctcctaacatagcattccacaacacatggttcttagcatccaaaccatcaaatactttctttgaagcatttactttctcacacttggcatacatattgatcagagaacttcccacataaaagttggaatccaagccctgtttaacggcataagaatgaattatcaagccataatctaatgctcctaagctagcaattgtacttaaaatacttcctagtgtagatcttgttggttttacattagctcttctcattctcaagaaaaacattagagcctctgcctcataacccgccttagcatgtcccgaaatcattacgttccaagccacaacatttgggtttggcatctcagcaaacaaatcacaagcctcacttagctttcctataccaacacaagcattaattacagtgatataagcaacttgatcaggaatgaggccaactttcctcatctctacgaagactttaagcgcctcttcgggcaaactagcttgaacgtaccctgtcaccaatgctgtccaaccaactgtatccagctcagtagaaccatcaaaaacccggcgagcatcactcacgagattgcatttggaatacatatcaataagtgcaccttcacaaaatgaatttgactcaaaacccatcttaacaacacaacaatgaacttgtctaccaatgtcaacatccacacatccagcagaagaagacaaaaccatggccaaagtgaacccatttggggaaaccccagaactaaccaatgaaacaaatgaatcgtgaacatgttccaaaaaacccaactttgagtacattgaaagaaccgaattccaagcaaatacatctttgttctcaagctgatcaaacaccttctcggcataacccacgttaccacacttggcataaagatcaacaatggagtttcccagaaaccctttggattccaccccaagtttcaagctgtaaccatggataatcttcccattttttaacgtttgagttaataactcaggcaattcgtcgaacacattgcgtgctctaatccgtttacactgttctacacaggctcgcgagagattgatataaaatggttcgggcgtggcagcatgggccgagctctgaagagaagaagagagttttcgatggtggtggaaggagatagagctggagaaggtttccgagagaggtcggaatcggatgctcatcaactcggatagtttctatcattggtttgtttggttaactgtgctgagacggtagacactgtgtgagagtaaagctgccgccgagggaggactggaacccactcagtgagccagggacggtcgccgccgaagagacacaagggtcacggtggtggtggaagcctcagagttaactcttccgtgggtttaagccaatttctaatttctaataagttttatttcaacaaaaatattaatattatttcgtataattgtaaaatattaatattaaatttaatatcgattacaaataaatataaatatatttttagaattctaagtacttttttgttaagtattaagtaaattgtcacgtggcaatcactgattggtccagatcatatattatttttattaaaatataccaataaaaaaataatacctaataatgacttgacatttaacgtcgctctcggacccagacatggacctgcaactcaaacttgacctgaactcggacctaggactcgggacctggacacggacccggacctaaactcggacccaaacttgggacctgaactggtacgcagacttatgacccaggatcccaaacctagaacccgggacccaaataaaattaaaaaaataataacaggtcagatcaaattcgatcctaataagtcaagttaaatctaatctaacagaacagggcacgacagatcattacatgatttggatcggttcggatcggatcatagccaaatcaaatccatttacactcctacatcagccaaagagggatcaactacctctgttgacccacttctctaaaaaaaaaaaaaacaaaaagtcttgcctttaaaaaaatgttcacaatttgtacatgttctttgaattgaaatctttgatttactaccgaaaacaaaaattttgagttaactttgtaattgagtcaggctttttctaattatactttaattttgttattaaaatttttgaatcaatcacagaacataaacaatgcaacacaataatacacaagaataatataatgagctggttgcaattttcagttgatctaattgcatttacaaagaatgcataaccctactgtaataaattatattttgtttatgtactttccaattacattttgtataaactatatattatgtaaaggtgtaagattgagtgattttatagaaaaaagaaggagataaatttcaatctgtaaataatgtgggttttgtctttgtgtatcaaatattagagattaaaagataattatcattgttccaaccaaaacttaaatctggtcattgttccaagtttcaaatactgcattcactcctcattaatatgaaacatgtttctgtattacagattacacatctatatatatatatatagatatttaaaccaagtatgaaaattataataagaacatagctttgaatttttgtctaatgcattgtattcgaaggcttctttgaaatcatacaagggagaacatagctttgaatttttgtgagtttcaaattagtctgaccttctaaaataatcttctaatcaaaacataaacatttgagcaagaatcctgttatgacttatccaagaaaatttatttatatgaattttagactgggaaaatccaaataatggctattagaatttagaatggagtttgacacctcagcaactaactaaaatatgttagttattcgaccaaaatcagttactatatatatagtctaagactttctttattgtaattagggagaactagagagattgagagctctaagagcaaagtgtgtaatatattgttcactctttaagtgatttccctcgtgtgagattaatctgcacctgcggattagatcatgaaacgcattgttttatatattgaactttgtgaaacatctattgagtgtgaattactcgaaaattttcaaaaattattttcatatggaattcaacctctggatgaaggtcattagcctaagcggcattagctgcacactttctcttcatttttcttctctttgtaggcatcccctcctgctacacttcgtcttatgtgaagacaaagtaacaactgtccatgacagttattacagttagttgtttttctaactgtttttctgttatgagttagttacagatagtttggttgttagctctatttctgttgtaaccaattcttgttgtgatcacctagagctactgattgtgtatataagatcatgttgattcattcatcaataagattctctttcaatcttcaatctctctctttctctgtctttctctctttcttctctcttctctgttttctggtatggctaataactttcacatggtatcagagcaatttccgccattaatggcgaatgttgtttctggtggagctggtctgaatggttcaagaactaactctggtgacggcaacaatggaggtgccactggtcaacctgccagtcgtcaaccgactctcaatcgaggaagaacaagagatcatgatgagttctctcctgtctatttcactcacaatctttcaattcgtttaaatgatcacaacttcctgttgtggaaacaacaggtcttagctgcgattcgtggcaacaggttacaacagtatatcaaagcagatccccctgcaaagtttctttctgatgcagatcgagaatctggtgtgcttaaccctgcttatttggactgggaagtccaagatcagctcctcatgtcctggcttctgtcttcaatgtctgaaaatctcctcacgcgtatggttggatgtgagacatcgaaccagatctggtcgacattggagaagttctttactcttcaagtttctgcaaaaatacttgagtttcgaaccaagcttcagaacttgaagaaaggctcactctctctatctgattacttactcaaagtcaaacatcacgttgatcttcttgcctcagttggagaagtttacacagcaaaagatcatgtcgctgctatctttaagggccttccaagtgaatatgacacctttgtcatatccactaatactagattagaaacatactctgttgcagagattgagtctcttcttctagcctcagaatccagaatcgagaaaaccgatcgagagattgagatcagtgctcaagttgcctcacttgacattgataatccagaagctaatgttgccaacttcagaaataactttggtaatttcagacagcaatctccatccccgaggtacaattatccatctcagttctctccttctaatcgaggtggctacagaggtggatacaatcgtggaagtggcaacaacagctcctattctagctttggatctggaatgtatggcagaggtgctggcaggtcagtgaacacagcaaacaaacttcaatgtcagttgtgttttaagcttggtcatactgctatagattgtttctatagattcgataagaacttcactggtacaacaccaaatcaagcttcaagtcagtaccactcctccagttcagcacaggccaatgttgctagcaccaacactgctcaagacaacaattggtaccctgattctggagctacgaatcactgcactccagaccagcaacatctcacccatggagctgaatatgatggaactgagaaactctttgtaggtaatggggcaggtttgtcaatacaacatgttggtcagtcattcttttctacaccttactcatctaagtcatttcaattgaataatctcttgcatgtccctgacattacaaaaaatttgttgagtgtttctaagtttgcaaaggataacaatgttttctttgaatttcatgacaatttttgttttgtcaaggacaaggagactcgttc

SEQ ID NO: 218036 - DNA, 6463 bp, Cannabis indica
ttagtttaaagaaaaaaaaaaaaaaaacataataatacaaaagcagcttccgcataatttgcatagttgatatgccactatttcatggctttcaattttcaaagattgaatgcagattgtgtatagtattgattattttagtttgttctatttggccaaacactgctcactctagaaagaaaaggaaaaagggtcccttaatactacaagtgatgtcaaaaatcaaaccgacattgatagaggcacacaaggattaaaatacatttctaggaaaatagtggaaaaattcacaggtcattttcagggaggggggaaaaataaaatatgaaacgttctcttgtgtggtaatgtgggtgacaaagtgataaaaagtagaagccttttgtactgttgagcattacagctgataataagaaaacaaattttgacatatgatttatactgccactctagacaacttgagagcatgggacagttagctacagtttactgcactagcactggccacatacgaaaggcacatcactattctttactaaccactagatccaaaacgtatatagactgggaaaaactggttttataattgataataatgggcaagactggttttttatatcttgaaaacgatatatgagcacacaagtacataggaagtgatgtatgatttttcttaatcaaacttatgactatcctgaccacaagttttatgttgcattttagtatatatgagccaatacaaaaataaattaataaggattaccttgaatgaaaatgcttttaatagagaagtaggcaaaatatccacgtggagaatccctaggcactggaataatatcattttacaactactacaacaacaacaacaactggaaaggggttattacataattacatgtaacttttgctagtactatcacaatgtaggacagttatctgaacccctaaaagaacgtagaaaatattcaaatggacgatgattatattgctagtcaattctagggttcatactagtggctttaatcataacataagttaagttaacatgattggaaaacaagctccaatcacatcaaagacaagtaagatctgtaccaagtcaaacctgcaaggtgcaagaagccagcatatggatgcaacttgtattcattcattcattgcatctcacattgtagaagctttagcaaaacttgaaaatctagagaaatcattttttagtagatcttgtgggtttccttgttcaacctatgaaagatcaaagcacaaaaaaaaaattgaaagtaagcctttggctggtgattaaaataacactagcaacagaaaattgcatacgaaaatcataattagtcagtaaagataaacataccaaaataccacgatcaagaaccattatactgtccatgttcatgacagtggaaatgcggtgagctatagtaattacagttgtgcctctaaattcactagatattgtgttctgtaatattgaggctgtttgagtgtcaacattggccgtgcactcatccaaacacaacacctggaaagcgtgactgtcagtttttctttcatgacatacaagaaattactcaaactccccccaagtatatgattattcccacttcagtgaacgcaaatttatctttcttttctttcttttttttttttatgaacaaaaattctaactttatgatatgtaaatccaagagcatgataattcttttattgaaattttctccgggtcagaaaaaactcttacctttgaagacttaagatgtgcacgcgcaaggcaaagaagttgccgttgcccaacagaaaatgacattccagatccctttacatggatgtctaaccctcctactgcttctacttcttctttgacatgacatctctctagggccttccaaatctctgagtcatcacttacatggaaaggatctagattatccctaattttggaacaaacagacacagtgactaattttttttgaggaagtccatttgagcaaatacatttgtatcagttaaagagttcactaatacaaatataacttgaaaatctttatgaaaataccttaatgatccttcaaagagaaatggactctgaggaacaacagcaaaatgagcacgaagatccctaactggaacatcacctatgttaattccatccacaataatacatcctgtacagattgggctgaggcgaaaaagagcattcaaaatgctagactttccagcaccagttctcccaatgattcccacctgattaacacaatcaacaagatacatggtatatatttctactatatgttcttggacctcaatgtttaaacatagaactttcactaggatggatagggtacctacctgcataccaccacatatggtaaaactaacatcatgaagcgctgccggcaaagatggcatatatctcaaggtaacattatgaaattctatctgtccttggtatggccaattaggacttaaggaaaggtccccatctaacctttcttcagggatgttcatatactgtcataattatgaacacgtaagtcaacagttggatacttttaattatttaaggaagtgtatcttaatacctcaagagctctttcaacagaaaccatttccttttctgtttcagtgaagcttgttaaaaaactgcccagcaaagatacaactggagaggcataagagagagccagtcctacctgtgaaaatagacaatgcaccaactcaatatttgggctttgggtaagaaaataatagtatgattgagaggggtcaaagagaaattaaataggagtttggagataagcaaaattaccagccctggtgtgccaaaactaattggtaaatttccagatgatccaataacagccatgatggcaacaaatgagatgacaaatgctgccaacaactttaaaatatatcacaagtcagtaaaatattgagcggcttctgtatatcataatgaaccatccaatgcatgtatctatgtatacaaataaaaataaacagtcttttctcactcaatcgtcgcggcttcacctagaagtttatttgtctatccagaaatcagcctaccattaaactctgataatatatatacatcctaaaaatatatatctaaacattaaaaaaaatgcatttgttgttattcagatcccaagtataggatgggacaatagttgaatagtaaattactatagttgttttgtgtcaaacaaatcctgagagtctgagacacacctgaagccgcagagaaagccacaaacttgctgttaattctgtgtaggaagttttctgatacaacataacgtgtttcataaatttttccaaaaagtactcctgccaaaaaatatttgtacgtaaatttgatcagcttcaagttccagggaaaaaaaaattcatcaagaaatacaattagaaaatttaaaacaggatcaagcctggtcttgaaggactattataagaaaataactgtctactaaacgagaagagtataaatcttgaatatgcatttcatgtaaacagaaacagttgggtgtttcttttcactggtatgtttttctacatctatcttaaaatgatagtgtctcctacagccaactatttttaataacacccactccattattttcctttattttcacctagaatgggatataaatataatcctcaaatctaatttacaaactatttccagacttttatagagaaggcttaactatctctaaatatattgtttgtcaaaaaggactccacattttatgtgcaaaatctgatcctaaagtatcataaacctaaagctcaatatccacaaactggcctgatcccatatgacttcccaaagagctgggcttgaatatgtattaaaaagaaagaaaaaaaaatcatcatggagtggtgcttatagccactcaaatccaactatctacctcagacttgaatgcccttattgtagatgatccatcaagtgtctctgagaaagttgcgtatatgggagatcgagaaacactgtccagccttcgcagttcccttgatgttgacctgtagaaaaactgaagaatactttacttagtagacatctttcactttattatatatctaccaccaagatggagataaaaatttgaaaggttctttgtcacattcttttactcttttataccaatgtactttcaattctagctcacacctcacatatttactacattttcttgaacaattggcattggaaatgaagccacagaaaaattcaaaatgaaaaaaaaagaaagagaaacctgaagtttgctgtagatgaaccaaaatggcagtagcaaaagcagaaagaaaacctaaaggtggaaacaaaccttttagaacattttaagtaggacagttgagttccagaataaaggaattaaagaaatctccatatgctaaataataaatacctgtacatatgacaaaaccgctgcaattcctagcaggccaacaaaattggctagaagaatgttgagaatgaatggaagggaatcatcaattgtataaagatctgaagacagcctacataacaaataaaaatatataaattacagaaagaagaaaaaaaaaaataaaaatcaatgaaaaataccgtaaatgcatcaaaggataacctgttcaatattcttccacttggtgtctgatcaaagaaatgaacaggcgcattgataagctttttgagcaacgtattgtgcaccttaactgctgatcttaagccgccaaaagcaaatgagaatgctctcaccaatgtaagacaagaatttatgacacaaaagatgcagagtatagcctgcattaaccccatggcaatagaaaacagatctcaagttttttcatgctatcacaaaaaaacatgaataatgtaaagtcacctatttaattgttctaataaattgtgtgccaaaattaaagcaatactttcaatgtattgtggctctatggactgtaaagatatgaagatgctgccaagatttagttacatgtgtccacaaaaaagctcattaccaggtagaaggatgtggaatattctttatgatgtgcgccacttgctgtatcgacccaataagaaagccacaaatcatttccattacgggaagcttgcatcagtattgctgatacacatattataattgttaagaaccaaccagagaatgcagcatatttcctgcaattttgaggttaccaaaaaaataatgacaatgtgcaaccacaaatcccaaattcaaataatatccaatatatgaaattttgacacgcaaacattttacccacttgtagacaataatttcaactctgccctcttttcgcacctcatcttcaatgatttcttgagcttcctctgaagcagacacaatattttgttctaaaataagcttctgtttcccttcagtacaagtgcctgtgctaccttcttgcccgcatatgtgtgtaaccgtatcaagttcattcaggggagagaaagctgcataagatgacgctgccaaatcagcagaacttcctacccacttcacatgtcctttatccatcaaaataatcatgtcagcagaagatattgcctgcaaagtggagatgtagaaataaaaatatcaatttatgagaagaaatagaaatgtgactcattttccaaacaaaataaggttaaactagtgcctcatagagtaaattccccattagttttaatcaaaaccaagtttagtcatatttcacaattgattggtgagaaacaaatatgcagcagacataattcttatgttattgctattgatatatattttcctgttaagtatttactaatgataaccctgtacttcactcttaattttcccaggcaaatttcagatgacgtgaagaatacttgaaaatggtcaccattctattcataaattcaatctaaaggcacttgtttttgacacaaataaacagctagaagagtcaagaggattcataaaaatgacctgaacattatgagtacaaagcacacgggtctgatgtttcataagaggacccagaataccattatacaaaatccacctagcaacctgagcgtcaaccgcactaaggacatcatcaagcataatgatatctgagtcatgatacatagccctgtattgaacaaaaaaatataagaatcaaagtaagaaagcaattaaagctggttagaaggtagctgcattgggtatatcgtaaaatattgtaccttgccaaagcaagccgagctctttgtccacctgacaaattcactcctttttctccaatataagccatgtcacctccgtccatcagtgaaatatcaatgtccagcgcacatgcccataacgtgtccgagtatctactcaaaatttaaaaaaaaatgaaaagaaataaccggtaattaaaaaaaaaaaaaaaaaaaaagacaatgcccttacaagataaacatagtgaatatttcaaatat

SEQ ID NO: 218037 - DNA, 4419 bp, Cannabis indica
attgaagaaaattgataacccaaaaaccttaccactccatataattcctcctcatttgctttcgtttccattaaaaagatgcaatccggtttatagcgcctaacccaagacttaagcgcttgggtggccggggtttcacgaataccccggcaattccacgatagaagcctcatggggacctggggggggggggggcgttgataagggtcgcctccccacccgaaagaacattttgcacctcagtaattgacacatttactaaattccattccaagttttgagtactcgtaccttcattaatagtcttccccttctccaccagtctactgccagcacttctactcccctgtttagtgcctcttctactgccagctgatccccttccacggccacgggcgctactcttcctcttggagctttcaccattgcgactaaaactacccggcgtgaaggtttcaacttccaggatgggcagcagggtcaccggcgattgaggagttttatcacccaggttatgcacttcttctcccgaggtaatcacaggaatcacattaacacaagcctttcttttttttttgcaccagagaaagccagtccattagaggagaactcaaagttgtcatgggatacaacaacccgagaaggcccttttttgctttgggtcggacttaatactttatcaataacctcttcaaggtttgtatcagtgggccaagtaatgtaagtgggctcaggaaattggtggggtactcttgatttacaaacctcttcatgtggtctatcaaccatttggtcacgtgtgggccctatgtcagccattaggcttgctatgattccctcatctcttctcttattgtctatcttagtcatagggtgtttcttagagttgggtacagacctcagccccatatttccgaaattgttcatcttctcctgctcccttaagcacgccttctttgccccatgtaccattttctgttttggtgaaagcctcaccccgacgggtctctgcaattctggccattgtctccttgcttcagacccatcactttcatcttccagcatgaccatcttaccctttcccctgccttcctccggcggcttctcgacggcgtacgacagtttgatttcagggactttcatcctcggaatagccgggtcaaagcagttctttatcggcactccaaccttaatccatgctccatataagggaactgcctttccaatgggaggatacgcatattccaatggtcgatcgcatttcccataacagtgagctaaatgcccacaatgaaaacatattgctggaagtttatggtacttaaattgcacccattcttttctatccctcgatatgtttaggtagaaacctgccactaatctttggtttagaaggatatcgacttgaaactttaggaagcctctccttgcgattgtggccctcggagctctatcaaagtcaatgtactcccccacctttctcgcaatcacatcagtattctcccaagtgagatatggcgtcggtaatccatgagcctccacccaatacctggctttattcatatcaacaccctcccagcaaccatcctcaggccattgaacgatattcagcagaactccattgaccaacctaggtctttttttgagtacctcttttttatcattctcattaaaaaatattccccacaagccaggtttcattgtcttcaaccgccaagcaccctcaagtttccaaatctttgataaaatttctttcacacgaccccttgccactgttcttcttccaaaagttttggccaacactccttttattgtgacttctgcacttagctccacgtctgcctctaaattgagggtcatggactcaagaaactgctgcctcatttcatctacatcccctgccccctgagtttgtttccctgcttccgataaatcccctggggttccaatggttcccctccgatgcctatctcttcttgcgtcatggttacttccgtaagcttagttcccatctctgaggtttgttccattgtttgtaaatagagctaacgaatttggtaaaaattaccagagcaagcgcacagttcggcacagtccgaaatcacataaggtgtagagagaaaagtttttatttctaaggtttttattaaggtttgcttttactttgaatagccggatggtaccactaaattagtgagagaaagtatattttaatatattttttttatttgacaatttaaattcaactaagagggatataattgtaaagttatgattttggtcatatgtgtttttcctaaatccaaatgtatagtttaggaaacatcgtgtattcaaaatttggattattttacctcaaaaaatagattattttgaagaaaattttacagaaggtttcagacgtttatagttggtatgatcgtcctccacctagagaacccccagctgcccagtcccattcctttcatcccctgtcgtctttctttgtgcggtggcactgttcagaccaaacacaatgttgaccacttaaattcttctgagtgatcaagaacattactcatatatttggaaagctcattaacatatatagagatgagcccaaattaaagaaattaagataactcagttttatgctatatttttttttccccagattacaatgtccgttttaatgcatttttttttaaaaaatttgttatcatttactcttagcttactaattatggatttctaaagcgttgagatatgatcaaagaccacttcgccattacaaagctataccagttgtagagaagctaaatttcaaaattgagagtggagagcaactccaacacctgctcaacattgggaagcccttacaaaatcatgtaagtatatgttgaaatcaagattgatgttaattatttctccccttttattcaaaatatggtcatatagagaaagtgtcccacttcatattgatggggattagcttatgttggtcacatagtttactttgttcaatctatttctctctctcttgttatgtttagtagccaatataaataagcgagcaagcagttatgtagtcgccaactctatgccctccaaatatccaagaaacctaattaagagaagataataacttccttcaaaataaaaagaaaagataatcgcagccaaataattaaaatagtctgtgtaaaataaaaaagaagagcagtaacaagaaataaccatggtcataaatatttgtgtaagatgaattaattttttttcttgaagagtttagcctactgtacttccgttgttcttaattttatagcagtatagtatagtatttgaggttttatactatgatgatgatcttcttctatactctgtcaaattactctgctcagtttcaatttttcatgaggaaaattcaaatttttgttttttcctttcattatttatgttcaatactattattataattttttttcataaatgaatcagatatatacatacacattcattaataatatattcaatgaattcatgatgcaatatgttgctgtaatgtcattcaaaaggattgtgtgaatcaaggtttcattaacttccagttccacaaatttaagttcaaatataaaaattggttttgtttaaaaaaatacgggtcgtcacgaatccaaacacggtacgaaaatatcgagcctataaaccgtgtcaggtatacttttaaaaaatattagtacggcatgacacgatttatattttttttaaaatacagtacaatatgatctagtttttttgaaaagtatgataaatacaagtaaaaccagcacaaccttacttacaatactagttggaaattgaaaaaaaaatactcatttttatattagtgcaacactaaatatgagaagatggttggagatgggctacaacaaatttattcttgaaattggtaaattaagcgctgagcaaagttggagaacatgggccacatgccagttttgttgcagaaagtgcgtctgtggcgagcactgagaggtttgaatgtgaatgtgttgcaatgggagaatgaggaaacaagtccatggaaataactccacgttgtcaactcggttgacttcatttggggatgtgatccacgcttcttatttgtatgattaaagaggacttcagttaaaagtttgggccattggtagataattgggcctcccttgtggaattagttcaattccaaaacaaaatacaatctagggaattttttaaatatatacataaaactaataatatttatatgtatagcctcagttattttaatacattattttaccgaaaatacaaattaatatatactcatccacacttccgtgtttcctcctcggtttactcagcatcacttttttttttcctctttctctgtagcctagccaactatttttttgaagt

SEQ ID NO: 218038 - DNA, 2638 bp, Cannabis indica
attacttttaacttttgggaatatatatggtatttaaacaaataattgaatcgataataatttcatgtatgatgtatggtatgtatatatattggtactgatgaaaaacgacaggtgtgaatgattcttctatgtactgtaaaagacctaattacctctaacaaagcataacataacaataaatttctttctcataattcctaggacaaaataaagaaccaaaatctttagatactatattatctcataaatttttaaagttttggcatcacaaattttgtttaagatcactcatttttaaatctctcatgttgcaactttccatgttatctttggcatcttatcacattttctttgacaatttatcacaaagttgaaggagttgatcaaaatattgttgatggataagcgaatgtgttgttaaaaagaatgtgtaggtgcggtataaaatagcttttattaatattattacttttatttgttttgtgctaaaaaattacttggaaaatatcgagttgatgaattttgtcaaagttgacatctttaggattttttgttggtttgaacgtagcttgcacatagtttgaattaggttggaacctagtctgcacatggtttgaactaggttcgaacctagtctgcacatggtttgagctagccttgcatagttcaaacataacctaaaacatggatcgaacccattcctattcatccaccatgtcatcattgtcatgtttgataggccttttttgtaaactaacatgttttatacaacatattttggaatgggaaataaatccctaaatattcagtactttaaaaataatgattttacatatgaaaatatttgataaatatgtattcttatttttcttcacaagttaatccaaatttagtaaataattcaaataacataccttgaagcgccattaagataaggaaggtggaaacttggggtggctggcagagactcatggggtgcacaacttttgaggcagcaattactggggcagatggcggtgacaactatgaaagtaagcgaaagaggcttcaaatagaatgaggaaactgatggcctgtgggggggtttcatggggcggcgatggcagcttgaacatatgaaggagggatgtgactgagaaattttggaaaaagacctctaactttcattaagggattaaattttctcacaaggtctttaaaatatattgagggatatatttaataatatgtatattatgcggtaaagacttatccatctccaaaggaaagtcagtgattccgcaggagaaatgggagagaagaatgctaacctgttaaaacttgtaaagtaagacttctttagaaggggaagaaagtgtgttttctcggaattgtgtattgagtaaagtcaatgatgttccgagagaatcaagctctattaacaggattttgtgtttcatttcacaatgatgatgaagagtagtagtattttttcacttccataatgaatgttattgtacttcaggtttgtgaatgtccttcgctatttgctcgattggaagtccttaatatggctagtaatcgcctcactgatgcttgtgcatcctacctatcaactatactgcaaaattgccgaggtaccttttcttagtaatcctgctgataccaataattccatttccaatacgttttcagaaattttaattttttagtaccttatcaataacttcgaatagtgtcgcttctttttggaatatgttgcaattagttgttggaggatatttttttggttcaatgcagatattctcatgcttcagctttgcttttgtttgtagccctttgtagcttaaacgtagaagactgtgccataacgtctagaacaattcaaaaggttgctgatgccttagatgctgggtctgtccttgaacaattatgtattggtaagtttgctttatcttttttttttttggtgatgacagtgtcctttgattttcttatttttaaattaaaaggttgctcaacttcctctcctacaggacataaccctgtctctggaaatgccatcgttaatttactggtcaagcttactgccttgaaaaggtttgaatcaatttttaaacttcattattgttctcttacatatagctataaatttgctgccaactgaagaacaagtatgtttttttctcctgatttttctatagtttttcaaaattgagtctgaatggtttgaagcttagcaagcctgtagttgatagcctttgccagcttgctaaaacctcttctttgtcagcattaatgcttggaaagactggtattggaactgtgagtgaatttcatttcattttaaaagtacaaatgttattgtttatttaactgtagagttcatgttgcaatttctcctatgctgactgcgtatgatctattctggcaggaaggggctttaatgattacggagcttatgttcaatgggactgatgattctgtaaaacttgatctgtcatattgtggacttacacctgaatacattttcaaattaaatgctgatatctccatcatttgttgcattcttgagctcaacctggcaggaaatcccattacacagcaggtttgctattttatgctgtattttttctgttgtaactggaaaaaaaaa

SEQ ID NO: 218039 - DNA, 3537 bp, Cannabis indica
agagagagagagaccaaaaataccttacgtgtgcgatggctccgctgtggtttggtgcgtggtctaacaacgccaccaccccgaacctataaaaaatcaaaccgacgttttcaaaataaaatgaggaatgagagagaaagagagaataagaaagagacccctcattttttgattttgtggagatgaagacggtggtagggtgctctgtctgctagtggcgatgagccgatgtctgccaaacatcgaaggggcagcgccatcaactgctggcactgagtcgacgtcttagagagagacggggagagttagggccaactatgttgtgtgagttaagttatattacgtttttatttaggtttttctaaatgggcacgaagcccatacgtgtttctgtaattttttttaagtaatttatgcattagtttttcactgacaaaaaaatcttgtaaactaactctaaatgctgtgtcgaagcaaaattgacgcaaaatttaacccttaatttgtgttattttttaaaatttcatctttagcgttagtttttgttttagtatcgaagtaacaactgacgcaattaattattatttccgtcagttaacaaccgaagcaaaaaaaatgagggctgacttttttgtcggtcgactagtttgaactgacgcgttgatcgatgtaaaaacccttttttgtagcagtgagtttactgaaatatcatttataatcaactaagtattttaaagataaaatacatcgaaggtaaaacattaattttttccttactcgattgatgtaaaaacccctttttgtagcagtgactttactgaaatatcatttataatcagctaagtgttttaaggataaaatacattgaaggtaaaacattaattttttttcctactcgatgtaaactgtctatagagaatcattgattatttagattaaaataatagataattaatagcgtatctatattagatatgttgagtgttctttgtaattaaaagcgcaattctgaatctatagtggagtcaggaggaattaataagttatgaaatatagttagtaaatgatctacttattgggagcttgatttcataggctcatggtccccacattatttgggataatattgccttgtagagtcaattaattgatttaataagtcaattaaaattcaaaattttagactatcttatttaaaaaatttcactaagcttgggcaaatttgaaaaaaaatagagaaatgatgtttatttgttaataaaggaactgtgtgagtattaataaatatatttaaataatattttgtttgataattatttgtagttattaaattaaaattgatatgaatttcaaaaaaaaaaaaatttgatatgtaaataattagattagattaatggcaaaattggaaaaaagcttgttgtttcattaagttaaaaaattaagtggcaaaaatcaaatctatgggccttcacttggtgaattcggccatgattgagattatgagcccattagtcttttgtctagcccatctcattctaatctaaccttgaagaaagcctatatgtaaggaataagataacaagcttaccagataactcattccttggcctagactattcaaagagactaaagtggcatttagttgttggtaatgaaatagaatggaattgaaaggaaataatttttattctattcttttgtttggttgcatattaaagtattggaatgtcattcaaatggaatgacctttctactattttagtgggatgactatttcattttgaaatagaaggaaagaccgtttcaatgcatgacaagaaaaaattgaataatgtttgtatcaatttttttatgcattttaaattttattccattctattcctattctttttcccattctcattcctattcttatatttttattcctcccaaccaaacgccacctaatttcattagcctaatttgaaattccttagcccttttctctctcatattttgttgaaacttattttactaggatcttaatttactaataagtatgtttgattatatacattataatttaatttgaaattccatagccattttctctctcattagcctaatttgaaattctatagcccttttctctctcatattttgttgaaacttattttactaggatcttaatttactaataaatatgtttgattatatacattacaatctaatgtcctaaaatatgaaattaatgaaacgataaataaacacataaaaagaatagaatcattacattagtcgcaaccgaaattaatgactcctttcgttcaatcactctaacccttagttcccgttctgtagcagggtattgccaagtgatgagcttggataactttcttaaattcgacacgtgacaaaactacacgatcttccataaggatctaagtaccacttagaatagcatgggatgatactcaaatcactaatggaataaaataattacaacgtatacgattataaaaaaaaaatagactaaaaaactttcatgaatgtcgaaactaataaaaagtgtacgaaaacattccttttaatagatgtacaataaatttgcaaatcacattggaaattaatcgtgaaacattgcaaaatcatctcaaatcacactcaagctttcatttttttagtcacgcattgcaaatatatcgcaaaagcatcgcaaaaagttgaaaagtatagaaaaagtaaaaatgttttaagtcaaatatcgcacaacatacaagaattattgcaaaatgtcatcattaattttaaatttagtctactataacaaatatatcgcaaaatattataaaatatcacaaaaaattggaaaattaaaagaaaaaaataaaaaaaaaaaaaaattaaatatccaatttttgagcaaaaaataacaaaatacaagctacaaatatgtagatttgttaaaaacaaactatatatatatataaataatcaaactcccaacaatattttttttagtcaatgacagtggtggtggctgctcgcagcagtggtgggggtagatcatggtggtggtggcggcaactgttttggcaaatggtggtggttttggcaagcagaaagagagagatggaggtaggaaaaaataaaaggaaaaaatggaaagttaggttaggaagatattgagactagtatttttggtagaatgagaaagaatagcataaatttttaatgtgtattatggtatatgtatatatctcacgttataaataaaaaaaaacaaattaatgatatttatacagggaaatttgaatctatgtttaatcacaccatataattaaaaaaaaattattcctctattattcattatattttttttttttgaaaaactattattcattagatttaaagggtgactattcaatggttacatttttattgtaaccatatagttccatttttttaatttgtaataataggttatgaataggtaaaaattctatttttaaaattaattaattataattaactatttttttaagtaattaaataaat

SEQ ID NO: 218040 - DNA, 6087 bp, Cannabis indica
atatttttgtacgatatatatatttatatatattcttatatatagtcattaattaataaatgatattgatcgatctaattattaataataaacaatattctgaacccacctaataaaattcaaccatcatacattaaataaaatctgaagtcgacaatcaaagcttttgacatttgatacatagtgtacaatagaatattgcataaataatttgtaatttgacattgagctgtttaaattgactatgtgaggattcgacggagtaataatgtaatgtaataccaataatgagtgactacgtccaattatgtaaacggtttcgtgatactcatgccaaagttttatttccttacttcattattagtttaccaaactcagatttttgactttattttgtggataagattctgaaaattaagtaattttattatttgtcaagaccatgtatattgtattgtataggctgactaatatattatttgcttaatcaagtaaaccccatattttacatctaaatatcattttaaaaatatatatatatattttgctccttcacataataagatgtattaaattgtcgtctccaagaagtgatggaccaatccattattccaaaaagtggtattttcgcaaatgttgatgacttctcaaaaaacaatctatgtggtgagctctaattttcaggcccaccaaatcatcataaatactcttgtcgtggacttggaaacccacgggccattgatcaattcctaacacatttgtatgttcaaaagaaactcaatttcatttttctttgtgagactatgtgtaagaaagatattttggatcgtatcaagagtcgacaaggctttgatagttgtttcactgttgaggcccaaagcaaaaaaggtggtttagcttttctttggaaaactaaccatgaagccatcttcttggttattcagataaccacattgatattgaagttcacctacctagttatgcacgatggagactcacgggattttatggcgagccaaatagaacacttcgagatcgcacatggcatcttcttcgaactattgctcatcagtcgcctcttccttggtgcattataggcgacttcaacaacattgctacgcaagaagaaaaaagaggcagtcggccctatcctccacatcttattaatggtttcctgagtgttattcgcgatttctccctgcacgatttaaagcttcatggccatgccttcacttgggaatgcggaagaggtacgagtcaccatgttgagataaggttagataagacccttattacccaactttggctgaatatttttcctaatgctacactatcaaattgtgatttttcctctagtgatcacacaccaatattccttcaacctgaaactggtaatggcagcaaccacctccatctatttcgctacgaaaatgcctaggctcgtgagccattttgcaagcaaatcgtaaagaactgttaggaggagtatagccatctttccctgtcagataaaattaacaaatgtagtgcaagcttgtcttcttggggttataaacttactgggaattttaagaagaggttgaataaaagcaagaaaagattatctaccatgagaggctctgatgatcaatacttcattgccgattttgatgaagaaaaaataattattttgaaatccttgctcaacaagagatttattggaagcaaagatcaaagcaacattggcttcattcgggtgacaaaaaatagcaaataatttcatgcctcagcaagttcaagaaagcgaagcaaccagattctgagattgaaaatttcaaatgataattggaaggaatggggctcaagattggatgatctaattacaagttatttttcctcaatcttcactaccgatggaactacctgtaacaatgtggtggataatataaagtgttctgtttttagggagcaaaatgaagacctgcttcggcctatacttgctgaggaaattaagcaagctctctttcaaatgctcctgacaaagctccggggccggatggcatgggacctgatttttatcagcaacattgggacatcgtggggcctaacattgtcaaattattaagtgatttttttgccacatgtgtttttccacaagagcttaatgataccaacccggttctcattccccaaaaagaaaaatgtctcctcaatgggtgacttgcagctaattgctttgtgtaatgtttcgtataagattggcttaaaagttcttgccaactgtatgcgtaatatgattgactttgttatatttgaaacccaaagtgcgttcatactaggtcgtctgattttggataatattatggtagcctttgaagtaatgcacaaattgaagcgaaaaaggaaaggtaaaaagggctttatggctttaaaacttgatatgagcaaagcttatgaccgggttgaatgggattatctgcgagctatcatgcttcgtatgagatttgcaaaaaaaatgggtaaaccttatcatggcttgtacctcgctgagatataccatcatgcatcacaatcgtgttatgggtcctatcatccccacccgtggaattcggcaaggtgacccactctcaacatatcttttcattatttgtgttgagggtttatcatcaattatcaagaagtttgaatcaaatcaactcctctgagggtgtcgtgtggctaatggggctccatcaatatcacatatgttgtttactgatgatagttacttattttgtcaagcctcttcgagagcagcttcaaatgtacgcaccttgcttcactcttttaaaatggcgtctggccaaaaagtgaatatcaccaagtcatccatattctttagccccaacactgatcttttgctaaagaataaaatctgttcaacactggggatgcctgaagctgatgagcatagtctttaccttgggcttcctaatatcattggtaggaaaaagactaaaatacttggctttctaaaaaataaagtggtcaatcggattaacagttggaatggccagtttctatctcgtgctggaaaagtaattcttcttaaaatggttattcaatcctttcccacttatgatatgagtgtctttcttattcctcaaaaaaattacactaaaattgagacactaatggctaacttctggtggaagaccacatccagcaaaggtagcggggttatttggatggcttgggataggatggcagttcattaagactatgggggcattggtttttgacgattacatgattttaaccttgcaatgcttgcaaaacaaggttggtggcttctcacctcaccaaattcgcttatcaaccaaatatataaagctaagtatttccctcggtctgattttcttactgttgatcttgaaaataatccaaactttgtatggcggagcatttggcaagcaagagacctggttaaacttggtgcaaggcgtatcataaggtcggggaccactacaagtatactatctcatccttcgttgcctgatcactccaatccgtatgtcaccactactcatcctggacttcatcacaaaatggttaactctcttttttatcataataatatatcctgggatcatgagattgtccatgacatgttcaattcgcgtgattcatctttaattctcgagctacccttatgtttttcagctggtgatgattgttggtcttggataggggagagcaccaattctttctcaatcaaaagcgcatacaatctgctgtagaaattgacacaatatcatcttggtgtggataattcaggtttttggcccaaactttggcaacttagaactccccgaagttaaaaatttcatatggagagcagttttgaatgcctttcccacatgtttactagcttgtcactaagcatttaaacatctcttcggcttgtccagtctgcaagagtcaacctgaatctatccctcatgctctcatcagctgctgctttgctccattatcatgctttgttgggcaatctggaaagcacgcaacagtcttgtttgggataagaagacttctactccccagcaagttgcttcatcggcattagttacacttgatcaatggcacaaagctcaggataaggtcaatttattatcattggctcttaaaactgatggctctaaagctaagtaatggactaaacccgtacctaatacaatcaagattaatgttgatgctgctttatttgaaaatgaaggctcttatggctatggaatttttgcacgagactcctttggcaccttgcttgacacaattgcagtttgcaagaatggctcttttactgctgaagttgttaaagccagttggggtaaaggaagcccttagttgtctcaaagataagagtttggataaagtggagattgaaaccgatagcatgctgaccgttcaagccattcgtgcctctcatcggatgtcctctgttttggggttgattgttaatgattgtaaacttttactttcaaatctcccaaatatcgctttgcatttaattagacgatcaactaatcgagttgcccactatgttgctaggcattctcaatttttatctggttgtagcattcatttacagaatattctgcttgatctacaggaccttttgtactctgaatgctaaatttcaatgaagttgttgtttcatttcaaaaaaacattattgtctcaaaatttttatttaaaaaatattctcaaattatattgagattattaaatttgaggatttttgtccaattccattcaattttactaatgtgatgattgtgcaaaattaaatcatacatcttgaactttgatacgtactaaatcgtgtcttttaaactttgacatgaacaaattgtgcccctgaactttcatctatgttagtaaaattggacagaagttcttgaatctaacattctcaatagttcgttaaaaaaatttgatggtctgaaaagttttcaaaatataatttgatacatgttaaaatttagggagcaaaaatcttaattaatctgtttacaatattattaataataaattattgttattttcttgagaagagtaaattattattattattagaaagtcaataatatcataaaataggttaagaaaaattataaaatagcaatgtttgtttctttttttttttttaaattaaatccttgaattgcattaaaagaacacttacaaatcgctgcactagcagctaagaaaaacaacattcagaatctatacaaatttaaaagccaatcttggtctttcactcttattttttttgtggtaagtctcccttaatctatttacaatcaaatattttgcaagtaaaataagcactttaatagttctcatctcatgagaccaaatggctctatttctttcagcccaaataaagtatacgcaagagttaaaagacaagaataactttaaagttttactctcgctttgcttcttcttatataattcaaaataccttgaaagttgtagttatgagggccaattccaatccaactcaacaactcctttgtaaatctcttgttaaattaacatcaaagaataagtgcagtttctaactcaatctcccacaaagaacaaattttatcagtctcaaacccattcaccttgagaataatgttaaattattaatatatataatggtgactattcaatggttacatttttattgtaaccatgatagttgcatttttgttgacttgtaatagcagggtgttcatagttgatctaattcaattcgcacgatccaatctaatccacaaagtgcggatatccgcattttacgaattggattagattagaaaatttaaaatccgtacttgtgcggatcggatgttaattaacatctaaaagtaatcgatccaatctattctccacatatttaaaaataaataaaattatatgtacaaataatacattcatgtaaagaaaatagtaatttaaaaagtttaatacatataatacaattatatttcaaaactttatagatcacatgtatattccattcttatacataatttttttttctaaatataatgtaaaatgaaattaaatattttt

SEQ ID NO: 218041 - DNA, 1803 bp, Cannabis indica
catttcatataggtgtatatatcaataaaaataagttagataaaaatatgagccaactactggactctttatattatgaagccactactataatttattgtaggaattcaaaatcccacctgcaaaattaaattacttgcactgtttttgcctttcttaatggcctaccatgaatatgaatctactttttatttctaatgttactatcttttcaagcaatgtaatctcttattgccttttcataataggaaagtaccacaagttggaaattggagatgactttttgaagtgagattgagaatgaaaaggacaattatgatttagagagaaaaagacaagatgaaattcattaagaagaacttcaaagttatttgacagttgagaattcatggactttatggtccatattcactaaacatacatacttagttttctctccattttatcttctataatttaagaaagtcattcaatgtgcaataattgatctttaattctcgtgtgagaaaatatcaaatcaacatcagaaattaagctaattcataattgaacaaagaaaaaataacttgaattgaactgaactcagtaatatgaaattcatgcttggtgttggtatggtttttgctatctaaaagaaggtcatttcagaactcaataaccatttttaaggaaattaaagtggatggttcgaatcccaaaagccccgccatggtggccaaattgaaattacgacggtttaacaaatcttttaagctctgtgtggggggcaccaaggaaacaatttaaagatgatgagtatcgagtctaaacgacaatcaaatgtgaatcacgagtagtttgcgtttacacaatcctctccaactctcttgcataactgagagtctggttgatgagctgcagggaaggtatctccttgcagggtgcagattcttttgccttctggaaaatcaccaaaccatccttaacttcccactcgggatgctcctgtgttcataaagatatatttcaataaatgtgtcgcacaatcaacagagaacaataatgtaagagtagcacgaagtttacctcatcgatatacttcagcagttcttgttctgaagtgtacaacaacatttgacaggcatctttgatcgaaagaaaatcatatgctttctcactgcatccagctatttcatctctgtaaaaagacagaacagatgataaaatcaagtttcgaatataaaattgccaggaacattcgcttgatataataaattattatgggagattttctactccacatatttggaagaagataataccatacctaactgtttttgccagaagatccatgaaataaacataagtctcatgcggaactgtctggcgagcactcaacacgcgattataagccccctccatgaaagactgctccaactccactgcatgtttgatgcatgggttctccaaagctgaagatgacagcagctccaattcagtatgaaactcagcgattctgttctgcacgaggagtctcaacaggttgagacctaagattgggtgctcttgagaagatggaggtaatcggttcctgccccaaccagaaaaagataaaggaaatttcaatagcgacattcagaataaggaaattgatagaaactcatgagtaaacaaaaaatagtaagcagcaactacgatatgtttctcctctccagtctctttattttttggtttaatagcatggattgttaatttattttttccaaacaaacaataaaactcaagaatatgctgagataatgattataacaaattaccgggcat

SEQ ID NO: 218042 - DNA, 3126 bp, Cannabis indica
ttttttttttttatttattgtaaatattatgcattatacctatatatcggtctcgatattgtacagattaaaaacataagaaataaaaattattctctctaactttcattctattctttacaatgcgatgagtccattcttttggctctgctctctgtgtctcgggtgaatcgttggagagtttaccaagtgaagttgatgcggattcactttttagaagtaagaagcagccgctcccatggtggatgggtatagactgcgccaaggtaacttgctcttccatggcaagatagtgctgccccctatactttttctttcataccacagctcttggatgagtaccatggggggaacaagtccttataatttataggaaagctttgaggtgatcaatgaacagtttcctgcttttcaccttgaggacaaagtgtggcttgggaaggaggtaatgatagatcagtagtgagatacatatatgtaagaagaaagataatagtgggtgaggtgtcctgatggctcataggataggagagagtgaattgtctgttaggaggcttgctgtaataaagtgaggtaaggagaggcattagtgttttatgcgaattccaggctctcgaactcctggcttttatctttctatatttgccattttatatcaatatacaacaataccttgctgaagctaacttggaacttcagtaggatttcttcttcaatttatctgtttgctatagtttattgtgaaattcagctaagcatgtaccaatgatctagatcaactttttaaaggccgaatagtattttgtgggactgagccatcatattcccttttcttagtgtacgtttaaaactttgtaaatctattatggtgcactaggcaatattactatattgtgaattgctgttcaatgattcatttagtatttgccataaatttacaatgattctttgtttataaattcaaacatattttgattaaacttgcagatatggcttcacatggagaagctggaggcagaggcactaaaagaaaatgtgcatcctcttattcgtaaagcaatttattgtggtttgcgtagtccaatcagtgcggtggtctaagttttgcgtgctgattttgtgaagcatgacttgaagttaatttgcgtgtacctgtacgcaaaatgtaaattaggtagtgaaaattgaggttagctgcggcagagtaatttattatgagtcgactgtcactttagtgtacaacccacttgcccatatgaaacccttttaagttaattgaggatcagtgtctcctgtaaactccagctgtagatgcatttttatgtttagatatatgacaatatttttcgtttagcgagagatgtgaatcttttactgtctactttaaaaaaggaaaatgtaattgggaaattatcagttttgcccctatattgttttgctgtaacaagcaattgacctgtaagttttattatatgataattaggtcttgcaaaataaactcaattctggttaaatgttttgcaaacaatttaaattacctaaaaatttgacaaatgtttatctcgcaatttaaatttaacaaacaattagttgatttttactccgtgtatgtttacgtgtaattatgtgcatgaaactcatatgtgattgacccatgcgtctatttgtgattggccatgttttggttgggtaggattactaaaaaattgatgagttaattttttttcttcaataaatcatataatgaattaaataaatatccattaaaaaaattataataaaatatcattcataaaatattagaaaattataaaaaaaaaattcctaaataacattataacattaaatttttagggctaatttaatgagcatttatgcctaatttttatgtaagatttttccccctacagaatttttcttttttgtttttaatttgagttagggcaatgctatttttttttttgcttttttatttttttttattctttaatgttttatatgtaattcattttttttgtcggatctatttgtaattacttaaagattatttttaaatttaataacgttttgttttatataatttatttcataaactaaaatatgaattttaattttttttaattcatataatttttttttggattttctagaggaggttacttgttttttttgtttttttttttttttttaatataattgttatttttttatatgttacacgctatttataatatttttacttgtaattttatatacttgtaattttatatactgtcttttatataagaagtataaaagttatttttcttccattttgatatttgtctcctcaatatgatattatttttttaaaattataaaattaataaaattttgatgtgatgttagttgtcacatttgtggcatttttttttaattgtaattatattaagagagaagagttatatattacaactcttctttttaaccgccaatgttatactattcttcttcatattttttttcttcatttttttagttttaaaatttcaaccacgtttgtttctagtgtggttggcttttgttcagttttgttgtagttgatttttgatcagtgtttctttttttttttttacattcatttttctctgattttttcccttctaaccatttttctttttctcgtataaatttttattttattttctttttccatgtttgtaactcgatccaagtattccttgcttgtagttaaaaaaactcgaaaaaacctaaatttaccttacctcgatcgtcaatggagaataagaattttaaagatcaccttcctagtcctacttctcatgttccttccatacataagttagaggctgattctccttctaagaggaattctaaacgacatcgatctatggagaaagattctgattcaaattttgagcttgaagatgagtttattgaaatagctaaagttgccgaggtaaggcatttatttttgtgttttttagggtttttatgtcatatttttaagttgtacattattgtgttttggtttttcaattatatttaaatagtgtaatatttttatttttacatgtatgtgtggtgttttcaaataatttatactttctttaacagttgtatttt

SEQ ID NO: 218043 - DNA, 4356 bp, Cannabis indica
tgatccatgcacatgttggtcaaggaggctttgtttgaagcttggccagccatggatggcttccatggggtttggctagccatggggactgtgtcccaaggctggccggcctatgcgtggaactagggttcctggccgacctttaagctatgtcttggggtctggtcgacctctaggacatggaaccctagctggccaagtcctaagctctaagcgagcagtcagttttctccctctttggaccgcggttagagtcttgtggcgacattggaggcatatacaactgtgaccttatgtgtggtatctattggaaactctgtataaggctagataatgagtccattatagttaattatgcaacttaggacttattgtgtgtcttggtaattgcacctaagacgatacttggtcgttggtcagccttgtacccttcgtttttcttagaagatgtcgttgagtgtagttgacttgaatatatacttgtagctttgtcaggttgctcgcctccgcttatttattccatctaggtagggatcggtgttgagttggggaggtggcagttgtgtaggtcttctactctccttgtactgatggtaaggacaaagcaaactttgcgtagggctcctccgtacgatccagatgtggccatggtagccacaagggttcgaatcatattgggtgaagagactgctcagcctcctgtcaaggctgagccagatgtggactcggagactagcagctccgatgtggaatccgagctcgaagaggttactccagtgaaggggaggagatataggacatgctctatcctccctaaccgtccattgggccattttgatgccttaggcaatccgctgaatgatcttagcgcgccttcagtaataggactagatcatgtcctagaacaatctcccgtactgaagatattgtattcaaagccacataagacaaggtgggtttcgccagcttttgttttttctagtgaggcctttgacaaggtcattgagtggccttgttgggggtgttcgttgtgagattccacacaagaactgtagggcgcacagacccctacgggttggctgtcatggtcagggtgctacatagaacatagggcagtgttgttgcttcatcattacttcctagacgttgctgcctacttcgagatgtgcccaactcagctcatgccgaagagcattaaatatttgtcagcgatgtttgtgctgtacagggagcttggttggcttccgtctactccttatgagattggatacttttttgagttgaagtctagaccgaagcagagcacgtccaactatttttatttcagccagcttggtcaccaacggctaggtgacaccaattgcaagcccatgtcaaaagtgggcaagtatgccaaaaaatactttatggcacaaggccttcatggaattgtgcatcacgagtttcagttggtgctgctcttcaaatgttttatccctactttggagataagggatagagtgaatcatatcctttctttgtcggctaaacagagaaatattattcggttgacgagtgtggtcaacttctggatgcatggcttgtatcccctgctcctgaagttgtaagagtgccagctactggtgtggcctgccgtacagattgaaaaggtcctaacttggatgatgaagaagaacctttgtctcatattatacagaatctagagaggagagagagggctctctgtaggcgcctgtcccatgggggtcaagttggtgatgcttctcttcgcattgggcctaaaggcccagtttctgatagacctacacgccctgcacccacaagtaagggcaagggcaaagatgtagctatgaactctgatagattttttttctgacgacaatggtatttgatagtttataacgccattcctttgttcttgtgttgaatatttatgaatgcattatgactttgctactttcttttcacaagcatgtcttccagatgagaggtcttccaggtgggccttttgacgagcccaccggtcgagtgagcgctaaggtggctaggacctctcacggtgtcgatgctaggggaccatcactgcctcctcttccacctgcgtctgccccgttgggcagcctatagttcagcctgccagccaaggtaccaggaggcccagtagaagggtagggttagctgctggtaagaaggctgttgagtcagccactcggcgcatagagagggccatccctttcttggatgatgcattgcaagagttgggtgatggtgtgccttacatgttgtactctgccagtcttcaggatctttctctagtgagttggacttccagctttgttcatcattttggtgttgtataagctggccgaccatggtgttgtttgcatgtggctggcttgggcatccatataggattctgcccggctggccggccatggtagtgcaaggaaaggactgggtggcccaaagtaattgttggatactgacattatttttgtttgtttttagtccttaatgaagctgagtttagctcgtgatagctctagagggtccttagatgctttccaagagcatgtaaaggtcttggaggcatctgttgccgcgaaggataaagctaatgtcgagttagaggtctttctagcagagaaatagagaatggtctcgggaatggagactatgctgaatgccaggaacaccaagaatatcaaccatgttgctctcatctttagattgcgaacagatcttgagaagcacaagaagaagttaaggaagctcttaagggccaacaggccattaaggagtattaccttgattttcctctgaacttacttatgagttccgcctgcacaaccccaaagctgagttgtcatacatgggtagtccgaccttcgtggagaaaacactagctcgtgagagggaattatttgagaactagatggagatggagatggatcagactgcagcttatcaagaggggtcatcatcaggtacccatgaagaggtgttggctgacccaccagtggaggaggtggccgatcaggatgttgcccaccaggccggccagcatagtggtgatggggctggcctagactctatagatctcaacttggtagctctagattcagctcctactgcctctgcacacatgtagattgaatttttattagtactcaacattatgtttgtatagtatagacttaagttttcatgttatgtgtagcctgtggctgttttaaggcatgttgcttcttagcttaggagcattaatcactttaattgcgttccatgtggcctctggcctttttgaaactgtatgtcctatgtggccatgagcctttttagaatactattttcatgtctatgtggcctgaggccttttagaatattattttattttcatccccaggatcttcatgttcgtatcttttgccatgagccctctatttttgaacactactagtatttgatcctggttctttttttatcatggattgtgtgaccgaccaggcggtctttaatcctgcttatcttcttagggccttgacaagtaagggtccgaatttactttgccaagccaaagtatgcctgcacgacttagaggcgggttttgtagcttatactaagcgttaaaatttctctgtataagttctttgtgctagttcgatgcattgtatagtatgggtgcccccaagtgaccatggagacaagtctcttggtcactttctattcaccaagtttcatagactttgcttgggtgctgccctgcgagggtaccatagtacgcatgtaaaactaatagaataactttgaaaagttaatctgtgagcaagtggttcatatacacaataaatacaatatataaacatgcaattattcattgattggtctttgttcctgtgcaacttacataaattgaatctacaggtggctacccctgctcacctataaaaatagaggctactgttgaagaacagtaggagatcacacctaaggagggccgtgggtgctagcgcttgttgtactctatttttgagtagatagatttgctacactagggttgagttttgtaagttggtcattggcagtaatcgcggaggtgctctccattccaatatcttggtaggagaatgacctccatgtttttgttgtaccttctcagcttgtaggctcccttactagttatttctataacttgataagggccttcccagttaagtctaaacactcctgctgctgagtcttcagtgtttaaaaacactctttggagcaccatgtcacctatgaagaatttttttctcttgacgtgtttgttgaagtgccttgctaccttatattggtaggcctgcagctttaggt

SEQ ID NO: 218044 - DNA, 9151 bp, Cannabis indica
ttttcttttacttttcaaaatagagaaataatcatatccttttttaatttatttttttgaatcaagaaagaagcttattaaataattatattctcttcatggaaaaaatttataagattattaagctcgcattttgcagcccaataacatcttcttatcggaggcatcaaatatggtgatagtcatgggcccaaacatgtaagacatgctctttccaagttatttcaaattctgctctttctgctacagactactaattagttgttctcaatctacatatgttgaaaatacaattaatacattacacaaaaaaaaaaaaacaagtaaatgaaatatttccacttttctttctgtcccatgatatcgatagaaattaggaaagtgtaaataaagaagtgcatataaggaaggtagaattcaattatcattctacttgaggttaaagttgttgttgtttgcttcaggagtggaaagagcacatatctccagcagctctgtcttatagttattcttgctcagataggttgttacattccagcccgcttctcaactctcagagttgttgatcgtatatttactaggatgggtaatgtagataatctggaatcgaactctagtacggtaaaatttcctcacttcatatttcaaattagtttttccatttccttcagttcatcttgcctttgtagtaaataacaaaaataactaggattttgtcatcatgttatacgatttacagttcatgacagagatgaaagagacagcttttgtcatgcaaaatgtttcccaaaggtatcggtcaaaagaacatctattttgacaatccaactatgcaacatttacattttgtattaatgttattgtgggtacaggagtctaattgtcatggatgaactgggaagggctacgtcttcaattgatggatttgcaattgcatggagctgctgcgagtatctcttgtcactgaaagcgtaatgccataaaactctattatactccgtgagttttaagttattagactataaatgatattagttcttaaggtggtcgcttgaaaatctccaaagtattgatttactgtatttttcaaaatagaatttgaaataaaaatcatatttataataaaatgtggtttagtaagagcattacattaaataattctatagagattggatgtttcttctttctgatagggccaaggaactaagacaaattgtttcatcttttaattctgctaaaaccagaattctcttgcattataaatgtataatgtatgatgatcttaccttactaatttaggtatacaatatttgctactcacatggagaatttgtcagaactagcaacaatctaccccaatgtgaaaattcttcactttaatgttgacattagaaataatcgcttagacttcaaggtaagtgtttgattttcattttgattctttttattcttttatcttcttggccatctctcccgtactgaaatcctttccacttacctagtttgatctcaaagatgggccaagacatatcccgcactatggtcttctattagcagaagtggcaggcttaccaagctcggtggttgaaacagccaggaacatcacctccagaataacagaaaaggttaaatttttatcttctaagttatactgtttagattatgttatattgtaccgaaattaagagaccctggaacatgggagataaaattaacttgaatcgatatgcattaatatcaatatctattaaaaaatgccataaaccgtgacttgcacctaacacttgttctcttgcgattaagaagctcaattacaatttgattatttcttaatagaaatccatggttaaacttccttcactacgagacagattttattaatgaagctttcttatatgataatggaatgtaacctaagaattgattggtgtggtctcttttccaatgtctaggaagtgaagcgaatggaagtaaactgccaacattatcatccaatccaaatggcttaccatgtagctcaacgtctaatatgcctaaaattttcgagccaagacgaggattcaatcagacaagcattgtgtaatcttaaagagagctatatcaatggaaagctttagaattaagtaaaagatctgttgtaattcaataacctatcaaaccactgtattcacaccgttttatgtgaaataggcttgtatatgtgagagtacacttcatgtcttgcaaagtgaaagaatggcccgaaaaacgaaataaaagcctcaagtcagaatattgtttacgatatagaaaagaaaaataccataatttagaaaactttatgtccataaagaggataggataagagaatattaattgatgtctctcctatagaaaacactaaatccattcaaatgccataaaaactagatatattaaattagatagcaaatcattcaaatgaaacatgactcaagtattatatcaatctccaaaatttcaaacacaaaaacaactacaacgttctcgaaataattatcctgaaaatgacccaaaaacacaaaacagtatgaccaaaatcaacggtaacggggaagagagacagtgttgtttttcttccaggttgccctgcgggatggtcggttcttgtggttcctgtgtccctttccacgaagacccctgaatttcttgcctgcggaggtaagaccacgaagctctctgtgcttgtgaacagggttgcagagccagttgattcttgggtcattacggactgcgttgtgggcaacatccaccaaaatcacctcaaagtacttgtaggtggaatcctgcattagcaaaatactcagtgacaaaaatacagataatatatttaaaagctattaagattaacagcctagatcgccaagtctaaggcccgtgacagagtatggatatgacgatgtctcaaaaatgcatcttgcaactcttttagttatttcaaaactattaagatcagaaatattgacctcattgatccagtaggaattgagaaccctgagacctcccaacttgcgtccagcacgttcctcggcaacagacctcttactcctctggaacttcaattgggtaactccctggtttgtgggcttaccatagacgatacccttgggcactggcctcttccttccaccacgcctcacacgtacacggtaaacaacatatccctaacatcagcaatcaaatagtttcagaacacaataatttgactgcaaatacaagactaaatcccaagcgatcgaattgcacccatagccaagcacaatataacacgttaaggaaacattaaactgcatccccaacatggcccatcgcttgtatcacatcaagtcagaagcaagagttggaaatatacaaccattgcttagtcagttgagtgacattttattttatattgctggttatgataacaagcacccaatcaattaccaaagctcctaacatcattggtcatcaaggaactgatatcaaaccagctgctagcatcaactaaagctagacagaaaaactgaaacatacctacatcaccactggaacaccactaattcataaaaagctaagagaaaaattaaaaagcaacaattattaactacaataattgcattttcactctcaaaaatacctgcttggccttgtaacccaagcgacgagctttgtctgggcgtgttggcctagtgacacggacaatggaagggtgctggcggtactcccaacacctaaccctctgcaagaacctcatcacatcggattgtttcttcctccatagctcagaaacgtacttgtaagcccctaaatcaccaaagtcaattagtaactataacaattacattgaaaatttaaataaagtaaaatgcacttgctgttttcaacttcacattcaaattaaataaaagacattgaaagtctatacgactaaacaatcatagagaaatgaataccagaaataaacaactgaactcgacaagaaccaattttggttcagatctacggacccaaacagcaaaaacactccgatgcacaaaaaattgactgttccaacttttttttttccattttgaaataaataaatgaaaacaacagagctcatcacccattattttctgctaccttctggttcaatccgtaacaaaacaaattttataaaacccaactatttaaacagagcaaacatatatctctagaaaagcagaaaaaaaacatgaatagcagcacttaaaacatatactcccaacaaaactatatacactagaacgtagaattacaagctataatcacatatcacaatcaaactcagattagggtttaaggagacgtagaagaagataggaaaggtacccattgaatcagaaatgagctgcgcacgcgggctgaggttttctcttcactgagagctagggtttgagttaaacctgagctttataaaggtggaacgtggccatggactctaaatatgggccagaaattttagcccatgtaaaaaacctggcccattagaaggtttaccagacagcggataggctcatgttacgttaaaattgaaattttttaaaatgtcattatatttacaactcaaaaaaaaaaagtatatatccaacttaaattaatttttattaatttgctttttaaaagaaattatataattttcttttttatattttctatattttaataaaaaattttagacattaccaaacacaaaaaaaaatattcatattttttgttaaataatatacaattatatttagtttttttattaaaaaaaaaaagaaacttcattaatatactcacaaatttgcaacatcaattgtgcatgctacttccaacacacacatgccaaaattacatgttctgtacaaattttgaagttattttatccctcttagacaacttcctctcattaacaaagttatactcttccttaactatggtatctatacaatgtgaagctatacagttatgttcaaaaacacataaatttcagttcaaccaaatgcaataggttgctccagccatagctgcatagaaaacatcagcaactaaacttttttatcaactgctattcaaccattgaacccaatcatcatatgtactcggccaaaggttgttgccaacacatctctcccaataagttacataagtcgtcatggatagggacaagagaaaaataaatgtgaatgactctccaagtccatttcgcaaactgggcaaagaggagactcaataagtacatgccttaataagattgtcccagtgagaagatgagaatacaaggattgccacacaatgaacgggcttaaagataacaccaaacaaccatctcaaacaataagaggtttttatttttttgaaaaattgttcatacattttactcactttgaatttatttacttcaatcgcgcctggatatctcattgggagaagaccttcctaagttttatgagctttctccaataccaactcacaattgtggagtttcatcctcaacttcttcaaaatgacttcacaatcaaaaaaattctatttcgttggtcgaagcttcacacccaaatatttcaacgggaagaactttcttgaaaaggcatcacctctaaaatagcatgcttctctctttgttggattccaacaaagtagaaagtagtcttattcttatttttttaaagcccaaaatagtcagtaaactcttgaaaagcactctgaatgcactaaactgaagcaacatttctcttgcaaaaaagaataagtcattcgcaaagcaaagattgaccaatttgaggattttatacatcaggtgaaaattgaattctttcttttcagtgtgcaattttagtagacgagtttgttggtttttatggtactaaatcaagtacgttacggaagagttttgtattatctgattatcattgtaccatatctcaatggatctccagatgtgtgtacattaaataaaaacaataaaaatacaagtttagaatatacctcttgaaatctatcagaatatcctcaaaacttctcgtaagttgtatctctttaatccatatgaagagaaaattgtaatttggactcacattagtgttttccaaaatgatccaccacacacaaggaattcctgtaataaccctttaataaatcttgcaatatcatgacattatgcgtcagagacctattttaaatgaaagtccctagattatcccccaccaggataggtaagactttagtccatcttgtgcaaaccatcttagaaatgcacttatagatggtattgtaacaagcaattgatttataacagtagttggctttccactttaggaatacgggttaagagagtatggttcaaatgatcaagaagaataccctaatttaagaatttaaagatggaaaagtccttccacataaccttaaagaacttagacccgaaaccatcaggaccaagaccctttaggtcatgaatgaagaacatagcatgtttcacatccttcgggtgaaatggtctgatgacttgaacttgttgatctagagaaagcagcaacccctctgatataaaatccaagttgagaattttcgaagtagagctaggataaattttttaaaatgagtgagaaagtgatcaaccaccctatgataatcatctaccacctgaccctgtgcatcaataaaggaagcaatacgattttcctctctctgcttctttaggctagcatgaaaaaatgcaaaattttcatccccaaacttcagctagtctatgttactcatttatttaagaaagaagccaagtattttactacaataagccacattagatcttgcagccacttcttggttttgaagagatattgagtgaggatcttgttgcaaatcaatatgggtttcattgtaaggaactccaaccatctcatattttctatgaacatcaccattcttattcttattacataagtttagaaccttttgtaatcttttcagctcgagcataatggtaaaaagatcattaccttgagccatttgggtccaactatctaccaccaacttcttaaaatctgtgtgctcagtccacatgttgaaaaaactgaagggttgaaacacccagctaagagaaagacttctaattaggaaaaaatagtgatttgaatcctgatcatgtgcaaaaagcctctgtattcaggtgggtatcttgccaagcctcaatttctaaaaactaatctattttggaaaagatccactcccttctatcttgattgttactccaagtaaattgagaaccagaattctttaattcattagccaaccccaaggcaaaccaggtgcttacatcaactatctcattcaaactcacaggccttccactcaatttgtcatcaaaactcaaaattgagtgaaaatccccacaaataaaccacagtatgttaacccaagaactttctctggtgacgtggacattaatgtttcatacatggcaagaaagatgacatctcagagttgagtagtctcgaatcatagcaatcgatctgagaagggtccttagcagcaaaaacttgttatagatttttccaacacgcaagtatatgtatcgttcataagtaatagactcacaagagtgaggtcgatctcacaaggactgtagttgattaccaaacaaataaattcctaattctatttggtaaaaataaaaataagaaaagatgttttatttctagtaataagaaaataaataattaaggtaaaattaacaattattaaagcttagggtgattaatttcgattacatttactttatatggtttaacatttaattctcaatttccaattttcatgtgataacacatttactaaagaaacttatattcaagcttggacatataaatctcaacatatatgcaaattttctactcttgtaataaatttaaacacatagaaagtattaatcataagaatcctaaatgctacaaaaatcatataggtactctcattctatatcagaatctatgtctattttactgtagcataatcaacactcacttctcagattttgtattgaaatcataaaacatttaattagtgatcaagcaattcaaaataattaagtacgaatgaaatagatgcacataaaaaattacaaaggaactaaatcatactaaaaccaaaataaagtgtcaaaaaatctccattaacaacctaataaaaattctagctactcgtagtcattgaaaacatctaataacaattaagaacataagaaaaatagagaaaaaagaagaactcttcgaaaaataaatgttgaaagtcttcagagtcgcatctcgcttctaatttttgtacttccaaattgtctattgagaagtactgaaaatgatcctttatatagctttttaaaaagattaaaaccctaattgttgcactttaaaagaggcaaaccgcaacaatctcttgtagtgttgcgacccgtgtcattcagccacaaaagatatatcgtcaagatttttatagacaacgaggatttaagggtttcaatgcctcaacattagataccaatgttaagctcacctctaaacttgctaaacacgatcttgctgccaaatttttgccttttagcgccctgacgttgaattctaatattgaggcgctactctgcactttctaattctttaacattagaagctctaatcacaccgaatcttttggatttctttcttggattattttctttgtgctttcgcgacaaaactttatttaattcatctttcttacacatttttttcctcaaatttgctctattcttctccaatattgaacttgaaaatattaacaaccgaaagcataaaactgcacaaagcacggctagaacttattaaaaaatacctttaaaacctatttaaaaatagtactaattaagtcctaacacctagctctgcgcccagattgactttggaaaccccagaatggaagttcagactttgataactcgtttccaacccactgtaatgtccccacttctagcctccattgggtcattacacccacggaataatagctcttatatacgagtacgtcactctgactgcttcattgactgatgactggccttacagaccaacacgagtgtgttttagcatgttttttcctcactctcacacttcttggg

SEQ ID NO: 218045 - DNA, 3811 bp, Cannabis indica
aacgacaaatcgttttgatcaaacgatttgtcgtgcaggtaaagaacgacaaataccattgtcatgtgagaaggaacgactgagatttacttgtcgtttgatgcttttgtttaattgacttttctgggacaattatgtccctgtcgttttgactaaggcttgagttggtgtagggacattcttagaaattcacaagaaaaatcctacacatatacatataagtatattgatatgactatgattgaccgtacatattacattataatttatacctctccttacacacctctctctacttctttctttttaattctcaaataagggaaattcgaaaggtacttgttagtgttttttttaaaaataaaataaagaaaaacttttaggcacgattcgttgataattttgcctctcaaagaaaaacttgaggagttccaaatctgactaaatattctagtcatactatgctcaaatgttttgagagaaaataagtcccaagattaatgttttatttttctttaccaaacacagggtttaacacagaattcaaacagaaaattatgcaaaacacaagccaactacaacaactacaaaaaaaccccaaaaaaccccccaaaaaaaaatgattgatttaatcataattataaatgggatttttctttgttattagtatgatctagcacaagccattacatcaactagtgtatacatgtatataaatcatgtccccaatgaacctctttatatttctttttcttttttttttttaaaaaaaaaaaagaaaaaacactttgatacctatcaacactagtttcataatcctttgtcattaattaacttttaaacattcaagtaaaaataagttggagaattcattaaattattactttaatacttagtttgtcttccatctataaatagtttgcgacaaaacaatccacacaagtacatagaatgaaatctagagataataactttactagagtaaaggtatcttgaattttcacagctataaataaaagaatcataaaagataatgaattttcataccaaactatattgttatagaaaaaatctcagcacttgagttgagtatttatgttacataactatcaaagtaacaaccaaagagtaagaacatttaaacccttttaatgttgtcttaccggcgcttgtacaaacaaggttttagctcaggccattcaatatctttcttcttcttcttcttcgtcattgaattttgctcttcctgcagaaaacatgcgagcaattactaacaatgcccttatcaacggcaaacaaaatcaatgtatgaatcgagtgtacagccttcgaaaaagctcacttttttcttgaagtagaataaaatgaacatcttgttagcaaagtcctgaatgagataagaatctgtcagcatatcgaggctagtattatcaatttgtgcaaaacatgattatggtagtaaaatgaaaatacctttgaaaccgatgaaaatcccagctcgcaaatggctttggtaaagttgttgggatcagctcctccgctagttggatcaaaccgactttttacttctgctattaaaagccacccgctgtggataaccaacatttgtaagttacagaacatgaaaattgaacataaaagatcatcgaaagtttttcgaaggtataaggtgcacaccctggcttcagaactctgtatgcctcctgtaggtaacttgagaagttggttcccataagcgaaagacaaaagacagcaacatctatggattcagaatcaagtgatgtctgcgagtagatacaagcaatttaatgaaaaattacctaacaatattaaaggtttcaatcacagaatgaaacctactacattcacaattgttattcacaagctatataagcaataactgacaaaagtacatacatttgacatatcacaggcaacgactgatggatcatttgagacaagatcaaaggagaacactttgtttttcacatttttcgcaaggcgagcatcccctaagattatggtaatgtggaaaaacttgtcaccataactaatcaaaggagaaaaccagaaagctatataattttcaaaagtagtactgtgcaatgaaaatgaaataataaagttactcaccacacccaaaatctgcgacaaccagagaagaaccgtaatcttttaaccactttataattatattaacaggtagctcaggccaatgtgacatttgctcttggtatcctgcatgatactggacaggtaagtaagtaagatatgtcaatcatcaaacaaaaactttatcaccccagttgttgtttatggaaattttcctaaaagaatcaaacaataatatagtgatattgaagagaaattatacaaaacaaaggaataaagcacatgttggggtaagaaaaaaaagctcaataattactttataaacactagtgttaacttcccacatagttttacagttcaaaatccttagcttagtgcttcatacaaacaaacatgaattagcatacaaaaaagataaagctcttatttttttcttgaatcattttagtcttaccatatcaaacaattctggttcttctttgaagtattcaagtgcctcctttccactattataacaaaaaagtatatatattaatcatagtcagtttgttgccaacaaggatatgataattcagcaactattaggttcatctaagcaaaattttgaagctaacccaatctcagcacaaaaggccaatattatttttgtataattcaaaaggcatagaaattagatatgaaagagtgagtaagtaattaattacgtgcaagtatagagcttttcgttaagcattctgaaatgaccacctgccaatcgcgctttcatctgtaagtcattgaaaaagtagtaataacaaaaataattaatatcaaaataataattaaaaaatcaatttaattaagtaatattgtgttcaatgaagaaaagtacagactttgtcgagaaaactcaaggttttagaggctttgtgtgatgttttgagtttagaagaatcctgttttggttgaggaacattggctgggtgagcttcagaaatttgtttatttagatgagaagggttattatcagttttacgtctgcaacgccccgccctcttccgctttctacttccttctctgtcctccattactgactctctcttcatcttcttcctccgacatacaagtttcagatggtatattcaaagtctagggctttgttcagtattctatggttacaatgaacccggccattggacaagcttcaggcccaattaccaaatttaagagaagttgaagaatacctctttttttttatatatattaactaaatttacttttaaataaaatttaattcaaatatacataaaatatggataagttgaaaaatactacttttttgtattcattaattaaaaatactctcttattatattttattaaaatatacctactttttttagtggattgctcattataccttcactctctacttaaatctagcatataatttacactaacctaagggatctaatgggacatcatctatataaaagtaggtatatcttaaaaatataaaaatagaaataaaaattaaaataaatacagtaaagtaggtatactatgtaatttcctcctttatttttatgagtattgtatccaaattatccttatacacttatataactcaggcccggccctgggcataggcgggctaggcctgtgcctagggcccacccagccaagggcccaaaattattttttctcttttaaaattata

SEQ ID NO: 218046 - DNA, 8625 bp, Cannabis indica
tgtgtgtgtgtgtgtgtgtggtgagggtggggcaccttacctattactacaatatttgaggaaaaaaaagactaaaacaattgctatgcaagtacccaagaactcgaacctcagaccgtatattaaattttttttctctgctctcttgagcaggtattttaatttccgttttattatagtagtctgtaatatatagcttaacctttatcatattacttcatacatctcaatcaaattttttattgtgttgttcacattaacacttctagaaaatatatcctagcatcccaaacctgtcatgctctgtaggcttgcgtttcaaagaccagttgcctattatgtggcttagtgtgacccaaacgtatggaaaaataattataaaatcttagaaatactatataaagagtaaacagccaaaaagtcaatctgtaaaattaaaaacagaaacattaaagcaatattacccctcctttggatgaatttggtgaaataagcggtataagtataagaagaaccacaacagctaaatcctgaaaagagccagatataaggaaataatcagttaagcttcgggtgtagaagcaatatgtatgcatatattaacaaaatataaccatacgtaaaaacaggagataagtgtcactatggatggaaatacattccatcaagaatgaagatgatcaccaaattaatagagtacatatataaacatgaatacttttgaataacacactaaattcaactcaagaatactgggagggacacattacaggatggtatactttaatggcgcatatggtagagacatgacatatgattattttctagtacttctgtaaggaaataaacatgtgaagactgagaactatacagagttatatgtcagcttgaaccaaaagaaatctcttttcagttgagaaattatgagtaagcaccatcctgaatttcccactgaactcaattcaaaatcttaattttagaacattagactaacctgaaagagtaggacagagaatgtagcacgaccatgccgggatgtactctccccgcgttcttgcagtacctgcaacataaccgcatgaaattaatccatttcacctctacaaaggacatacatcactgaaacttgacaagttaagcctcagaccaaaaaccacataaacttacaagttcttctgtccataatgaggttaaagattttgaaaaattcatcattacacattggatctttcttctatcaaagattgaaagttgagactatttcagaaccctaaagaaattaatgataaatttcttaaagcaatacctgtaagacaactgcagtagatgataaagccaagccatttccaatgacgattgccgcgggaccagcttgtccacaaacataatgaataaataagccaaccaccaccgcagtcaccaaaacctgcaaaaacataaagatcccaaacttgcaaattagtagcaaggaatagtgtttggctatggtggacagcatgatgaaacaatagaagtttaataatcacctgggcagagcctagtccaaaaacatatttcttcatggaactcaatctttcaacggagagctaaaaaaatgaaacgaagtatgagaatggatttttttcactcttattcgtatagactgcacataattttccataagttaaatcaaatttaaaatggaaagatacagaagcatatttaaaaaaaagaccccacctcaagcccaatattgaacagaagaaaaacaaactccaaaattctgcaattgcttttgtcccatgcacatgacgtattatggaaaggccataagggccaatcaaaatgccagcagctaaatacccaagaacaggactgcctaaaatttgaagcaataaaagacgagccatcagtgaaaagaaaaattgtactgagatatataaaggaaattttataaatcaaatatacaatagtgaaggatgatcaaatgcagattgcacttaataaaaggaatatcatcattttttttatatacataatggggactagaaccactccgtgctctcacacatattcataccacttgagccagccttgagtgcaagaacatcatcaatttttgttatcaagtagccaatggttgatgaggtgagaaaggcggggtatagctaaaaattagaacacgtagatgacataaatcgagaagaaaaaactaagtaagacagctactaatttaagtactatattacaagttcatgacacaacagaggtttgcagtttgttttgggattgaataaaatgaaatgttagcatcaaacgggaatatgaagttcaagaaacaacatatagaaatccagctacctccgggaattttctgaaatataggcacaaaaactacacttgctagcaatagccataacatgtcaaaaagggaagcctcctcctcattcacctgataaaagtttaaagagaaagttagacaaaaaggaacagagcacatcaaactgaaaaataatataattgttataaaatataacaacatgcctcttgatgagggagcatctcaattaagtttttaattcttttaggaagcctctgtagttgtcgaactatgggctttgcacttaatgagacttcttcaatgctggaggtgataacatctggctgttgtagcaactgtgcccccctttctgctcgattggaataaaatgtgaccctgtgatggtacaaaaacatttgtgaaattgaaaaatattaggtgcataataaaggtaaaaaattgtaacctcttaattggttttgcaagagaagcacttacagagcatgttaaatagggccacacactattacattattaaatttctacagccctaacgtttgattaagcaactaagaaaacttcctcgaagagaaaacaggaaactgtgtaagctaatttagctaagtaattcagtctcaaaaatgttttgcacttaaataaacaaagtgaaggcgcatttctgagcagaaaacagcatattcttgaatcacatcatactgttattattttttaaagttgaatagtaacacataccctgctccaaatagaacgagcccaaaaatgagtttgggccattgattctttacggactccataacaccattaaatactgatgctggtgtgagctcggctccgtcaacagtaaaagagaagaatgatgctgaaaaaaagcgagaagatttatttaatgatgctttcggagagttcaagggtgaggcctcccttgtcagatccttttgaatttcctgcttcttagaatgcacagtttttgacttttccacctctgtttcagcttcttttagagaatctaaactgagttttccattatcgtgatcactcaaatattcagcttccgtgtctacaaaactctggcttgttttctcagatagaatatctgataaaggcttggcaaccaaagaaccatcgaattgaacatctttgtcccaatcaactgtaatatctgcagaatttccttgaatcaggccttccttctcttcgacagcagtatcatcatcactaaacaacagctcggtttctgtgtgatcaacatgaaagtctgtggagaaagacttctgtgccttttgcaatgcaatttcagcatcattcacacgttgtgtagcctcgagctcaaatgcaacagcttgctcagccaaaagcattatgttcgttacatcttcttctgcttttaaagcattcatctgtgttttctctgcaatctcattcaacctatccacttctttttgcaactcctcccttttactttgcaatcgcctcagttctgccatacagctttccaaattcaactggcattccttaatgtcttcctgggcaacctttttttcatcttcttctatatcatccttttcaagaccactagcttctgaactgtctggagattcaatttcttcttttgcagcctctaaagattctactaccacttgaagcctagcctctgccagcgaaagagccattgttgctttttggacagcttcttttgctatagcctcttcattcactatctgcataatgttatcaagagtagaattaacatcgttccgagcattcgcagcctcatcctgcagggctatcgcagcttctgatattttctgagccttttcctcaaacattgtactgttgagtcgtgcaacttccaaatctgtcatagctttatgcagaagttccctcaattcatccaaactaggtgtctccgatacttcttgatctttcccttcttcagtagaaacactcaactccacactatcatcagaccccatccctgagctatccccattagtttcgaagaattcgggatttgacccattcccattcaagtatcccaaagactcattattctgacaccgcagccaaactcttctcgaccctttttgcacattacaaaaactaccaaacaaagatattctaggatttaaacttaatccttgagaatcagatttctcacagccactgaaacagatagttttcttaaccttcttaccactactcgttctcaaagctgtccgtgaattaccccgaaagttacagctaaaatatctatttcttgacaagatgcgtgaatcagaacggtcgaacgttttataactagttccttcaccatagcataacacatttgactgcccaaaactatacgccagatccataactccccaccccaattaacacagcctcttataaataaaatacggtatcgctatctgcaaaccatctcataaaccctcaattctctcattcgtcattagtcaaacacctgaaacacacaataccgttgttaacgacataagtataaaccgaatccaatcataataatattaacaaaccaataaccctaagaccattgatataaatatcatacgtgtttgtctctttgtgtgtgtatgtgcattttttcttcatttagcactaaaataaattggcatatacaacaacgaatacagacgagtgacgactcgacacacttgaagtaaatagcaatttcttttgaatattcatgtatatacgcatattcatgtataagtaaaggcaacgaatggcggcaagtgccagtgcatgcattatttgtacgtttgtaaaggagacggagaaatcgaacagtgaaggagctaaaatagaagacgaactgagaaatcaaaggcggaggtggagaaaggtaagagaaaggtgacggaactgatacctaattgagtctgaggagtgaggtgaagaggttcgctagcccagctttcgtttgtttggttgtacgaaatgaaattgcagctcagggctctttctctctctggggcctggaactgagaagggggaaatacaaaacccgatttttttttatataaattaaaattaaaatttttgttttagtttgtgaatttttttattttcaagagagttactaaaatggttaccaatattatatatgctatggggatattcttttctataagctgtcttatactcgcgaacagacgcgtgtagaacaagtatccaatcatagcttttgtagccttgtcagatgggtcccactcgaaaacagtttggaacacgtcattgttgtctttttatattattattttatttgtattgataaattgttacaacatcataatttgagaatattggatgctaaaataattttatagttaattaaatgtaataattcagaatgacatgtaaaaaccatcgttttttattttgcatttgttattttttgtttttgaaaaattgacagttgttattaatttcccttttcgtttgcattttctattatccgttcaatttgcctcgttccctaaaaaaaaaaaaaaaaaatttagcctcttgacaatattagagggacaaagaaacaaatatagaagaatctcagtttttttaaaaaaaaaataagacacttgatagttgagattcctccatccaacgaggagtctagatgatttgagtatctcatgggaacttaaaagaaaagtacaaaaatatcataaaaatcagtggaaatccgtgtctaaaacgaaaaaaaatcatacatttcttgaccaaaaacatacaaaaacaataaaaaagaatcaataaataaatatatctcaattcatatataattttcttaaacaacataattaaaaaggaaaatctctcaaaactagcttaacaagctcaaaaatccattttgctgaacaagttagacatgaatttggagaggaaatatgggagagacactgacacgtgcggtggcacccaataaaaacttccattttcttcttgtgtatggtattaaatagaacttttctctgaaagtctagtcgtcggcaacagggggctccgacacctcttcggtgggttcgggcggtggagtggcatttttccggtgagcagccgcttggaggacgtggctgtagttgcctttctccatgaagagctgctgaaagtggtgcttgcagtagagcactccatcaagagcagcataggaagaatgtgtcagtgggcaccctccatgagcacacctaaaacatgtcttgtggtaacactctccctcgagtgatacctatcaattatcatcatcatcatcttacttaattaatagcataacaataccctaattaattattaattgttaagtataaatcaaataatgacgcaccttctccagtggatagaccgtttttgagcaagtggcacatttgtcttgggttccagagaacatggatgagagcttgctaggggcccttgactgtacaagattacatcataaattaaattgtgtaaatttaacattatggagtggagtggatatatcatataatattacacaatcatatgcatatttatattatttgtttaagatctgatttgtaatattttattttggtggatatttttgatgcatgtatcagtaatcaataaataatttattcctattgttttccatccatttgaatgaaatgattttatatatgagacatacaaatataaaaatatactaaatgagaaacatatgagcaagatgtaggaaagtaaaataaccagatcatgttgcctgtcagaagacttcgctgagacaaattttcaccaaaaaaaaaacatattgtcagctaaatcattttcttttttttattattatttaaaaaataataaggaaaagaaatcttcattggatataagatagttacctgactggaaattcttgctaaaatttccagattccttgaaaagctgctcaaaatgaggcttgcaatagagaactccatccatggaggagtagctgctcatctgtagaagcatatgagattgaaatttttagagatcagatcacatcgttggattttagcgttagataatcaatctcatgtacaacaactttggtaatgtctattgtgtaaatttttgtacttttgataccaaaaactgacattccaactacctagtaagagcatgctacatacataaacttattatatgtcactagatctaaaatgtaatgatttgaaatcatgttattgatccaaaatatatactatacatgtacatatatatagacaaagaaaatggataattaccgaaagagttcctttgcagtggctacatttgaagcatgctttatggtaaaacactccttcaagagtcatgctgtccaccacataaacagtcctatcacaagccttgcatttatccaaagttcctgtaaatgccattttttcttttctgcttcccccttcttcagaaaaaatcaaaagcgtaataaggcaagatataaatgtgtatatgttcttttgattatatttcaggtgactgagaataataagaaaaaattacaggtttcttataagagcaagtacttgagacaaaaagattgaaacaaatctttgctctgtctaaaacagagccaattttatatgttggattataacaaatttcaggaaaagcagtaaataaaggacaagtgaaagaagatgccaatatgtgaagtaaatatgggaaatgggtgcacgaaatttgtgggtgttatccgattgaattggagtaaaagaaggtgtggagttctgaccctttcaaggggtgaaaatagtttcaagttaaaccccaactgttttttgctattttaagtaaattgcaaatcacaaatatggatatgtcatatacatttgtatttggaaaatttttaaaaattactatttttgactctctctctctcagaataaccaccagttttactaggcgtttctcccgttgcttcttctgtatgtttggttgaacaatgattgctatcaacttttgggttggaatttctggaaagcttttcaattcaatccttagctattttttttatttaacatcgtgacaacattaatcgaaaaaagaattacaaacataaaaaattcagaagaacaagctaaataactctagacataacaacttactggcctattgaaccaagttattatgagcacttacccttttgcaattcaatgtccaggaaggaattatttctatatgcttctttttaataatctcttcttgctgtagtcggttcctttatttctctttttactcggtctaaaatatgataaagggttcggttggcaggccgtattgtaatgtattgtatc

SEQ ID NO: 218047 - DNA, 3185 bp, Cannabis indica
aaaaaaaaaaaaataagagaataaaaactaattaatatgtgaaattattttttcccctccaattttaatattcttgaccttgcagcatcaaaatcttcacccattttttcttttgttcttgattggactgtctctttatatatgtagtttagatatataagaaggcagttacaagacatagataaggtctagcctcttgatttttatattgttagtgaaacggaaagaatggattataatattgtctcatacattgttgactttttctaagtagcaagtaagttagagtaataataatacagaaatattatattgagatttgatattgtttttattgaccgagattttggggcaactcaaataatagcaaaaattattttaagcataacaaaatttgtaactaaaagtaaaaaatcgtgtttaattataaattgtcattcttatagtgtgactgaaaactacatggctaaaagtattagtaagaaaaattataatttgttgtaactaaatgtatttttagtcataatacttgttgtagctaaaactaaattaataacaatttatatctaaatattatgtttactcactaataagtaacatttttgttgtgactaaaagtcacatttagtcacataaattttttgttgtgactaaaagcttgtcactaaatgtgatttttctttgtagtgagagctttaaagaaagacaaaagataaaaatatttacgtggtttaggtgtgaacgaaccctagtctatgaatcaatattattggtgttattgaggcttacaacaatagtgattctcccaatctctatagcattttagcttataacagaaagagaaatcgatttacaatggagtgagacaattgatttataagcgaacactactaaaaaattaggctttctcgataccttaatgttgacggttttgtttgtaaccgttgagattgataccaatctcgacagttacgtacacacgaaaccacagacattggtgaattctcttaaaaaaattaaatcacaacctatctcggcaggtctcttatgaaccgttgtgatagagtactgtagtcccctatctcaacagctcacgagggactcgccgaaataggtatatatagttaaaaaaaacattaaaattttaggtcatcttcttcctcattcaaatttgaaccaggtcgaccctagcaattgaacatgcaccttattcctccccccccccccctcatccaccacgagttgtcgcatgctcaacgaccacccacaaccgtcgtccccttcccaactgcacaaaacatccctccagccaccactcgcccacaaccccgttcagtttgtcctctccttattcttcccactctcactgccgaccaccacccgcaacccaacccgtcttctccttaggtggcattttcaaattttgaaataaagatgaaaccaagtgagttgttctttgatttttattttaataatttttttctattttttaaaagtgaataaaattttaaaaaaatgataatttttataaaaaatatgagtttttatttgaatattataggttcaaaattattttagtgacctttttaccacttgagaattattgaggagcttcatttagttttttttatagatttttttttttttgaattttggctgaaattgatagtttaattcaattaatttttatgtcaattagttttttggtgaatagttatttagaaagtgaaatgtgttgttttgatgtaatttgaattgaaaaatttgcttttgtgaaatgaaaaagtaggaaaagtatgtgtaatactacaagaaatgtcagttttaccagcatagtttgctactacgctggtaaaaataacttttaccagcgcatttcgcaaactacactggcaaataagtcaaagttttactatcacacatttgtagtggttaaaatctgacttttaccagtgcatttatgaaatgcactgctgggaaaaatcatttttgccagcgtttttcattttatgctggcaaaagttctaataccaacgttgatttgccaaaccctttcgccaatacatcagaagtaaatttcattttaacagcgcaataccaaacttttaccagcacaaaaatgtgctggcaaaagtgacatttcttatagtaaatttcttttccttcaaatagatatgttatttaaaaaaaattagaatatatattgagtgtttgtctaaacttttagtttaatcttaatataatattttgtttaattttaaattaaaaaatttggttatagaaatttaaaataatggtttattttttatttttcttataccttattttgcttcaattgaatgggtggttgagatcattagtaaaaaaaaaagaaaagtatggttgagatatgtattatttttaaataatttgaattcaaaactcaagtttgtaatctgaggagaaattatttttatattttatttaatttgtatatgagttttagttagattttgtgtcttaaataaaactctattttaatataatcttttattcatttatcaataaagaaatatacttatttaatgagttatttagttcatgtgattatttatttatttatttgatttataaattcatccaaatccttataacattaatattcttatttcttgtgctgtcaatagagtggaaagtaatcaagattgtgtgattaaatgtattcttatgatttaccagtacacaggatttaactgatgggataatttacaatgtagtttacttgcaccttggataaatgttatgtcctttccagggcattggttaaagtaagcttaggttggatgtatggagtatgcatcagaagggatcgatattgaacttggataagatataataaacttaccataatagctattcaaatcaatatcgcctagttgatcttagatcaaatgatctcaatcctaagatggttaggtgcaagttcaattgtactatttgtgttcttcaatctgctcgttaaagtcgaccaatggttcttctcgtgacatataaattaaggacatggtagttcaattgagtgagagcactaatcatagatacggaatctatagcttccatttggacatagaagtgaaataataacttccttcgagcttggcttaatagagataaatggttgaatgctcattttagtgattatatta

SEQ ID NO: 218048 - DNA, 13959 bp, Cannabis indica
cataatatcaagaagacgaagtccgtctcgctcgtctctgaaccaaccataaccgaaaagaagacgaagaagaagacgacgacgacgacgacgacggcgacggagaagaagaacaacgaacgacgaacctctcttcaccttcaatccacggctccgacctcgatgcattcagtttctgcaccgcttttccacaacctcattcattattattacctaatctaatctctacttctcaagtgagtgttcaaccctttcttttttctctacatggatctactttctccatttttgttttctattcaattcaattccattctttcaaattatatttacttttttctgcttacacctcgcaaatgctgctcctattgtctctcgagactccccccctgttcgttttggaaaccctagatttttggtgattcaatggttgcatttatttgtatatgtagggtttcttgaataagaagaagaaggataataattagtatcggaatataattacgtaccttgatagatatagaagtggtgtgatgagctataatggcagctcaacaatcttctcgtcttcatcgtctgctcactcttttggacagtatcctttgcctttcgatgctttcttgtttatattatagggcattgtctttgttcttgttgttctccgtttcaatttctttcccttaaccaaaaaaaaaaaagctggttcgtcacagtccacaaggttcactgctgctcgtcagattggggaaatagccaaatcgcatcctcaagacttggtatctcttttgaaaaaggtattgtttattatcttatgtacaatacaaagctcaaggtcgaatgtttctttgtcttagtagttttagtgctgtgttgttgtattaggtttgtcagtatcttcgtagcaaaaactgggatacgagggttgctgctgctcgtgctattggggctatagctgagaatgttaatcacacatctttgcctcaacttctttcttcattcaaatcaaaattgtctgactttggaatgcctggtatttctgaagatttgctttcattgccagattttcattccaacgttgctggcatctctttcaggaggtttgtttttgttttttttttcaattgtaatgattctttaatttcatattgatgttagtttttgtctacaaactacagctttaatatcaacaaagtgctcgagtttggcgctttattggcatctggaggacaggtagttttgaaacctacattctgttgattttcatgtggtgctcaatgacatttgtatcaaacccaaaacttatactattaagatattgttgttcctaaatgctctcctgctcttggggatgaagcacatctgtgattgatctttttttattgtttttttgaaaaaagagaaagaggtaacttttcttagactgacccctcccccaatatgttattgaaaccctcacttgaggcggaagaataccatggatacagacgctttagcacaaaacgaactaaaacaatatagtgccaaaacaatacaaaagtacataagaagctcaaatacccatagataaaattaaattacaacaaagatctccattctctacataagatcttttttagttgtttgtgtatgcatataattagaccttctcataccacttttgaactcaggaatatgacattgcgtatgatagtttgaagaacccaagggaaaggttggctcgtcagaagcaaaatcttcggcgacgtttaggttagtagtttaattattttatggctttagtctttacacgagtgttgtggagaaaacgtctatcaaaacttttttcttataaaatagattacatgtctcaccttctgtggtattatttgtcttcgggtgttaaagtcaagctcattgctacttgacgcaggcttggaagtatgtgagcagttcatggatgtaaatgatatgataagagatgaagaccttattatgcagagctctcatggaaatggaataaatcagagagtttatgtaccacataatattcagcgattagttgcagatatggttccaaacatcatgtcgagaaggcctagtccaagagaaaggaatcttctcaaacgaaaagcaaaaattagctcaaaagaccaaatgaaaggttggtctgaggatggcgactcaaggatgttgggtgtacagaatgtgactgtgccaaaggtcctaagtgccgattccttaagttctagtaaggtatttatgccaactaatctatactttttatttttttccttcctaatgtattgtcaaccaaaactttaagagctattgactgtcttgacacaataacatcagattatgttgctcatttagttggaaaatgatatgatttaatattttgtgtgagccatacacgtcttgttttgcttctcttttctattttacatatataattgtaaagggaaaaatttgggttcatcaatttgtggaatatataaccgtatggaaaactttagagttatatgctatgaatctttttaaaaatttagctttatttcctaccctaatctccaattctgaacaatacataaataaatccttgttttatttgttagccaagaatatgtggatatagtagtccgtggcattatctacctctagatagatttctatgagatctttccttattagattactgtgagttggttagttttaaacagctcagtagcagagagttgtggactgaatacaaggtgttttgttaagtgtgctcaatgagggccaaacaaataaaggtggggggagtgaaattgaattgttaatttgtcaatggagtttgatgtgggtggagtggcattggaagatgtgagaagtgggggtgagtaagctttcttcaaaatgttttgaggaggttcgtagatgttgttggcaaagaataaagtcaatcatatagaaatgttctttttgaggtaaaaggattttcattatactatggtattatgaaaaatgttggtgctagaaggttgagggtgagggatagaagaagttgccaactgttgtgagcagggaacttttgggatataataagatgacatacagacagatggtcaccaaaaagacaacatttaaagaggtggtctttgaaaagaaaagggtgttcacgctatcaattcattttctagaaacaatgtggagaaaaatgttgatcgaacagaagtcgccaagaattgggggtggtaatggtggtcaatagataaagcttggttgtgatcttaatcttaatttactataatacgtttgtctcacttctgataacgaagcatcaacagtcattaagcacatttctctaataatactattgtgattgagtatgctgattttaaacaaatagttgaactcttaaatgtagtgccattgtggcttggtcaacttaatcaggctcaatgaacccattattgatggttggagcttttagtaggtttagtcatattttactttttaggttatctttcttaggttggaaaattaacttgacttttcactttctagccatgtaagagtattaaaattttcattttcatgtggcctttttaaattatttgtatgcaggcctctatggatgttaatgatgatgaagacggctcggaccatgacaaagatggattgtggcctttccatagttttgtcgagcaacttctacttgatatgtttgatcctggtatgcctcttatttgtctctcattgttgattattaagagtatgcctgcacatttaattttttgatgggaatggtttcacctgcatactctattgcagttaaaatgattataattgtatgggttgttgttggtcctgatattacattgtgtttgttgggagtattaccgtttattatagctgacatcaactttaattattgccaatcgttactatggctgttattatcaatatccactatagttatcattataattatttcttttgagacttttgcagttgctgctgctattgatttcttattttggctcaatatcatgtcattatttgtttatcttctaaaatgatattgtttgacctttaattccagtatgggaagttcggcatggaagtgtgatggctctaagggaaattttaactcaccaaggagcttctgctggagtatttatgcctgacttgagcttggatggtgcacagttttttcaactagaagatgaatttgtatcacatagaatgaagagagaaagagcgattgatttgaatatacaaggtccaactgatgagtttgaaccgaacatgaaaatgccaaagtttactgatgtgtcgtctccatgggtggatacaatgtctgttgccaacatagattgtaacactgacatcaatataaaggttgaagatgatagtatctgtgatctgcccgctgagcccgttactgagttctctaatgttagcactgttaaggtggaatcagattctcaccttgatattacattgcattcgaaggaagaagatattacattgtattcaaataaagaagatactgcacagtattcgaataaagaagagactacactgtattcaaataaagaagtaactgaaacggccttgttcgaggactcctccagcattaaggaaacagatgtgatgagaaacatatctgaaaattctgagctgatgaactggattaaattggctaggcattcatggcttaagaactgccaatttcttcaagaatgtgcaatccgtttcctttgtgttttatcactagaccggtatgctctttgtttaaaactttagctcattgttttaaatgtattatagttattatagctgttttccccttatcatgctttctgatctgactcttccatgccttctgtaataatacattttacttttgtgttgatcaattgcagttttggagattatgtatctgatcaggttgttgcaccagtacgggaaacctgtgctcaggcattaggtgttgttttcaagtacatgcatcccactctactccatgaaacattgactatcttgctggagatgcaggtaaatttcatgtaagctcatgcgtttttgttcttaactcttaagtgcaggcttctgtgttgtttgatgttccattgagaataattattatgcttctgatatttatttatgttcagtttagaccagaatgggagattcgccatggaagtctgttgggtatcaagtatttggtagctgtaaggaaggtaaatatttgtgtctccagaagttagtgataatgtggatatgctagatttaaagttacttcaaacattggttgatatgagacatcatgaaatgaagtcactattaaaaaaggaatttttgagtaaggttccgttgaatcttttgttgcctgtaaatttgcattaagtataaacattagtaattgaaaaataataaagtaaactgaagcatgcatctttgatgacagatgccaactttaattattcatctgagttctgggtagaaaatttggataatggttctatcagtagagggaattagatgctaatgactatccatagatttatactaaactggaggcaggaggatatcaaagctgtgtacaacggccattcttactattttttgggctgtatggcttgaaaggaactgcagaaaaatatgaagggagggaagaatcagccgaaaggctatgggagaagattaaattttgggttgcaacttcggtttagaaacccattgacttcaaggggatatctttccagatcttagtggggaatgggatttgtattttgtattaaatgggttaggtttgtgctaagatcttgctttgtttttggttgttacgaggtcatttctgatctctattgctttgtatatttttgttatacatccaaagttgtttctttctttaaaaggaaaaaagaaaattctgctgatacgttagggagagcaaattagcagcctagcaaggtatagatctccgtagagctacccccgtgctatcttttttcatatttaattgataaaatcttgaattactgaaattctattgagtggtttacagtttaataatttagcattcaggtataaggaataagggatgcttacaagaatgatgtcaatgtgtaatcgagttttgtgtgtaatttcctgttttatttttttttgttaatgaatttctctgacatctctattaggagatgcttcatgaattgcttggacgtgttctccccgcatgtaaagctgggctggaggaccctgatgatgatgttcgagctgtggcagctgatgctttgattccaacagccgctgcaattgttagcttacagggtcagacattgaattccatagtgatgttgctatgggatatattacttgatttggatgatttgagtccatctacgagcaggtaactttcatcaatttaatttcattattcttttctcttttgcttttgatttctgctgtattattgtatgtatgttatgtacctagcttactaaaaaattaagacagaatagaaattcttcaaatccctgagttcctcttgtaaatactctctttttttcttccttttgcttgaatgactggttaagtaatactcatgcttggctgtgatattatttttcttttctaacgcttcaatacttttaatagttcgtaatttttaagatttttgaagaacttgctatccacttgcagtgtgatgaatttgttagcagaaatttattcccaggatgaaatatttcctaaaatgttgggaaggtcgaaagatagccaaggatttgatctaaatgaggtaggctgcattgatgatactggaggagtgaatttgcaggagaatccttttatgttagcaacattggctccacgtttatggccatttatgagacatagtatcacatcggtccgttattcagctattcgcactttggtaaatttttctatcctctatttattattgatgcttggattttgttttttgagaaacataaacaagggtagttttgcctagaattttttgacattcttttgtgtgtttctccattttaaagttgtgtcaggaacctacattttttatgttctctaataattttctgcttttttatttcatttgtgtaggagcgattgcttgaagctggatataaaaggaacatttctgactctggtagctcttcattttggccttcatttatactcggtgatacccttcgaattgtcttccagaatttgctgttggattcaaatgatgaaattttgcaatgttctgagagagtttggaggctccttgttcaggtatttagaattgtcttaacattattttcaatggtttatatattgcttactttaactaactggactcattcaatttactttatattgtttgactctagtctccgaaggaggacctggaaattgctgcaaggtcgtacatgtcttcttggattgagcttgcaagtactccatatggttcggtattagatgctacaaaaatgttttggccggttgctcttccacggaaaagtcattttagagcagcagctaaaatgagagctgtgaatcttgaaaatgagttttatagaaatatctccttagaatctacaaatggagctattccacatgagagaatgggagaggcttccattaatcctgttaagattgttgttggtactgatgtggaaatgtcagtgactcatacccgagtggtcacagcaacagcattgggcatttttgcgtctatgttggaagaagggtctacacaacatgttgttgatccactatcgaatgcactggcctctctttctggtgtccagcggcaggtaataacgcgtcattggatcggacagttatgtcctcactttctctctcctcacgtttcctttaataattcacaacttcattcactgcaggtggcatctatgattctaatttcttggttcaaagagataaaagtcaggggttcaaatgaaaatcaaggaactatgtctcgatttcccagtcatcttagaaattggctgttggacttgttggcatgctccgatcctacattccctactaaagaatcacttctaccttatttagagctttcaagaacctattctaagatgcgtggtgaggctagtcagttattacgtactatggaatcatcgggtatcttcgataacctgtcagcaattacaaagcctgattgtgaaactttgagtgcggatgatgccataagttttgcatccaatgttccagccttgtgtaatgataatatcgggagtaaatctgttccacatcttgaggatatggagtcagcaaagcaacgacttcttacaacttcaggatatttgaaatgtgttcaggtactttcaagaattgattgttattaaagttaatctattttgaaaatgttctctcttattcaatattcttgtttttgctttctggaatgggtatgcagagtaatctccatgtttcagtctctgccctcgttgctgcggcagttgtttggatgtcagagcttcccgcacggcttaatccaattatcttgcctctaatggcttcaatcagaagagaacaggtagttactttggatacaagttaagtagaatttgttaagaatgatcataatatttcccatattttaacttattttatttattttttttgaaggaggagaaactgcaagagaaggctgctgaagcgcttgcagaacttatttattattgtgtttcgcgtaagcctagcccaaatgataaattaattaagaatgtatgtactctaacatgcttggatccttgcgagacacctcaagctgcagttattggctccaagggaattattgacgatcaagatcttctttcatttgggaccgtgactaataagcagaaaacgaagggtcagatgattgctggtggtgaagaccggtcaaaggttgagggcttcattagcagacgagggtctgaacttgcattgaagcatctctgtgagaagtttggtgcttctttatttgataagcttcctaaattgtgggattgcctggcagaagttcttaaccctaccactaacgactcctctttaactccaaatgagaatcaagttacacaaattattgactctgttcaggatcctcaaattttgataaacaacatccaggttaattcagtctttctttttagttgcatcgtgttctttaatttcattgtgaccctgaagatgtgacgctacattaggaccgcttacattttgtttaactaaatgtttgtactaaggtggcgtttggttgggaggaatgagaataagattaggaataagaatggaatggaatcaaaattaaaaatcaaaaaaataattgataaaaagtttaataatttttttttatcttgcattggaacggtcattcattccatttcaaaacagaatagtcattccaccaaaatgacggaaaaatcattctattagaatcacagaatactttattatgcaaccaagcaaaggaatagagtaaaaattatttcctttccaattcatttcattacctccaaccaaatgctgccacctaagtgttgtgtttctggtttttacattttcttttggtaccgacaatcgcccaagtgtacgcgtttgttgctgctgatcctcaattggcatttgaacatatgtttcattatcactcatttgtttcaatatcttgttgtgtgctgcttacgtgttcatttaaatgcattccttttgttgtggactgcggtcacaattagcattttgctgtatagtggttggttctaacctgttctgctgtggtggtagaatagctatttatcttgttgcctcattttctcttttgtttctcatgtgcaggttgtgcgttctattgttcctttgttaaacgaggcacttaaaccgaaacttctcacccttcttccatgccttttctattgcattcgtcatccccacatagctgttagattagcttcttctcggtgcattacttcaatggccaagtcaatgacagtacatgcaatgggagctatagttgaaaatgctattcagatgttaggagataattcttctgttagtgcaagacaaggtgcaggcatgctgatcagtttgctcgttcagggattgggtcaggagcttgtttcctattctccattgttagttgttccacttttaaggtgcatgagtgattgtgatcagtctgtgagacaaagtgtgacacatagttttgccgcccttgtacctcttcttccattggcaagaggccttcccccacctgttggactaagcgatagtttctctaggagttccgaagatgcacagtttctggagcaactacttgacaactccaatatcgatgattacaaactctctactgatttgaaagtaacactaaggaggtcggtatcattatcaaatggagtgatagatgcaaagtgttttgagcaattgtttgacaagttaaatgcatattcattattacaaatttcatgcagttactgatttgagtgacatttagcatgtcttcatgctcttttttaaaataaaataaacatagaattgcatatcatcattgtttttttttcttattattatttcttggtgagcccgtgggacatgtaagtatgtgtagattttctctgatatttaagtttctaactctctctatttaggtatcaacaagaaggtataaattggctggctttcttaaaacgtttcaagcttcatggaattttatgtgatgatatggggcttggcaaaacacttcaagcatcagctattgtggcttctgacatagttgagtgccgtgcttcaaataacaatgagagctgttcaccatctctgattatttgcccgtcaaccctggtcggacactgggcctttgagatagagaagtatatagatgtttcggtcatatctactcttcagtatgttggttctgctcaagaccgcgtttctcttagagatcattttgataagcataatgtaataataacatcatatgatgtgattcgtaaagacattgatcatcttgggaagcttctatggaattattgtatcttagatgaaggacatatcataaagaatgcgaagtctaaaattacaaatgcagtgaaacagttaaaagctcagcaccgattgattttgagtggaacaccaattcaggttggttaccggtttgtgtgtatattttgtcgaaatttgaaaacaaaaggtttctgaagttttgatttttaccttttgttgcagaataacgtcatggacttgtggtccctttttgattttttaatgccgggcttccttggaactgagagacaggtgtgctttgacaaaacattattttttttgacaaacctattttcggttgatatttgattttattttatggtactaccatgtcactggacagttccaagccacttacgggaaaccattagtagcagccagagatcctaaatgttctgccaaggatgctgaagcgggggcactagctatggaagcattgcacaaacaggtaaacattctttttgacgaaaacatattttcaagaaaaattatgcatctatgttgttggtttgtaatagttgagaaagtagaagacttttactgaagaatttccaatctaataataggtcatgcctttcctccttcgacgaacaaaggatgaagttttgtctgatcttccagagaaaattattcaagacagatactgcgacctgagccctgtacaattaaaactttacgagcaattttccggctcacatgtaaaacacgaaatctcaagtattgtgaaatcgaatgagtcaggagatacaggagaaggaagcagtgtatcaaccaaagcatcttcacatgttttccaggtaaaagacggctgtttatatcgtgtattttggttgcatgtctaaattttagacaagttcctctgttgtaatgtctcatactcactcttgcatgctaatctcgcaggcacttcaatatttgttaaaactttgtagtcatccattgcttgttcttggagataagatccctgattcgattgaatgccttttttctgagcaacatgctagttccgacacaatttcggaattgcatagaccttgccactctcccaaactcgttgcacttcaggagatactggaagagtgtgggataggcgttgatgcatctaattctgatgcttcagtgggtgtcggtcagcatagagtcttaatatttgctcagcataaggtgtggctcactctttgcaccatttatttcttgatttgtttttgcttgttattcttagttgtacgtgtacctctcttatccaactatgtcatctcttctaggcctttctggacattatagaaagagacttgtttcagacctacatgaaaaggtaggcctttctggacatagtatgttttttttttccgtaatagttttcttggtgaatcaatattatggtagcttttatttcctttttacagactatagtttttacatatttttttttgaagcagtgtaacttacttgaggttggatggatcggttgaaccagaaaaacgtttcgacattgttaaagctttcaattcagaccctactattgatgtcttgctattgactacacacggtatttacatttagatatacatttttttatatataggcttgcgtcgtataaaaggcccacttaggaagtaacttatattctgtttgtagtcggtggcctcgggctgaacctgacatcggcggacacacttgttttcatggagcatgactggaatccaatgcgagatcttcaggtaattctgttgtggcttgtacctttttcgtaataatttaatttgctcggtaactaacatagaggaggtacttaattgttttccaaaatgtttattaaaatgtccaggcaatggatagagcacacagattagggcagaaaaaagtagtgaacgttcatcgtctgataatgcgcggaaccttggaagagaaagtcatgagcttgcaaaagttcaaagtttcggttgctaatgcagtgattaattcagaaaacgccagcatgaaaacaatgaacaccgatcagttactcgatctctttgcatcagcagagacttctaagaaggtatttgttacatttttcttgacatccaaaaataaatgaaaacaagttataacatttttttaaacttttttgtatcagggaacttctgtattgaagcaaacggataataagttcgatggagatgtgaagttaccgggaagcaagaagggtttaaaagccattcttggtgggctagaagagctatgggatcactcacagtacaccgaagaatacaatctaaatcaattcttgtcaaagcttagtggctaaaaaaattggcgtttttccactttgtgtatagtattgtatttttcccagagcgaggaaattttgacagcgtggaatcattatcagtcatcatcagcagccgcccccatctcttcccgtatttatttcgtccaatttaatattctttggttgttctcgtcctcgtcgtctacatggctgtaatattatgaaagcaggaatggaatggaatggaatggagggggaatgaatgtagttggggaagaagaatggtttttcctttgttttttaatcttagaagaagaaagggtttagggaagggaaaagagaatattgtaaatttcggatattgtaaatacaatcactttctatttcttattttttttttttttccctaaaatagtattaatctctatctagctatgaacaacgtaacaaacaggttttttttacatccatatgatgacacaacacaacataaaatgatttgtccaacgatatgtaatgtaatgtagacaatcaactatatttgcatttaacatttggaaactaaccacttttcaatcaactacttgaaaatttttaattgacattttggatgttataattataatattatttctgtaaatttttgaaatttttttaatagtttactatatcgaaaatagaat

SEQ ID NO: 218049 - DNA, 3583 bp, Cannabis indica
gcctaatgtttgaactgtttatcttttggttatttaatagttttaattggatttttctattattttttggcataatctaaagccttaattatgaaaaatgtaagggttgtaaccaactcaaactgaaaaaaaaattatgtgtatggattaaaattttgtaggctgatctaattgggttggctcatcgaataccctcaacccagccaacccaacttatgtgtgcaatcctggttttaaacattgtttattcagggttgagtcagaaatcgacgtctaagagtagtagatatactctacacctctacagagggaaagggagtcgctgcaaatggctggaacaactccgactacatactctccatcactgaagacccacaaaaagggttccaaaaaccacgacgtcgattgggttcgacctgatggccgtgattttcaccaatgcaggcttgcctgtaagctattctattctttgtaaaatatgctgttctaagctttggtttttctgggtgcgtgtattttttttttttgttttggaagagagtttagcatctcattatttgctttgttggttgtattttagtttattgtcaaatgtcatgttatttcataaaatgaaggctatattttggcagttttcaagactggggctgtaaatgctgctgcaggatctgcttatgcagagattgggttaacaaaagtcattgtgtctgtgtgagtatctctatacctccttctctctctatatatatttacacatgaatctctctatttatacatataaatatttacatatgaattgatatgtgactagttttgatgcttgttttttttttaatttcttttgcattcactttagatttgggccaagagagagtaagaaggcaatgatgtacagtgatattggaaggttgaactgtaatgtgagctatacaagttttgccactccagtgcgtggacaggtaataggtccatcatgttttgactcttacaatagcttactcctgcctgaattgataacatgtattgaatatttgagctttcataatttaggggtcagacaacaaggagttttcttcaatgcttcataaagctttggaaggtgctatcatcttggaaaccttccccaaaacaactgtggacgtttttgcactggtgttggaatctggtggcagtaagttcattagttttttatacacagatttgagatccttactttgttagaaacatagtaaataaaattgtagaaagagtggtagggaattcacaagatatgagattagccacctgctgtctcttattccctattccaccttcttgtttgtgttttgtagcatttttttttgttgagtgtccctattatagcaaaacaagtctctctcttctttttgaaaaactagaattggatgtactaaattataagctccttgttgtagaaagcttttatgatgatctcctaaattagaagaggtttgactcgacttgctcggtggatttgaaagcttttgatagtgttgggtatttcttctttttccttgcatcagggttacttttactttttactgatataggagcagaatccaaactcatgttattacttaggcatagtatgatgccttctttctcacattttagttttggtaaagtacaattactaagttctagtgacagtttattatacataatgtcctatcatgacttaaatctttgctatttcatcaaagtttctgttttgttgcacttgtacaaattggggtcaacgacatcatattttatattgtgctgagtgttagttgggaaatgcatcatctaagttagggatgacagcatcatattgtacaaattggttatatttgcctgcctcgcacccatcattatttctggatgccggtttgacttctaaaatttactatttagctagtagttaataaattggccaactctcgtatagttaaagaggtcaaaagtgtaatgacttgtagattacaaattgttaaacacaggaatgtttctagaggggaaagggtatacctgaacagaattcttttgtattaaggtggctactgggtaaggagccggtttttatatagtgctccttttggttgtatttgtttgtcgattattgaagtttcttccttcttgatcaaaaaaaaaaaaaatggccaacttgggaagcatgtttggggtataagaaatctttttcttctattaattatatacttaaactgaattgtatatagcaagagaataactttcaaaatgttaacctttttctctttgttagaatttagttcctaatatgagtttgtttagtgtacaattaagctaatcaacatgcccatggatttaacattttcgggttgtaggtgatctacctgttgtaatttcatgtgctagtgtagctctggcagatgcagggataatgatgtatgaccttgtaacttcagtttcagtggtaagcatcttgctctgtgttttgttttcctacttttaatttgttattaagtgtttgtaaagatgtatactaccctctttgggcaattctcaagccttctatacctcctctagtcaaagggtgggcttgcatacataacctgttatagaaatgagagtttataaatctgttttataggaaaggcaaggtcatgtgactggttttgttagtattattatccatttagctgactgatttattgtactttttggtatttgtgtttccggaaactagtcttgccttggaaaaaaccttgtaattgacccagtttgggaagaggaaagctcccaagatggaagcttaatgataacgtgtatgcctaagcgatacgaggtcactcagctaactatcacaggggaatggtcaaccccaaaagttaatgaggtatggcaacttgttggttcaacttgagttcaagtctttcttttcccttgaaatcattctcgttttggtaaacgtttagaacaatctaggcctcaatggttcatttttacaatgcattattaataattatctgatctgtgcattagaaccattggctaatggcaaaaaattgaatgggattatcaacaattcaacactactttgcttgcaatgcacagggaatgcagctatgcgtggatgcttgctcaaagcttgcggagatcatgagaacatgtttgaaagaagcagcttccgattatgaagaatagcatgaaatttatttcattacaaattgctgtttagtgaatttttgggtcattttatggctcctttttttgtttcttttatacatccatgaaactagtttttttttccatgcaagagtaggcaatattttagtgttagatagcaaacatatattttctataaaaaataacataaccgtaattagcaacttttaagaaaaggaaaagcaaaaccagaatttttatatattataattctaaatcaatgtaccatatatgtactcttgaaatgtttctgtgtcagctttaacctgcttacaaatcttttcttcaatacatatccaatgcctgaggcaacatgagaaggcaccctatccaactggacagattggatatcagccatctttccctgctccacctccca

SEQ ID NO: 218050 - DNA, 24127 bp, Cannabis indica
cttgtattcttggaagagttggatgaacttacctttctcctccagcgtccaagtactgccaagtataatgattattcgatttgggctccaaggttaatggttaaagtggttgcaagtccatctgcttgtcctgaatctgggttggtagtcaaaagtatgttccagagcattcaatccttaatgcttaattaagaaatgaattaagaggggtaggcaactagttttaagctggacttttcgccaccaatataactcctgcaacacttcttcttccgaatagtcagattcttggggatctatctgatgatttccaacccaggcttcaaaatggattgataaagcaaccttgtttgaataaatagaaagcaattgaaattcaaagcttttgagattgaaataaaatttgaaaatttcagaaagaaaccagccgcctgttctgccaggttcaatataaaattgatcccatggcgcttttctttccctattaagaaatttttttaaaccacttcctcggataagtgcggaccacgtaccagaaaagtaaaaaagttctaaagctggagctcgttatgaagtacctgacaatgaaaggcaattaaacattgataagggctacacttgaatacccctggttgatcctgttatagatcccatgccaatttaccagcaggtcggtacagaggcataggagaaagtctcaaaggcctcgcccgttcgaaacccagcatcagtttaccccaaggaagctgatcccattgtagttccacccgttgaagatgaaatcttagatcgagatccggatccacccgcagcataaagagcaaaggcggggccggctcaatgttgaattgagaaatccattcaagggtcggaacattctaatgccggaagaatagggaatacgggggatcgttaagatctggctcggatgcgtagctaagcatttggatctgctactcggattgcatgaaaaaaactggtggttcaatcggacgaaaagaagagctgtcgtagagtagtcttagtcctgtctaccttgagatagcccctatctataaacgggggaccccccgaaaggcgaataggaagcttcaagcgatctgggatcccaccgagatgaaggtgtagttttaactaggaatcccagggttgccgatcaggtgaagtagtagtttatgggcacaaaggattcactcgcgattataggcccgccaaagggaaagcgcacaggtattcaaaagagacaagacaaggtctttcattgtccgagcaatggctcaagcattcaatggttgattgttgctcatcgaaaaggggggacccattcaaagctcagtggtagcactcgacttcggtactaggcctgactagatgttcggaatctgatgaccagatgctcggaagtgaaagagggagcacagtacgcactgatgagcagcccgacttagacgactaatgccttctcccaacctcaaaaggtttttaggttgagcacaagaaaagaaaaagaagcaactccttgagcgctaggagagggaccgccagattgaggatgaggaggaggggagtatggaaaacgagataaaggtgtggtcattggaggaggaggaatacgaggcaatgaaatggtttttggttgtatagcataaaagtgacaaaatagctttctttttcgatagaaagccccaaaaatacatccatgttcgtctagtgaaaaagccagggtatgaaagagctacagcaaagacaagattgactcatattattccgttcttgctttcctattcaagatggctttacagcaggtgtgctgacttgacccgaggagatccgatagcttgtgcttccctgcttacttttgctattacctcaactgctttcgacctgctcacttagaatgaagataaataatgggcttaaaatcaactagagtaagtcgacaagcgagagaccccaagacagaattggtcttttcgactttcctgctcttgccttgttagcctggtaagacgaatctgtttacttcaaactagttctcttcccgaccatacgtcaaagtccggcaattgatctctgctgtacctggaatccatccgcgaaagggacgagacgtacgggaatgatctcttccttaaagattgggcttgcgaggtcctcgctatggcttttctttattccttttgtgccgtcatgacgactcgaaaagacaattcatgatggtttagcctgttctaccctctcccgttactgaaagttcatcttttgatttcaaccaccccggataagcctttcgtccggttttctccacgactcccgctccctttaatgcgattctattaatatataacgactgattccttctcagatccattcattccacctgagccttattggattggaattcttttgaatcagaaaagaagatgggatcatatttcattcaaccaaaaaacaaaactgctttgggcccatgagggtaataaaatcttaaaccgattgacaatcatcttggtgatgaccttataggtcacattacacaagctaatcggtatgaattgactaacgtcgggatgtttcctatcctggatagtttgcttaaccatgttgcacaaagaagggtctaagggccttgaagttctaatcaacctattcctaccgtgtctaaggtgtgacggatttcttccaatagtaggagggctcacagtaatcccgggtatacgggtatagcagttattggacttcaataggatagggcaaggaagtttgaaagctatagtgttccctaggcgatacgaggtaatagtttgcaggccaattcccttatatacagtgattcaataaaagcaagcacaagcctgtgagaaagctttttaaagtaggaatgattttaggcaagctaagtcctagggaaacccttttggagtgttttaagctcatctaatcctgttggagttcttctacctgggaaggctaacaataatagatggatattgatttccatgatattttatttatatggtggaatactagaatgaatatttttttgaggactcctaacaaaggctttctgtccccaggtctaactatctttctttctttggtaggtcaagggatagatctttttaagggcgtaatacgtctttcgatggtgatcccggaaagccagttagtttcctttcatgtggttacaggctagttagaaagaagcactattagtcaaataggcaaactttttaatttacccacgaatacttttcctatattctttcttctttcatgtcgagctttcgaaagccactggggagggagaatgaacgatcgactgctaaagatcttgaataatgcattgatagctttgcagaggagaaaaacattgattcttcccgccttgcatgctgaagtgaacaggggcggtaccaactacgactagaaagctgtcactcctgtcaatgaataccattcataggtgcccatattagtaagatagccgtaacgactttgttttactgctcgaggtggtgatagtgctcttcctatttgttttctcggctttcttcagccgaaccgaacgaagacagtttctctcccctctgtacctattgcactgatttcttctctttcactctctttcttcattcaggaaaggtgattaaatatactgtcgcgaagcaggctcgagagacctttggtcgagtttgctttacttcctgagccctcaccacttcctgcgacagctaacaaggtgcatttaggacaactcgttcatttagcactacttcattccgctcgggcatctctttggagagtcccttctttccaatcaataaatatagtgcgctattcatattatttctgcttgaccggtaccaagaactccattttcaatgaattctgggtctgggcgcttagcagcccggactttcccacttcaacactcgcaggaaagaaagaaaagacctgaatcctactgaagcagctaacagagactgagcagatattgacctatgagatttgtacacttcggcttggcaccttcctttggtttgtgctcgcacgagccatttctctgccaatcacgaattcgaatctttgcttacccgtgggccttccaggatcacttttggagctcgcaacgttgagtttttttttcccttactaatccatatgaagttaggcttacagacctcagtgggtataaggaatagaaaacccgaatggtttgggtttatcctatctataatatggctttgaacctgccttagagactatttttcattcaagaaagtaccgttttaatgatttacatcaattggagtggagttttgttcaattcttcaaataaaatacttcctgcctggctttctgtgctaatcagcattgctttcaagctttaggataaatttctaatggaacgagccttagttcggttctggtgctcaatctagttatagtacgggcagggcaggtaagggccaattaagaaatactttgtagggaaacccgagttcaactagagtagcgaacctggaaagcttagtagttagcctggaaagttggagtagaacgcaaacaggataagcgaataaagttatttttttcacgaattctaggcggttgtagagggcctttgaacgcaatgagaagatctagggtagaaagtagcaccccagtagctcaaagaaagtctcgtcccgacctggggttggcttgagaaggagagtctcgccggttgttaacaaagcggcatgcaaggaagcaaagatgaaccggcttggggggaataaataagatgaatgttcgggtgacaccaaactaccttctcttctaatcctgctacgaaatatcgattttcaggctaaattccaaggtaaggttttgagccaatcaagtaagcgctgtatccgtccctgctgtcgcaggtgatgaagtagtgggtgtaagaaagggttagttaatgaaatttccttcaaacctgtcagtgtgaaatcaagctcccggggataggaaaactagcaggaagagtattacgcttcaagagaagtggaactaaagcttcctccccctttcagaaagactgtcctatcaaccccccaaactaagacgcattcctgcctaccgaagctatttcaatcggtttcaaacctagccagaagtgatacggccatggatcctaaccctacatgcgtaagagggctcgccgttcgctggttcagagcccttattgggtccgggaaatagtgttagagcatcctccagtgactcaaagactaaaagcatttcctttggtattgactgatgatagggttaacgagagaattcctatttcttaccgctccgtgggaactctaatcattcaattctaaacccttttcttttttgtggattgaaattccacaacaaaagtctctttctcggcctagtttgtgggatttgtgaactctttctctttttttcttacctagctggtgtaattaaaaaacccctttgttcataggaattacagaaagcttttgaggattgttcctaggcctcttctttttgttttctcctaggtttccttatccctcctcgaatctctcaatcagaagctggagaggagagatggcatataagaagtggtactcactcgaatagagagagtgtaggctcactcacaggtcaggggcttgtacagcaaacagaggtatcaattcccacagagcaagtgggaaatcaaaaagaccagcgaactaaagactttccgtgagcataaaactcctgtatggtctttaccgcttgggaacctcaacctcgcctatcccctcgaagcagctctatggggtcgctggagttaaatcaagcttttgatcatattcagccttctacggctgatgaaagtactaacttcccttgagactgatattggtttatcagttcaattgtcatatattcttcccctgaattgaaaggattttcactcaattatcttcgtgctcgattccttgttggtgcttgattctcgaggctgggaagacagaagaagaggttttgccatcaattagctttctgaacttacagtacagggcggaaagtgagctttgataatcctaagtacttcttcgagtaagcttgtgatctatagacaggaaagaaggctagctctttactcctgagctaagatccacttcttgcttatgagtccgataagctgcctaaagtattctatattgaaagtcgtgagctgaaatagcccgattctctacttctggctgtagtcaattctgtgggcaagtcaagtatatatagtagttaccgttgcttgtctgctccttcgtataggttccgtgtaggcgcctttccatacgatcaattgaatattggaaaagactatggatattcactactattgatatctgaaactttagactctgcttactcatttgatttgatataagttcggaatccactgaggtagagccgggccgggggtatccatacaggtcgagtgggccttacggtttgcttgctctcagttgcctttaagctgctcataaatgagatatttgcattagatagctgttagtaggggcgcattggttagcccacgagagagaggctgtggggctgttttccttgggcattggaacaatcacaaatgcaggaaggaagagtgggtcagttcattgtccccccttcccgatcgtgctaactttggctctcacagtcgaaataatctccattaggaccaggccttgccttcttgcctccccccttgtacatcctattatttatctctctccataagacataaactgtggctgcaaacaccaattttactatgatgttgcccagagagtgtcctttacaggttctagcaattcacatgaccgtttcagacccttccttttattcaccatatatagtaactaagtatatatatacttagtaccagtctatctatggaccttagcagaagcgagataactgccattggctggcctgggaaagcatttttagcaatagagagaataggtcaaagcactgggttacaggaagtcgtactagagagattagattctaattataaccgccagggcactccactagatgaattacccaaagtcaagtacaggacaggaaactcatgactaaatagctgtttcaaaggattcaaaaaaggcaacttaaatgggcctgtcatcgagagcaaatggttacccgccaatcaatagttatccggccaccacgtaggcaccttctttaggccgtgggctttctgtctctttctcgccaactgcttaaacatactacgcaggttgaaccgcgtcaacttccaactcggtgggtcgagcctcacgtagagatcgccaagtgctctattccttatttatctgactcctaagccggccgtaatcattagattttcatcagcttcaattgagccggaaggaagaagttggagccaaggcgagcggagatctttctttaaattatagaatagtccaggtagggcttcatctctcaacaattacaagtgaaggagagaaacggtgtaaatacgagataactctagctgtaggagctgtccaacggttgagctgtcataggccgatgaaggataagagtgatcggtaagctgacccgtactcaagaaagactgatccgtaaagtcaagctctgttcccgattcaatccattccagaagcatcctccgaagagtattcccgcctttccgctttccaagcttcaggagaaagagagtagaacggggcaacagaatcgattgaatagctgaccaggttgctagctatcttattgatgaccaagtatgctcccccggaggaagattccgaattcgtggagaccctgagccaactacgaaacaactgaaagccggtctgattccggggattcaacaacttgcaagagaaaaagaagagcaggccgtcagaaatcgagagggacctcctaagcaaagctttacctaggaaactgaccgcggtgcaatgcgaggatttagcgtcagaggtgagagagaggattcacaattcagtaatatggatcttctagggaaagtctattgagtctcaaggcaaatcacataggtacagagcctaatcttttatagcattagagattgtattggtgcatcttaacttcaacagcttgcttcagggagggttataaaagtaagttataagggcaaacaccgatgagggcaaagagccacgataaaaccagctagtgatagggatctctatcctgttgagtgcgctcaagtgattaaagcaaaagtgtcctctattaggtgaggctgactcttgtaagtataagcccaatcaactggtcctcccatggccccaattgagtgtgtacgcgccttcaggctggcaagcccatgtttacagagtaggtttgtaaacaaggtttacaaacaactctccttctgttctgaaattacgctttaggactctgtagatatcaatctagcgatgacaccaggacatcaatagatggataaacacctggcgtcggggattattaacagggaatcgggatctcgttacgtgcaaaaccaatggcattcggggaagactcgctaccaagctgcataggatgggcaaggggtaggtctcacttaaggctcatatcgtattgtctcaaaagcctttatattatcaaattcatcagccaagcaagatattcgaattcaaaagccaagatatattaccactgaaaagtcgaataagtgttttaacccagggcctcgcgttgcggaaggaacgttctgttttgagttgaaggcaagagctctttcttcaataaaggtttggaaccctcgttttgccgtttccttcacggcacggccctgctcgccaggaggaatctttgattcatggccggagatcaaggcacagatcggcctttagagataggggcgagcagaaagcagcaccttgtataggttggggaaaagccccttgtatagggttcaaaaccagcgcaccagctgaaggaagggcttcatagctccaacctagttttggggcttgaatgcttaccttattattatgaaaaggggaaagattgaatcttgaaagacggagcccccggctagcaagatcgggaggtttagtgtcctcttaagaaggaatacccgggtcagcttcgatcacgaggagagaagagcggaccattgaaagtctcaattcctatccgcccaaggcgatttcaaatccaacgatttattgacctacgaatctgctattaggcaactcaacccttctccgcaaactctttcagttgttggatgcgcaaaacaagctattcccctttacgacgactcggtgacctttgacacgttagacctggttgcacgtaatctttactttcgcctttcactcgtgcagttggacttactagtgactttaaaccttgagaccgagccctgcctctcacctttcggttcattgcaaggaaagactaaaaaaaaggcagctttgggcggacacaagccctcgggacttgacacttggacaccgggaagcttgccccttgagactgggtccttcgtttgtaactgcccttttcctttccactttggaattcctcgttgctttcccctttgacctgtgccaaactcaacttttgctgttgccaggtggaatgattcattcaacctcggtatcggcaaccaagacgcccttctctgtcgaatgaatcttcaaacctatcacggtttcctgttgactttttctcaggtgacaggggctggagaacacttcacaaaatgcgcctgaccgcctaaccagttgaaccgttctcttatagaaagggtaaaccgcaatataaaaattccttttttacctatctttctccaaaaggatctcctggtcatatcgaacctgctatttcacccttgtcctgtccctgggggagaaggaccaacaaccaatgatcttgttcattcatatccacccgtccgctagcgactaaggtctctcgagcctcccctgcccatccatcactagctccatatagtccccatggaaccatccgatctagagcgagcctcaaacgagatctttcttcctttcatccactccttcaatccatgcattactccgctagccagctaagctaaagctagccttccacccgggcattcaaagcaatcttctaaaccgacttagcactctattttatctccccctctctctccagccggggaaggtcaactaatctcgatccaatgttctcctctcctagctccatttccggaaatgacgcggaagcatctgacctagccttcgagggcaagaaagcaaatgagctttcactttcagaagtagctatctcttcaacccggcaaactatgaatctttctttccatcgattggatccaatgcattgccatctccagacccagattcttccatttcccggcccggaacgggatacaaactcgccgaagcagtctatccttcgaaccgattcaagctcctttgcagatacggagccggaccgaagcaatgaagaaggtgaactcccaactaagcttgtcattccacacccgggtatcgaatccgaagaatgcagtaagctacctctcaccccctcactggatattgaagcttcaaggcatcgaccgcatcaactaatccatttccagtgcttggcgggcctctgctccaaggcaatctcttccatttccatcagctgggcatctcattgattcaccatccctcgaggggcaataaggagccgaaagcatgggtctagaacccccatccgattcagtggaagctagaaagagtggtttgcaaaagtatccgacatgtggtggtctcaagtagtttgtttgatcgcgctttggttatagtaaaccgccgcttgccccgctacttgaatgtcatcaaaaatcaaagcacattccctctgtctgttggttatgtacaggcaccctgctctgcctgccttatatcaacttcacacccaccctgtgtgatatgcagagttctcaatagtcaaagaagcgatcaggcttttcccatccgagaacctagataacttagtgctattgagaccatgattcctcaatggccctctaccgggaagtcaaaggaggatcatgtcgacttgctttttactgtgaaaatgaatcctaactaacgtttcactttaacaggcctaaaaagagagagatgcgagatgcgcttcagttgctgatgccctacgaccttaaaagcaatgtccactttcctgtgctaccgaacaatagtgtaaatagtcaatagctctttcagtcctgcagttttagcaggcagtagcctaataggcatatctcattcaacgccggcatacgaaaagcagagcaacttgactatgagcaagtccaactcacgagacacttcgtgccttccttcatctctctttcataagcagtagtccattcatatctcattcataggctgtaggcatacataggcttctgtatttgtgaaaactgttttcgtaggcggtaggcagtaggcagacgcttagctggcgataggaggcactggcttatggcggtacgaactactggcactgtcatctttctgcgctgatctgtctgctcatccggatcaattgccttccacttttccctctagagaatcgatacctggaagggtcccgtccctctctcttggccggcctattcttgtccagtaatccttcttctttcgttaagagttccgcgctttgggtggcatcgtatagtaaggtgagaacttcttcgaggccccggacagagaggctgtacgtatagagaaggaaagtctatttttcccagagtctagctaactctaacccaagatcaatcttgaagaggttcttcttattcagtagcagattcggatagtgatcagtacccctctcgttcttcccatagaaagtttcttttttctatgaaaggttgactgagctttaaaagaagaggctccttgagtcatgggactttaggcatctcttatttatatgaacattcccctccgaagctgagaagctgaagatggatatcggactctgggattagtgtagcggatagtctccttgttatcagatgacctaagtgacggcggaggactcgctagcaggatgcaaagatccgatccccactggaactcgacctatcccaatatccctcgctacacactctcacccagcttcatggtcacactgataactgttcactgtcttgctatctgaacttgaagattctgtttgtgttccgtgaactcaataaccacttatttgaaatgctatagcgggtgcgggaccaagacaaagaaagtgcttctatcgaggtcttgaagagccttgtgttgaagtaagtacaccggtaacgtatataagatcaatgggttctttcctcaactaagaagaaaattagtcagataagtgagactaatttcaagaagcgagacaggatcgtaggatagattcaggctatccgacatcgaatcatctagttgcttgttgttttctttttgaaatcgagattgggttggtgttcagtgtaccgtgggtacaagatcgaaaagagactgggacgatccaccatcgtttctggagggtaagaggcagtcctactcccatacaattacaaggctgggtgaccggtcttgggttgtgtggccccgcacaggtttcggcacccccgggggtgtgagtaggttcctatccctgtgcctctatggtacgttctcttcctgagaaagacctctctgccggcctgcaatgtgcctgcggacacttgcagctgtcaggtcttgaagagcctgaaatccccataaaaactaacataaaaatgaaattgaatgttgggtttttccagtctcttatgaaagaggtcaaaaatttgaaactttcgatctatttcttgcatcttaagaagagcttccgctttcttctttcttttcgctatttgctgttctattcttatttttcagtagtattttctcatttctttgatttgtggaatgcagagggccctactttcgggaacaaaatggttccatctgaaggatctcacggctcggagggggaatcctcaaaaaatcttcttttagatttgggaaactttttcatttaaaaaaggagagcatccccccacaagcagagcccatcacgcctcaatctttacttcaaattgagattaatcctaacgatacccaaaacgagttacgtgaaaaggcagcattcctactttcttcatattacgctgaagcaaagatatatcgagatcattatgtatgggtagacatcgcacaacacctagccttcgagagaaacggtaaaaataatgtcagccgcgaagatctcgttgggctcatcgaagcgctcaaagatccagcgaatgaagggggggaattatacctcaaaagtaagaaatttctgctccgctataataaacccttaaaaatagaataggaagagaagagaaggaacgagaaaaaccgaattcctctatttgatgtcgattcatccacacttccattccttgtagaggaaggctaactgcttgctggctgggagctgtatgagcggtaacgtccacgtacggctccgtgagaagggcggtggacataaatggccttgttgtacctcactctcgtcttcaatggggtctgctcttttttttttgggagagtatgccaatatgatcttaatgaggtgcggagctttgcatctgacattcgttgggcttccctcttcgggagcctgcgtcccggcgtttttgtgcaataaacccctccggccgaagactagtggtaggtggtcccgcgtagctttcggagaagggtagcctagtgtgtaagcacagcaatgaaccgcggcgaaccctcagacgacctatctaagattaggggggagatcctcagtagtggtgaccctttcactcttccacggactgatacatgtaccgaatgctcatacgggaaagttgactcctgggtctggaacctggggggttgctccgagacatcctttctttctcgtccactcaggggggtgcggacacacctgcgcggattacaggtgacggttacaagaatggcggggaagtgaacagtacccgacgacattcagggatggatgtagacccatcgggcaggggtaatcattccggtcctgggagaggttgcgaccattctcaagaaccaaaaagactgagctgagggaagccttatgagtcactgaaacgacggcaggagggcccttgatctatcaatagagggagcaaagggctggcttgctctcatctaagagaaaaggtagccctttgggaccctctttctcttagatgagagtattaagcttcaaaaacaagagtcacgctctttaaacgccctaagaaataggcttaagtcatcgattccaatcctcatctttttgcaaaaagccgctccgccgaatgaaagaaaaaacctaatagcatgaatatccttcgcccgttatctcctcatcttcctatttataagccacagctcacttcgacgtttccaatttcccatagaatctccggggctttcctagccactatagttttgtttttttatcttctttgtcttaaaatagggtggatttgcttcacctatgagaatttctaccaattcttcttttattcatcaaagctcatcccaatctccgtcgagattactgccttagccctgtcctatcatctgtatcatggggttcgtcatttattgacggatttttgggtccccccccccaaaagattgaaatgactgttcaaaatttcacctatacctttgagattaaaaaaaaatggattttcttatgaaatgtttattattattttattagcgttgatagctctcttctttaaagcttatgccgtagaagctgacatcaggctattggcgttttatctgcatcttcccgaccaagacccggaaggggttcgctttgtttgggatgaactcgcaaagactcgacccgaggacttccctcgtagagttgcgtcttttataagactcgagtttctcagttgaactaaaaaaaaaagagtttgagctcttttggcttacttttagccacgcggggcggctatccgcatgtgtcccaaagtgactgacgtccattttttgataatgggtatactcgagagaaaagtttggaattcgacctctccttatacgcgggtcatggactcctttttgtttaggaacccctttctacattcaattatttattgagcctggtgtggaatcaccatcattacacattcattgttggtctggctgctggtctagcgatccctcctagccgccgcctagagtgcagcctgcctgttgaagaccgtaacgtaagtaactcagtgctccatacgggggaaatgaaagcagaattcgttcggatcctcccacatgttcaatctttttttagcagtttccccagagatctttatcattaatgcaaccttcattttgctcattcatggagttgtatttagtacctctaagaaatatgattatccaccgttagtcagtaatgtgggttggcttggattacttagtgttgcgcgcctaggagggcagcgcgctttgggatgcggaggagctattatcgcccagctccctaaccaaatgcggcaccgggttcggaccgcagggaaccgtagcatgggggggacgtctaatccttttgccgccgcaaggctggctaatcgtacgcagcaggcttgaagacccctggttctggaaggcacatgagtccgaacgctatgttgaatgtgcgaccgacactacactacgtaggtacctgtgcaggtgaggcgtcggtcggtcctagaaacggcggcaggggcgcgaggagttaacgaccggacgtgctgcaacctagggatcaccaggcagctctttcgctctatagggatcgggggggcatagcacaattcttcttggaggagggttggtttgcccgggtgactgatcctgccataatgtactcctacctatagcaccggcaaccgaagtcgagcatatatacgacgatcttcatgcgtgaatagccgggaggaaagaaagggcggtagatgataatgaaaaagggcgccgcgtctggacgggcgggcggaatggatgcgcgaaaggtgccatggagtgaggaatatcccgagtctcatgtaagacaactaaatgcacctcgaggtgctgccgaggaactgggggaccttctcgagcacaggataggcaattgagctagcctattcgttatggggaatccatgctccgggccgaatagagcttccctccggcacctggctttctccggcgcatattagcttagctgcgcttaataggccggtttggcttcctctctggcggccactttccttaccttacccacgctacactcccactccaagctacgcctgctgagcaagaggcattgcgatttcctcttctgtggacgcaccggaatatgatccgggacgggaagagaaagacttttttctccggctctcgtaaagccaaagacgccccaagacaaggtacaactgttgggaaggggacatgatcaatagaacctggctggatccgggctgggatagtggcgcccattcctaaccagttccgaaaaggttcgctcatgctggagggagcatccccacttagtgatcggtccgctagttcacgcaaatccgaagaagttatcacggacgagccacatgcagggaaacttgcacgtgtggttctggccgggctttcctgaggtatctaataaccttgcttctgctcgccgctggcgcacctctcctaactattgcccatttattccggaataatctttttaggagggacaattttacatatttctgccaaatccttctattattaagtacggctggtaccatttcgatgtgttttgattctttcgaacaagagaggtttgatgcttttgaatccattgtattaattccacttcctactcgcagtatgctctttatgatctcggctcatgattcaattgccatgtatttagctattgaacctcaaagtttatgtttttatgtgatcgcagcatcaaaaagaaagtctgaattttccacggaagccggctcgaaatatttgatcttaggtgcatttccctctggaatattactgtttgggtacgaccggacaactaccgatatctaaaaatatcctttcttataatgttgttgttaaatatatatctatatagtaaactatcgggtattacttagatgtgaaacttgcagacctcattggttgtgatattgatcttacggggggaacgaaatcaaagaatatatagacttgtagagaccctctatgtagttgtctagctagggcgtctacatctttccccatagccctggggctgtgtctcgatctcctacgtgcgaaatctgaggtctgcaagcctatggagattccccttggtctaattccacgccttatgacgaaaggggagtcggcgtggcgtaaagtgaagattgagggaagtagagcaaaattcccttctggggtattccgaaggtgtaacctaggcaacgaaaaaggggcccgatacttcaactagaggagcgaccagttggttcaccaaaccccgacccagcgttacacgttctccaggtccgaagggatccagtacccaactaccgactcctcccggaattgcgttatcggagccgagccaggaatggccgttagtggacacccaccacttttcaccggttagagaggccctctttaatacattaagaaaagatgttcacaggggccagaaagactcggtcataggaacttagaccacctacgcgctggtaaacgaaaaccacctcgaccggatcagagtaaaaaacaatgtcgaatcaggccgccccttgccttgaaagaattcacacgcggccaccagctttcccaaaatcaggggagatctgctgcttactgctcacgaaaacatccgacctatactatagtcaagtcgtccgcgtatctttctgatctcctttccttctatttctcagatttttggctttgactaattcaaggtgaaaaaaggggttggctaaaaaagggggagagaggagtggggtacgctcacttctgcatttttgtttaggttatcgagattatcaatcgctctttttagtggggaggaatagtgcgtgaatggcggttctcagacgagggaatccttcctctctaactaaataataggctagaatgcttctatcgatagagctttcacgtctgcgcatagaatcgtttttttgcctaaacattttgaaaacccatatcatgggcagttggatcggaatccgtgtgatggttcgagagtggtttcaaatattcttcgcatccatcttcgacctttcctattgttggagaataggtctactagttcccgattccatgttaatgtatctatatgaacctaatctctctcttcattcttcttgagctgtccccgcttagaggagcgggacccctagagttgagagacgcaacgaaccagcaaaaaaaaacttagagtccccttttgggctttcataactaataaggcgtaaaagaaaggagtctcggtattcgttctgacttccgctcgcaaaggaacaagatctggatttgactagggcgagcgcagtttactatgcgagtggactttgcccccctttctttatacttgcagtaaaggtgtgcaggtgggcatagaggttttgtagtcgttaccggtaggagtgagttacacttctctaaggtgggtgggcaacgagtaacgaaatcagatcccctgtcaagtaggtttcgtaatcgctaacgtatagtgttgttattcgctcagtgaagtagaaagcaacgggataatggttcgcattgaattcatttagtaggtcgccttcttgttcaagccagaaggtcaggtacagaagcttatgttcagtgttaagaaaggtgggcggcggatgtgtgggtagttagctcgaactgtccgcctgccaacaataagtcaaaaaggtgttcacctcctccgcacgtataagagaaaggcgctggtacacagttgttgttctaacgactacaagtatagtccagcattatagggaggggcgcgaaagcacaaaaaggaagtgaagtacagaagagcaggttatctctgaggtacgaatcaaaaacttaagatgttcatccccaagcctagcctactctacattatcatatggtttcgcgggcacgtccaaccgtaccttgccacttgccagttcaaagtctaaaagccggtcaataagacagatccggatcctagtgctttcgagatggttcgatcgctaacaaagacaagcatgggaaacagcagactcccaacaagcaactccaagagctcaagcctaaagccttagtaacgcgcatcctcattgctcgcgtaaagcaagcgtaggctcgaaggccgaagcgcgctagtgctcgttgcatttccctcctactcgggtaaagtattccgctcgtttgctgtcaggaattcagtagagtggccggtcgttgaaagaagcaagcctatagcctttggctgaaatcccagaaaagtctcaatgctatctaccaaggggaaagaaagatgcgccattcttagttagggagagggtatgttcacattgagtatcctcgtatgctcagtcgagtgacaaacgtacctatccccgacgtgggtaacgcatctacaaaaccatggtgttaacaaggccctcccttctcctaaatccaattttttatttacttaaaataaccttcactggccaagaaagtttggatccctccgctccttgcccgttcgtttcacttacttccgctcctctcatcgagaaagcaattacacatcctgactaaggagcacaggcaataggttcgtaggaagaggcaagcgttcacacatccgtctctatcatatgtgttgggtgaagagctaagactatgcctgggccggggtcaggaagacaggcagaaggagtaagcagcgcctatactatataagatagggtctcttgcaggcaatttctcttatccagtaaaggaagttcgatagctgtccaaggggcaaagagtagtattccggtctctcttgaaagcaatcaagcgtgagaagcaggatctgtccacagcttttagccctttcccttaataagttcctccttctctccggattctcgtataaagaagcaattacctaaaagaagaggtgacaggcagttggacttagctttccgggcacacaaatgagatattggagaatagatttatttcaccgatgcttcgttctcgaccgggacttcttcgataccggagatatagatataaaggaagctttgaactacttatttagagggagaaggaaaggaactagccctctccatatcgttggataattggttttaggattcagccgtggatgcaggatcgaagagaaaagaataataaggtttgattgattaccccagcccaggaagttttagcacaaggaaatcgtggagacgcagccttattgggaaatgactggagctttggcctatgttggagtatgtggagaagcgccttctgtcgttttagttgaggaggcggaatgcatctcttatgtgaaggaaacacttttcaaatggaaggtagcctatttcgctttctatcacgaaaacaaagagcaaatcaccccgcagttgacccggatctgtatgtccaagctttgcatacgggagactctaattgaatgagaaaaggcaagaaagagtggctcgacaggcccgtcaacagaatggaatatgttctagtagacttaaaccaagaatgcggcacgcccctatttgtattatcacatttcacactatgcctggttcactggtatcaacatagtccaacggtagaaacactagttaggggcaacccaaagtaggaatgctattcggggaatagacaggtccaccacagacaagcatgaagtgaaggggcgcgctagtcatctcctttctatctatatgccgattgatatggctattcgtaccttttttctcaatcccttgcgccgtgttttgaagtctgtatcgcaccacttattgttgagggttttatatttttggtcactattttgtattattacccattttattaaattttgtaatagtgaaatatgtaatagttataaagatgaacgattattgattatcggattgtttcacttttttagtagtgatgaaagacacgtatatggtaggatttataaaacattcaagaaatatatatatatcatagatccaattatatttgtaaaagtactttaatatagaaaaccctaaatcataaatgcttttgctaaattaaagaagaaaatgataaaagatgagcggaagcactaacctgaagccattattggagattgcagagaaaattttgattttctaagaatacactattttcttaggtattttctttgatgggaaaggagagaatacaaatacccttgggaagcactacctatttatagactcatcttagaatgaaatttgtgtatttataatttgacccctcaacaaactataaattaacttattatagtatctacacattattttcatgacaattaaatacctttttgatacacataacataattggtcacttaattttatatcacactttataatagcatatacattatacatatatgtgcacgtaggattttagtccaataacatgtacatccgttttgttgcacgtggcgtagagatatggatacgtgctaattaagtactcgtggtagacatgctgtaatcctgatcatttccactactatttactactcatataaatacatatgctcatcacttcctcctctcatatacatcaatatcatacattttatattaatagtaataattaagtattaaaatcaaatattaattatggagagtactaggaaagtaataagctctggaatgttgttgttgttgttgttgctctttgttcttttggcctccagtaagtacttaattagctagctaggatcaaattatgtcccaataataaataatatatatgctgatctaatatctcaatataataaaaatatatattaataaattaaggtatttaattgaattaacaatattaattatattattttaaaaatgaataatgcagattatgaagtggtagagggaagagtatgtgaaagtcgtagtgaacgtttctttgggaaatgcacaactgacagtggttgcacctccacttgccggaccgaaggattcgccggtggacgatgtaccggactccgtcgtcgatgtttctgttccaaaatatgctagcctgcttaattaattattataattaaatatcatatcatgtactactacgtactatcgatcatgaataaatataataaataattaattatatatcttgccttttttttttcattcatttcattttattctttatgcttaataaaaaaaaagatctttttctcagaaaaataaaaaatgtgaacttgaggttatttgttagaaaaaagttgtgtgatcattcaattaataaaataataaccaacaaaagtaatgcgaagataataacaataatggattaagaacaataattgatcaaataattttacaatattattgttacaccttaacataattaagagtatgtaaagagatgaatatagaagctgagcaataactattattagtggctaaaatataatatttacatttaaattattattaatttaattttaattataatataagtatattgacactgaaaaagtatatttaattacaaataattgttgtgattaatataatatctttaattatatataatataaaaataataatttataattaatgatatatgttttctaattttcagtgacatcacaagtgataattttgaggccgaataacatagattgatgataaactttattacttatacgtatgaaacttatttgcacgaaactaagtaagttgacaattattaaaaggtattattaatggtatcaaataatgctcaaaacaaaatttctctaactcacctaatgatttcggtcaacaggagagatttcatgagcattggacaaaactaattttactttttattatagttaataatgttgatggtgctattttttcgaaatattcgttacgggtttggaatggttgcaagggagctctggcgttgttttagaagcagtgaataagtttaatttgtaaacatggtgcttagaggccgctaatgatagaagcaatggaactcaaagaagcgttgagttagataaaagagaaaggttggcatcatgttgctgtggaaattaattgtcttacgctcataaatgatatcaagaatactaaaactttagcttttccttatagttttgttttacaagaatgtagaggtttgttgatttgatcgctgttttgtaaaatggtctgcaggcttctctttatgaggttgatcgtgtttttagtagaaattctttacctgcttgctattcttccataatttcaaaagatttaattgaataaagctactttattttcaaaaaaaaaaattcttaattaaaagaatcattaaccaatgtaaatgtaacttttagagcataatggtaattttttttaaaagtgttaaaaattatttaagaatataatattttattttatatctctttcacattatttttaacacttgtaattttaaacgctctaatagtatattattttttaatactataattatgatttcataattttttttatatattatttattttaaatttttaattatatatatcatcacattatttatttatatttgattttttattatttttaaaaagaaatagcattaatatcattaatataattttttataatagtatttatttatctccaatagtataatatttttatattttgccaaataaacaatatccacatgagtaccaatcctctaaaatttaatcatttgaatgctgaattaatttgagcactattattgggcactaatggtgtctaaaaccttctatatataagtgtcactctatgattggttagcgatatttcataa

SEQ ID NO: 218051 - DNA, 4102 bp, Cannabis indica
tgttgctttttcgaggaccaggagattagattctgtccaaggtaaacaaggtagccaccagtagagcgtcgatcatcgacacagcttgcccaatcggcatctgaataactggtaagaaccatatcagttgttggtcgaaacactaaaccgtgtgatattgtagccttgagataccgcaggactcttttacaggcctcccagtgacatgtcgtaggtgcctttaggaattggcttaatttgttgattatgaaagccacatctggccgtgtaagagacaaatactgtaaggcaccaatagtgctacgatacagagtaatatcagagaagggttcaccctctgtcaaggacagttttgcacttgcactggcaggatttggacaaccttttgcaccttccatgtgaagcttgagtagaagatcggtgatgtatttagtttgggacagatacatcccagtgtgatccctgtaaatttcaactcccaagaagtaatggacttctcctaagtctttgagtgagaactggtgatttaaatcagtgacaagcttactgatgagagacatattcggccctgtaactagtatatcatcaacgtatactaggagtataacttgattcgatcctgagccataagtgaacaatgaattatcggacttagaagccgtaaaaccccactgatatagacagcttttgagtctgtcattccaggctcgaggagcctgtttaaggccataaatggctttctttaggagacatacatgatctggttttgcagaattgacaaagcctgaaggttgtttcatatatacagtctcttggagattgccattgagaaaagcattagaaacatctaactgcttaatagaccagttgcgagagactgctaatgaaagaaccgtgcgtactgttacaggttttacaactggggagaatgtctcttcatagtcgattcctggggtttgtaaataacctttggccacaagtcttgatttgaatcgattgagagagccatcagcattgagcttaatcttgtgtacccatttattgtcaatcacatgcattcctggtttgtatggtacaagtacccaagtgccagccttttttaatgcagcaaactcatcattcatagaggcaagccatttgggatttttcaatgcttcagtgatgtttctaggttcagtgggtagtagagattcgggtaaagggtgctttgtggctaaataggctttcggtttaactatcccatttagtgatcgagtggtcatagggtgaattctagggacaggatgtggggtagcattgtctgtgttgctaggctgagaagtggaagtgtgatgagggtcagggttatgtagtgggactgtaggtggaatgagtgtttgtcttgctgcagggataggtgggatagtggtgggaggtaattgttgttgttgttgttgtgtggatgatgagacaattgggaaagggacaggattacatgttacctcagttgcatttggaagtaccacaccagaagcaataggattagtttgtgtagtattaaaactagcagtaggtaaaacatgaggagaaacatgtacctgacttgttgcagaagcagaaggagtgccagggtagtgagtttcattgaagttgacattccttgcaatgtatattcgacctttagcactctcacagagataacccttgtgatatggtgagtaaccaataaaaaggcactgctcagacctgaaatccatcttatgagagttatagggtcttaagtgaggaaaacatgcacaaccgaagggtttcatgatattgtagtcaggtgtttgaccaaagagacactcaaaaggactaatgccatcaagaattggggtaggtaatctattaatagtgaaggtagcatactgaaaagcatgccaccaataggagaaatctaaccgagactgtgctagaagtgtaagaccagtctcaacgatgtgcctgtgtttcctctcagccctcccattctgttcatgagtgtgagggcagggatgtgagaaaatgatcccctgatcagatagaaatttcttgaatggcttgtattcacccccaccatcagcttggacacctttgataggtagaccaaactgtttttcagccattgctttaaattttaaaaacatatccagggcttgggatttgagggagaggggatagatccaggtaaacctactataatcatcaatgaaatgaatatagtatttgaatccatctttggatggtatatgggatggaccccaaagatccgtatgcacaagttcaaggggttgagtcgagtttgtttgagacagggtaaatggtaacctgtgatttttgccttgctggcaggcattgcaaaactgcagggtcttaattgacccggtatgaggtagttgaggaagtagtttggtgagagtagctatagaggggtggccaagcttatgatgccaagtgttaacatcagggcctgtagaggcaaagcatgcaataggcatagatgaaccagaaatttgttctttattgatattcaattgagtacaagaggatacatcagtattgacaattgaacaagtgttcagattacaacaagagcaatgaacagaagcagtagtagtagttaaaagacactctaaggcagaatttgacttgacagaaccatcactaagcatgtatagcccatctttacgctttcctttgaggagaagagcacctgttttcttgtccttgacaaaacaacagtttttgtgaaactcaagaaagatgtcattgtcatcaactaatttagaaacactgacaagattcttagtgatgtgaggaacttgtaaaacagattgtaattgtaaaggacaggaaggagaataagatggaataacagagttgcctatatgagagataatgagtttcttaccatcacctacagtcacggtttctgtgccagtgtaaggctgttgagtgtcaaaggtcgaattgtcaaaagcaatgtgagccgtggccccagtatccgcataccaggtgttgtcatcacctaaagtcctgaactagtgttgtcatgtaagcttgagggtcataatcaaacttcaggtttcagtgagatgggccctgggaggaggttgatttgggcgaggcacacccagttctgtcgaacctgagtggcaaactgggcagtatgacccgatcgaaggcacacttgacatataactcgttgttgattatatcttggatatcctctgcctcggccattggacgattggggatagtcattttgtgtgttcttgactgaggaaaagggtcgagcacctcctgatcttccattagcaaaagcaatgttggcctgcatcttgactgcaagatcagtcacagtttggtgatgctcaagtcgactttcgtgagacaatagtaaggcctgaacttcttccatggtaaggatgtcacttctggatgtgattccagacacaacagaatcgaattctggacccaggccgttgagaagttgaagaacaagatcttggtcatttactggagaaccagcaacacttaaggcatcggcgatcgactgaaccttgtcgacatattcagagatggaaagattgcctttctggagagtagagaactggcctttgagttgaagccttcgagctcgtgtttggctagcaaacttttgttcaagggcgcgccagacaccagcagatgaattgtaattggccacagatgcaagaatgctctctgtcatggaggatcgaagccatgacagtaagagttggtctcttcgtcgccattgaaggaaatctggatttagttcacctgtaacaagaaattgaggaggagggattcccgtgaacaagatctcatcgagatcatgtccaatcacagtgggaaccacttgagatttccaagaaaggaaattcagtcgatcgagtttgagggtgagagaagaagtaagagaatttgagaacgggttccatgttgcagtagcaggagtggcatttgccattgaagcacgagctgttgaggaagaggcattcgccattgaagcagaagcaggatcgagagacgtgagtcaacagcgtctgataccatgtaaaacacatacagagaaaag

SEQ ID NO: 218052 - DNA, 13884 bp, Cannabis indica
attccaattttaaattttaattgaaaaaaaaaatcaaatttttaattgaaattacccttttgacccttgacttttgtcaaaaataccatatggttagtcaaacccaaagtcatatatctcatttcacccaaatttcaatctttgataatctccggcagcgcagtggtgtggtggtgagattgaatcggaaatgtcgttccttggaatcgatttcagctgtgctttgggatctctccgccatggccaatttcccgagaaagattgcttgcttcccctcatttctaagctcatcggctatgccctcgtcgccgcttccaccactgtcaaactccctcaggtatcgtaaaacttcttcctcactctcaatttcttctttgatcccttccagtcaatcaattttcaaaaattcgagaatgttatttttatttatttgagaaattccaagaaaaaaaattatatagttttgtgatttaaggttaaactcatcaattaactcaaaagatgtgattttttttttttggcttgggctttatcaaatcatgtaagaaaaagcttaattctttaataattgtaagattatttgaattttagcttagctactctttaaatattgggatgaagcagcatcgtgcctatttaagttatattattttgcttgattaaacttgtgatgtttggattttcttactggatcattgctaagcaagtgtttgtgtttgtgtttgtgtttgtgtttgttgtgaatgggatgcaatgcagataatgaaaatattgaagaatggaagtgtgagaggtcttagtgttgtatcttttgagcttgaggtagttggttacaccattgctctggcatactgttttaacaaggggcttcccttctcagcttatggggagctagcctttctgttgatccaaggtattcttccccaaactttgtttaattataaaaataagctactactaattgtttttgatcaagaaagaaactttattagtcaaaccaagcctagaaagccgcaaaactaactgcatttgcctaaaaaattgagggcaccgatatgtcgttttgaaattttctttgtggctccagctttaatcagcctatcgatacatattgtatcgagagtaaaagatttcttttcaagaatacagagattactattgatccaaatactgtaaactacgcctgccatagtagctgaaatcaggtctgtaataaggctcctctttctccttgtgttgatccaaccaagccacgaatcgaagtcaataggccaaaaaaactgccctgccaatcttgaacacgcgtctgttttttgattgtgtgctctctagaaaagtggttcagccactactaatttaacacatgagcaaaatgcttccttggagacgtgggggaagtagtgcatatatgaaccttaacctgattttaagcatagaataatagaatgattttcaattttaatgaaactatgtacaatatatgcttaaattgttgaaacatgattgatcatttgattcacttctgactaaatttctttcccctcttttgttgattgattgagaaacgcatagttgtgtgataatatactgtaatgagttgttggttgtttgttacgaggccataattttgtttcatctcttgtagaaataacctcaagagaatgtgcttgcctttagatatgtatagtagcaagagattataaaccagctaagatgtaatttattgattgtgcaagttgtagtgtgcttatcctaaattttaagaatgatgcaggatagttgatcgaaattggtgatagtttgtctttttaaattgttatagttatggcaagttgaaaattttggtgtagaactcaggcctgagtaccttgactaattattatggttatagttttacattaataagaagctaactttctcttctcatctgtctgtcacagcaataattttagtcgctgtcatctactatttctctcaacctttgggtttgacaacctggatcagagcgctactgtatcctgctttcgttctttcagattagactggtttttattcttcattgtttagatatttatacatgtgtttattgtccaatttttccttaatacaatcatcttgtagatactgtgctgtggcgccaaccatcttagctggtcaaattgaccctgttcttttcgaagctctatatgcatcccaacatgcaatttttctgtgtgctaggatccctcagatatggaaaaacttttctagtaaaagcacaggggagctcagcttcttgacttgtttaatgaatttcggaggttccattggtgagttaataaaaatgtgaatacaactaaaccatttcttaactcttataataatgataataatatctcaattgatctttgttttgcagctagggtatttaccagcatgcaggaaaatgctccacaaagtggtatccttgttttttactattttgttttacataatatatttaatccaatagcaaacatccttggaaaagagaagtttaggtgatgatgcattgcattcatttatttattttttttgcaaatatattattattcaaatatctgtctaaccaaccaacaagctcatcaaacattagtactataacaatttacaattaggtacatttttgtggtattatattataagaaagaaaaaggatgtgcttatttgtaggaattagtgttaggaaatttcggtagtacacctctcttaaaagagttgttctggtaaatttgttgtctgcttcatatttaggaagattttttagtccattttttttcccataatcatatatgttgtagctatttaggaccctgtaaatattctataaattccgaataatttatagtgttgaaaataaagttcaaatagttacttaccacgcacgcacaataaaatatttagattttattttcagcattataaattattcagaattttataaaaatatacaactagtcttaaataactataacatacacgatcatgaaaaattagactaaaaaacttatggatacagaaacatttaaagggtctacggaaacaaacttttagggggtgtactatagacatactcctaatgttaatgttatatgtggaagaatttaaacatttgttgtgatccttccttaactgttacaagttgtgttggggtctgtaattggtatggcaaccaatggtacccttctgagtcaaataatcttatacaaaaaaccagaagaagctattaaacaacagcaacagaagaaaagggagtgagagaccaaaatggaagaattcaaacatcatcttgttgtatgtgaaagcttcattcattcatccaagccactactgcctctcaagctcaactactaaatcattgaatcttacacatttttggacatatttacccaaatatgtttatgtttgtttgacaatgtaatggtgtagtaactgtagtttgtttcccattgaaaagcaatttttcacatctctacaatttttttttggattattagatgataaatattttgaattcctaatttaacttttccaccaaaaaaagtttgtagcatttttagtctctttcctttaatctatgagtgatgattgaagactgtagaagataatgaagaaagcattttgtgtcattacattacatccttagctaataatcattaaagaaattccaaccaatttgacacatcctcatctcatataatcatatcaaaatacactgcaaactcattcaactatatcaaataagagtttctgataacatatttgcattgttcacttgtgttgatttgatttagtggactaaaaatgaacaagccattttagaaaatattattaacttttttatattgtataaaaattggccaaaatggacagaagcaaaaattgcaaactctactgaaaatcatagtgaataataaacacactaacattacatgattttaatgattattgttatctactttctgttcaatgttctgatgtaactttttccctagcaatacagcagagcatgacagagagattaacttccattttctatcaataaataacaaagttgatctagaaaaaccatacaaacacaatcaataatcaactaaaaaaaacagaaagaaatacagcatagcataatgtcatgcccatagcctcatattacctaataaattttatgctttcgagttggaaaacaagcagcagtgtttcgtcttaagacaaatgcttccatatcgccgggcgatctctggatatcagaagagtgcgagatgctgaataatcgaaagatggtgaatacatatcatcagggccaacaatttctctaaccatttgagacttatcttcatcgcttgtatacggatcaagatcgttgtctgtacatgtatcgaatacaaacagccccaatccactaacagccatgacatgattcgagtttccccaaacttgagtgattgctgaataatggctatcggcattgcattcaggcaacgagtaagtgctgaatagcttttgcttacgcagcgaaaattgttgcacttctgaggtggactgccttttcacccctgaggttctcacgttcgagcaaccaagaaagacagaatccccacgtgagaaaaccgactgtacattcacaccgagctttggtatcttaagacctataccagatgggttgcgaaagtccataatgttaatggtgtcttgagtgcagaatacaccatcgtttccctcggcttctgatgaacttagcctgcatttaagatatcttaactcttagaaaacataatataacatgagcaaaggaagaaaccaaggatcaaaagaaaggggaaataagtatgtacctttgtcgaacacctccaccgagctcagcatcggtattattcacatgaaaagcagagatttttcgaccagataaagaaactgattgtaatgcttgagggctgatggagtttacatcccaaagagagatagtttcagcttcagcaatggctacttttcctctatttctccactgcaaggggcttgaataatccattgttgacacaggctttgatacaccccattccatcatttcttctccatcacgaatgtcaaatattctcaccgctctctgagagctagaagttaaagcaataagagatccacaaggtctataccaccattgtcgagtttctggatccataggattggacaaggaatttctgtgtgaaatattgttcggtaagggaccaagcactgttcttgaaggtggtggtactctttcaaaataagaagcatgcacttctttggtgtagaaatcccacgagcaaaaacccgaatccaaagcattccccgcagatgcagccacaacataccttcccgaacatccatctgcactaggagctcgaattacccaacagtctctccatattccaggagatactccagcaggaggcttgtacaccgccttttcctaaaatttgttaataaatcattagccaataagataaaatactagacattttactataatgtatgttcatatcgataaaacttatacacaggttaagacaagtacctcattgttaacaatatcataaaaagtacacgaaccatcatcatgagcaaggagaaccgactcgccttcagacacaaaccagcctcctgttgatgttttgcagcctatttcattcacctggtaaatactattttcctcagtttcatcatcaaccatctgtctattctcctgatcttcaaattcatcaattgcttcatcggctgttagaagaagctcggcattttctttctgaatcattatgtccgaagaacatcccccagcttccaactctacaccatcagcttcttctgcatcataacattccataccagcattcatttcccttgttgtgattttcgttccctccttattcaaggaagccaagaattctatcgctattgggttatcatcaatggaactcaatggcttatcaactgccttcgattcaacactttgagaatttgttgatgagggttttaatgatataacccgatttctgagcaatttatgatgtggaaacagtctagcttccaattcatcactgtttaaaccgttcaccgagcttttactgttgtccaccagatcaagctgatcgctcacaacagttttcaccttctgatcaccaatctcatttcctttcaaagtgcttaacttcgaaccagaatcaccagcaacacgacccatagctttctcaatccccgaaatcttgtcttgaatatccgaaagtatcacctttgactcatctggtttattcaaatccaacatctccttagtcctcttgatatcagaagcaattctcttaaccttcccttctaagaaagcaagcttctcatgtagcttactcggataactattacaatcccgaccatcaacaccagcttcacttacctttccctccttagcaacatccaaaacatttacagacttcttctccatctccttcttcccaaagctttcatctttagcaagcttcaaaggcaagtcatctatctccacctttactcgagctttctttgcgctctctttcttgatacaattcgccatagccttaccaacatcaactccattcctcaaatctaagcttatatcattcttcccatttccacacttttcactttccattgttttcccttcccaaaccccacgaaccttactcattttctctgaaatcacaccactaactttactatccctaaaaaccctaattccattcgaccccaattcgctacttttcgagcccaaatcaccaaatttcttcttctgcttcccacaatccgaaaccctagaaccttcaaaactttttccagtgctcgaaaaagccctatcggttctatccaccgaaaccctccgctcctttcggacatccgaccccatcctcgaaaaatcagacgggctagggctccgacctctcggcccagacgacgaagtggaccaccgagtccgagcatcgcctccggtcactcccccagacacaaaagccttatctacacgtgtcacaggtcggatagcaggtttctgaaccttggaagtgatcccagacccattctcctttccagtagaaaacctactgtctgaaatgggaatcggagtaattgccttaaaggacttaccagttgcagcaattttgggtccggcagtacgaccggaccggtctttaatacggcgagaagaggcggcggacatgaaataatttcaaaaaccaactccaaatagctcactgcctgaagaaatcagcaaaaaaataaaaaatttaaaataaattcaagtcgaaaaagaacaatcaatcagtaaaggcaaatactttcaagttaaaacaccataccaaatcatcaaaaacattagcatataatcccaaacaatacaaataaagcaaaaaatcatactcagcaaaaaccattgtttaaatttaagaaaacttaatcatcttcttcttatgaactaactagtttttaacagaacaatcgaaaggttaatgcaaacccatatatattattcaaagagtaaaacaaataattcgaacccgttagaatggtccaatctctaaatttccagatcttcttggccggaggtggtggtctcagtctgaaacagagaagaagagattagggttagtatcacatcaataaaattaaataaaattcgagtcttaattagaacaatcaatgagtaaaggtgaaaactttaagttaaaatcgcacaccaaatcatcaaagactgaagcttgaactttcaaaaaccctagaaaataatttattgtcgtcttctcttctcttctctgttctgaaaatgattttttgagttgggttagtatgagtttgagcgggatctatattttgatttacaacattttttttttaattttgaaagtttgtgtctttacttttcaatttttaattacccattttacccttgacttttgttcaaataaaaaaaaaaattaagaaaattaacgagtgagctgtgtctgaatttgggaaaaaatatatgtacatattattattacatcattttaaaatatgggacaccaaaattcaatgtatgtacatatatatatatatatttttttttttttttgaatagaaggtgaaacttcattaacttataatagccaaatcggccattatagaagaatgtacagcattagggatattgctgacattaaagatgcaatcagaccaataacaagaaccgcgagcaagacaatgagcggttttgttagcagatcgcgacacaaacgtaacagacacatcacacaaacaatctaacaaacgtttacaatcggaaattaacaaaccaaaaacagaaggcataaaaactgaactagaaagagcttgaactgacacaagggaatcggtttcaacaactacattagaccattgtttacccttgatccagctcaaagcttccttgatcccaaaagcttcaacagttgtcgattgaacattccccacccttagaatagtagaggcttcaatcaactggccattactatctcgagctactaaatgtatgtacatattaatgatgtagatttggtgcttctttttggtgttgggagatagcaacaaattccaattacaagggtagcattattttgaattaataggggtatcaataattgttgtgtgatttgttcttattgaggttgtattatagcaaatgtcaaacctaaatctaacttattaattatttgtgtcaaaaactaaaactcaaagtgaacctatttatattagagttgatccgatccgactcgtttatataaagaatcattcttagttttgattaacttatcaacttaaacatgtttacaatcttgttatgacaaatatatgagtaatttaatatgtttaaaaaatataatttacatgtagtaatataatatatttatgagtgtataatcttacatatgtcatattacggaaataatgagagaatctaaatattattattaatgtgttgaatgaatttcaaaatgaagaacaaggtcttatataggatacaaagatcagtaaggtctaagccatctaaccaccgtgcataacataaaacgatttacaaccttaactaaccaagaatctaataacgagtaactaactcaacaataaagacagtaaaaaagtaaaagtctgttacccccctctcaagatggaccatatatatcatgtatggacatcttgaaaaggtgagaagtaagtgttggagacgggagagggtttgtaaatatgtcggcaagttgtagattacttctaactggtatgaggcgaatggcagacgagacaatcttttcgcgtatgaaatggcgatccaattcgatgtgcttggtccttttatgaaatgtaggaatgttagctatgtgcatagcagactgatcaatgtggagacactagcaaaaacggttgtggtgtccaaaatgtagagcccattaatcaattcacctttgtcaatcatctttttggtgtgaatttcttgcatgtaaaatttgttagcaaaaaaatttatgacaagattattcccaactgttagacagctaacatatattattttatattagaaagtaggaacataaagcacattagtaagaataagttgatttgtaatatggacatttccacttttgtaatatgaattcttcacttcagactgaacgttgccagagaagaagcagaacacagcaagagaaaatggagaaactaggatatgagggaagcataactctcttgctctgatgccatattgcggaagtaatgagagaatctaaacattattattaatgtgttgaatgagttacaaagggaagaataaggtcttatataagatacaaatatcagcaagatctaagccaactaactaccgtacataacaaagaacggttaacaaccttaactaaccaagaatctaataactggtaactaactcaatgatagagacaataaaaagataaaagtctgttatgtcattatcatgtcatttttggattaagaatgtcaacctgaaaatggtctgtttaataaacgagttagccatgtagatccaaaaatggcacaaactcatttaagacaaatctaaacttgtttatttcttgtgaattttgagtcgcattatcgtgtctaacccaaattgtcacctttacttgtaaagactactatattgacgtttctatttttagagcttcaaaaattacaattaaaattttcttatacatttatatttgcttgttttgaagaaaattcaaaataatttattattataatacagtgcatgaattattattttgttataaaaaatgcacttataagtagtgattaaaaacaatatagtagtacacttatcttaattagtcaaaaatattataaatttatcaataaaaaatgaataatgcatttatcaaggctgctattcactattttgctttgtaatttaacatgttttgtgcaaagagaagagattaatatgttgtaacttgtaagagtcttcctttccaataaacctaggataaaattttcaatgcctatatgatctatcccatatgtgaagatataattttccaattaataaatgcaataccttgataaatgcaatacctttttcattgtacattgatcctaatcaatgttcatcatcatatcaccaccagaagaaataagaaataaaaagtaaaattagttccaacaatttgctttgagtatatgatctacaagaacacaaacattttgccacaatgttcacaattcaaaattttaatttaatttgttcttgaagcatggggtgtaccaagtttacacaaagtatcttatcttcaacaccaataaggcaccatttcaattaagagagctcgaaaggaaaagctcccaacaaaacacgagtttcagatcgaatgccaagaatccaagccaccaccaaatcaaacatcaaaataatgctcggaagctttcatgctatatcttttcagtggcggtgcctactccggtcacgatccctgtctctgtcccggtccctatcccgcccgtactctctatctcggtcacgatcataatctcggtcacgatcccttcccctatctcgttctctgctgcgactcctacgcctatctctatcatctcgttctctgttcctaccgctttccttatcatcccgttctcttcctctgtctctacttctttctctaccatctctgtcaacaacacctgcataatgcaatttggtcaataaacgaagtctccacatcttaataaagctgcatacaccttaaatcctcttaattaaagataaaaggatatttttcacaaaattagatgacataatctaacagttcaatagatacaaatggaaaaggctggttgggcaaagtatagttttgagctcagacctggtgagagcacaactcaaaattaaatgagtaaaatcatgaaaaattaatagtgttcaatcaaattgacaaagctctcctttaatcaaacctaatggacaatggataaaatgcaacagcctttcaaaatatcagcagattaaaagcacaatttccatgttattccgtttcgaatgagaatctagacaagtactcttgcgtgtttatgtgccaagaacaaattacctagttcttccacttcccatccagcacgtccagcaccaggaagtgtccttccagcatcagcttgctgtgttttaacccgaaacttcttcttgagataaccaaactcatcatacatctcaccatcatcctgaaattagcaaagagaaaaaaaaaagatcaaaaaaaaaaaaaacaaaaggaaagaaaggagcccaaaagaatgtatcccctgctggaacaaatagctcttacctcctcagcctcccgccgacggcgtttagtttcttctagttcttcctcatcaagctctttgtaacctcccccacgtcctcctctgtcaaataatttaataaatgcgtctttataaaaaaaaatgtgtatatatgtatacactagccctttttctagcatgatttgatgtaagtagacaaggcaaaaaaatgaacaaaatgataaaatgaagcaattatcttaaagcgccagtgcccctagttaaaatatacctaattttcatttgtaaattgacacataactccagtgtctccagtaccacaagttaaaaaaaataaacatactgaatatgtgaagcaattctcttgtggaaccactaattgtaaatatacattttcaaataaaaacaactctagtgtctccggtaccataaattaatattaacaaaagagagttgatatgaacaaaaacaaagcaaactaaccttacaccaccttcattgtgaccaggtttgtttgtgttgcaaatattacactttgtacgctttgcccagttgatattgccacacctagcaaaataatgaagaagcaatatgtaaattgccacatgcacttgcactctatagcgcattcatgacattaatcgtataatattttttaatttcatgcgtactaaatatctgtcatgaaaatacttggagcaaataacacaacataaaactaagattcattaaccattgatcaaataagttctacaatgtccttaacacataataataaaatgtttaaaaagtgtttagcaaacgattattattttgttcagctctcatacgtcataatttacaggtgatttcacattatcttcatctaaataattaatactgcaaactccattaaaaaaagaacgagaattaagacaatccagcacacaagatcataatccaaagcttacactagaaaatccatcaacaaaaagcatgagaattaagaaaatccaacacagaagttcataatataagcttacattggacaagaccaatcattaggaccaaagagtcctgcaggagcagcagcaccagctgatcggccaggacctccagattcttggccacgacctcggccacgtccaccacccccgaagccacctccagaagctcctgttgggcgagcagttccacatcgattgcaaacaccgcgaaacgcaaagttcacattggaacaactactacaataaccaagcatgagaagtttcagtgatgaatctataagcatatctatgcaacaaattactaaaggagcaagaatgagcagctcaccaatatcacatcacagaccttgtatttgggcacatccaatctccatcttgttgccacgcttttccaggaacatcaccccggcctctaccccgaccaccagccccattcaaatcaccagattcttcttcagctccaacataatcagcaacaacactcggcatttgaacgccaagtgttggtgctgctgctggcatatctacaacagtattatatgcgtggtcattgtttttcgattcagcaatgtgaacaccgataatactaccatgaaaatccttattgttaaaccactcaacagcagcaatagcagcatgtggatcctcataagtaacagtagcatctccttttggctcatttgtcaccttatctcgataaaaccatattttcggtctaccagtccgcttgtctttctgtaaagtaccatgaaacaaaatcaaacattaaagaagaacaaatgtactaaacaaaacacaaatcaaaatatggcaaacgtaagactatcacagattaaacgtaatgtaattctcaataatacctgatcaaactccataccttaagcaacccaatggtcccaaaaaattcagccaccatattttcatcaaccccatcaggcaaattgcaaacatacacagacccatttgaggggactccttttcctgcatggttagccattggtctccaccttcataccaagtcccaacactgtaaaacgatacacttattcat

SEQ ID NO: 218053 - DNA, 7398 bp, Cannabis indica
tgacagacccaatcgacttcaaatgtggcttctttgaatactgaaagtagccgttctggtggttccactagcaaatctttcttttccgacgactcaaccagaggatgaaactagtcggccactgttgttgatccttcgtgccccaagcacggatgaacaagaaggagagtgatctgacaatgcagtgcgggtctctccaacaccttctctaaagctggcgagtctagcaaacgtgcaattgcaatctcttattgccatttccatcttttcaaattggtatgctaatgtttgagactcggagatttttaaaaatcgttcatggtgttttaagtccaatatgatactactcaggttcgcctttatgctattcatatttgcttcctttctttccattcttttctccattcctttagctttctcctccattctcgttgatggcatttaccgagaatcggtgcttggataccaattgttaagaacctgctgtagattactaaagcaacaacaaacagtagaacagtagcaaaatagtaggaaagtaattgaataaccaattacaaactatgggatccccttagcttaggctcttttgatgcaaagagttttactcaattcattgcataccctttctattcctttactcacctataaatagtaatttctcagtcaaagccactctctcaaataaagactcaaataccctttttatttagctagcacaccatactaatcctagtgcctaacagaaatatgttgtaatttaaacttgcttagtacagttaagagaggtttgttgctgagacaatatctgtttttatgcacttatggtgagtacaggtttattaacattagttctatggcagattggttgagatgcgttagtacttaactacttattgctcaacaagtcatggagcttagaaactttgaataaaaaagtcgaaatggaacacattggaagatattgtttagtactaactgacagaaatgccaacccatttgctagaattaggccaatttaatttattattaaccttaatttaaaattagatctctttaactctgaatttaaatcagaactcaaaagattggttatgatactctataagttactctatgagtttggaatctgaccaaaagctaaagtcagttgaatatttgttatgtttaagaattatttgtcctattgatattcacatgcatcgtaatattttatcatagtctgcaataataagctgatattacttaccttgtctgtgattgtacttgcttggaactttgttagtatcttgtacttcacaagtagatactcaatatctagatgatgaatacttttctaggtcctattatagaagagaatctaagatgccatgcattatatacttcacgagtcattgggagtttctgctcaaatggtcagacatgtggttttctcccacaaagcctgaggttcaagtccctcctaagtacatagcaattgttatagttttgtggttcctaaagattgtagggtggctaagcgagatcttagttttgaaaaaacatattaggagtttctctatatttgaaagaagaagttttccttagctggaatataaaataatttcttgcctattttactctggatgtagtacaatctaaatatactaagtcagcagtattatgttaggccttaggataataaataaagaggataaatgagtaattgtaaaggggcattggtactatatatatgagtgagtagcaaaggggagaggagggaatgaatttgtactgagcagctcttgactttgggagatcaccgggtctctcaaatacccatatatcaataccagcaattttttgttctattttcttgctgttctagacaatttgataggaaattcctatcaaagtactagctattagtgcacagtttggagtgagagaagtaccaaagtttttgaggggatagagcgttcagcagaggacatgtggaagaaaattaaagtttgggtagcatcgatctttaactcaaaatactttgaggatctatccctttttttgtaagccttgtgtagagaatggggtaacctatgtattaaatgtgatgtttgtcctactttaataggctatgtgagtctagcttcagatataatagtagaattctgtgtttttgttttcttgtgggagtcccatgttttgtaaccatgtattcctctaccttatttgagggttctaataacaattatgggcggtggtcagtcatagacatttgatccctgtccctttttcaaaaaactgtgcctttggtggacattctgcgttttaagtttctgacaggtaattaaatgtgttgtacttaagaaccacacaagcactatgcgaataatgaatcacataatgaagttatgcattacataactacgatgaaagataccaatcgttggagaaaaaattgctggatgtagcaactttgtgatgaaaaaaagctaaatttattaaatttctatcgtctccttgggtaaatgttatttgttgctcaaaatcttcgagcatgtttatgctatctaaatgaattgagttcttgataattagatttaacattgtgatatgtttctaacagttgtttgattctttccattttggaggaatgcattttacaaatatataagttgagttgttggatactccaggcctactataaagctatatataagtttcacaaatattgcattttgcgtgtgtccaaacatcaacttaaaagactattggattgttgtttgaaaagatgcagcacaaaactgcaatgctaattcttgtaggcctctcatatttttttttcctatatgccttagtgactctttccatataatcatgtttatgttactttgttaatgtagtgaaatatagaagccattatcttgtctaattttcatttttgatgtccttttcttgtaggtaccgtgccataaccagtgcctactatcgaggagcagttggcgctttactagtgtacgatgtcactagacactcaacatttgagaatgtagcaaggtggttgaaagagttgagggaccacaccgatcccaacattgtagtcatgctcattggcaacaaatctgatcttcgtcaccttgtggccgtctcaactgaggatggaaaatctttcgctgagagggagtctctctacttcatggaaacttctgccctggaagcaaccaatgtggagggcgcctttaccgaggtcttgagtcagatatatcggattgtgagcaagagggctgtcgaggcaggtggtgattctggaggcagttctgcacttccctccaaaggagagactataaatgtcaaggaagattcatcggttttgaagagaatcggatgctgttcaagctagctttggtgtttcttctcctgcaacagttggcctctattttccctgtacatgattttacatacaatgattctgtagaataagaatctaagctgtctgataaattggtcgggggaagttgcattttaacactagaattggtcctgtaattggtaatgtcatgtggattgttttgcttgttacaaatttactttgagctaaatgaatgaatcactattctctataggtatttttcttgaaactattgtacacaaaactcataacaggtgagcctatatgggctttgggcccaaattggtttaaagcccagacatccaaaatcggaactgttcaagttccggagatataattgttgtctctctcactctaataaatcacctttgataatgttatcttttgaaaatgggcaaggcggctatatttatattggtaaaatgccaactactataagacaaaagagaatgactaaaataaacatgagaaaaaagaaaaaggataaaattttaatttataaaagagaaaaagtccatttcttacttttttattctttttgtttacacttttgatagagacaaaaaaagaaaaatgattaagagaatttagaaagaaaaaagatttttacaagaaattttagggtcgtatcttacggtacggggaaccccaccaaggagggtttcaatgagacaatatttatcgaattaaatactcaaatctctttgactcgaacaactaagccagaacgattggtgatccaggggtcctatcctgtgctgccgcagcagggaaccgcactcaggctacacctcctgttctgatcctccggctccacgcttcgccgccgaaatactaccgaacactccggtagctcaccgagatcggcaaacagagactcatcttccccactcactaccgaggaaaacgccatcgaaaaatcatcgtccatgtaagtaccgtctctctccataaacgggctctccagtacaacggccgtcgaaacgacgtcgtcgtcgtcgaaccactggtggcgatatccacagccactgagcaaggaagccgagccatcactgacgagctcagcttggccagagaacaccgcgatcgccccttcaggagctttggcaggaagagcatcttcggcgccggatgaggatgacgtggcaggtgtagatccggctgctgcggcggaggatgcggcagctgctgctgctactgcggcggctgctgaggtggataaatgtgatttggtgggaattggatggttgtgatcgcaagcgtaggtgattatgagctttgtggggtccacacggcttctctccacttgttttctagcggggcaacccttcgaactactacatcgataatatcccctgtaaataaaataaacatttaataattatatattttctcgaaaataataattattctcagataggatcatatgatataagaagataatccaaactggagaagttaatttctacacaacagtttgaaatttacaacccaacaacggcgcgtgtaattctacgctccaattaatgtatttggataaatttgtcttttcctaatttatacacgtgagcagtttaggtatggggggaaggagaagattcggtagcattatgatggaacgttattctcacacgttgtgttggagcgtgagaactcatcaaatgttcccccaacaactccttcaaagcgcattttagcatagccgcctccagattcaaaagatcaatcaacttgccggcacacacattacctggcggcgattatagattctaaccttaacgggagcaccaccacccatccagctcacgttagtacagatctttatttttaatttctattttcttaaaaaaaaaatcaattattttttttgatagaaaaaaaaagatcaaatttaattaaggtgtgtcaaacgaaatttaaatagccagaaaaagaaaaacagatttacctgggataaggagatcccttgatgggcttttggccgtacttcctccaggcccacgaatcggacggtggatacgcctctcctttgttcttagatccctccacgtcactaatcggcactgacacaactctcttctgtacaccccttttactgagcacgtttccaaaaccgaaaaatccccgaaaaaatttcagtttaccaaaatttaaatacaaaattaaaaaaaaagatactcaaactcaaggctaaccttttcttaggtgatggctcctcaaacgaggtcgtttagttcatatcgtactccggaggagggagaatccggaccatttccagatacgtgttgttcgctgtcttctgggtaagacgtagtgtgaaatcgacggtccatgatcagggagggttgatcacttgagtgaatctggacccttgatttttgcgccagcagtagcctgaaaaaatattgagaaaaagagaagaagagagagacaaggagagagagatagagagagaaagtgagggtggagaagatggagacggaggccggaggggtttaatatgggccgtcatgttgacagatagatatctgtgtttgtttattagggacgtgcaagcaaacacccattaaaatattatttttattattattattatcttacatttataaatgtataacgttaattaataaagctttttttttccttcaatggtgggttgatattgtataactcgacctaggttaagatattatagaattcgctaattattggatttgaagtttggatgaggcaataaacggtccaaaccaaccaagtgggacttagacttatattgattaagaattttttatttttgttcaaagttaaaaaaattcatttataaataagaagtgatcaagttggtgagttaattgaggtatagtctatgagctagcgtgatagagtatagataatagatataaatatacattatatgtggtggtagggttagttttttctcatggaaggactgtatatatataaatatataaatggagaattgttattgagtattgccagtgcccaatatctttaagagttggtatcttattgttttttaaaatttattttcttaattaatgtgagatctgcggtttaactacaccattaatatgacattaaaaaagatactatacactaatactatcttctagtaattttcttaaatatagtagtatagctttcataaggaaaaatagttaatagctagcttggacttttgggttctttctaatataaaatacaatcaaagattattaatgatttccttgttattactcaatgtgaagaagaattattaaaagaatggatttgtttctgttttggaaaggaaatgaccaaatatgggaattattttaaaatgacttgggtgtgtactatgtggtgatcattaatttatgtgatgcgagtgtatattattgttaattaatgaaataagttcgtgtttgaattgatcaagtggggtgaaaataattgtatacatattcatgtttcgataagtagcaagtattaatttctgattattttttctattttatataaaggaacgttcctatgcataacattttttagtcatcacatctaaatcgaaatgtattttataagagtataatgtcattgatacatttcaatattaggttacactcatttgatttaataaataataataaagaacttctaactaattataaataatgttacacaagtataataataaacaatttaagatgttaataaataacaatattctatagaaaaaaaaaattaatggaagtaataaaatttcaatagaataaaaaagaaataattcatttcatttttttttagttacattttagagtattaaaatgttattatttgtaatggaatagtttttccattattttgataaaatgattattctatttttaaataaataaataaaaaaaagctatttcaatgtaagatgagaaagatttaataaacattttattaattttttttacatgttaaatttgattcaattcatattcttatttctatatttttat

SEQ ID NO: 218054 - DNA, 2035 bp, Cannabis indica
ttctgtaaccatgatttccagaagatcaaggtagttgttgctgctctctaaagtttttataattagcttcaatctgatccaaatcttggattgccatgtgtgcattgagatcaatttcaacatccttcttctcaatcttactctctgataagagtagaagcttcaatttcagctacagagtagccttcaattctagtgttagatgagatgacaaaagtgtcatacttactaggtaaacctttaaaaattgtagctatgtgatcccaaggaataagaacttctccaatagatgcaaaatgattaagcatttgtttaactttcaaaagatactcattcaaagacattcatcctttcttgatctgctacaatttagtcatgaactgaagaatcttggaagaaacttgaagagaaaaatgcttctcaagagtgttccagatctgtcgagccatttcgcaccctaccattcgagcagagactttctgtcattgaagataggagccaagaaacaaagagttgatccttcacctcccattccttgtaagcaggacttgtgttatggataacatgatcttcatcgttaggatgattgaagataaatctttgtagcctattacctttgatcgcaaccaatactttcatagcaagaaattataatcattgagttgaattgaaaaattgtgattgaacgagacaggagctacataagtagtggctctatttcttagttaattaacaagtttgttcgtcgaggaaggccctgactgtttgatggcggttgattcccaagctgtgccatattttccatccatggaaattctcgctttgataccatattagatctttgtgacacattgaatagtaactaatcagactttaagaagaagaagaagaagaagaagaagagtggaaagatagagcaaaggaaagagagaaagaaagtgaaagactgaatcaaaaagattaattattttcattacattgatcaactagtttttacatgatttatatatagtagagttagttagttaggaaaataaaagaggcttaactaaccataacagattcctaatcatttggaactaactaactaaactcataatgacagctaacgactaacttagttaactatcaatgctagatttgaaaaatgtctccctcactttcgtcaagcattagatataaaaaatgtctagcccaatagtggagatcaaagcatctcatctcattgccccctcttgatttctctccttatctttcacatattctctctcgcgcacaaaccagcgtaccagcactccttgagtcgtcaaaccgactggctccttgaatggtgtgaaatgctagcttatcgactcctaaaagatttttttctcgacagatctagttttattttgtgtttataatttatgtgctattttggtgtttttgagtttgtgatgagttgttagatgaggatttattttttcagtttgaattttgttaagtttttttggtgttgatataaatctgacaaataaataggttaccatagtggtgaatggtgatttttggaagaagaaagaagaatctactttttaatttatgatttttctttaatttaaaattagtttttttaagttttaattttttttgaataatttaattaaaatgactagtgtaaatttgctacaatacaacccatccctagcagttaacggaggaaattggacggaagactaaatttgtgatcagaagtagagtttgtgatgttttctcactaaaatttgagcttgtgattaagtgcaagtgaaatgagaggttagaagtcgtggtaggcaatatccaatccaatccaattgaaccaaaccaatccaatccattccaatgacaaaaaattagatatccaattataattggattggattggatgttgaaagttagattggattggattggtcattggatatcagtctcaaaatttaattaaaaactgatccaatctagttatatttatacatattaaaaatattatttttatttatttatataataaaaa

SEQ ID NO: 218055 - DNA, 7428 bp, Cannabis indica
aattttattccattctattcctatttctattctcattcccattcccattcccattcctattcttatgttttcattccttccaaccaaatgtcaccttagtttttcttttctatttttatttaaggattctcatcttctcctattgtgtatgagtatgtgtatatatcaaaagttcacaagttcctacattcatggagatatagaaaaacatataagctatcattcgcaaacatacatttcatacttgttcgagtaatagcaatgagaaggctcgtgccataattcaatcaactttttctctatctaagcttctccaatcttaatgtgaaattaaacctttcatgacatatttttacttgaattatacaaagtagttattgtgtttcacttcataattctcttgtttttgagctgcagtcaatgcaaagaggagatccatcatggattggttacatttacgccttcttgattttcgctggggcggtatgtatggcttctccctgatttacatctactaaatatggttacaaattggaggagattattgattatctaataagctaaaatccaaagttgggttgagactaagtgtgaatgtaagggattcattgtagtagccaattatgggtgtaacttttattgtatgtaatgaattgaggataaatattctgtcataaaatacactaggaaaattctaagttttgcttagtgaaggatatgtgttctttgaattttactataagtgttcctagtcatatactagaacttgtactgatttttacagtggtccaaagtatcatattaatgaattcaattcagctgtttaatgtttcttgttttgacttataagcatatttgctcagtcattaggggtggtgaatcaatctcgatatttccataatgttcagcgtgttggtcttcgcctgaaatcaactttggtaaacttctctggtttattatgttaacattgtgaattaagtttctctctcgatttcgtagattttctgatgctttctaattttttttagatggctggtatagttaggaaatcattgcgactcacacatgagggccgcagaaatttcccaactggaaaaatcataaatttggctacatcagatgctagtttactttatgtatgttcttatttgattttccctcctttctcttcttcattcatgtgtatacatttgattgattttatgttctcatgaattgcatagatataactacataaaacatagttttttttttgtattactttttgttgggaaaatactaatcatgcatattaacttttttctcatacatagttaacacttcttagattttattgttgaaaactaaatcttcaagcactaacttgttcatgattcttcaacaaattttgtcatatatctacttcatttcacaccttaagaaattatctgctctgaaaccaaatcacacaggttattgaaacaccttctcaaccaaagctaaagtcaaatttgattacactatttctcctaaccatgtcaaaagtcattgaacttgcaagattgtttcattcattacctctccagctcatgttgtgtagatatagactactaattaccatgcttgtcaccaacatagattctcaagtataactataattgtctttgacaattttcagcaagtatgccaactactacacgagttatggtcagctccatttcgtattatcatatctatggttctcttgtaccagcaattgggagttgcatctctttccggggctctaatgcttgttctcacgctacccttacaggtagggtgccccttaattatgtcatgtgtttttgcctagagcttcacaagagatgtaaatcaatttgatttgaacataatattaatatgttcttcctttctgtatgtaattctagttgatcaatcttttagcatgctcctgtttgatttcattttccttattgtagacatttgtgctttcgaaaatgcaaaaagtaacgaaggaaggactactgagtactgacaagagagttggcctcatgaatgaaattctcgaagccatggatattgtaaagtatggttgttttttctaaaagaatattgcttttgtaatacattagtgctacttgatctgaatctaagttgaacatgtttcagattttatgcatgggaaggtagcttcaagtcttgtattgaaaacatacgaaatgaagagctatcatggtttcacaaaactcaattactctccactgtaagtgtggaagatagcatcatagttggctagttttaccttatcttcacattgttctgatttagttttcttttgttgcagtttaataaatttatcttgaacaacatctcaatatttatgtcattgatatcatttggagttttcacattgttcgggggagatttaacaccggcaagggcgttcacctcactttctctatttcaactgctacgatatccatttatgtcgcttcctgatctactaagtcaggtgcaattcctatgttttaactataattcaatgtatatgacaaaatcatttaaatagtcttctttgacagattgtgagagcaaatatatcactacaacgcatagagggactactcttagctgaagagatagttttacttccaaacccacctcttcaacaagatcttccagtcatatcaattagagatggctacttttcatgggacactatggttagtttttggacttgcctatatgttgatgagtccataatttgatcttctcagttatatatagtgctaaagaccctttttctttcttttaaaggtagataagcctaccttatcaaacattaatttggatattcgagaaggtagcttagtggcaatagtaggtggaactggagaagggaaaacatcactcttatcagcaatgctaggggagcttccatctacgacgagtcaaagtgttgtaataagagggaatgtagcttatgttcctcaaatttcatggattttcaatgcatctgtgagttgattttcgaacattttgagtgattgggaacttttccttattgccatgtgatcggtgtactaatttccaggactattcttttaggtgcgcgataatatattatttggatctgaattcgaacatgcaagatattggaaggctattgacattgctgagttacatcttgatcttgattcacttccagttgagtgtactttacaaagttttacataagcaattattggtaatgctgattaacatggaatgttctaatagttgactaaaaatacttgtttgttgttaatttcaggcacgcgatctaacagagataggtgaacgaggagtgaatatcagtggtggacagaagcaaagaatttctatagctagagctgtgtattccaatgcagatgtatacatgtttgatgaccctttaagtgctctggatgctcatgttggtagacaggtactcacttattcagctaataagtttatcattgttgctatttcagtcatatggtaattttttgtaagtgaaatgtatgtgtagaattagtatttctacttatgtaagtcacttttgtctccaggttttttataagtgtatcaagcaggaattacaagggaaaaccaggttattggtcacaaaccagctacattttcttccacatgtggatagaatcgttctagtttgtgacggtacgattatggaggaaggaacctatgaggagctgactaaaaatggaaaaatgttccaaaaactaatggaaaatgcatgtaaagcagaagaaaaagtggacaataatgaaatttgttatcagaatatagcagttccagatcctaatggagtattaaatggattattttctgatggaagcaattcaaagaaagagaatgttgatgaggctgttctaatcaagcaagaggaacgggagactggcgttgtcagttggaatgtattgatgaggtaatatggtttgttaggagaggattgtcctcaccttatcaagtggatcgagtatatatcaccaactaacgcgagactttaatatgccccttcaggcatggcatggaccataccaaataactgtgaacaaatcgatattagggacacccctttgcaaaattaggctccctctgatacaataattcaacttaacaaaattgacttgttaggggaggatcgccctcaccttactaagtggaattattcaatatttttgtattttgcaatacttgattatggctctattttcaggtacacaaatgcactaggaggatattgggtgctgattttggtcttaattttctatttattaatggaagttcttcgagtttcaagtagcacatggctaagtttgtggacagatcaaagcaaatcaagaagttataaacctgaattctatatttacatttatgcacttatttcatttggccaggtgggtgaatcattgatgcacatacttaacagaaatttcatttagcttataatataatcaacatggtttaactgtaacaggtgactatgacactgtcaaactcaattttagtgatcatatgtagtcttcatgcagccaaaagattgcacaatactatgttacattccatattgagagctccaatgcttttctttcactctaatccaactggacgaataatcaataggttttcgaaagatattatgggtatagatcaaagtattgcaaatcatatgaaatcatttctgagtcagatatggctgcttctttcaacttttgcactgataggagttgtgagcacaatatctctctgggccatcatgcccctaatgattttgttctatatggtctatttgtactatcaggtatgcttggcattgtatcacatattcacattccacactttcttctcacaagaatctcctgaaaccaaacgatttttctgcagagcacagctcgtgaactgaagcgcttggattccattacaaaatctccagtttatgcacaatttaaagaagcactaaatggtttgtcaactattcgtgcatacaaagtttatgagcgaatcgcctatgtaaatggaaagtttgtggacaacaatacaagattcactctagcacaactgaattcacttagctggctctacttaagattggaaacattaggaggtataatgatttggttcacagcaagctttgctgttttgcagaatggaagagcagaaaaccaagctgaattggcatcagtaatgggcttacttctcagctatactctaaatatcacaaaccttcttagtaatttactgagagtagctagtagagctgaaaatagtttaaatgctgtagagcgagctgggacttatattgatttgcaacacgaggcaccagatataatcgaaaacaaccaaccaccaccaacatggccatcattaggaggtattagtttcgagaatgttgttctacgttacaggcctggacttcctttagttctccatggactgtcttttaaaatttgtccaagtgagaaggttggaatagttggaagaactggtgctgggaaatctagcatgcttaatgcactatttcggatagttgaaatggaagaaggaagaatctcaatagatggttatgatatttctaagtttggattgacagatttgagaaaagccctcagcattatacctcaatcagctgtaattttctcaggtatgcaatgtatatatccccatgaagaaatatcaatatgccattctttcaagaattgagggaatgaaagagcacaataaaaaaactaacactaggactaaaaagttgtagttaattttcattttttctttgcaggaactgtacggtttaatcttgatccttttggtgagcatggtgataatgcactttgggcggcattagaaagagcacaccttaaggatgttatcgagaggaaaccttttggtttggattcaaaggtatataattgggacacacgcacacaaagaaaagagttttttgcggttaaaccctcttaactatcactacacttgcacttaaccttttatgttcaaattttgacggtaaaactctctacattactgcttgcaaatttaaagtgtcatccaatttttaccgttaattgtcaatatagactgcttatgtgtacagttttgtatatgtgtcaaattaaaattcatacacctagtattcttattttaaaaatataaaaattatttcaaaatttataatatatatatatattttttaaaatattttatttttatttttataattttatttaatttttaaaataatttttaaataataatattaagtgtaccattataaacgtgtcatgtgtataagagtgtacacataagcagcccatagtgacagttaaccgaatggtactttaaatttgctaactagttcaatagtttagaaaattttactgtcaaaatttaagcttagagggtcaaatgcaaatgaaacgacagttggaagagtttaaccgcaaaaagctccaaagaaaaaacagcacaagagtttacttggtttagaacaagattacaatttatatggttacaaacttaagtaacttgaatgctcgatgaagcgatagataaaaagtcgattaaaaggtaataacttacatctgtttgtgtctaggttgtttgaaaggaggagagaatttttagtgttggacaaaggcaattacttagtcttgctcgagtattgctacgaagatcaaaggtacttgttcttgatgaagcgacatcagctgtagacgtcaaaactgatgctcttatccaggaaacaattcgcgaagaattcaagtcctgtacaatgttgattattgctcacaggctaaacacaataatggacagtgatcgagtacttgtacttgatgctggtcaggtaaatcaaactctacaaatttttgttcttgcaagtaatatgtatcacaaaacaagtcaatgttttcccaaattgtattaagtttcattatggtattgttaacattttaggttctcgaatacgattccccagaagcattgttgtcgaatgaagaaagtgcattctcaagaatggttcaaagcacaggatctgcaaatgctcaatacttgcatagcttagtagtagagaaaacaaagaacaagatgggaatagagaaaaacaagtgatcaatttgtgctttcaattttggaaattagtgaaacttttcaaagccttatgcttttctgctaggaattctgatttgagttgctactactactgtctgtgcctactaatcttggttttttttttttggtatgttcatgctaaaaaatgaaaactacttcatttcaataatttcgttattgctgattcgcttattgtttttcgatgaaaatccttttttattttttagaaaaagagggaaaaaatttacacgatagcttttctcctcattggtcaacattttataacttaaaatgtttcac

SEQ ID NO: 218056 - DNA, 10718 bp, Cannabis indica
tttgttgttttgtccttcaccaagcaaaaatcaaagtaaaactcaatcagaacattgttatctgtagcgagtttagatacactaatcaagttcttagctattttaggtacatgtaacatttgttttagcataagaaaatgactagagttagttcttaagtgaccgataccaatatgagagatagtgagcttactgccatcaccaacggtgagagtttccttaccaccatattcacttttctggctcatggaggaggtttcggatgtgacatggttgctggttccactgtccgcaaaccatgcatcactatccagcatctctggtgtggcaatgaaggcattgtgaccttgtttttgctgattctgagtgtgaggatcgcttcccatgaagttttcatcgtatcgattgtagcaaacagcggctgagtgaccaaatttgccacatacttgacaggttggtctagagttgttgttgaaacgtcctcttcccctagatctgccacgactacccgctcctcttccaccattgttgctgctattttggttttgggagtagaaagctctacctcttccttgggtatttggtttagttgccatgttagcttgatgagctactggtggagacatggttttgggtccttcaagactttgcatcctctcgatcttactatcaaagctgaggagcaaatcttgtaactcttgccaggttgttttagatctggcttcaatctgaactatgatagttaagtactctgcacccaaactagataaaacgttagatataagatgagattcagggtacgggtcccctgcaagggcaagagaatcggcccaacacttcttctgtcgcagataatctcccatggttgaagatcctttcctgtgagtttgaatcaaagttcgtgtatcatccattttggccttaaagtaagcaccatacagattttcaagggcacgccatagctctgcagctgtagtagaacccatgacctctgtagcaatggtttcggtcatggagttgtagagccaccccataaggagctgatcattaatgatccaatgctcaaattctggattgacagcaatcatttcgacaccttcttcgtttttacctgtaggaaaaaactcaagtggacaaggtttggttccattgaggaacccatcgagcctatggcctctgactatggtggaaaccatagttttccacaaagtgaaattgtttttgtctagttttagtgaaaagggctggtttagggtgctaaaatgctgaagataggtgttagggagctgagtggaactactagaggtgttccctgttaccataggattatttccagcagagctcatagtcggagcaactggagactcacctttttcaggcgtttccatgggtagaggccgagtacgactctgataccaagaaaaaatttagagtgtataggatatgtaaaactcagctcaaatgagtgaggcagagtattcaatttatagcaatattggatacatggtataacaacactagccataggtaatacgacaggtgtcataatacaattgcataaatcaaaacagaaagatattctagtactgtattggcaactggtgtaacggtatggcagagggaatattcattgtgatattctgtgccaatgatgaggtggaatacaattgatgaccgcactttgctattcctttatgggagagacttgtgagaagaattttgaggctggattcataggtgctgtcatttttgaagcctgtagaattgtcacggacgtgagaaatgtaagtgccattattacctggtgctcatgcagcttcagttcttgattggatgatttgtgagcttataattgctaataacgacaatttcaggataaacattcttaatgatcacttaattttgtgttactttttttttttcataaattataaacacagtaaatagctattgggtgcagaacacatacttgtcaattgtgatggatcgattgaccgagtcaaaactagctagcaaaaacatgtgagagcaaaaaaaaacaaattgcaatatcattgattattctcctgtaaccattttccaataaagactccccactaagcaggtcaactgaagtaacttgacaaatgtcaacgaccctaacaattaatgtggcaatgatcagtttttcttgaagaataatagttattgtataatttttttttacttatacttagaaatataagctagagtaaattaggacataactcgttagtaattaattttaaaaaactcaaaattttacggcaaaattctaaaatttgctttcttttaccatttagttatttttatatatttttagccaatgtgtaggtaggatattgtacatgttaaaatattatttattcacgtaaataatatatttaaaaataaaaaattattaaaaaaaaaattctttctattctttcttaattttttgatttttttttttctcatttacagacgaacagtcctcctcccaagctccaccttcctcattcctttcaaattccaccttggtcctccatcgaaaatccacttcggccgttaatgttttcttgcaaatgttctaattataaaagatattactcatgattattaataaaatttaattataaaatattaaattattaaattttaatttaataacaaataataataataataaaatttgatataatatataaagttttgatgtatatatatagaagtggtaatagttccagaagcaacaatttcttttattgaatagaagcagtagtatcagatacagaacggtttgtaaacgaagactgattgatcggtattactttaggcacacaaaaagcaggttgtcttggctggggaagagatacagttccacttcctaacagaaccaccactgacgacatggtgggcctgtcgtttggatcttcttgtacacacaaaagcccaatatgcatacatcttataatgtcttctgttgggcttgactccatcatcaaagggtccacaaactccacttcttttccttctctccatagttgccatgcctgtcaaaacaacttatcaaaacgccatgacatttctaatctccatatgtcgtttccttacattatttttttttttaattttttaaaaagtagctaatattaatttaaatcaaaaaacatacatatctaatgagtgtctgagccttttcagaaaggtgagagctgcaactcttcttcccactaatgatctccagcaagattacaccaaagctgaaagcatctgattttgctgagaattgtccatccattgcatattctggggccatgtatccactatttttacataacaaatataagtgagtttagcctaaaagagtaaagaaatgaaacgcaaaaaacgaaaaaaatacatgatatgacaaattaaacgttacaaggagaaggtgtgactcactatgttcctacaacttttttggtatttgccgtgttttgatcttcgcagaagattcttgccaaaccaaaatctgagattttggcaaccatctcactgtccaacaacacattacttggctttaaatctctatgaattattcgtaatctagagtcttcatgaaggtaaagaagccctctagcaatcccacatattatgctataacgagtcttccaatcaagtaaggcacgattatctgaatctgaaaaaccagaaaaaataattaaaagagttaaaatttaaaatagcttttgtgttatcaacaattaaacaatgttaaataagatgaaacaaaccaaatataaagctatcaaggctgttattaggcatgaactcgtatacaagtagcttctcttgtccctccacagcacaacccaaaagtctaaccaagtttcggtgttggagcttagcaattagtacaagctcatttttgaattcctcatcaccttgccatgacttccctgatagtcttttaactgccacttccttcccatctggtagaacaccctaaaaaaagtatttccaagagtgtattaaacttttgacctcctatgcatctctctgatccacgtgaaaaacaagagaatgtgcaattaccttataaacacagccaaacccaccttgtccaagctttttatggtctgaaaatccatctgtagcagcgcttatagtagccaaatccatgaacggtagttcctcagtgctgactagctcatcatcttttcctgctacggtgatggccctggggcttagtgaataagaaagtaatgcattttggctctttacctcatctgtcaaaaacacatatgtcagtgaataatatggtaaatcacatctatagtgctgtatggtaatttcataactttcaccttgttttggattctttttcctcctaagataaacagcaaaggaacacatcagaatcactagcagtgatgatgtgcaagaagcaaccaataaaatcttccttttcttccccttatgtctcatactcccatctgctgtcaagaaattttcaaatttctagtgttagacaaggtactcatttttagttgtctcatgaaggaacatgtccttaaacaaccaacacacaagcaaaaaagggtccaacaacagaaaacacctaccaaacatttgaagtataattccttagaaggtatatatcagtgtttattatgaggtccatataataagataaaagtttaagctttatcatctattttgaagaatcttataaatcatatggaaattttaaatgcctaattattacctttggagctttgggtgtagaagaaacggaagatctcaaatcttacattgcaattactacttaaaatgataccaccttcttcagaggggaagaatccctgaatatcacccaaagcagacctcaaacaaattttacactcacgtttagggatatctctggtgcactgtacaagcccataaatctttccctttgaatactcagtatctccggttttaaacatggtaccattagaatcattaatagcctcatcagacagttttttaatcaatttagtccaagctaatctgaattgatcaggatgtgccactttcttcctgtgataactcttctctggctttttcccagcataaatctgcatcttacgaaaatcatagggaaagtagtgaatttgacacacttcataccatatgattgctctagttgttttacacttgttcatgattccttggcttgcactctcaaggcatttctgacagtcagtaacattaacatctcctctgcaaagcgcttggccataaacctgatctaaaccatctccataagaagtgtctttataacctgttgatgatggtgtattgttaactaatgactttagaagtgtcttgaggttgtgttcaaatgagctggtgtaacttactgtagttggaatacagtctgacaagagagggtttgaattaacaggtttgtgaaaatagaaggctaaaacaaaaacagaaatcacagctgatgaaattgtaactttaaccatgtcttttattgtgaaagtagttttagtctttttggatcaaagataaaaccagaagtttaaaatgcactaacactaacatgtgtatccaataacagtgcatgcatcagctcctaaagttgcagcctgatattttgtgattgactaaaaaaatggttcacacttagtataaagtagattcctagggaccagacattcttttttttttcttttttctgatggtttggtcccagctgatctgaattgatctgtatgttcattttgttattatcctgtcagataaacaaaatgatctagaggtttggaaagtttctcatttgtttttattttaattttagtttaggtggggttggtgacaaagagggaaataaaagcagtagagttatttcattgctcaaaatagaccaaaaacaatgttttctctctttttattataatattaccttatccagttgcggctgattgctagtccacacgttcacaaatcagttgtataaaataacacatactcttttttgctttacttataaatccaatcaggtttacaatgtttatgtatttctattatccaatcacaatagtcaactgtataatatatagtcatacatattgatattcagtttacagttttagcaaataccataagaaaattgttttaatagtttttttttttttggcatgatcatatgctcttcattattattattattattatggtccgtggaagtgttcaggtagtattttagtgcaaattcttttactgttctatattgaaggaaacatgatacgaaaattcatccaaccactcaacaaccaaaaattaatgtgaaaacgagcttgacaagagatggctaaatcaataattgatttattgtcggcatttaaatctttttataattggttatgtactaatttttattgataataaatcaataatgttatttgttctaattcaatcccattattgagctaaaccataattctgtatcaagagaaagcgcagaattaaatgactgacatgaacatcgaatctttatcatcattttttcgtaagaaaatcaaatgatttgtgtgaacttctgactagtttctcaagggtagtactactttttgctctgctcttctgtttttaatgtttcattaccattatcaccaccattatttgaggtactatttcaaacaccaagactgaagcaagaaaaagctttcattaaaaccaaagtatatacagaatacagttatatattaggtaactagtcaaataccagatcaacatgcagagtaaattgatcaattagactagttacacttgactttgtcatcactcacgtaaaacacttgacatagttatactattgattgacaaataatcaacattaatttcatcatactgatttgataaaccccaagaaaacgctggccgttcaggttgccgaagagtctcgctttcactgtttaacattaccacaatagatgacattgttggtctctcttgtggatcttcctgaacgcacaacagtccaagataaacacatctggtaaactcatctggagaacatgagtctgtcaacaagggatccatcaactcaagtgcccttccttctttccaaagctgccatgcctgcaaatttccatatcccaaaagtgaataccaacatctgaaattgcgatttgactaatctttaatttaataacaaggcttacatatgctatgagacttagagcctgtttggattgttggaaaccagcactctttttcccactaatgatctcaagcaggagaactccaaagctaaacacatcagatttaactgagtagagtccctccattgcatactcaggagccatgtaaccgctactccacagaagagtaaaaaatgtaaaagacaaagaatatgaatagtgccattatattttatgttagaacacacttactatgttccaacaagtctacatgtactggcttcaccttcagttcctacaaagatccttgccatcccaaagtctgaaatctttggattcatttgactatccaacaacacattgctagcttttaggtccctatgaatgattcttagtcttgaatcctcatgaagataaagcataccctttgcgattccaattacgatattaaggcgattactccaattgagttgtgcacgtttgctaggatctaacaagagaaaattaagagattaaaatatataaatgcttcaaaatatatctgtttcagtataaatgaaattatgatagaaatcagagccgaggagacttaccaaagaggagaacatcaagacttccattaggcatgtattcatacaaaagtatcttttcttctccatttacgcagaaacccaaaagcctcacaagatttttgtgttgaagtttcattatcagtagaacttcattggtaaactcctctgaaccttgttctgaacaacttgacagcctcttcaccgcaacttctcttccatcacttagtttaccctgaaaaaaattagattttagggttaaaaaaactatttactttatggactactaaaccctcggaagtagaattttatgaagaaatttaatatattaccttataaacagggccaaaaccaccttgtccaagcaaatttgactcagaaaagttatcagtggctgcatgaattgtgggcagatcaatatatggaaactctcctgcattctcctcgtcccatgcttgaaaatgctgttgcagtatatttttcagtccatttggtccaccattgtcgtttaacggttcttctggatcattcttatctgcaaattgaacgatttcattatacaaaaagaaaaaagaaagaggtaaaacggaatcaagaataataatttaggttgttatgttaccattttgagatcggaatttcaatataagacagtagacagagaaaccgaaggccaatacagctaaaaaagctgaaactacaaagataattgtcgtcctaatgtgccatttgcttcctgcagtataagctatttaaaatttattgaaaaaaaaaggtcacataaaaattctcaaatttcttaaagaaaaatcattggaaggcacttactcttcccgggctccaatacgaatccactcggtggtatttcagaatcatcttcgtaaaaatcgtataactcgtatcttaaaaagcaactcttgctcaaaattcttactcccttagagaaactgcagcaagttgaagcattttcaatagtggccttaaggcaagtcttacagccagttggagataagtcctcagtacactgaacaacagcatatacaatatcgtttccataacttcttttgtcagctgcatagtatttgatcggcgaatgattataagctgccttctcaatcaactcatttaacatctcttccaacgcagatccgagctgttttggttctgaagcatttatgagattatgcatttctaaattttctgaaacatcaacagagcctaagaagttcgtattggaataacgtatcatgcatttttcttcccatattactgcttctggtgagttgggacaatggcccatgatttcttttgaggtcaagctaatgcaattcttgcaatcttcatttgtcgcatagccaaggcacatatagaggccgtagactttatcggagtcgactccagaggaggaggtattgtaaaatttagaaacagaagcagttgaggctaaggaatggaatagattgtagagactgttttgagttgggaagtgactattattgttaagtgtattatttgtgttgcagatgcggacaggaagatatgcagcattaacaagcacaaactgtcccctgaggaaacagtaggccagaagtaaggttacagctttgaaagcgtttcggaaatacaacaacatattcttaatttcacaataagttttgtgttgatttttcgtgaatttcttactgaaattcttctcctcttatttcttttcttttcttattttaccggagggagagtatgtactaatggcttaccaatagatttttcatatttcttggcaattaataggctagttttaacttttgataaatgaatcagatcatccaaaatggatttggtcttcacttcaggtcttccaccagccacctaaagttatgatatttttattaaaagtaaaaaggtctttcggtgtttactctgttccaaagaaattaacgtagaaagttccttctctggaccacaggtccacagaagcgatgcacacagaacattctgctccattaaaacaaatatgaatattgctattaggtccacaagcaccaacatgaagtgatgtactataaattattagcaattttttataattattattaaaataagataagttgagatccaatattgaattaccactacctttaaaatttctccgcaatcatattaactattcagctagtttactctttgttatagaaaatttttaactgtctattaatcggttaggggtctaatgaagcttaaaccaataaacacgataaatggatagctaaccctgccaatagaaaggtccccagacatcaaaacaataattggtttgaatctaaagttaagaaatacacatggtgcctagtaccttaatgaagtcgtataatttaatatcgatcacagttattttaatttaataaaaattattaaaaattattaactaattataaaacatatattatagttgtactaagtgccacataacaatactcaaagttaattaggggtacttcattttctccttaaggcaagtttaatgtagcattgttgcctgaacccaccttttattttatatattaaaagaaatttaactagccaaccaaaagcaagaaagaaaaaaataaaataaaaataataagtagtactggtcagcaccattactaatatttagttttgaaaaattaatattttaagattaaattgtccatttttctaacagcacagcacctaccctagcttctaccgttggagaagcctttaggaaaaaaaaaaaaaaatcagtattagacatcaacaatgtttagtatttttcactattagacattaatgatgtttagtatttttttattggtagcgttttatgattagttagcaataatttttaatttttttttaaaattatataaaatctaatatttaattacaactataataatatagggaaatttgaatttatatgcttaaataattaaaaaattttattattata

SEQ ID NO: 218057 - DNA, 4722 bp, Cannabis indica
tagttaaattgatgcatcatactttaggactcttataattttagaactttttattcctccagaagaatgccttagcacccctccatcagaaaatgtagccaagaaaggcttgacctcagctgtctccctcgataagaaaagagttcaaactactcagcattctgcattgacttggactgagaaatataagcccaagcttccaaatgacattattggaaatcagtcattggtatgttggttattgtactccaccaacatgatgtttgcatctaaaatattatataaattatatgttagcaaccatttcgcctttttttttaattatttttttaaaaatgttagcaactatttcttgctttacattttcatattaccatgtttgggagtgttgaaactaaaaagacgatgccttgcaggtcaaacaacttcatgagtggttgttacgttggcatgatcagtttcttgatactggaagtaagaaaaaggggaaaaaggcaagtgattctggtgcaaagaaggcagtactattaggtggaacgcctggcatagggaaaacaacatcagcaaagttggtcagtcagatgcttggcttccagatgattgaggtaacacctgttttattaaaatacgttggattgccgagggattataattttacctctatatatgattgactatgttggtctttaccttatgtatactacacaattcttgcttaggtaaatgctagcgacagtcgtgggaaagctgatgccaagattgaaaaagggattggtggaagcaatgcaaattctataaaagagctcgtcagcaatgaggccttaagtgataacatggactggttgttttttcttttatatttttctcttgcgagtttgcattgaaccggtactcaatttgagtttttagctgtagttaattagcaattgaaatgcaggtcaaagcatccgaaaactgtgctcattatggatgaagtggatggaatgtctgctggagataggggtggaattgctgatcttatttccagcatcaagatgtcaaagatccctattatctgtatatgtaatgaccgctacagtcagaaactgaaaagtcttgtgaactactgtcttcttctgagctttcgcaaacctactaaacaacaggttttgtgttaaattttacttttcatattataaaatgcagggtaatgatatgtgcacccaaacattacacacagtagcgtgacaattttgttcaatcattcacatttatctaaactggaacccattgttaaaaaaaaatgccacgtcactaaatgtaatatttggttgcatattttaggtgcacatcattactctaaaaaatatttgtttttctctagtttcgtgggtccttttcccacactcacttgtgcactgattggggtctctcatggctctaacctgttgtccgtgtttcttctgatttttgatgctccataattactttttaagtttgatagtagagcacccctcttgatggtaacatgaatatatatatatataaatatatatatatgtatcaatatgtatgtaatgtataaaaaataaagtgcatatgattagcaatattagagtgtgcttgtgtaatgtttataataataaggtaaaccccttctttctaaaatcaacttcgctgcttttcaaaatcagattccagaaagcaaattatttcttaatctggccaaagtagatttaccaatcatcaactgttagtctgttactgttctttctcagtctctaaaaacaatatcacactggccttgtatgtatggcaagtctgtatggccttgatatttccctcttttagttttagtgtttctcaactatataattttcttaatatttatgttgctagtaaatactctaggctattgacagtgcacatggtttatgatagatggcgaagaggttaatgcaaattgcaaagactgaaggtcttcaggttaatgaggtaactgcttatcttcgtttatcttttaatttttttatggaatcaaattggaagtgtagtggcttttctaagataatgcaattgttcctgttctgtttgaagtatacggctagttatggtgcaatacattcaatccaaaggattagactcttctctaagacagaacacctttcttttcccccccttgtttaccaaaattaatataccggcaactaatttaataatgaccttctgtattataaattgtatcattggaacctttgttcatcagttgtcaagttacatgccgtatggatatttaatggttctcattgtcaatttgtcatgtctgctctcgtttcctctctctcttcctctgggctcttattagacctaatttatctgtgcaagtagtgctctttctgatgatctataacgatccttggtatctaatttgtagattttgttaactttctttttttccttttcttctcatggtgtttaacatgatttatttccttatcttttaacgaagtagctttctcattgtttatttattcactttttccagattgctctagaggaacttgctgaacgagctaatggagacatgcgaatggcaataaatcagttgcattatatgagcctctcaatgtcagtaataaagtatgatgatgtgaggcaacgcttgcttatgagtgcaaaggacgaagatatttctccatttacagctgttgataagtatgattatcttaaattattaaatattgcataatgaataacgacctttgtattctaaagtgtcttgctatggagtcttagctgccctttatctttttctcccctcttccactgaccttatattagtttccattccatttcaagtttggttattgaacatgctttaggttaggtcttgcagctattcctaattcaacgcaaatttggattttaaactaaatgtgctgtgtggatgattttactactagtcaagtgaactttgagttcaaattattgaacacccccttaaaatgaaaagcatgaacttatcaacttctatttttcctgtcattttttgctttggtattagttgttgcttcttgtattataattgtggagaaaaatggaattttatataagatccaatgctgtactttattctcataagtatgttatccttgcaggttgtttaattttaattcaggaaagttgaggatggacgagaagatggattttagcatgagtgatcctgatctagttcctcttataattcaggtactttttgctagtacttatttttgtattgctgtcttatattttgtgccataagattatctactagctgtaaacaagctttttacctttttaaattacttggcaggaaaattatcttaattacaggccaagttctgttagtaaagataacgatggtataaagcgtatgaacttaattgctcgcgctgctgagtctattggtgatggagatattttcaatgtacagattagaaaatatcgtcaatggcagctatctcaaaattgcgctctttcatcctctataattccgtatgtttctgttcagctattggattggaagtaacttacctttttcttttgttaatttctaattcatgttcttgtttatattcttttttggttacaatcagttctgcttttttacatggacaaagggagacgtttgagcaggtaatgaatttacttgtaaatgattgctaatatggccacatcccttgaaattcatcccaaatgatcttttgcatgtagggggaaaggaacttcaacagatttggtggttggttgggaaagaactcaacacgaggaaaaaatctgaggcttatggaggatttgcacgttcatattcttgcttctcgtgaatcgaattttggaaggttactttttctctctttaaatttattgtttctctgcatttctcttctatacgcttagaatgcaattgcaaacttggcctattgtttttctcatgtcaaattgttattatccagggaaactgtgcgtattgaatgccttactctacttttgaaacgattgactgagccactcagggtgctgcctaaggtggggttcattttgttaataactctgccagtggcaaaagggttgaatgatttaaataatagtttcttgttcttcttttcactctcaactgattaacaggatgaagctgtccgggaagtagtggatttcatgaatacctactctattagtcaggaagactttgatactattgtcgagttatccaagtttaaggtacccttacctcaattgaatagagctggttacttgcaaccttttctttaaatttataagctgttgcacatctgtattgaacagggatacccagatccactggaggggataccacctgcagttaaatcagctcttacaagagcatacaaagaaggaagcaagtcacggatggtacgagttgcagattttgtcacacttcctggaattaaaaaggcccccaaaaaacgggttgctgcaatgctggaaccatctgataatggggttggagaaatcaacgaagaagtgattgcagaaagtgatgaagaaaaatcttcagatacagaggacttgggtaagttttacgtttcaacaaaattagtgtcactttcaccttcattgacaggaatagcaattgtcgaaccaagcactaatgcctcattttcattcaaatgtagttccaatctcagaaagtgcttgaaacattagttgttacattagtcattt

SEQ ID NO: 218058 - DNA, 5944 bp, Cannabis indica
ttaagcccccacataataaaaattctgggtccgtcactgcggccttagggttgattgccttttgtttagttttttagggtaaactgagcttagaggtggttgttgtagctccggctaccgctttgggtggagaaatcatttaatctcatcgtccattaaggtataaatctgatctctaataatttaattaatgtaaattattttattttttattttataaattttgttaggattctcctagattgttaagattatgttctagcggttgtgcatagtggccggattttgatccgtattgatcgctgaatttcgataagtaaatttctaatttttaatagtatatatatgtattttatgttttacttaatatgtattgtatgtatgcatatatattatattgtatatgtatgtataaaaatattataagtatattttatattttttatgtattgtgcatgaatatattgaatattttaaactaatagtattgtaaaatattgtgaatgagaatgagtaggtgagtgttgacagtggatttcgccaaccgacatggagtctgactaggatcaaatttcccttatgaatgtcacgtgagaatgataataaatataagagacacaaatttatagaggttcgacctcttttgtttagataatgacctactccccttttagtagtattcactattgagataataccaagtagattacaggatgaaacattgtaatttctagctatgctctcttgaatattacaatgagaatgtattttgcatgtgagaagtatgaggaaagatagaagaattattgctatagtacgtacttatgagcgtgattgaaaacataagttctaagtgcttatcatgacctttatatagtaatagggcctacaagctgcacatagagatatccttagaaaatagagaagttccactatatatatgtaataccaagtaaataattaataatccctaaagaattaaattgttgtttgttgatggtgagtccctatctttgcggacagtttgaactgtttttaaattgtgggcatgcaaaggcgattcggaaagctcttatgaaaaacataagtgttggcatgtttatgtacacttggccaacaagccttgttaaacgcttcctgatgcttggaagttgtcactcctggtcggcgagctataggtccagccaggacctacctagtaaggttgtacatctctatttccttgtgtgtattgtccaaccatggaatctcaaaggttgggaggctacacgatagtactgacctgtcttcaacgtattttatgatttttgctgagtggaggggccacatcaagtgaacaaaattttgtataatattagtcccgaaagtccttgtctgaacgtttgatcgggtagggactttgcactatatagcttctttattcgtgtaggtattcatagctaggtattggactctttcacttacgtgactttatggtagttattaattttacgtcaagaaatgtgggatatcatgtgcggctgcacactttcccatgttgcaactcttggccttctctttcatatgcatgttaatttttgtagcattaactccccattatatttatgggggagaattttctagaaaccataaacaagcttcattcttctttttattctttactttttacatttgaagaacaaacttctctccaagactccttagagcacaaatcttgtgagcttgagttcttcatggatttttgagtttctaacacctagacttgtcgtgcagactagctcgatcctccttgcatcttttgtggataagttcactattttttttttaattctttaagcatctatgattattgagttttaatcttttatgaacttcttgattctcatgtcttgggatagtttttatgaattataatctatcaatagctttaggatgcataatttataactccttgatgaaaaagatcgaatcttgcaatttactttgacaatttgatctttggggtttgaagaacacataaaacatagcttagaattttagaaaatatgatttttaattcatttagggacctggccagcacatcgcgtctgttagagaccctggccagttcttcgtcctgcctatgacccctggccaatacttggttcctttccaagaactatgtccgacccttctacagttaaatcttatcctagggttcatggtgaacccatcatgagctaccgattcttggtgaactaaagggatgtcggccagttcatggtgaaacaaccatgagctgaccagttcatggcttgacacttcatgggctggtcagttagtactcacaattattggcttgctagcccatgtttttttttttttttatcttagtcttatttgtgatctccgactgttcaactccctttttctttttgcacaaatgaacctgcgcaactattggggaagtgataacatgatcaacgagggcttactctgtcttttgtacgaagactatcacttagctagttgttcctctgagagctcaataggtagctttttgagggaatttgaagtgagcagtggttttcctgaacttaaagttcaacatcaccactattctaagtgaataggtgatgagctctacggtagactcatctgggaactaaatcaagggtggagatagttcctgcttgagtcttggacgtatattgtctggtagggtatgcctgacacattgcatgttggacaggaattttctgtatctagagatcttcctacagcagtggttgctgtaactattgtccaatacttccagcaacattgaaacatggtgaggatgaagaaatcttatcgcaaggcaccatcaactgaagcccatattttcaaacacatggcaaggggaatagtccatcaagttgaggaggttgaacgacctgaagcctgctaggctgaggagcctatggagagtcaagaggaagaagagctagaattagttaattaggctgagcctaaagcagagtctagggctacttaaaggcaccctagggactgtgatgtgatctagggtacccccaagactcttacgatgggtatctccttattctacactattgaatgccaagcttaatggcatcattgatagtgcacttgttggccacgcccaatgcattaggcctgcttaagaccacttggctcaccatccgcatccaaattggatagcgtggtctggccctcatgtggagcaaggtgtcgtacttcctctggacccatattttagggacatagctaacttcttcaagatgtgtccaactcagattacaaaaaaaagagtaccaagtacttgtcagcactctttatctagtatgcggatttaggttggtcgctgccttcaccttttgaggtgaattactacttcgagctaaaatcctgtccaagctagaataagatagaatacatctactttagctagtatggctatcaatagttgggcgacactaatgacgaagccatgttaaaggtttgagggcatgcctgaagtttctttatggcatatatcataaaagatgcatgtcagttctttcagcgggttctaacttacagtcacccacttcccatgttaagacgaaaagataaagccaacaacattttgtctctcccaacagctcggtgcaacatctatacattggcctttgaggagaacttcaagaagtatggtctgtaccctcataagtgtaggtgttgctactccagataacactcatgaggaccctagcaatgctcttgttgggaaggagaaaaccaaaggaaagaaatcttctattgagaaggaaaagagcaagttttctaaggaggcttctttggccaacgtggcttggatagagggtaggagaactacgctctttgctggcatcttgtctatgtgtcggcatggtttgtgatgctgtgattttgattaggcctgagagataggggccttcaagacctccctagcctatgccgacagacaaaggtaagggcaaggctgtcatgattgaggagatttccaatgagtgctcttctgaggaggagggcctttcattttatatttattactttttatgctgaccttgttggttttgatttacagatatggcctacagaataaaaaaaatttatgaggtgaccatcgaacaactcccctagggggcgtgctcagtccaaggtatcttggatggggaattccattgatgtgacccaaacacctttgcatccacctccttcaagcccatttcccccacaatcacccttttattcatgattctttgcccaagataactcctattcctcctcttaaagcacctgtcaagggcagctagaaacatagttgggcagcttgttccgtctagggtgaaaaagccaagtaagttgcccacgactaccttggaaagtgcctgccaagtgttgattatcagcttcaagccctagactatttgacgaccatattcttgaaagatggggaatctgtaagttctcttattgtttacttagttttttacttcatgcactgtacaactctattgaccttatttcttcctttttgatttcaatttctcttgaagcttagccatgcccatgttagggccaagggctctgcaacgacctttagaaagaaacttgaacggaaggattttgaacttccagcaaaagatgcatagctttctaagcattacaaggtaaaggacaagtacaatggtgtgggctagctgcttggtattcgtactaatgaggtgactaaactaacctcaaaaagcatcaagatgaagagggatttggaggccgcaaagaagacctgcaaggagaagcaagaaagtcttgttgtagcattgcacagtcatgatgacctcatggctgagttccgtgacttgagaatggagattttttatgagagttacctccataatcctgggggtaacttttcttatgttgagtctcttaattgcgagggcatgattgctcggggcagggagctgtgtgaggccaaagcagcctaagagagtactttagggccgtctgctggccagctttgccaatattctgaggaagtacaggctagttagattggggaagctgtccaatattctgttgagacacatgctggcccacattctgtggagacacatgccatccatggacttgtcgagcaggccaatgatggagctgcctaggctgttgattctacccacgagactgctgttgttgaagttgctgcccaggacccatctacccttaactcacctgcacttgacaacattaaaaagctttagttctattaattttttgtgtttgcattttacacatttttttctttattcttgcatggcccagggcttatgcatttgaaccaattttttttcttcttgtatagccttaagaccctttacttttgaactagtgaccaaccaagcagtcttaatcttggctttatcttcgttcaatttttgaacatgaagctggttgggaaacctttaatcctaggtttatgcattttttgctcaccttgaagcatgccattcgcacatacttagttgttaatttattgcattgccaattcttcaaaaaaatttgcctaagtatatatgtgcttattcgatgtagtgtgtgggtgccccccaagttatcaagcagacttatggtgtcttggtgacttgcaattagccaagtatatagattctttgtaatgatcgctttagtaatttgaactagtaaaggcaattagcactaatttctgttaattttataattatctatgaatttgtttatttgtggaccccaatatttagaaatgagcattagagttataatttctcaattccgaagattttattaaactcaagggatattatttgtccgatatgtgaattatgcaatttttgtaattttttgcgcggtgacaacggaaaatgcgatggatggctagtttgat

SEQ ID NO: 218059 - DNA, 2265 bp, Cannabis indica
aattaaatttgaattatttaattacaattaattaaagacaaaaaaaagtttaaaattaagttatttaaaattaatttaatttttaattagaaattgtgcttctaattattcggtggtggattacggagtatggtatgaaatttctaaagctacatgaatggacaacaagaaagagacctagagagagaacaagaagagttcttctttttttgataagtaagaagagttcttgtttatttctattattccaagtgttgtaatattaaaaatactcaaaatttatttggttcacatttcatttaactttgttaattatttatttactaatagttgattattacatgcctatgtatatatatacatttgtcatatataaaattctacactgtttatttttataataatcatgcatctcattttagaaatataattgttaaggattgtcctatatattttatgtatattgtatttagtgaaatgaataaacataaaatactagattatcttttaaatagtttaaataacttggtaaatcacaccaagtgactatctcctatagttagtcacatattttttaactaactttattttcttaaataattttcgattttttaaatatagtattaattaaattattttcaggactatattataataatttaattaatgtattacaataggctaaaatttagaaattaaaatctttttcgaaatgattttaataaaaaaaaacacatgttttaaatagtgagtgggagaagattgtcatctactatgaaactcatggtctccattattaaaccagcaccgagagtatatggagggtcttgagacgactttattttcgtccccttaaagaagttgttgaactatacattgtcaatgttgatttcctcttcaggataggacaaagtaatgtattttagtgcgataccgaccctaagacgatattattaagttaaatcatggaatctgaaataatgagtaacacttacaaagtaatgcccctgtctttgacgctaggacacataacttgactaaacaagcgatactttattttgtaaagaaaataagagttactctagttacaataaataaagataagaacatgtcttgtagattattcaatattaatttgatcaaccttatggcgaaactttaattgttggataatcttatcataaaattttaaaattattttatgtattttaaatgtgcacatgcatcatatttagattctaaacttgatattatactttttcatttatagcctttatattgtatttatctcatattgcttacatctcgctttattttaattttatttcagtctaataataaaatggcacgccaataatataatgttaacaattatccctacaatatggtaactgtatttgatggtgatttcacatccgactggagagcagacattgaacttctgcttctcaaagagattttgtatgaattagtagccgaacaagatctatggctagaagtatgtgaataatcgggtcatgcagctaggaatgcctttgcacaaggcaagaaaataattgacgtgcaatccatatcttgttgatttcattcaatgaagagatcagggaaagatatgagacttttgtctacgcctgtgatatctagaaggcacttcacaatcagtgtggtgccactcatgaataattaattggtaaacaatattatattgaaataagttttacttaggacataaaatcccaacggtttatagtgtcaaaaataaaatttaagcatgggagaaaatttatcttccaaaggcttatggtgggggttttcaggaaggacttaagtggaacaaagctattcttgctaagtatgtatggccgataatggaaaagcatgatctgttatgaatcaagtggattgattcaatatatctcaaaggttctaaattttggagctatgacttgaaacaaaatacaaactgatattggaggaaattatgtttcttgaggcaaacattcagcaagaattgtattcaagctactggaaggaatggtaagtttaaagcttctaaactttacaatagtttgttgcagcaaacccaagtgacttaccagaaagttgtctagtgtagaatgagcatttcgaagcatatatttaaggtttggtaggctgttaattctcacttgcttacacgagatccttcctaggttttatgttgaaaattattttaccaggatttagatttactaccatgtatattgtttaacatcctaatatgaa

SEQ ID NO: 218060 - DNA, 1400 bp, Cannabis indica
aaaaaaaaacaaaaaaccaaataccctaaaaatacttattaaaaaaactgtacattcatattttataatcgacactggaaaggatccattgggcttttttaacccttaatgagcccattttgtgctactccacgctggaaagggccataggcccatagcaaaatggacttcatttacctattagcccattaaaatttggacaaaaagcccaacccacattattctgatatttaacattgagaattgttcatccaaagacatctctctcagcccatcgcaaatattaattcatttcaaaaaagaaatattacacaaagggcttaaatgatcttctttttctttttatattttcacggaatatgtttaattttttacgaattttgttagttacatttgtatggagtctcataaaaataacatacaaccaacataatataaatataaagcaacataaaaataatatacaaacgtaattttgtaaggcgtaaaaaatagcaatccatatttttataattgaaaaaactataattcagtatttttgtaatattctttttcttttgggtatttatcaagcaacaaggaaaattttcatttttatagtcatgctacttgacactagaaaaagccacgtatttaacctatatgtaggggtggccatttatgatcgtatcgtgagtcgcgttgagacttagatattacaaacaaatatcaaacctaaacccgacctatttattaatcgagtcaaaaacaaactcaaatccaactcgtttataaacgggttgacctgacttgcttagcctgtttatataaataatccaatttaattttaattaacttatcaattaattaacatgtttacaacatgtcttatttaactaaaaaatataatttacatataataattttaagagtgtatttattaagggtgtcaacctaaaaataattacatgttgaataaataagttattcataccaacccaaaaataagccaaactcatttaaaataaactcaaactcgtttatttcgtgcgagttttgaatcatgttatcgtatctgtcccaaattgccactcctaaccatatgagcccattctgtactactcaaagctggaaaaggccataggcccgtagtaaagtaaaatgggcttcttttacctataagcccattaaaatttgaacaaaaagtcccgtccaatatcaccctaatatttaacatcgagaagaattgttaatgtatactctttcttacgtaggttattattgtgtcattttaaaattaagcgtattaactcgaaaatgactcatttaatagaagaaattacattgtatatccactttattttacttgttttaatttttacttctattttcatattttttttttagatatgatgttccca

SEQ ID NO: 218061 - DNA, 4800 bp, Cannabis indica
aattttttgggtttaattatttgtttattggttaacggaagatcaaacctaatcgttaactttaacagaatattcttttatttttaagtatattctgttaaaccaagaaatatcgttagatagacacttttaatatataaagatataacttcatacaatattaaaatcgtctctagaacaatagtgatacatccctaacctaagcaaatccttaagttaatataatttgttgataggataagttgaagaatacatttttttttgtatctgttaactaaaaatgctctcatattatattttattaaaatatatctatttttataagtgagttgcctaatatactcttattctctagtctacttaagtctagcatataatttacattaacttaaaaggtctaatgggaatatcattcataaaagtgagtatatcttaaagaaaataaaaatgaaggtaaaaattaaaataaataaagtaaaatgggtatacaatataatttcttctttgttgatagtagatgctatctggagaaatcatcactctactttagtaaagtggttgttgctattggtatttggtggctgagaattttttccaaaaaaaaatatccctaagttatatcctaacataattattttatttaaagaaaaacataattatttttaataatatttaaatattcagataaaagaaatcctttattattttttttttaaataaataaatatcagttatatatgactttattattctttgccacgttgcttacatgtaaagaaagtctctctatagtcaacttatatcatagtaaattcagattttctaccaattataggctcaaattattattaaaaaatctactaaaattattttaatggaataatatcagatttttgaccaattaggtctctcattctaatattaaaaaatccattaaaattaaattcgatttaataatatactattttgaaggttgtcattttagttttttcttcctttctttgaatgtggaagaatctccttcaagtaacgtccatttcttaacacattgttcattaggccggagacctgacatttcatgcttattgtgaaaaaaaaaaagtctatatattttcttcattcatccatgaacagaaacaaaaaagctaatatcatcacctttttcttttttctccctgcatgtcaccatataatatctctttttcctcactaaaattgtttgtgaatgtagagtcgtcaaggttttaagtagcaatgacacttgtataaaatatatatgagttgtcaagttttttcactctataaaacattgtcaaaacatatatatctttctcatcaatatagtactagagctaactagctagtagtatagtattcctttattgttttgaaagaaagaaaaaatggaggagactactactgtggtgattgttggagctggcccttctggactggcaatggcagcatgtctaggcaaaaagtcaataccatatattttgttagagcaagaagattgctatggctcactttggaagaaaaactcatacgataggctaagccttcatttggctaaatgtttttgctcattgccccataaaccccacaaattttccacccccacatttatgtccaaacatgagtttagctcttacttagactcttatgtgaaccatttcaacataaaccctcgttacaatcgctctgttgaggtggcttatttgaattataaggatggtgacaatatgaagtactactggaagatcgagaccaacaacatgttgtcgggagagcgtgaaatctatgctgctgagttcttggttgttgccactggtgagaatgctaaggctttcattccagatatccatgggattgaaagtttcaagggggagctcattcattcctcacaatatacaaatggacgaaagtatgaaggaaaatctgttttggttgttggctcaggcaactctggcatggaaatcagtaatgatctttctgagtttggtgctcaaacatgtatagtgattagaagccctgtaagtataatttatttatatctttttcttcctaacaaatcttattctaattatttattatgtgaatgatatgcagttacatgtgttaagcaaaacaatggtgtacgtaggaatgttgatgttgaaactgaagatgagtatcaattatgtggataagttaattttgtggctagcaaaattttactatgcagatctacccaagtatgggattcatcgacctcgattgggacctttccttttcaaggccagtggtggaaaaactccagtcatcgatggaggaagcattgacaaaatccgttcacaaaaaattaaggtttagataatatcagtatatatatatattaattttaacgtattattttcatatattatttttattattttgatgtaaatataggttgttcccgcaataaaaagtatcactggaaacaacgttcattttgacgatggaactcaagggaattttgatgttatcatattggccactggttacaaaagtgtagcaatggaatgggtgaaggtatatatatctatatattaccatatgtatataatatgtatgtcaaaaaataattaaaatacatgcatgtctgctcatgtagaattaatatagaggattgagagaggattgtacatcaagaattttggtcccagttaatccatgttttaatttatgtctatgtaaataaacgtcgatcttgtttaaaatatctaaataaaataatattttttttagaaaattgatttagaatttccaatattacaaattatgatataaaaattgagtatttattacatgcttacataaaccgagacatcaaaattaaaccaaagttatttgtaccaaactttgcctgagaaagacatgagtaataatactaaatttttgtttccttaaaaaataacattttacagcattttcatacaactttgtattgtagcatatatataggttttttacatgtataattttcaattgttatgattacaaagatgatttaatttcatttaatatagtgtaatagtgatagaaaagtaaaatttctataaaataaattgtatgtgtatatatatatcagaataaatgttctttttttacttactaaaatagtcttaatttgcaggactataagtatggtctgaacgagaaaggaatgccaaaaaacaagtatccaaatcactggaaaggagataatggtatctattgcattggcatgtctggaagaggactagctggtatttcgtctgatgcaatccttgtagccaacgatattcataacatacttaatattggcagaacaaggactacaaaattgaagtggttttaaactagggaaactatatatcattatatatacttctaataatatattatgagagtcttagttaatttgtatgttgaaccttagttattagctaaattgtcgtttgtgtcctgctatgctcaaactttatgtttctgagttggcttgcttatatattgtcagtattttgttttgttttggtaagtcaattaaatgtgtgtctccttttatgaatctattatgattatccatgtatgattaaattttagaaatttttatttaaatattaaaaactctaataagaacttttaaacaattaattttccctttgggattaacaatgacaactcacaccaacgcataaatacatatgcaatgcaatgtatataactaaactaggaaataaattgcggtgcggttgtattttgtttagtaataattaaaaaattaaattatattaaatcaaattataatattttttaaaagaaaatgcaccaataaaactcattaattaataatagaaatagaaataaggttgtatctaattaaattcaaatttaaatgacgatatgttatagatgtgtttaattaatttctttaattttttttataaatcataataaaacgttgtaaaaaagattaaaaaaaaataattaataaatctatagaaatcatcattgtatctcacgtgtagtcacatcattgcatttcacttatagtcgtcactatcatttcaataaatttgttatacataaaacaaattacttaaacaataagttaattactcattttatacaaacgttataatgaagaaaatatttgaaaataaacaatccttgaaaaaaaaaatagacatctaacaaaaagagaattaattaataaatctatagagaactcattctataattttaaaaccgttagtattaccgtatctcacttgtagtagtcattacattaaatatcaaagtcatcgctataactcatttataactgtcactattattcttaattgggggttaagtattcacttttatacctaagtgatataagttttctgaaaaaagaaacactcacactattaaacattggaataatctttttgtgagagtgtttactgattttaacattagaataatctcgaatctataaattaaattataaaataatcaattcataatatacacatgaattactattaataatatatacacataattaaataaattatattattatataaaatattttataattaataatatatacacataattaaataaattatattattataactattatgattatgtatttacttaggcttaacttcttatagataaatatcaatgtggtaaagtaaggtacgtaatagtaaaacgattctattaacgtggtttcctataatttcattatattatagatgcatataagttgttgttgctaaataaaatatcatagttctt

SEQ ID NO: 218062 - DNA, 4932 bp, Cannabis indica
ccttcctagaaactataagcttggtaaatccagaaagctatttccatttatttcttccctaagtgcttgtggtagggagaaataagcttttggacaaaggtgtaaaaccttgttcaagttttgtgattctcctacttggcactcggtgttagtgatgttgagattgttctcacatataatactactatttatattgtgtttttgtaatcttctcttcatcttcttttctatatttatgtatatattttgtcaagagttgtaacattattttatcaatattattgtatttcttgtctttgagttgtattttggcattagattttctattgaagcactaataaatttccaacaataaaaagcttacccttctacctagcttcaatcgaaggtgagaccatcaaaatgatgaatgaagacctaatgaggttggataggtttgatggatccaactttactaggtggcaagacaaagtgaggtttttcttgaccacattcaagatagcatatattcttgagtctactttggagcctctatccgctcaatctgagaaagacacccccgaaaaggagatttggaatgctttggaagcaaaatgcaaggagaaggaagaaggtacaagaaaatttttaatttcacaatattttgaattttcttttagtgatgctaaagatcttcttcctcaaattcatgggttacaaaccattgtgaacaagttaaaggttctcaacattaagcttcctgagacatttcaagttggtgcaattgtggcaaagttgccaccaacttggaagggatataggaaaataatcctctataaaaatgaggattattcgttagaagagatccaaaatcatattcgaatcaaagagaaatcgaaatttagagataatggaaatgtgaaagaacctaaagatgaggtttctaaagccaatgcggtctcaaacaagcatcacaaaggcaacaacaataataaaagaggtggaaaatatttgggtctaagaaaagacattagccaattcaaagaagtgagaggccattattttgtgtgtggaaaatctgggcactacgcaagagattgtaggcctcgtaaggatccaattacatcgtaataattcaacgtaaaataatttcagagaaaaaaattacataaaattcatatgccacaataatggcttataatttttcctagaaaagtaaaagtaattcgtacacctaacattaccatataattaacgatccatattaaatatacattgacaatacatattatcatccattcatatacacatcgcatatatatataatacaagaaaactcgcataatatttaatatatatacataatagaaccaattctagtaccattttttgttttgtggcactaaatttggtgtggagcttaagcatttaataagattatcatcctaccacatcttagcatcttcaacatctctatatatatatatataaattaaattagaaaataataagatgaacaaaaaagttacgtcttgatgaaccaacaagtatcttcgagtattttcgtaaatcgtattcaagaaacaataatgtctcacactatgattttctagatcaagaaaaatacacaaggatcagtcttggtaaataggatatagaaaatatattcgtagattttttctcaacatgaacaaggacagtttttacttgaaagaaaaaaattatatttgattcaactttttaggttttctaaatatatcatatatatatatatagatttagatttatacaagtatattgattataactaataaaataatattaagtgtttaattaattaagttatttatttatttaaaataataaatgatcatattataatacttaaaataatatatgtaatatttttattgatattattttcaaatgtaaatatttaatttaaagtaataagtatctaataactaattaagagaacattttaaccacctagagataatctctcaacaacttcgagagaatatccaatcagcccaaaaagacacaatatatgaaaagaattaaggatattccaataagcatgaagggataaatattattttcatctattaactttttatttaatatatatacatatgacgattttaggtatatggtacaatgatacttaaaaataattcttttgctgcgtacctaatttagtattataaaactaaaaaattaagtgagagtttgttaatcatagatatggaaatctatagctactatgttattagtgaaatgcgagattcgttctagctaagttagagtatttaatgatagagtgatcatattagttcactcaaatatcattaagtcaactagatgatttaaggataaaatataattaaatggataaaacaataattttaatccctattaattatagatgattattgatcgatattatagaaaaaatatataatattataatgtatctatatttgatatatagagcattctttgaaatcacgagtgcgatttcgaatctaaagtggagttatgagaaattaataagttagaaaatttattttttaaaattttggatctatcttatttggagccaaaatttcatgagcccatagtcctcccaatatttaagataatactagtgaagcctacacgtgctacgcacgtggataatttctaaaacagtaatatataaattataattttatatatacaataatttttcagaaaaaaaaattaaattattttaaaagcatattatatataattgctcaatataaaaattaaattagatcttcattcagagaaaatttccaaaaatttagataaattcataaatttgttatacatgttccaagtaatgctctatatggccaatatatattgcaaatagaataataagaataaaaaattagtaggcaacacctatatactaaatttgatcatcataatatcactctttgtaataaaaaaattgtatagacttaaattagtttgtgcactattggagtatgacgatgggaggttgaaagaaaagatatagtagaggttattaaagtaatttattagtagattctcttgcacatatatatgatgggaggttgaaagaaagatataaaaaattaaagggtattaaagtaatttaatagtggaaagccgaaactatttacacttttataaaggttatagatttaatagtagattataataattcgttatttaatcaattaatattcacattattgttttgttaattttgagaatattctactatattattgaagataaagaagaaagagataataaatgtgttattagtaattagacatttagttgttagaaaattaattataagtatttaaataatgttttatgtaaaataattatcttactatcattattttatgaaaattactgtttaaatgcaatgaataaatttattatggtatagataaaaaatagatcattatatatttaagttaatttggctttgagtaataataataagggcaattaccaaaatgcccttcacataaacaaacatatacttaaacttaaggataaaatggtcatttctctagtgatctacataatccaataataataattgttcataaaaattaccagtacctttaaaatattagtttatactattgtgatatttttatcaatttgtcgagtttccattgtggtcgatcataaacataataaatacatattatatacaacaaacacataattctataaaatctctataattgagtaataatatttatctattttccaataataagtatttatttcaaaaatcactatattattctataatttactataatattgattaattactaattttacatgtctatttatggcgtcattacaatgatcaaaattcaaataatggaccattcattttggtatttgtttttacaaccacatattgaaaaaaaaaattaaaaattgtactaaatataattatttatacaatataatataatatttttataatataaaaattgtctaagagactagatttagctacataactttttaaagtgccaatttttaattatatataattaaatattgtactattttacaaaaagaatgtaaagaaaatataattacataattttatacaattttataaatatttacaaataaacatgtatgtttatgtttattttcagttcattttttttaaaaaaaaattacataaagttaaatatataaatacataagttaatatctatattttgatgtagtactaaaataatatgtatactaaaatttaatacgaaatgaaaataaaaatatacaaatatatttacaaattttgtttattttttatatacagtttttatatatataatatatttattaaatatttgattagtattataaagctcttattaatctaatatgtttactataattatgattcaatagaattaatatatattatttattaattattaatctaatctatttattatgaaaatatttatgataatacttctttaaaaatcaatatatagcataacaaagatttgatactttgtggccactgcctagattttagtcatctcgcttagatctattcgcaaggtcaccgctggctagatctgttcgcaagctcgtcgccgcccatatctcaatcatcactacttatatccatttgaaaggtcttcaccatgctagattgttcccaaggtcctcgctgtctagatttgcacacaaggtcattgtgacattcagtagtcccgtgatccgtaaggaaaaatactaggtaagttgtacaattccacattgcctgggaaagatcaagtaggataattctaagactgtgtaggtatgggactacacagttgaagagaacttaaatagattgattggtactacctatatcaataaggtgcatcttgtttttcggtagcccat

SEQ ID NO: 218063 - DNA, 4721 bp, Cannabis indica
ttaaattttttttattttcaaaagtacttatcagtaaaaataataaattatttttaaattattttattgtttatttagagttatattatagttcacgaggttagtttttgttgtttcatagtttatttataattgttacgataatgatttcccattgttgtttacttatgtttttactttttgatgaacaaaatatatttttataatttcaaaatttcataaatatatttttataattaaatcttaaagttgtaaataaacataaaaaaaaaattaattttccttaattttaatcgtccttcctgtttttgtcaaatttttattttaatttcttaaattttaggactcattttgtcatttgctttgttatcataaattcaatatcttactcatttgtgcttgggttgataaggaaatggtcctaaacagctgccttaattaggataataaagttatcaccattcataatcacaaatataatttttctaaaaaataataatcataattataatttatgtaaactgtcttttttgtttaagtttttagcagctaaattgtcctaactattgttttacttgcacttaatccattaatctcaaattttaacggtaaaatcttctaaactattgaactattagcaaatttaaggtgtcatccgtataactgtcactataaactacttatatgtacactcttatacacgtggcatgtttatattgatacacttaatattattattttaaaattaattttaaaactaaataaaatatttaaaaaataaaaaatattataaattttgaaataattttttgtaatttttaaataataacattaactgtactaatttaaatgtgtcacgtgtataaaagtgtacatataaatagttcatatttggcagtcaaatataaaaaatagattacattttaaatttgctaatagatatgttttacaaaaaattgctaatagatctataattttatcatcaaaatttaatcttagaagaattttttttttttaggaaaatacttgttaattataaattaaactggtaagtaatttacaacaacgggaaaaataaaagaagacaagagatatctaaaataagatcgttaaaagcagcaatacaattagatcggccatataaagtatttgtaaccatcaaagcatttgtctcaacatgaccaatttggagttcccaatgtgaagcccataccaaactacgaaaaagagcttttgcctccatttcatgtgaagcaaaattaccaattaaaggcatgaaaagggcagcaagaacttgacctttgctattacgcacaacagcacctaccccaattcgattgttagttgagtccacggctgcatccacattcatttttaagattgaggtgtagaactttgttgaggccgatacttagattgagcaaatcggtaattgaaaatgtagttattagcataagatgctaagtgttcagctggtttggccctttgtctgtgtacaacccgattcctctcagtccaaatacaccataaagtgcaaattatagactccatttcagtgactgaatgttgtgttgtaaggtgaattaaataatacctttgtgcatcaatgcaggtgtcttccagtcgaaatggtggtttgttgcacgccatactgctcgagcatatttgcaaccaaagagtgtgtgactgattgactcccaagcttgacgacaaagtgaacaagtggagtcagtaatgatgtttcggcataccagcgatgttgcaatcgggatagcatcatgaaatactcgccaagcagattattttattttttggggcagctgtaatttccaaaaaaatttccaccaggtcgtggatggagttgaggtggaggaaaggtctgtttcttctagtgatgcagcaaaatggtatcccgaatggacattatatatacctgaggtgtggtgatgccaaataagcttgtcatttgttgagaaaaagcttaggggaattgtgagtattcgatccacatcaatattagaaaaatactgctgaagtatattgcagtcccattgtcgatcattagtgatcagattagcaacatcagcttgggcaggacctttgtaatgtgttgggaagaaattttggtggccaggtatccatggatcagtcgcatagttaatgttccttccctctccgattttccatcttagtccaacacttaagagctcccgtccgaaaaggatgccttgccaagtaagtgaaggagagtgaccatgaggtgcctcaaggaaagtgttgtttggaaagtaacgactttttagtaatctactcaaaagagagctaggattatcaataattcaccataattgcttagctagtagcgcctgattgtaatgtacaaacgaccgaaatcccataccccatcaaatttatttttgcataagagtttctagctatgacaataatggatctttgtgccattctcgttcgatccccaccaaaagtttgacatcatcgattcaagctgattgcaaatggtgattggtaacttgaaacaactcataagatatgtaggaatggattgcaccacaactttgaggagtatttctttgcctccaacaaagaaaagtttgtcattccaagttctcataagtctccaaatcttttctttgacctcactaaataagtgttgtttatctcgatcagtatatgctggtaatttaaggtattttttcatggcaatctcgaatgggcatagacaacactctatggaattgaatttgggttgccaaagtcgtatttagtgagaaagatagaaccgatttgtcaggatttaaaacctggcctgaagctctgtgatatgtgtcgagagatctcctgatagcatggcaagaactttcattagcagtacaaaaaagtaagccatcatctgcaaaaagcagatgtgaaatcggtggagctcttctagtgagtgaatatccatagagataccccagtcgttcctcattctgcaacaagcaagatagaccttcaaaacatattaggaataaataaggtgacaaagggaagccttgtcggagtcctcttgttactgtaacaaaactagcaagctctccatttaagaggaaagtgaaatggttcttagtcaagcaattcataataagggatattcaaccatcagcaaagcctattcgctccataacaaccttgataaaattccattcaacccgatcgaacgccttactcatgtccaatttcatggcagccaccccttttcgacctgatgttttgagtttgataccatggattagctcaaaagccaccaagatattgtatgttataagtcgattgggaaggaatgcactttgtgtttcggagatcacatgtggtaggacattcttgaagcaagcaactagaactttggtaatcatctttgagatgacattgcaaagactgatcggtctgaaatccttcatgtattgtgccttctttatctttggaattagagtaatgatagtggaattaagaggagtgggatccgcaccatcattaaggacacttaaaatagccgtggtcaccatgttaccgacgacatcccaattgttttgataaaacatagcagacattccgttaatttcaggacttttgtcaggtcccatagagtggagagccaattcaacatcagcgtgtgtgaatggtttgaggagagtctcattcatttccaaagtaacagtggctgggatagtggccaaagttgcagcaagagcaatattgttaattgaagaagcctggaataagtcgaagaagtaagcttcaataaccatgctcatgccgtgtttggaagtaacttttgtactatcttctgttttgagggaagcaattttgttgttggactttcttgctgaggctttggagtgaaaaaatattttgtatttttatctcctaattgtatccaatcaaggcgagagcgttgttgccaatagatctcctcttattctaacaaatcatcgaaaatgaattcattgtgtttcagggattactcagagcattgtttaaagagtagactttcttttgtgcagctgcaatattattcttcatacgaccatatttttaatgtgacaagtttgcaaagaaatagcacatgaatccggattattgagcacactcctaatagggtccaatgagtgaccagccagccaacaattagtggaaattacatattatacccgttttagtttaagcattttaatttctaccttctgattcttattctttcatttatacctacatttataggtaatattcctattataccctttattcattatttaggttaataaaattgcaaagccacactctctctctcggttttgtgtggaactaaaaagaaagaagaagactttcaaagttatttcaacaaacagttaaaatgcattatattaatctcatacaatgatcctaacaaatacacataaatatgtacataagcaatacaaccagaaaattggagggagaaattagatctaaggagagaaatcaatacaaattttaaaaaaaaaaagagaaatgttacatacattcaaatcaaaggacaatatggaggttgtggttgctgatgtgcagtgttgatggtggcagaggtcatgatggagcttttgcacgatggcggaagctgaagttgtgtgcgttaaggactctatggctgaaacatgaagaagacttgtgtggagggcatattg

SEQ ID NO: 218064 - DNA, 3369 bp, Cannabis indica
aggatcttgtgatccaaaagaaagccaactttttgttcttatgtgaaatgttagccaggagagaagtgattgagaaggtacgtgtttctatcggttttgaaggggctatttcggttgaccctttgggaaaaagtggtggtgttgctcttttctggaggtttgaagaagaggttcgggtgattgagttcggtagagagtttattgatgttattgtgactgatggtgtttatggacaatggagattaagaggcttatatggagaaccaaaaagacatttaaggagaaagacttgggacttattaactgaactgaaaaataagcaaagtctgccttggtgtataatcggcgatcttaataacatcacttcaagtgaggataaacgtgggggcattccatatccaaactggcttgttgatgggtttaatgatgttttgtctgaatgtgggcttcatgatttagaactgtttgggcatccgtatacctgggagcatcggcgtggaactatcgactgggtggaggtgcgtattgatcgagccttggcgagtcaaccatggttagatctttccccttctgctaaacttttaaatttaaaagtttccacctctaatcattgcgctatacatttaatccctgttaatcaagtcgtggttgctcgaaacatgaatttttcgttttgaaaactcatggttaaatgaacccgtttgtttgaagattattgctgataactggtttttgcataatagtaatggtgttcttgagaaattaaaagcttgtggggaggctcttaagatttgggggaaagattttactggtaacttttctcagcgtataaaggaatgcaagaaagagattcgccattggaagaaagggagtgactcagttgcggttgaaaaccatcagcaggcagttaataatttgaataatattctgctccaaaaagaaattttttggaagcaaaggagtaagcaactttggcttagagaaggggatagtaattctaagtatttccatgctactgctacaactaggaggcatcgaaatgtaatccaaaggctgaaagttgatactggtgagtgggtagattggcaaggtggactctcgcaagttgttgtcgattactttactggtttgttctctccttctggacttagttttgctgaggttgttgactgtgttcccaatacagtctcggctgctcaaaataatatgcttcttgagccgattgtggatgaggagataaaaagagccttgtttcagatgcatccggaaaaatctcctgcacctgatggcatgactctgggcttttaccagaaatgttggagcacggtgagtcatgatattgtgacttttgtgaagaaatttttcatggatggcttttttcctaaggaattaaataacacaaacattgtgcttattccaaaaaagaaacaacctgaggtaatgaccaatcttcgtcctatttctttatgcaatgtgttgtataagatcatatctaaggttttggctaatcgtttgaaaggagtattgcccaatgttatttctgataatcaaagtgcgtttattccgggaagattgatttctgataatgtgatggtatcttttgaaataatgcactacttgaaacgaaaaagggttgggaaggaaggctatatggcggtcaaacttgatatgagtaaagcatatgactgggtggaatgggcttttattgagtcgctcttgattcgaatggggtttgacaaaagggtgggggagtggattatgttctgtgtctctaccgttacctataatgtcacacatggtggtcatactatgggtccaatttgtcctggtaaaggcttgcgccaaggagaccctctatctccttatctttttcttatttgtgccgagggtttttcggctctcttgaaaaagtatgaaagacatcaatggttaactcggtgtaaagttgctagtggtgctccaagagtttctcatatgcttttcgcagatgatagctatgtgtattgcaaggctaatggtagggaagctcaaagagtgatgcagctttttcaaatttatgagttggggcctggccaaaaggtgaattttaacaattcctgtttttttcaacaagaatacaagtgatgaggttcggagtcaagtttgtacacttatgggactagccgaggctaatgaggatagtttatatttgggcctaccatgtatcatgggtaggaaaaagaatgctattcttgggtttcttaaggagaaaatgaggaagcgtatttttagttgggagactagattcttgtctaaagcagataaggaagttttgattaagtcggttgctcaagctcttccaagctatgctatgagtgtgttcttgttgaccaaggagatttgtgctagtcttgaaggtatgatggcaaagttttggtggaaagcccaatctaactcatcaagtaagggtgtgagttggtttagttggaagcgactttgtcaacataagcatgttggtgggttaggatttcgaaaccttcgtgattacaatctatcttttttgggcaaacaaggttggcggctgctcactaaaaaagatacgttggtggaaagaatttataaggctcggtattacccaaatggctctttcttacaagctgaacttggacaaaatccaagctttatttggcgtagtatttgggaagctcaagatctggttagaaagggtgcaaggcgttcgattggtaatggttcaactgttagtgttctccttgatccgtggttgcctatggatagtaatcctttcattgtctcggatcatccaggcttagttgatacaattgtttctagtctgatggtggtgggtgagaaatcttgggacatggagattcttattgatatgtttgtggagagggataaaaatttgattttgagtatacagctaagtaactcaactgaagaagattcatggtattggtacatggaacactcaggtctttatacggtcaagagtgcataccagttcttgcaatcggctgctggcagttggttacatttggatgaggaaaactgctagaagaaattatggacgctagaagttcctccaaaagttcatcacttcttgtggagggcttgttcgggttgccttcccactaaagttcagcttagtacaaagcatgtacatgtggatttactttgtccattttgtaatgctgagaatgaaatgatttttcacattcttgttgattgcagacttgctaaaagttgcttgaacctctctgctgcagcgtcttttcctggtttatttcaggaattcagcagctgattttttgcgattttggaagggggatgtagtgacattatcctagatgttgcaatgataagctggag

SEQ ID NO: 218065 - DNA, 7823 bp, Cannabis indica
gtcaagttaatttgtaatttttttttacacattttgtatcggttgttcaaaatatgtaatgtaagccgaaaactgaattgattttaattttttatcacctgtgcttccgcgccaattttatatggtgatttgtggttttgtaacagggatggactctttttgagatactaagatatgctccccaacacaactggtctgcttatgaggaagctcttaaaacaaacccagttttagccaaaatgatgattagtggagtggtgtattcgataggagattggatagcacaggtttttattatgtgttgagtttgagcatgaaagttcagcagtttttaagttcttatggagtatttacgaacttaaattttgtgtatttgcagtgttttgaaggaaaacctctatttgagtttgaccgcacacgtatgttcagatcgggtcttgttggttttactttgcatggttccctatctcactattattaccagttctgtgaggtgattaagcttatattgatttgcacccttcaattactttccccgctttttgttccttattttcttaacataatagatcgacttcattcaagactatttcatattgtttcaggaacttattccttttcaagactggtgggtggttcctgtcaaagtactctttgatcaaacagcatgggcggcactttggaacagcatttatttcatagtcttggggattttgcggtttgagtctccagtcactatatttaaggaatggaaggcgacattcattcccatgttgactgtaagataaacttgtgtccatttttttttattgaatatatattattgccaggaatttctttgacattcccagacctctttaaaccaagccatacccttcaaacttcaaccgaatataggttaacctagtaatctagaatctcatgtaccttaccattacgactaaccaaaatagagagggaatgattagccctagctctgatttgtctaccaaagaaaaaggtccagataagttaatcttgtgagaagctagttaataattgtagtaattgtacagttgtcattcttttattattctttatgaaatgtgtcttagttggctgagttgtatttttttagctgttgatgtggaaattgttttgagtatatccctaggagatctgttagagtggagaaaattagtaagagttttgactcaatcctctcgaaagattggaataggagagaacaaacttcttgaaagcttgtgatttgtaaccttgtccatcaattcaataaagtttctgtgaggaatttcagttaattgtttgtcaaattgaagaaataaattcttactaagaaaaagcttatcagggaacttcattgttgtttcttcttttccaatggtttataaagttttctcttctaatagtctcctagttccagagaacaccgctaatacacaaccgaggcttgatctgcttatgtcaaaataatatttggttttacttggcatgtagtcattgcccatagtttgggttgagcttgtgtttaccaaaaacaaagggaaacaagaacatttagttaaggtttttacatgaatatgtgtatgttggaacttttgcgtgtataacattttatatacatattttaattacgtttatgtttgttcaattgatttttgcaggcagggtggaagctttggccatttgctcatctaattacctacggtgtgatccctgtggaacagaggcttctttgggtggactgtgtggagctaatttgggtgacaatactttcaacgtaagtatccatatgatttattttttactacctatattccgcgaaattcttagaatttttagtagttataggtaccatgtgtggtctacagaaaatatagttgtacgatgaaaacacatcttgttttgggttaaaatctgacacttacgaacatattttctattgctagttattcaaatgagaaatcagaagcaagaatagctgaggcaccagtggaagctgattccaattcctcaagcgtaactattaatgaggtatgtgttagcaacttttgcacgcctacttctgataagctagattttaattatacttctgatatgctgcaaatttttattcttccctgttcatcaggagtaaaaggaaattcaggagcaagaacattaaaagtatataacgagaagttgctcaactggatgctgagaatgaaaatcgcttcacaacagatcacgaccgagaacacataatgattcagatcaagacatgacaggttggttatttatataatggacataaatggagaactgcttgtgtatgataggtgactctgtccatagattgcttgtgtacattgggtgccttgtctatctttggatcaatatgtatctacattcttcgtatataatttcatatagatcgcaaattagctgtaaaataacatgatactgagtcctgacatgagaacttggatctctccctctctctctctttctccaggatacctctcaaatttttgggtatactctgaaacggtgacaatcaaaatcaaccaagtttgttgtgtataccctgtagccttttagcatgagaaagcatacaccaattaacaaatatttatccaacatccatccaacaatttttgctgataatctcaaaattttggtttaggacaggcctgaaagtctttgaagtcaaatatttcgatggaatttatgcttgatatgctaatccttcattgaaaacaaatatggagaaaacaagttgataccatagaattacattttgttttgagattaaactatttaattactactttttagcacaagtacaaattgtatattacttgttgaaaacaaaaaataataataaaataaagaatcttttcactgataagctattaagcttatttgaagtctcatagaagtagaaggggatcttcactgaaatagcagccattactttgtattcaagatgatctgaaattgaggcaaataaattaagaaagggctctttaatttatgaagattcaatcatatggcatccgaagttcgtataattttctttgatgcccacatacataccacaattcaaagctatattccaaattcgaaagaaagcattttatgagctacagtcggcaatcataacttcgatttttcgttatggtgactgtgtagtgtaggtgagtcctcagcctccccttaaagatccaaggacatgtatgaattttattaatgctatgtaactagggatgtatatttccactatgggatggattgtattcttaatggggtgggaattctccgtctaaatagggaacgggacggagacaagcattattttttgtcctcaaatgttaaactgtgcggggacggggattgcactccctatcttgatggggactcgtttagtatttattttatatttttaataatattttataatttgtaatttatgtttgttttatgatttttaagttgtgttttgaataataattagtttattgaataataattcatatgtaatattttaatttttatgtagtttaatattcttatatatttaaattttattataaattttatttttattatgagattctccaccttatctcgatagaaaataagctggatgtgaattaaaattcttaatgtggatgaagatgggggagtactcaccgctaatttctgccccgtgtgcatctctataacacaacaaatttctctagaatatgagacttgctatttcctcatgtacttccgctagcaattgtgtacttgtcctatgattggtacagaagaaaaatggaagaaaaaaaaatgttaagagagaaaagtagaaagaatgtaaaaatgaatgtatttggtatgagagaaaagtggatagaagagaaatatatagagaaaaaataagaatgggatcaccaaaatttatccataaaaaagtagagagaaaacgaaagacagtaaatttattaagttaccctcactaataattattaaaatttaaactatataaataaaatagtaattttctctcattatttaccaaataacataaaagaatttttttttccatattttctttccttccaaatttttctatccctctcaatttctttgcttcttaacaaacatagggttagtgattatcgaatcgtaggtgatccttacacgcataaatagcattatgcattctaaatacttatatcctaccatgtagatttatatatatatcgaaatattaattctagaaagtctaattctggctatctacatttctagggggagcggtatggtgataataaaaactacaaaagtgtgttgttttttatctaccattgagacagaattcattgcagctatagaaacttgcaaaaaaatgttatgaataaagaaatttcaacaagtgttaggaaataataacaaaagtacataatatattgcgacaaccaaattgcagttcactttagtaagaattcaagttttcgttggaggttaaatcacattgttgtacgatatcactggatacatgacaatttagagtccaagcaattacaagttgaaaagattcaacagatgacaacaattcgaatattgttgatgctgaaaaatagtcaatactagcttgctagattggggagatgaatgatgagtttaagtaaatatatagagagacacaaaatttatagtagttcactctctatgtcgcgatggtaatagagctacgtctacttataattttatttttcacgagaattacaagacaattgactaaggacagagctcaaatttctagagagataaagtagagagagatgctttgaccttatggagactttttagaatgtgaaaaatgagctagtgaagctctccttttgtaggggaggaggtttaaaataataataataaatatgaaaaaatcactttgggttgatcttggccattgatgatgatctaatggtaaaaattgactcttgatgaaaattatcaatttcagagcttgaatctcatccgttggatcgtttttcgggtaatttgcaaaaagatcacacttatcttgggcatgatttttggactcaaaatattaagaattgcaatatgggtgtgagacataacttgaaagagctttgaaggagctttaaaataaaagtttaatcgcgtcaatcaaatcaatattgagggagttatgactgttttattgaaggttgttcagcacccaacacccaggttgacatgagtaagtgaaaacacgtcccaaacttgtattttttgatatctaagtgatatgttgacattacttagtacatttctttgttttggtgaagttgttcaccagatatcgaagatgtcacttattggtgaaatcaggttgactcaaaactttctgatttcgccaatattccaccttgttgtaggggtgaaatatcaaagtgtgaatttgacttgtcacaagtcgtagctcttgtttactacaaaaaaatagttagatgctcaagacaaaattagattctaataggtagaacccaacgcaccaggccatacgtgcttcttgggtggcttctcggggctggttttgattcttcttaggcattcgagattgcaagcgaggtctcctaccccatgtattttatcaaaataagtaggatttccggagcaacttttgttggaacttattttaccatgttctagatttactaacatgtatgtttgattataatctataaactaatatcctaaacatgaatttcctaaaataatgaaataaacacatataaagttgcagaaaaccttacattcgtggcagcagaatattatggctctatctgttcaaatctctaatcctcgttcctttcaatcgcagagtattacaaagatctgaacctcgatctcctttagtgatggaattattcacaatcttccacactatgattgagtatcgacttgaattgtgtgggcaatgtactcttcattatagggatctcggaattatgaagaaggaagagagagaatattcaaattctaaagataagctctttttctaacaaagtagtctgatgtaggttatcaggttatgaacctatcattatctatttataggattctttctaaggttaggatttaaattatatagaattaaaaaagataaaataatggcttaaaattgaccttaagtggccggccatgtatgtggaccccacaagttttaatttttccatttgtttaataatttttcttaatggcatattttaattttaatcctagaaatgtcaaatctattttttttaataattataattaattatcaaataaaattaccatttaacttatttattagttagaccttacatagtctcttaattaacaaataaacactaaatcctcttttcttctcaattaagcccttgcttaataaaaattcataaacaagacatagtctagtttagaattctaattggttaattaaaaccaattaattgagtctacaaaccaatattatttcaactagtgcgggaccatgggcctatataatcaagctcccaataagtagttctagaatttatcgagtaaattctatatcttattaattcctcctaactctactatagattcaaaattgtactcctaattacatagaacgctctatatatttcaaatatagatactctattcattatccattattgtaatccaaataatcaaagatcctctatagatgatttacatcgagtaaggataaatataccgttctacccctcaatgtattttatccttaaaatacttagcttcctataaatgatatttcaataaactaatataattactgaaataagagctcttccatttatctctgctaagccaagctcaaagaaaatcatcatttcacttctatgtcattatagaagctatagattttgtatctatgattagcgctcccactcaattgtactaccatgttcccaagatgtaagtatcaagaagatctatttgctcaactttaatgaacaagtcaacgaaatcaaataatacagttaagctagaacctaaccatctcaagattaggatctattgatctaagatcaactaagtgatattgacttagaaagatataatagtaagttttgttgggttttatgccctaaataaaactccatttcaatgtaatccattttattcaacatcaataaagaaacagaagtatttttcattcatttgtgtatgttttggttcatcttatcaattgcttgtctatttgatttataaattcatctgaaacccttttcacatacttgatcctgtttattgtgttgtcaacacattggaaagtaaacatgactatgtgaataaagtttcctagatttatcagacacagggttttactgatatgataatctacaacagagtttacttgcatttggagaaatgctatgttctttccagagcattggttaaagtaaagctcaggttggatgcatggagtatgcatcggaagggaccgatattgaactttgacttagatttattaaacttaccgtaatatctattcaagtcaatatcgcctagttgatcctagatcaaatgatcttaatcctgttatgattaggctcaatctcaagaggctattcgtgttctttgatttgttagttaagcctacttttgggtcagggtgatacgtacattttgggaacacggtagtgcaattgagtgggagcgctaacataaacatggaatctatagcttctatctggcgaatagtaagtaaaggatgatctccttcgagcttgaccaaacgaaaataaatggtggagtactcatttcacataagc

SEQ ID NO: 218066 - DNA, 9588 bp, Cannabis indica
gaaaggtagtttcaagttacatctaatatattaattttttaattaagtataaccatccaataatcaagattaatgtaacaatcgtagttacatatttaacgtaactattaactaatcacccgtatatatataattaaaattatttcccttcttaaagttgcttttggttgcaaaatttctcccaaaactataaaaatcgttgcaaatcgttttatagaaacttgacaatttaataatagtaattcaaatgacacaattcttcaataacagtgacaatattttgatgtatgtaaaataattatatgttaatttcttaacaggtcacatttattcttttagacatagcggtgagatttggcacttttaaagtttaacatgatgtgaaaaattctaaatatacaatcaagtagtgataataatttaaacaacattcttgaagtattttatagaagaatgagaaaaaattatctctattcatagaatagtaaaaaaatcaaatgaatctttgagagtttgaattttatgtagtatgcattattaaaattaaaaaaaaatataataaatacgattttaatttactttaatttataattattattgtcggataaatttaaacaatataaaaaatatgtgagtattcaaagatcctcaaaaataaacatgtgagtactcacttagaatatcaaatacttcatagaatatagaataacatatatgggagtatgtaagattgtaataggatagacacagaaattatagtggttcagtagaagttttgaactcagcctgtctagttcacttttgaaaaaggtttcatctttgtaattttaatataatttgcacatccttctttgaatggagaagattcaccgatttatagagagtaggtaaaggttataataattcgatcataatgagactgctacaatttacaaccacaattggtataatgattataaaataactataacacttgttttaatgatacttgaatatgcttgacggtttattttcgttgattgatgtattcttgccttttcttttaatatcgtgtgtcttcctcgatactacaagaacacttttacctaatattgcaagatcctttaaataccacaagttttcctcgcaaatcccgtctcgcgtcgtgggagaggggaatttaatccaaataacaatttctaacatggttttacaagtgaactttttaagatttaataataagataaaacaaatcgaaaaaagagcacgatgaagatgtaaaatgcttcatgtttaggactcaatattcaccttatattacacactaaagaatacttataaacatgtcttgaaacaattgaaaaggaagaaaatgctaactaaaatattcaatctcacatgcatctctcaaatagtttgtatccctaaaattacatttggaagaagaatgaacataactacaacatcaacaggggaaatcaccaacattcagtaagagaggggaaagaggagacaaaaagaatggatcagccatattttctagcagccaaaatctccaatccaagcatttagcaaggaaatgctatgggaaatacatgtgctgaaagagagttcaaagctatggaccaatatggcttcagaacagaagagcagaaaggagcatagctaagctcaacagatatgaccctggagcaattttaggctgtgcattgcgagatactggtgccgctgctgtagagttcggtgcagaaattgaactggttggtgagacaggaggcaacggcggctctgacacatcatccaatgtcaagactgggtttggtgcctcagatggtggcatataaggagcagtgatgagttccataagactgccaggctcaacggggctcatgtaagcaggtgtttcctttagacccaaacatcggtttcctgcaatattttcaagcaccatctgttagctctattcttcccaaatactaaccaaaaagaatgatattataattttccattcttctatttattttatttttttcctgctaacctttatttgtatagaaaacagcagtagttacttttacttttccccgaattttctctaatctatgataattttgcctttgatattgaattaaggcaaaatggttacagagattcaggtataaaaagatttaaagaaagaataaataaataaactgactagcataaaggctgctagtcaaaagagcattacacaatacacatggatttgcaatcaatcaaataatggaaagaggaaatataaattagcattgaactatgtacttacttttgtatctagcagctgttttaggaaagtcggtgattacaccatcaacattggctcccgtgacataggaatttatttcgacagttgcatcagaaaagaagtcccatgcttgagatacaaactcattgctgaaggtttcaacgtaaacaggaatttttgtaatctgaagcttactcacaacatctgtagaaccagtcaaaaataacaaattatctgggaatacagaggccttcttaacaaccaccgagtgagcaaatgtcttgatgtccttcaaggaatcatcatcaagacttcggatttcctcttcaatcttgtatacaagtttataattcttgttcccttgaaactttgttagaacagaactattagtagactgaatcataacctttaaagctgtttgattgttgaagccagctttgctcagggctttagtcactgcatcagtcacacttaagccctgctcttctgcaagataggccgcatgctgaaagaaagtaatgacaaaaacagaaaaaaaacattgtcaggaaatttaataatctttcttgttaaataatattttcatctcccatttttattttccattatgtttaaatatgctttagaaaaccattcatcctgaaaactcatcagcatagcccaaaaaactcacgtctatgctgatcaagatgccagtaagagagcttgatttctttgtcaagtctagaaaatcagacaatgacattaattttccatcattcatgcttcttggattccggaaaagtgtgtacgatgaataggggcttgatataacagctacataaaaagaaaataaattagtacagaagtttcagataatttcttaagatgagatcttgtccatcaattactgtcaaaaaatactacagcaatatactacataaatatttaagaataaaataggaagacccaacttaagcaaatatctagcaaaccctgtcctactgatatgaatactccaactgaagaaaacaaacattttcaggtgacttcagtgataaacaaaacgagtatcttaaatgaattccaccagtaaaatgattacaaagacgtaaagttatattgcctggagtcgcttttaaaatcacactatttgtctcccataatccttaacatgaatattaaaagttgggaattactcaccaaaaataaaattacaaaaacaccacagttaaatgagtaagcacatgagaataattttgaacttacgttttaatgtttgaatttcatcccatgtcatgttgaatgcaaatattccagtgctagccataatctgtggaatgcttattatacggttgctgaaatcagattgagccgcatctgtgctatctattaaatttatagtgcttaagcaaaatggtatcccatcctttgacatctggactggacaatcaatcacatctgcaccatcatcaattgccttggaataagccttgtcagtacaaccaggatagtctccactggccccacattttgagataaccaaaggcttttctgaagcaagaggcaaaaaacaggttagaaatgaaataaaaaatgacaaatcagaatttaacaagaaacaaatacagtgctataccttgttctttggcatttttgcctatgtgagcaaagcaatctgcagtgttattgagaagtgagcatcttgagataaaaaagaaaaaaaatatcatgttccatagataaacaaaataaggtttaaacctaatagttttctgatattcctcccattatggaataggtaaccattaaacttcatatctctagtcaaactataccaaatttcttacctcctacaaccagccatgaagagaatttatcacttggtaagccaatattcttatgatagagaaaaataaactacctatggctgccgatggagtaattggaaaatcagttagcacaccatcaacactgaattcgccattgtcaatgaagttcaggtactcagctactggatcataactatagttgtagcttagaggaaagtcattcacaaactctgatgcatatatttccaaccctgctttgtgagcatccaagacaatagaagtatgtggttccaaataagattttgcatccatgggccatatgtaatctttagggaccataattccagaggcaaatgtcttgatttttgtaagatccttcaagagagaaccataggtctggttcattgaaggctcaatctcatcttttcctagaaaccgaaataccagctttgtgacctttgtattgagtcttgcttcaatactcttcaggaaacccacctctggcgatgagatataattgatgtatactcctttagataaagagagtacatagtttctcatacttaaattatgttgcgtgaagaatgcatcgtgctgaaaaaacagaaaacatgggacggttcaaactgataaggaaaccagattgaatatatttatatgtatagatatgcttaaagttgacaaatcaaatatgctgaaaagctggttgaaataagccaacatgcgttgcctaacgtacctgaatattcagccataagcctcgtggtttcaattgtttagccatctcatcaactgtgagaattgaaaataaatttccatcgaacttattggtgcgagaatagactccttgacggactgcaaagataacacaacaaaagcataagttagaagagtttcacaaagacccacaatcaacaaatagaaactagaccattcaatcgagttgtgctatccaagagtaatggagcaattacaataaaataaaatcttttatcgaaaaaaaaataagacctcaactacaacaaaagcatccattatcaatgtgaaggcaaagagttagacggtgtagcaatattaattataaactgatcgtaatatcaggaaattttaaatggtttgaatggaagaaattagaaaaaataaatagcaataataattacaataatctcaattctcaaccagtgagatggtgtggggaataaaatcttaataaagatctaaattctccctttgcaacataatgattccagattttcattttcttataaagaaataggaaagaaaatgacatttttaataaagcaatccaaatgaaacttcttttgtgtagcatctaatattcaaatataaatgagtggatacaaacatattatcatgaccgccaccggcaaacatatcaaaaattgcgattataagcatggaaatatagttatgaagatcaccacttaaaattacttttccatattaaatcccatttgcaggtttggtacactttcgagttttgtgctttatttttctcctttttctcttcaaatcttagaacacatgccaagttcacagagttcatctgtgacttttgctaatgatacgacatgcaaattatatagggttagactagcataagatacaattcaacaatagtttatgcttactgtagacatttgctagctctttgagagtgaagtccaccgaaaaccatcctctggtaggcttcccatcaatgacatattctttatccctcttattgaagccatctgaaatatcagtactattgtctaatttgacatctgaagcacaaattccagcagcatcttttgtgagttgcacatcacaccataagacggcatcaggtaagctagtaatcaatgctaaactgtaagcagcatagctggaatcaggaaatatcccagaaaacccgccacgggctatgaccagaggtgatttccctaaaaataaaataagatcaaaggtgagctcatgaaacaaaatatcacaaagaaacaagtaccaaaacatgcagatgaaccttaaattgatcagctacgttgcacactttcttccttagttttctcaccaccaaaaaaaaaaaacaaacccggctgccgaccaaaacagcaaaataacaaattcagctacagatttcaatcagcccaaaaggtttgaaatatttaaacccaccaaaaataagttgctgtcttctgcagatcaaccaaatcagtacagctcagaaatgtcacttcaaacatgcactatttccagctctcagggcaagacgaaagaaattcacaagaaatatctccatcaagccatggaaaatgaaaaccgggaaattaaaatgcatgaagaaatatcaaacactcccaatttttcattctattatcactccagagctaaataaaccaattctaatgaaaaccgcactcggtcgacacagcacaacagcttgtgattgccttataaaacgtgaaaaccccaaaaaccagaactctatttcaactttccactggtttctcagcattcaaacaaagcttctcatcaaagcacaatcaatccttgaagtacagcatataacataaataaaacaaagaaagcacaaaatacagagagctatgaaaatacaataccgctaagtgtttgccatggacttttggaaccagatccctgagcagagaccgaagctacaaccaagctaaaaaaaagagtaagtgaaactagagcgcgtgagttacacatcgccggagaatagagctcgagaatgaaccacttgagcttctgctactcccgacgatctcttccgtccaagttttaggtttctcgtaaaatgtgtgagatttgcttcagctagcagagtgacaaaaatctagagagagaaagagtggaggagagagttattggagcttagctctgaacctctcagcctggcatttccgaatttatatttatattattcaaaatcaaaattaaaaataactttgtgctcgtgctgtttttttttttttttcatatacataaataaagtttagtgtttattaactaataagctactagataagtgtgttttcgtaaatattagtgttaattagtaagtacgcgtttgcgtttcccacgtaattttataatgagccgagccgagacgagctaagtagagtcaattttgtcaatccgcttgagcgagctgattgagtaacagtccacgaagctctttgtcagaaaacgacaaaacaaatgagtaagagagtgatttgaaggtttacatgtaaggtccctaaataaataagttttggcaaattcttacttaaaattcaatttttttgacaaattagtcttgaaatttttaattttttcacaacaataagttctcacttttaaataatagtgttttttttattttatttttgtgctaattgtaaatatttattttttaaatttttttaaaaatacaatatgtatgtttaacaatctaaaaacataaacaacacaaaaaaatttatggaggttcaatcccttagttcgataatagtctactccttttttattttattatttatgaaagaatattaagatcacaagatccaactaagtgaatttcttaatatctctcaaaaaagttacaagtatattgcaaagtgttttttctcttgaaagtgcgtaaaaagaaggtcactccaatagtgaattggcctcactatttataggggagaaggaatacatttagtcctgaaataataagagaaagatcggtgtgtatttgaatatgaatctcaagattttcttatgtaattatgtaaatcacatgaaagtaaggatttgaaattggtcctattattgtggaaactatttgaggaaaataccctaaaatcgtgttatgcaagtggcttgcattgtttggtgcgaggtgagatcctgagcctattcgggtattttggcatcatctgtcctggtcggtacaaattggtattatattctacccagggttgaatttcgttgccacgtgtcagcttgcaaagtgccacgttattagtacaaagtttgggataaaatttgcctccaagtctacgtgggaacttttgctcgtatggggacttcctaggctttcacattgcacagctaggtaacacgcatttgtatccacgtgtgtgcatggatatgacgacagttctgcccgaggtgtgcaaatctctccctgtctctacaattctttacatcaattgcttttccttggaaaccgcgccttaaagatcgtaaactgactgttacacaaattcctataatgattaacctttcacttttggggtaaaacatgatattttaaatttgatgaccattatacacctcaatgaccccataaataggatcaaaaacacctattgcaattttttaaccatttaaagatttttagagtaaggatacaataatctgccttattcatctttgatcagaccgttttcactaagaagttttaaccaaccagcaaaagagtgagtaagttactcccccttacacttttataattccttgtttattactcccccttacacttttataattccttgtttattgctctatgaaccatactaaaatgcatgcttgcttttattcactataagaattcagattcttgaatttagttgattgaaacaaacccaaatgccaactattagggttgattcgatccgtgttgagtctttatgtgtgtattttcttcatctcgctctcttattccactttttgaggtttttaggggttttttctttttattttgggtttctagaaccctggaaaatctttcccaaattatatcgaggagatgggtttctttaagttagatctctttcatttctctggttagagtattggaatgttttttcttgaaagtgcatttctatgctattcagtgactcacctttttgtctttcttcttttgtagatgaacccaattgaattatggggaggtgataaccgagtagacgacgacctactctaattatattcaaagataacccaacactctctacgatttgcccttgtcttcaagtgaaccatctctttctttggattcttccaagtgggaagtactaagtgactcccagaggcctcagccccaactgttgattttatggtaataaatcaggtatccaacaatataatcataattatcattgtaccatagctccaaggatcaccacatatatatacattaaatctgaaatatagattacatgaaagaaagaaatatcccttgatgactatcagggtattcttgaaacttctcgtaatattaatccaataaatctcacaccgtagtcttccaaattgatccaccacacacaaggagtagtgtgggatactaggataaagtatctaatttgttcttcttgcattctcaatataggagcaagaattgttcttgagagaaaaacaattttccttctctctagttctatttgttgggctttataccctaaataaaactctattttaatgtaatctctatcatttaaatatcaataaaga

SEQ ID NO: 218067 - DNA, 3255 bp, Cannabis indica
atgaaaaaaaaaaaaaaaatagtgtaacagtaaaagtataaaaaatgacaatttgtttataaaatatttttataagatccactttattttttctttttatttcttttaattgggcagcttcttttatatggtccaagcccacaaattgtggctgacttttatttggtccaagcccacaaattgtgacggacccagcaatataaacaatatatatattttagagattatttcataaatacacacaaataattaaaaattacaaacatacggttttatagaattttaaatatttttacgattttttaattttatttacagaatatatgatatttttatgttgtactcttgttactttattgttgatttttttgtactctgtatgttattttttgttgttgttttaatgttatttagatgttattttcatgttactctagttttcttgttattttagtattgtttttattaaaaattataaaaatgtaagaaaaaaattttaaacgtaaaaatgtaattggtagcttatgtaattactcctatattttaaaataataatttattataacacagcaagttgtcccttggcaataaaatctagtggactatatttacggtgacaattattatgtaagtatattatgaagtggggttaacttttttgataaattaaatgtagggtaaactgtgtagcccatattattgtgtatttctaataattagataatttaatgaaagagtattgagttactactgcatatggctagcaagttgggaagcaaaggattttttattttattttaaataaagtcgtaattaatttgtgtaatgaatgaggaaacattaaagtaggaatggtgcaactttaatgctagcttgggaagataagaatgagattgatatagatgtatcacattcacatccatatatatcgatacatatttatataaagagatgtttatatataaaaatatatatatatatttgttggagtggacttatataatatatatatacaatacatacataagaaaggtatggttggtaccagaaaatattgtgtggtttacgtatatattggccccacaccatataggaaatagcctcttcttcttactatcagtctatcatcgaactcaaaacacgaaaaagctgttttctgctatagcttatgctgccacaaatatcagacctctctctctatttgtatcaatcataaagcaatagattgctctatgatttatttatttatttatttatttatttatttatttgaaataggattgctctatgatttggtcttcgtttttctctcatttatgtctagaacgtactgttttgctcttttcaatctatgtctcttaccccaacgtcattgactacttctgtccctttgacatttcatttctctcatttgcagatgtcaaataggagaaaattataacaaaaggtgtagaattaggtcaactaaactttaaacaataaaataattaacagtgataaaatttacgaatcaaaaacaataatcaaagaaaacataaataaatagagtaaaccaaaaaataagtaaggcccaaaataaagaaatcaatactaagatatatattggatcatgtacgatagatcgatgtgatctatatgactctactccagtttctagaacaccaccaaattctctctattgattgagtaagaataggtacaatatagtcgagatcgattctttgatgagttctctcaatgtgtttcaacactcacactcttacctaagaattttctttatctatagaagattcttcttacaaaactcaaactcaatctctctcttttctctatacctctctctctctacctcttaatattttctctctctcaatctcaatctgatcgatgttttgaaatgacaagtgaaggtagtctaggctttaggatcaagatcctaagtcggtggcgacaagaattgaggttgttaagttagttaagcaataactaacttaaccaactctcctttaagtaaggtctccacatcaacataagtagaagtacatccggaagcgagtatgagagcttccggagtcacgtttcaaggcactcgctaggaccttccagataggaaaaatccagctagagatgactatccaagactaccttccaggaggaatagctagccatccagaactcctttccagaggaggactagctttcctgaagacccttcctaaaagaacaagaaagccttccaggacttgaatccgcgagtcaacaactttccaagaataatagtaacttttggagacatttttatttggaagaactatacgaagaattccacctagttacttcaaattaaaagaatcatgatgaagaaagaattcagccatcatggttggtcttctaggaatctttgtatactaacttttgagattgatcaagttcaagcaatgcttatgttctaaccttaggaaaattatcttctgttctaaccttctctaaatcaactagcccttcttctatcttttctctaatttagtagaggcttatatctatatgtttgctattttcataataagctgggttcttacaattatggatggatgactggctatccgaatacacagtcactccccctttaatttgttttaattcaaaaagaattctccaaagccatagcgcttccttgaatgcttccgtagtagccatgaattctgcttccgtggtggaaagagcaaccacggactgtaattgggccttccagcttatacagttacaatttgtgaagaaaatgtaggaagtggttgattttctagtatctttgttcgaggcatagtcagcatccatgaacctttttaactccaattctcattttgctttctcgtaggtcagaccacaatcccaggttcccttcaagtaccttaataaccatttgagggccttctaatgttcaatgcccgaatcggacaagaaccgacataggatgcttagagcatgagctatatcccatctggtgctcaccattatatacattaaacatcctaagactacaacataggttacattcttcatttcctctttctctttcaaattgttaggacattgtttcttctacaaaccgaattatccccctaatggaatggataaagtctttgtatcttccatattaaacttctaaataaccttcttgatatatttggactgcttcaagctaatggtcccttccttccagttcctagacacctcaataccaagtatcttttgaac

SEQ ID NO: 218068 - DNA, 3870 bp, Cannabis indica
gagacaaaagggatatatattaaaaaaaaagagagagaaaacaaacacaacaacatttaaaaagcctgctgcaactcaagactgggcgccactagacgggttggaggtttctactccagataaccgctccaccgtctcccgataaaggtcatgaacgaccctcatacctcgaatgaggtgagtctgttgagcgtaattagcctccagcaactaattcacgtttttcaagccttcaatctaaagcttggcctcggtaagctcaactagaaaggtgtctttagtgtggtgcaagtcacggttgttcgccttgacttgctctagttttatcaccagcgtgctggcctccttagcagtcttctcagctagcaaagccacctgtcgtaatgagccaaaatgaaagagccacgtatcagaacaggggtcagagcataacaaaaaaaaaggagagaaaaagaaagtctcttaaaaaattttccccaaccgcctgttgcttggcagaatgggccagtgtgaagatgtccacgctactgcaggacgcttaagtctccataggcagctctgaagcgttcccgaccacttaatccaaaatttcaatggaaaagagggtggcctctctccctaccttgaaaaccatgtgcttttctaagccctctacttccacggttggcctagcagagggtagggtgtgcaggccatccaaaattttagcctcttgcactaccaagagcagcagcccgtctacgaactagcaccttctttgcctccaagcgctcctttagggccttgttcacttctctctccttctgcatattaagaggattgaaaggaatggttttccttgggaaagtgaacccaacggagggtatttttagaatggcagaagggtagtatgactgaggatggcccagcctcaatggtggatcatgacgctggggtgggcccctatttcaaaagtggttgcctcaggcatttgccttttcctaccagcaacattttcgcataccactttagaggaattggtcctttccatcgtagacctgatatacctgccagaaattggtacaaggtaaaatgggtcagtacgacacaagaccctagtactctcactccccatgataagggcaccgtgcatcaatatttccagagcaaacaatcgcacacaacatgcactttacaactcccaaagaactctacctcaagtaagtgttgataagggaaacttatcggttgttaaggagaaatgaggtgggtgatcctggtgttgtgtcttggtcgatgcaatgcgtgcctaagaatagagttgctagaacgatcttgcaagacagaggaaaagatggaaccaaatgctagaactctggtacgacagttagtaaaaaatgtaaagtgtgaaatggctgttgaaagtatttattaggccccaggaagaggtaccttccacgagaagcgaacggttagactcattcacctaaaggacgtctgatggttgaatgagtgggaagctaagaaggtgtactgactcctaacggttggcttccaccgttgcatgcatcatgaaaagtgctcagcgaatggaaaacctattcaatccaatcatcgttgtttttagtatcccaccaaacacgcacccaacacgcgcataaaactcaaaagttagcatttaaagccctgacaaaataataaaggagataatacctaatgacagtgacactttcattggaacctgatgacgtgatgtaatgaatagttcatatttccgcacgtgccaggagtcactggggaaaaaatactgcaagctccctgaccatggtacgtctcaaaagcttggggggtaaatgttatctgcgttttcgtaatcgtgacatgtggattttaatcaagaaaggctaggaagtcattagtcaaccaacttcctcaattgatgttctaggaggataaaagccccaactcacgaaaagggcctccatgactaggagtcccctaactaccagtaatgcaaaagggatccgtgagctaaagtcttcccagtcttggaaaacgaagccatctactcccgtgaagagtatgagatttacctagaaggaccaaggcaatttaaagatgcgccaaattgggctacacgtttagcccgcggaggctctgcctatacgtgtcggactacagacccagtaaccaggctttttcaggtacaacgtcagaggttgtctcccacaacacgctattgtacagagcatgcatgtctcatcgtacctgaccaaatgatccaacgactagggataagtgaaattcaaaaagaaaaagccttgggacgacaggcgtaggaggtccagcctgtacgatctgacacccataaatgccatatggaaaaatgctacttaccaatccaacggtcagatttcacccaaggatgatcaatccatgccaacacatgaagagaagttgacctataaatgcccctgaaaagcataagataacgggggactttttccaaaaagagagaccttttttgtggggcaagactcatccttcaccattctgggcaaacacctctgtattaagccaaacaatattatacctaaaaaactcataaatattcctactaagcttcctcttctttgagaggaagacgggggaaaggagttctagtctattgtatttctatttgcataagcagttactgaccgttgtgcctaataaaatagactcatggaataaggatagttaacgcctgaaccacgtaaaaatctcttatttgttatcctgctatttattttgttgttcctttcttaaggtctaaacactacaaaaaaataggtcaatgtcggcaggcccggccccccgttattgatttatctcggcgggtctggcccgccgtaaatttcaatgccgagattggtggtgaatctatctcggcggtcccggcccttcgttattggggacattctcggcgggcaaagcccgccgttaattatgatgcaatctcgacagtctatgcccgtcgagataggtatatttttatcccaatttaatattttttgacacctatctcgacgggcatggcccctcgttattggtcaatatttgcagtctaaagagcccccccgagatagtgtattggtggaaaaaaataattctccctttattactgtgattgcatacaaaaacttacaattcaaatataatttgcaaaataatatttcaatactttcaatagtatgtaattcatcttttaatataataaagtattacataataatatatattgtaattagttcaaaagtttgacagtaaatataatcagtcatatatacttaataaaatttaatctaaatcatggcatatactcagttaagtaggagacccattcttcacgcacttcgttgatctcatccattgagtatgttttctgaccataacactacaatataatataattcaaaatttaaattatattataaagatacgatagcttaaacactacaatagtaatttttcatttagtgattagttatatattaatttttttatttgaaacaattataaactaattataggaatcaacattttctttgaaataaaaatcatttaaattatataacaaaattaagtacaaaatacattctaattatattataacaaaattaaagtatatattacaaaatatgctaagtccttactaataaaaactgtacacaaaataagaattgcctaaaataaagatattcaaactcatctaatatgcttactaattcataattaattgaaagatagaaaaagtatacctctagctagccagcaaaccaatcaacacttggaagaaatcgtgttctcccttcaatttagacccttgatgattaaccacaaaacctacga

SEQ ID NO: 218069 - DNA, 3654 bp, Cannabis indica
aatcaaagatagatagaactattgtatttatattatcacatagtgatattttttttattattacttttacacatgcatgaaatagcttagacatgtttggagaagctgattcagtaaggactcttaaatatccttctccaaatctaagattttttttatccgcatagatagtttgggcttcttttatacttatagtttgatctattacttatttgattgtttcattagtagatattttaatacgtgtttcattacgcgttcttataagttggcaaacttactattagtttgtttacttatgagaactgtgagtcggtgctgccgaaatttttacaaaaatgaagtaattttaagagcatagttgcactatatgtatattataaacttgaatgggataggttctttacccttttagtaatggagtgagaaggtagattaggacacttgctacattttttttgttgttattttaaatttttttagtttaattactttatagtaggagattacaaccgatagaagttggatgacatgaactgacgctcagtcgagtttcaaagttgcataaatgagtttattgtagttgttagaaacctcgtaaatcttgtcagattatctcaatgtccttgcatgtagtgtttgaatataaatttttacacacctgaaaatataagggttcatttgtttgtcagtaggatccaaccttcgtacaacccttgatttttccatggggagtctttttctcagcctactgttcaacttcctgaagatgaagaagaacaaatgtcaaatgtgtttgcggacatgttaagagaatatccggggtttaacgactctactagcactatgaattctttcaatgaacccccaattaatgaaaacaacaagtatgatgatctgttaaggagagaggatctgagttatatcctagttgcaaaaaatcagccctcaatgctctggtaaagcttatgcattgcaaagttttgaataagtggactaaccactcttttgatatgttgctctctgtcttgattgagctatttttggaggggacaaaattaccgaagttgcattatgagtcgaagatgagttacgcaatttaagtttaggttatgactcaatagatgtgtgcaagtataactgtgtcattttttggaaggagaatgacaagaaagattgttaccctatatgtggcgaatcccattggctgaaaagaaagggtgaaggtaaaaatgttcctcacaaagttgtgcagtacttcccactcacaccaagactaaaatgactttacagttcaagacatctggttgaggacatgcagtggcgttactcaaagagaccgaaagaagacaatgtgcttacgcatcctgaggatgctgaagaatggaagtggtttgaccagctttacccgtctttcttcgtcaaacctagaaatgtgagattggatttggctactaacgcttttaatctatttgcgaacatgagaaattcttatagcttgtggccggttatttgtgccccatataacatgccaccttagaagtgcataagatcaaaattgttattgttgactttattgattcaaagtccatcttctcctggaaaagatatggatgtttttatgagaccgttaattgacgaaatgaatcagttgtgggacacaggtcttcaaacccgagatgcgtacactagaattatattttcaatgtgtgtggctatgttgtggacaataaatgatttccctgcttatgctctaatgtctggttagagcatgaaaggatacatggtgtgtcccattagcaatgaacacactccttccattgacctaaatagtaaaattagatatgttggtcatagacattttctcaaaaggaatgatccaaggacgaaaaacaaaaaatacgataggaagcctgagaagagagcaccaccttctgtattgatgggagatgatattttatcccaattggagcaaatttaatattatttgcatagaaaacacaaacaatttgggggtgtcaaacagaagtgctctgctcaagagctaaactgatcaataaagagtacattttttgaacttgattattggaagaatttgtccttacaatataatctcgatgtaattcacatcgagaaaattgtgcatgagagtgtactaggtactcttctaagtatcgatgggaagctaaaggatactgagaaagcgagaatggatttgcaagacttacaaatacgacctgagttgtggttgtatgaaaattaaaatgggaatggaaaaatgcatcagctatttacacacttaatgtttaaaaatagattgaatttgtggattttataaagtttgcgcgattttcctgatagttttgctgcaaatttagacaaatatgtaaatttgaataccgggaagatttctagactcaaatcccatgactttaatgtgctatcacaacatttaatgttggcaagtattcataagtacttgaagaaagaaatctaggacacaattattgagttatatgtgtatttcaaacaattatgttcaagaacactcaatatttgtgatttggaaaacatgcaaataaatattctaagtactttacacaagttagaaattactttcccaccatctttctttgatataatggttcatgtaattatgcatctccctaaaaaaaccatattaggtgaactagtgcagtacagatagatgtgtcccatcaagcggtcaacatctgtgaacaaataatatgtcaagaatcgttcccgtttagaaggatctattgctaaatcttatgtggttaacaagtcattcatgtttgtgctttaaaaaatgaaaactcgattcaacagtcctgaacaaaacaatgatgtcatctcaaacatgccagaacaataatttcctgattcaagcatgtcattggataagaagacattaggcaccttaccaataataagcaagcataaattagtacatattgaataattgcatagaagttgagctatatatcaagtaagttgactttcaattaaaaatgatgtatcaaattactattactttatataagttatttgttatttatttttattaaatatctaaatatatcacaattattcaatagtaaatagctgaaaataaatgtaactatcattattacaaatttaatataaccattgaaattttctatatataaagtaataataagattagtttcaagtcttaaaaaacataaacaataaacattaatgagtatcaaaatggtatattctcatatataattcctgttattttgttcataaaattaataatcggcaaatgaatttgaaagacttttaattaattattaacattatttttaagattcctcaccaaatttacaattcaatgatacaatgaacatgggttttgaattaacacctatatataactacctaagatcgcatcccatatcaggttgagaatgacaaatatatatatttatttatataattttgggttgatgaatattttatattataaagtgtcaataaatttagtatataacactagagagagtaataatatacttagatctcattgcataattgggtggtcctcgtttgagctaacaaaattaagtattaattaattaaacaaataagaattctttagcatgg

SEQ ID NO: 218070 - DNA, 5826 bp, Cannabis indica
aaaaaaaaaattctaaatttctacatgtcattaacctctctctcttgttctgtgctgatataagcagattgattttcaagaagacaacagcatatggatttgtgctttattgctagcaattttgttccaagacagagatatcataagatcgcatgcaacaatgaaaagtatcccagcagttgccaacatgttaaggtcagaggactcaacaaacaaatattttgctgctcaggcagtggccagtcttgtttgcaatggtagcaggggaacacttttatctgttgcaaactctggagcagcaggtgggcttatttctttacttggttgtgctgatggtgatataagcgatcttcttgatttgtcagaggagtttggtttggtgcgttatcctgatcaagttgctcttgagaggttgtttagagtcgatgacataagggttggtgctacttctcgaaaagcaatacctctacttgttgatcttctcaagcctattcctgatcgtcctggggcaccatttctggcactagggattctgactcagcttgcaaaggactgtccgtcaaacaaaattgtcatggtagagtcaggagctttagaggctttgaccaagtatctatcacttggtccccaagatgcaactgaggaagctgctactgatctgttaggtcttctcttcagcagtgctgaaatcaggaaacatgaatctgcatttggttctgttggtcaacttgtagcggttttacggttaggaggaagggcagctaggtatagtgctgccaaagcacttgaaagcttgttttctgctgatcatataaggaatgctgaatctgctcggcaagctgttcagcccttggtagagattctcaatactggcctggaaagagaacaacatgctgctattgctgcacttgttaggttgttgagtgagaacccatcaagagcacttgcagtagcagatgttgaaatgaacgctgtagatgttctttgcagaatcctttcatctagctgttcaatggagctgaaaggagatgctgctgaattgtgctgtgttctttttggaaatacaagaatcaggtcgacaatggctgctgcacgctgtgttgaacctttggtgtctcttcttgtaagtgagtttagtcctgcacagcattcagttgtccgtgcattggataagctcgttgatgatgagcaactggcagaacttgttgctgcgcatggtgcagttattcctcttgttggccttctttatggtaagaattacttgcttcatgaggctatctctagagctcttgtgaagctagggaaagacaggcctgcttgtaagatggaaatggtgaaagctggagtgattgaaagcgtacttgatatcctgcatgaagcaccagattttctctgtgcagcttttgcagaattgcttaggatattgaccaacaatgctagcattgctaagggaccatctgctgcaaaagtggttgagcctctattcgtattgttaacaagatcagaattcggtcctgatggacagcatagtgcattacaagttcttgttaacattttggagcatccacaatgtcgtgctgattatactttaacatctcaccaagctattgaaccacttatccctctacttgattctccttctcctgcagtacaacaattggcagcagagcttttatcacatttgctttcagaggaacatcttcaaaaggatcctgtgacacaccaagtgattgctcctctaatacgcgttcttggctctggtattcacatattgcagcaaagagctgtaaaggctcttgttagtattgcactaacatggcccaatgaaattgcaaaagaaggtggtgttatagaactgtccaaagtgatactacaaagtgatccttcacttccccatgctttgtgggagtctggtgcttctgttttgtccagtattcttcaatttagttctgaattttatttggaagtgcctgttgctgtgttggtgaggttgcttcgttctggatcagaaggtacggtaactggggctttgaatgctctgctagttttggagagtgatgatgcaaccactgctgaggcaatggctgaaagtggtgccatagaggctctgttggagcttctcagatgccaccagtgtgaggagactgctgcaagattattggaggtactgctgaacaatgttaagattagagaaactaaagctacaaagactgccatcttgccattgtctcagtacctcttggatccccaaacccaagctcagcaagcaagattactggctactttggctctaggtgatcttttccagaatgagggtcttgctcgaagtgctgatgctgtttcagcttgccgtgctttggttaatgtgcttgaagaacagccaactgatgaaatgaaagttgtagccatatgcgccttacaaaatcttgtcatgtatagtcgatccaataaaagagcggttgccgaggctggtggggttcaggttgtgctggatttgattggtacaagtgagccagaaacagctgttcaggctgcaatgtttgttaaacttctattttcaaatcatacgattcaagaatatgcttctagtgaaactgtcagatccatcactggtaagtcattgctctcttttcctgtgacttatctgtttttacaacgaagagtatatgaactttatttgttgtggctttctatagtttgctgatgaaactttttgcattttcactctggtgaaaaggagttaactatatctgtgtccaggtgtacaacatagggtgtgttctgttgggggtaatgggatggaaaagaatcaaatttcattccattcctttgttgattgcattttaaaatatttgaatgccattccaacagaatgatttttccaccattttggtggaatgactattccatttcaaaatgagtggaaatgccatttcaatgctagatgaaaaaaaatttaataatgttttcatgtattttttatatgcttattaaattcaattccattttattcctattcccattctcatttctatttctttcattccttcaaaccaaacataacatgtgaagaaaccttaacctcatgacttcacttaattttgttgttttgttctctcctatatatgtttacagtaatgttttttttatatatatattataatccaaaaaggtgtcctcaattgtgcatagatatagccaaagacagtttctgtgtttctgtaaaatgttttgtatattactgtagccggtaaccactaaccagtgggtttcttgggttgctttgcccagcaaataataactttaaagtcaagtctaattcacctttttgacatgacagccgctattgagaaagatttgtgggccaccggaactgtaaatgaggagtacctgaaggctctaaattctctttttggtaatttcccacgtttgagagccaccgaacctgcaacactaagtattcctcatcttgttacttcccttaagacagggtcggaggcgactcaagaggctgccttggatgcactttttcttctgaggcaagcttggtcagcttgcccagctgaagtatctagggcgcaatcaatcgcagctgcagatgccattcccttgctccaatacttgatccaatctggtccaccaagatttcaggagaaggctgagtttttgttgcaatgtttaccaggaacattggtggtcataatcaagcgcggaagcaatatgaagcagtcagttggaaacccaagtgtcttctgcaagcttacacttggcaacactacacccaagcaaaccaaggtaaaagagggttatccttcagtttactgttgttcctttgtagtcttaattaactttctgtatgtgcctgtccaatcttcgagttcttgaccttattccacattctctcaatgcactgctctgtatgtattatgtgttagtttctaactgtgatggatctcgtttatttgtcagattgtttcaactggccccaacccagagtgggatgagagctttacctggtcttttgagagccctcccaaaggccagaaacttcatatatcatgcaagaacaagagcaaaatgggaaaggtacgcataccacgaaaccaaagttagaaggaatatagagagtagaaactctagtttttagtaatttgtacagcatacagtgcacatttttctcatatcaaattttatttttaaatccctttccctctattctccttggaatttctaaatgctaactaaattgcttttgttcattttaaagagttctttcgggaaagtaactatccagatcgatcgggtggtgatgctgggagcagttgctggagagtacaccttgttgccggaaagcaaaagtgggccatcccggaatttagaaattgagttccagtggtctaacaagtaatgaacataaaaatactgaaaatttgttgttctacagttctactgcacattgagttattgatagaattcattttctgaggggaattatttctttcttattctttattttcccaatttgggttatttatcacattcttgtacataatgtaccaaagattttgatatatgcctttttgttattattctctttcttgttcacagtcttaagtgtagtcatttgtcaatgtaatattttgtaacttgatttgcctgagaaaatgtaagcttttgatgttgtgtgattagccaattttagaggaattactaataagatgcattctgcttttactcttatcttttttctgttgcattttttagggtgaattgaagaaaacccagatgaccaaaaataactttgtaatgaccaaattgtactaactcctttaatttgatgactgaatgttcccatcccataactgttctgtaagaatgtaagtaccattgtattatatttgacgttggatttttaagataattttagtgtatggttgagaagcaaattaggatggacgaaataattaagagagaaaagacctactatgagaaagaaagttcagtttaaaattaaaatatattaatttattcatcttattaatctgaaaattttatatttttaattatttgtgtttacagatgactcccacaatactatttgtaggtggctaatctgatgattataatttataatagggtggtaatgactggttctggataatctaataaaaataaataaaaataaaagttgtagatttttattattattatttttttctttttggtcgataaaacttgatagaacccaatgcctatttgatagacttcaaaaatcatgacttttatgaaggaaaaaaatatttttgttaaatagtacctgatacagctcgatactgcttgaatgcaattctggcaaaaggtgtaataattttatttttgtggtagaccataatttgccgagaccgttttcggttaatctgaaccgtttactacttaatggttcgaccgtaattcataataaataattaacatttaaataagatcatttataataaataattgatttatatatattgaagacttctcaatgatattacttggttactaaataaatttaactataaatattaattttaaaaatattaaactattcaattttgatacaataataaataataaaaaaaattaattttcatgcttagttcaactacgtaattgaatataaaaaatatgtttatatacaaaatatttaagtcaaactaactttttttaacattttttttgctgaaaaatattttttcttattttgttccaactaatgaaacaaactcagaccatataatataaaaataagatatttttttaattaaaaagaaaaattaagca

SEQ ID NO: 218071 - DNA, 12985 bp, Cannabis indica
tgataataagacattttcatataatttgttatttaatcatttttttcttcctaaaccttggattattttcctctaaatataaaggtacaagttttatttatttagggtgtgttcagaaagtcattgtgtaattgaaagtaattacatgatttgtcatgtttgttagactatgtaattacactgtaattgtgtacttggagataattgaggagttctaattacaatttccgattctcatggccccgtgtgaattcgatataattacactgtgtactaaaaacattattatccttctgtaattactaactgttttgctaaacaagatattagaaattcatatgtaattaccatttcatatctaaatacacattgtattttaatatatagtgtaattattagattgtgtaattactaccaccttaataattatacttcctaataattacacagttacttcatgctaacataaattataatgaaaaacgttcatagctatttttttcatcttatgcaagataatgtgtgtgaatttaacttcataacttttcatatttcattctagatggtatctagagaggatcataagacagaccttgattcagatgaggagcttccattcagtagttcatcaccaaccaaaagaaaaattcattcattggattttgagatacctcataatcatatgcattcttcacacctagacattgcaacaaagtcaagaacttttaattttatgacgattagtatacttcggagtatctacattgtgttaatcagagcgaaaatcaacgtcttgctaccgtttggccccttggcgattctgctacattatactaccggcaagcatgtaatggagtactacactctcttaatcaacttataaacattcatttcatgaataaataggtattttgcgttcttgaactttgtcactaatatggtcatgcttctcgaattattagcaatattaaatattcttcctcaactttgaatgttagtattttatgagacttcttttaaataattagcaattttactttctgaagtatgatcactatcatattttgcccaacgaacttctaccattgccacaccatgcccttaaataaaaggggttcgatttagcagtggtaaaaattcgggagacaaattatgacaatggttataggtcagaaggtaaaattgctaattaattaacgaaagtcccatatttcattaacgctcaaagttgatgggaaatatttaacttcggtaataatttaaaggcatgattgcttttcacggccaaagtttaaggacaaagtacttatttattctttctaagaattaacatttctaattaggataaagttattaatacacaattaacattgtggcatacttaaatcattttgcgactaaggtatttagacatgaaaatagatcatgatgaaacatcaatattggtgtgttataagttgttaatagtttaccttgaatgtgttagggattggttttcttcttgagcttagtgggaattatacctctggcagagcgtttaggatatgcaacagagtaagtttttgacttctaattagttcttcattgcttgaagtagttagaatatgttaagaactgtcttaagaggctaaaagactatttcttgtttattacattgcaggcaacttgcttttttcaccgggccaacaggtaacggttacaaaaaagtactgaactttcgtgtcgaatgtttgattaaagctataaattatgctgaatttggaacattgtatgttaagtgaactctggatcgaagaaaaattgaaggctatttaggatattttccccgaactattactactactaaattgtgttccctgaatgtttttgttcgttaaaaattctttctgaactattcacaatgctgaaatataagactctcttaagttttattcaatgtgtcttaacaaattgctgatgttattgatgtgtcgttaccatatcctaaatagccaaaattgaaatgaggaatccatgaagaagtttgagaaaccccatgaaaaaatacatgtcaaacatagtgaattagtgaagtagaagggtggtggtgaagagccatcatgagctaattctaagcttgtgttgttgttgggggctttcgggttgattggaaacggctcgggacacagtattacaatggaaaaagaagcttctcttctttaaattgtcattgacttagatgtgtcttcttaggctgttagtgtcaatacttttaacacaattcatttgctggaatttgcagttggaggtcttttaaatgctacatttggcaatgcaaccgaaatgattatatcaatctatgctttaaagattggaatgattagagttgtgcagcaatctttacttggctccatcttatcaaacatgcttttagtgctcggatgcgccttctttactggtgggataattcattctgagaaagttcaggttttcaacaaggtagatttcccgaaactcaatagaaactattccctttctttcggtattttcagttgttctgagttttggtatgtcatctttttgaaacaggcagctgccatagtgaattcgggtttgctgttgatggctgtgatggggttaatgtttcccgccgtgcttcactttacgcattcagaagttcatttcgggaagtcagagttgtctctttcgagatttagcagttgcataatgctagtggcatatgcaagctacctatactttcaacttagaagtcaaaataatctttacagtcctgtagatgaggttagttgcttcttattaaccttttcattgttttgttcatcttaaaaatttaattaactctaatctttgtttgattctaaatattgataacaatttcaatttttaagtgtaatgaacttacatctataatgtttttgtctcctttattgtttaaatgttttataaagaataatgaactgttggtttggtacgctgtattagatcgtattgtattatatagtattatatgtatatcataatttcatataatactacataaaaatatgatatgtaacacaattcaatataatactatacaatacaatatgatatcatacggtgtatcaaatggactccaagcgccttagtcaaatatatgatttaatatttgttacattttactaaagaaagtttgagttaatatatggattttgtacaattgagctcaatttaagttgagtatatttctgcaatatttagcaggaagtagataataatgacgattcggaggaagaagaagttcctgagttaactcaatgggaagcaattggatggcttgctattttgacaggttgggtatccatcttgtctggatatcttgttgatgccattcaggtaaagaaattacgtcaaatgcattctgttaaccgagatttttgacagcttaactaaaagacggatgataatattttagagagctttagaaacataaaatacaaggatttttacataattgggacgttcacgagccttagtccacgagtcactatgattccattgttgaggcttacaacgatggaggttctttcaaggatttcagcagcgttttgcttaagaattactgttatttcattaagattcggttgatattaaagtacaaaatacttatttagttcttattcttgaatttttctcatatttctatgtgaaatgattcttgtattcagggagcgtcggactcgctgaacatgccggtggctttcattagtgtcattttgcttcccattgtaggaaatgctgcagagcatgcaagtgcaataatgtttgccatgaaagataagctagtgagtgatttcaatccccacttaaagctttatgtttcgtaacataatcgattaatcgttaacataattgattgtttggtttcgatttttcaatgtaggatatcacacttggagttgctattggctcatccacacaaatatccatgtttgtggtaagtataaagacttgcatgtgtgtttattgttgaaagggatattttgtggcataactaccgtaaagttttacgtttataagtgaagagggtatccaatgattttcattttttagcgataaaactatccaaaagttaccaaaacatagttggtgactcgaatgacacgtgtcaccacctaattgggccatgtcataaatatcgatgaggttacttaattaggtagtgacatgtgtcattctagtcaccacttaatgaaagttaactatttaaagtaactgaattatagttttagtaattttatcgctaataaaaatcattggatttatgctgattaaaaatgtaagactttgggtagttataactaatccttgacttttttatagtttgattcatatgggttttttcatatttctcaaaacatcggagttttaggcttaatacctattttgttattatggttattactattagaaatatcatcatttgtattgagattggctgattagttttgtttcggttttcgctggattatagattccgttctgcgttgttgtcggatggatcatgggaaaaccaatggatttaaattttcaactctttgagactgctacactcttcattacagtgctagttgtggcatttatgttacaggtgggtgtttagctattcactttcattctttaattgttaaaaatagttcttttgagtatactttagaaattgtttgtattgtattgtatagtatttgccctttagatttaaaaatggaaaacattctagggatactgtggctcgggaaatgtcttaggtcaataactctcatttggatgacagatcccggtagaagggcgattcttggattttaatttggtctgaatttcgtactagagcacttgacatgttgttaggatctcacattgactgagtataagattggttgctaatatataactacttgggcaccctcaactagcttttggttgtatcaagtggtatcagggacaggtagaattgacgcccaaaagctatcctctccttatttagcttttgagagtgagttctgcctaaatagttgtatcaaagtcatgcactctcaagtgggactgatgttgcttaaggggtgacttgtggagtaagccatcgactgcagagtgggctgcagtggatgtcggctccaaaggagggtgtaatgttaggattccacattgaccaagtatggaattgcttagcagtatataattacttgggcaccctcctctcctaggataggtttcgggagtgagttctacccaagtagttgtatcacatgcctaaatagcctttgctccttaattagctttaggcttgtgtattttgactaacttgtattgttttgcaatttctttgattattccattattgttttgtaacaaaatcaatgtgttcatttttgcaggaaggaacatcaaactattttaagggcttgatgcttattctctgctatctcatagttgcagccagtttcttcgtccacgttgacccttcaaacggtgagaaccgatcaattttttagtttccttaaccattttatctatgcggtttgcattttcgtttttgattctagtttcgagagacaatcgagcatttccttctcggtcaccagtgaatggagcaatgaatttagaatcctttagaccgaaaaatgtagcctctatactaactttgtctctgaacgccttatctttaatgttctttatcccaaaactactaaatgaatctaaagagatgccttgtaagctaagctaccttattggttcaaattcaagccattctaacgcaagagtcattccttacaccgtaacataacatagctagaatttgctactaagcataaacattactcgtcccatcgatttcagcttctcttgtaggaaactagaacacgagccaactttccaaatctttcctaaaataattcaaaccgaaatcgcttgttattttgagattatttgtgtgttgagtttgaaatgagtcaatagcatagtttgttgacacttttttgtgttcaattccattttggcttatgttataaactgtgttttgttgtgcagcagatgataactagaatttgagtaaagtggcaaagtggctttttcatgtgggaaatatagaaaagatgtccactacaaaatggtagcaacaaacaatttatatactttgaagctgcatatatttcattcttgtggaaaatccatatcatctttgcagctaagaaaagttttcttttttcatcattgtataatagaatttgattatgttatgacattaacaaatattaatctctaatctttttgggtggggagagttcttcagttttggtgaaattgttatcattctttttatgatgcttctcataaatgcgcacactgattttgagtattttcctcgtccttcagaaaaatctaatgctttcgcaacattttattcatttcattatcggtatgaaatatgggcgaatgtcatgtagctctgacaccagtgttttattatagaacaatattcaattatcgttaatgcaatggcattgctattaaacacaacactatcataaaatagcgttttataaatagttaacagttttctataattattattaaaataaaataggtagaagaattaccccgatagcaataagatatttcatagtgatgctcgaaatcgaaaccatgaataccctttagctagtaccaaataacttctccaacaaaattgctcaatgaaccctaaaactcgaaacttatttttctcaatttttatctttttaagactcataaattattaacacatcgatataatattaaacacgataaataatttattccctcattattcaattcaatatgtctctctctatatatataaataagctatacaaagaaaaattctcataacaaatgaggcatgcaacacaagacaaccacagaggatgataatctaaaatatgaattggctgtacaatctcaaaacatagaattagaaacataaaatttgagattctgacaaatcaaatcagatacaattacaaaacaaacaaacaaataatgttgtcgattttatcattgtggcttatagtagccgccactgccttggtgaggtggaggagggtggtatggagcttgaaccgagtaaggaggccgaggcatagaacccgactgttgtgggtgagtgtgagcgttgtagtatggaccccgccacccagggtatgcgggttggccgtactcgtggctagctggaggctgttgttggatctgtggaggcgggtatggagttcctgaggaaggtgggacatggtaaggaggaggcggttgttgtggggagctatagggagggttcgggtgagcgtatccagtcatggctggctgctgctcgggaggaggctggtaataaggcggtgcttgtggacgtgggtcgatttgtggtgaatttgatctctgagtttggtggcttgctgaagagtaggtgttgttgtatggacctgcgggtttagagtcctggaagttgaggcctgccatgtgcctctggacatcttctatcatttcccgacattggatatttctagtcattacgaagtcactgcattgctgtttcacgttcgtgattgcgtcctgtttcattgcaagaaagaaatcaacatgtaatagtgtagaacatcaattttaaaagagagaaaaatttcaaataatttacctgaagagtgacgtaaaactttaaaccctcgttgatgttgtccttaatttctcgaaactttgctatagcagcttgaatttgctggtaacatttctcacgagatgctgcaataattaagaggtaaataatagatatataaacatgaaattgagaagaatatagttctatagagctatttttttattcttttgctatgcatacacttaaaattgcaatttcggaagtgaaatataagatcgattaactggcagaaatggagacttgagagactaaaagtggcagcaaatgtagatgacaaataatgtatgtacagaggtgagttaatggcgagcatttgttacggcagagatctatttctttgcctaattagccaccaagatcatgctttgcaagccttcttatgtgacagcctctatttgatgataatactaaattattcatataaaatgaaagcatgataaaatcaagtacattattatagtaaagagccttagttagcacacattgtgaactaggaagggttacctttgtaatcttcgagattaaagatggcggcaaagtcctcattttgggcctgaaaaatgataagtaaacacaaactcacttaactgaagttccatgatttaatttatcgataaatgataacaatcactaacatggtcacaagaataaatttctatagtgtttccaagaactttcaatagtgtgaaattaatcgagaaaatctcaaggcaatttcgccagatccttaataggattttagagtggaagaacaattattgttgttttgctatagttattaatgtgtaaggcaagtttaatactaatttacttgttatacaacaatataacagcattcctcatggtagattgttgtatttcataaacaaaattcgaaagggaataaatttgtaacattggttcagatttgacaatataaaatgatgtactaatacagcaggcatggctcagactaaaaaaaacaactctcatataatataccacgaaaataaaataataaaaattgaagcacaaattatggtttaatggaaaaaagacctggatttgcatcaataattgttcttgtgcatcgatattgtgggcaatatcttcacatatatgatcgtacttcgctatctctttcctgaaaaggtcctcaaaggagccagttgatgtcatcaactttggtaatatatcatcctgaagtcatatgaggaacaataagcacataacagcataccataattcaaacagcgaagtcaacaggaacaattatttattgtaacactaacaattcttatccaatgactaaaaaatgcatcccataataaagcaaatagtcaagagatttagccttgtatgaagaaccaaatttgaaataaaaccctaaactggtatagcagaaattcgggcacaccttcctcttcatatctttgagcatgtcttctagaacagcccgttcagcaccaagtgtttctaactgcctctgcattattcaatggagagaaagtcataaacatccaagattagaatatatactaacttcagtactacaaaataaggggtctaaaggacattattttcagaatgtagatgccaaaattgttcaggaaaagcacatggcattcccgaaattcaagagtcaatgtgataattacaaagttttaggtcataaaaatattaccaagctctgctttagtgcccccagtatagcatcttcattagcatccaaagacattattggcctcgctagagttgggagtgcagattcaatctgaaatgagaaaactgcatgatcagctattttttgatacatcaaaccatgaaatagaagactcgaaatatccaacaaaagaggaacaggttgcaaacatttccattaaacttctctcaaatcactctaccattcacattcataaattgatgccttctataaggcctaataagaagttcaaaaacataccggacgacgatcgagaatagacatcagagctgaatgttccctcactgagcgctcaatccgaccatcgctatctgaagcttgtttcagattggctgcaaacctatttaacctatcctgcaaattctttgtaagtgtgctggattgaggcctagtccaccgtgttccaaattggcttctaaattgaccatcttctcttgcctctttctgcaagagttcttcaacttgaaccagcatttcctgattcacccggctgaaatctttaagctgctgtaattcaccttccaaaccagctggacccccacaaatctgaactgcctccacatcttcttttagatctgtaggaagagtgaaatttccttccaaagcaagaatggattccggtagatccatttccttgagccttacccgagttagctcactagcttgctgcaacttctctgcttgtgttcttataatgtcatccaccatttcagtgtacctagaaagagcttttgcactattgtccgggactaaactagcaaacattttttccttactagcatccaacacttcactcattgccattggtttcaccatggaaaatgccgggagaggaggtaaggaactaggggaagggaccctcatgaggtaaactctgtcattctccttcatggccctctccaggttgcgattgagactggcctctaacttgataactgcttccaccagctgtggaggagctccttttgaagatttcttggcctcggatagtgcagcaatcccactctttaatcgagcaatttcctctgcaatctcttctttctcatgcaattccaaactacacctatagcaagcttcagcaaaaaacaaagaagcctttagctgcacgtgagatatccagcccttatcaaaatgctggttcagaggtggagcagtcagtgccgcaaaagcctcctcataatacaacccaacctgtaatgacatccaagtcaaaatagaaatcaatatattatagatgcagtaatatccacaatttatagatgcggcaaataacagatactaaaccatcacagagtcttatatctaataactaatctaaaaatctctaacgaacacttgcgccaaaaaccgcaactttaacctaatcaatcaaatgtcaaaatagcccagtagccatcaaaactttgacatggacaaatatgatattgacatggttctgataaacaagatcatcaaagagtgacccaaaagatttctgtttaatagaaactgaggaatactatattcaataagaagccaaaaaaaaaaatcataattctcaagaactccaaattaccaagattagcacaaaactaattcataaaatcattcaataagaaaaaaaaatcataattgtcaaagaactcaagattaccaagattagcaaagaaatagcacattcctgtaacaaaagattgcatctttacctaaatgagtcaattcaattctacaaataacatacataatataatcaattaaacacttaacttcccatctgtacctgcctagagatcttggcacatactgaggaatgcaacaataactgcagaaggtcacacatgataattctatgcaataataactgcaaataatggtgttttatggtcgcacagtgtaatattttgcagcttgtgagaccatacatggttattttactaataaaatcttttataaagaccatattaacactctcaagaactccaaattaccaagcttagcacagaattcattcataaaataaatcataagcaaagaaaaagcaattcaattcacttcaagattaccaaaagatttcatctttacctgaatgagtcaatccaattctaaatataatcaattaaacactaaatttcaatcatttttacctgcctagagatctttgcacatactccaggagtactccccttagcaatggagttctcaaaaacacactcctgagcctgagcaagcatcaacctctccaacattccagcacactccaccgacaaatccacagtcgtagagccaccaatcgaagccttagcagcctcattatctctcaagaaaagaaaagcaccagccgcagcaataaaagcatgagaagcttgtctccgaccatcaacagtagaccgatcataagacaatccaatctgactataaacagcacccaaattaaacaacacagcagccttctccagatgaatattctgctgagaagccttctgtttgttcttaaaagcatcatgccaaacgaaagtgacggagttcacgtgatccttatcgggagagattgggaatcgagtctcgacgagacatagggctttgtaataattctgaagaagatcacgacgggcggtgtgagaaggatcggattggcgttcgatatcggaacgatactccttgagggtttggagatcgtcttcgaggttttgagcttcgcgatcggagtaattgaaagcgatatagttgcgaagaggacggtaaaggtcgatttgagtagttttcttctcgtagagagcgagcatgatattggtggtggccgccgacgaagacgacggagctgccatggctgagatcaaaactgaagcttttttcgattacagagaaaatcaatacaaaattgggactgacaatttgataaaataaataaaaaaaataataatttatattttatttatttaattaattttttatatttatattattgactatgtctctttttcttcatggcaaaggaaaccgatttatttatttatttatttaattaataatgtcatttaataatttaactttgagttgtattgaatttaattttcgacagtaataacatttaaattattttctaaaacttaattacattacttatgaaaattttaaaaatatacgttaaaattaaaattatatatttatttacaaattacgtggtaaattactttttaataaatttaaaaataaaaattaactgtaatatagcagttgatttggactccaaataatttcgattgtagcttaaaaactatagtttaaacattatttgggtggctatcaagaaatttatgttcacaaatccttttattagagaagggtagcttatgatttttccttattgaccattatctagtgctattttttttttttttgaaaataaaggaagctttattaataaacttctttcatgattacatcacgaatatcaggagtgaaatcagtactcctaaaaacacgatcagcgacataagatgaagctcgagcaacagcatgagcaacaccattagcagatcgtttaacaaataaaatagacacatcactaacaccttcca

SEQ ID NO: 218072 - DNA, 5592 bp, Cannabis indica
agtgagtagatactaagaaacctaggtaaaataataataccaacaacaatacaactatagaccctaattttacattaaaaaaataaaaaaaaaaaaaaaacaactaaaagtagtgtagttgtcaatatgtaatacagtaaaaaaaacatgtatatatgtagaaaaaaaaaaaacgcgttacagtacaaatgttataatctaccttttctatgtattttatgtaaaattcgcattatgattgctttaaaatctaataaggtacgtacgtacaaatgtataagttctgttttcagcttagtgttctgaggcagcctatctcatttgatgctgaagtaatcaatgtgcatccctaaactaatgcttatcactaatggtaaactctataaccttcgttatcagttaattgtgtaaacttaataataatggatcatcttaggtgaactgatactgagataaattcgggaaataaaatgtatttttatagtttagggatgcacatcaattttaattagtacagggttcctattcctgtgaaaatgaaaaatagtgtctttcttttacattattataaaattagcatgcatacaactcatttaaggagcaagttggtagcctgtgttactattgctctagaccaaaacaaatcccatataatatctaaaatatatacacattaatgaaagatgatctacgcttactcatacactaatattttattatcatcaccatctatgatcccatgctacaaaattgtattgttattacaatcctcagataatcaactagattttctaatttctttccagcttgttgagaatgatcttcagtgctaaacttcacacgaataccagtcgaatattgagaaattacacaaggttgtcatagctgactacaatgaaagagtgttattggatggagttcgttcaaatctagtgcttaaagaactagattgattgttccccttctcaatcaccagaaatcactgcatgaacaaaacccatcatgaaaatggtggaaacaattcggatccttgagtatgatttctcgtcctacaatcccagatattgccttggcagagtcatggcaaaaccgacatacacgaaggttcttagtcaaacgaataggtgcaccggcttgtgtactaatgagcccaaaagaaagtgccaacatttcactgtgtccaacctcgatgcattctcgctcttcatcaacatcatgaaaactataatctgctttaggcttgtgtcctttgtcctccattttcttcattaaacactgcaactcccagtatattccttctgatcttggatgggacacatctccagtcccaaacacatgaactttatttctcagctctatccaactataagctttcttaggtttcaaacccatgtctccaaccattcctttaacctcatcaaccatgtcccatttggagttttcagcataccagttcgacaacaacacgtagttctcagcattaagagaatccaattcacaaagcttctccatcacccgcttacctaattttttgttctggtgaaccctacagccatccagcagagctctctgtaccaaagcatgctttcctatcttttgtttttcaataatagccattgcctcaataaacatcccggagtttgctaaaagagctacattcaaagcatagtgttcaactttaggcgacttaatacagttgaagtatagtataccctcctcaaccctgcgtgcagtagtacaagcacgcaggacagctccatacgttgtttggtctatctgtaattccgatttcttctccatctcccgaaacaaatctacaccaagctggccttgtccatgtgagctataccccattatcatcacagtccatgaaaccaagtctttgtgcttcaaccgtttgaaaattcgcgaagcagactcaatgcagcctgacttaacgtacatgtccataacagcattaagaactgtgacattcagctctaccccatttcttagcaagtaaccatgaatctctttgccttgcttactagcggccatcctcccacaagccgggagaaggctagacactgagagaggatccggcttcagtccattcataaccattaaacgaaatagtttaagtccctcgttgtatcctccagtcttcacatatgcacggatgattacagtccaggaaatgatatcttttactggcatttgatcaaaagtagctcgagccatttggaggctgccgcactcgacatacattttcaagagcgagttactgaccaagacatcaaactccaactcaaattttctagcaacctggtgaagattcttaccttgtttcaacgacttcaacatggcgctagcttcaatggctgttgccagtgccactgaatctatttgagctcccaagtccaacatttcatgaaacaagtctatagccaaactgggtttgtttctactaatgcacaagcttccaagcagagtccaaggaaccgaatccatacgagggggcttgtaaaggagcaattttgcggtattaatgtgatcgagatgggcgtaggcttggagaagagcggtaaagacatactggtcctggaagcaaccaatttgagagcctgggaatggagttgtttagcgagggataaatgaccagagagacgagaagcagctaagacccgagggagagtatgcctgtcggggcgaacaccgcggagcagcatatggtgataaatggagagaacacggtgtgaatccccagtagttaaatgggtttggatcagcttattccaagcaaaggtgtctgaaaggggaatttcatcgagcgcatggtgggcaactttaatagccgagggaagatgacgtgattgcttgtattgggttggtttgtcggtggagaagacacaacggattcgcggctgaggagcaagaacctccatttcaatctccaaactaaatcttacgtaacattgttgctttgaaactgagaggagagtgattttttactacatcctcatccacaaccacatctagccaaagcaacaagcatgcgcctttggaattggaattagagttatggtcttccaaacctccaaaattgatttggtaagaataaggaaatgtagctaattatagaacgaatgaaatgaaagatgataatgatgaagaaggaaacaaggttcttttggtattacataagcaaaagtagttagttaggtacatctcgtaagtttctttagaattagaatttgaaccccactttagtccttgttatttaaaattcaccctttcatccagttccaatcaaactacaaatagggtaatttgttaatatgaagacaaagaaagtatttttttttttctccttggctcccttcaaagttaactgaccaaacaaagaaaaaagaatcgaattaaatcaaagcttacaatgttttctcttgtcttgagcttaacaagggtatattatacaatatatatatcataaagttctaattcaatacaagcaaagcatctcaatccccatgtgaccttgtcttgtctactataataacaagtaacatgtgcatgtatgtatgtgccatcccattaattcccatctttttatttattttttttggctttgaagcctaaagacttccatgaattttctgtcttggcgtggaaccatattccattccaaactcagaagccaacatttgaatatcaggtgtaatttcccagtttctatgccttgcctccataacaacactctctatttgactccttatatcttcaaaatcctcagcacccactgcctgtcgcttccccatctccatctccatctccatcatgtcaatgcttgttttgttcatctcaggagggctcattggatttggatggcctaaagatctccaactgttaaaagcagaagatgaatcccccttcaccttttccctgaacttgttcttagattttggaattctagacaaaaatacttccacaaaatttccaacacatccccggttgtatggatttacttttccctcataccgatatcgaaagttttcataggtggtctgcaatagtataacaaacacaacgttttttattcaaagtcatataatgagaacacacaacagcaaaccaaacgaaactatgtatgaaaaaataggacacaagaacctgattagtggttattagatagagatgaaacactgtgagacctcccacaaaccaagctgctataaatgtgtacaatatcagaattcctgaaactggtgactttatgaaagccctccacagattacagtggtagacatccattatttttttgatgttcacccaacagaatccaaaaacataaagacacaacatggttgttgacgagacaaacatgaaaaagaatctgtaattccgctgtatatgggaaaggaaaccattcaattcaaccatcttatgataagcctcctactgatactgaagtttagtgttcacagtacataccttcccaatacattgacctacccaggggcaatggtgatcaaaacgctcaacacagttgttgcagatggagcaatgagagcatcgtggcgggcgatacaacaggcacgtttgacagtacttgaccttaacaacacttccattaaccatgacatcttttgtgggaggtccagctccagctccagctcctctattatcagcatgacttgcagccccccaatccctttccccttctgggggatgctggttccgaggaataatgccaggatctcttgcagatgtaaggaagagaagaaatataacctggaatgaaatgtaatagttccattatcaattcatgtattctaattccattgcaaatattgaatgtgacatgaaaagagaattcactcacatatattgtgaagacaacacatatgataacaatgagatttccgagactgtgtctaccattaatgggtgtttgagaaacaaaagcagaaaacagaatgactggagtcacaattaggaagattgtaaggtacaatgacctcacatctggaccaaatatgagtcttcctttgagaaaaaatctctgcaagaaaataaatgatgaagtttatatgctaatgactactcaaactttatttgtttgaatacaagcagagtgctaaatcagcttacattgtttcctttccaaacttgataaacacgcatggagggaccatgtgaatcaattatgtgtcgattggagtcagaagccattttactgccgtacattgttgctcaagttttttatttcaacccaaaacacaaatcctctcacttgcccaccaccactataattttataaatatatactatagatacatataattgaaaacaataaacaaaagtagctttgtttgaacatttacatattagtaaagaaacaattttttgttaaaaaaaaaaaaagaaaagaaaaagaaaagaaaagaagaagctgaaatgcagaagatacccgagagtgaggaagatagagatcgagatttcagatgggttgagctatctggaattggatccccatttggagaggtaacaagctttgctgatgttggtcttcttgcctttttgtgattaaagttacaccactaacaccatact

SEQ ID NO: 218073 - DNA, 6752 bp, Cannabis indica
caactgcaaagctaatcaaggaggaagcttatttgcaatacttcttgaaccaaaccccaatgtttagaaaactctcataatcagattgtggcctgcagatgaaaacatttcattagactgttatgtttgataaagatgtcaaactagttggcaactttgctttgtttacctatcaattccatgaatatcattaggaaacacaatagttttaacatcaactcctttctcctttagtgctcgagcatactgcgaatcataatctcataaacatcaatgataattgcaaatactatcatgtcaaattgcttaattcgagttactgtcaaagatgcagatgcagatgcagatgaaagacagcaagagcttccatgtcgaatcattattcatttttacttatgttggaccataaaattagcatgaaagtcactatgtaattcttatatttagaggtgaaacatgatatctttcttacttgcaatccagttgaatttggaactcgaagatctttggcacccaaaggaaaagcgtaggcgtcttcacctgcacagatcatcaaagaataaagacaatttctttttcttatcaaaagattaaaaaagttgaacttgagaagagtagcccaaatggttaagcatacagtttgcttccataagatatgagatttgagtccctcttaggcacctacacaacaattattatagtttttgtttctcaaatattgtagggataagggggagctcagtttcaagagaaaaacaatagttggggcttattagctgaatgtttttggatattggtctcacaaaagtatggtgaagggactagtgtgaaaatcaagtctaagctacttggtttgattgaagtggagacttaagaagcttgttattgctttgaagcttcggctctttcaaggtttttcatcagaaaaaaaaaatcctatttgaagtagcatagaatatcccatagtcactgaattttaaatttttctcactcaaatcctttaccgattcatatctttttttctgatctagccagcctcaacactgcatattacttgtgactctcaagcttcaagacttatacaatattgctatcaagccttggccaggtgcatggctacaataatagaaagcacccatgctacttactagtggcatgtgaagccactgattttctatggcaagcaattagccgataattaatgataagagggtcatgaatgcagtttcacttgtgaactctaggttatgtttgcatccaagttttaatattttgaatggctttgcatcttaaggagtttgattaatggtagcacaaaactcctagactgcaaaaaagccatacctttgagatgtggaaaataggagactttgtttgaaaggaggtcaggtgttcagctgttggtgcttcagtgtaatagtttttccactcacttccataggtctctacaaagcaccagtctgggatatcagatgtgccaaccatcaatgcaaggttgcaaactggattccttgctgctgcagcagcgaatttgtcaggtgcctgcaagcatttagaaaataaagagaagtattttatatttataaattttttccacttgagaatactaaatgtaggcatgctatagagaaactcagtgaatattccaatccacaatggtcacatgaactgtaggaagaaagaaagaaacttataaagaagcagaatagcatcaaagatcagaattttactggcaagagtattgacaagatcccaagaatctgaatttatacagagtctagacaatattaaaaaaatatgtaaaagattttatagcagaaatgagggcggtaaacagattcaaaagactaacatacctggccaatcaagtgggttgtgagaaagccaccatgggaaccaccaagcactgcaatttttgatggattagcttttttgaggccaatgacatgatctatagctgtgagtacatcattgacatcctgttcggaataatcttaagatattaaaaacttatatacatgcagcaaaacttcatagacgtaacataattaatataaaatgctaagaacttaatttattatgataatagataaataataagcacctgggtcccgatttttcctggtagagattgcagagcttcctcaccaaatcccaaggatcctctgagataaattagcatgttgaaaaagcatgaatcctttagcacattccagcagtcgatgcagtaatatggtttttaagaggaaaatgaaatggaagacaagaggcacttcaaaaaatataataatcctaaaatactaaaaaaaaattaattaagcaacttaatgaacaaatcatatcaagtatatacattccttgttgaatctcaacgaggaatgcattgactttgagatctcacctataattgacaatcaacaagttgaatccatttgaagacagaaatgccaatgactttgaaaaacttgtcactgatgtagtatggggaccgccatgaagcattacaatcagtggctcacatgaatcatttcttctagttttggaggacacaaatactgcttcgaaaggtttcttagctcctagaatatttcaaagagtagagaagttgcaattaacattcaaattactatcatgtgattcatcttggagagaatagtccctgtaatacatcagccaaaaataaagatcttatatagtctattatggcatgtaataccttcagtcaagttaccagaaacatccttcactggaatcttcataatatcaaactgctgatttgacagcaaagatttaacctgaagatcaaccatttgattgtttggtttcaagtaattagcattatctaaggaatgaaaaaacgaaaacaaaaaaaaaaatgcaagcaaaataaactgaccttctcggggcatttaactatgggacttgatacatctaaccaattccatgtagcattatcagtaagatacccatacttgatttgaggaacatctactggactgctagaaactgcgaagtcaaaacaagtgcaagtataagctcacctatgtacacaactaatacactagatagttataaatatcagcattcgatgatacctgcaacaacgttatttccatccaatgcaagaagattccatgaaaaaccagagtctatagggctaatacgtgatacttctgcactgtgattcattcaaatgcataagtattgtataaaacaacacgaagaaagtcataaaaagttatgcagtcagataccttaatacatttattgaaagtaacactagactacttctccagatggtagataatattattgtgcagccatcaagaagccacggattactcaggaaactagtgcagtaaagcccaggaaagcaaccatcttcagcagacatcacaacaggaatcttcaaagaaattgaatagtagacaactaaactcagtagatgaaacaaactgaaatagaatcctcagtaaacaacacatgcctttcagatatagtacatttcagtatgtagaatggtgtttgaactgaactctgaagacataaatgtgaccagcataaaaactaacaagtacttagaatttgaggcgttttaaataactgcttgaatttgaatggacaatcatgagaatacaattgctgcaccagcaacaattcccttgtttgaatcaatctttgtagctggcgaaaaacagctgtgaaatcaagatctcaccacatcaacaattttcaaagatgaggacagattgccatctgttggccattcgatcctgtgaagtgaattggtcgcggaatgtgctccagaatccacagaactacgtgcagataaaaacacaaggaattttccatctgggctggaaaagataaagacaacaattcaaataaaataatttacaattgtgaacaagatttggaactacaactcaagagttaagaagatactgagacacaatgcaatttttcaaaagatttaccaaactcaaggaaggaactgtttccaattaaattaaagatgctataaaagattacaatacaagcagaaaataaaattttaatacaattattctgctcacatttatcaattttgactactaaccatgcaagtaacaagacacaaaaacaccctactttacaacaaagagcacagttcaaacaaggaaaatgcatctctattttcagggaatttgacagaaagtgtactgctgttttgaatttctaagagttcttttggtatgctttctgattaaatatgactctaacatactattatatttgtaatgtaatattaatgatgttttgagttgataactaagttatgagaatagcctacaaaatgtaatctacaccctataaatttagagtaatgattggcacactcccaatttacacacaaaaagtacacaatttaatacaagatggtatggtccccacttaaaactatccatgatacttgaactttccatatttttttttcttttatcataatgatgtttttgctgatatgtctaaaattcgtggcattttcatccatcattccaaaaaaaacaaaaagttaatagacctgcaaagtattaaatttttaatatttcaattacaagaacttaaaacatataaaaaagtgtaaataccttgagatattataatcttcattgaactacaatcagaaatataagatatatacttacctgaaccgtgggtaaaaggaactgcttatgctttgagttagcttgaacacaggcacattttcagttgaactatctctacaacataggaaaagtacacagcaacagcatatttaggagaactctagggagccaacaaacagttgacttgagaaagataatgttaagaaaaaaaaaacatgtacatcacaaaagtaactcacttaagattatctttattggcttctgtttcatcaaatggcgccttaattgcatataatgcacaaggcctgttgtagcagtattttattccaagctttcccttatctgaagaccacccaacaaaaaccaaatactggtctgatccactaattgatggcgcccataccacttgaccaacactcaaggatttctcaattcctttaacagcttgtacctcaccacttcaaaccataaaaaatgcaggcaatgagtttgtaatgaaaatgatactctagtagtttctttaaacatcagtgcttacctattaatattaatgacaaaaagtgcaggctgcctttttccagcataggcctcaccccagccctcctcccattcccctagtcctttccagctaccatagtccttatccgatgaacctcctttcttataatagcctagctcgttaaatgttggcttggtgggagatggctcttccgcagcataagcaataagagtttcatcagcattccaagaaattccctcaaacctatatcaatacaagactacatttacatatcatacatgatagtaatgtacattacataattaaacaaaatagactgaaaagttacatgcttaattaccatccatcagtgtatatcgaaccatgaacagattggggaacatggaattccttctccaactgagatgaactccaaatctcaatgtgacaaggagattcattttcaggattccgaacaacaaaaagcttggttccggatggagatggcacaattacagaaactcctgtcatctcaacaggaaaaggggcccatcgaaagttcacagaagtggcactttcttttgaaatttcagtggaaagaacaaactttctcctcttatttgccaaaaggttaggttgactaactaaaaacattgcctgggagtttatccctgcaccaaaaaaaatcgtgtgtaaataataaggtagtgactagtgagtttaggaatcaaatagaagagatgattttcactaacaagtgttactataagatgaacataaacaaataaatattaatacataccgctcccagacttaaaagtccatgccttatcaatgttggagatgctagtaaattcttgaagtagcttagattgtaaagtgtattcttcctcacttgcttcatccaaccccaatggcagatcctttcctgaattccctttagaaccctccatggcaaatactttagacaatcttttactacagaaaaacaaaatcatcaattcaaaatgtatggagaaatatctcatactaaaacttatccgttgagtggtaattcagatagaaattgaataaaccaactgtaacccaataagagatatcaaatgaatgaaattcaaagagaccaactatggctacggatatccatcatcaaatgactatgatcaaaaagcagtaaatgttatgaatttgaatatgattatgtgagagagtagagagaggacttacggagagagagaatcgagtgtgagtgtgggagtgattggattggagggagttgaataagaaggaaagggaaattgtggtcgtggagttggagttggagatgcgaagctaacaagccaagccgaattcagtaggcgttgaaggcgttgaagtgccccagccattcacagaaaagattctcatctcatgaaacaaatataattagcattttccccttaatttgttcaaaattcctataaaatataataaattaataatgacataattatctcttttcttttagattttatattttttatactctctaaatttttattaatacaaaattttgctttttttttataaaaaaaaatgaagaattataatattctattaatttt

SEQ ID NO: 218074 - DNA, 6178 bp, Cannabis indica
atactatcaactttcttttattatttaaataatatatttataaataaactttttgtatatatattattggtgtttatttataattcaataaaataatataataataaaaaaaatagtagttttaatgtaattttgtgttgtgattagaacaaaatttagtgttacaattttattatttttatgttgatttaacgatcaaatttaatatttattattggagttgccttaattagaaaagtagatgaattagacctatttcaaagtataataagtaggtagtgattcaacattttcaagctagagcaattctcgaatagatgagctaaaatagttcgtttattaaacttttaaagaatttggtaaaattatacagtccaacaaactgagataaatagagacgctaaaatagtttatagctattcttttaactacagtgtagctcaatagtggtgaacttaaaaatattatatataatattcctatttttctcttgttcttttaattttttttttattatttcattactctttttttgtcttttttcattataattaataaaatatataaaaaaaatataatatttaaatgactcaaaaaaaaaatatataaagaaatatcttgtatagtgtaatataaatatgtgaagtaaaagtagaaaaacaaaaagtaaaattttgaggaagtattttaaataatagagtaaaaaattattggtagcactcacatcaacttttctactctagtttttttttttaaaatacatcacaaaattttatatttttttattttatcccaaacttttacatcactatatatcaatttctctatttttttttttctgtacatcactaaaattattatattttaaaatatatatttattttattacaactattttttattttttataaaaattattctattattttaaatatatattttataatataaatgaaaaaatctgtcagtattatttttcaactcagttggagttgccttattttgtgactttgaatcgttagtttagaggcttctagtatttagttttgatcccaaatgtcaccaaaacatggctttattatataatgaaataaggttgaaaaggcaattatacaatcacagtccacactaagaatatgcttaattattaatgggatataaactagtccactcacccagaagtcgttgtaagagtagaacgacaaaacaattaagtaaaaaaaattcactaacggcgctcttaatttatgattattttttatttaatgaatggagcactaaaaacatacaaatattattaattaattaatattgtattgtcacattcagccccaaagtgtataaacccaagctatagtatagtatattacttataatagaattattccaaactaccaagtttttggacctattaacttggaaatatatatttttcataatatgtccatgcaacattatttatttatatataaataaattcatcaccttaatgtgtgagtggatggtgagggtggcaacgtttgcgaatcacaaagtgcaattaacacaaaaggtcacttctttgtaaagcaaaatattaagataaatcccaaaaaggaaaatgaattatttaaaaattaccaatctgagtagtattgttattgtattgatttcatcactttgtttaaatgtatttattatttatttttattagacactactagttagtgatattatttaaaaattattttttaaaattatatataatttaatatttaattacacaaataataatatgatattaagtggagtactagatagcaataatatttttaaatatttctttaaatatatttagttgaaataaatattgttaatgtatgtatttaatatttgagtacatattttttgtaaattattattgtcatgataaagtttaataattagctagtactatgtagtttttttaatgatcaattatttatactaaaggaagaaaaagataagaggtcacaatattatttcgtttggaattaccaatctaagtagcaatgattacgtttgcttagtaagatgataggccatacgaatatatatgagaatggctaacatttatattagtgcttaatttttttttaattaaacattaagtttcatataatattaaaaaataatttttaagaatatggtgttttgcaaaaacacgattagtgctcaatatcactactatatatacatatttataacaataataattataaataaataagaagagacaagataaaaagaaattgtgagtggtggtggtaatggataaatgctatagggtagtagccatagtaatactagtggtagtagtagtcgccataaaagactttagaatttttattttatttttcttgagaggaagactctagtctttactttagatttgggtacttaggttcttactttgtttgaaatatatattataatacaaaatttaattagtaataataaagttggtaaacgcacttactaagttacaaaagaaatatcagtttattaggggaatggattctaagatatcatttaataatagggcacaatataaacacttcaattttggaacaatgttttctatttattattattattattgtatttgacctaatagaagattgtgttagaccaacttgattgtaatattaatactaatttaatgaggaaatcataaattaagaccattttctaagatctaaaatttgtcttaagtttgatacaaaaaaaaaaaaaaaagcttgtgttatttttggcttactatttataattatactctaatataaaagatataaaataagtaaaaaatattaattattattaatggtcatttaatattttattaaaaatatataaaattgatatttttaatcctttttattgtttgaatttaaagtatgttttgtaaaagtgaaagaattataattattagtggcacaatagtaaataaaaaaaattatggtggcttaaatttggcataatattatattttttttatcaaatttaatacatattttaatatattgcaaatttagcacactttttataaatattattggagtggtattatttttaagtggagcattgctaatttattattgggcaccagtagtgcctagcacattctaaacgtatcgtcttgtaattgactaacgatattctctaaaaattattacattaaactatttgagactcgatacttaattagaccaataacgatattaaaacgtaaaaaaatattaaatactattgatacatttaaaaaatattaagtatactaacaatacatcatcctttagcactggtgggagatactctaacattaattcattctctttcattaaaaaccgtccaatataatatggtttctcttacgcactcagctcaactcaaactaagtagcctatggacaagtgtgcctacttccccattttattactttttatgtttggcaccttatcgacttaattaaatgtcattaaatagccaaaacccttgaaaaccccaagtaagcttctttttttcttcctcctttctaatatattcttcatttaaacaaaatattaaatgaacttggaagttgaaacaagagcaatagatagagagagagagagagataagttaataaaggtgagatactcatatttgtggtggtggggaaaagttaataaagatgaggagaggaaagagaggtagctaataagtatgtgtaacaagagtaagagttcacgtgatgagaaggcatatatgtcatgtagtatttggccattttgggcaaaatgtgtgaagcatggacctatgtgttggcccatattaattccattccttaatgggtgcattgccaaactcatttgtactccttcccaacaaattaccgtatgctgcaacttatgtcatcttaaccactaagctaataactttcactcaaataccaagcaagacttcaatgaacatgtgcaactttaaattattgtcgtcacaatatctcagctctggacaagccataagatgaagtagctaagattgtaataaatgtaagacgaaataaatttatgtttggttcataatatttattatctcatattaattccttgatggttacattggccaacccatttctacttcttcagcacaaattagtatacattaagctaattaattgcttcactcaaatgtaaaccgagttgtgattatagatgaaatcagagaagattcaatcaaatgtcaatgtattatattcatttcttgtaaagacttgtgctcatctcttcattgggataattgatagcattgtcttatgagatttaagattttacaagtgtcaaatagccatgcacaaccactaaaaaaaaaccaatctttagtgacaaccttttaattacaatataaattttttgtgactaaatgtgacttttagaggttgtttgcttgtgttttttagttttatattttcagaattgtattttcaaaagtgagaatagaaaacaattttttgtcattttaaaaatttaattatgtttagctaagatttcttaaaacttttttttttagattttttttactaataaaaaaaattcaatattctacaacacactatgacatgaacccatcctaccccagaccggacctgaactcggaccccagcccaaacccaaacacgaacctgaacccaatccctgtacgctggaccctgaacaaagatcctggactccaacccggacccggaccccaaacatgggccctaaacccaaatcctggatcccagacccggagctaggtccaaggtcttgggttgggtttgttatccaaggtccgagtttgttttttgggttctggatccaagttcgggttcaggtctagggttcgggtttgttgtttggggtctaggggcagggtttgggtccaagtccgggtcaagggtctagggtttgggttcgggtctaggtctggattcaggtcttggtttgggtctacaatctaggtctgggtcgcggtccaagtccaattctggggtccgagcccatgttgaggtccagggtttaggtccaggttggggtacgggtctgaggtcggggtcgaggtccgagttcaggttcagttccaggtctgagttcgggtatgtgagcaaaaatataaaatatgtataatatgtttgacaaaaaaatattttttaaaatagaaaataacattttcatgtactctgttttctagctttaaatttttaagaaatatttttaaaaatttgaccaaacgacccctgttagttttttaaagttgttttctgtttcaaaaaactaaaaacaatttttaagttatgaagccaaacaacccattactcactacaaaaagttacttgtaactaaatcatagtatttagatatacgttgtctgtaacgccctaaataattaggcacattacccaataaacttatgaaaccctaatcccctaatcaagattactagtaaaataagcgtggaaattaaactttattaataaacggaatgaaaataacttgtaataatttaaaagttacaaaagttgggatcccaaaagtatttacaaaacactattacaagttctttttttttggccgacctaagcggtaaaacagagtctcaaaatacatcactggtagaccccaacccgcttggtctagtgtggcccgaacatgtacattcttcgttcagctcccatactcatggctgatgagaaacaactttaccctttcctgcacactagagcacccgtgagccaagctcagcaagatagtataaaacactgataaacatatttatcacattatataatcagtaattccattcacatatgcctgtatgacacagacctgcatgttacgctcaaatgcctatttatatctacgcagcgttgacctacgtgttgcgctcacacgtctaattacaataaggccttagaatggttcctctcggttctagttaccaagtccaacctggttatgccttgaacacataaccctaactcttaacatactcatatactcatatatatcatggcatagcattcatataacatatatcactagggtaataaccctaagcaattaaaccgctcatgttagggtaataaccctaatcccggttactgattactcacaaatatcatttctaatataagcgccac

SEQ ID NO: 218075 - DNA, 5786 bp, Cannabis indica
aaatccatattctacataatttcctctaaaatataatttcctcaaaaaattcaacgaaataggccgatcttactgggcctaagcccattgggttgctgagctttaatgggccatgtaataacccaattaagacaacgaaacgaaccccctttaaactcagcagccactccctaacactctcactctcactcctctctctctcctcactcacgccggaaccaccgcgacgacgccgccgccgacggccaataccgccaccaccaccacctactcctctcagtccgttatctctatgtaagtttcatatttgcctttttctcttctttcatttcttcaatttcgatctgatttatacttgaatctgagtaatatatatataaatgtttataacttgttatttatatgtattatatatatttataggaacatgtgatgtgatgtgtgtggtgttagggtttaacaacctgttctgtgattttttttttctcgcagagtattttactagggtttaacctcagaaagaaagaagagtttgaaaatgtcttacggtatacaatctatgcttaaggagggacacaagcatctctctggtcttgatgaagctgtgctcaagaacatcgatgcttgcaagcaactctctactatcacccgaacttctcttggacctaatggtaatatggtttattcactatctttatctatcttcaataatggcttattatgttaatctttgtactgttgttcttggaaccttggaatgagatctatgctatggtgttaaaaacaactctaggcagtgtttgtaaaaaaatatgagaaatttggagaaaagctaattgggtcttcatattttgtatcattttttgtttttcttaatttaaagaaaaaactgaatcaggcatgaataagatgagatggtgatcaatcatttggacaagatttatataacaaacgatgttggcatttttcttttttatagtagcttaattgggagatcagtatgataataatgttgagtttcacttagtgtttttctgattcttttattagaccctttgaatgatatctatggttttagtaaatagtgataacttaaatgctaggttatggtgttattctttgtaaaacttgagaaatgtgcagaaaagccaattgggtcttcatagtttgtatgatttttattattattattattaattttaatttttaataatgttgggtttcacttgagtttactgatcgttgtactgctgttcttggacccttgatatgatatctatgttggctaattgttttaaacatgtgattgggatttatattaccgctaccaagccttaactcaatgatagggtttgggtaattagataaatgctatgtgtgtgtgcgattgaaatctatttaaaaatagaaacttttgtatgtattgtccgactttgctcatgtgtaagggctttgggggatttatattacccttgtagctaccaagcctttatcctatgatagagttttggtaattaaataaatgttatgtgcgtgattgaaatctatcaaaaaagaaaatatgttttgaacttgttagtaaagctgcttattaaatagtgataaacgtctggttgtggtgttaaatcaattttgccagtgttattatttgttaaaacttgagaaatgtaataaaatgcaaattgggtcatatattttttattttttttgaatcaggcatgaataagatggtgatcaatcatttggacaagctttttgtcacaaacgatgctgccactattgtgaatgaacttgaggttcaacatcctgctgccaagctcttggttctagcaggtaaagctcaacaagaggaaattggagatggtgctaatttgacgatttcttttgctggtgagcttctccaaaatgctgaggagcttataaggatgggtctgcaccctagtgagattatcagtggatacaacaaagctattactaaggtttacttacttgcgcatgctgtcaactgttattgattgcgaatataatatttttgcaattttaatttctttgttttttgtgaaacttcagacagttgaaatcttagatgaactagtagaggaaggttctgaaaacatggatgttcgcaacaaggatgaagtgattattagaatgaaggctgctgttgccagcaaacaatttggacaagaagatgttttgtcttcacttgttgctgatgtaattttaatctcatcgacctatgttttacgttatcacttttctttgttgaaatttttgttaatgagcattttctattgcgtgccacaggcatgtattcaagtatgtcccaagaatccagcaaactttaatgtggataatgtacgtgttgcgaagctcttgggaggaggtttacaaaacagttccgtggtaagagggatggtcttgaaaagtgatgctgttggaagcataaaacatgcagaaaaggcgaaggttagtgcttactttcataaccttttaaaaatagaagctcattgttctcaatgttattcaacacgtggccttcttattcagtcaactttttgtttaattgatttcattttagttgctctttaggattctgttattttgtttatttgaaaattgaaaatattgcattaagaaacggtgggaagtttattttcatggtggatgatgctaagatggatatttcgtcctattctcttgctattttagttttcttcattgtttatccttctatagtgtaggtttttagtcctactttataattataataataatactcaaaaagcataaatcgcttaaaatatcttctagaagctggcagttttctcgtgttaagaatggatgcttcttggtttttgctggcattccaacttagggtaattaacaccggccgtcttaagcaaaatgaacttgccccttttaaatccgagaatgatttcagtcttcttttctcccttctgtcagttcctcatcactcagtcgactcccgtccctcaaaaattgtctcaatatgcaaaaatatctgaagagtttttctgattttcggtactccattctgaagtagggccttatgtactgcttttttagctacacattttttcacaagatacatattggtagctacttactattaatgcatttcttgtactttttttatgtgaagtgttctacctttttaagcttgtatgttcttttttacctacttcattcaggttgctgtatttgttggtggtgtggatacctctgcaactgagacaaaaggaacagttctaattcatagtgccgaccaggtaaattttgaactggatattttacctacctttcattcaggttgctgtatttgtttgctattatatgaacgtttctatcttcttgccaaattatttagctgttatattctgttttatttcttgcttttatttgcatgctcttgcggttacttgtctgtaaatgcatgtgttgttgtggctaatattgatcatctactcaactaacgtatcatgcaaaattttcctccatctcatgttaatgttcagtggcatccatttttctggtttcttttggttgtttggttcatattttctccttaatgaataatggaataaaaacatgaaaatgtattctcggtggaatgtttttcggcttgcaatttagtttttctttcccattatattgttgtcatttggtattcttggctcagtaatccgaaatcacaccataccaagaatactgttctgcttcttatgttattttttcttgacatttaatgtatcatgtgtctttaagtagttctcatagttttttcttttactatattgtagctagaaaattatgcaaaaactgaagaagctaaagttgaggagcttataaaggcggtcgctgattcaggtgctaaagtaattgttagtggagcagcagttggggagatggcactccatttctgtgaacgctacaagtatataacctctataaagttcttcttttcgattgatttactaatctgcaaaacatacttgtgattgttatacttattagattgcttatgatctttcttgaaattttctaatgagatttttctaagcaaatcttataatttaatttgggacatctttccttgcaggctaatggtcttgaaaattagttcaaaattcgaattaagacgattttgccgcaccactggtgctgttgctatggtaagtcagctagcatttaatagtactcaatttttgtttttatcaaaaatttccaaaattctttaacaatattcttatttttgttacagttgaagcttagcaagccaaacccagatgacctaggacatgttgattcagttttagtacaagaaattggtggtgctagggtatgtaaatactttggtattttattcccgtgttcttattatatatttttctactcgttaacatttctcgtaatgtaaataatgtgtaggtcactgttgtgaagaatgaagaaggtggaaactctgtaaccactgttttattgcgaggaagcacagatagcatcttagatgacctcgaaagagcagttgatgatggagtaaatacttacaaggtaattaattatggctagtttttattttgtgtatggatcttttttaaacttatctacccccactaaccgttcttactgggtacttttgcttctaggctatgtgcagggatagccgtatggttcctggtgcagctgctaccgaaattgaattagctaagagagtgaaagagtactcgtttaaagaaacagggtatgttttgtttgttctcgagaatcacttgtgttctgtttggcctaataaggttttaggacttgaattgagaatttcagtgcacctcatttatgatcaatacacttaagaccacagcagtagccttttttacggggtttccaataatattaatgttttaatgtttttgggtatatcatggtgtgaatattagggaagtaaccgttgctttcttctttgcagattggaccagtatgctatagcaaaatttgctgagagctttgaaatggtgcctaaaaccttatctgagaatgctggtcttaatgctatggaaattatttcctcattatatgccgaacatgcatctggaaacaccaaagtcggtattagcttggacgaaggtgtttgtaaggatatcaccaccatgaatatctgggaccttcacgttaccaagtaagcaatctcttattgaactattaaagatagtgaaaatgagccttgaaactcttctacttttttgttcgtggtgggataattatcatcgcgttacagatgattctggttcatttatttcgattggtgttttcgtctcaggttctttgcccttaagtatgctgctgatgctgcctgcactgtactacgagtggaccaggtaattaattagcatcgttaataactttagcctcggctaagctgaaagaatatgcattattttcttgagtaaaagattgtgatttttcgttttgactgaaaattatgttgcagattataatggcgaaaccagcgggtggcccgggtaaaagggatcaacctgcgatggacgaggactagttctctattttgcttagaatctttgggttaggaaatttaccaaacttgactaggctaaaattgtgtggaaattttgtttgtgtttttaagagggattattgtttaaattataatggttattgtatattgccatttgtaagctttttgcttttgagagggtttttttcttttcttttcttggttcgtctctctagctcttcttcttcttctt

SEQ ID NO: 218076 - DNA, 3722 bp, Cannabis indica
aaaatattaagtaatttaaattaagtttatatattttttttttaataatgaggtgtatttattattttatggtgccatgtaaataatatattgtgtaattccatgtttgggaaggagtgaagagatgtttatgtaactgggtaaattgtaatcccatttattaaagctatcaaaaagaatggtttgaatttgtactcttttgctccctgtccctgctcttccatttccttcttctcaatcattgtttaaggttcgttcttcttcattcatatttctatgccctaattttctcgaggttcattattattttgtacaatttcaataaatgttgttttgggttcatttgatttttgcttttttgggctatttttgagagagcaatcgatgattgttttaatatgcaaatttgtttcattgatccatgattcaaactccgaagaacgagttaaatccatttcttttgcaattcactttaccataaagaatcacaatccttaaaatcgtcttttgaaccaaccagaccgatcaattcagatcagatcagatccacttcgataaaggaaaggaagaatgcaattttttgggggttcagagatcagtccctcgccgccggtgcctacagcttccggcaacaatgctcatatgatgtacatcttcaatcgtaatggcgtctgcttactctaccgtgagtggaatcgccctctcagaacattaaactctcagcaagaccacaagctcatgtttggtttgcttttctccctcaagtcattgactgcgaaaatggatcccaccatgttcgtctttctcttcatcttgaccagttttatttgagttttttaagatttcagtatagggttaatggaatttgttttgggtgtagtgcggagagaggaaaccttggggtacctcaattgcctggtcaaggttgctcttttcacagcttcaggaccaatacatacaagctcagtttcatggaaaccccttctggaatcaaggtaatatttatgtttatcattctatttacgctatcaattggttaaaagaaagaaagacaatgtatcttatatttacttgctgattgattctatcatctatgatgatttgacccaaaattcatctctcttttgttgatatggtttttgaatcataatcctctgtttgtataatcataatctcgtcccactaggaatgcctaaattgttgatatggtgttgaatcataatcctctgttcataatggatgatgtactatcattgcagtttatcttggtaactcatccaaggactggtgaccttagggaatccttgaagtacatttacaacttgtatgtagaatatgttgttaagagccctctttattctcctggatccccaatcaggtaacttatgtcttccacttataagcttgatgatactaactaagaacacatacacacttgccatctcgatatatttgttttctacactggcatgattttatttctccaatatcttgttaaaattactagcaatcaactacacttatacaataatagatatgcttgtatttgttggctatcttactccattttgtaggcttgtcaaactgtcgtctactcatgttttgtacttgaatagatctaacaaaaaagtttttttttagatttgacaatgccttaaggttattttattttacaactaagaaagccattgtacaatttttttttggaaatttgtatttacattcttactcttgtaagtattttgtaggaatgagctatttaatacatcacttgatcaatatgtaaggagcattgcgtagtggttgaaggtaaataaccaaccaactattggaatggaacctaaagatacatcatttatgcttctgtctcatataaacaagtgtctaaatgtagtttagacccgtttctggcatcaccactctggcaatggtttccatgtacttgtttgctttgaatatagtatgtgcctaaccgatctaaaatagtgttatgtttatcctcgttggttggattatgatcacatgcatttgctttgttattaaggcagaggactcacaatattttaatagaaaaaaaataattatattttggctttagattagtgattgaaactaattactattattggttacatttgtgtcaataaagcattataaattttgtttctcaccatctattattatttgctttgaatacataatttattctaattgtctatctatacctccaaaaaaaagttaaaactattttttttaagtaatttatccctatgtatgcatgatcttagctgaagagatgcttattatattttttaaagaaaatggactacaatataactttggtattataatacttaactaatgtttggagggagaaaaaaatgaattaaatagataaataaggattaaaaactcaaagccccgtaaagaagctcaataaatcgaacaaaatttaagcccaaaaagcagaagggataacctaaaagcctataagaagtttaatggtaaagacaaaattgaagggaaagctaacatacctggctggtatcattggaaacagtatcgggataggccaaggacgatactgtactaagatagctcaaagacgacaccgtacttagtaggtgtgttcattaaaatgttcacactgcatcattgtataaaaaaaaatacagtttgaaattctttacgatgcgattgcagtttgtattttttccaaactgtacgttgcggtttgcagtttcgaatttaataatacggttcaaatttaatatatattacaaagttaccaatttttataatatataatttttattcctttttcatataagaacaaatacatgcaatatatgaattcacattatttttttttagagacaattcaatataatgatttaatgattagtatatatgttatgatgttaaaattttaataagaatttttttttcgtattgttaaaactttataaattaatttttaaatttttgttatgatgttcattaatgatgatagtataaaccgtttaaattgtatcgcaccgcaccacactgtacttttgcagtgtgatttttgtagttttaagatcttgcggtacggttgcagtttgaaaaattacataaatcgcatatgtagtttggtttgaaaaaaagtcacaatttgcaccacctgcactacgaatactcctagtactgagataggccaagggcggcaccattctaagaggctaaggatatacttaggttaatacacgccgaggtaaaatagagaaaatatcaagagtaaatcatatctcgattccgcagatagcaaaatcaaaacagataagacaaaataaagtttaagaaaaggtaattataacattaaaaaattaattttaagagaattaagacagctcatgagaacacgtatcacacaagtttaaggaatgacagcacaactatgcatgcaaaaaaacatactatgtaaaaaggcaatcacgtagaagagagagatattatgaacttgaaaaaaaaagaacccactaaaaaaaatataattggataatttgatcaaaagaaaaatttaccattttttggtcaaaacaactaataatatagaaatatatatggggcatggtgtagtgtgtttggtgtaagagtttcacttagtgggttttagttgagacgagtctaaagattaaggaaatttctaatcaaattatttaaagagtttgagattactc

SEQ ID NO: 218077 - DNA, 4646 bp, Cannabis indica
accaaagctgaagcaataaatgcttttcttcaattcaaaacctttgctgaaactcagtttgaaagaaaaataaaaagacttaggactgatggaggaggtgaataccaagccctacaagacactgctttagcccatggaattgatttccatcattcatgtcctcacacctcagctcaaaatggtagagctgagagaaaacatagacacattgttgaaatgggtctcactcttttagcacaagctcacatgcccttgaaatattggtgggaagcttttcaaacatctgtttatttaattaatagattaccaacaccaatacttgaccataaatctccctttgaggctgttcatggtaagaaacccgattatgccttcttaaaggtatttggtgttgcttgttttccttgcataaggccttatcaagcacacaagtttcagtttcactccttgaaatgtgtcaaccttggttatagtgaggttcacaaaggttacaaatgtttgactcccacaggtaaaatatatatttcaagaaatgtagtgtttaatgagttagagtttccattcaaacttggctttctaaacaattaccaagctgaaaaaccagttataattcaaagttccacttggtcagttctgccatcttttcaacctcctgctggtttttctgctcctaaaccagcaacaccctcatcgtcctcaatcatacctgaagaagcactctccacaccaacacaatctcaggtaaatactcacctttttaactctctgcattcttcacctgttgcttcacaagagtctccaatttcagaaaatgagaggggacttgccatcagctctgctgctatttttcaagatgaattcatagttcaatctgctgattcagaacagtcagcaaacacctctccagttccagttcagaccacagtccatcctcaaacaactggccatcccatggttactcgggcaaaagctggaatattcaagcctcgagtattcatgggacacacttactgcaatacagaacccataaaaggttatatggggttgaattctgtagatatgtatatataggtgattatgtaagaatgaagtactatatatagagttccaaaattgtaaaacccataaaaggttagacgttccaaaaaaagtgagtctttatttcagttaaactgaccaatatatgatcacatacatttataaataatttcttgtgtcattgtgacctacgtatataccttaaaaaacctacctcattcccaaattcacactacactactattcatcttaagtcttatttattaactggaacaaaaactcatgatatatatatacatgtatataggttacatatatgtagtagctttattattatctcttcttaatttaatctctttctgattatgtatttaagtagacttgatcaacacgttttaactctgatatgctgtattttaaataagatatactcgacagtgtgtacaataaaaaaaaatattataattaatgtaatttaataatatggagtttcatgatgaatattaaaattttatattcaattatactagatagtgttggacataaattttattttttccataattatgaataaataaggacgtgttatatcttatatttaatgtatattttttaattatattaattattattaaataacgtatattttttttaaaaaaaaaagaatttaaataacgtgtttcagtaagcgcttttcgaacgttacaaaatgatacattttggtatataaatattaatgatcttagaaaagtagctataatatatatcaaattagttatatatgcatgcatattaattacgtgcgtattttttttattcatttaggaataatagtatggaacaaattttatttatttgtaaaagacattttttttgtaaaggatatattggttatcgtcatggacaaagccacactaatacatgcactatcaattgcctcatctcaaattctaaaataaaataaataaataaaagatgtgtatatatataagtggcatatacttatatacataaataatagagagtaaatacgattctatattttgtaaatgttacagattagactatctctattttgttaaataataaaatgaatcttatatttttcaaaatggtacaaatatatataggaccctaaattgattttttataaaaataaaacttaataataatctgacttaaatgtgttatgacaaaattagttaaatttccaacgtcggttcgtgttaggaattgtctttaagttgattatattaaaaaaaaagttatcaaaatttgaacgcggggtcatatttataccattttaaaaaatatagaatctattttgttatttaacaaaacagatggtacaatttataacttttgcaaaataaaatttgtaaagaaatgaacctattttcctctgctgcatttttcctctgctggtggctgctgtgtggtccaggtctaggacaggtgtccttctctctgtcaattgaagatccctagattgatttagccgttattcttgtaatgatgtggcaatgattgcatttgtacaatttattctttgtttgttacaatttgcctacagctgtaaccaagccattggcttttctctgtattggtcattattgacccagcttataaatatattcactcagtctcttgaatcattgagctgagatttcacaaaacactcttgcattaattttctcttggtatcagagcctacggcttttctatcctctcaccatgtctgcagaaccccaaaacacagggaacaacaaccctgcacaatccaccccagccacagcagcatccacggttatgggtgctggttcaaccttttctcagctccaaaaccctgtctcaaatcacttcagtagccttaatcagccattttctctcaagcttgatagacacaactatagtctatggaaaactatggtatcaaccattgttagaggccatagacttgatagctttcttaatggtactaacatctgtccacctgagtttgttgatgcaggaactgccatggaaagcttggatactgctgattctcaagttataaatccagcgtatgagaactggatcattaatgatcaactcttgatggggtggttgtatagctcgatgactgagactattgcaaccgaagttatgggagtggctacagctgcagaattatggaaggcccttgaacaactttatggagctcattccaagtccaaaatggatgaaactagaaccttgattcaggttactagaaagggaaacacacctatgacagaatatcttaggcaaaagaagaactgggcagatcttcttgccttggctggagagccttatcccgagtctcagctcatcacgaatgtcttatctggcctagatgtgaactatctcactatagttcttcaaatcgaagccagatctaagacatcttggcaagaactacaagagttgctgctgagttttgacagcaagatagagaggttacaagctatgtcttcgaatggaaagagtttcaactcattgatggatccccaagccaactttgttcaaaaaccacatgttggaggacaaggaagaagcactgccagccatcctcaaagccacggtggcaggaactcaggcagaggtggtggaaatcgtgctagaggtagaggaaggttcaatggcagatctggagggccaaaacctacttgccaagtttgtggcaagtatggtcattcagcagcagtttgttacaatagatttgatgagcagtacatgggttcagatccaaataacccaacacacaacaagaacagcaacaacaacaacccatcagcctatattgcaacaccagaaactgtggagagtgatgcttggttcactgatagtggagcaagcaatcacatcacatctgaatcctcatcaatgacacagaaacaagagtatgggggtaaggaaaaggtcaccattggtaatggtactcaactctctatctctcacataggcaatggtattttatatactgactcgggtcaatgtttaaagcttaaagagatgttgcttgttcctgaaattgctaagaacttgttgagtgtatctaagttaacccatgataacaatgtgctcattgagttttatgctgattgttgtgttgtgaaggacaagctaacaaggaaagtgcttcttcaagggatgcttaaggatggtctctaccaacttcaagctccaaacacaaagccaactcctctgttttcaagaaaaatcgagtcaaataagcctaaagagcaactgtttactggtgttgctgtcaagtccaagtctagtgtcaatcggtctaaaaccaatgtgtcttgtgtttctaagagtgatgtgtggcataggaggttaggccacccatcacacaaagtattgagtcaagttttaaattgttgtcaagttaaaattcccaagtatgaaatgaatcatttctgtgatgcatgtcaatttggcaaatcacatgctctcccttttaaaccttcaaataataaagctagcaacatacttgatttaatacatagtgacctatggggaccttctcctattgtttctaacaatggttataggttctacatacactttattgatgattg

SEQ ID NO: 218078 - DNA, 3816 bp, Cannabis indica
tataatttaggtattattatcgccaaaattaaacttaactatttatctacaactagaaataataaaaaaaataagaattaggtttaatcaatatattaaaatattatttatttattaattaattacctctgtattcagggacttgaagcaatttaggagctaaaagcctcatcctagcataaatctcaggtcttcttccattttcataaggctcattctcaatatagcgttgtaaaagaacttgaaattgttgaaattgttgagctatttgaccagggcaacctatatcatactcatcatcactatttatattcatgttcctcctttcattattaatacccttcattcttcttttctcttgaaatttcttgtaattccaattcaaagcttcccatgtcaaacatatttgtgccacataagcggcctcgagttcatgataagggttcctatgaatgttttttggagttttattgatcattgatattctatgaacaattctctctgataccgatcttggtgacactttgattgatcttaatgattctgtaatatatacattaaaccaaactaatcatcaatatatatatttataaaactttagtgatttattaaaactatgtagttacaccgtaaaaatttaattaatttttgaaaaattctaaatataattaattgtatcgaaaataaaattaaaatactatttgaaacttgtgttcagtaatatataccttaaacaaaatttattatcaatatataattatacatcaaacaaaataaataatgactaattttgtaaaaaataatatgtagctatatagcaaactttttactaattaatttctgaataattaattgtactgaaaactagagtaaatatttaatattgtttaaaaactagtaaaatatatatttttacacataatgatgtaattaattttaatcctataattaattataagtgaggtaactttatttcacttaaaattatataagattaaaattatacacattattatgtgtgtaaatactaagtacaaattatttaaatgtgtttctagtattacttaattaatcataatatcaatcgagatattaaaaataaaaaattcccaaaaatattaaaaaatttccttattaatgtactaaataagtaataattggataatgatataataacctgtttcatgaagcttttgagcagtgattttgtcaaagaagatcatttcttcatcatatttttgaaaaacagtgtaagattcccacttaggacaactccttctcgaagaagaagagaaaggatcgtctgttcccgaatctctataattaatcgaacttctccattcggatgagctcttcgatgttgatccaacggtacaagaatctccatacacgtcaccatcatcatcatcaccaccgtttattattcctttcatttgtaacattttattattattattgtccaataatatttgaggagtagtagaagctgtagtactacttattggtccaaaactaataaacttattctcatcatcatcccctgaacaataaaaaaattaaattaaattaaattatagaaaaatttacacaatatacttataaaattaagtgtatttttttatttacatttttacgattttttttacaagttttacttgttttgatgtaaaaacaaccttattttttttacaagttttacttttttgaagtatttatgaaatattctcttaattaaaagaatatgaatgaaagtacaacatgtgaatatagagatacgtaccatgatgagagatgggccatgcttcaattttattattatttttggaatctttttgatgttgatattgatgatcatcagtatcattgtgatcagattctgtatcggtatcatgtatagataataattcagtgacataattttgttgattttcttcttcttcttcttcaatttcttctactaaactctcttgtggggtgatgaaatattcttgatgatgatgatgagaggttattttgatgatgatgatgatgattttgatcaataataacattgtcgtttgtgacaagatcaagatcaaaacgacaacaattattattgtcgtttggtaagaagaaaagagattcaccaccacaaataatgtcagctactaaatgatcattattattttcttcataataacaatatttatcatcattatcattatcatcatcttcttcttcttgattttcttcttcttcttcttcttcatcatcatcagaaaaagtgtactcatgattactgtattggcttctgaaaagcaataacaaaaacatatataagtgttaatagtaaagagtagtaactagtaactaattatgtagatatataatgatatggattagttactaccttgggaaaattggattggttccaatgaagtggaaaattttggtgaggaaaatgaaagagagtgatgagaaaatgaagaagagtttgaatgaagatgaggcattgtagaagagcctaagaagagcttcttcttctttagagcaataacatgccattctttcttttaatttggttattggaaaatgatgatgatgatgagtggcctcaacacttgctttttacaaagctagctaagcacatccttaggaaagcgtgttctttggtttattgcttttcttttctttttttaagaaaagaaaaataaaataactcttccttattatgtttggtcaagtttgttccttgtgtcttgtttttctccttcttaaaatgaccattatgtcctctagcttgaagaactctttttgttagagaaaattgttaaaggacactattaatatttagagcattggtgtttaacacattttacaagtggcattttaaaaattattttcttaagttatatgggacccgatacttaattacattaatagtggtataacaccaaggaagtgctagtcatcaggagtgccttttagtagttctctattgtttaacactttatatcatatatattattaaatgttattggacaccaatagtgcctagcgcttctccttgtgattagttagcaatacttcttaaaagttattatattaaattatatgagactcgatacttaattaataattatatgacatcgagagaggtgctaggcactactattaccttttagcatttctcaatgttattagtacaatttagtatattaaggaggactgttgttttgaacaccactttatatgtaatattgttattagtgtaatttaatattgagtttcacatatttgaatttaaagtataatatgtgatattctctactactcaaaatgcaccaatatatggtacgaattatacgtatcgatactattatgaggcaagattttacaagtgattttagtaatttttaataattaatattaaatctaaatatgcatgactccatattaattaattacatcaataatagtataacatttaaaataatattagatactactaaactttattaaacattactcctttataacaatcctctttgtataagaaccacaccaatattcaattaaattttaacttttgatcatgtcataattaatttccaatctttggatattgttagggcaaattcatctaattgtcaagctaactagtaatatatatgtacacttttttccttaatttattacttgatatggctcaactaaaacataacacaaaactatacttattggtgtcctgttgcacaaggcatttggaatcttatggaattctcttttctacatgaagtaaaagaagagattgattttaagaatgttttactttat

SEQ ID NO: 218079 - DNA, 1562 bp, Cannabis indica
atatatataaatatatatttactaccaaatccatacatgggaaagttgttaaaagaaactaaactatttaagcatttaataaaaataaatttaaaacagcatcaaatctgaaaaataggaaggacatacaaaataagaagagatatgaatatcttcattataattattaaatgacattgagtgttgctaaaatcttcgttgcagttgcagtgccaagcatcttcgatctcaaaagggtgcaacatactcctagtagaagctccactgcctccattcgtcttctactattctttgaactctccttatacgagtaaatttgtaaaattttaatctaaattccttgaaatgaattatgggaagccctaagtagaattgcaatactataaatttttttagaaagcaattgcaacattttccaaagtaccctttggacaaaatgagcaaccatgagtagtgtggctttaaaatgtgagggtaatatagtaaatgtgcgtatattctcaaagacaatccacccaaatttaattcccctttcctctttttggcgcgtccacgttgcattcacacagaggccttcttcacttcccttccctctctcaatctcaatcttaagaaataaaagatataattaaaataaataaataaataaaagcactttttgaggaattggaaatattggagcatcaaacaaacacctttgagggtaagcatctctccttttcgatcgaatatatattatactttctttcttgctcttttctttcaatttcctgcccttttctctcttcattcatcactcttatcgcttccacacttggattacttgatcccgattttggcttgggtaatagctcattctcgctatcctttatctaattattttatacttttcttttcttgtttaagttacggtttaagattatcatttgaagtgttcagctatttgattttctgggttgttctttatttcactgattctttctttctttctttctttttttttttttttttgcttgttcagctttattacttggaaattttttctttggttttgtgtgatgctctaactcagttttgggttttgcttgattgttaagtatgcttgagttttggggtgaaatttttgttatgttttggaaacacttaaatgggtgtttgtatgttcgataatctgagatgggtatggtttggtttggttttgcttattgtgtagggttttgagcagaaagtattagagtgaggtttgtgatggataagggttcgaagagcaaatgcaagtctgtaacgcacaagctttttaaggacaaagcaaaaaacagggtagatgacttgcaggctgtgttcatggacctgcaatttgcaaggaaggagagccgtactattgatatggcagtccttgaagaacaggtcaatcagatgctccgtgaatggaaagccgagctcaacgagccctcccccgcttcttctttgcagcaagttagcatcatataaaaatgttttttgccattttgagtgcatatcttgaactccatgtgtaaataagtttgtacatcaatgtatgt

SEQ ID NO: 218080 - DNA, 5130 bp, Cannabis indica
agtttttttttttgaataagtatattcatttattctatatacatatatatatttgaaaaaatcataaatttgatttcatatatatagaagttttataaaactaaatttcaaaaaattattcattaagaccaattagaattaaattgacattgagtattgtgggctctgatgtcaacttggtaaggaatttattttttaaagggttgttgtcttatgatctaaatcaaactaacatggtattaatttcttaggaaaaaatttagcccctataagtgatttaaggccaatttccttatgtaacattttgtacaagattatctcaaaggtccttgcagtggtcttaccgtagctaatctcagagaaccaaaacgcattcataccaggatcggaggacttatttcaaacaagattataatttcctatgagattatgcattacataaaaaggaagagaggtgggaaggaaggttttacgacttgaaattggattttagtaaagcttatagctgtgtcaattaggcgtttcttgaagcaatgatgcataagaagggtttcaatcatcattttgtgtgactggttctacattgtgtctccactgttcagtatacgattcttaatagtggcagggaaatgggcccaattgttccttcaagaggtattcgtcaaggacatcccttatcttcttatatatatatatattttctccagaaggtctttcttccctagttgaacagtttgaaacttctggccaaatcaaaggctataaagttgttaatggtgctcccgttatctcgcatatgctatttgcatacgatagttacgtgtattgtagggatagtgaaagggatgcttgtaatctcctcaatctattgaagacttttgatttggctttagggtaagttattaattttgataagtactcagttttcttcaacactaactcacgtcttgatgctcgaaataggatttgtcaactaatgggtgttcctgaagctgatggctctagtttgtattcggggtaccattcttgataggccgaaacatgaaggctatattgggtttttccaaagacaaactttagaagcggattcaacagtgggaagggcacttcttgtccaggacaggtaaagagattcttctaaaaaaaagtagcacaagctctttcaagttttgctatgttaattttcttattacctgtggatacatgccaaggtcttgaaggtattatgagaatattttggtggcaattttctaaggaaaagcaaggtgtcaactagataagttggaagaaactttgcaagcataaaaacttgggtggtttggcctttagagatttcaggaactataacttagctatgcttggtaaacaagtacggagattactaatgaatgaatcttctttagtttccaaagtttataaagctagatacttctcaaatagttcttttctcacagctttccttgaaaataatcctagctttatttggaaaaacatatttgaagctaaatatcttattatggtaggtgctcgaattcatattattggcaatggtgcaaaatcgacatcaccacggatccttaactgcctgacttgcaacactcatttgtttgctcttctcaccttggttcaaaggataaaaaagtggcaagtctcaataatgttgggacattgatattattggggatttgtttgatgaaagagaccgttcagcaggataatggcgatgttcaagcagatggtgatctttggaaagattactcgaaaattaaagtgccaccaaaagttcttcatttttgttggggagctatcacagggtgtctctctactaaacttcatttgcaaatgaagtacattaatgtcaatctcttatgcctcttttgcaatactcaggtggaatcaattctgcatgttttagtgagttttttctaagtcatgttggaacacatcaattactagtgtcagggtgattaatgtagttcattttaaagagtggtcctatgttactactcaaggaagaagtgatattgtcattgaagaagtgttgatgatattttggtctatatggaatgctcggaatgatcttttttggaatcaaaaggtaaaaacaacaacaaatgtagtgttttctacacaaaccttaatcaatggcgatgtactcaacaaagatgaatgtagcctcttctttttcatgatgtcaaaggtttagagatagagcactagactaaatctttaaccaatatgcttaaggtaaatgtagatggtgctatatttgatgctacagattcttttggtttcagttttattgttagaaatcgcattggtcagattattgatgctgtctcagtttgtaattcgggccaagtttcacgtgaggttgccgaagtaactgggattaaggaggtccttagctagattaagaacaaaggttgacaaggtgtctcatctcgaaacatattgtcatgtagttgttcaagctattgagagctctgtccaaatactttctgcttttgatcttttggtttaggactgtaaacagctcctggcatagtgtaatatgaatttatgttttgtcaaatattctgctaattacagcgcgttttcttgcgtgacgttattgtaattcgtgaattcgtattttttatgattacatctttccttgtgagttgttagagattataatggctgatttgatttattattaaaatgtttgtttcaaaatcaaatcaatctgttcagaaactctaattgacaaaactgacctcatatatattcttaaaagaaaaactaacaagttttaatatactcatcaaactttttaactgaacattgaacaatgatcttttcctgtatagagattgttgtttgaaatttacttactttataaaataacatatttttattcgagttggtggataataaataatcgatggcttatacgttgtcggttgcatgccaacaaaatagaaattaggaatgatactggtatttatacgtacattattcaagagttaatttgtattaattcgatctaattaattattataataataaagagctaattaattaattagtttaacattatataacaaagtttactttagttatataattcactataattaattagctagttatggctctctatggatacttaaagttctttccatgatgattaggaacttgattgcagacatgacagaccaattatattcatctttagtattttttttctttaccatacaaaaatatatatatagtgtttagatttttttttatttttttaaaaaggtaaaaattatgggtggatgatcatcatcttaattattattgattaaataatcaatttgatttaataggctactaataattaacaagtttaaggtaaccaaaaactttccgtccaagtattattaggttgattttgtttaagattatattggtatgatgttctcaaaataattaatataaattggaatactaaaatagaaaatataattatttgaaaacttataataactatgttttagttagatcactattaattaatttatatttactataaataactgttacttttagtgataattttttagtcataacataatttagtcacaacaaattattttgccacggaccttttaatcacaacataagaataataatttataattagttagagctttttcacttttagtcacaagttttgttgtgattaaaagtaaaattttttgtagtaattatttggttgaatgaaataatctgataaattgttgtaaaaagtaatgtaaaaatattaatatattaaatccataatattaagattataatatgctgtttggaataagctaatgctagcaagagaatggtaatgtaaaatatactcttttgttttgagggtttaatcttagaatattattcatttagtaatataactagccttataagaaggtaacaaagctgtttggaatgagctagtattgtttgtttagagggtttaaccttggagtataattccctgggcgtttggcatgaggtgttcaaaataatttgattataagaaatattatgaatgagaatatgattgtaggaaaatatataaactgtgtggctgtgtgtagggtaatatgtaatcacattcccgttaattgaattacactgtttgtttgaatacataattcttatataatattttaaaaattaaaataaaaatagatttttattatatctatttattgttaattatacataaaaataaaataattattcattcaagaaagaaatttattaattagtaaatgaaattttttatatattttattactgtgttatttatttttatttgttatgtcatttatgtacatcatcagcacaaaattaaaatataatgcatatatatgcatatatatattattgttaataacattaaaaaaaaaaacctcagttaaaacaaaacaccgatttcacagactatatatatattgtaatatattttgttcataataaatcataatgatgtacataaatgacccctaaaccctaaattcgaacccggacccaaaccctggaccccggactcggactcggaccccagactcggacccacaatccgatccggacccgatacccgagacccagacccgtaattggtataaggatcgagagtgtattaaaaatatattataactttacataatcaattaatacaaattaataccaaatattatattgtattaaataatattaatacaatacaatacaacacaatccaacataatacaatacaatacaagttaataccaaacattgtattgtattaaaggacaaatctagatggtgaatggaaaacatcacagtacataattcaaacaaaaaggtataccattaacatgatcatgatagattaatttgctaaaccaaaagcaaaataaaatgaaaacaaaacttgtcatccagtccagaacagaatatttaattagtttaataatttatatttatacgtacaaaatattattatttaatatttggtcctccgacatattgtatcatgcacatgtaatgtgtaagtgtattgatggaatcatatatacactagaacctctatttaagaatactctattcaagaataacctc

SEQ ID NO: 218081 - DNA, 5600 bp, Cannabis indica
ttttttccctttattttcttgggtaaagattatttaatatttcttcattaacgtctttaattccggtattttgatataatagtccccaagcggtttctttatttgcatctaagcccaacttctgtgagctgtcatctcctccattcttgtctgttaagttaagacttaagcggcaatttccttgaatagccaaaagaactactctatttccttccttccttctcgatctttcttttctgtttttcgtccactaaaataggcagatctggaaacttccatatttatcctcctttcttttctccactttccctttaatacttttctcagtttttagggtttcaacactctcgatcttctttgctgtgttaaagatttctaagaaattcctttctacacatgcatctcagttgctgatttccgagtttttccttcaccgttctttgatccctcgcatcaggtcaacatcatttcagaccagaaggtaaggctttttgtttgccccctacttatttatttattttttctgtgctagtttattaggtcttgacgattgtgattcaataatggtggtgattgggtttttagtagttgcgtttggttgtcacaaagtggatgcccgttaaatgttcgtgtatctgacttagaaacgtcgttttatttttaattaatgagaaaaaatagaaagtgaaacagatccatgtgcgaatgtaccttacatttgatcgttattctatcaacatttacattcatccattattagatcacattattgcactcttcggaggtggaagaagcagtgctaagagggtatgattgtctgaacatctgtctgggttagctcattagtggacaggactaaaatgagtggtaaaataaatgattttttttttcttttctgaaaatactagtgggatgaaagaaagagcatttttcattttaaggtatactctgcacttatattgatctgataaagtcctcacactagatattttctatctgggtattatttggctctatgttgtataaatatcctatatcggtggaagttcaaatatcatgatggttattttcttttacttattattaaactgtatttgtgcttactttgagttatatggcaatgggtgtggaaaagcatatgtttcttagaatagaagaaaaccttttgtcccttgtgaaggctcaaaagcatgaggataaaagaacataaaataaaataaaaatctcatggacccttatgtttcggagtaagtgtatagggttaaggtgggtaaatttgaagacaacttttactgtgactcgtgttatgaattctaaattgctaatgttattacttgtggtagacactttgtagtaataaattcatatcacttcttatgacgggtattgcatttacgaaggattatattgtcctttgttgggataccaatttctattacatcttgtggttttaggagttagtttgctttgattgcatctgaagttgcttgcaattacaggataggttgaagaagtaccgtgtattgtttcccatctgagattcgatagggacattgctaggacatctatatcttgtgttttcgtcatggtcgtgaatacccgtcctcttaaacgaatgaagagccgagtcacggcagatctctatgacttcctcacctttccatcaccagtatatggctctaccaatggatcctttaggacaaacatcagggcattcctctcaaagcatgcaatgttgccaattccatcgtcactcttcccccacctaatgacatggcaaattttatttagggttgggaatgtgatgagtggccttgattcgctctcagcactgatttgcctagacattgttgaggaggatgttgccatatccagatccacctattgtgaccagtgccgagttgttggtgagttgactcgcttagttgaaatctcttgtctttctttctatctataagtttgaataatctcaattctataaatttgattattgtcatgattcttagttcgtcatcaaatgattaatgctagttcagaacttgtcaagcaaaatttcgtagttatttagactttttcccttcatcttttatttatttagaattagttaaatatcttgagataaaactattagtgctgattggtatagtattgagatttaactttattattttaaaaattaaaaactaaaagtttgttgtctcacaagaatttcatcttttttatatttagagaaattatattaaatggtctgtaatagtggaattctcgagcaacatgatgtttttatgagttattctagcaaaatgactcacttttgctctaattaacttatggtttatcatatttgcttactagtatttgcattttcacttgagttatgtgcatatgattcatctaatttaatatctatatatttatgctatttgtattccatcttttatctttagcaagttattttgctactcttgactcattttgatatcattcttatccaagccccttgtataaaaacaaatttagatttagttcataatatggaatatactagtatcaattattaaagaatcccaaccatttgttgccttttgaagtgcaggcctttttctacttataaaattctggaaatctggtcccaaatcaaaattcaagattcaatatttaatagatgaactcatgtaaaccctgagaaaaacttgttaggtcagcttcacaaggaacacatttaattattggttaaccttgtttttttttgaaaaagagacagaggccattgtcttagactggcccctattgaaatctgtcacttgtgacggaggaaaaccttggttacaagagtcttagcataaaaaatactaaaacctacacgaaaacaaaaccggactcaataaaaacagtacttgttattcctaaaaggaaattacatcaaatttctccattctctagttaaccttgttctcaataaaaacagtacttgttatccctaaaaggaaattattggtaaccttgttctttttctcgcgtttgtattgctgcgtgtaagaggtttggggcaaacaacagttggcgtaatttacaaatcgtaactacactgtttcttataataatattaatttccaaatgatcacttctgtgttgattcttattaaacagcacatgtaaaagatagaccaaattgcatagaaaaatcctttctataggcaaaaataaggtctcatttgctcattgtacctgtgaaatttcttgcttccttcccggaaaagttaaaaacttgtgtttagcttcatcgaccaattttttccaaatcattttgccacaatggtaatatgaagtttttaaatatcttccttctctgaaaccttttaattaaaaacttagatcggagataaaaacttttaattttataaatttgatgggtcttttgtttgaagagtttgaagctttatgatttgtaaggatctaaatgaagcttatagattgtttggaggcctcatgaattttatctagagctgctgcataaataccttagtaataaataagtgtctcaaggatcctagacagaggtttagtgtttgttttataaagggttaagttgtaccttgtgattcacttttcttgggcctaaaaactgccttaactaaccttagcggttactggcaggaaaggtcttgagggagtatgactatggcagatatttcatggtcaaataagtctttattgtctccaaagacttggcgttggggtgtaaggaattttagtttgggtgggccaggtatccatgtgttttgttaaaagtaaataataaaaaacaaataagactgaattgataaacaggggatgcttcaacaaaaaaaaattggggaatgtttcagatctcattctcaccctctacatcagaaaattcatactataacgactaccataggctaatgttgttagggccattacccatagataataaatagtaaaatcttagttgcttccgcatcttttcttttttttaaaaccgactcgatggattgatatttactgaacatgctctccatcgtgttagtcttctaagtgcttattacgtgatagtattacagctattataactctcaaggctactgaaaaaccttctatttataagtagctattattactccactggagtctaaatactctgaatctgcatttcatttttacttcattttgtggagcaaccagtacttgtatactcctatacatagtctcatttagaattagcttttctttgtacctgctacttacaatttatgtcattttgtgaagtatatgtaactcctgcactctttttcttcttgcttacttgataccttttttctatgttgtttgtcgtattagatggagtcagcttctttttcatactttttgaaaattctctcaatctttcccactctttatacagacttaaatattgaccacatctttaccttattgtttaggattaatggctgaaatagcgctattatacaaaattgttgaagaaactataaatatatttttaacctttatcttctttttattattattattattatgccactttcttttttcactcatatatttttaatcttcattaattctcttatttgcacttttatctcaagagaactcttatgtttttctttgcaagtgagtccacttgtacttgattggtctaaattataattttattgcctattagaactattcaggttctcattgtgattaaaatatatttgttcattttggcttttccttgtcctaagataaagaaaaataaaatactttttcctatacagaaaagattgttggagtcgaggtatatgtatatttttttttaaaataaaagtacaagtgaagattgatagttgtcaagttaggtaattttttgaatacagtgaaattaggtcatgacacggaacaaaacgattacaatttctggcaatcgttttaagttatttgtggctaggataacattgaggaatctcaagaattctgataagctatatttcttttgaaacatttaggatggagtggccatccagtctgtacgaaacggtaccattttattatcaaggccgatggtaattccattggtggctatcacaaaccctgtatgttctgtggagatgtcctgcatttgtcagaatccaagtgaggaccttattttctttactccatatgcattgaccccttttaaattactgtgatggaccttattttctttactccatatgcattcaccttttttatattactgtgatggaccttattttctttactacatatgcattcaccccttttatattactttgatggaccttatattctttactacatatgcattcaccccttttatattactctgatgctatgttttgattcagatctctgcattgttatccatttagtatatcttccattttgctctcttatagaaaatttatggtatgtgctctgtaagcttgtgctcaaacagagacacaaacagatgcatgtgtttatggatgcatgtatgcatttgtgtattcaagggatatgttccatttctactctttcttattctcctttatttactgctttgctttttaaaattt

SEQ ID NO: 218082 - DNA, 2968 bp, Cannabis indica
tcttggttttgcattcctggtgacataccaagttgccgagattcttattttggtggggcttgtttctttatgtcaaggagttctgcgctcgagttttttaaactgtgtgaggcatttttttgctctcttgtcattggtgtgtgactgactccttagtaagcctgctccttggtgagattgccctattttggggtttttggttcctaattcatgttgatactctcttggaattatcgagggcttagcaagcctgaggcagttcaatcacttcagtcgctaatccgtagcaagaacttggatgttatttttcttatggagaacaaaaaagagtaaggaagagatggcagtgatctcgagaaggttgggcttccctaatggttatgtagtctttgctctaagttaagctggaggtattttcttgttatggtgacgaggtcgggacatccagatttttacgagggacattaatatgattttggctcgtttcagagctttccaacatcataaatcttggttgagctacttcatgtttgctcctccttgaagggagcaaagagatgtgttttggggtaagatgactcaagagattagcgcttaccagaacccatggatggtgacgggaaacttgaactctgtcctttctcaagaggaaaaaattggtggcagacgagttaccccggttgaaggtcatgtgctccaagaatttatctttcaaaatggggtcgtggatttagaaggggttggagctcttttcacgtggaccaaaaggcaaggttgggctcatcttatcaaagaaaaattggatcgtgtccttaggtcgactgaggggctaatacaattcaacaaagtcagcctaaaaattctaatatgagacactgtgatcttgctgtgattgtgcaagatacatatcgggattgagaaaaagttaaagctccttttagatttcttgatgcatggactcgtgacccaggatacttgaaagtggtggaggaactgtaggggcaaacagttttagggtaccacaattttatcctatgtactaaactaaagttgattgcctatgcacttaagaagtggaatttagagtgcataggttgttagaaaaaatccttgtggaggttcaaattagaccccctcttagtcatatttggagcttgaaagctccttgatgctagagatttatgagattgaaataagacgagaatctatatgaaaacaaaagtcaagggaattgtggcataaggagggggattgtaattccaggtttttccatgcctcaatggttgtaagacgcaaaagaaatttcatatgagtggtgattgatgatgaagttaattggattgaaggtcagaatcttatttaggcgagtttttgaatcacccaatccaactatagattcagagttctttgggttaactcaaccttgtatttctcgggaagataatgaattactagggactgttccttcgttggaagagattaggaaggtggtttggtcgtttctccctctcaaagtacatggttcagatggtttccaagttaaattctacaaatattattggtgtgagttggggactcaagtgtgcgcttttgtcacataattcttccgcgctggcaagtttgttaaagaggtaaatagaacatttttggtgcttatccctaaaatatcaggagccaaatgtttcaacaactactggcctattagcttgtgcaatgtgagctataagatcattgcaaagctacttgctaataggttgtgtaaggtacttgacaaacttatttctcctcgctaattggcttttgtcaaagggaggtgaattgcaaaaaactccattattgctcattaaattatccacaactttaagagaaaacaaggaagggtggcctttgttagcctcaaatgtgatatgtctaaggcgtatgactgtcttgaatggtgctttttagggaaagctttggatggctttgggtttgatgctcagttttgagggttaatcaaacattgtgctatcactgtgagtttttaggttcttttaaatgtcgggccaacaaaaacattttatctaggccgggggttgagatagggagaccctctctcactgtacttatttattttatgctcggagttcctatctcatatgttgagtttgaaagaaaatcaagggaaaattagcagcatcaaactgaaatgggccatctattactcacctaatgtatgctgatgatacatttatctttgttagtgcttattgtttaaaaaatttgttatgttttatgtgttagtatgctttcattcaggaagagcattttctatgctcttttgttttgtttctaaacttcatgcaaatttttatcttataagatattttgtcaatcaaaatgtcaaatggagagattgttaattctatttttggcatctttagattaacaaaaatattttataatttgttttttaatttcagctgagttgtattatttatttccatatatttgtatttgattgattgatttatataagatatgaaaagtgactagattttctttatttggaaagtttgttataaagggtaagttttatgaataaatcaattctatctttttgttgatccgatcctttatgagttttttaattggttttatcatatttcttgtgaagaaaactaaagtaagactttctttttctataaaaggaaagtggcacttaatggttatgattttgtaagtatagaagcaaaaattcttaagttgattgaagatcttttttaggaaagtttcttatgagttgtggtcttgttcaaattccatatatgagctgtctataaggtgtatattgactataaatacacgttataacagctaggtttagtatctctttcatctctttgaatttcattcttattttgtgagaaaaagtatttttgttgtgtaaaggagagtgtgttcgtccctttctccgtgtttatgtatt

SEQ ID NO: 218083 - DNA, 4133 bp, Cannabis indica
tttgttttgttgttttttatttttaatgcagaaagcttttcaaagtaatcaatttgtgattggtcactttttggtgtacttgttacttcatgctgaaagcagtgacaatatcattttttttgtgtctgtatggttatgctctgattggttttgatggtggttatggtgatagagatgatgattatgagcaaagctaatgttgattacttatgattgatgatctgatttttttgataaggaatcatcaaattgttattccagtagataaatgcgcctttttatgcattttatactcatgggttgaaagacttaatttataagtgtgggatttgaatatggctattgctggtctacacaatgtttctgtgcttgattcgtctttccttagggactctcagactcgagcaccaagtcaaataagtgatgaagaggggagggtaagcacccgggcatcctcaattttacaaatgtggagagagcttgaggatgagcatgtggtgagtcgagcccaggagaggttcagggatagattgttccaacaaaggggtgatggatttattgcagatctttcgagaacagatagttccgaaagccatggaagcgatcgtattggtgactcagaggttgccagtttgggtgagaatgatcatgaggttttgagtaattataacagtgagcattcttctgattttggagaggttgaaagggttagggtgagacaagttttccgaggatggatgaatagtggtgctggggaatgtgtatcaaatgtttctcagatcagtaacagtccaagggcccagtggcttggtgaaaatgaacaggaaagggtgagagttataagggagtgggtacaaacgaacagtcagttgagaggtactcgtgctggcagcagagaaaatcaacctgctgaatctggtactcagatagaacaagtccgtgatgggttggttgttaaccagaatgaaggccgacatcaacaagttcggaggggaatacgtaaattgtgtggtaggcaggctcttcttgacatggtaaagaaggctgagagggagaggaaaatggagcttcaagtattgttggaccacagagctgtaacaaattttcctcaccgcaaccgcattcaggtctgttgccatgctagaaatttatttctataagaacaagtagatcataattatatataatattgtaactgtaactacaatcatatttgatatcataatggtgtggttgagttgtgctcaaatattgaattcattatttagtttgaggtgttaacactttttcatttttgctgatgattcaatgctactctttttttttcctcagtcattactaagaggttggttcttgcgtaatggaagtttggttgagaatgagaggccctcttctgtagctgaaagtgaattaggcttattgaggcaaagacatacagtctctggtcttaggtattttctaattcagagctcaataacttatcagataacagaagatttatcaggaacttataatgaagaacagaacatgattatttgtttagcgagtacattattatctgttatttacatttctcactgattcttttaaatttatacctacattgtaaacacagtactttctttattttatcttttgtaaacacagtactttctcactgattcttttaaatttatacctacatgtctgtctgttgtatgtgtttgtgtatagccctttactattgcagacgataatttttttgtggtgtctatcaatttttaataagatgttttatatatttcgtaggactcattattatttagtttgttagtttttgctcttaacattttggatccgtttcttttaacgtagggaagggttctctagactggataattctgtttgtgctcaagcaagcagcagtctttctgatacatctaatgaggacaccagttcaactcgaaatggggaacctcaagaaaataacttatttgaagtcagaggtgatatttgcgaacaatcagaacttaattatgaagggagtgaagatcaagaacacgacggccatggaatattggatggtcagagtgagttaagaggcaatgccgttgaagatatagattcacaagaatcaaacgatcacataatagaagaatggcatgaacaagttccagacaatgtggtaagagaatggcgatggtcaaccaatgctgaatttattgacaggagagatgacactgaactaaacacagatgttgactcacaggaaaatgctactaatgaatgggccagtgatacattgcatattggtgttgaagaacgtaggaatattctggaagccagttattcagccaacgatgaatctgagtcgagaagggagtcaaatgactaccctcatctatctggtcctgcagatgatttagaagataacacagttgctcatacgatcggggaagaatctgcttctgaggtagagcagtggcaggatcaatctccagcaaatgaggagggagattgggagcaagttgatggtgaatatgatgaatggactgacaaccccggtgaaaatatcgaaggaagtcagcaacaaacaaccgaatttggatggtctcagggaaatgaagacgtacaaaatagtcatttggaagaggttcctgaagagtggcacgaggaaggtgatttccaagaaactgcgcatagttggctagaagagccatccgatagtgaaactgttccagccaggcaggttgagacatattatttccccgatgatgataatgtttatagcattgaactcagggaactactaggcaggtatgaaaagaatctcgcccattcttctgcattaatattagtgggtgttatttatttatatggattcaatattttcattttcaggagaagagtatctaatcttcttcacagtggctttcgcgagagtcttgatcagttaatacaatcatatgtggaaaggcaaagccatgccgctgttgactgggagctggatggttcatcaccatctcctgcatccgttgaacaagatctcgatcaagcaagggcaaatcagagtgaggctcaggaggatgctactgttgtgagaccgcctcctcctgtggctccatccactcatccaattcctcctcctcctcccccaatgtgggaccagaggccacaccgtgatacctttacacagcatgaaatgcatcaacgatttggaattgtatgtgtatgtctctaagtatcttcaacacttaattttattaatatgtatgttaagtgttttaattgtcactaatttctttttgttattatttataggagtgggaaatcatcaatgacatgaggatcgacatggccaggctacaacaaaggatgaataatttacagagaatgatggaaacttgcatggacatgcaactcgagttgcaacgatcaattagacaagaagtctctgctgccctgaataggccagctgcttcacaaggtacacattaacaaatttagataagaatttaaagattaaagtacatacaattattggaaaaggaccataatatcatataaaaccatttgcagcagtgttgtgtgaggatgagagtggtttggccatggatgacaccaaatgggatcatgttagaaaaggaatgtgctgtatatgttctaataccaatattgactctttattgtacaggttggtagaagattctcagaacccttttcttcatttatatatatgtatatttattttagataattatttatatataatgtgtgtgtgttgttttttttatgggtgcagatgtgggcacatgtgtacatgttcgaaatgtgctaacgagctggttgagagtaaaggcaagtgtccaatgtgccgagcaccggtagttgaggtgattcgtgcttattccatactataaaaaattgattactctcattaatattatacacaaaaggaaaagaaaagaaaagggaagactttgagattaacaacatcaacaacaacaacaacaacaacaacgtagctttgtttctttctacacttcacatagtttttttcgatttggtttcctcttggatatgatttctgatgatctctcctcttattaaatatataatatacataaagagtgtatgatttcaacaactttgtc

SEQ ID NO: 218084 - DNA, 3032 bp, Cannabis indica
ataaaaaacacaatcaaattcagtaatgagagaaaacaagagattacagctaaaagaaaaaacactacaagaaaaaaggcatatatggtaagagaaaaaaatgacattagcaaaaccatactcattaaaatttgaaaacccaaaaaaaaaagtacataataatgatatggggaaggaaaaaaaaaatcaataccaagaaggaacagggattatggactggaccttggcaaccatgcaaacaaacaaaaaagcattagtaactaactaataaaacatattaacaaagtaataacaacagtaaattagtacttgattcctttagcacgaatgcctaaaattaataataataaaaaaaaatatcgacatgggagacaaaattgagaaggtacattctttctaaagccaaaatggaaaacctagctttctccgcaagaataacatgatttctaaagcaaacccaacaaggtttagctgtaataacaacaaataattgcttgaacaggcaacgaagttgatagggtaaaacccagaaaataacaaaatagaaaaattgcagaaaagtccaaatttgaggaacggaacaaatcagcaaacggaagataaaattaagggtttcaatatgaatcgataacaaaacgaaagggtatttcacagagtaccaccgacgaagaacaagggttagatgattattttgtaaaaataaaaattatattttgatgaattcccacaaacacataaatcaagagtgaagaaagaatgcataaatgaataatctttttttttttttttcaagatcgttttttttttttctttaaaaatgaaatttttaaattaagaacgaaaagaaaagagggttaaccaaagtattaaagaaaaataaaagaaattaccttgaggatcatctgacttttttctattattgtctttaggggagttttctgatcttgaattactggactttccagagcaacggaagcaacccataacggcgtcgtttcctttccacgttctctccccctctttcctcttatacttaaatttttctgagaatatgcagtcaaaacaaaaccaaaacaccaacccaagaacaacacatgaaaaaaaacagaaaaacagaggtaatgcgagacttggaaactcgttacacagagctacagacaagaaaatagaagagaagagagagaaaggaagagaaagagagagttcttctacagaactaacacagttttttttaatttttttcttcccttaaatactcagtttcctttgatttatatttttcatggtcctgttatcttctgcaaatcgacatacaaaacaaacgcacactcttcccaattaaaacttgccacgtggtatgtcgaaggacttttttgtcatttagtaaatacacggcttcggagtagctgattttaattagccccacgtcgttttataatctttttgaatagtaaaagcaaaaaaaagattgtcgtttacgtgtccaatcagccacagctttcgctgacgtgtccttctctgattgtcgtacggcgacgcttggatgcgagctggttcgcaacagatctttgtccttttttttttctttttacgtaatcaaagatttcttctttttttttttttaatacatgttttgtcttgtattacccgcctgtgacgcacacgtaaccaaacagccctaaccaccaccgtcggatttagaattggtcaacgtttgaaaaagaaaaaatgtataatatttatgagcattgttgtgaggcataattggtgtccagcacctaaagcctacgattaattagtcatatttttttaaaaaaaatacaaaaagacactcatagtacttagtacccttgtaattggtttaacacaatatcagtcctacttattttactttcgtaaatattatcgaaaatcgttaattaattatagagcgacactttatcatagtactagacactatggaccgtacgcagaactggattggattagacaggttaatttgtccaatccaatgtttgggcatgttagaagtctagataactaattcagctaacctcatctgtctgtgattatttatcacatccaacagggtgagataaataatccaatccagtcctgcgtaccaaacaggccctatgagtaccacgcagcaaagcttttttcaaaaaaagtaattttttaagttatattagatttgatatttaattacactaatagcgatataacagcaagaagatactagacaaacgtcgtattaagtcgtattatattgtattgtattatattaaattggattatatatcatatttttatataatctatgttaaactttatagtaaaatattatatatttaaatatcataaaaattaatatcaaatataatttataggaatatcaaaacaaactgtaatagtgtattttaacaatttttaatatttagtggtggggtcccacaagtgctgacgtcagctcagtgtgtgtgggacccagtagccgaaacgcgttacataccatatttaaagccttttcagtgtttgtgtagcttagctgctaaaacggtgatccacgcgtacagcgactccgctcaacattaactcttcaaacttaaaaatagaaaataaaattggggtctatattatatccagctgaggtgtaccacagaggattacttaccaccacccttgtgtaaatgaatgcgcctcttctgttttcctcgctactagtttcgagtttattttaaataacgttctagaaggaaaagaaaaatttatgacattatggttttacgtgtttcatatttaatgtcaatatttagagatatgtatttgttgcataattaatcaaaaatttaaacaatttcatttaatggccaaactacctcaaaatttactaaagcactaattttgtctatttttttctttttcatttttttcatttttatattttaaaataattttttaaataaattttacacaaaatctctataacaactaacagagtaacttaaatctcaactaaaataccgtatgtc

SEQ ID NO: 218085 - DNA, 2955 bp, Cannabis indica
attattttatatttttaataaataagttatactctttacccgctaatatatataactacacatattatctactcgtatcgtaatgtaaaccgaagaaattttgagaccgacaacaaatttagcttcataattttaacaggtcaggtaagttctccttaaaaatctattttccttgtgctccaaccttctattatattaattttttggtttgtttcagtgcctgattacctttgaatttgtttttttgggattttcttttctttccgattttcatttcccagctatttaattggtcaattgtttaatttcgtgatggataactattaaattatttagtcttgaaactcatttgtttatagattttattttgaaatggttcggttatgtgatgcggatgtttttttttttggatgaatttttgggggtgttggtgaggtatatttatgatattctgattctgctgtggatattgggaaattggtttttgttatcttttgtttgtttcgaacggggaagaaaaaaaatcagaattttcccgagaaaatgcagtattttcagtttcaattcatgtagcaggaagtccacacactttcctttcagttaactcactgtcacactgcaacaatttggctgactttaaagatagaagaaaatgcaaaataaaatattttagtcagtgattagtttgagggggtttatttatttgtttgtttgttgatttgattttctttgaccgaaatgagaatttgaacaatgggtgtattgaggctcccattatgtttcttatgggtgttctatgacttggcttttcagagttcaaatggctggaacacacgtgggagtgatatgaaggttcaacttcaatttgagtaattttgttgtagcaaatattccgtttggtctcattgagatgtatgttacagctgaagctgaagctgcagacgttgatgagatgggctattcaatgagtagattggagttagagtctgatatctgtgatggtgagaaaaacatccctgaagtcagtagtagtcaaagatccaccagaccattaaatgttctagaccatgagatagcccagattacaaagttaagatcaggacctcatgagttgctaagccatgttgaacctgggaggagggagcagcaagtgtctacagtgaagatgcttgcacgtcgagaaggtaattattctggaagaggaaggttctcatctgcagattgttgtcatgttttaagcagatatttgccagttaatggtccatggcttgtggaccaaatgaattcccgggcatatgtctctcagttttctgctgatggttctctttttgtggctggattccaggtatttaatctaatgccagaaaagaaaattttaaatcttctaaatgttgaaataaagacttaaatccttggtgagcttgctgagacaaaatgacagaaacaagtaacatttgaaattaatgggaattattgtagattccattactgaaaacttgatgttggaattttaaatttttcatttcgtcattcctttaaggaaattttcaagtcctacctaccattctgaaagaatattcatttgcaaattccagggaagtaatattagagtatacaacgtggacaaaggctggaaagtgcagaaaaatattgttgccaaaagtttgcgatggactattactgatacatctctttccgcagatcaacgtcatctggtaagttgtatatcatttgtactttatgtataattggtgtttttgctcttcataattttgaaatgccttttgttttatacatgagatttatggtttctgggaactaggacaaaattattggtaacagaatttgattttccacataacatggctcaacttttgtatgctttttgctgcgtttagtaaattccttttgttcacatatctttcagtaatttgaggatttttctcaaagtgtcattgaagaccttatctttaatctaacagacttatgttttggtattgcaggtttatgccagtatgtcacctattgtccatattgttaacgtggggtctgctgaaacggagtcactagctaacgttactgtatgaaatgaattataatttatttggacaatgatattctaatttgtcactaaaagaaaaatgagtttttctgtaattttggctttttaaatactgttgcaagattgtaactgtaaatgattgctttggcgtttataaaatttcacttaaaccctggatatctctgttcttggatagttacctttcccaaaatataaaatgtttatttgttttgcaggaaatacatgaaggtttggatttttctgccgatgatgatggaggttattcctttggtattttttctgtgaaattttcgactgatggaagagaacttgttgctggaagtagtgatgattccatatatgtttacgatcttaatgcgaataagcaatcccttcggattcgggcacactcggtatatagccatatcatagaagtctttattatacccctctcttattgttttttgatggcatacattttatcattgaaaacttaatgtggaatctttgactcagtttatgtgttttttcttcatttgtgcttcatctacctatttatgttgagactactcattgttttccaagtcaatgttttcatatttgcttcattatactgaataatgtgtaattacccttttgcatgactttcattttgcagtcagacgtgaacactgtatgtttcgctgatgaaagtggccatcttatatattctgggagtgatgatgctctctgtaaggtaaatatagcaaaagtgtatccttctttgtttttcttttcatacaatatgtttatttattagttttcccttgaaaaaagaaaatgcatgttgcaccaagaaatgtggcatccaatctatgttgtggtttggcctggtagagaaggccattaccaat

SEQ ID NO: 218086 - DNA, 5834 bp, Cannabis indica
tacagtgttctataaaaataatactaaaacgataagaaaactacataaaaatatatatattttttaattatttattgtttttgtgtatttgtgaaataattcctttaaatatatctttttaatttttgtcaagtgatatgctaatcgtgttgctcatggccatttgactagagtttcgtggttaaatgatggttgtacttatttaaattgtacgattccaagtagattacgtgttattcttttgaataatttaagttaataaaattgcattatttactattaaaaaaaataaacactacaaaaaattaacttttagtgataatttttagttacaatataaattttttgtgactaaatgtgacttttagtcacaacaaaaaattatttgtgactaaaacgttgtatttagacttaagttgtcactaatttaattttagttacaacaagtattacgactaaaaacacatttagtcacaacaaattataatttttgtaactaatacatttagtcacgaaccttttaatcacaacataagaatgataatttataattaatcacaaacttttactttgctactattttttttctctattaaaatgaaaagacttatcacaaatttcatttttgattctatttacaagtacaaaaacaatatacattttagctacccaaaacactatattcagagctttccatattcggtatactacaatattaacaactgttgtataaaccttttgacgaaaatatatagaatatatgttattataaaaaaaaaaattaacttgaaatttaagaaaaatattaggtcaatatgcattcattattttctttttatttacttattgataaagtaaaacaattgccacctatttcatagaaaaaataaaagaaatgaaacaacaaaaattagttcacatgacacaacatatagcaatgtcaacaaaaaaaatagagaaagctcctaattaataaagacattttaaatattgttttttagtctatcacacactttactataaactatatttttaaatgctttttcaattgtagtaactttttgttcccttaaaactgcatttctactcttccacacacttggtaaataaggtggcaatgaaaatctttcttcttcatcttgtggccttacaattttcaatattgtactattcataccggtctacttgtagcattttttaacactcgaagaaaagatgttcatgggtctcttaacccaaacaattaatttgaatttggaataattccaaaattcattagcttgtctctcgtagctagctagtttctttttgagagccaaccacataataaatttgtgcttggaagagcaataccggtctcaaatcaaagagaaccgccacttcgaagagagattcagattcaattttgaacaaattccagcaatagagaacttataaagctgaaagtactttaaccttgagaagatacatttaattaattttttaatttcgtttgaacaattttcttccaataccaacttaaatagttgaagaaaataagtaaagttaaaaagttatcaacctacttgagatgtgcacaaatatatattagataaatagagggaggtttttaggtaagagaatcacttttgctgtaacggtagaggcgtttcaaatttattttcttattttaagacattatatctcttttttcacatgtgatgttgtgtattgtagttgtattaggcattctatccattaattttcgtgaaattctaaatactttagtatgtaaaaaaaaaggttcaaaatagtctattatatacgctcgtgcaaaataaaataagcacgcatgtaaatttgtctgaattctatttttgacactctaaattatttaatttttttaaaaaaaacaagcaaaatgtcgtaatataagcaaaactgatactctcactaaagaatttgattctcaacgagtcgtgggaatccttgtgaagaaggagatatgatcttcgctgaattacagacagtattgcaagacatagtctcgccaaatgagagtgcggtggctggatttttgtttgcctttaatcagtacaaaaaattttacttttagcaataacaaaacttgtgactaaaagtaaaaacgttgtaactaattataaattatcatttctatattataactaaaaggtgaggttcgtagctaaaaatattagtcataaaaattataatttgttgtgactaaatatgtttttagtcacaatatttgttatgactaaaactaaattagtgacaatttgtatttaaatattatattttagccattgtgactaaaaaattattattaaaagtagcaattttttatagtgaattgaaagtttttgtcattgaaaaaaaaatataatttaattatggcacacatataattcttattattattcattaaagttgtgaaaattaattgttgataacagtcatgtacatacaaaaaaattcctcaagaaatagaagacaatacacatcatcattataattatatttctaaacattaataacaagaaaagaacaattattgatatgatgattttccagttgtataaatatatctatatatatatttatagaatagtatagagagttagagccaaatgatatttttctttaaatagtctaatcagaatgtgcaacgacaaaaaaagtacgtacgtacacgttaaataataatcgtacacacagagttttaattttgcaacataaaataacgtaaaattacaatattaattaattgttcattaatcgaacaatagctgatctaataatagcttcataatcagttgaaaattgatcaattgatgaagatgatgatcttaccaaaacatcttgaaacaaaagctccttcacacttgatatgctgacgtggataatctgtaattgaagctctctaagtgcattcattaaccttgctgatgggtaattcaaatctggacactgaaccctaatcatcactactgaccccaacatcttcacatcaacatctaaattattgttattattactagtattactagtattagtactagtactacttttacttggtctcatcatcatctgatgatgatgatgttgttggtgttggtgctggtgctgctgctgatgttggtatttgttggtttggttttcgaggactactttcgcttcaagctcttctactttggcttttagctcgttgatgtagacaactgcatcagcgagtagagaagccttgtccattttcgagacatttggaaccacagatctaagtttgtagaatctgtggttcagtttctctctcctttgtctttctgcttcgacgtggttaacgggcatttgagattcggtgggggtggttgttgtaggctttcttcctctttttttcattgttcccgaaatttgtatattctcgttgtttgattgtctccggccacagtcagtactgttagccggagtataattagttgcatctgaatcaggttcagaacgacctgattcagatgaagatccatttctgatttcgctagtgccttctttttgcttattagactgtaaaaatagattatttgaagaatgtatttctagaaatggtgtcatatgatgatgatgatgatcatgattattaccatggatcctctgcaccatattattattattactaccaaatagagatttgattaattgtaccaaactccaatcatccttgatgagatcagacgatccaagctcgagcactccattaggaatggagatgcaaaaaagggtttgaacaccatgcattcgagcttccttaactcggtcgcaaccgccggtcatgaactgaaaattctggctaccgctaagccaaatatactcttgatccgaggcgaaagcccgggtcaagattcccccgccgctccccgaaaattggcgcgtaaaagacaccgtgcagaaccacccgatatcggtgcctccgccaccgccagtaccacctccgcttctagtatcaacatccataatttcatcatcttgtgctacttgttcagggaaaggagttttgtatctcggcataatttcgaaatcgaaaccgaacggtgtcgtttcgggtaatctgttgttgttttggggagtagtgtttttattaaggccgcggaaatgtccatctccccaagataaaacgacgccgttgttgtctttgtaagcttgccagaaaatagagtaaacccaccattcgggtcgggtttggattatgaattggagcttttgttggattgtcatcatggttatattttcttgggttactgagacatgatgagatgttgaagaacaatttggagacataataagttcttccattacagaaaattcacttagagaaagagagagagagagaaaccaaatatatgagagactaaatgaaatgaaatgaaatgaaatgaaaaaggagaaagtgtgtttgggtatttaaacgtaaaaaaaggtcttatattaactactcatgttttgtctcgcactgattgactattctaaatcataattaattaataaaatgttgagaaaaacaaaagagaaactatatgagcacaaattataatatgatgttactgttttctttaatttaaagggcatattgtttattggacattagtagtgcccaattttttttataggtagaaccctacaattaattaatgatattttttcagaaactattttttttaaagttatataggacctgatacttattacactaataatgatatggtaccaaagaatatattatacactattaatacattttagtaagttataaggccgagagccaatatttattatactaataatggtatgacactaaagaagatattatgcactattaatactttttagttattctctttgtaaaaaaaaaaaactattttgttaaataacaaaatcgaccctgtattttttaaaattatacaaattgaatcttgaactaattttttgtcaaaataaaacttaataataatccgatctagaaatgttataatgacaaaactatttacattttctgtatctgttcgtattagaaattatcttaaaattgattatattataaaataaaattgttaaaaattgagctcaaagtcttatttttaaaaataaaattattaaaaataaaactcaaggtcttacttttaaattgttaaaagaaagaccccgagcttaatttttactatttaacaaaacaaaaaattaattttatcatttaataaaataaaaaattcaattaataacttttacaaaatacagctatttataatcctactatatattacatacacatatgtgcatacatagtaatggtacgtaggatttgaaaccattcgatttggataagagaaatgctctaacacatatttaaaaatgatatttaatccaatttaatcacaataaaatatttaatatttagggctggattataaatggattgaatactcctacttgtaatctatcaatctcaagcctaaacagacagaatgaaatagaagtgagaaagagaagaagggtcatatatatatacataaatatataatatatatatatatatatatatatattatggcacgtgaagtgtttgatatagtcaatatagaagttggattttgctatatagttacgtacacatatataaacaaggcccccacccaaattaagttcaaattaaccacgtacagagaccacacgaattgaactctaagtactcttccataaatatttattatttatacaatatttggaaacaaaattttctatcctaaaattagtgtgccctctatttatacttatttaatatataa

SEQ ID NO: 218087 - DNA, 9807 bp, Cannabis indica
aaaaaattatcgaaaagaaaaagagagtgagagtttaaactccatagaaaatttctaatcatttggacacatgcaaaataataattcaagatggaatcccataagattgatgccttaaaacgaagtgttttcttttacaaaattttcactctttctacactcccatattttgttgttttatttttacactctttttaataataataataataataataatcatttataatagactaatgctaacattatacccatacaaatatttacataagaaaaaatatatattttactgtagagctctttgactagctttaattttctattaagggggtgtttgtttgtagcttttcaatcattgtcatttatcaaaaatcaatagcctcatccccacttcttaaaagccttctttgacttccttcactctcataacattttttttcaaaccctgaaattatagatatatatgattattatagtgtgtgttaattttcattacatatgaattcaatatataaataaagcttttggtgagttcaatgatatttacaaatacaaaaacatccagaattgtactgtttgtataacttgtatatgtatgttttggctagtgcaaaaactaaagcctattaagcatggactaagggcactaccaacaggtcttaacaatttgtaacttgtccaaactctactaaactacaaattttcatacatattgatagggaaatttgatataatatgcataaaatattttaatatttttttcctaaatccatatgtattaaaattggccatatatgaccacattatcatttttcccataatacccctcacatttgaaatcccaaaccaatcagcctcctctctctccctcttgctcaaaccacgctcaaacccacggtgacggcgcgcagcaccccattcgacgcacggtggacccaatcgacgaccaaacccacgaccctatcgacgaggcaatcgatgaccggatccacgacccacacggtgcatgccatgcataacaatgtcgaaggtgtgtttttattttcttttttggatccgaaagtgttaaccatttatgtcgaatctgtaaaattggaaaattttgaagaagaagaagaaggcccgttgggttcgatgctagtccgatatgggtccgataggcccttcaattggtttaaatatgtgtaagtccgatgggtccgatacctaatccgatgccgagtctgatgcccagtctgatgggtctgatttccctattgatattagatattggaccatgaaattaagtacaccaatacggtgactaatgcaatatatactttcttttggaaaaggcttacatttcaaaatgactaatatacattatttatacaaaataaaacgacatgtcgcctgataacggcaggcatctttgcaatcaggcttagaaacataatgttgttatgtccatttttacgaatacgacattttaaagtataacacaacacaacaacgtaagggtttcatattaagattgatagaaaaatcacaaacgacacttgaatcaataaacgacatgaagctcacagtaacttaaacttacaaaatgagaagggcaaacttgtctaaatcttatcagaaatggagtcatgaatgaatagccataaaagcacataatgaatatcttgcacattattaaacctgtaagctctccagcatcactacatgaatcatgaatagttaaaatacagttgcaatcataatcctcaagtgcatgaaagagagagcagagcttattggtttgattatctaaatgggaaaactaaaccctatcaaaccaagcaacccaactaccctaatattaatagataaaagaaaatgatcaaacctttttagctgaattgaaagcatagtttattatataaacgaatgatcatcatataatagagaatttgtaatgggccattaatagatagaaatattaaattacatgtgaactattgggacttaagaggagtaacatgcatttgacaagagtaaaaaaaattacatcttcaaaatttaacttgcagtcaaagtcatgatgggtttcggagactacatgaacaattccgtgagttccccctcactttttactcaaagtttcagataacatacgatgatctgagtaaatggtaaaaaagaaaaaacagctttaggaataaaccaatttcaagttcgaatccacgattcattattgcaacaatcccatgtaaccaaaccctgaaaagttaaaaacaaaatattgtgatcaggacggaaatataaatatggaaacttttcctacataatttggattgttaagtagaatgtcaaaaactctaaatactagaattaaagaaaacaaagaatcaaattgaatgactgctggagtaaaccgatggttcaattatacaagttggcacgaaaacaaagtatacaacaaatattgtatggcattttggcaaagatagcaaacctcttggattccctattctttttccataagataatgtccaaaaccatctaatcctctatattctaaataaataaggtggtgaaacttcagatctataagaccactgcctttgtctctcatcaaagttcactctttacttgaaataaaaaataatcctagacagctcttccaagttcctacaatgattcacaacaaagaagccaaagtctcttgacatgagctaaattaaggggaaaaaaaacattacaggcctttttatcttaaaatacaatgggatttgattcatttccctaaccgcttgagctagcctcaagtggccttaaaaattacagagacttagtatatcatcacctatgaaaatcgagcatccataaacagagtacaaaaccattaataaatggcttgcaaattacaagtaggtttgcatgtgccacgagtctttaaaattaacctagaccacacaccataaaagaaggacagttaagtctgttacactaaccaacaagcacacaagttgcaagttcacccattactattttttccttgcatctcaaaagtctcccaaaacttctcaaatcaacaattcggatctttctacaaaactctaaagcttaaccccaaccaaacctcaatgtagcaaaccataggtaatgtaaaagtaccctacattaactgacataatagtgcaatgaacaaaaacaagaattttacaaattagacacttgaacaatgatcctcaactacacttgaacatatccacatggtgacatggcaacgaaactacgttaccaataaaggatcctcgattacacttgaacatatccacatggaactgaaacaatgaaactacatgaccaataaaagatccttaaaattaagacacaacacctaaagtcctaaaaatacatcgaaatggagtagtgtcaagatatcatgtctagttagaccaacaaatggagtagtaaacttaacaccactacaatacacccaattcagtccaaaaaaaaagttcaaaccattagtttgattgtagattcaatctcaaatccttaattagaaatgtttgccatatatactttaatgacaagaagaaaccaaaattgttcaacttataagaaagaaactccaaagaaaattcctcgtactcaacaatcagaattaagcaacaccaatattcagtacccagaaacaaataaaatagcggaagaagtgaacttttcaattggttaccaatttaacgagctgggttaagagccaaaagcaagttctttcctccgggcaagtatgcgacattaggcgacttagcaagcgttgcagccacttccctcgaggcctcaatcctcctaagctcaataagacccataccagccgcagcagtggcatccgagatcagcttagcagactcactctcaccctgggccctgataatcgccgctctcctctcctgctcggccttagccacaacgaatttggaacgctcggcctcctgctgagccacctgcttctgctccacagcccgtgagaactcacctccgtacgacaaatgagtaatggccacatcgtcaaggacaatgttgaaatctttagctctgcggatcagactatctctaaccatggcggaaacgtgaggccgctcagtgaggagctgatcggcgttgaattgtgctacaacggccttcaaaacctcgttaccaatagaaggaaggaccttctcgtcgtattcgagaccaagagttttgaaaatatcgggaaggcgactgacttccgggcgagataaaaccctaagggtaagattgaccatctgaagatccttggtgccagaaacggaggagaaggtgtgaggcctggtacgaatatcgaagatgaagggcttctggagccacggaatgaggaaatgggtcccttctccgacggtctcgtcgatcacaccacgaaatcggtcgaagagtacggcgcgctgaccaccgtcgactgtgtagagagatgagttgacgactgtagcgccgactccgagaccgaatgccgcgcgtgcgacgttggtgaggaaggagacggcggcttggctgctccccattgtagtgatctgaactgagctaagaaattagggcaaaaatgtgtggaaagaggggttttttctttgctgtgtaacaaagatttcagggtttatggaaggtgcttctataaaaccctcaacttgagaaacacgaagtgatttacttgtatgggcttttaggcccactatttcgactggcccaattatatatatggaaaagagaaaattagattgtattacattttttaatatttacttttatttctatattttttaaaaatatattttgatgtccccattatacaatacaattcaggttaatgtaaattatgtgttagacttaaatgaagggtgaacaaaagtggttacattttaatgaaatataatttgaaagtatttttaattaataaatacaaaaaagacttattcttgaacttatccctataaaaaaaaattacatcgatacacgttaaaatagaaatattaatatggtatgacaaaagtttacaattttactatggagcagaattttttacaaaaatactgtctttttataaaacaatcgtaaaacaacaaaataaaacaattaaaacaacagcgaaacaactaaaaaataatcgtagaataaccatgaaaacttaacacagtacacaatataaaacttacacagtattttttaaaaaaattctaacccacaataaaaaaaagtaaaaaaaaattgaaattttagtatgtgctgtaaaagcccctattaatatctgcctctcttacacggttgttggaatttgactatctctatttttttgagcctgattatttagttttgatatctgtttttttaagaaattttttttataatgatttaggctctcttttagatgttcttttttagtataatgttcaatttttctaaaacgtcccttattcatataaattattcaataaatatgactatgaatgaattagttgtacacatattttaaatgaatagtgagttagtttggatgaaaaaatttccatctattatttatgacgtactcaatgttattttttttttcaatgaaagtttgtttattattaaaaaaaatgaatttcaatctcaatcaactccattattcataagtgattttataaattgtcaaggcatatattggtacattttaatattgagttcaacacattttaatttaataaataataaaaaaaaaattgttacctaattataataatgacaccatatgagtattgtgtggtaattaaagtgttaaataacaatcctctattaaaaaagcttaattatatacaaaacggcattataaccaaaaaagtcttgaatgaagagtagtaagttggcattgagatgtggcttaacaaccgttgatttcgagaaagagagccttgatgatcacattacttcacgagatgagtggcaaggaataggtagagttcttctgtacaaaggcaaagaagaacaagtttttattttctttttctttgttcatatcatatgcaaggattacaagacaaataaaaagtgaaaaagaataagaaaaagtggtaaacagagaaaactaataaacaagttaaacagagaaaactaataaactaaatagtttttttcatttggaattaaaatacaactaaagaaagggtaaaggccaattgacatttttcaattccttagagcagaagtaggcatacatgagaatatacaagaatacatctttacaatgttttaacataaactgaatttaaaattgtgcaagcactaatgccatcttagactcgtagagaagtgtgtactgataattaagagatggacacaagtttacagtgtaatgagatgggatttcaaggttagagaattggcatttatcttcaaaaaaccaaccatgaaacataagaggaaaatgtaaaaagaaaaatgaataaaagagcctaatccacaagaagtctgaccccttgatacattgcaccagattgaagatcatccaagcaatcaatacaccggtagccgcttaattctctaaaaccagtcaacccacggcgagttaggaaatcacggaaatcatcctcggtatagaatgttactgcttcgtcacgaaccactccacggttcgactcatcataaaagcaaagtttaatagtaattcctgtcataagaaatcaggagaggttcatatatgtgttccagttccatcattcacgatgttaacaaagctttttgttgtttcaccagactctaccccagaaagatagaaggtaaagaaatgaaaccttcatcaagatgcagagtatagtttcccagaggcatatccctatcaagactccggaccacctcatcttcatcctcgagccaaaatgcacgctttgttcttattctgaatgcagatttgattgcttcctttattgcctcagcacttccatcaataccaattcttttgctatattctcccaacttgaccgttatgattcttccacaaaatggaggtggattctctgctcctgaaaaccccattaacaagtatattaaaatcctcaagaaacaaagaaagactcaagaaaagatttaagtatcatcattcaagggaacgggggtgattatttcttattgagcacttcttgtgcaacaagatcaacaacctctctattttaacaaaaactgtttctataatttagcaacttagtcaagctgacatcccatttccacgttataacaaaaatacaaacagattcaacagaatatagtcatgacactaacaaactccaatggctattaaataatatatcttcatccttaatggtaccaaaaccaatatttcaaagggagtcttaccattaccaggtgcctctctccaattccaaggtggaactccactagctacaactgcatcagctgcagtgatagcaagaggatcaccatcatgatccaatcgtctttccaaattgactgctgatcggtctgtagctgtaatgtgacagatatcaaattaattcctaaaagaattttcagaagaaaaaaaaaagcttaaaatggtaacaaaaacatatatagacttgccaaaccagttgaaaaatggaaatgaaatgaaattgtgtacctccaattggtccaaaaggtatattggcatcctcaagacctgtgaagaacattacccactatcaaaattagaacacaaaacaacccacaaaatttccaacactaatagtgtgattttccactgttttgaacactaacccttatcagagaaatgaataaaggaatcaactttaggaggaggagtatgactcttgtaagcagaagtggaaacagtagtagttgaagaactgttcttgttcctatccctaagcaactcctcaagatcctcataataagacatcttggccgacctactacccactttgacttgatgccgagctttcttaaactccttaagcaaattcctccatttatcagtacacatagttggtgaacgatcgaaacccttttccctcatcttagaggagatctgttcccacaagtgtttattagatttcgaagtattgaaaagcccatcaacttctcttcgaaacccaattaagcttcgagtctcttcttgaacccaagtctccgctctcttctttggggctttaacctcgtgctcttctcctccactactattctcacccagaatcatctgttgctgaagctggttctggttctggttctgattctgggtttggttcctcgggtgagaacccaagacaccattagtaacaacaacctccatcatcatatctctatctgattcttcttcttctccaccaccaccaccacccccaccgccaccgccaactccttccttgtagaaatcaactgaacgagtcttctccgaagagagatacatgtttcaaactgaacggtcttgagacgtagttgtaccggaataatttacatgcggttgtagtggataacaagctttgtttgttgttgcagagagagagagaaagagtgtgtccgagaaggaaatggaatgaagaagaaagaagaaagaagaaatgggacttcgagaggactactgcgagggaaatgtttctatatggacgagaacacaaagagcgttacacacttgcccaatagtatttgaacacgtgttactttggttttttaaattttgttaggatttttgttatataattcaaaacctctctcataacttatttttgtctctattttacaaaaaaaaaaaaaaaaacttgtttttgtctcttaagtgatgccatttttgtctcttatttttatttttttatttattctcgtacctactagtaatttgggttttttttttacaataattatttcaaaaatcaaaagtgaacttagataacaaacaagagtgtgagtttacttaataataatttgattatgattatgcgttttaactaataatttgtttaatatctaatgaattatttactatagatgaaaatatattgcaaatgaattggtaggaaggaaaagaatggaaagaaaaaaaatattctcatttaatactttagcgtaattggattgaaagattctatttataccacgttaataattaacgtaattattaaaacgttatttttatgtatataatttctacttattttgtcaataacttattaattacatagtaacttctaaatacagagatagtaataaaatactacattgcaaacataaaaatttcattatagtgtctaatatatttaagatacatttggtgatacttttttaatcaattttttatttttaaaataaaaaaagtgaaaatattttcaaaatcatattttataaaactgtttttcctttttaattttttaattaagaatctaaattctaaagacaaaaaaaaaaattaccttcaatatttttttaaacaatttttttaatcagtattttaaactccaaccctaacttagactttgaaaactaaattcaaccccgaacttagacccaccccaatctcgatctcaaactcgactccgaactcgacttaaataaaatcaacaaataaaaaaataataaaattataaaacacacttttattttttatttttaaaattgaaaaacaaaaatgataatgaaacatatttttatttttcaaaaacaaaaactttacttttatttttgtaattaaaaaattaaaaaataaaaatattatcaaacataacttgaatattttgaggacttatttattttcacttaaaaataggttttttttttatttattttacgaaattctacctagaaact

SEQ ID NO: 218088 - DNA, 2847 bp, Cannabis indica
caactaacgctgcaacccttttagaaatcaaaaccgtaagtttgaaaaaaaaaagttgaaaaaagaggtaattcctcaatttttcaagttacagttattttactttaatcaaaattataaaaaattattatctaattatagaatgcaacatctagtaaatatcttggtatttgtagcaataacataacatagtccaatagcatgagatgagaatgtacatttgaaaacaataggttcatatcatagaaattattattacacttataagaatttcaagttattaataaaatgagcaatgcatggaaaggaaattaatttacacttaaattgaagtgagtatatataaaacaaaataaattaaatgtagggtatcatgaaaatccaaaataatgaatgtgtccacgtgttgccattggactatgaatgcatgccaaattagtcaaatagtcaactcttgtatattttggtttgcttaattaaccacgctgcagaaccttcttacttctcccttgcgaccagtaagaacctcaatggagcccatccgcaccatcgccctggcaaacttagcagcccacaacgagccatggcgggcattcaacgacaccattctcgatgtcgagccactactcttgagtgtctgatccgaagtaaacaaccctcgatgatttttcaactctgcgtagtacacgttatcaagacgaagaggagtacgagactcaagggccacggtcggattaacaccgccgttactcgtcatcatcatcggaggaggacacctggtcttcaaaaaggctgcgtatctacggtccatggaagggtcttgaggatgagtggaattaaaagtgtacaaacggtctgagaaggaagagcagtgggatactccaatggagtgtgctcccgagagagtcaccatttcttcggcggacaatcctttctttgcgaatttttcgatgagttgcttggcgttgagtgatggaggtggtaggttttggcctgcttcgtcgctcagggagactaggccgtcacggcgtcctgatgggactgcgtagttgatgcgtcccgctatgttggcgctgtcacgtgcggcgaaagcgagaatgtctgcacatgatacggttttggggcatatggattcgagtttagccttggcttcttcgattacatcgaaaccacgcaagcttgggttgttggctggatgatctctctcggctgtgtttcctggtgtggattgcagtagaactgaaccatcacaaccctgcattgaatattaaatatatgatcaaattcaaaaccatatatgatatatgttcaatatttagataataataccaattatttttagctataactattatgagagagggaagaggtacgtaataattaatacgtaccctaacaaagcaatcgtggaaatgcaatctaataaggccagcagcgaagcctggattgagtgacacagctttgtttacagctcttctaacgattgactcagctgctggacaactccttctgtaaaaccccactttcagaccagacgatcttgatgaagcagcccaggtggctgaagatgatgatagcagcactagtactactatgcaattatacaccaccgtcgacacagactttccataacccatttttgttgttgctagctataatacgtacgtatatatatagtttgaacgttatgtacggtattcggtatttgaaattatacaaaatcaagtagaagagattggaggtgagacaagtatttgtattatatgtagatcgttaattaactatcaatgaatacaattgggcaaagagaaatgaatatagatgaagatgagaatagggtttatgtaggttatttatagtacttataattaatagtagtgtgtaaaacgcaaatggttttcgttttgcaatggaaaacgtgtatatatatagctatatgttgaagttttccaattttagcaccctggcttccatcagctattgtgtttattatttctttattacatatactaatttattggaatcattttcattaatgtatacatgtgtatatataatataataattcactactagtaccttattatatattaactatttccgttgttatatgtaaatttcaaacttagatcaactggcagcttcaaataaaatggtttatatcttttttgaccaatggagaagagatgaatataatatatttagtaatatacatggacattatgtatattatatatatgaactcgttttcatgagatcatcacctcatctacattttccatagacggctaggtttatttgcttgaatgagtatacacatgattagttgatcaggtctcgttagctgactttattatatatattgctaatgagctttcatttttatctatatattgcgaacaagtcgtgtagtaaagtgtaaagattttttcaaggtctagatattagttgaagacaattaagtacaaatattatatttaatattgagcatatgtagtggttatatatgtttgtaagtaatctttcggagagaggtgacaggtatatttacatagtaattgaagagagctagctagacagagaagtaaaacaaaatagtgagcttcgtagaaatttcacattagttttttttttttttctttttttgtagatttattttttagtatgaaagatgccctatataaagaaggctgaaaggttgcagggtcatctccaattcaaactaaaatttcatctaaccccaacgcatgttttgcaagtttgtgagcaaaggtattggtagtacacttcacatgctggaatgaaaaattgggaaaatgagacaaagtgatcttgatttgagaaatt

SEQ ID NO: 218089 - DNA, 3819 bp, Cannabis indica
aagcttttaatttttgtttgaattttatttctttattatgaacttatgaaaatttggtactttttatattcaggggaccatgaatacattgatgtgatcaaccacaaccatggtggtagctctgagcggttgatcattgatatcgattttcgcagccattttgagatagccagagctgttgattcatatgacagaatattgaattccctgccggttgtttatgtggggtcattaactaggttgaaacaatttctacaagttatggctgaggctgctagattctcccttaagcagaattcaatgcctcttccaccatggagatcacttgaatacttgaaatcgaaatgggaatcccattacaaaagacaagcataccctgatatgcaaaacttgagtgccaacccttttgaccacaagcaatgccgtggccatttaaaaaggttgcagtctctgcttcaagccgaaatcgaaaccgagcggcttttaaagccaatgaacaacaatgacaataattggagaattaagcctgagagaaggaggcgttatctttactagaagttctttcagatgtataggttttagcccggccttttgagactaaagactagtgaagactgaagagttcgtgttatgagatttttattgcgatttattaaatttttttccccttcctacagcggatactaaaataagtgaaccaaaatgaagagcaggttcgcatgcccagttccaataggcaacgatggtgagagaaatatatatatatatatacacacacatacataatatatatattcttttgatatagttttctgtttctatgttgcactggcatcaagccccaatatttggcttttggaacatttgcggattttcttcttgcaattccaacagccgaatgagttgctatcattgtttggtgcatccatcttatagaatctttacatatttcttaattggaaaaatcctcccttatgtattaatattccttgtccctgaatttttgtgggcaagggaaattttgtccctgcatcttatgttatttttcgcattgtaattcatttatttcatttaatttaataataatggttctcttccattttcctatcgaggtgaaatatgaatttgctttaaatctatatcaattagtatttgtggatctactttagatatcagatgttttgtgttctttgagtatgtacagttcccctatcaaggatttgcatatgggtgtttaatacttgggaattatgtctgacctgttaaaataaagtgcatatctattacaatatatgcctttatatattatgccataatgtggtgacaccttgcaaattataaattatatatatatatatatattcagtatcatccgtaaggaataaggaggaaccagcgtgtgttcgatttctttatggcttttctgccaggcttgggacttttaatatagtttaatttgaagtaataaatggggtttcgaaccctatgcagcggtggaaattttgtaattatatgatgaaaatgaaaactatctgaataggcatcatgcactataaaaacaattgttttgtggggtctgacagatgcatacagaaaggaattttaatatgatgctttatgagtttaacaagttcaaattatttaatatgtaaaacgaaaaggctgcttataaaagataatctaatagcaaggatggtctttattctggttactgtcttattgaccaagttgctcactcatgtcatcccatctttcatgactgcaaattttcctgaaattaacacaaaatatcatttttatatcatcagtacatgatattacataggatatgtaaaagtgctcctaaacaattgaagcaaaacttttctatttttttttcttattattattattcaaaatacattattaaatttatattttttctatattacagtgcactatatataaatttgattagtttagtcgtatcaagataaatattaaatattacaatatcacattaaaaaacttaggaaaagaaaattaatagtatatttatggagtaatcaatcattttctatatactaacaacagataatctctatatgaatattcttcattggttaaaaaaaaagggcaaaatagctcaattttagctcgattaatgaaagttcacttcgaccacattttctttctttattttagttagggaaagaattattttagagagcagtttctggggttgttatgaatgttatgcatcataatattaacactacgtcactacctttaaccatttaaaaagtttaaagttggacccatgtatatgaggtactattagtctattacaacattcaagaaatgttgtattaatctcaaatacatgtatacagtatataacccacgacacttttcaaccaagaacaaataaaacagcaacaatgccttgtgttctatattatttaggatcaattcaaaactaataacacttttaaagaatacttatatttttgaaatgacaatatggtaattggaggtgatgaaatagaaaaaaaaatagtttttttttgttgcattttaaaatattggaatgtcattttaattaaatgatttttctattattgtgatggaatgtctattttattttgaaacagaaagaaagaatatttcaataatcaattttttataggttttaaatttaatcccattcttattgtcattggtatattttcattcttaaatcagaaagaatatgaatagttttaggaatgacaatagggtggataaatgatggtttttgtaacaatagagtggaataaattataaaaattatggttactcataccataagaaaatcataagttcaactccctctatttcaacattaatatacatataaattattaacaataatggtcattctgttatcagcagtttgagaaatggaggagaaaaagtaaaataaaattctcaatcaagttccaaaattaagaaaacaacacaacattacttacagtaaaatattaatttgtactaaaatttaattgcatggctttacttctaattggtgaaacgcaaatgtgtatattttgatgttataaaaatcgtaatgtgtatgtaattaaccaaaatattccaataaagaatgatctataatcatttacgttcataacaacaattaaattcatatcaaatgaacattttgttattataactgatgcaatcaatcaggctgtcccaactcccaagccaattgagggcttgggccgaaaaatttagttaaactatctttgaagaataatggtaaaattctaaagtatgatatgttcaaaaacaaattgagccatttttaaaataaaatatcaaatatagtgattttaataataaattagaacttttttaagaaattaatttttaaatttgatggtaaatatttgtaaaaagttaaaatttagtattttaaaaaaatatagaaaatattttttttctaaagaaaattttgggccagatggaggcttcggcaagggcccaccccgcctaatctttgggctggccatggacgcaattggttttgttttagtagggattgaagagttggattgaactagtttattatattatttttggttttaacaaaaatactggattttggacaaaaatttgtaattttactgtcacacaggattttcttgcaaaaatattatcttttaattaaacaactttaaaataagaaaacagaacaactaaaacaatagtagaataactaaaagtaacagtggaacaaccgtgaaaacttaacatagtatacaatataaaagttacatagtattttttaaaaaa

SEQ ID NO: 218090 - DNA, 5190 bp, Cannabis indica
aagactgtgaagaatccaaacaactaaaggagaatcgggctcagatcttcgtgatactctacgacaacaaggatacaagggttagagatatgagcgaaaggagtcatttaattccgctgcaaccaatgtaaggtttctcataccttttatgtgtttattttcatcgttttataaattcatatttaggttgttaaaaatatacttgttagtaaatttagatcctggtaaacatattccaacactgagggccagtattctccctagggagcctgcctttctgcggaccttttccctttgggaaatcaaagcagactttttgcgaatcctaagccttcttgtttttttgagggaaagacgtgggattcttctttggagagccttctgagggataccgaatagggcttggctctcgacttttatgtcttcgagcatttggtgaagacttttctcttatattgtctggtccaagaggcatagcctttggatgcacgtgaatgcctgctgtttccatagtcttttgcatgacagctattatttcttgtatctttctattttgttccttttgccagctcggctttgtgatcaacaactctttgcctcaaggacattagttcagtgtatcttccatcatcataggcgtcatactattcttggttttctttatactctacatcatttgttttgtcttgttcttctacttctgcgtctattcgcgaagctacctcttcatcccgtagtcctctgggaccttaggatggacaaggttgacgtgtatggtttctagtatccatcatcgtagtctgaatcttcttatattgttattttatacgtaaagccttctacagctctcaatgaaaataccgaaatattgaccgagatttttggcaactaattaattaaaactgcaaaaataattaaaagagagttaatgcaaatatttttacgtagttggggcattaatgaaccttagtctacgagtcactgatatttaatatggaggtatttttttacagagaatattctactctattttttgtgatccccattccgaatgtggttggaggtatttatagcttttttcagagaagaaaaaaggcttctattgtcccaagtgttcaccttggctttgcacaagttccaaaattaggaaaataaaatatgcatgtctacatagtaagtcacatagggtttaggtgagataagcctttatccttccttgattgacgtgacagttcattatgtagacgtcactaatatcctcgtttaacgcgcaatagctaaagaatagatttaatgtgtctgacacgcctttttatatttgtatgtagacatttcctccttactgcatttaatgcatgtgaataaaaatctctgaaaccatgcgctcgatcgatctgaactttgtctagctctcagagatgagcaaaaatgttgacccctctagtttcaaccataactccaggaggagcccttcaattatattcgctcaactcataagttttcttaagatatccctaagcacctccgaatcttaagccttaactgccacgtggtcggtcatagagttgccacgtatattgagagaaaagcagggcaacatctattattgttttctttttaaacaataaaatagaaaaaatgtttatatttttttaaagaatcactattgaaacatcgttacctattgcagttatcaaaaaaatatatttctattattttttttaagtaaaaatagaaaaagtatataatatttctaaaaaataaaaagtattataaaattaaaagtattacgattaaacaaaaattataattaacaataaattttgaataatattatattttctttttatgaataacaattaaattaaatattttttaattaaaaataatgttgtttattggataacactttaattcattccgtggcgcgaaatccatcattggctaaacaatcatttggttatgccattttgggctttgctctaaccgaagctatataaaaaagaactaattatataactaaatatatgtataattaaaataaaaaatcaaaatataactaagtaaatgtgttttgcacatatttctaatataatactaatattttaaaaagtaaaaaataattttttttttcttaaattttcaagtgtaccaagtgaaatcttttatacccaattgaaactcgggtacccaaaatcctacacaaaaaacgagtgagtttagtaggtagtagttttccacatctaaaacccaaaaaccataaatttagaatactcgcctggtgtacaaccctatcattaacgatacaaatttaaagagttttgaaaattcaatcttaaaaaaaatacaaaatgaattatcaagcaattatttttgagcaattaataaaacaaataatttaatttttaaatatttttattgttcataacaaagataatctctttaagaaaacatttaaaaattttagaaaaaatctataatatgctatatgagtcatttcgtacatttcttatttatttcggtatttagaatttttttttaagcccttaaactaagtgggtcttaagcgcaggcctaacctgccttaactcaaacccgaccctgcccttaacatttttccttccttttataccaaacaaagtatggtaattcttttttctacgtagtaaataaaatcacacatgattaacaaagcagcaaaccataatcgatgatagaattttctcgaatcaggatagctcatcgtctaaccgaagaacatgttttgtcaaaccatgagctgcaaaatcctaatcgcgagccacaagagacaaaactgcttccgaaaatttaaacaaaaaaactataacatcttcaaacaacaccttatcacattgaaaaaaaacaccttcccataaacatgccataaatccaaccaaacacaagtttggagaaagagacaaaaaatgttggcgtattgtaattaattctttaagcaagggtatttattgttagcacccaaattggccaattatatatttatttaatgtaatgtcttattattatataatataattaaaaaattattatagttttatttttaaaaatagaatagtgttgttgtgattttaatatttctctttaggggataggggatgaggacgagaatgatggagtttatttaagctttggtccttctatggtggtgaccctcctcctactctccgcttccacttccacccacccctaaatcctatacccactttccttctatacccttttccgaaatcacactccggtgatcggagctccgttttctctgccttgggtcggcgactctcttttaccttcttcatggtcctctttcttcttcatcattcccgggacagagaagcagagctggaagctggaagataaggccgtgttgaaatcaatttgtatagggagactgagaataaggaatcccaagaagaaaaaaatgaatgggaatggagtggcggttggaaatggaggaattggtgggttggaaaacgagtacattcgaagacaccataggcatcaacccggaggccatcagtgtagctctgttctttccagacacatcaaagcccctgttcatcttgtacatctctatatctatctatcctttattgctcgttcgtgtgtatacgcatgtgtattctttcaagctctagggtttatgaactgtgtttatcttcttattatgatctatttatttgatttcgtcaactttttgaaaaattattgaaattgggtttgttcattttcttgcttttagtgtttgtgatagtgattgatttccgtttgatttgggattgttttgggtttctttatttggattttctttatctcgatctatgaatttttattggatttcttaatctcaagtatgtagggtctatttgacatttgaggtttgttgaatttgggaataaaataaaatcctggaaaggtaagttgagaaaaagataaagactttgaatcttctcattagttttactgatttgtttggttacaatgttgaattttgtagtaaaagtgtaatttttctaatggtatgtgtgtcattgtaaaggctggttatgttacttaacaggtactgttggtgtgtagagagattaaatacaccaaaaaaagaaagaaatttgaccctactgacattctgcatttggaagcatttcttcttcttcttctttgatttgaattgagtgtttttgttttctatttcataccagttggagaatggagtataatggggtttcagtactgtctgaggaattattatatgttatgttatatgtggtttgtttgttcacttgaaaaaattcttcatcaggtttggtcattagtgaggcgatttgatcaaccacaaaggtacaaaccgttcatcagcaggtgtgttgctcaggggaaccttgagattgggagtttgagagaagttgatgtgaaatctggacttccagccaccacaagtactgaaagattagaatatctagatgataacgagcacatcttaagcatgaaaattattgggggtgaccacagacttagggtattcttcttcttcattctactcatgtttttacttatttacttctgttgccattgtgatttcatagcttacttgttggtgagtaactttaagtttgtgcacacaatgcaattatctggccttgttggtggaagggttttggatttttctgagtttaaacactttgaaacttgtcatggtgtgaaagcaattatcaagtgctattagagtcatgcaccctcaagtggaagacatgggctcggcttcaaagggggtgtattgttaggatcgcacattgacaaagtatgggattggttagtagcctaagagaggagggtgtccaagtagttatatattactaaccaatccttgacttggtccctgtgagatcttaagagaaatgtagctaaatgagttaatcattatttgactagggtgttgtgcggactgcggaggttacaatcagtctgagattaaacttcgttcttggacggtcaattatagtagcttctgtaatcttttattattcatggaagcttgtctcttactagcctttccgaaacctgataacatgtgatatgtatttgtaaggacctaggtagcgtttggttgggaggaatgagaataggaatggaataaataaaatttaaaatgcataa

SEQ ID NO: 218091 - DNA, 4841 bp, Cannabis indica
atcagatttggatgatgtgaagccaagagacaaaaggcaatgctgaagcttttcaaaccaagctcgaggagcttgtttaaggccatagatggccttgtgcaatttgcacaccaaatctgttttgccaggcacttcaaaccctggaggttgtaacatgtatacctcctcttgtacgtctccattaaggaaggcattattaacatcaagttttctaatatgccaaccatttaacaaagccaaagtcaaaacaacccgaatggtaataggtttaactactgggctaaaagtctcagtgaaatcaaatccatattcttgatgaaagcccttagcaacaagccttgccttgtgttttagaacatatccatcagggttctccttcttcttgtagacccacttgcaaccaatagctttccttcctgttgggagtctcacaagtgtatatgttttatttctgaccagtgcaaggacctcatcactcattgccttgttccacactaattgactgagagcttcttgaagagatgtgggttctcttgtaaccaagaaggctttcggtttatgaatgccatatttggatcttgtcctcatgttgtgaacattttgaggaccagcaggttgatgacagccagatgaagatggtgcaggagcagtggcactgctgaaaatagatgcagtagcaactggagtaggcacaccagtaggaatagagttgtcactgctgttgagatcagtgtttgagtgcacacaccagtagggggatctgtcagattgtgttcaacagaagtgataacctgtggagaacctggtaaactattatctgtagagggctaccctgcatcaaaaccagaaggttgacttggaagccaactattagtgggaaaaatcagtggagatgagtcaggatttgtaatttcaggttggtcattctcaatattggaatgcatgagatcagccattgtgtaagtacaaggagtatgagaacatgtgggtatgatggaagacacaacatttgagatagggactttggtggatgaagttggactaactttggcaaatggaaaagcaaactcttcaaaaatgacatccctagaaatgtaaagtctcccattcgaatcaagacacttataccctttatgattgaggctatatcccaaaaaagtgcaaggagtagacctatattccagcttatgtttattatatgtcctaatgttgggaaaacacctacaaccaaaggttctaaaggtggtgtaatcgggtttgatattaaacatgacttcaataggagatttgtgatctagaagtggggttgggagtctattgtggatgtagacaacagttctaaaagcttcatcccaaaacttaagtggtaaagatgcttgagcaagcaaagcaaggccattttcaacaatgtgcccatgttttctttcagctaggccattttgttgatgggttgtgggacaagggtgtctatattggatgccatgaaatttaggagctataactcacccccccccccccaaactctgtttgaaggaactttaatttttttcctagttgcaattcagcttcggccttgaaatttaggaagactttaagagcatcagatttgtttttcagtaaatacagccatgtaaacctagaaaacacatcaacaaaatgtatgtaatacttgtaattgtttaaagatggaatgtaagatggtccccacaaatcagacacaacaagttgcaatggttcagcaataacagtattggaggcttttggaaatggaaacttatgaatcttgccaagacaacaagctgaacaaatagagaaatgagaaattttattgcttgtgggaatcttacatgactgtaaaacagtttgtacaactttttcagatggatgccctagtctattgtgccaaagagtaaaatcattttgcacttctgaattacattgaatgcatttagacacagccaccttggcattattgagggtgaccatgcaggtagttttgacttctaaggagtctggaagaggacttaatggtactagtgtgggattctttggcaggttgcttaggaatgggagggacaatcttggcatgggtagagtcaaacaaatagaggccattcttttgcttccccatcatcaagatagtatgagtcgaattgtccttaacacaacacatatcaccatgaaattcaaaaaagacaccattgtcacgagcaaatttagacacactgataaggtttttagtgatttcaggaacatgcaataaattgttaagaacaaggggtatagaagaattttttgaaacaatatgagattgaccaacatgtttaatgtacaaacctgatccatctctcatgtatagctcatctgaaccaccatattcaacactatttccaagattttgagcttgattggtgcaatgattcgtagcacctgaatctggataccaacttgtatcattgtaggtgctgttggttgcaagatttgcttgagcttgaatctgagattgagactgaggtggggatggagagctgctgctgccattagctaaaggtggtcctgagaaagacttgtcgaatcgaaagggacagtcttgtacaacatgaccaaatctcaaacaaagttggcactgaggccagttaggaaaattaaagccaaacttattacttctgataggattgaaattaaagttacctcttcctattgaattctgactgggattgggagaaaaattattgaacctgatattcggattgggaatcctattaaactgagcagaagtattactgagttgggaattgccagggccaaattgcttgaatcttcgaaaagcaagattggcttcagcagtagaatccagatcattggtcaccattcacgcctaaaggagggaactgctctgataccatattgaagtttctagccattgaagaacaccaagaacagaacaaaatagagaaagaaagataagaggaaggagaagaaagagaaggaaagacttagcaaaagattctcattgattatcaacaagtgttacaacatttatagtctagcattagaagaagtctataacagactttcctaactaactcacaatacaaggacacgtgtaaacaaacacaactaacagctaacaaccatgtaacggttttaactgtcttcaacaaccaacttgttaacagatgcaaaaagataaaataccatctttatatatattgcaaaaaattacaagtggaagaagttaatgtgcggtaaaatttattcttaacatagaggaagaagtgatggagattattttacagatgtatcaattttctcgttgtgaaaatgataattaggaagaaagacaatccaatcaaacaagtggttatggcaaggggaaaggagagtgacaacaccgcatatgtaccagtgacaaatgctatcatcataaatgccatggccgccattgttaacttcatacatattccaaagtacctcgacttcacatcatcaaaagatcctttcctccaaaataatgtattaaataagatgttgataaaaacagatgaagcagagagcaccatggctattgtgtctgttaccacgaaggcttgaaatgctgtgttattcctaagaatagcagtgccttgttgttgatttgcctcctcaccgcttatgtaaccgcctggcatcgtaaatcctgctgcgaaagtcactgttgtgatcaacgtagaagtaactagacttgattctttaagcttttcaatgcgctcccatactatttctttcatctcttttttaaaattcttgaaattgagttcgacatctaggatccgttttcctatataaggctttatggagtatttatcgaagaacataaatattctttcctgtcatatatatagtaatataatcacatgacatgtttcaaagttagcttacttacaagaagatgattatgagaataaagcactcatgataaattttaaggtacctcggttaagttgtaatcatgaagatgaacatcaaaaatatttttgttgtctttgttgagtgacatcttattaactcttgggtgagacaacaaagcttctacaatgcatacatcccatgatggtgataataatgttgcacccatatgaagcaaaggtgtgtttccatcattatcttttctattcaaaaggtaatggcaatgttttaagatgaattgtacattatcgaaatgtccacctatcaccgcgtggtgtagcacatttttgccttcattgtcaacctcttcgtaactatctggacatcttaacaaaatttcattcattattttgtcgccaataaaattgttgaaaggcgcaatgtgaagcggtgtcatgcctcttttattttttaagaaggcgctactttcatccttttctagcaacattttcaaaatctccaatgccatagtgtggcagaatgggggaggcaaaagcataacgtagtgtaggggaacgcaaccagcatcatccggttgtttggtcagataactgaatttctccaaaagtatttttattactcctgctcaataatttcataaaaatatttataataaattatattgagtttcttcctataaaagataaagctttgctattagacacgaatgagttgggcaataccaccatcatcatattacaagaaagaatattttaataacacttcaagggctcgtttgaaataatgtcatattaggtcgtattgtattgtattatattgaattgtattttatgtaatatttttatgtaaaactatatgtggcattaatttttatggacacctaaatatatgatattttagtataaattcaaatttaacatagtattacataa

SEQ ID NO: 218092 - DNA, 6958 bp, Cannabis indica
agagagagagagagagagattcgttttcattatttgtgagtcaaaattcccaagtctcaactttggagaagaagagtgacaaaaaagaactccttttactctctcatactcatacaccctttttaagggaatggcatggccttcttctccttctcaaactccattaaaacctttgctctctcactaaccctcttctccattctcctcttcttcttcctcacaatcccatcaaaccctcctgctccatctacacccctaattccccatagatcccttctcaacgataacacacaagagctttcttgctcctccgttaaatcacactccaatggccttttcaactatctctccttccatttctgcctctttaacaaaaactcatttctctccatccctttcctctccctccttctcgttctccacttctacatcctcatcaagacggcacaggatcacttctccgtcgtcaccaccaagctctctttccacctcaatttgtcgccgagcatggccggcgtgaccctcttggctctcggaaatggtgctcccgacgtgttcgcatccgtcgccgctgtccgccgaggccagtatcgaactgggttcggtgccatactctcggccggcactttcgtctcggctttggttgttgggtttgtggcgatttacgccgcaccattttctctcaagccagcgccgttcgttagggacgtgtcgttttacctgattgcggcgttgttcttgttctatgtgtatcttagtgccgagatttttttatggcaggctgttgggttcgttttgttttatctgttttttgttgggtttgtgttttggatggatttgggaatgggcgcagagaaagagaagggtgggagtgaaatgcatttgattggagaaattgatgaacggaaagatctgatggttcatgattgcgagatcggcctagtcttacagaattcccgtggagaaaaaccaagttctgggctcaggcgagctcttagaatggtatgctatgtcctttaaatgttatgatcttgttctcttctttcttctctcatttggttatatgattataccaattgaaatttttgtagttagtagaaattcaaatcattgtgcaagtgttaaggaaacttacatcttggtttgtttaaacaatcccatcttgatgataattgatacaagctgagtttgtagaaatgacggctgtaatgcttgctaactattgttcttaagctttccttgagtgactttagaatttaaaattagcttgctatgtaccaatccattttcaatcacttgcattcgaatggtttggactctagctcataacagaaagttgctaacagcacctttccctagcataggaatatgaagttatgctttgttgttgttacttgttaatttgagctttggtgaagttgaccattagtgaagctcgaggaacataagaaactaaaacgtgtaacttaattaatgatttaataatatcactacactgatgatgcaagggaagtagaattgatcattagtcgtacagaataccagtgatctggctggaaatgtaggttttatttgaagatttttcttatgaagtcatatgcttaatctataagtaagtaagatataagatgattgtgtaaaagggttcctacttcctggttggtcattttcctatcacctttgtttccccattctcctaatttggtatttagttttcttcttatgcttggaactggaaaaaaaaaataatgtactttcttcataatcgatcaaattttcttttgttcttatttctactaatattgtatcctttttctatttacaataaaatctactaacttatgctctttattgtgtctgtagatctcaaaatcatgggagatcccagtttctgttcttttaaagcttacaattccgcagacttcacctaccaagtggagcagattctattcatcagccaatattgctctttgtccactagcacttctctatgcaggaaacacgtttgttccattcgatcatcccattcacttcctccttccacacacccgttttcccctttggcttgtagtattttttgggtgctccaaccttgcactcctccacttcattacagaaaaagaaccgccaaaaactgagcatataccagtagtgatcatagcatttgtaatgagcgttttctggatatctactgttgcaggagaactgctgaactgccttgcagctttaggttcacttctcgagttacccccttcgattctcggcctcactgtccttgcctgggggaactcagttggggatctggttgctgatgttgctgttgctaaggcaggacatccagcaatggccatggctgggtgctttgctgggccgatgtttaacatgctcatcggtctggggacggccttggtgatacagacaagcaacatttaccctgaagcttatgagcttcatttccacactggaattgtaatggcatttgtattcttgcttctcagcctgatgggttccctattggtgattacatggcacagatttcgagttcctaggttctggggattctgcctagttggtctctatgttgttttcacagctgttagcttagttattgccaagttctcaaggtgacattgttccatatgtatatagctaagtgctcagcttctacatgccccaatttccaagcctgatcaggacttcacattccaacttgaaatataatatttatatataaaaaatttaggtgtgacaaaaattacttgtattttactgctaggtcttgggtgattctgtgacacaaaattctgctgtaatagaaaataaattatatattcttggaaagtttacatcctaatacatatttgcttcttcaaggtcttttttaagcagctattaatttatttatttgacgagaaggagttctaagcattactttctctagcacttctttcatggagttggagtctattaattctatgatccctacactggacaatagcaccgccttcataaaattttgccttgttagtaaatattattttagaaaaaattatattatttagtatgaaataaatacaaatttcaatccattattggatacttagcacgctcagtaatcaatatgtatatttcttgagagaaccctcgaaatagttttacataccccattcatgaaaaatgaaaattaaaataatcaactacatcaaaaaagagaaaaaagaaataatcaaaatctagaaaaataaatacttttaatttcttactaacatattttctcatccagataatattttgattattttttgagtaatataaatggtcgtcaaatgtatattttgggattggagaatgttttacatagtatgaatcaatcaacagcgcaaaacattacataactatgtcagtggcatcaatagtagccaattatagtaattttaataaagggtaaactcgtcttcacaaaattcaaacttaccataaaaattgatgctttctgtttcttacaaataatacaagtcagaatcaaactctctctctcaactttcctccatctcatataggttggtactcataaacattattaattatcactaatgaaaaacaaaagaacaatatagaaactacacaaattctcttccttttttattttaattttaatttggttttatagattagtcaagattcttccaaaaatatggatctttgatcctcttttcactgtatccattaacatacaataaaggaaacaactttacaaaccatgccttttttcgcccattggatctattgctgcaaatttttttttaattttcaggtttaattcatttataccatctcagaacatttaaaacaggtacataaaaatctctcttcattgttgtttttcacatgtttatgtatgtatgcttatatacatgacatttggttctttctaatttgaaacttgattctgtaaattgatttataatttttttgttctctttctttcttttggtgtttttttcctgcttcttcatgatttcttatgcttgattttgctaattatttggtgtacactgttactttctttctagttctctttccttttttgtgattgaattatcatcttggtctcaaggaatgatttgctgtcaattaaaagaatgcaaactgatttttcttcatatattgcaacaaatcagtagaacaaaattttcacttattaacttgtactgacattttacatatgatcattcattcagggaccttaactcaaatctgatccattcttaatttaagttaatgatgttcatgttttagagtttctagatgattcctttgatgtttcttaatttttaacacttttatattggttggatcagaatggatcaccaagggcataaccaacctcagtcaatgatgatgggaggtgggggtggtggtggagctcaaatggcttatggttaccaatccaatccgatgggtggcaacccaactcctggctcggttggaggcattcagtccaccagccagcctggtggagctcagcttgcgcaacaccaactcgcatatcagcacatccaccaccagcagcaacagcagcttcagcaacaactccaaaacttttgggcaaatcagtatcaagaaatcgagaaagtaagtgatttcaagaaccacagccttcccttagctaggatcaagaagataatgaaggctgatgaggatgtgaggatgatatctgcagaggcacctgttatatttgccagggcgtgtgagatgtttatcttagaattgacattgagatcatggaatcacactgaggagaataaaaggagaacccttcagaagaatgacattgctgcagcaatcactagaactggtatctttgattttttggtagatattgtaccaagagaggatttgaaagatgaagtggttgcatcaattccaagaggcaatgtgcctgttggagggcctgctgattcactcccttattgctatatgccaccccaacatgcaccccctcaagttgggaccccagggatgattatgggtaagcctgttatggatctatccatgtatgcccagcagcctcaccacccatacatggctcagcaaatgtggcagcaacaacaacaacagcctgaccaacaacaatcgtcgtcggatcgttaatggggactatgtatggaaaataataagtgtaagtttgagttacttttgttggccattggtttggattgaacgctggaaaggatttggctattgtttcatcatgtcattgtagtggattatgcgacaagagctagcaatcttactcataccattatctataaatatccatatttttctttacaactacgtaataaaatacttgactcgatttatggttgtgcttctaatagaaatatgccattttgatttcatgaacataagaaccttctattctcctttcttttcatctagtgactgaaaatatgttgtttgatcacttaagtgtgtgtggtttgatgtattttcacatttttataatttgttctataaactttgatacaggaaatctcaaacagcgtgaagaaggtagagagaaccttagatcatcaataagtgtgactaaaatttgagtgaaggagacaggataactccatgtatagataataaccctgaaagaaatagtagatcagatctcaacagagccagcaaccattttctcttttgatagtttttacttttctcatttaatgtcagtgatgtgatgcgactttgaacaatgtaatgtaagatatcaacttataaagtttatccgtccttctttctttcttgtatcttatcaacgagagtagctcttatgacccttagctgaaatagatgttttcacaaatatggcttatcaattattcaatattttggccacttgattaatatattttcaatgtgaaagaaacacaaactgaaaatgggcttcatgaagaaaaaatacttggaaagtctcaagaaagaaagtgttgcattatctctcagacaatatttggtaaaattaacattttatacttgaaaaaaaaaatgacaaacaaacatcaaagtagtattcttgacactcaacgcccagtactctgaacttacttgacatcccgtttgagaaactactaacaagaccattttgccaagtgacctttaaaagaagataacaaatgtccaagttatttgttattatacaatacacaacttgtttcagtattaagaggcaatgttagatacaaagcataatttcatttcatctgccaactttctttcaaaacaatgccttcggaatcccatcaatgccaaatttatcagaaaattgatgaggatcaattggaccagggagttttaaagagatggaaaactgccctggagggcataacttctgcgcttgcattttgaacatttgggagtacccgtatactgttttctcaccagttgtagtagctccacgtattaatactttgccctcacttgaaacttcacaactaaaatcacctccagccacaaaaagaaacatcaacagactactcaattggttaagaagaaacaatatagattaatattaagcttgaatataaactcataaaatgaaaactaacgactataagggataagaatcaagtttctaatagaaaactaaaagcaaaaaggtacacataaaaacgaaggaacactaattagtaaatgggagaaatgtttccatagttcagagtgcaagggaaattaagaagacatggattaaactaatgttagccaaagtcaataaatgtgcacttaaagaatttttgtttatctgaattactgacatgtaaacatgagtaatttagccaatagtgatgaggcctaatgatacccttcaaaataagaagttatagggtattacaccgtattgtattatatagtattatattgaattatattttatgtaatatttttatgtaaaactatatgtggt

SEQ ID NO: 218093 - DNA, 3650 bp, Cannabis indica
tttttttttttttgattaaagaataaacatttcttcataaacatgttttgcttctctagggctttaaatgcatattaaacatagtttgggcaaaaacagcacaagcacccttgtatttatgacttggtgatttttatttcgtgtcatataaccatgtttgcagtttaattctcaaaatccatctgtcccctctcaagctggtctgggacttggagttcagaattcaggcattggacctgttacttcttccacgctgcaacagcagcagacgagttccatccatcaaccatctaatccatccgtgttggtttctagtggcacaaaagaatctggtaactcagcttttttattcaccttatattctataagattagagtatagtcagcatgctgataagattagtgattctgtatgtatatttatcgtttcttgctattttctaggggaaacaatattatgattgttaatttatctaatgctaaaaaaaattgttggtgtgctcttgtttttattgagtggaaatggaagggttctagagggatatcaaaaaaggaatttgaactaaaaagtagtgctccatttgtgattattttactgtggttgctaataatatttgcaagagctgtctggattaacttcacatattcgggttgtgcctagatatattttaagattttaaaactgtaccaaaatttaagttcctccatttttttaaagtcacaaactatagagcaccaccagactggttgagtatttgttctgtttgatgcagaacttggccatgcaaaagttgatgagcagcagcaacagaatttacctgacgattcagccgttgattctactgctgcaagttctgggattgcaaagaatcttatgaatgaggatgacatgaaagctccatatgcgattgattctccggtatgttttgctaaataaaactgtttagatctatattttctttgatgatcaacattttttctactaggaaatgaggtcaaaattcgatttcttttttttacctctatattttctttaaagggcatacattgtttctattaggaaatgaggacaaaaattcttttataattctaaaagaaatcaggatttcttttaattcattacatatcattaagtggtgttcttagagctattcacagttcatgctcttctctcctatagtgtaacactttctcatgttccaagagaagctattgttatagtttacaatttctctaagagagctttaggaatggctgtattccttccttactttctttgggtacttaacattacctgttcatttgtgaatctttttcttcaaatatttgaaaaaattatttcgtgctatgctgggatagaggcttatttattgtctagttgaccttcatgatggcttggtctgtgtagacaggagtttctggctccttaacagagccagctcaagggccaagagatattgatctctctcctggacaacctttacaggccaatcaatcttccggtagcttaggtgttattggtagaagaagcgtttctgatctgggtgccattggcgacaacattaccgggtcaactgcaatgtccggggcattgcatgaccaatcatataatgttcagatgcttgaagctgcttattacaaacttccacaacccaaagattctgaacgtgcaaggagttataatccggtatggatgtgcaattatcattaactttcatattgtgtttttatctttgatgttacggttaaatatttatcattgttttgtccatttgcagagacaccccgcaagtactcctccaagttaccctcaagtacaggcaccgattgttaacaatcccgcgttctgggaacgattaggtcttgaaccttatggaactgacactcttttcttctctttttactatcaacaggtacgaaaactggtaacaatgagagtacttgcatttcgctgactacgagcttagtctcattcttatttatttttcattctcagaatacatatcaacaatatttagccgcaaaagaattaaagaaacagtcgtggagataccacagaaagtacaacacatggtttcagcgacacgaggaaccaaaagttgctaccgatgaatatgaacaaggaacatatgtctacttcgacttccatattgccaatgatgatttacaacatggatggtatgtacttataaaaatgcatgcgaatgaaaattatagtgtggagttacaatgtgggctgatataaatatttggtgtacaggtgtcagcggatcaagacagagttcaccttcgagtataattatcttgaagatgaacttattgtatagaagaggtgtagatgctacttcatcagatcattgttcatttaccaggttcgtaaacattgataaaatgcaattatctctgcgctcaaatatatgttgggagatttacccttgtgtgttcgaaaatattcaaaaaaaatatgaacatcaccatgaaaaggatcactcgaagcatattatatttcgggcagaaattgagaaagaggttgaaatgtaactttagtcgagtgtgttggccttggccataaattatcatttagaaatgtaactttagtcaagtgtgtatcagaaaatttatgctatatttattcactttgttatcttacatcttatcccaaatggcacaagaaataaacatgaaattatatttagggttttgatttttatttgcaggtactcttagaagaccgttcagcactctacactgataagcacagaggttactaattcatagtttcgatttcatatgctttcatttcgaagttgttttgagttttattttccttcataaaaacagtgtatattattattacattgttccatatcatcttatactttggtatgtctaaacatagacagaatagaatgaatgcaaatccctcttacttgactgtttgttctaagtactgcatacaatacaattctatatattttcagctattcaaatctctccccctaaaaaatatataaactaaaaagaatataacttttcatattgatacttggtcattacaaataatgttcattggtctaagtgagccttaatcatacgagatctgttaatgcctatttagccttagctacattgtgggcctaatacattgacaaaatataattatcaatacttcaatgagaacaagttcccctcaatcatgttctactatcatgaattgatagcatctagtttttatcgttttgattgctagcaagcaagttggttcttctctaataaaaagatcggaaaattccaatttatttgattgaattactttttatattatttattgaatatgttaatgagtaaaattttccacaatagaaattcaaaatgaaaatattttcaaattttggtggtaatattacaagaaaataaaaaaaaaaatttgctctgataccattacatgtttactaatcaggattggaagtgataggtatggtaatcactccttttcatttgtttactttatttaatagttggaatactctaatggaaagacataaaattaggagaaaagaatgagagaagttttcctcccaatttcttcaggtataaattattacgggtaatgctactttttagttttttatttattttttattattaaaa

SEQ ID NO: 218094 - DNA, 7671 bp, Cannabis indica
ggggcgaccgacgcgtcttccaccgccgccgcctcctccgcctccaccgcctccgcctccactgtcgcaatcgacgctgcgaccaactccttcaccacctacctcaatccaacacctttattaaccctacagaatcagaatcaaaatcggtatgttaaatttctatcatttgcctttaaatctgccctctgttctctctagctaacttttcctcattttgaaaaccctaatcgccatggcagattctatggctcctcgtcgcttttccgttctctcggcggtgggtatggtactgtttttttcttcttatttttatgcactttcatttatttgtaatcttgtttattgctaccagcactaatctaagttcttcaaatgacgcgaacttaagccaatgcaatataaattgatagatgattacttcacatttatttgttgattacaattgtggttttgatttacgtattttgtgttacatattacacttgatattggaactccattgtcttatttgtctacttctctgattttcttttctttctttctctttttgggtcatcttctgatgtgctgctattgaaaaaatagggtgtgtagtgttgtggttcctatttgagcaagaaggtgataacccattatcttttatggccaatgttctattgttacttgtaataggaaactagaatagagagaaagcttgaagagagtatttcagacttacccctttttttttcttatttggattttgggactgttatgaaggagtgagtggggatccatttccctattttctcttgttacttcatttggaaaattggaaatgcctcaaaccctagttttggtcatagaacttgttgcttgtgacttttcagtttgtgtctaacaacaatgaaaggaatatatatatatatatatatgtatatatatatcaatcttatataagatcttatctcataaatttggaaactataaatgtagattggctctctgtggtgttttggagttttgtattatttggactcacttataattaaattatagttcatataaattgctttaaattatttttgtacagttttagaggctgaatttctggtactgatatggggatcttattgaaactaattactggaactaggagaagtgcactcttgcttttgttaaatctctctttgcctcttgttagtacgctcttcccactttctgctctccctgtttttttatcaactcatgcattgttgctaggtagactctttttcagtttgaatagtaatttggtcaatctccatttccttttattaagttttcttgctcacacaacacgttcattattcatatacactttcatgttctttaccatcaaaagatgagagataagatgaacttatcttcttatgactccgcttgttaaaatagtatggatgtactggtattacaagggcgatatatatgcatacaatagctcactttattgtgtaattagtatgcatgtgtacagctcgcttgtgcaactgtctttggcatttgctgtcctcattttcattacataaatgggatagatcattgttttacatgtatgtatgcttaactcaactagttgtgctgatggggacttttctgtttgctctacgtagtcatgaacaattggatttatgcagttttcttgactgaaaaaagggaaatcttgtagtgctgcttcatctattactctttccttgtattgaaataaaattatttatgttttggcagagacagtctgttgacacaagtttgcttttgagacaaactatgaaatgattagctaattgctttatgctttttttttctttttctagtagttgattggagtaaatgacgtatggacatttttctttttgtagttcttttgccacggaagtatcagattaacataagtgggacttgaatcagactaattacctccaatgatcgtatatattcttcaactatcgagtctgagcacttttgtattgagacaggtatttactcgttattttaaagaactaagactaactaataaagccatggagacgtgtccttcatatttgcattatatgcttagaattcaaaaattaattttgaataactttctatcctttttgttttccaacagaaattagaaattttagtattttaaaattgatgttttccagtttaaaaagataaatatagctcctaatttttaataatatactctaatattgattgtctatgtgactgaaaaaccagtcatcacttctttttcctgcaacctcaagctctatgtattttagttttggtttgattttaatggtgtttattctgtattctacgcaaaaactctacttagatatttaagagaaccaacgcaacaggaaactcgtcttattcaagctgttgggtattgttttctttcttgcttgtaataattattctataaatgtatgtgatagataaattaatttcaatggtaaaagttagtttttccccataaattaacactcaaatgtaaattttaagttgtttatataatttggttttgtgagtaaaactaattgtactttttaccatataaatatgatgtatacttcattctaaactgttgttagaatattaatttccttgtaagagtctttggttcttttaaacttttgtttgtatctttatcgaataatgaatattagaagtatatagggaaagaaaattcatcattttgtcacagagcttgcagaagactgaatgtacttgttacaaacatacaatgcttcatgacatttatggattttcctattgttggtttgttttgggacatttctctattgagcctatgaagttttttcttgcagtgtctatggggacaattttgttaggagtttaaaggaagtatgtctgagggaaccagtcttgtaattgaatcttctgagaactgtacagatttatcccaagatgatgtaagcacgactggagaaacatctgatgacacaattttgtctcggcagacttctgtaaaccttgttccgtttattggccaaagatttgtatctcaagaagcagcatatgaattttattgcagctttggaaagcaatgtggcttttcaatccgacgccaccgtactcgtggcaaggatggggttggtcgtggaattacaagaagggatttcacttgccatcgtgctggatatccacagatgaagccatctgaagatggaaagttacaaagaaacagaaaatcatcaaggtgtggctgtcaagcttatatgagaattgttaagcgagcagagttcgatcatgtacccgaatggcgtgttacaggctttagcaacaaccataaccatgagcttctgaaatcaaatgaagtttgtgtgattccgacctactgtatcatttctcctgacgacaagagtaggatttgcttgtttgcaaaagctgggatgtctgtgaggcaaatgctgagattgatggaattggagaaaggtgttaaactgggttgcctaccttttactgaaatagatgtgagaaacttattacagtcttttagaaatgttgatagagataatgatgctattgatcttatttctatgtgcaaaaaactgaaagatgagaatcccaacttcaaatatgactttaagatagatggccataacaggctggatcacatagcatggtcgtatgcttcatctgttcaatcatatgaagcttttggagatgcagtagttttcgacacaacccatcgtttggatgcctatgatatgctgttaggaatttggcttggaattgacaactatggaacgacttgtttctttggttgtgtgcttcttcgagatgagaatatgcaatctttttcatgggcactgaaggtaagatgccaaagattattactaaggcaatctacatctaccttatgaaaatctagcactatattgcttgtgaatttatttaattatcttagttcaccatggcttagatggggcactacgtttttgtttaccattgagttcatggttgtttgttcctaatatctatgctgttttcaacagacatttttggacttcatgaaaggaaaggctccacagacacttctaacggaccacaacacatggctcaaagagtcaattgttaatgaaatgcctcaaacgaacatgccttttgcatatggcatattatatcaaaattctcaaattggttttctgtgcttcttggatcacgttatgatgagtggaaaattgaatttcatcatctttataatctagacggggcagatgattttgaagaaggatggagagacatggttaataaatatggactccaaacaaacaggcatatcatgagcttatatgcgctgcgtacgttttgggctttagccttcttgaggcactttttctttgcagggatgatgaacacatctcaggctgagtcgataaatgcttttattcaacgattcttgagtgcacaatctcaaatggaccgatttgtacataatgtaactttcatcaactcatgccttgtggcaatttctcttcgcagtaatgatgaacacatttcaagatgagtcattatgtgtgtattctaagcctatatattttaacgtcttttttgcagttggctgatgtcattgagtttaaagatcgagctggagcaaagcaaaaaatgcaacagaagatgcagaaagtctgcctcaaaacaggctcacccatagaagcacatgctgcctctgttttaactccttatgcctttaataagcttcaagaagaacttgtactggctccacagtatgcatctgttccggtagatgatggttgtttccaggtcagacaccatacacaaatggatggagggtgcaaagtgatttggcttccatgtcaagagctcatcagctgtagctgccatcaatttgagttttcagggatcctttgtaagcatgttcttcgcgtgctttctactaataattgttttcacatcccggacgagtatctgccaacccgttggcgtgatgccagttcatcaaccacttacacctttcagaacacaagtatgagagagcattctggaaaggttcaattgttagagtctatggcttctgctcttattgcagaatcagttgaaacagatgagcgccttgatagtgcatgcgagcaaattgcaattgttctttcacgaatcaaagaccttcctcggccaatgcacgacactaatgatgattatacttgcccttccgatgcattgattctacaggaagtagaagatgcagatggaattgttcgtttcacggttggaaaccctcacgaatccatttccacgggaaagcttaaagaaagaaggccaagagatggagtggatatcggtagaaagagaaggtcagggtcttgttgtggagagtttggacacgatgcatcggagtgccaactaatgggaggtgatcatctgaatggagatgcactgggatacttgtagtaggatacaacacccaagatggtagtatagaatgtacaaattaatagcagcaggagttctagtctcagcctaatgtggttcaagttttttctactccaaaatctatattgctttcattttttgtgactccccccaggagtgaagatctgaactagaattctactcagatctagggcttaatttaatttgaagaaatatagtgatattcttttcttttctttttgttatttcaaagaagccacaccaagtgtaaaattggaattcgaatttggaagtgaattcttttaattacaaactaacttttatttacttctaaatgatggattgttcctttccttgagttcaaaatgatccttgaataagtaggttttgttgccaattatgatccttgtagaatttttgtccttttaattttttgttatgttaattcagtccagtttaaaggtacaagaaaaaataatatacaaataccaatccaacaattgattatgagtcagtatttttttgtatgtttaacatcaataaactaaatttcaagtaatttaaaattgttaaataaacaatactattgcaaccatatatgtaatcagtcacataaataaattattttaaaaagagagcagattgtgattggagggagacatttacaacaatttgtatagttcaagagaatcttcacaacaagaaaaattttaggagataactctacaaggattgtagttgtgggaaaaaattcaaaattattcttttcaatatcattggtttaatttatgcataaaatgacatttttgttattgctagttaaaaaaaatcaatatgtaaaatagtcaataagaaaaagtcatgttagcttaaattattcagcatgatattccaataattgatgcaaaagtttattgatgaaataatgtcggtagcatacagagaaaactatatgggttatgctgatattccaaccagaatatcatactgatttcaaattaatttagatttgtaattatttggccgaggaaaacatcttcattgaagactttggcaacaatttaaattagtcacattttagaaatggaaaacaatatcaatgcagagaaaaataatagggatataatgctttaatttacatgttgcattattattcaatgctcaaaatcaaacaacacacaattattttctatctactttttcactaacaaactcaatttttgcaattgccattactacttattagtagtacttgcttgccttaatgccttagtaccttacctaactagtcagcttgctcatcagccagagaaaccttgcttagcctgcttggtaatgatctaacaccggtgttcgaattccttctacctccaccgtggcgatgatggcgcgagccaaaaagcgctctttttacgagcgctttctccatgttggaatttgatgatgttgagcctttggtgttaggctttttctcctgcatactcatcacttggcttgtgctagtgctagtgctagtgcaagcttcattggccttgctagaagccattttgtttgtaatttgtaatagtttttttttttcttctagtttataaggttttgtttttacaaacaattttacataattaaaggaatatgttggaaaaaaaacaagtgggttatatggaggagccatgttggtggtgtggtggggttcaacttcaaaaagaatctatatgtgtaaaattcttactcatggaatttgctgctgtcttgtattttaagaaattgatcaaaggtaataaagttggctcctttttatttgtttgcttgcattttgtatactatcatagtataaaagtatatcatataattttatggggtttaaatactaatcaatagttatattgtatttgtagattgttgtaagagattaatgacatttgtctatggaagcttttgtctttttatttgatataaatatatgtgacatgacgaatgataaaagggtctttattgttaagggaaggacaatgaaaaaggaacattattgtaatttgtaaatcaattgggagtgtttgcatattatacgttgagaaagtttaagtgggaatatcaccttaagaatattataaaatacacatcccaatttattaatagtcaactcacgaaatgcctcttctaaataatttcttgcattaaaaatatattttggtgtctagtcactattttcttttaaaaagtaagcttttttttttttttttt

SEQ ID NO: 218095 - DNA, 7522 bp, Cannabis indica
gtacttggatgtaaattttccttgaatttatcacgaaattacaatatatactctactatatcgttggtcccatatctatatttggaaatgtaataagaagttggacatacataatatatataatatatatttataataatgctaattattaaaaatcataatttcactcaatccttacacctacctagtgattatgagatttgttttactataggctttttattttattttattattttttttgttcaaagagtgtgtaaacataattatttgccaaacaaaaacaattcatgacactcatttcgtaatttcataatatataaatagtgatgcattatatataattagtaatttatactattacaaaaggtatttttggtatcgtttaaaatattactaacataaaaaatctatacttaaaattactcgaagtcttaataagtctcagctctaaatcaagaccataatttatcaatgatgtcagtagtgaagatttaaagaaacaatatgttgaatagaaatctcaactaatgagtgagtgagtaccatttcattatatagtagagtaagatattacaagagaaaaacagagaccaataaaagcattacacttgttagaagaattatacaggaaacaaggtctaacgataagtttgttagaaaaggataatgattacacaatgattgtaaaattttgggattctctcattcagtactgccactactcctatgccaactcatgattgaattcaatttcttcaacaccacccctcaaacaataaggtgatttaatcacattgaatttgctgacaagaaattgaaacagagttggggtatgtcctatggttaagctatcagatacctggtcatgagaggggacatatctaatttgtagtttcttctccaaaactttatttctcacaaagtgaacatcgaactcaatgtgtttcattcgagcatgatagacaaggtttgcagccaatgcacttgcactcaaattgtcacaccatataacaggtgcgaggtgcatttgaacttgagttcattcagcggctcttggatacatgaaatttctgcagctaactgagcatctgtattcagacattgtgttgctcctagccacgactgtttatttctttgtgttgctcctagccacgactgtttatttctttgatgaccaagagttcattcagcggctcttagatacaatagcctgcaatagactttctatcatctggcagcaggcccagtcagcatcagaaaagccaatcaaagttagattagtggttggaggtatgtgtaatccatgatgcattgtcccgttgagatacctaagtatcttcttggctgctccccagtgcacatcagtaggttatttgagggagtggctgagcttattgaaagcaaaagaaatgtcaggtatggcaaggttgaggtattgcagggctcctattacacttctgtagattgttggttcactcatacgtttgccatttgttatagaaaaggttttccctactgttattggagtgacactaggttttgtattttctattttgacactttgaagaagctcagttatgtacttactttgggacaagtatattccagtgctgtccctgtaaatttcaatacccaagaagtattgtaatagtcccaaatcctttagagagaaagttctattgagcttggtgatgaaagtgttaatttggcttggataacttcctattgtcactataaacttcaatgcccaggaagtattgtaatagtctcagatcttttagagacaaagttctgttgagcttggtgatgaaagtgttaatttggcttggacaacttcctgtaacagctatatcatcaacataaaaaaagagtcatgatgacaaactttgagtatttaagtgtgaagaaagatgaatcagccttggaatttttgaaacctcactgaataagtgttatccttagctgctcataccagacccttgaagcctgttttaaaccataaatatacttgtgcaatttgcacacatgatgtggttttggagtgtcttcaaagtaaggggctgtatcataaaggcattttcatcaagcactccattgaggaatgcattgtttatgtcaacttatctcacttcccaatcatatgcagcaactaaggtaaggactaatcgcactattgtagccttaacatttgggctaaaggtttcaccaaagtcaaggccaggtctttgatgaaaacctttggccaataaacgtgccttaagtctttgaaggtttccatcagcactgcatttttctttggcacccatttgcacccaacaacgttaatggcatatgttctgggaacaagagtccaggtgcacaatttcgaataagtgttgcaatttcatctgacattgcatgatgccacccctcatgctgaagggtcgtggctactgaagctggaagagaattgagactggccaataaaagtgtaaggtttgaagatgtcggccttacccctagtgatcatgggatgagtgacttgaagtggagcagggacactactagtaacaggactctcatgggatttaggaagagacgagggagaagcaataatgacttctgtaggatcaacagcaggaaaagaaacaggggagctaatagtggagaaagagtcacttacagaggacgttggtgaggctggggttggtgatgctacaacaacacttggagatggtgtaggagtaagggaagaagaagacaaagaaacaataagcactgtaaaccatgactatggagtggtcataatgacaaattgttcaggttttctagtgttgagaaaactagaagaaaagggaaattcattttcattgaaaatcacatgccttgtgatatcgattcgaccatgtagactaaggcatttaaagcctttatgaacctcactataacccaaattaagacaatttacaaagtcaaactcaaacttgtgactttgataagatcaaatacaatggaagcaagaaacacccaaaacttttagaaacttgcaatcaaaaactttagagaataatgtttttcaaagggtgacttacccttgagaacagtagtaggaagtccattgatcagatacactactgtttgaaatgcaccagaccaatatttaaggggcattttggcctgagcaagaagagttagtccagtttttactatgtgtctgtatttacgttcagcctaccattttgttctgaggtgtgtggacaattatgatgaaaatagataccatgttcacttactaaatttgagaatgcttggaattcaccaccctagtcagttctcaattgtttaattttcttttcaatttgattttttactagtcttttaaagtgaataaaagctgatagtgcatcagattttcgtttgagtggaaatagccaagtatatctactatagttatctagaaaatgaatatagtatttgtagttggtgagtgaggcaatcgggctaggcccccataattcagtgtgtatcagttctaaaacttgagaagcatgactcgttgatgtagggaaaggtagagagtaagctttgtcaaattggcaagcatcacataatttgtgtgtttcattagcattaaaaggtacatgagacaaatttaaaacttttaggaaattaaaactagacacagtagatagagtagagatactagataggtaatcgacataggtcgtggaagtgcgagaactggatgaagtggagctaagttggtagagggcatcttcaagtgttccttgcagcacctccttcctattgttagatccttcacacaacaaagattagggaaaaactcaatagatacattgttgtcactggttagttttgaaacactaatgaaatttttcataatagagggaacatgaagtagatcatttagaacaagagaattagagtttatggtatttaacgaaccagtacagacatgagaaattgtaagcttgttgccatcacctattatcatttgatccttaccatgatactcaatttagttggtcattttctcaaattttggagtgagatggtttgtagctccactatcagcataccacgcatcatcgtttagggtctgaggagtaaaaatcagtgctgtcatttgggaatttttatcctggtattgctgattgtcaccttgtggtggttggcccatgtaattatcattatacctgtagtagcacatagctgctaagtgaccaaactttccacagagttgacaggttggtctcgagttgtccctgttgtatcttccgctatccataattttttctactatagttgttgttccctctagaggtattgccttgatattgacttccacgaccctgattattattgtatccatttcctctttctggttgatttccttaattgttaggattgttgggtcactgagccaaacttgcagagggcttgcccagcgtcgtgctagttggagagacagctcccagtgattcaagtttactattaaagctgaggagagatccatgcaactcttgctaggttagatatgtttaatgctcaagcagaagcacaatgtagagatactccatatcaagtccagacaacacatttgctatgagatgtttttttggatatggatcaccagcaaaagatagtgaattgacccacattctcttcatttttaagtagtcaataattggttgggctcattttcttgtattttgaagtttggtacgcaaatcatccatgttaacctttgaatgagctccataaatctcctctagagctatccaaagggcagatgcagatctacaacccattacctcagatgtgatgcttttagacatggatccataaagtcagcccattaagagctggtcatgcacaatccatgcctcaaactctgggtttggctgatgttcagtgacaacaacctcattctcagctattctctcaactgagataactttgtttggacatggtttttgaccattgagatatccctctaatctgtgacctctgattatggtataaaccattattttccacgaggaaaggttgtttctgtcaagcttgatagtaaacggctagctcagggtattactgaagggagttgctaatgttaatggagcagtagtcatgggagaattggtttgggtaatggagcttccttaagagtttccaccattgacatttcttggtgtagtttggctctgatttgtcgacattggcagaggccaaggagtggctctgagaccaagtgaagttctaaaggaacaatatgttaactagaaatctaagctcaagaaatgagtggatgagtagcatttcattatataacaaagtaggatattacaagggaaaaatagacggccaataaaggcattacatgtgttagaggaattacacagaataaaaggcctaacggtaagtttgttagaaaagggtaatgattacataatgattgcaaaactttgggattccctcattcaatattgccactactcctatgctagctcatgattggattcaatttctttaacatcagctagtaaatcgagacagaaaccataacagatacaaattgagtataactgtcagtttataacaaacactaaaacatcttttggtgtcgtttataaaccgacacttaaaggcattttaaaaaaaaaaattacttcagaaataaaaaaaaagaaaaaaaagagtataaatagaaaattataaccaagaaaccctaatctcatctcttcccttctcactctctctcttgataccctatctctgtcttgctccctcatctcgcagcgccggaaaaaaccagagcaagaccagcccactctctcacccaactgctcactctcccactttcttcctctctcgtggttgagacatcactgcccccgccaggccagacaaaacacgaagagccactatctttctcactcttagactcttcgtctcttgttctcttggttctcttggagaacaagccactggatcctacttcacaataaaaatgaaccaaaccatgacagtttctcgtaaagacatgaatttcacgaatttagatcggtctccttgaccaaatgacaagggagagaggtggagtgacactacaagaaaatcaccctttgccaaaaaaaaaaaatttctcaccagtaaaacaaggcgtaagttactggtaatgttttgtcgatgaggttacgcgccaataaaggttgtcagggatccttggttgacataaggtgttttacctgcaaaacaccatacttcattggtaaaaaaaaattgtcgacgaggtttttttggttagcataagtccaattgtcgacattaacctgtcagctgagggttgcttgacgaggttgttttggcaaaatcagtcaccgacaaaactttcacaccaaatttttttttctcgcaaaagtcttgcttacgcaccttacttcgccgacaaaactttctaaaaaaaaattattttattttgccggcgaagtaaattgcatcgataaaagtttatttttattttcttaaaattttaaaatatataaataataaaataaaaattaaattaaaactaaagccagatttttttaaataataatatataaatataattcgagaattatattataaaactaaaatttatattataattacaaaactaaataaaatctataaaagtaaataaaagtatcattagtgtataaaaattagtattgtttatattgtaaactaaaaaataaaactacaagtcaacagcaacatcatcgttgtcatcgtcatcatcgtcctgggtgggaggatgtaaagaccgcttagtttaatttggaaattagcagttaatctcgtttaattatgaaattatttatagctatttaaataatttattatactgttattattgaattcagagatgcatttttatgtcatgaagtaattttcataattttgcattacggtgcccggtattttggaactcggtgtttggctcggtaaaaatcacaacttagtatgttagtagtttgggacggttaattagacattgggaatgtcgggaatggccgggaatttagaatttcccaaaaatacccctttagtgttatttatgtggttttagggtggaggggcaaaatggtctttttgccccattagtattttgtcttctagtgttttattagtggaattatatgtttatttggtattactatttggctgaaataaagttgatatatgttaaataactttcatttcattttacaaaaaattaccaagtttaaaaaatagaaaaattggaaagcttttctctcaaatctctctctctttttcggctctcttggagcatcaagaaccagccattttctttggtgattcaagccctattttgcaaaattatagtgatctcttgttgtggtatgtctccctagctttttctcctttgttttcttgaaaaaaaaatgatgaaaatagtatgatgcatgcatgattatttgaggttgttgctgctgtgatcttgttgttgttt

SEQ ID NO: 218096 - DNA, 5810 bp, Cannabis indica
gtttttttttttttttgctgcaaatatgtgtgaaattgttggtagtggagtttctttgatatgtcaattagggttttcttattcatgtttattgaatcatctagtgttgattttgctttttgggtattcagaatttggtacttttgtttctgctatgtgatttttcagtaacactaagttcttttgtttagagataatgaaatagaatagaatggaaaagaatcaatttttatttcgtttctttgtttagttgtattttaatgtattagaatgattttttcactattttggtggaatgacgaaagaatattccaatacaagatgaataattttttttattaattttattaatgctttgtagatttatatcattcatattcctgttctcatttttatttctgtgttttgatttttcccaaccgtaccctaagtaataactgttttcttagttcaaaggaagatctgtatgaacacttctcttataggatgattgtaaaagtattgtcctctgaattagcttaagtagaaagttttcgacttggcacattcgaaacaattcttgtcaagaaatattgaatgttcatgtgtgaaaaatggtaactttctttgttttaaacttcatcatatagtacagtattagtgtgtatatcataggtattttctaagtggttatttttggggcaatctggagtttgtgcaaccataattcaatcctttgcaaagttctcgattctcatctgtgaaaaccaaaagaaaaaaggcatcccgagaagtttctgagatataaattatttcctttgttttttgtgctgtttagaaaatggaagaaactgttagtaatgaactctcattgtcttttaattttcagttggaatgctttgggttgaacgaaccccaaaagctagtgaactccaagagaacatggaagtatacttcaacacgctgcagggttttattctactttctcatgggagtacagtaggtgcagggcctaccttatcggcttgtgtctatgcagctgtgaagcgagttgttgattccagctttcatttatggaaggagtctgtctcatcatatggtaatctttctgtctctctcaacttacttataaagacgctcatgagaatagaacaagcagagaatagagtagcaagaacaaacagagagccaaaagaactagaatctcaattgatattgctgagaaaaggaaaatacaatgaactgatcttaggcaaataacacaattctttgcataacttttaattcttcttagactcttatatatactattctaatctctccccaaacactaacattccttcacaaaaagattcatacaccctttcatatactctcttatactgtattctattatcttggggtctaacacagtgtggcctcctttcatatgcatagctttgcaagtttctgttgcacttttgttagttgttttagaaaaattctcttatcaatacttagaacttatgccccgctctcgttatactctagtgtttgcttttgatttttatatcgtctagtctgtaatacatgttagcttccatagtatttttctatacaattgttgatcatatgttaactaagatgcaattctttcctagaaatgctgttattggccgaaatagcctgcctaagtcttttttctcacaatttcggtctcagcagtgacattctgatgattcgctaagttgaatagaaccttatattttgtgagtatacattgacaggaacagacgagaaacaatcgatccctcagctggttggcacggtgtgggaagcatgttccgctcttcagaaaactccaggcaataacattacggcaattggacgagcaatatctcaggttgcagttacgatgaaggatgttctccgcgagatgaaggagctcaagcctggatccacagacccaaaagatgataacggtgatgacgacgacgatgacgatgatgatttatgtgaaggtgatcttggaaatgatttgtcacctgaagagatgaaagttgcccagttaaccattgctgcagtatccgcgacacttgtagtgataaaagaaattatccgctccatcacgagtttgctcaagatcgggaacacgaatgacaacactactgttgtggattcgttggagaatttgttgaaacagattcaaaaaatcggcgaacagattgatgagatgggggcctgtctttatccaccacaggaagttcccgttataaaaacagcagcagaaaaaatctcgggcatcgtcgatgacatgcaaaaagaagttgaaaaccttaagggaacctcagaaggttttcttcaagcttgtaatggattgaaggtctcactagcagagttaaaatctgaactagattcatcaagttctttagatatagagtccaaattgcagaaagttgatttgaacaattaagagagaaacatcaatgttttggtcatgtgaaattagataccattttggcaaattttgattaagactgttgtttattatgaatccatttgagattttggattgaaaaataactgttaccaactgtatatttcattagaaaatgtctacaataatcgataaattcggaaaatttatacgagtggcttatagctttatgccctctgaatttacatgctgatatgaattacatgattttttttttctctagactctcaatctgacaaaggcttatcggaacaatcatgcattttcgaacggtttaacgccctgtaaacttaaccatccaggcaccgcccaagtagagaccgagcaacggtgctgccagaagacactgagtaagaggatcagttgatggtgtcaacacagcagccaccacaaccgccccgactacaacatatctccatatcgacaacatttggtctcctgtgaaaagccctacctgtcccaataggaactgaattaccggaacctgtaaaaaccatggaagaggatttttaagatgatcaacaatctccggacaataaattgtatcgggaaataaggcgtttgaaagagggtcggatacctggaaagacaagcctgtgctgaacatgagaataagtataaactcaaagtactgatcaatggaccatagcgattccacaactccttcagcataagtaacgaaaaaggtcaatgctgctggtgcaagaaccaagtaggagaagacaattccagcatagaaaagaaccgaggagcctaaaacaatcggccccagaaatcttctttccgattttgttaaccctggaagaacaaatgctataatctcatataggatgatagggcttcctatgagaagaccacagtatcctgatacctgcagtaagagcataagaacatagtgtgttatttacttagttttctagtttcccgaagccatcgattctactgaaatttacgagcaactcttgtctatcaagattaagagatttgtctttctaacctttagagatgtgaagaaaaactcgccaggagcgagctgcaggaacctaacaccttgtgttttaactggagcttcaagaatcatgatcaattctttcgaaaatgcaaagcaaccgacgatggctcctccaactgccaaaactgatataaaaagcctctcgcgcagctcttcaagatgatcaaataagctcatttctttatcgtccgggagaagctctttctcgggatatagaaagtcataaatgggacttcccccattttttcgggcaagatttccaagcgcttcttctgttgaaatgtcagcaacatctacagaatggatcataacataacgttagcttccaaagtcacaaatcaaaaaatccaaaacaaaatctataaaggacattagagagtcattatgttaactactgacatgaatcttgttcctacatgacccgatcaattcgatcaggcactcgccatctattttcattgttccattctctcacaacactaaaaaaaaactattgttcaattctttcacaacatgaaaaaaccaacaactcagaggtgtccctttccgtccagaattgggttatggcctcacaatcactagccgatatacttttctctcatacctttcttagttcatagtctgatattctggtatcctaagtgtagaggaaccacaccaatccatcccgaactcgatatcccaacctaagaacttatttaatggtcctaaaataatctaacttgaaccaaattggaatattaaaaaaaaaagcaaaaacttcaaacctcaaatccaaaaaaaaaaaaataagtttcacttccaactatataattcccataaaagcactcaaaaaaccagctttaaactactaaatataaagttttcaactaacattaaacaaaaaacagaaacaaacccatgattcttcaattgctttagataaattcttaacacaaaaaaaatgaactttaaacaagaaaactcaaatccagattaaattccaagtatttaactaacactaaacaaaaacccataattcttcaattgctttagataaattctaaacacaaaaaaatggactttaaacaagaaattcaaaattttcactaagttcaaatctcaccaggtctatcttcaacagcagagccaatcccactacccaattcaatctgcttctctctcaaatcatcatcaacagcaaaacaaactccagacccagaattcttcctcctccgagtcgttaacctcaatattgggttttgggttttggggttttgagcttgaattgagctcaactgtgttctgactgagttagacccaaaacgatcgaaacagctgtgcttattgttgttgaggttgagattgagattgaagtgtaattggggaattagagaaccgcttgtgcttcccatctcaaatctcaatctctgtgtgttgatttttggttcaaagtttggagctttggttggttcgttggtagttgttgtttagttcttttgttcttcttccaaaatatttgcgaacacaaaaaaatctgaattgggaaatgattggttggttcgttcttaaatctttattacgtaattttaacttgggccttaaatgggcttgggctttttcttgagcccaagagtattgtatacgcatttatttggggtatgttgaaacatagtattaatgaactaaatctacctccaattttatatttaattgaaacatacctctttttatatgtattgtactcaaaatatcctgacataaaggagttatatggagagtatattgaggtgataagagtaaaattggtaaagtattttaaaaaaaaagtaaaatgataggctttaaaaaagagggaaaaaaaaaaaaaggacaatatgaaaatggtatagagtctaatttcctcatttttactttacttcatttaattttcagttccattttcacatttggtaagatataatagatatccttattatatgttagacttaagtaaagagtgagagtatattggataatccacttataaaagtgagtattttaataaaatataatatgagtatatttttgataaattgatacgaaaaaatgatttttctcaacttgttccagaatgtgtgttagggtgttcataaaatatctaaaccaatttaattcgcacaattcaattctaaatgcatattaaatagttatttaaagttattttagtctttcatgttaggataaattttatttacacctaatttcttttacaacacctttttttcctaatttatattcttaaaaaataatgcttattaaataaaaataaattatattttaattggaatcttttaattatatttttcgttttctttcaaaaaa

SEQ ID NO: 218097 - DNA, 5837 bp, Cannabis indica
taagtggacacagcatctctcaccctctttctttttatttattatttaaaagtaacaatcataacaaaatggggtagtgagtgagtgaggtgacgacctctactgtgctgagtgcccaaaacgcaaaaggaaagatctatggaaattgatatttggaaaattatataattattatttatagaatctatactcactcaccacctgttccttcttcccttcacaattacattgcgccacgtggaccccacaccattacacgtggaccccaccttacatcaccaccacccaaccccaacaacagcaacatcctatactctttttcttttatattatactcctccctctctcttacaattctccaataaataattgaaaccactcttgctctctctttacaaacttattttattgcaaattatataaatatatttgtttccttcaataaagtgaaaaataaaccaaagaaagaaagatagattttaattctgagttctaacctccgtaatcagttaaattaaagaattgcttttcttttttaatattattattattattattagtttacgaaaacagttaactttgttgtatatgctccggggtgatgcctacggcggtgagtgtggccaggcaatgtttgacgccggaggctgcgcacgcgctagatgaggccgtggccgtggctcgccgccgtggtcacgcccaaacgacgtcgcttcatgcggtctcggcgctcctctcgcttccgtcgtcgcctctccgagacgcgtgcgcgcgtgcccgtaactcagcttactcccctcgcctccagtttaaggctctggagctctgcctcagcgtttctttggaccgagtctcgtcgacccaactagctgacgacccccccgtgtccaactcgctcatggccgctattaaacgctcccaagctaaccagagaaggcaccccgagaattaccatatgtaccaccaaattcctcaacagtcttctatttcttgcgtcaaagtcgagctacaacatcttactctgtcgattcttgacgacccggttgtcagccgggtcttcggtgaagcgggttttcggagctccgagataaagctcgctattttgcgacctttttcacaactcctcagatattcgcgatacaggggaccccctgttttcctctgtaacttgaccgagtaccctccgaatcaagtaaaccggagctccagcttctccttccctggtttccccgccggaatcgtatccgacggagacgggaattgccgccgaataggagaaatacttatccggaacaaaggaagaaatcctcttctcgtgggtgtatgcgcttacgatgcacttcggagcttcactgaggttcttgagaagagaaaatatggcgttttgccagttgggttatctggagtgactacagtttgtatcgaaaatgatgtttcgaagacgattatggaagattcagaaaaagggtctttgagtttaaagttaagggaggtaagtcagctagtcgagcagtgttctgggtcgggtttagttttgaactttggtgatttgaagaacttcgtggatgaaaattcaacggttgatgttgcaatagtgagcaatgtcgtcgaccaaataacgaggtttttggagcttcagaccgggaaagtgtggttaatcggtgccacggcaagctacgagagctatttgaagtttgtgagtaagtttccgtcgattgagaaagattgggaccttcaacttcttcccataacctctctcagatcttccatgcctgaatcgtataccaggtctaggtactaactactttttacgtacagttttcttgattttgtgacttgcatgattactgctttgctggatttgctttacttatttaattgatattctatatattaattaattatcaaaaaggtgttttggctggtcgtaaaaaataaaataaaaaaatttctcgtctcactcttttcagcagttttctcaatatctttattttctttttctaaaacgacactggtaaatattacgtgatgactttgtttgcttctgccaatatttttaattaatgagaataaagttttgtatcataataatccgattataactaatatagctgttaattaatatatgaggcacatcatcgatacatcataattttcgaattcataaactttcgggatgtttatttaaagatgtcttattctctagggttgaccttctagtatagttcagatttagagggtttttattctcaggatggttgaccttcttattcatttattttagattacttttctttctgagctaggatagtattttgctggggctaactttagttagctgtggagatatatgcgtggtaggaaagactcattaaactttagttagctgtgattctttatcatccacttattttgctttcttaaaaagaaaaggatgttaattgaaaaaaaaaaaaaatacgttgtcactatcaatagagagattatatatgtttcttctaatatggaaattttatccttcttttgttagtttagacagttttagtaacatttagtacaattttcttttagcgctagctacaaattttgtttagaactagttttctgatactaagttaactggagggataacaatctagttaagtgcttccctctttagctttgtccaaaaaaaacctttgtaagtttaacttttagcaatgttaccttgtattagctgtctcttattcgataattttaaacctttcgatcgcatttttcagtgtgaagatgttccctttgtataatatgtctcttatcttactcagcattttaattatggtcatggataaacttacagcttgatggagacatttgttcctcttggtggattcttttcagcaccatctgatgtaaagttccctttaagcagttcttttcaatgcctgtcccgctctctccagcacagtgataattctgagcatgaagtatctaatgtgtcaaagccgggcatcacctcttcggttgcagatcagtgtccatctagcttgccttcttggttgcaaatggcagcactaaattctaagaaggaattggatgtgaaggtgtgtatcactttaaggaaacaataacacttttatttgaattagttttggtttcgccttatatagaaagcggaatgtttcacagtatttgtttgaaaaaaccagtttgtatctcttcagtgcagaccaaagatgatggagatctattgaatgtcaaagttccagggctgcagaagaacgaggataatgcttctcacgatgctagacgattgcctgaagcgaatttgtatccaactatagtcgggttccagtctggcaaaaataagagggacattgttgctaatgaggatgtttcctcacatggagctactaggcacatggatctaaattcatgcttgccaacggatgttgaaaagttttcagcatcacaagcaagcaatccttttcctgtttccaaagagaagacagagagtttttcatctggaatatgggaaaagccttctaaagatgaagatctcgagtcgggtggtgccaggtctcctcgttgcagtatctccaattcaagcaacggtgatggaaatcaaagatctcctgcgtccgcaacttctgtgaccacagacctaggcctgggaattttcatatcaggaggttttaacaagttgaagaaacgtgaaaatcaatatcacttggagcttaggcaagacatctcagattgttgcttggaaaatgctaattcagccaatggttatctgtttaatcatagacctcagtcaacatctgctagtctggacaatcataggcaatttgatccaagagatgtgaagatgctctttagagctatgtttgagagtgttggctggcaatgggaggccataagtgttgttacccaaactatagttcgctgtcgaaccagaggaagtcagagaggggatatatggttgaatttcatcggaccggatagaagcagcaagagaaaattgcttactctcttgccgagatactatatggaagccgggagaatgttatttgtgttgatttgagctcagaaactagaatgatccattcagaatcaatcacttgtgatgtaaaatttagaggcaagagtgttgttgattgtattgctggggaaatgtgcaagaagcctttggcagttgtcttccttgaaaacattcacaagtctgatgtactggttcgaaatagtttattgcaggctatctcaaccggtaaattttctgactcctatggaagagaagttagcacaagtaacaaaatcttcttgacaacttcagcagtctcaaagcagcatcatatccaggtttctactaaggactcatccaaatattcggaggaaagaatctcaaatgtaaaaggtcggccactgaggattatgattgaaggtgcttctaaagatagtggagcaagccaaagcaggatactacctgacatcaattcaaattcaatagttaacaaaaggaagttgattggtgtcactgaacctctgcagcagcgtgatagctcagaaacagtgaaacgagcacacaagacatcctcggcgcatcttgatctcaaccttcctgctgaggaaaatgaactgcagcaactaacaaatgaaggaagctctgaaaatgactacgtttctgagaactctgatgcttggttactagatttcattgaccaggttgatgaaacagtggttttcaagccggtcgatttcaatttgcttgctgagaaaatcttcactgagataaaagatagcttccaaagaactgttcactccaagtgtatcctagatattgagtctaatgtcatggaacaattacttgcagctacatatttatcagatgggttcaaagtggtgcaagattgggtgaaccaagtcctaagtaggggattttcagaacttcagaagagaaacaacaaccttacagttcattctgttgtgaagttagttacttgtgagggtctcagcttggaggagcaaaacaaaacaaattaccttccacctagtatcatcataaattgatgcaataaatacatcaagaaaacaagcttcatttttatttgttttgtaattatagagtatatagtgtcataatatagcacttagttcttagctacttctcttcaggctctgttaatccccataaatgattgggtttatgctctttgtgtatgataatgtaatttgcagctagggcctgtgtgatttttatcccttttatgtactaaataagctgaagttgttaatgttttatttttctttctgtagtctaagttgatgatatctattaacttttttactaaattttccgagaatttcactatattagaaatgaagtaaaagagtaacaatgttgggactatattgacaaaatattataaatataaagatgtagcatatctataattcttaaatttgtataatattggaagtacataaagttattttaaaaagcttaaatttgataattaatttattggataaatatcttaaaaggttaaattgataataaattataggataaatatctcctctacatatttgtaggattttgtaaattgaattattattattatttctaaaaaaatttcccttcaattgtgaaaattgttgactttgatggtaaaacacaatgattgagcaagactttgatggtggtctaaacaaatggttttaagatttttaggatggaaaaaggtatatgaatttatagtagtttaccctcttttattgataataggctagttcacttgtgatattattattttcaatgctaaagaacacgactagagttatgttcttaaaatggcagt

SEQ ID NO: 218098 - DNA, 7023 bp, Cannabis indica
aacaatttaatttctaaagaaataaatagcaatgttgaaaatggatatcctttgcctgcaataggccacgtccccccactccccagctgcaataacaataagacatcatcattctttgtgtcttgtccactaactgtccaaaaccaccactcaacagcatactttcctttagataccttacacttctcatctcatctctcttctttaattaatcttaattaattaatccaaattctctcttaaaaccaccaaacccaaatgaaatcattccaacactaacataagccataacaatggccaccttctcctcatctttcgctactctcctttcaagttcaatcccctacccactcacccgccacgcctgcaactttcccaccatccaaagaattgtcaaattccccaattcaacttcaacctttcttcctctgaaacttaatcctctacacctcactcaattttcttttcttacttcttccgctggattccgcctcgccggcagctccgttggaaacgccgaacctgatggtgaagatccaccgcttgtcggtgaggactctgccgtcttcgaattggccaagcagaaattatcttcgtgggtttacttcgctgggattctgggaacagttttattcgtgctcgacgttgcctggctcgataactctactggttatggaaaagccttcattgatgccgtttccggactctccgatagccacgaggttagttgaattttgttattcgagtaagaatttcgatatcaaatgtgcagaacaaactcgtccctgattataagtagtttaatttattctgtggagcttaaagagaaagaagaactttttattagaatttctcctaaagaattgtaacagttactttatgcggcattagctgtgcattgttctgataaaaggagttgaatcaataatatctgcagtgaaggaattgctggcagaaatctaatattttctgttaagtttgcattacattatgattctggtgaagtgaaattatacatgttgctgatattgggtctaatgaaggaagagattacttgatgatctacaataccttctctttaatcaagtgaacaaagttcttggatttttagatataaccatatcgtgtactatttacagtgtcatgcagctcatgcttattataatgtgttaatgtcaagcttaagtcacgctggtctcacttgacccaatttacagtgacaatatgttcataagatagagggtgatttgtgctggtcaaatttgataataagtagtgtggaaaacagtacttagagttagaagagcattatttaagagttagaaaatggatttctatttatgaaaaacattttattctcgttcccttctggctttttgaacattagagggaaagagaatgggattaagttccaattgctagtctcattttttctttcaatttttgcttcatgctctctatatttgtaaattatatatgtagacccataattctatttctagggaccttgtttttcaatatatgaaaagggctaccacttacgtgtgatatttgcttaatttctcatctcttttcttttaatttttcatgactttatattcttagatttcatgtgttaaggttttgataaaatctgatgtaaacatgaatctgcaggtagtaatgctgcttctcattgtaatttttgcaactgtgcacagtggcttggctagtttaagagacatgggtgagaaaatcattggagaacgggctttccgtgttttgtttgctggaacttccttaccattggctgtcagtactgttgtgagtacatgctgctctatcatgaaaccccaatatttttaattttttccttttataggttttctttgctcaagctagcttggtttctttttgtctttctttttttgaattactgtccaatttaaggtgcaaacaaaatttatttgaactgacttgttgactttaagtgtttgtaattcaggtgtactttattaaccacagatatgatgggcaacaactatggcagcttcaggatgttcctggactccatcagtttctatggctttcttcttttgtttccttcttcttcctctacccttccacttttaatctactagaggtagcagcagttgacaagcccaaaatgcatctttgggaaactggggtaatgagaattacaaggcatcctcaggtacataatttattttctttggaatttctgtatagtgctggcactcatagtgaagtcattgaagaactgctcgaagaatttctggatatttaaaatgagacgaatgcatgtgctgactttggcaagtcatcatcgtccccactgatccattttgtttccccatgcagtcttgggatccttgatctcgacacaaaactttattgtatgtagatgatgagatcttttaagatttagggaattgttagttattgagcaaaaatggtaaggaactttagtaaaactgatggaagtttcccttgttgaaaagacatgtcctcaaactttataaagaaaccctaacgtaatcaagttactcctgtaaattatcttcctctccttccttgtcctctaaatccattcagctaatctggttttgtatttcttgttagatggttggacaggttatttggtgcattgctcacacgatctggatagggaactctgtggcagtggcagcctcagttggcttaattggacaccatctttttggtgtttggaatggtgacagaagattagcgataagatatggggacaattttgaggctgtgaagagaagaacttctgtcgtaccctttgcagcaattcttgacgggcgacaaaagttgccgaaagattattataaggaattccttcggttaccttatgtagccatcactgcagtaactataggtgcatatcttgcacaccctctgatgcaggcaggcagttttggacttcattggtagggcgacagatttttattttgattggaacttaaagatgaacaagagatgaattacaacaaaattaagcatatacttcggataagttactattgatcccatagttatattgccttctttacttagttcgagtctctattttacctcaataaatagtttttactttacttcaagaagtaatttttacttttggggccacagtataaaaggcaaggtgggcatacctgtgttgataatttcgacattcacataatttcatcttcagcatagaatgtaatatgacagtaactcagctgagtatatgatatttgtgctgatcatttgcagtcaaaaagggaaaggtattttttctaatatttaattctatacaaacaaatcaaaaaataaagaggatcgaagaataaagaggaaagtgatatctttcctatacaactatattacagctacaaattcattcctaatatatactgattttcctacactccccattaagctggtctaaaaatacaagcttgctattaagaaaaacaatttatattgggaaatttaggttaccatgtaatgtatgaacccaaaataatctactcttaaatatatatcataaatatactttagttccacccaaaccaaaaaatattcgtcgcattttaactttctccattctctctcgccctttcattctctttatcctctctcttataaaagaccacataaactcatcagtgtgcactgctcatcactacactccactcaccactgcacacctctcattctcttgctctttgtttggacgattcccaaatatatagtttgtttctaacagatctacacattagtgtttttgttttgttcattttgcccaaaaattgaattttacattctttgaatttttttttttttttaatttttttgcaatatttagcgatgtatttgtaatgataagccaaatctgaggtcagggatgaagtttagcgatgattaggtttgactaaaataataaatgtgcatacttagcgatgtttagattttgtgttttatttgcgatatgagagtaaaaaatacaaagcatatcgctaaacattgctaatcatcatgaaaattttgtgtgtgatttaatgatatttagcgatgtattttacactgttaagagctgacagttgtacttttctgttatgttagttacacaactaactaactttctgttagttagttgttagttttcggttatggcattgtcatgctttgttactgtaattcttgtatgaatattatacaactgtaatcaataatagatgagctctttcatgatatctttcatctttttcattcttctcttttctctattttctctcttttctctgttattagttttctttactgttcgttcattcttaagcttcaatgtccaggagattcaactctcctcacatggtatcagagccattgcctttgttggtggcaaatattgcgaactccagtcttggaacagctgcaaatggtggatcagctgctaatactgtcaatggtggaaatcaaatcggaagttgaaatagagaaccagatgagaactcacctgtgtattttaattactcgatttcaataaagcttaatgatcacaactttcttctttggaaacaacaggtcttagctgccattcgtggaaatcgattgctgaaattcattcaaaatgttgctcctcctccacaatttctcaacgatgcagatcaaaccaatggagagtaaaatcctacctttgtcaaatgggatgttcaagatcagttacttgtttcgtggcttctatcatcaatgacagaaagcttgttgaaaagaatggtagggtgtaacacagccaggcagatctggaattccctagaaaaatacttcactcgtcgtccaagattctggagtttcccaccaaactccaaaatcttcgaaaaggatctatgtctttgaatgaatatttgttgaaggttaaacaaactgtaaatcttctagccagtgttggagaaacacttaatgatcgtgatcatatctcgactattttcaaaggcctccccagcgagtatgacacgttcataatctcctcgaacacaaaaattgaaggctacacaattgtcaaaattgaggctctattacttgcatttgaatcaagaatcgagaaaacttatcaagaacatgagatcagtgtcaatattgccaaaactgtgcctaactatgtgtttgatcaagatctgaatcatgaagctaatgtggctcagttcaatcgcaatatgaggtaccttgtgacaaattgtaataacttcaacaactccagaggaggttatgctggcaatagctctcgtgataatggatctcaatttcagcaacctaattccaacaatcgtggaattccaactgctaacagaggaggaaggtttccaactccaccttcaagagttcaatgtcaactctgtcatcgcctaagacacactgtcgttgattgctattacaaatttgacaagagcttcactagtgttggatccaactcaaatcagcagacacaaccacaggtgaacatagctcacaattcgacaaattaagactcaaattggtatcctaactctggagctactaatcactgtactccatacgcacaaaatttcatgactcgaactaattacaatggagcagacatctatatgttggagatggaacgagtttgtctattgaacacattggtcattcctattttttatccaacagtaatcaatttctcatcttaaataatctacttcagattccaaaaatcactaaaaacctactgagtatctctaagtttggcagagacaataatgtgtattttgtgttttaccctgatatctgtcttgttgaggacaatggtgacacacatacactcctgactggtgttcacagatggcttgtattttttgatgaatcacaggtccatcttcaacacaccaagctgccatcaagtctcaatcccaactttgaaactgatgccaaaaacaaatttgttcatgcaaaagcctatgtctctacctcagaaaataaagaatgtcactcagtccaatcccagttccaaatgtggcataatagactagaaaatcctagtgaaaaagttgtgaaatctgtactcaactcttgcaatatacctattagcaataaagatcaattctctcattgtaatgcttgctgtgtaggaaaaatacacaagttcccttttcccaactcttctaacactgtgtataatgaacccctacaacttgttgtcacagatggggtccatcctacataacatccgctaatagatataagtattatatacatttcctagatgcctacaccagatttacatggatttacatatttaaaataaatttgatgctctaaaaacttttcaactttttaaagctgaagctgagctccaactaggcaaaaaaatcaaagtgttacagagtaactggggggtgagtacagatctttcacaccatatcttaaccaacatggtacagttcataggcgtccatgtccaacaacacatgaacaaaatggcatagatgaaagaaaacttaggcacatagtggaaaatggtctaacccttattacacaagcctctatgcctttaaaattttgggatgaagcttttaggactgctgtctatatccataatagattcccaacacctgtcctacaaaataaatcctcaatagaagtcttgtttaacattaaacccgactacaccacattcaaaacatttggatgtcaatgctttcccaacattacaccttataacaaacacaaacttcaattcatatcatcaccatgcacatttctaggttacagcatcaatcacaagggatttaaatgcttagattcatctggaagaatttacatatctagggatgtcatatttgatgagtttgtgtttccctatgccacaataaaatctgattcccctgctaaacagattgagtatctgccatctgctttaattccaacttctcaacatgatagttattcaaagtcacattagaagttaggcccaatattcttgtgtcatctcatagt

SEQ ID NO: 218099 - DNA, 6323 bp, Cannabis indica
tctctctcttctctcttctcagaatcctcaccactttctgcatcgctctcgctcaaaaagccaccgccatgaccatcgtcgaatctcccgccctagatgccactcctgtcgtcgacaccgttgttcgccacgaaagaagggtactgaaattctttcatgagaaatgtgattgcttttttgtgatttaagtttggtttgatttgatgaaaaatgttacttgaaattggcaattttaacaatgatgaaataaggaaaaattaacattgtgaaaaaatgttgctttcatgagtttttcataatcaaactgcattgtaattctcttactgtctcattgatcagatgaggtataaaagatggctttggtggacaaggtttggaatgtttgttactatgctgcaatttattggtgcaacttaccttgtgttcacaattgctacctatgtttctcatgaaaacgattcaagtgattgcattttaggtaaggtaagcttcctctgtcgatttattttagtcagttgtatgttttcttcctctatgcatgatttttagtttttatatgttggtgaaacatacaaagttttgtttttagtaaacaaaaatctttatgtgcatatattttatgtgttcatctaatatgtcatttatttctttaattttatctaaacctctgccatggtttctctttttcttgattgtattcatgatcattaacttaagagataatatagtttattacttagaaggaagtcaaactactttgaaccatctttcaagtgggctaaatcatatcaatactttactattatattttttgaagttgatttgtttttctgtcacatctgttaaattggaaattgtatttgtttatgggtttatgtttttaatatctaataatttaagttttgttgtgctggtttttatatttgatgattgttcggttattgttaagttaaaatggagctttgttgctaagatgatcagattgtgcaacatttatgattttaatgatatagaaggctaaatgttatttcatgcactttgttccatacatgagttcctatttaattaatcatgcaagtaatattattgaaaaatgaaaataaaataaaaaaaaaaattaatcagtaatattattgaaaaatgaaaattaaaaaaaaaaaattaatgactcttctttggaatttaacattttggcaacaacagccttagatagattttaaattctaaaaaaagtactaaacctctcactttctcaatgtgggatttattatgcccacaatttgtggtttcaactcaacattatgtaaaatttactatggaaaggtttctaacttaaaagagtgttaaagaccaaaaggaccttatcatcttggaaactgattgcttgggtgtagttcaagcactaaggagtaacttgaatatgattttactgtttgatcatgttatcacagattgtaaatctttactttctgaattgtgaatgcttctgttttgtttgttaaacgatcaacgaatacggttgcttaaaagtttgctagagctttaatatttagtttggagtctgttccaactaatcatagagctttaatatttagtttggagtctctttctcgcgtgtgcggagggttgtaaggattctgtgtgtctgatcatagaactcgcaatgagattttgtatgctcaaggaatattagaatatagaactttttacctttcctattttttaagcatacgaataataataatggtattttgctgttgacaatgtaacgcagggttagtaccgggcagttgccaatggaagcagcatttacttattttctttatgttcttggcatgcgctattacaatactacattgttttacggggtctgaagttctaaagtggagatcatactatggaaccaaagatgatgcatggaaatcccattacagggaggtctttgatcatggtattcgtgaagttttgtgctgccttggacgtgccaaatacttgtaggttcctctgcttagtggctgcatcagcatgtgtgcatgtgctaacacccgcgtgccttctgattttgacatatgattttatttatttaggagtgccttggaggaagatgaagttttctcagtagctcgattacttggggatcttgttgcttatcgtgcatcaggcactggacatttggaattgttggcaggtatttctgggtcttgacactgtaaaaaattcacagtaggttacactcttttgatactgcatcaccatattaaaaatacaaatgtttcaagtaaatgatggaaaatgcattgatcttatcaaataggaaattctctattagaggaaagatacagcctaaacataagatattgaggatctaaatctctctaaacaagacttgtgtatacttctagttatacacctagaacttgtgtcatttgggaaccaatcattgttaaaattgcccaaagacttgaactgctggaaatgaacattcctatcaagagataatgtcacttcattattaaataagtttgggtcaaatttataaagaagcaactactatttccatcctatagctctactggcataatgtttctatgtcaaagtataataacactgttattatgcatcaaaattcatgtccctatttttgcttttctttcttgttgcatgaaatgagatttgagagccagttaatatacaggtctagccttaatgcagaagcaaagcgagtcatcgaattcctatgatgagtgcatgaaagcacctgcagaacagattcaggaagctgcagctcttcataaatttgctgaagcagcttatacggtatgagtaggacaagctcttcttattctgttattttttgctatttcatttttaacataaactaaccacatgtgcagggtcctttacttgattttggaagaaaccctttcttatttccttgtgtgtggctctacagacaagggattttgactccctggatgcgtaacaggtcatcatttcaatgagtatatgctgacacacatatttgagaaatctaatattattctacacagttgacaagtcagggcattcataatgattgctgtgcagataatttgttattgtcaagtgtttggaatttaaattttggtatttattaattttgcttctgtgttcttaggcgacccaaacttgatggtgataactggtggagggggaatgcagcagcctttctaaaacatactaatttacccccagaagtacttcgaaaagggcgtgtaaaccaggtgagagatatgttgtgagttgtgccacacctttcctgtcaattcaatttgtcctggttattgatatttctgctaaaatacaatggaatttcacttttcttgggcagaaaggttttcgggttgaatactaatgacgagctaatcattgaattaagtcgctgagctactttagttgaatggcctattatagcataatgctgcttattttaagttagagaactttgtctctttacagttttttgttctttctttgatgtagaatgagaaacgatgatggtattatgttaaagtaagggatagtacaaccaaaggagaagaccagttgagccatagaaccaactgctaaactcactaaacccaggaaacagacataacagaaaagtttatattaagcaatcttagtctctttaacaagtcataaaaggaaaccaaccaaaaaactttgactgtctttagctatatagcaacccacaacttgatttatgatttttcaaaagcgaaactccttgaacattgattaataaaaatatgttttatgtaattttaactaaatgggtgtatgagaggataatgctttaaggatctccattaataaaattcatgttttcttcttttgtttacgtactttctgtcttaggcaaagtgcgaggcagcctactttgtaattgttctgcataatctaagatcggtattgattgctgtgcgtggaactgagacccctgaagatctgataattgatggtttatgtagagaatgcattctttctgcaaaagacttggacgggatgataaagtattgctcttctcttttcctatttttttgtctgcgcattacatgcatgtctgcctgttatagtttcaggatgtagagagtctttatagaacttattctttcatatgataaaaatagttttgcaattataaactgatttgaataatttgtgtactatacaatcaaacgatcttgtacacataatcatgctaagtgaaaaataaagccaaataacagtctcctataatcaaaggctacataaatacaaaatcagattttagaaaccaaatcttacagctaaataacaatgaaaatctaatttatattctccgttggccatatcaaatcctatgctcatttaaaatggcatctgccaacattctccccaagcttgttcatgaggatatgaaacatgtggtatgtctttccctttgtgtatatcaagctagctatagtggtataatagagattgttgtattgtgctttgcagtagtggtcatgttaaccctgaaattaagcagaaagttgtctcatctttcccacattatggtcattcgggcattgttgaagctgcaaggaatctcttcatacaaatcgaaggaaaagatgaagatgatggtaaatattttatttccttatttagtttaaactataatgggatgcttgcttattactggatctggttccatttccatttacacaatttgggttccatctagatttgattcattcaagtgtgcatgcagcctagtctcatttaagtgctcaatttaatatttaaatttgagtgataatacttaagaagtaaatgaacaaccttgaatataattgtcatttaatcacatgtatataatgtttaataattaaatgaaaaaccttgattccatatcttatttatattctgagacataaaaatgttatatattatcctttatgttataactgtccactctgaaaactaagaaagcttgatcccatattttgtgataaccaactaattaatcctaaagtggtgtattttgtagattcaactaggcactaacagaaaattctgatgctttataatgtcaatttgaagaatgcattctaattgtttgtttatgttaataatattaatattgttctccacttctatcttggatagtcaaatgtaattggttatggttggtccgggaattatgtagataatcctgaataatataaataggaatacagtgatcataattgacatgacacccctaaataaataaataaataatctagcatgaaaaaatttgaacacacgagaagaagtgcatcaagtccatagttgtacatcccgaattgttccatgtttcaatgataattgagctccgggtatttccttttctgaacttgagtttttccttcatgtttggatggttggtaatgctaataaagttgcagaatccggttcagatggccttctttcttctctactgggagctgggtgtgaatgtgagggttacaaggttcgcatagtgggtcattcccttggaggtgccattgctgctgtactaggaatgagagtatggatttccactttaaaataaatgtgtgcctacacttgtatgagatttgtttctttatttttattttttgcttgaatgctttaaaataaattttctgaacattttcagtttttgcaacattttcttgactaaagctcttcttgccttgtgcatgttggttgtataacccaatattctataatttttttcttcagtagaaaaatacctgtaaagccaataaacattaagtggtacatcagttcttacacttttatctcataaactcaaccactggtttggctctttaaacttaataggaaagtttatacaacagaagaaaatttacaactattacttatcagtaaaaaagaattagaagcaacaataatcatatgcttaggaacaaaaatgcaaaagaaattaagaaattaagatcaagattcactacaactaaaacccatctgtacaagaatgtcaaagtagattactttatgcacaagagtaaagtttataatgtagtacataaatcatagcctctttttctgttgccttagttgctccatattctctcttatttgtcccgctctgatttcctttgtagcttcgcttgtcttactgttcagtatatgaatccttgagtatgctagacttaagtgatgtaatgagaattttagccattctagtcaaaaatcaagttttaacccatttcattctactttctaacaatgtacttatatattgcaatttgggtttttttttt

SEQ ID NO: 218100 - DNA, 6689 bp, Cannabis indica
tatattgttattggtacattttaatattaggtcttgcatatttttatttaataaaaatcactaactaattataaaatgacatatcggtgttggtatttggcactttaagatatcaaataacaatactctacaaagtcagaggtgatcacatgggatggagtgagtaaattattagggagtaatttgcgacaaatacttttgcttgcagataaataactaagtaatttttttagcagaaaatttttgtaggtactgattgttaagtgatatgttagtacctacatatcactttgtgattgatctaggtaatttattttttaatttaatttaataattaattttaaatgataaaaagattatattgggtggcttcaaaatgaaataaccatgataaagatctagactttacttgatcacctaacttgttacttgacaaagacgatggtagagaagaaaaaagtcaagtatatagaacattgcataaagaatcaatagatgtgatgtgaagattgttttgatataatttctcatgacccttacattgcattatatatataatatatatatagttatattctttgtaagtaagaacagtaaaaatacctctactttcctctttaaaaaaaaaaaaaaagaaagaaaagaaagatagcccaaagccaaaggggtttgatttacatttgaggtccaagaggaagcctactcataaattgctgatacacagaggcattggagagattcagaccagtggcagactctgatattggttctgccttgggctctccttttggcaacatgaaactcatttcattcgcctgtcgttgctgctgctgcgccaagtaaggattcatgggcattccctgaagtttgggtggcatcgagcccagaccagccattgccagattggccaaacctgcttggttcattccaaaagagaagttgcccaattgctgcctcggtagactgtatgaactcagtcttcccatgttgttatgaagttgttgtgaagacggttcaggccggtgaacatgggattgcatggctgtggaagccgaaccttgtagttgcatagaagggccagagttgacatggctgctattccgagcagcaggaacatcatgattgtgctttccctcgtatgttgtgatcactgacttgagatcatgggatgctctctccacatgtttcctcactgtgcagccagcattggtgcacttgtagtaactcctgcatcccccatcaaacaaatttactaacagaattagaataagaggttctcttcactaaaacagcagcaacagtagtagtagaataaagacagtgagtagaggtataagtgttaaaaacctggggtttggatttcctttcactactttctgaccgtacttgcgccagcgatatccatcgtcaaggatatcaacttcactggtggtctggaccacaacccttggctctctaatagctctggtggctccactcatttctgttgcaaaggcttctagtttcctgatttgttcatgataataaagataatataagtactaccacttcactcttaacaacagcaacaacaacaatatatatatatacatagagatactaaaagagcattccccaaaaagagaagaaaaaagatataaaaataggtgagcagtaaccttcttttggactcagattcatcttcttcaccctcataacccaatgaagcactgccatgtgtccccctgtcatcctcatcttcatcattagagaaagtagatgaggcgtcaacaactgcatcaactgattcaagctgagtaccattttgagcctgtaaagaggtggactggttacagtattcgggtcccgctgatgctgatgctgatgatgttacctccaagctgtcattcctccaatcaacaacagtacccttttgtgtacttgcccaaactgggtcaccatcaccaccaccacaattaacattaacattaccattttgcataccagcttgctcttgaatgtccattctcatgtcggccagtgggttggatgatgatccaatccctgaccttctatgagaaggtttagcatgattatgggcccctttgtagataatctcagtgatatggccctcgtgagatctttccacctttttcttcacctgacaatttggatgcgtgcatttgtaataacttcttggatactcactaccctttacttgtttctgtccatattttctccagttgtatccatcttctgatatccatcttctgatattgtgcccccaccaccaccaccaccaccaccaccacctcctgctgagcaatctcctccactgcccttttgatctccttcttcctctccttgctcctccaatggtggagaaagctcaagctctccacccttttgatcactactgctatctttctcatttcctcctcctacactttgaggaggtgagttttcagactgaactgacatttcaatattgggataagatggatgaggatgaggaggcatggcagcagctgatgtcatctatagtggtaatcaataatcataatcataatagttaatattagccatattgacataatcataaactaactgctatgttgttacttactttggttgcagttccaagaaagaatgaggaggaggggcctgagttagggacaggtttgaaagcaaaagaaccagcatttatgtcctcaaagaaactctctttatttctatctgaggcttccataattaatgttgaactccttgtgttgccattagaagaagcaaatggaaatttcccagttgttggggatggttgtgcctgcaaaacacaacacaacacaaacaattcatctcctttaatcatttgtgtgtataatatgagattggataagaatagacagacagacaaactgactgactgacatactgacacactgcatgtaaagcaactatctttatttattaacagatcaacacaaagtgatgatgaacagcttaacagaacttatatcatatataaaagcttctctctcctgattcccaagtccccaaagcaaaagaaaagacagtcaaagcaacaagcaagcataccaataaagttgtaattttttcttttaaaaaaaaggccttaccaatgaatttgaaaggaaaacaggagaatccagaagtgtagtggggctgagaccaggtggtattgtcagataaggagatctagactcagaagcagccagtgaaaggtctgaagaagaagatctcatgctttcagtgttgagtctaggagcattaaacccagctctagctgcaattctatccacaagtcccccaccacgggagtttgatttttgctcggaaaaaaatgatcccatttccctaaattctttgaaattgttgttgttgttgttgttgttgttattgtttggaaatagatcttctgtcttgttatgtgttgtgcctgagaattgcctagacccaatatcttcacctaacatggctgagaagaaagctcttgagctgggactaggaggtacccaatctccaattatagccacattgtcatctaagcctgccatgaaaatcaaagctccttttcccaccagaacactatcaaatttttatccctgaaaagattttagaacccaattaaagctaaataattttttgattcaagaaaagcaaaagatggtgtgtttgtttgagctaatactagacacactagacactagacagcattgtcatcgaacaacctgacaaagataccattttgttaaattgattgtcctttgcttcattttggatgagtcaaaaaaagctgagttttttattttgccaaaaataatcttaagaattacgatttgggtagcaattattatagctaataactgagacccatcatggaaaagaagcatatcatatgattaaagcaccaaaaacagaagtaagctaataaaaattgaatctttaatgcagttttcacctaaatgtacaaatgggtatataatacaatacatatatgtccaaattctaagatccaaacataagaaaatgtgagagatggtaggagaaaggttccttttttatgcagaattatgatatttatgatagaaatatattaggttgggttgggatggagttagagagaggaaaaaaaaaagaatgattaaaaatgattacctgagtggagatagtcaaatgagctgatgatgatgatgatgatgatgataatgagattgagcataaaactcaacccccaattttgttgctttgagaaattgttagcttattgtttgaagaatcatgattgagaagaagaagagaagaatgaaatggtgtgtgagtgtgtgggtgtgggttgtgttgagttttttgttcttttgtctgagaaaaatgaaaaacaaaaaaggagagattataaattataaataatttaagaaaaagaaattgagacaagaacaaaagaaggaagaaaaaaaagggtgttttggggtaatggtggtggtggaccggaaacggatggaatctttgaagaagaactaataataaaaatcaaatctttatcttccattcacttttaccaatactcctttttccttaataataatcttattcaaacaaaaacaagaacaacttatattgtaacccccaaaacccatttcatctttcttcttgttttttgtttttgttttccttaaacactactctcttaattagcctctaataacaaaaatataaaaaccctttttttagttggtttttttttcttaataattaataataattgaattcaaagatggaatgttttaagtagctagtatcatgtgatgtacagaagcaatttatagtaaaatttaagtggaaggcaagctgtcaataaaattaaaattggtttttagatgctaaaaaaaagtgctttaatttctactattactagccaaacacctgtacacttgttctgttttccttccaatatatttggctcttgttataacctattctttcttataaataccttctttttcattttcccaaaatatttaattttatttgtttttatgtaaatatatatttttagctaataatgagttttgtcatgaattttgatatatatcatatcatatttttttaataatttttaattttaggatagttagatttaagaatttttgtccaattttaataaaaaaagtttaacatgaataaaaatttagggaatataatttgatacttatcaatattcgagaagtataatttagtagatatcaaaatttaaagagtgatttaatacataaacaattaccgaattaataaatttaataaaattagacaaaaacttttaaatctaacaattttaatattctaggagattttttaacagataagttgctaattatcttttttttattatacattaaccaaatataactgtaaaataattttaatttataaatatcttcttttataattaaagcgtcaaatataacttcaaataacttatcaaaattagagttcttaatgcacatagtaagaatatgacttataaaattagatataaattaaaaaataataaaagaaatgtaaaaattaaaagaataaataaaaagtggacatagagcgtaatttccttatttttaactgtcaaaaatttaaaaagtatgatttagtacgtatcaaagtttaggacaaaaattgtaataagctatttattttttaaaattttaatttttaaaaaatacatgtataaggaaggtagtaaaaagaaaaaaaaatagaagaggacggcatcatcggagttaccaatgtaataatactattcaaatgatattatcatttattacaaacttgttttttatttttatttttttaaaaaattattttacaataataaataagttcacaagtagcctaccctagcctaagagtgattaatttaatattaattggtgatgaattatctagtattattgttataatatattgaaaaaaaaggatctcattctaataattaaaatcttatcatgttatagaataatttgttatcatgcatatgtagaagcaaccaaacaaaagcacttatataataaggtttaattctcaatggctcttactttgtataaagttattatattctcatttctcactaaatctcccaatattacatattattattcttcatttaaatatttttatattatatatgttagataattaaacaacatgtatatataatgacaataaacaaaatctatagcttatagtaatcaattcgttaatcaataatcaccatgatatatactactataaagaaagaaagaaagaaaaaagaatcatattattattattattattattattattattattattattattattatgtaattttttatgcatgcataaagaaataagaaaaaagaatcatattattgttattattatatcatgtaattttttatgcatgcataaagaaataagtagatgagtattttgtgtttggaacatgaattggaaattccaaatggaagaatcatatattgactcttattttattaatactaatattaggtaatatttttttttgttgaaagttactgattgattggatttttttttttgttaaataataaatttaattctgtattttttaaaatggtataaaatagtactgggttattttttttatcaaataaaatttaataataacttaattt

SEQ ID NO: 218101 - DNA, 7874 bp, Cannabis indica
cactactccattttcgcttctctcatttctttctaatcaataaaaccttaaattttctctctctctctctctctttccctccttcttcaatggcttccgtcgttgaggatcctatgctctcctaccgaatactagacgaagaatcctcttcttctctatcttccaatcccctcagatgctgtcatcttcgtcggcatctctttggtgctcggaattgccctgccgccacctcctgcgtggtaccagagttccttataccgtcggcttgctcgttctcggcattgctcttggatctataggtttctttctcttctcaatcttttttttaaaattcacaaactggtttgactgtgctgaggtttttcttgatgatgatgtattggtttttgtttgtgaaacttgctttgtttggacaatacgtgactttctttctccaaaactttttgtttgtttttagttctgaaatctgtaggtcatatcaactttgtgagatttttacaagttcggttgaacttgtaatttgtttagagaatgatcattctcattttctcaaattggataaaagaagacatgttccaccgattaactgacccctaaaaggagagttttgaaacaaattgaaagttttacttcgggaaaagtgatgaatctgttttgttcgtttagttaatgatgacttagtggctgaagtattcattatgttgcagaatatggtacacatcatcgactgggaaagattggcgatggcattcgtatatgtaagcttaagctatagtttttattatgaatactcagtagagtttctttattatgtagtaagcttatcttctctaggtctgttatgagctaataaatggatacccttgttgaatttgcaggggcaaatattgatcctgaacttctattggctgtttttcttcctgcccttctatttgaaagtgctttttcaatggaagtacaccaaattaaggtagattctcatttaattgattctttttataccatgagtttgggcactttacctactcctcgtaggtttatttatttatttattttatgttttcttgtaaaatgagttttcacataaacaaatcatcaaaggttaaaaattgaaattatttcatgtgtagatacttgataaagataggttttatcggagggctcaaaccggctaccacgagtagcataaataaatatagaaacaaaaattgaaaatgcaatgaatttgaggacgtgctggtgctgcagataataccaagctataatctaataaccttatcttcaaatcattatttaacaattatttttactttattattataatattaatattaattcgactgttattgttatggttatcatggcaacaaatgaacatcagtgactcttcactattcacaatttataaatgattataattttgatatcatgaaattttgtaatgacacaaatgcttattgtagcttcatgcaagtcttttgggaataatctgggattatggatttgaaatgaattactagcaatgtgtatctttatgtgcagagatgcatagcacaaatgattatactagctggtccaggtgttctgatatcaacattctgcctcggaattgctttgaaggtattgcaagcttatacatttagctacaaagtatggctatatattcatacacgaaatcatgctgcagctcacttttccttacgactggagttggaaaacatccttgttgcttggtgggcttctaagcgctactgatcctgtagctgttgttgcacttttaaaagagcttggcgcgggcaagaaattgagtacaattattgaaggagaatcattgatgaatgatgggtatttctttccaaagcagtttgcttgcttacctttacttagatatttgataaattgagcaagtgaaaccatcatgttgatgaatagatctgtttatcaatgtttttttgctgctgctgttgcttaattggttttgttttattacacttttttccattattgtatttgtttggatgaattgaaattcatttcaggacagcaatagtggtttatcagctatttttccaaatggttctaggaaagagctttaactgggaggctataattgaattcttagcaaaagtctcgcttggagcgtacgtattgttttattgagaattgttttgttgcagaataatagtgatagatatcttctgattatgtggcgtatgttgtttcagtgtaggtattggtcttgctttcggaatagcttctgttctttggcttgggtttatatttaatgatacagtgatagaaatttctctcacacttgctgtgagctacattgcctatttcaccgtatgttcctcttcacacttggaacacttaactgtctagattctccagttactcatttttaattgctgtaggtgcttagtttttcaatgtattcaaatgaaatccaacaaaagatacctcagtacttggacctatgatatgatatgcctccttcagccttcagatggttatagattagatttcttctatcaacaaggatacttgtctttgctgacacagtacttcctcaaaataaataaataaaaaagtattcaagtgtttttttaacttatgcaacctgtgactgaaagattttgtgtgtaaaaggtttgtagagttttgacatttttcaaaagagctgcgtacacttacatttgactgggtcaattaacttatattactaaattttcaagtagattttttctgtaatttcatatttgagtttgtataagacaagtttttggtgctttttttgtgtaagtaatagtggtatagctgattgattttgtatattccttttcatatgagctgaaagtactcgttattattgattttggctttacctatgtatgttcttgttagagattggtgttctgttatgtaatctgatgccagtagtcatagttttccttttggaaaaagggagatatcttacattaccatttcacagtatgctatgtgattttcaaggccattgtattttggctcaacatattagcactttatttttatcatttccttgcaatttgataatggtttgattgtggagcaataaaatgattaatgttaatttagtttagtgacttactcacatttgttcatggaaaattgaatttcttaccaggcacaagagggggctgaggtgtccggagttttgacagtgatgacattgggaatgtaatttgaattgcctcatcagttctcattcagatcttatgaaataatgaaattgttcttagacaatacatatatattttttaatttgaaaaattggatcaggttttttgctgcagctgcaagaacagctttcaagggtgatggtcagcaaagcttgcatcatttttggtatgtccattttgtgatttgaagaaaaaatggcttatttagttatgtgtacagcagatgtagctggatgcatgttttattggtccaactcctgcaggtttcagatcatatattgattaaatgatttttcaagtagttgatattatgttgctccttaatatacactacattggccaccagaaatataaatagattttgattttattagactttgatatcaaatacctccttgagtatgtatatgctgtactttccactctttgctctcttctttgtgatgcatattgcttatttttattaataagatattaatatattaaattctcacttcttttttcctttcagggaaatggtttcttatattgctaacacactagttttcatcttaaggtaattgagtttgagcttgcttgttcatgcctagctttgctcgactactgtggaatcagattgcagtttgaaagttgtacgaatcttatgaaatcatgtggacaaaggaatttttaattaaaaattaatagcagtgtagaattaatctctaactaaaaatactttttctattctagttgatttcatttcattgttgaaatgcatagagaaaggtgccttcaactacttgtgtcagggttctcatgattctgttttgctttgcagtggagtggttatagctgaaggtgttcttcttgatgatcatgtctttcgagatggtaaaaagaaaaattctttgtattctcttcactagtatcctaaactctaaagttcagacatcagtgaaatctgaatgttgtcataatcttcagtcttttttgcatatgatggctgcaattgcagtgtaaatgagaaaaaaaaatggaaatgtgcatcacaaaatggactctagaatagcagggaattctttgaacctgaaatatgagaatatcagtattaacctttttttttttatattattataattattgaaaaccacctgtagaaagatttttccttctggtagcttgcccatatttccaattaattttgttaattgaaacgaaaggagaaaggaactacattaccattttgcaattgactattaatcagtgctatctgtttttattagcaaagaatgagaattttgatatgctagcactcccaatagctactttaaaaatttagctaaaaggtaataaaagagagctccaatagatgagcaattttagaaaattcttaaagcattctactgtagcttagctacatttagctcatgctattcatgctttaaactattattttattaatttttctatcaatctatcttttttatttctcatgtttatctctatttaatttgaagtgattaaaaatataatatttagatattatagagaaaaaatagagaaggtgatgtatggtataatgtaaaagtcagaggtaaagtagagaaagtaatgttttggtgatccattttcaaggatagagtagagcatgagagtggtcttaaattcttcttttatttttattgcctacattataatggtatgatgtttctctattatgtttggttataagtacacttataactattaataattatgtttcaggacattcatggttgtacctagttcttctctatgtttatgtacaagtttcccgtgcaatggttgttatagtattgttcccctttctgaggtatcttggatatggtttggaatggaaagaggctattattctcatatggtcaggtttgcgaggggctgttgcattgtcactttccttgtctgtcaaggcaagtctttgttaaatgagagtaaatgtttttactgattttgatatcctaattcatgtagtgctgcttttctctgttgttctttttaaacatctaaacctgccaagttgatttttgacaactggtgtaagatatgagctaggtggattaccgtgcatcattattcataaaatcctgataatgaaagctgtggcgtgagtgtaactatccaccagtagggtataagtttttctattttgtccataaaattgatgaggtaggacagattgagtatgtaatcattgttttctcttgtggaggatttcaggattatttaattgtggtctaaaggcttaagcttgacgaattttagcttcagaatggataaaattatatttgatgccagataggatctgaaattcctaaactcacactcataagaaattagtataagaatatctaaaggctagaatatactggaaattaaggatatatttgggcaaaaaaggagtgggtttttgagactgcaaaggactaattgagaaaatttgttatcatttcaagggacaagggagaagaaaaagaccaagtcacttgtaatactaggagctttaacatactagacttccatttctttggaaactatatgtcctttgtcagtggaaaactaacttcaggcccaagctttcaaataaggactttatatgattgcaagttaaaactcctaatatgtgttatcatatttcctaacagaggcaatttgcttttgtaacaagtgggctttatatgattgtactattcatttcatttcttgcccttttgtcctttgagtatcacctgcttctaatttgtctgctgtatgtctactgtttctctattagcgttctagtgacacttcaccactcctcagtcgtcaaacaggaactttggtatgtacaacttatacatattttgactatatgtctttgttttgtaaaatagatcagtcatgagtcttggcagttattacaaaattaccattttctttgcagtttgttttcttcactggtggaattgttttcttgactcttattgtaaatggttcaaccacacaattcattttacaccttctaaacatggataagctatctgcagcaaaggtgaggatgttactgtacactgaaaaatgttgttagatggagcactacaatgcttatgtcatgacattggtcccattgctttaaaatgaaacttctatgtactataatcatgttatcatttgaacccacctactttatgagaaaatgcttagagcaaagataaatgacatgaaacgattagaattattggtttttccattggaagtgaaatgaacaggcaaaacaattttatctttctttttgctgaaaacaatagcagcagatgctttcttccccataatggctagcattcttgtactgagtaaagaggagaaatctatctaatgtgaaaaggggaagtttgcttcaatgtatgcatatgaaaggtattattatgtttttgactgagttactatacatcttgggaggagtatgaagttttttggggtaatactaattacatgttgcatagaacctaaattgagtttttttttgtctttttattttctcataaataatagttctgttggttatgcgatgttactattttccttttgtatttggtttttaacgcatatattttacgtggcagaggcgtatattggattatacgaagaatgaaatgttgaacaaagcactagagacttttggcgatcttggggaagatgaggaactgggacctgctgactggcctacagttaaacgatatattgcaagcttaaataacattgaaggagaacgagtgcatcctcatgatgcacatgaaagtgataataaattggacccaatgaatttgaatgatatacgtgaacgctttttgaatggtaattttaattaagattactttcagtcccatttctttatttctgacatttcactactagcagtgttcttcacgaaggtaaattatattgttattatttacttcagttttctggatatattttttctctactttcaagtttctgtggttgttcattagatatatcagcccatggtatgcagcataaagtattacatttacatttttagttctagagtatatagttctgtccaattaaatgttgttataaatttgtaatgttctccatgcatgacggctcagtagtataactgattaaatgaatatcgtcagtttgttaacaagtgataaagaatttaatggtagtaggagatgaagactattgtggaggtgtgcagttttggaacttatatgggtttcatgttaagtgagaggtgaaatctggagattaatattgtgacctcaattgtcttcagagtatgggcattttcttaaaagaaaatataattgatgtattcagcattgtttgtgttttaattccatacctagtgtagccagttcacatactcgtatagatactgtggctctagaggaggatagatactgtggaactatgttgtgtgtggcacttctgatctttatgtttgaaaggaggagaaattttaagacagatttcacaacttagctgtcttcgcagtaggatcaagtgttatacttctctgatagatctcttatttaagtagtttagtttcaacgtcacccttcctgtatttcactttattttgagggatgctttatagtttattaagggtgattatgtttt

SEQ ID NO: 218102 - DNA, 5379 bp, Cannabis indica
ctattcccatacggcagaaatgcgtgaaaataggaaaacacaaagtatgtatttataatgagagagagggtaaccctagaaagaatgggccgaaaataaggcccagtgggctaatataatgtcctattacctttatcgatatagctgttattcgaccactagtagaagctatataaagtgtatcattgacctgcaagacaattagataatatacacaacacttcttaaattgaagacagctcaataaactgcaaatgattggtatatttattttatttaaaacacttattttcttcctcctttcattttccttccatgacagcactataaaaatttaaaagaatcaaacaagcaccctacaacttgcttaagctcttgtgaaatatttaaacaataaatcttcatatttggtagactctgaagctaaaaagagagctactcaacttagaaaacaaaaattcaacaacatagattcaagttatacaaagacgtgtcctttatttttagtttaaaatggcagtaagtgatcatactcaataaattaattaatcatattatagaagataaaacaaaatattcaactcactttgcctaattgtgctccctgcttagagcaaaatttgacaagctaattagacgaggcaatgactgttaaatttaccttatcaatcacaggtgatccaaatatactcccaccacatgaaaccttatagatacaacgataattaatgtagtcgagagcatataaattatggtcatgtgatccacacctacacagttttagcacatattaattttatctttaattagggggagaaaaaacaaacgaagaaatttctccattaggtcctgtaaccacaactcatgcagcaataatgattagttatatagaagcagaggaacaaatattaccagaccaattgcgttcgaatgtcgacaactggttgtgacttaaccttcagaaaatggattgattatgggttagaccaattaaaggaatccataaccagaaagacataacatagaacatatgaaactataatatacttgagcatatgaaaaaccatacctcgccagtagtttggaatgtccaacaaatattgccatctgaaaaatcaagaaaatatattttccctttgtagcatccgactacaacctaaaagagtcagaccatgagaaactgataaagcagtcccataagttcaaacagagcattaaagctcatttgctgaataacttttcaatttaaagtataacctgagaaaagtggccaagaatagttgctgaacattcaacgcgtccttccagctggattttccactggatataaccactaaaccaatttacatgattgcacaattctacttctcaagctgcacatcattatatatatggacacacacacatatatatatatatttcttgaaatagcttagtgctgataaaactatactgctagagaaagactcaatctatttttcaattaatcacttaatagttgatgccaaactcctgtttttcatttatttgttgtcttatgtgacactttttttctcaacttatgcagttatgcatctatttcccatctaaaacacatcagaaatcaaacatggccgatcccaatacaaagaatgtaagagtccaaccacaatatgaaatgcagtgaagaagaagagagttttagaatttagaacgataaaacacaccttaacaaatctctactgtgaaaagaattacaaaattcccctacatggaaaagctcgtgaagaagatggcaataaacatttaaccaattttgatagaagtaacataaaaaagtacggcccttaccttctaacattaacacatgtaaattcatgcgagtgagatccgataaacaagtaggtgtcagggcttttaaacactataagtggggatgcatcaacacaggagcccagataaactttccataatttttgcatgagaaattttgtgtcacttgggactttcatgcaggtttcttgatgattgtcatccatcttattgtcatattcattcagcttgttataacattcgtataaaacattgttgcaccggctgaatgaacacgaaaagcatattgaagcagtattccatggagaccaattaagtgaagtgatgccttccaaagtaacatttacatttgaatctagcttcaagcgtttagaggtaagagcatgaatttcatcctttccaccatgaagggttcccaataatttattccctgagttattgtttgcaggattaggagtcctaaagtgaacagcattaaacggtttcctttttccctgtttcagatttatttcccaattagcatcttttctcaaatctagttctgattttttcctctcaagaagagtagtacaaagtttagatgggcttggaaagtagtaaagcaatctcatatcaactccaaggttattagaaagatgtgcagcagcaatagagtttccacccatcataaagaaatcgtcgtcatcagaaacctctgcaaccattaatacatcacaaaaggcctgcacaaaaccacataggacttcattaagaattttcaaaagtaaaatgttcacattttttagctattaaattgagaagcatgagctagaaaaataattgctactaaacaggtttcaataagctattcaatcttttttctaccagtttgcattcccaacgcaaaacaatttgacatttgaaatttagtcaagcaatagatctcgaattaaaaacaagaccaaggatcacctaaactggtgttagaattaacaccaaaatatttgatatttacaggaggaaatgcttagaaactagtttacaccgcatagaatttaacgaagactgcttgataattttcaacattttgaagacatgaaatttttgctattatttcaactttttattttattttactggtttaggagaagaggaaacaatataagaaaacactagaatttgaacctagattacacacacatatacaaccacctaattaaccccaaggccacaattgcacagcaatataaatattaaattataccactatggataaagacattgtattagagccttctaaatatgattgactcccttcttttgaaaagttccttcatttagtagaaaaaaaaggtgagaaaaggtcaaggcttatatctactacttagaattgcgtatgtgtcattaaagttactatgtgcgaaacgaataacgggacaataataccatcagctttattacaacaagaatagtaaagaaagtcagcaatgaaaattaatattttggagggagaaaggcaaacctttttaataactgtcattaggtcaatattttcaacaacatcaatctcatccttgacatgatttgcaataaattcagaagtcaatgaatcataatcaacttttccactagaagtaatcggaaatgcttcagtgaaaatgaagtaatttgggaccatcgctgctgaaactttgtcaaccatccaacttttgatatgagatcttaatattccattgcttttgtagtcttctaaaattacatatgctatcagtgacaaaatctctccttgaattttattggtgattactgcacaatcaactatgtttggatgtccccttaatgtatcttcaacctcctgtaaagcaatacgctgtccattcaatttaacaatccgatcttttctacccagaaacactaagtcgccaccttcgagtctttcagcaaagtcacctgtcctataatacaaactatgtttatttgctgaaatgcagttgacatggtcgtgggacaactttacttggtccagatacgtaaacatagaatcagaatagtatccgatcgaattacaactaccagaaacatatatctctccatgattgggcatgccatcatcactaacaagaactacttcacaattagcaataggcataccaattggaacacttgttagtgtctcagactccaaaatcataggcagcctcttgcaatcaaaataagtacaatcaccagataccttgatttcagtaattcacatgttagtcaccaaccacgaacacaaaaaaagaaacacagctattaatataaataatatcatattgaaacatgactaactaaatcagaacactaaatggcatcaggaacaactaactttatccactaatccaagttttttcttaaatataggggatttatacaaaagacttatcaccaagtgaatctatagttttcatagacctttataaatcaatttcccacaaaataaccacgagtattttgaattatacaaggagaaacagggtgaaaggaataagaaaaaacagcaacaattatcttgtcaattttgcgaaaccaaacaacaaaacttcacaccatcaattggattattataaccaaaaaggttcaacttctaacctctgtacttccgtaaagattcaaaatagtagtccctggtaataacttcgacaatacttcccacaatgataaaggcagaacttcaccacttagcacaaacaacttcaatgaactcagaacatggctatcgtgctgactttccaaagcaggaaggattgttctaattaatgatggaacagcagtaagtctagtgatagaataagcctacaagagcagagcaactattttttatgagattaaaaagtagacaaaaaacaaaaaccataacagtgaagcatatttccaggctcaaaacagcaataatactaacaaaattataaaactatcaattcaatcgtaagttcagcactaaaaagattaaatcttttatatctatatctatataaatatatatataaaagaattaaaacctactgaaaacaaaaacacacacacggattataacatgcttgcattatttactaacaagcatacctgtataaaatcaataatagaaaacaaattttctctgagctgattgaaaggaggaatgaccaacgtacaagcagtgaggagagcactaaggaactcttgcaagtgatcaacaaagctaattgacgtcttgaacaacaaagtttcatctccattcaagggatacaattcttgcatccataagaaccggttaagaagccctgcagaaattgtgtagttccaaaatttgttattgaatggactaatgtgtttgaatattgatagaccaggccagtttatatgcatcatcaagtataacccaatttcacattagaaatttcacaaagtgaagaagtttaactaactcatcaagttttccaaaaacaaaaacaaatttagctttggtaaaattgttaccttgctcagttccacaacacctttgggcttccctgtcgagcccgaagtgtacatcacgtaacagaactgtctcagttttcccactctcac

SEQ ID NO: 218103 - DNA, 7689 bp, Cannabis indica
ctctctctctctctcttcgtcattttggaaaaatggcagttgttgctttattattgtcagtgtatacttgtgtgttaaacaattggccaacttccttctcctttgaaattattattttggtaatgtttatggttttcttagctgcgaatagggcaattgatatgaagtggtgactgaaaaatatcttgaaggatctaacatatactttgctttaggtactgaaagctccccatggagatttgctgtcatgtattgaaatggcaaaggtatgaaatcgtataaaacatagtaaattttgattttctattctgtttttcagggcctcttagaatgtggttgtactcttcttacattttagatgcttgttgaattgtaggttgctgatctgattgcttttgtagcatcctcaagcttttcatgtgaagaaagcacatctgactacattgattcatttggaagtcaatgtctttcagtgttcagatctcttggtttaccaagcactgctgtgctaattcgagtatgttattagaagtgccatgaaaaaaaaaggttttttctttataaagaaaagtatgtttttgcggtattaaaattatgccttaatgtctttaggatcttcccgatgagatgaaaagaagacacgatatgaaaaaattatgtatttctagtcttgtgtctgagtttcctgaggattgtaagttttatccagctgacacaacggatgagttgcacaaggtatgttaattgaaatagattttggttggctgttaaagttgaagtcgattgggcaattaattaactgacattgtttataacctgccaatgttttacttgtattgtttagaaggagggtacttccttccatctctcacatctattttgttttaccgcagttcatgtggcttttcaaggagcaaagactttcagtccctcactggcgaagtcagcgggcttatctcatggctcaaaaggtttttatttcatatatatatatgatacaagatggggttgttttatttggtttgttacattccattatactttttctttgtacccagaaaaaggatttggaaaattatacagtaatttgataattatatgcattttttgacatccttctcttcaatgtgtcatgcttaggttgatgtcatagcagatagtggcgactcggaaaaatgtactcttcttcttacaggatatttgcgtgggcgcaacttgtcggtgaatcaactggtattttttccatccacttgcttgctttttattgcatgaattggtagttatatcttattcagacttatctttttgttccaggttcatgtttctggtgctggggattaccagctctgtaaaattgaaattctcaaggacccatatcctttgaatgcaagaaaggagacagatattatggactcagatgacattagtgatgaggtatgtggttttctctctttgtatagccaatgaaaactatcattgcgcatataccaattttattgattatggtagatttcagatattcattagttcacagcctgttttctattttattaggttgttcgttgcttggttcctgatccgttgaagcaggagcctttacttgttgaaaatgtacctgatcctcttgctggtgaacaggtacgttaatcaagccaaattattcttgtactatcaatagtgtagtttttccaggtagttattgcctgttagaagagaaaactaaaagcatgagtttctgcatgacctattttcttgtgcactttagtctctttcaatgtgctgttggcagattacaactatttttagtatctagtctttgatgattggctggacaatattaaacctatttcatattttgctacagctcattaaaaaaataaatgtattatgatgttccttgtgagatgtaagtatgataaaactataaattttgcaacagacttggccaacagaagcagaaattgctgaggctgataaacatcatgaacaaaaaaattgagaacacggacccttcctcgaggcacttcagaataccaggtctgtaaagtttcttttcagtgacttgtttgactttctattttatctctactgttttttttttccagtagtcttcaattttgttagcaatttatatttgcaggctgcttggattgtggatgatacagatgaagaggattttgatagtggcgatgatgaagctgatggcatggtattagatgaaagggggagtgattttcctggccaaaagaacactaatgattatgatcttagtgatgataatgcttctttgaacttgagggactctgatgaagaaactgatgttgattctgtgatgatggtgagttttgactttaaaaaatttgtatgacgtgagtttttgtttactagtgagaatgcctagccatacttttaatcaaaatctttgaaaaaaggatctgtatcttatatgtgaagattagactagcaatgtacaaacaagaataatttatcagacagacatgtacacacaatatcttcttcattcttattctttaatatggatgtgtgggcggataaaagagttgtaaatcttatatgtttatgcttctcatctatgttttgcaggatggtgaaaacttgactagagagcaattggtaaatgaaattcaaaaactgaaaaaagaacacgctgatgatgagggtatgtatctttttcgtaaccttttgattgaaaaattcatgacacagtttgaaaatttgctagctagaagtaaattatttgaagctctcacaatcttgttgagattctacaaattcttctgcattttattaagttttctttcacattttgcaaatgataatagctgcatgctccactattagaccaaacttttttttcttcagatgagctcctattctgttcactcattttcttggttgcttgtttcagagtttcccgatgaagtggatacccctatagatattcctgcgagaaagcggttcgccaagtatagaggccttaagtcctttcgtacctcttcatgggatcccaaagtaatctttgaaatgctaaatatatattatatatatatataaattataattcagtatttggatgttttagcctgggaatataacattgcatttctctggatttcaggaatcgttacctcaagactatgccagaatttttgcatttgataattttgcacgaactcagaagcatgttctttctaaggcattagaaatggagcaagtagacagggatgactgcgtaccggcaaattcatacacaaagctatactattaaagaagtacccagtggtgttgcttccaaattatgtatctcttcaaaaacaatgcctgtcatagcctgtgggcttttgcagcacgagtctaagatgtctgtccttcatttcaggtatgtgcatgttgacattttgctgtttttgctgttctgttcagtacaaatggatgcacgacttagttcacctgtttttgcagcattaaaaagctcgacacatatactgaacccatcaaatcgaaagaagaactagtgtttcacgttggttttcgccaatttattgcaaggtaagattctaacggtaagagctctagcattattgaactttattagaattttaatttaacgttttattattttgtaggccaatatattctactgatagcatgaattcaaacaagcacaagatggagaggtttcttcatgctggacgtttctccatggcatcagtttatgctccaatttcgttccctcccctcctttaatagccttcaaatatgctgaaggagatgttgccccttcagttgctgctgttggttctctaagaagtattgacccagacaggataaatttgaagaagattattttaactgggtatgatttgttcttttgtttatatgaaaatgtggttgctagtatattttagaacgctctctcttgttacttgatcctttagaagtttacttttgaaaaaaatttgtgttatgtaactttaataatctgtgatatgatgtaattcccttttccatttgttttacattttacattaaaatgttaggattgatagcctattatgtgcatttactttctttgtgccaatccaactaaaaaagaataaatttgctctttacttctccactgcatgaatcttacatcttacatcttacaacgtaaatgttcagatgattgtatgtttataattataaaatgtttacttatgactgatatattaacattgaagcatattttgtggtgcagctaccctcaaagagtatcaaagttgaaagcttctgtaagatacatgtttcataaccctgaggatgtaaaatggttcaaggtgagaaactctctgttatactttttccctgaatttttcgcacaatccttgtgtagcttaaaaaaaataaatcgctatacattaaatgactgtttcttttgttggtggtggtttcagcctgtggaagtgttctccaagtgtggtcgccgtggtcgcgttaaggaacctgttggtacacatggtaagatacctagctcaagaataactttttagatcgctttttcacattatgtattatccatttcaattacttcctcaatatccttagtaattggaaatcagtttaacacatattatagacatttttactagattagcttatgctagtaatgtcagtgcatagtggttaccaattgatgacatgctctttagaattttttatggcctcaacattgatttcatccttaaacatttccatttttttcttttttgatacaggggctatgaagtgcctgttcaatggggtccttcagcaacatgataccgtatgcatgagcttgtataagcgtgcatatccgaggtggccagaccattgcttcccactttctaattcttgaaaagaaaagtggctcagtggcaggtgcatgcagagattttcttcttgtaagagcgcatagaaaacccatgctcgtctactcatacaacacatcagaaactgaccaaaaaaatctgtagattttgaaactttagaaaaacatgtatggaagacggtgacaatggctggagagaagatcagaatctgggtggctgtgtggctttttaaagtgaaagaattttgttcggaataggcagtgtattttatagcttgtttttgtttcacaaagttgtctttctctgaagtagtgtggcagttttctgtttcatttgtattaggaaattttgtttttatttttaggataatataaatatattttttggtagtatgtttgtgtactccaatccaatattaattacaatatatttgttagagattttaattaattgtcagtaatatatgagtctcaaatctttgttacaccattttaaaacctttttgtgttatattttatctgactgaaaattaactagtatgccaccattttttcttgatgatcaaaaatttttgaatgggtttttggttccaatccagcttattaattagtttaattaattgttcaacactttagaactaacttacaggctttaggcttaggtaggtgctgttcttaactaataactaaaaaaaaattggttttttgtttgttttaaggtaaatatcattttaggcttttttctttacacttttttgtatgaaaaactctcttaaaattggttatattaaataaaaaattgattaaaattaggcttaaagtgcaaatattaacacttaacagtagagctttctggggtagagtttttatgtttttattttctgccagttttttaatatatttatattttgtagaaattttgaatggctttctttcataccaatcggttatccccaagagagagatagagaaagtgtgcatgtaaaacgacatcgttcaaactcttcaaagaaaggtcgtttgtgtcgtttcaagacatctaataggatgttacaactacctgacttccggtagttaaattagttactgacattgtttttttttggagagaaacttcagtaaaagaaacagagagtttactttcttctctattttcggacttaagttcttgattcttgaacgaaagatataaatatatatattacacaatcattttgagtttaagaacccctttctaaaatctctctgttttcattttcttggtacaacaatggcctgcaatatttctacattgggggatattgtggagtcattagcaagtgaattggccaagtcaattcaaacgaatgacaccatgattgaagagctcaagtccttgagtgatgatgatcaataccataaagatcgagaaaatgtgagaagaaagtttaatgagttgctaactcagtgcttttcttcatatcctgaaaatggcaacaatgaatccaagttcaagatttcagccaaactcaacccaccacataagtattacaacaaactctttttcttttggagaaaaaattcaaagacatgaaagaacaagaagatgacttgaagttggagctagacgatttgttattcaatgatttggaaatcaatgatccatatctcatctccttgaacaggaagcataaactgatcaagaactattaccttccgaattcttcgaaacatgtacttccaatggaggctggtgctgttgattcagtagatttcacagtgaagactaagtttggattgaagaacaggattcgggaaatgatgattgagaggcgaaacgaaacggtgaaggctcaagcacaaggactattctctttcattgacttgctttttcttgatcaagaagatgaatttatcacaatttcttgtactcattctgctatgattgagattggaaaacatctttgtttcaatctttgtgatcttatgtttatcatctcagaaaattcattattgtatggaaaatggaatctgttaaaagaagtgctgaaattgctaatgcagtaccagcaaaagcatacaagtgtcatgaggaggtttcattttgtgattgaaaaagctgagaaagaactaaaaaaactcttcgagccttttgatgatgatgatgatgatgaagatgattttagtgttgatgatgagaacaagattgatcaaacttttgacatgatattcaaggaagctctgtatttggactccattttaagttatccttatttgtctctttcgaaactcaacataaagaaggagctaagaggtgttatgaatggtgttcaggagtgtagtaagcaaatggataagattagaacagaagttggtgatttgaagacaaatttactatctgaaaatgcaaatattacaaagatgaaattgagatttgacacagtaattagagtttggattaatatacagtggtctattttaaatgatgagccataattaattaataattagtgcaagagctatgtaatataaactctgttgatatgtttttcctttcatttgcttcaatttagactacttaattacttaatctctctttttgccttgtagtattcaaatgctaaatttcccaaataatgttgttataagccaaatcaatttcaaactgctccaaaaagataaaatggtttattttgatattcctaccaaatgtattattttgtccttttttgtaaatttcaccttgttaagaacatctctgggtgaggtggatatattatgtggcaaattattaagattaatgttattcatttttttaaataaaaaattgaagctaaaaa

SEQ ID NO: 218104 - DNA, 8412 bp, Cannabis indica
atatttgactccgaccgttacgtactgatcaccccaacctagctacgtacagtactcctctactttttcctatttctactatatatataataatccaataaatataaaattaatatagtagctagaaattagaataatcaaagcttaaatcagcatatatatagatagaaatatatcttaaattcaaaaaccatagtaatttatacatgattatttttaataaatgaaaattttactaaaattactccttgaattgtataatttattttacctgtaatcaagatgcgaaattgtagtttaattaattaacaaataatttcactattatatatttatttagattaggtgaggtaaatagaaacatgacaaagaataaaaataatagttaataataaggtatagaccgttgatttaatttcattctcacctgaaaaatactatatatatataaatagattttgcagtagtacctaatttgaggaatgttcatagcaattttaggcgcaatttcacgcatcaaattacattcacgttcttatatatagctaaaaaaaataaataaaataacatatattcattcgaaaaagtactattactaattaatatataataacagaaaatattagctctttatatatggaataaaacaagacaaaaagatgtttcttttttttacaataaattttcctttgtatatatttataagattgtatgatttatttatttttgttcaaatttcgtatttttaaatatgatgcgattttatataatattcatttttaatatttttataaaataaaaaagatttcaaataagcttccaataaaaaatatataggatagaattattctggataatttagcttttcttagtacaaagtattatttgtaaattataatgttgaatgtcgtaatgcgtatccaaaatataacatcgaaaagagaaaaagtcacaaagcaactaactaaaaccgcaaagctaagtatataatacgtattcaaaagcaaatctactcaatagattattttcgtaaaggaaataaaaataataataataattaatattaaaaataaataggatttgtctcttgaattatgactactgaagagttttgcttcagatgtaaaaatttaacttaaattataaaaatagttccaaataacactccattgatattttgctcatttttttaaattaatatatattgatgttaatatgatttagtttaagagtctagataaaaaaaataaaatgtataaataataatctaataataaattatgataatatatatatatatacaagtatatagttaatatttgtatttttaatataataaactgaatttcaaatagctagcttaaagttgttaataatatagagattattgtaattaaaataaattatattaactaatgatcacataaacaaattattttaaaaaatgagcagaatataactaaccaaaggagacacttgcaaagatttctatatttcagaataaatttttagaacaaaaaaaaaaatagaaagagtaaaagtactctacctcatagttcaaaaaatatatatatattatttattctaatattaatattaaaagtattattaaattaaagaaaatgaagttcggcgcgggacgggggttttgcttgtattttctgcattagtttttcttttttctcaatcttttaatatttaatttcattaaaatatttccctatccaaaaaaaaaaatataattattttatttctataaaaaaattacattaaataattattatatctctacgactactaagagagcacctttctaaatctataaatacagcttcaaaaccgtccaacttcctcaccaccatttccacacctctataccactttctactacttcaaaatctctctccaacctcagaaaaaaaaaagataaattatttatcataatattatggctaaatcaatctttataatcatgattataatggttttattgggttgtatcatttctagtagtgaaggtggtccaacaacaaccacatacaatgtggtgagttttggagccgtgggagatggtaaaaccgattcgaccaaagcctttttgggcgcttggtcgaaagcgtgcggctcgggtaaccgagccgtcatttacgtgcctcaagggagattttttgtgaagagtgtgaattttaatgggaataattgcaagaacaatgctacttcttttcaaattgtgggaacacttgtggctccatctgattataggattattggaaattctgggaattggattatatttgaggatgttaatggtgtcagctttaatggtggtgttcttgatggtcaaggtactgggctttggaattgtaaaaactctggcaacaattgccctatcggagccaccgtaagttactttttttttttccttttttgtttttgtttttgtgatataactggcggggtatttatgtcattttacaatatatggcttacactataatattaaaaaaaatcaactaattaaaatgaagttttttgaaatttactcttaatatttgttttgttaatttcttaattttttgacaacttttttctaatttgaataatttttttcttcataatatttaaaatttatgtattgttttagaatgtaaaaataaaggagcaagatcagaaaataagaataaattaaaaaaaatatatatatatttttctttgctatatttaattcgaggaagaacaatagatgatgggtcacatgtggtaacatgcatgcatgtaattaggactagtaatagtatcatgtatataaatataggtgctctttttatcgtataagaggagaaataaaataataaaattggttttttttatgggaaaatgttatttggtattatattaataataataaaattaatgagaaaaataataatgtaactgatgatattggggttctgagctgaatggatcaggaatcatttcttctgttgaattatacgttttatttttcaattgtgtcagctaaagaaaccgtgaatttaaggaaaagagaaaatatatttatttgctatgttaaaaatatatataggatttgaagagtttagagactactgtgcattatatcataaaataaattaaataataataacatataatatgtattaaagtcaaatagaaagtgattttcagattattataaatgattaatccctacttgatcgatcgaaactccttatcatagaagtcaatgctgaatatataaaataatatgaattaagaggtgcacatgatatatatataatcatggttaattatagagaattaatttttttaaggacattagtgatatctaatgctatttatttgttaatctcttacaaattttaattgtgaaattcgattattaataatgggtaatttcacaaatgcacaaaaacaacaaaaatacggtttcacggaattttaaacatttttacaatatgttgggacttatgagccgctaataaaaaaaacaatacttgaatttttttcatatatattttagttttaatttaataaaatatctactaatttttttaagttttcagcgttacatattttctaataagttttttttttgtatgtacagacattgcaattttcaaactcgaagaatataaaaatagcaggagtaacatctttaaacagccaaatgttccacatagtaatacacagttgcaacaacgttaaaatccaaggcgtaaaagtaacagcgtcagaaacaagtcccaacacagacggaatccacgtccaacaatcctccgccgttacaatcctaaactccaaaatcggaaccggagacgattgcatctcaatcggcccaggaaccacaaatctctggatcgaaaacatctcctgcggaccaggccacggtattagcataggcagcttaggaaaagagctaaaagagccaggtgtacaaaacgttactgtcaaaacggtgtcgtttaaacaaacccaaaatgggcttagaatcaaatcttggggaaggcccagtaacggttttgctaaagatattttgttccaacatgctgttatggttaatgttgagaatccaattttgattgaccaaaattactgcccggatcagaagggctgccccggtcaggtctctggggttgagattagtaatgtgagttatcaagatgtgcatgggagttctgctactgaagttgctgttaattttgattgtagctctaaaaatccttgtagtggaattaagcttcaagatgttaaacttacttataataataataataaagctgctgtggcgtcgtgtgcacacgcggatgggagcgcgtatggattggttcagccttctagttgtttgttgtaggttcaaattatgtattactagttactagttagtaactagttactagttactactagctaagctagttttgtttgttataggactttttctttgtgtgtgtaattgaaaaaaatagaagaagaaaaagggtgattaagaattattacattacttgtaatcctagctagttagtacttaactagtaatctggctaaaatttttaatatattatataaaataattttattaaataatattaattaactaataattagtatatatatataactgtaatttcttacttttgcttggtgtgctttgcaaggattaatttcaattgtgttatgaaatatattatatttttgaatttgaataattaagaaatgacttataagcacaggttacttgttttacaaaaggttacttgaactatactatttttttatttaaccccataaactgattttgtaacggaaaaaaaagtactttaaatctcatttctgttatattattaacctttttgttcaaaaacctcaattaaaacttagaacctagaaccttaatgtataccttttttaaatatattatatttgaatttgaataattaagcatttttttttcgagatgacttggatgaagttagaaaatagggtaatactattttggaacttatattttgcaaaagatattaattggacctctattttgttaaatgataaaatgaactctatattttccattgattttttgtcaaaataaaatttaataataattcgatctaaaggtgttatgacaaaattgtttactttttctgcatctcttcgtgttagaaattgccttcaagttgattatattaaaaaaaaataataataaaaaattaagttcagggtcatatttttactattttgaaaaatacagagcacattttattatttaaaatagagaaaatatatttatgaggataggttacttgttttacaaaatatgttactatgattttgtgaaaaacctgttttatatatttcttacacatttcagtttactgcatatttttatgatggaaataaataagttgatattacagaaaatttaagattttctaatttcgtatagtaaggtaatgctatattggtcctggcacttaaaaaattcatgataaagtcataattttcatcatcgaaaatatgagaaaatctcaataaatttgaaaccctggtgattttattttttattctttttttttaaaagaaatgtaattaaatagatgtaaacaaattaggtctcttcgctgttacaaacaattgttattgaatttgaaaaagttttgacaaaacacaattttttttaagctttgacaaaacacaaaaaatatctttgtttatttttttaattttatttatttaatgaattaattttttttataatttatctttaagaaaaacaataattattaaactaagaacaacaaaaccaaccaaaacttaataaaaataatattttcaacttaaaaaagaatacactactttattaatacactaccaaaataataacaatcaaaaaagaataccctactttattaatttttaactttattttttatataaattaattaattataaactatcaattttaagtaaaataactatcaacaaactaaattaactcaacattaaaatcaaaataaaaaagggtaaagaacttataaataagttaaaaaaaaaacaagaagggagagaatgcaatgaatgtatattaaatgaaattaaatagataaaaaaaatgtctagacatgcatgaaaaaatgtgatcaatagagatgcccaggctattgctcaatgcttgggcatgaaaagaatgtctagccaggcaacctacctgggcctccctctgtttagatcgctgaagcgcacgaacgatacccagcatttagttgaccgagttctaaaaagggtgcaaggatgaaaatccaaacttctgtctagtgtcgggagagcttgccttataaagttagttggttcctcaatttcaaactacgttgcatcctccgacgtgattcccaccgcaactgccaataaaattgatagactcttgagagacttttggtggggtgatactgatcaaagaagaaggataaacacggttgcttgggagactctttgcaaaccaaaagtatcaggaggtttaggctttagaacttctgaggctactaacaaagccttccttatgaagtgggcatggaagattctgactaatagtgactgtctctggcgcaacatcatggagtctaagtatatctctaatcaataattcttggatgttgaggctaaatccttggactctcttttatggaaggaaattcttaaggcccgagttcatctctccaggggtctttgccgaaggattggagataggagtgctacctccatttggtttgacccttgggttctgggagtgaaccccctactccttgggtggaggatgtgagtggtgttagtttggttagcaactttatcaacaataaccattgggatgaggacctcatcaatcattggtttcatgcagaggatgctaggagcatcatcaatattaccttaccggataggcctgtcgttaactcttggctttggatgctagaatccaatggttgtttctctatcaagtcggcctacagggtgataaagaacttgaactcatctaatgacggagatagtaaatggagaactatttgggggtgctaagatacatgataagcttaaaatgttctagtggaaaattctctcagacgacctattaactaaaggaaaactggggcctattctttcactaactgatacaagttgtcctttgtgttgttctgcggttgaatactcctttcaccttatttgggattgtccttttgctcaggcagtttggtttggcttcaactggcatgttagaaccgaagagctcaacattcacgactgggaaaattggatgacttggtttgctactaagtcagataggcctccaaatatcaattatcatctctttcttggaggggcgacaatcatttttcagaacatctggagagttcgaaatgcactcattcatgacaagaaaacaactcctcttagagccaccgtgatcaacatcaactctagactgttggagctcttggagattcactccataaaaactggaacgattagtgattggctaccccctcgccccccggctgggtggattacttgtaacactgatattgcaattggaaataaccagtcggcaggagcggctattttcagagatcacaatagtcagtgcaaaggtatctatactttcaagatcaaacattgtgatccactggcaggggaagttgcggctctgtgtgagggggcaattgaggctgctagacaaggctacaaaaatgtcatattccaaagtgactcctctaacgctattgaagttctgctcaagacaccacaagatatcaagttgctgcattataacgttcaggagcttgtttgcaagttccatcactccatggcttctcttaacctttgggaagcttgttggattcctaaatcctacaatcgtgtagcccattttgtggcccaaggggcgaactgctgtaaggcttttggccatttcgattctccctctgcttttggttccccgcattcgctgattgcaaatggccataacctctcatcacttagttagtggtccccgggtgctttgtttttttcttttgtctccaattttaggctttgtttactttagttggcgtttttgttctgttgtttggtttggtctttgttttctccctggtgtggagtttgtttgccctgctgggtttctttgtttgctcttccggagcctttaaattaaaaaaaataagaaaaaaaaataataataatatataattgaataatactaataaagaaacaaaatttgattatttctaaaaatatttatatataaattgtttattaaatgtaattatgttttatatatatatatatataaaaaaatgtaataattatcatttaaaaaattaaaacatatgtaattataccgat

SEQ ID NO: 218105 - DNA, 7971 bp, Cannabis indica
taatgggtaaattatgattttttcaacttaattatgtaaaatttgagattattaaaaaaatgagttaataagtgtaatttattcacagaaattttaataaaatatatggatattgtatataccattttttaaaataaaatattttctagttttgtgaatgtggaagctcgattatttggccaagaatgttacgacggtaatagaatgagtttttgttgtaccagaatgttttagtggacacttgagttgacgggatattttggggtagttagctttgaccaaaataaccctaagttagaaatttgcaaagtgttgagttaagggcaaaatggtaacttcactaggatttatttatttattttatttgggattctaatatgtcctaggctgaatgaaaaatagaaatttagtattttaagttagtttagttttttttcataagttaattaaggataaatcaaaataaaaaatatcacacaaaacatatcctcttctctacctctctctttggctcaaacaaacccagcaaaaaccatcaaattcaagtcttaattcatttgttttcttgccaatatttctatcctaggagctgtccaagcttgaggtaagttcattttttatattttttgtgatttctaggtttttaagttgagtttttgggaactttgggtgaatttgggtctgtagctcatggttggttcagagcttgttcttagtgttaaattaaggttgtttatttattttttatttttttttgaagaaagtaatcaaactttattaactttcaaattcagcaaccaaacacagaagcaattcagttgggacatctcccatactgaaaatacgatcaggatacgaagtagcagctttagcaatcgcatgagctactaaatttgctgaccgtttcacaaaagaaatagtaacaccacttaaacttacaagcaagttttgacactctttaataacatcaccaaataaaaagatcatatgaattggattacgaattgcttgtaccaccactaaacaatctgtctctaaaatcacatgcgacattgtttgtcttttatccagctcagggcctcacgaactccaattgcctcagctatctccgaacgtacacttccatgacaaagccgagagacaccttgcaacataaagccatgttcatctctagccacaattccataaccatagtcttggctactcccaaatattgatgcatccacattaaccttgatttcgttaacattaggtgcacaccatcggtctaatccatccctggccactaagcatgtccgtgatgtctccaagtaaggagcttgagccgaattccattgatcaagataacaagtggaaaatgcaaaaataaaggaggcattataggctttgttcttccaaactttgtcattccttgcaccccaaattgcgcaacataaaatgcaaaatagcctccaggtttctgtgcttactgtgctgaacacagtcacgcaccagtccaagaaactggtttcttgctgcactggtgtgataataacagctttctcccaacattgtgctgcaataggacagaaagcaagaacatgcatgattgtttcattatgcagaccacagacaggacatgggctattaacatcaaccctttttataatcagttggacttttgttgaaagacaattggtaccccctctccatattaagttcttaactttggggggtatttttaaccgctagagttcattccagaaatccgaagcttcaacattattccaggccgcctttgctttttgaattaagttaaaagcacttttaaccgaatagagtgagttgagttctagaactcaaaaactcactcaataatgatgaaattgtgattttgaggtaattatttattttgaatgtttaaatttgttgtttggatgttattgaactattctgggaagtttgattaagtttggaggagttttggtttggttttagtgtaaaaaccaactttttatcgcttatgcaaaaaacggttaaccgttttacaaggtactataaaaacgatgaaccttttttcccaattagttggaagccaaaaaacagtgagccttttggggtattttttagcacttaggttcttgtattttatcgatatttagggtattatcatgctattattgataaggaattgtccgattttgagttaaagtcctagaacatgattaatttagttatctaccaatttactattgtcattacatagggcatgagatcgtcgagtgttgttccactcaagttggcatgcacacttaaatttggattcgagataagaaaattcaattgtatcgtatctcatggctaatttagatacgataattgccgttaatacgaaagagttataactctaacctgaaaccgatattaggtttcttacttataggttaccttattaggcaacgatagttacattagttgactcattggaaacgagggttgatggatacttaataaagtatcgagaatagtgtcttattagacaaataattgatttgttagtattgtgatgtattgtaatgttttgtatgattatatgtttaaagcatgtagctgttattgattaatattttgttatactcatgaatgtgtatttctgctttcttgttgagtgtttgtgactcacgtgtgctttgtgttgcagataagaaaaagaaaaatagatcagccatgagttagaggtttttcggtgaatgtacatatcagtctcatcatcttttgcgcttagtatcatgttttaaagtattttgaacatgtatgaatattttataattaaatgaaatgctgttactttagagaagtttataataaggggatccccaactcagtaatattttggaaaggaatttaaattgtattttaagaaataattactaaagtttttaattaatacacatttttcttaaactggtagtttattattataaactaattataaaagtacacacgtggcgtccttatgggttatggcattacaaaatggaatcagagtgacaaaggtttaaagatcctgaagacaggctgaatatgtacattggctgtgaagaatcgttcgactcatggcatagtaagtgttttaattatttatttgctaattaattgaaatatttatttatgtaaaattcacgtgttgttagaaaagcatgatagggttatagatagcaatgttatatatatgagtgcggaaatgcttattagcattagaattggttcgattattccaaattttagaaagtctacggtcacaggtatagtaggttatgtacctgaggtgatccgataaggttaaccgcgagctttttaggcttgcggctggcagtgaggatgcgaatcctctaccactacaaaattaggaacacgtgtatgctgcaatgcaagagatcatacgacggcaaggagattagatcagagaattaagagagcagcaagttcggtctactcatgttcctatccctccggcacctttggttgtgtcacaggatgtgggaaattagttggagttgttgtatgaatggttcatgaagaaaatgccaccagtgtttgtggatggttctgatccactaaaggcggatagtggatgagcatgataacatctatctttgactttatgcgagtcaagggtaatgatcgggttggttatgttgtattcatgttgctggaggacacctgtatttggtgggagattgtgtcccaaggtcatgacctgaataacatgacatgggatacattccggactttggtctatgagaagtactataatgaatccattcacactactaaggtgaaagagttcatacgaatgacttaggacagtatgacggtgactgagtatgccaccaaatttgaccggttggctaagtttgcttctaatgaagtggccaatgagactgctagaaaggccaagtttatccgaggtttggaagaacacattgctcgagatgtggttgtagctgctaaataactaggagtttcttgatcctatgctcaagtggttgggttagcccttaatgttaagggtgttgaagatcaaattcagaagaagagtaatatgagaagatattcttggaggccatcttccaatgttggtctgggtatggatgttaaccctaatgatcgcaagaaaagacccaatgatccactagccacgggtcttaataataagtttcaaggtaaccaaggtttttgccaaggcgagaacgaaaattggagaacttatcccaagtgtcctagatgtaagaggcaccatcagtgcaaatgtcaagctcgagcctaattctagtgtggggtaatagggcatctatagaggaattggccacagtattgaaaccaaaatagaagaaagaagatgctctagttcctactcgagttcttgctttgactcaagtggaggccgacgctagccatttcactatgacaagtcagatttccattaatggtattatgctgtctgctttaattgattcttgtgctacggatgttagggtttataccctaaaaagtctgtaaagatatttttgattattaataaagagttgaatattttgatatatgtatgaatgttaaattattattatttattattgaataatttatattaaatatcagaaaattccttattcaaatatgaggttgtagcttgtagttgtacagataactaagaccacttagctatgaataaaatagtcagcaacatattaaagttatgaaatctttaatcaatggttgctagtatggttcactgatacccgttcttcggtgcaagtaatctcaatttggattacggatgtagtatggcatcaaagtgaaaatgttgtatataatagagattataaatgataaggaccgatatgaatgaagatgtctttatctaacatgtcgtttactataaagatctaatttatattataacgatgatcaatagtggtaggtcatgagactgcaggatgtctcataactgcctgttgttgacatgccccatttgggcctgtcgaatagctttctttgagttcgataaagccatcagctctatcaaggaactcctccatgttgttagttgagatccttcgaatgtctttctagaagtcactcaatgggagaatgcccccagtatggtcgtatatcgaccttcttttgtaaggcctttgacttttgtagcctcggtcatgaacatctagatttaatcctttaaaggttctccttgccattgtttgacttcgacaaggtctcttagctgcgatggtataagtctcgaggacgagaattgtgtgtaaaattcttgagagaaccaagagttgaattttttggggtgagtttgaagtaccattgttgagttgtttccgacaaagtggctgggaatatgcaacatcgcacgtcagcagtaaccttttggagatcgagttgcatctcaaagtattggatgtgagccaactagtcttctcgtctggtatacattttccatatcggcatcttgaatttgggcaagggtaaggcatttatgtatgccgagaatggtggtccccttgattggtctagtttaaggtctaaaggctttggaccagttgtgccttgaatcatgtccctgagttggtccaattgtgcttgcacagaaggatctgttgctgtagggacttgattaactagccctccttagtggggttgtagattctggtgcgacagggtctggccgaccatactctgagagagtgtaccgtggaggtcggccagacctgtgttgaattatagaccctggtcggccactccaaggtatgggtgttggctttggccggccaggcctacactaggctgctgtacatggccagctagacctacattgggcagggtttggctgcccataactcttctatggggggccagacctggaaagggcaagttctggcttcccgtgactcctcaattgactgatgacgacaatgtgtcgataggtggtagattacaccagttgttggaacttggcagatctaggtgtctgaagtgattaatttcacttctcaaatcatcgtttttggtgtttccacccgctcttagtccttgtcggttgaagattgacctttgggtgcctcactctcctttggccgcccaagggaactcctgcatatggctggccagccaaaggctggatgatggggttgttgctgagccaaagatccttggccgaccccccatgccgttggttgccgagatctggctgttcttgctattagacttctgcggcaaggtctgtcattcctctagcaagggaagatatgtcctagtctatgagggaccaggttgatcatcttgtcgatagacctccttaatctatcaactagtcttccttggagtggatctttgatgagatcctggcctcttccatcagttatctagttaaattgtcttattagatcgttggcctctttgttgcagcgatctaactctgcttggtgagatcgaagaatgtactcctggtcatccatccatatcaggaatttgcgtctctactaagcgaatacattacaattagcagtgcgtggttcttcagttaagtgagcttggcctacaacttctctaagtctggctaactcgagatcttctcccaagtctacacggggctcgccaatcgtaggcttgccactggtcctatctttatagcatagaatcgaagacgagatccggttgttgttcctgggggttgtcgcccatgtgtccttccttcaggggaaggtgccaatggaaggtcctccctcagaggcaagggcttgctattcagatccaccgggatgtttgtgtcagtttggctagctgtagtggccagacttgtggtgacaggattgtccacatctgtagttttcataggaattccaattgtggctagaacatgaacatcaagatctgtagcctatgggtcttgagggagactcaaagatgcaaatagtgcgactggggttcttctcgtgttaaccatggcatttgatcagatacgatatccttgctctcaatgaaagcaccaaactattgacctcaaaaagtggtcaaccaacagcggggtcgtatgaatctaacgtatgccatgtgttacacaattagaattagaaagtaaagaacacataattgttgtagaggtttggccccctttgacagcgggtaatgacctactccccttttagttgtattggtaccgagggttaatactattcagatcactataggtgagatttgatatagcacccttaaggatacaaagtagaaatcaaggttgacaaatctcaagtgttgagaatgcttgtatgggcgtgtgagagagagtgaggaagagagttatcagacttaggcttagagctttatcacttggaggctagtatcagacttagagacttctaaattagagttaaggcctttatataggaagcctaaaccctaatttacaacagaacccctagatatttgtatattaaattagtaaacttgaacatatatattttccagctgttttattgggttgttagggcccaattcaaaacccaacttgcagtccacgtgtagaattgtacaaaaaatcatactaggccttctctttacctgtcagacacctgcagggtgcaggctggccgaccatggtgttattcagaggctggccggtcaaggatggccgaccagcttctgtgagaaagctggtctgtcacttgatgccccattttagtgtcagggtccccgttgacttaggtactgacttggacttcttgttggtgagttgtacttccacgtgacgctaattttttccacgtaagtaatgccacgtcaggtgggaaaaaatcagaataacactgggtttggatctgtgtcatggtgttttagtattgatttgcagtgattgttattgcaaaggttgtggctgtgttagttgtgggtggtagtggtggggtggtggcaatggtgata

SEQ ID NO: 218106 - DNA, 5018 bp, Cannabis indica
aaaaaaaagagaaataggaaacaaattagaatatgaaaaacatgagtaaagtgtgtccaataattataatatcctaaccctcttaaattcaaattcttctttagctcttattgctggagccaaggctctcgtagaacaagatgtacccgtgatctgtgttactcgagtattcctgcgccgatccaaagaatgtttgcacagcagactcatctatcatctcaacattctcatcatcaaaaaataaccagtggttatggctcttcacaagactgacgtagtgtccatggtttggcccactcccgacatgcacaacaacagcaaacagggagtactcagagtctgcatcttctactgtgttgctcagcttcagctcaagggggaagacaactcgataagagagcttcttgtagcgtccaagctgttcgatatatttgaaacgctttagatggattaccaagatgtgaggtggcttctttatcttcatccttttctgtgcttcttgcaaactgcacatggcaacatttccaccagtcataaaaactaatgagaataaggtcaaataaacctcaagagattcaaggttaaaaaaaattataaagttaacaatactagaaaattacatcaagtctcatattttctttaaaagaacaattttttttgtttgaatctaaacaatataaagtaaaatcccttatttatcaggtatttctccaccacaagtgaggttatctatacataacccggggggtcaaaaaaagaaaagtaaaatcccttggaatgtttttagtttccttctaaatccaagttcaagcatataatggtcttttaacaccagagacgaatcactgatgaataagctatccctagatatttagggagatccacatagtgggcaaaaatcagaaaagactatatctgtagcagagaggaagagacaccaacctgcagcacttatcacagaaaaatttatcctcggcattcaatgtctcagtagaactgaagttcttcaaacagctggttattgaactgttctgctcgatatcaaggctcaagtcaaaaaaggtctcatcccttgctgtcactgtctcacaccgcaagcaccttgtctcgttggtgagaagtccctgttccagatagccattaaaaacatgagataataataataataaaattaaaataaaacaaaataaaaaactcagagatcatcactttagtgaagcaatgccgcacataagaaaaacaatagtatggaatgcgtaacacagttcagccactacacgtgttagcaatacaactacacaacatcatatgaagttatggttgaacaacataatatttagcattaacaagttaccaacaaccatttgaaagataacttaaaattaattataaaagcatttacctgaaaatttttgtgcacccaggtgactaatggctctttttgagtaccattaacctgaccatttcttggcccattggctactgtatcaggaggagataaagattctttatcactttttgttgcttgagcctctttttccaatatatcaacaagctcattcagcaagaaattcaaaaactcgtgggcatcctataaaaacagaaggcattgtaaaaaatagtgattttaagtttaaacagttatttgaaaataatagtaattctacataaacttgaagcaaaatatgattaacatcctcttgcccattgacaagaactttttaaatgttcaagcaagagcaagtcacacgctcatatgcagaggaaagtcaatatacctttttacacgtatcctttgagcaagaaataatcactttaaatatgatgaaactcgaacatgcaagacaatacatgaagttttaattaaagatccatattcattctgggcattaatttctaagagtcaaaccatacaaaaaagtaactgcagtacctaccattgataaggctattattcaatcttttaataatggaacaacaaagcatatgtttcattcagtttgattattgaagaaggttctatcatgtactttataaaagaaaatcatattatagatcttaatttggtgccttcagcaaaggcatttgattacccatggtatcatcttttcattgtcaactctctccctccctccctcctctctcccagggttctatcatgtacttaataaaagaaaatcagattgtcagcttatgcatattatagatctttatttggtgccttcagcaaagccatttggttggtcctttcatcttcaactctctccctccctccccacccaaagcaaaaagcaatgactttctcacaaccagtgaaagctaccaaacaaggttgcaaagttccctctacgttcttcattgatcctcttcacctatacaattcataaaatatctaacaattcatacacctaatgccgcccttcaatttcaggaaaaatcctttagttgtatacacagttatcagtttgtgacaattttggctaatggctttgaagaaactgcattttgtggtgttttcatattaaaatatatacctggtgcatgtagctacggaaaagttcattttgttttttcaacctctgtacaaagcgcttaggagcaatgacccccgttttcttcttctgtgaacttatctggacaaagaaaaaaagaggaacaaatcatttgttgatctctcaaccaatcagtaagtcatgacaagacttcagatacaacaacatcatctattgtaaatgccataccaccaggagggataacaggaagaccctattagcatcatagtggatactagatagaattcaggcaaaaaaaaacaaaacagaaagacatactgtagagtccatagttaattgaggatgacttacttctgaaagcttgtacatggagtgaaaaagcaagaaaagtaaaacaaaaaaagatattaaatcaacataactcgcatggtaatatgtagaaacacaaaggtacatacacagccaacttgagaaaaatccatgtaaactttacagcactaaagcaacaaacaaggagaacagaggccagtaacataaagaaagcatgtaaataatagctgtgttgatcaagctcatctataacaaaaacattccaccttgaattattacctggctaaacaaatcagctaaacacgtcaagagattttcttctgcatccccaatacttttggtattcgaatagtattctaacaactgttcgcgaaatggaacacaaaaatatagtgcctgaagaataaaaacaatgaagatcaggaaacaattttaaaaatataatcagcctccactgcctattatttagcagataataaatatcatatcaacacaaacaccaaaccagaagattgtcttcccatttttcatttctccatttttttttattattatggttaagaggacaattccaattgtacatggtactctaaaaaaatgtcaactggcatttatactgtcacaccccaaaaatgtcttctgcaaatatggtatacttggacttcaaatggtctaaatataaatcaaactcatgctcattctgttcatttgattctttttttagttttctctagatagcctattgaaaacagaaagaaaactatccagctagtataatttctttctcttatcctctacatttggagccgaatcaaacaccgttagtatcgtagggtaatgtgataaaatacacatcggctcttacgtttgccttgaacaaagtggcagaaaacaacaaaaattacacaagcaacgagtccttttttttttggatcaaaagtaacgagtcctattatgaatgaattggaaccaaaatcccttattccttattatacttcgcaataacataatcgaacactaatatcaacacgcacaaaggggtatatcttgatactcaacagagtagcaacaaaaaagaaaacgaaaagaaaattaataaagaaattaattcatccagaacgaaatgaaatatcaaatcctataattcaaatgaatatgtaacaacacaaaattcacagaacaataacaagactttggtcctcttgccctcttgcacgccaagctctattgtaacacaagaattcagtaaaaataagagcaaattcaaagaaaaccaagtcaaaccctttcattccaatcgaaaatgaaaatcgatgaaacgaagacttaaaaaataaaaatttaaaaaagaaaaaaacatacctgcaaaacgctattacagtagcaagtgttgccgaaattctcaaggccaaagtatcgctcgccttcgggaaattggtcacccagagctttctcgagtttggaacccgcagcacccattagcgcaggccgaagggagaagtcaatcgaatcgccgccgagttagatcctcaaggctccctccgaatcaactaagcgactagcaccatggcaatgaaccgattcgcttgtaggtctcggtgagtatcgtcttctatgagatgttggaattgttagggttttggttcggaaattgaagattggaagacgacgagggtttcggtcgagacgaagtggaaggaaggaaggagagaaagaaaggaaaataaagaaagaaagaaagaaagtaagacgaagaaaatgaagcaaattttattttattttattttatttttgaatttttattttaataataaaataataaaatgaagggaatggaagtgaattaaatgaaattttaaaataaataagttggattttacttgattaataataaataaaaataaaataaaataaaattggtgatagtgtaaaatagagagctgcaatcacgtgtgccgaactgtgaatggaattgagtgagctgtaatttttgtagatgaaggaaaacaaagattacaaaatagaggacagcaactttcacttgggcttctcctttttagacaagcccactctctttttaacatagagataatggggttttttgaaaaatacctcttttattgatcaattaaccaaatttacttttaattttatatttaattgaaacatacctct

SEQ ID NO: 218107 - DNA, 10449 bp, Cannabis indica
ttttttttttttttggctaaatgggatccctcaaacagatgggactcaggggagaacacagattagtgaggctttaaactgcagttttagttttgtgaacacaaaatactaatgaaatgatttgggtaataattggtatacacatttctcaaactaaaaacagatttataaaacttatctacagaacagaagagagatcgacatgaagttacaccaaagcatgcaacagaaaaaaaaaatgataattataaagccaaacttagaaaagattacaggaaaagaaaaaattaacataattatgactgagcttggttggcgataatgcattgtgattgaaagaaactaaacaaggaagatggatcaacgaaagtcggcacggccggatgttgccacccattcttaggtgaaacggcatcgtcctcagctaccacaccgttttctccttgatcaccatctttatcatcgtccccttcaatttcatctccatcgtcatcgttgccacccacactcgtgtccttctcatcaactattcgctcttgatcattatcatcattggcagcagcatctgggttgggagagagaataagtggcgatagcaatggaatcgccttgcaagaatcgatctcaggataattagccgggaacctaggctcggcggctaccgcggccattgatatgatctgatcaagcagaagacacggcggcgcgtgagccttcagcctcgtcggcgacttgttatcggctttcgcttcagcttccattatgttagtctctagtagtggtttttctatttttcgaaagaatgaaatgaattggatgattcaatgaatcgattgatctctgtttaaatattttcgaggagtcaatgaaattgagatgcaatttatttgaatatggcgaaaaattaaagcaaaagccaaattaaaaaaaaacctaaaataagagtccgttattgaatcggttacaatacaatcaagagaaaaaaaaggaaacaaaataagtaacggctcatgagatttgcatttgttggtgttattattatttttgactaactctttttctctctctctctctctcttaacaataacatcaacatctatcgaagaagctgagtcatgcaatgtaaaggcagagagagatctcatcatcatttttttcaggtaacttctgaaacaaactgttttatttattatgtttctgttacgaatctaatttttatgagagaaataaagtgataagaatagttattttgtttagtgtaagggagaagataaatggaattgggtataatttattttcttctgtgttctgcaaaagctctacctgtggaccaggaacgaaccaaccaacaaacccaaatgacatctaaagtgcaagtcaattgcgaaaactatcaacatatttggttctttacgccatatacaaacaaaaaaccaaatacctaatcactaaatcacaaaccaattacgtggtcatccgcaattggctatttcttttacataataaaaaaaataaataatagaaaaagaaaaagaaaaagagagataataaggcgccaagaagtaaacgagtgatcattgtgtgtctagtgattcacaatggcttacagtgtctctagtggtagtggacctttgttgaacctgaaactctctgagaaacgcttccgctttcacagatttaataatgagaaaactcaactccttttctttaatactactaagtcctacccaaccacacacttctctgcaacctttcatacttgcttcaactctaattatgccgtttcttcaagtctaaaaggggctagacttggattcactgccaaggtaataatgaagcccacccattttgtatttagctttttcaagttttgggtagtgactaatttttctttttaggctggagctcaggaagggtattcttcaggggaagaagctgagtcgcttgttgatgaggcaaattatcaagaggagttttcttggttttctgtgatattgccgtacgttttttctgctataaatttaataggtttttgtagtttataattaaaaatgatggtgaatcattcattagtattttgcttctgttactaaatcaagacgagtagcttctatactgttgcatcacaagtttatataggtacttttgcttaatctatgatatacgtgaacatgtagaattaagtccacagtataattttacttgggttattaaatcttaaggaaaatttcaggtttttgtttcctgcattgggaggtttgttatttgggtatgacattggtgcgacttccggcgccacaatctcattgcaagtacgtcttcagtttggcaattctcattattttaaatgcttattgtgtaatgtgtttttatgtacaaaagcacctaaattgattcaaactgtaatgtacatatttcagtctcctgagcttagcggcacagattggttcaactttggcgctgttcagcttggtcttgtggtatggtcatgaatcatacaaatactgtatccgtgcaagtacagaactttttaatttgtttcctctaaagtttgatcactgtggattatacttctattttaaggtgactatgtattgttaatgtaggtaagtggatccctatatggagctcttcttggttcctcccttgtgtacccaattgctgattttcttggtatatactttgcttgtttactttgtcctgaaattttaatcttgtttacgagtgtcttctaattcaacttcttgaattggcttataaaaggaaggaggagggaacttatcatagcagctttactatatctgttaggaggtctgatcactgcaaatgcaccagggcttagtgttctcttagtaggacggcttctttatggccttggtattggcttggtaaacttcttataactattttcctcccaaataatagaaaagtgtatatgtatgttggaagagattctggtagagttcatgtactcaaacatgcttttggcatcatctgtttgtttggacaggcaatgcatggggctcctctttatattgcagaaacatgtccgtctcaaattcgtggaactctagtatcgttaaaggagcttttcatagttctgggaatcttggtattttaaacaaacattgatgaagtttgccctcattttcttggctaagtgaaataattcttcttttgcatcctcctgcagttgggttactttgtaggaagctttcagattaatgctgtaggggggtggcgtttcatgtttggtcttagtgcccctgttgctgtacttatgttgctaggcatgtggagtcttccaccgtctccacggtggttgcttctcagggctgttcaaggtaaagggcctgtgcaagaattgaaagagaaagccattgtagccctgagcaaactgagaagacgacctcttggtgataaagtatctgagaagcaaatagaagatactttggtttcattgaaatatgcctataaggatcaggaatctgagggtagtttcatggaggtctttcaaggcccgaatttgaaggcatttgtgattggtggtggtttagttctttttcagcaggtttttcttcatatatgctactgcatatatttgttagttgtgctcgttttcattttaaaacttaacaatggagtgtatgaaatatttataagctaaatttcttcttgattgtaacagataactgggcaaccaagtgtactatattatgctggttcaattcttcaggtaattgatcattaaacttgacctcataaattgaagtgaagttattcctttagttaacttacagtataatggattcattataatattgatccagactgcaggattctctgctgcctctgatgcaacccgagtgtcagttgtaattggtttgtttaaggtgcatctagtactctttttgttcttattgttggttttggggggaactttttctcatgtttctgtttagtgtttgatcatactttctttgtgattaatttgtctgcagttgctaatgacatggatagctgtcctgaaagttgataatcttggaagaagacccttgttgatcggaggtgtcagtggcattgtatgcttctaactatttttgaaatttatttcacaaaattaagatttccccacctttaattgcttcttgtcttaaaataaaagagaaaaaatatgcatccattttatttatgcatttgatctaaagccttaaattcttctagctacttcagtagcatccatagaggtgaaaaatacgtttgtagcttagccttattctgcttttgttttatccgccacaggctgtttccttatttcttctctctgcttattacaaatttcttggggggtatccacttgttgctgtagctgctttgcttctctacgtaggttgttaccaggtaaaagtttttctcttaactattatcaatttccactcaattttatttcctgattaagtgtttgaagactagatacgtatgctgctactagtaatggttctcacatttttagaattggaacttaagatcaactttcacacaatatgtattcttttttgtcttttgtcatctcagatatcctttgggcctattagttggctgatggtgtcagaaatctttccaattcgtacaagaggaagaggaattagtcttgcagttcttactaatttcggttcaaatgctgttgtaacatttgcattctctccactaaaggtcgtcatcatcgttatccttacattgtcaatattgtcatttcagtttgaattatgttttccattgttatgccttggttgataagagatcaacaactaacacaacttatgatcctgcaggagttgttgggagcagaaaaccttttcctcctttttggagctattgctctattatcacttatttttgttgtagtttatgtcccagaaaccaaaggaatgagcttggaagatatagaatccaaaatcttgaacaaataagtaccaagacagcaattgccaccaccatcgtattttcatgataactctgttgacttttatgtgcatactagtgttgccttgagagataatgatatgttctgtaattatatatttatgctctttacctgaacagacttgaaaaagggaactgtaagctataaataatggcattcgatttttttagcaataatttagagaagattcaaagcttgtgtttcaactcaaatagctttactacgcatacctttacagaaaagggacttcttgaagatgccaatttgaaaagaaaattttattgtattttgttaaatgttggctcaatccttcagttagtatgactgagaagcaatgaaaactggttaaggatcacaataattattatctttttaatcattttgtgaaaagttggttcaattctttagttactattggctgaagtactcaatcaaatgttgacaccgaggggaccaataataattaaagtatgtccaatccttgtgttagtttctttttttcctttggttttttacttcattagagcatagttagagggactcgtttgtcttaaactgaatctattacagtgactcgtttcttatccaaagaaaatctattgtagtagtggggacaaagacaaaccaaccaaatcaaaataacaaaagaaagaaagacctttagtggtgaagagagagagagagagagatggatcccaacctcatgagaatcttttattggtccaacacaagccacgtgtgagtgaggctaatctgagttatttggccgttagtagtttatcaaccacaccacaaattttctcagtctctcatcacatctccgtactgttaaaggctcaaaattcagcacactaacaaactcattcccctaaacacacacacaccagaactttcttgttttgtttcataaactaagatcaccaccctctttagccatggcttctgcagtttcaattactggagctgttatcagaactactgtaatgtcttcatcactttctcactagtttgatcactcttcttctgctacttttcattcattcattttttaaataacatcttcatgggcagtttctcttaacttttgacacagtaatttgattgattgaactttgtagttatgtaatgtcttatatgctaatgaccatgttcatattttgtgcagttgagcttgaacaacgttgcttctggtggcaattctgtgccaacctcgactttctttggtgctaacttgaagaagctggtgaaccaaagagctgcctaccccaaagttgcctctggaagctttaaagttgtggcggaaatcgatgaagacactcagactgataaggacaagtggaagggccttgcctatgacgtatccgatgatcaacaggacattaccagaggaaagggattggttgattctctcttccaagctcccatggggactggtactcactttgctgtcatgagctcatatgaataccttagtactggacttaaacagtaagaaaagtaaaccacatccttatatttctttgtttacattttgtggttttcgaatttgcaaaatgatataatcatcttggctctgttgattcatgtttcagatacaacttagataacagcatggatgggttctacatcgctccagctttcatggacaagcttgtagttcacatcaccaagaactttatgacactgcctaacattaaggcaagaacataataaacatgtatgaatggttttgatacatagctcagataattagtcatgtattgaccaatctaatcacatattcaggttcctctcattcttggtatttggggaggcaaaggtcagggtaaatctttccagtgtgagcttgtgcttgccaagatgggaatcaagtaggttgagggactaacaagtgttttagcttatttggcttgccttttgaaatcataacataatgatattgtacaatttggttactaatgtcattgtcactacatatctcagccccatcatgatgagtgctggagaattggaaagtggaaatgcaggagagcctgctaagttgatcagacaaggtaccgagaggcagctgacataatcaggaaaggaaagatgtgtgctctcttcatcaatgatctggatgctggtgctggtaggatgggtgggacaacacagtacactgtgaacaaccaaatggtgaatgcaactctcatgaacattgctgacaaccccacaaatgttcagctccctggtatgtacaataaggaggataaccccagagtgccaattatagtcactggtaatgacttctcgactttgtatgcacctctcattcgtgatggtcgtatggagaagttttactgggctcctactagggatgaccggatcggtgtctgcattggaatcttcaagactgacaatattccccaagaggatattgtgaagcttgttgatgctttccctggccaatccattggtaagaattattttgtataactttactcatttgctattactttagattttattagatggacttgttttttgggttaaggcttattatatgggacagtgaacattggaaaatgtaacttttgttattgcttttgcagatttctttggcgccttgagggccagagtttatgatgatgaagtaaggaaatggatctctgatgttggagttgagaccattgggaagaagcttgtgaactcgaaagaaggtcctcctacttttgatcaacctaaaatgacagttcaaaagctcctcgaatatggaaacatgcttgtccaagaacaagataatgttaagagagttcaattggctgacaagtacatgagtgaggcagctttgggagatgcaaatcaggattccatcaagagtggaactttctatggtaattaatagagtaaaaacttttcttaaagtccttgaaactaacaagtttttcaattttcacaatgttataaacatatttttttattttcttttatgtaggacaagcagcccaacaagtgaaagtaccagttcctgaaggttgcacagatccatcagcagcaaactacgacccaacagccaggagcgacgatggtagctgcgagtacaaactctaaagcttctctgcctatatatcttaatggttgctgaggaattaaagatgttagtcctatcttttgttggataatttatcacttttgtcatttatgtaatctttggttttcatcttcatgatcaaatgagttatattcttggcatcttttttctcttctttattgtcatttcccatgaagtgagttatctatctacattccttactatgatggatgatgtctaatagtatttctactaagcaaaaacgacatgtctggtttttcaagtttcctgtcatctaataatacatcaaaataacaatgatggatcgtttaagacctttgatattatagttaccacaaacaaatatcattaagaattctaaactggaacataatatttcaaaatcaataaatagtacactactggtacaattgacattttgattctctagcatttcaaaattggattatggataaatactaagcataattaagctttaacaaacaatgtggttttgccaactattattaatggtgcatgaaaaacagactctttccaagtagacatgatcaagatagtcagttctacaccttaatttcctaagaaagaagataatatatgaatgcgtaagtaaggtcaagaagattattaatcgtttattattaagagtacacaagtattgcatctcccacttcagtttgtttggagtattcttccatgattttcctcctccatggctgcaataacagaaaagtcaaaaccaaagaggccatgtaactaagttggactacaaaacactaattattgaaaagggtcaatcatcaagttaccttctccggcattggtagagttgggaaagtgtgatggtccttttgtggatgaacgagttagacttgcagattttgttggagaggttactgctgcaggttttgctgaatggcttatcacagcaggtttagatggtggagaattttcaacactactacttctaagtagagaactcacagcctctctcaccttgtccacaacactcatattttcaccagtagtagttttcttaggactaactgcctcggatatggctcgtgaaagcgctttgtcatcttctcctggctcaaatttatgcaacaggtactcttttactgacacacccttatcccatactagcttatcacccccactaatgcttacatgcttttcggtttttggagccacagggcctgagaatatttgtctggaagaaacaacagcagcaggggctgaggaaggttgtggagatacttgagctgaaaatgtttttgatgttcgaactgaactagtagtttgtggagatgaagggatggttgaagtgtttttagtcagccgcgaagcttctgtgacgatattcaggcttggaatctttgaggcgattgattgagttgtctcgaccactaatgcataggctggtgccgacttctggctctctgtttcagatactgtctttgaataagtggagagcttgtcattggttttagttgggattggtttgatactaggactatgatggtcctccttattcttacttttgttgttgttgttgttgttgttgttgttgttgttgttgttgttgttgttgatattgttgttgttgttttcttttatggagccagttgaaggcaatgcatgcttctctgaaatcacaggaactgctcttggatgctgtcttgcagtctccttgtaactctcaggggccagctctgactcatacactgaaaataaacatgagatttatgtaagaatagacacagcagttaaagtacaggtttaaatgatgaaattttatagataaagggcaagataagattcatgagttcgtttcaaaatcacttagcaaccaatgaagtaacacatgaactaataactggagtgagagagttaataaaatacttaatccaatcaaatccaaccaatgaagtaacacaagataagattcatgagttttgtctcaaaatcacttagcaaccaatgaagtaacacatgaactaataattggagtgagagcgttcataaaatatttaatccaatcaaatctaaccaatgaagtaacacaagataagattcatgagtttcgtctcaaaatcacttaccaaccaatgaagtaacacataaactaataaccggagtgagagcgttcataaaatacttaagccaaacaaattcacgctattcaattcaatccgcaaaatgcaaatattcgtacttgtgcgaactgaattacattaaaaaatttaaattggtacttgtgcaaattaaacagtaatcgatataattaagtttgcacatcttatatttttaaaaaattatatatatgtataatcaatatttttgttaaatatttcaaaaataaataataatt

SEQ ID NO: 218108 - DNA, 3492 bp, Cannabis indica
ttattatttttcttaaaaaataatgtaagccaatactagggcataggattttttatgtaattttaatgaaattatttttatgtaaaaaattttataatgtaatattcatagcatgtgagctcagtttctaatcttgaaatccaggcatgcacgccaaaatcatatgcatgcgagctcaggatttatcctcaaggaccttgaccatgcacagccacccgagtagcttcgggtacctttcgttcttctatagtgggcaccaaaacgtgcccacatgaaaaaagttcatgcatgcaatgcatacaagcaggacatgagtcccttgagacgcaaggagaaccaggcgggtccatttggactagtgagactggttgtgttggacccgtgagactggtggtgttcgtgctcggagaaggaacctgactagattctggtttcttcaggctcctcttgttgccaccgtgagccacggactagaaggtccggtcctccccttgcttcgcctccatgtttgtgcgaacatatatatggacctagtttgggtccttttgacttgttcatgcgataaacttggtgcctagccatggccatcgtagccatggtggctctccgcagctgccaaccatggtggaccatagtggtcagttcacctttaaccccaaaaacccaactccaataaaataaatacatatgtttgtacttttgggtataaatatgtatatatattatattatatattgtatatagtatacatagcgtatatacattgtatatatagtataaattatcatattattattttaatgaaaataatttaatattgttttggatatttattttttaaattcggttttgaattcaaaataaatattatggttacttataagttgaaattcaaattctatttagtaactttcttaattattttaacttaaagaataaaagtgttttattattaaaataattaagataaaataatataattttgtgggatatttattttttcaaattgaattttgaattaaataaatataagttggttataaatttaaaattcaagctcaaaagctatatttatattaacacaaaagttgttttgatcccaattaaataataaacgttattattttaagacaaaactaatatgataataaagttatcttaaataaagggtttatttaaaaataaattaattaaatattttaattaatttaaagggtttaaaaagatgttttaaataaaattttatttaagtataattaattaaaaatattttaattaattttcaagcttaggaaaatcttacaaaattacaaaattgcccctgcagtgatggagattagttttgtaatttaaatttctaatttttttcaaagattgtaaaattagaaagatcaaatattttacccgttcatcatcattgtttatttattatttttaaataaatattcattaatagttgattaataacatgctcatgcattagtgtataacatgtcatatatagaaattctacgtagttatattatcatgcatctcatagtagaaacatgatatattaagattattctatgtgattatttatttacctttttgaaaccgaaagcatataaactgactaagaataatttataattaacttggtaatttaaaattaacttattaatttaaaataaaattaaattatgaattaaagaattgattcaaatttaataattgtgacaggaaattataatttgaggattttattataaataaattaattataattattaaagtagttaatatgtattaaataaatatattaacctaaaatagtgagtgggaaaacgagttcatgtcaatgtaaccttcaacctccattattggtcaacaccgaaaaagtatagactggcctcgagacggctttattttcgtacccctaaagaaggtatttgtctatactattgttcaagcttgatctcttgactaagataagagaaaatgatgtattttagtgcgatactgaccctataagacagcgttactaagttaagtcatgaaatatgaaataatgggttacactcataaagtgcaactaagcttcatagtagttagttgttaacttgaccaaacaatagtactttatattttgaaaagaaaatatgagatattaagtttcaaaattataaagatgagatcactctcataggctcaatgagatttactcgataccaactctaaggcggcgatcaattgtcaaagagttttatatattgtggaataacttaaacaatattttatgtattttatcttgtgctaatgcatcacgtttacattaatttcaaaataatatttataattaaagtataaccattatgtcatcttaatttatttcaaaaatgtctactataccaaatttccttattgttttattagaaattgcaaaactgaatggtgaatatttccattaacggaaatctaatctgaatttgatggtagtttgtgagaaccacaaatttgtcctaactgagtagtgtctccgtaggaactcatgtattgcaagtgataatgctaatacatgaggcggagatacaagaatctatcgtaaacaagaggactcaagtatgcattattcttgagtcgctttactcgttgcttcaaagtgttcactataaactatgtgatgaacaagctatagttcagtacatgactcaattattaaacgagttaactgtgtttgaaaaccttaacaaggataagtcctaaggaaagtgagttaataaacaatgttgaaacaaagtcctactttccttcttacttagataagaaaaggaaagcggacaataaggagaacaacagtagcaagccttagccgaaaggcaagaaggcacctaaagccaagaagaacaaagtcaaccctaagtccaaggacaagaaggcaaaagaaaagtgtttccagtgtggcgtgatggaacactgaaagagaaactgtaacaagtatctctttgagcttaaaaaaagtaaattcgatttatttattcttgaagctaatttaatggaagataataaatccttatggattgttgattttggagccactaataatatttattcttcaatgtaaatacttgatttgtcaaaagaactggctgatggaaatgtgactataagagtgggcaatggagcacaagtgtctgccaagtgtgttggcaaaatccgtttaagtttattaataatgtgattattatttccatatttggaacgctaatttgttctgcaaaacagagaaatagactttatgtggccaagcgtagtgaacaattaattttaaataataaattatttagagtagtattgcctcaacaaaataaaaggcaaaaagtttcaaatgatgatgaaacgtatctatgacatctacgtttaggccatattggcttagacagaattaactgattaacaaagacatgtcctataacgaaaataaaagttgaaactcttccgatatacgagtct

SEQ ID NO: 218109 - DNA, 9527 bp, Cannabis indica
gccctaatcgtctctctcatgctttccgcaaaccccaaaatccagagccagctcagcgaagccctcgccgtcattggcaagcacgattttccgaaatcgtggcctgctttactcccggagctaatttcaagcctccagaaagcgtcgcaggcttcggattatgcttccatcaatggtattctaggtacagctaactctatatttaagaaatttcgataccagtataagaccaatgatcttttgcttgatttaaagtattgtttggacaattttgctgcaccgttattggagatttttcttaaaactgccgcattgattgacgctaccgctaattcgggtggtgggtctgtggccactcttcgaccccttttcgaatcccaaagattgtgctgtagaatattttattcattaaacttccaagagttgcccgagttttttgaggatcatatgaaagagtggatgactgagtttaggaaatatttaactactagttatcctgcacttgagaacagtggtgctgatgggcttgcactcgtagacgaacttagggctgcagtgtgtgagaatattaatctctatatggaaaagaatgaggaagaatttcaaggttacttgaatgattttgcgcttgccgtgtggagcttgcttggaaatgtgtctcaagcttctagccgcgatcagcttgccgttacagctattaagtttctgacaacagttagcacgagtgtgcatcacaagttgtttgagggcgagggtgtgataccacagatatgtcagagcattgtgatccccaatgtgaggttgagggacgaggatgaagaattgtttgagatgaactatgttgaattcattaggagggatatggagggtagtgatcttgatacaagaaggaggattgcctgtgaacttcttaaagggattgccaccaattacaagaagcaggttacggatttggtgtcagtacagatacagaatttgctgacctcatttgcagcgaacacagttgcaaactggaaggacaaagattgtgctatatacttggttgtctcccttgcaactaagaaagccggtggtacttctgtctcaactgatcttgttgatgttcatagtttctttggttctgtcattgttccagaactgcagagtcaggatgtgaatgtgtttccaatgcttaaggctggagccctgaagttcttcacaatgtttcgatatcatatatcaaagcaatatgctttgcaatgctttccagatttgattcgattccttggtgcggagtcaaatgtggttcattcttatgcagcaagttgtattgaaaaacttttgctggtaaaggatgcggggcaggcaagatacaactcagctgatatttctccgattttaggagctttgatgactaacctatttaatgccttaaagcttccagaatccgaggaaaatcaatacataatgaaatgtatcatgcgtgttcttggtgttgccgaaataactcctgacattgctggaccttgcataactgggttgacatctgtacttggtgaggtttgcaaaaacccaagaaatcctgtatttaaccactatctatttgaggcagtggctattcttgtaaagcgagcctgtgagaaagatccttctcttacatcagcttttgaagcaaatcttttccctagtatcgaaattatattgtccaatgatgtaagtgagttctttccttatgcatttcagttgcttgctcagcttttggagttgaatagaccacccattcctccaagctacagggccatttttgagattcttttgtcacctgattcatggaagagagcttccaatgtcccagcacttgtgcgtttgcttcaggcctttcttcagaaggctcctcatgagctcaatcaagaaggtagattaagccaggttcttgggatattcaagaagcttttgtcatcaccaagctcatatgagcagggtttctttgtgctaaatactgtaattgagaatcttgaatatggtgttattgcaccctatgtgacacacatttgggctgcccttttcactgagctcttgagtaggagaaccataaagcttatcaagtccttgttgatctttatgtcgctctttctggtcaagcatggttccacaaaccttgtggagacaatgaatgctgttcaacccaacatattcaaagaaattttggctcagttctgggtacctaatcttaaacatataacagggcctattgagaccaaattgactgctgttgcatcaaccaggcttttatgtgaatcaccaatccttttggatgctatggctactgagctgtggggaaagatgctggatagtgtagttacccttgtctcacggcctgaggaggatagggttgaggaagaaccagaaatgcctgatcttgcagagaatgtcggatatactgcttcttttgtccgtcttttcaatgctggaaagaaagaggaggaccctctgaaagaaataaaggatccaaaggaatttttggttgcttctttggcaacgctttctgcctctaatcctgggaggttccctcaagtcatcagccagtatcttgatccagccaatcagactgcattgcttcatctctgcagtacttataactgcccaattgcttgaatgagtaagttaccgttacaatttttttcttcatgaaatagagattcttgttgctatttattatttatatagagataactacctggaatacatacgcagaggatgtcaaacaccagaatgtattgatatctcattatcatattgtcttgtatgtattattttgatgtacttcagttttcgtgcatgttgtattgttgtgaggtttacctatgtgttattttgggtataatagcatcttattagaagtttcaacgatatatattatatatgtgcaagtttaattttttcgtggataatattgagttcttgaattgagttttattgctggaggatggagcttagccttctgcaatgcaatcttggcccaaaatttaaatttcattgttgaattttacctcatgcaatcatgaacttgaaattattcctataatgtcgttcaaattattgtcattattgttggtttcatcattttacagctctcctaggatattatgttattttaagtttaaactgccgactacttgaacttctcatatatatgctttatgctattaagtattagtaatagtgctattatttcagaacaagacgtctaatcatcgattttctgattctttccagaatctgattttgtatttgaagatgtggcttcttctacaatcaaagtttgaactagtctcccatctgaaagtgattatgaactagcagtagttttgcaaaaacctgccaacacagctgggttaccaggttatcatacatgtattccatttccaatatcttattttgtgttgatgtgagattgttggccacaagttctccaacttaatctagccaagcggctggtttggtggtttgacaaaggtttctcaagttttggcagggtaatttgagctcttgtttttctcctttctcggcatctgtctgtcaacaaatgtagatttgtttcggttggttttctttggctgttccttttttttttctcccctccaagtttctgcatgtaagcactgttgtcaaattttcagtcttaactaaatttttccgttatgagttatcggctatagcattagcatctttgtatgaattttttaccagtagaaaaaaaagtcttgttaagaacttcttgggtctttgtgagtatacgacacagtttcattaagaacctctttattagttgtgccataattctttttttgccatctatttcacagtagtttctataacaaaatttgaaattaaattgcaatctaaatctttgttattgacatgtcacgataactcaagcaagtttattgtatgctttttcttcacgtttacataaccataaagggcgaaacttgtgaagcttatgatgctttaatatgtgatttttataacgctctgaacattttttttttatatatataaatttttgtatatcctttttttaaaataatatgtgatttgtgacaaggtttgcagtttgttttgttttgattctcctttcttttcgtggataaacagaattgagaactagtatgtattatgtttgtgtgggtagcaactgcaggttctcctgattcaattaaagttttactctcattacataaatgaacaatgtcttgtccaatactgtagtgttagctcaaatgattgtcatgtgtttgctctgacagttttttcgagtctctcctacacataaatgacctttgttatgtaataacgataatgagcgatgtcttgatgccactaaattacaatgcgtgtattattctttgagatcatatcttttatcttacaacatttgtgacaccttatagagtagagtgaaaatgagaaaacaacaccacttcaataaatggcatatattttcttggacaaagttttcttttatccaatgacattaattattagcacgtagttggcaatggtccatgtacttgcaattgactatgggccagattgctagcattgaattgaattgaattgcagagctgattaagtcaaattatattttctcaatcggtctgagaacattatatacgacgaaaatcagatcctggtggatgcacaagacaaaatgcctataatattataacgacaaaaaaagagtaggtgcttactgcatagccaaatgtacaaaagtagtttaagattatacatcaaatatatggacctttttcccttatcgaaagcatcatgcctattacacccttctgtgaatgttcaatacttgttaagctaattgcttatcacccacacataactttatgtattaaattcaagggagacttcatcatgaatactggctttttgaatgcatccaaaaacaggtccaaacaagttaacaattacacaaatgtatatgtataaaactcttaaaaacaataactgagaagatcaaaataccccacatcccattatatagcatatggaatgatgtggtgttatgcaaatcaaccataatttcattgggcaaaagaacaaaccaattgaaaaggttgaactgattatttttatcaaaagcattaatttatagtgattatatttctaattgatgttttatgaagaagaagatgaacaaatgaggaaacttcatatctttatgttaataatattgatccattgcacttccaatcccaattctcatttttttttttaaaaaaaaaagaaaagtatagaattttgatggactgcctaactgccttccactgaaattttgtttagatagtctctttggcctttgggtgattaataaattaagctttggtgttaatacaaattttaaaatgtgtacgatgttcccataccaacaagccttctccaatccatagcattggtactaaaaactcatgattcttttgcccctttggaccccaccacatagtttttggcaagggccttaaggtccacatatggtatggtcccccatctatttttatcacctacctgctacaccaaattctattcccaagactaaaaaattacaattagaaggttacatatgtgatttttttttaaaagaaaatcctagtggggaactttacctaatttgatcaatccctagctataaacaagtcataacttgtgttttgtcaagtatactagaatgttagatggtaggtatcattttgttgttctttttttttggtgggggataatgtgagaaactagaaatgttaggtatcaaacttggttccctaataaatatcatccaagggcctaacagatgaaattacttaattgacttccttgtttctacatgtaaccattttggtctgcataaattaaaaaaagagctcaaaacttaaaaaaccttccctttttctatgggcaaattggacatgtccaaaaaaacacttatcttttgtactagtgtaaagggaacatcaaaattgggccactcttgctaaaaagaatagaaaaaaagttgaagaaggatggagaaaaatttggagggaagatttaagagaccaaacaacattgaagagctaatacgagtggctcttatatattctaaggctaagaagtggatgcaacggcttaagaaagtgtaaaactaagtcaaaagcaagtcattatttgtacggacaaagtgcaccaacaatccccactcagcccatctctttattactacagtagttttttaacattataaaaataccattgtctattgagattaggagaaccctcctttgtggccttagtatagcactaaccacaaaagtttccgcagccaatcttgaataattgagagaaagattttactccactattgtagtttactatttatttgaatagtactagattcgctacttaaatattttaaatatttagtaataacttctcactcatgtttagaaagtaagatactagtagattagatttgattaagttttattatgtgatttagaaataaaatacttaatctatttgccgacgagaatatatattttcaaagtaattttacggtaaaatattattttattttattttatgggaaatacgaataaaaatattctttttcatagatgaatctgttgattgttattcaactaattaggattgcaaaccaattgatgacatggtagttgaggtggctaatttggttgttatgttagttattggtttaaggctataaaaagaaactttatattcattaattattatcagctcaaattaaaaactcatagagagtgattgtgtaaggtgtcagaggattcagggttgtaaaattgattgttctttctagagaagacttctatcatgagattgtgttgtacaggagctagtctcctctatttgtgtactcatacaccattgtaatcaaatcaagttgatcaataaagtttctagcctaattttatggttgttcagatccttggagtaggttgctaagctcattgcttagtcttccgaaccaagtaaaaatcttgatgttaaatctgtttgttattttcataacaaatagtatgagagcaaggttgtaattgaaaggactaagtaactttttttttatctattgagttccaagaaccgtgacaagaaaatggttacattaagatttgagattgacaaattcactagtgaaaataactttagttattggagaataaaaatgaaagcaatattggttcatcaagaaatttcagatgccattgatgatgatcgaatgagagaactgaaggatgagaagataaaaagagaaactgagatgaaggcacatagtgccatattgttgattggtgatgagatattaagagaagtatcaaatgaagagattacattcagtttgtggaagaaatcgatatcaatatatatttgatgaaatctttggcaaaaagcctttatttgaagaaaaagctttacacacttcggatggatgagaacaaagacctttggaagcatcttcataacttcaatcagatcatattggagttaaacaatttgggagtcaaactggaataagaggatcaaatgaacttttaacactggtatgatatccaacaatgaaagccaacatagagaagaagttactgattttgttgactcagattttgcagccaacattgacacaagaaggagctgtatagggtatttttttacagttctaagaaggtgtatcagttaaaaatctaacctacaaaaagtcatggtcctttcctctacataggttaagtatatggctgtaaccaaaatcatcaataaagcactatgactaaaggatttgaccagttagttggggttcaatttagaagacataacagttcattgtgataatcaaagtgctttgcaactcatgtaaaatcttatgtttcatgaaaggtcaaagcacattgatatcaaactatacttcatcagagataaaatgctctcaaaacaggctcaagtgaagaagatatgcactcatgacaaccttgtagatatgttcacaaagtgtactttcagagacaagtttcatcattgtctgaacctactgagcattcaagactgttgagtctttagtctttcactcttcattggtttcctaaactaattcaggttgatatgttgagaattagctcacaaaaccagttaagggcaaaatgctaaaacgtccttttttttagcattctatctattcctgtatttaaatgatagtcaagttagttggcccccaatttccactcaactatcataactgtaaaaacataacaactctacaccacagtcatcttagcacccatattagtctctctctttctaaatttttctctcccttcctttcctctcccaattgtaatttatgtcttagaactagtgtgagtgaaggagggttgtatagattccttgtgtatatgatcaagggtttcctaggtgaggctattgtagtgtgatacaacattgtggtattattccttaaacccccaaccaagattcggttagagttagttagttgttcattaactaacttaaatgttaaatatgatagcaagtattttgggttctttggtatatataaagaggactactcctatcattttaaaagagcaataagaagaagactcaaccagaaaaagggggagagacacaacatagtagagagagaaattagagtgagaaatcgatagagatatttgagaaagagagagctaggattaagaaattatatattgagcaacattgtcgattatgttggctcgtgttagtgaggagtgttgagagattacaccatggatgacttaactgtgattattttattgtagctcttgagattgatatctctaattctcattatcaataaagattggtggcagtgctttcaaattagagtatctccaagttcatcttgaacataggatcgaaaccagtataattctcgtgtgtttatctggaagctatctagattcatctgtgtttatcttttcggtttactatgtatttgctgattttgattattaatttgtttgttttgattaaatatttatttatttaagtgtgatcttaaagttataattatatatagaagttaattcttatgtatcggaactaaatttcttaccactattgttgagtgtaatagtttgaagaactctaattataatgtgctaatgatcaataaaaataaatcattttgctgtcattgaaatcaagataaattccttacttttattcagttttagtttaaaattgtaattcttatggactgtacatcagtgacctataagcacaaaatgaaattggtctccacatggggtaccctttcaaagtcactgttaaaataaataactaagtgcatgtttggcatcataactagaaaacagttttttgtttttaaaaacagaaaattgtttttaaaaacagtttggcttgtttggccttgttttttaaaaacagttttcagaaaacaaagttacaaaaaacaagaattttga

SEQ ID NO: 218110 - DNA, 5845 bp, Cannabis indica
agatcctggtaaaataatatccaacagtaacaacaattcctaatgccattgggactaaggaaaaattagggaatgaaaggaaaaagataaatgataagcaaatggccaaaagtcttttctcttctttctttctctctctaatttcaaatgaaatcaacaaaaaggattaggattccaatccaattaatcctaatgccataagaataaataaaaaaaattaaattttcaaagaaaaagataagtgaaaaaaaagataagatttttcctctttttctttgttaattaattcttgaaattctcaaggactaattaaaagtgttcaaagtcctaatttaattgtgaatgcttgaagaacagatacaagtgcctaagattgtcaaaattgattcccatctagtagtttcaagcaaaataggctcggttcacgtcattaagtcaactccagacaagtgtaaagtttacatggggggaaatactaacctaaaaactttctctagtgacttggacatcaatgtttgacatgtggcatgaaatatgacataacagagttgagtagacctaagtcatagtaatcgacctggggggaccctagccccgcgctcaagttgactttggaatctccaagatagaagtttggacttcaaaccaacccactatcttttagtattctgtaccattaagatatgaaccaacctaatccaagccctaagagctgaaattacacgaacatgtaatctgaaacaaaccttgcacctaaggtttcacccgatgcctaagttgacatccataacttaggttttagttcctaagactgtctttgtgaaaaatcgtcaaaacatgacgtgggacatcaactagacataccacttaaatatttgaggcattagaattagaataagagaaagttgatttttcagcacctagagccccgagcacctagcgcctaggttgacaatctgtcaatctgggcaccttccaagtgtctgatcggagatcgaacttttgcatcgtatttgtcttcatcaaaaattgggaaataggtccttttggaggaaaagtaataatttttaggcacaaataacagcgcccaggttaccacctggggctgtccctgcgcgcccaagttgacatttttttaacttggccatttaaaatggagttttttagggattatttcagaaattttttccatcatcagaaataaaaaagattcaagtaaactcaaggagaaaaccacaatcatgagtccctagaaatagggccctgcgcccaggttgacaatcaacctgggacactgccctcaattgctaaattttaaaagcctttgaagtatcaaaaatgaaatcttgggagctcggagaaagggcccaacgcctaagtcatcatatggctttgtgcgatgggttctgcttatccaaatttgatgttgtttcaactgcccgtctagtttttcacaaataaaatgatatatgatttcaaaggaatcaaattcacaactttgcatttctcatttccagcacacccagaaattaagagttttgagtctttcatttctccaaaccagcaacatctcctagaacaggtgaccagctttgccaaaacatataaatggactaagtggtgtcaaactatcatttaggcatcttaaagtacatcccttggacgtttttatacttacacaacatccatgttgacattagatgtcaacttaggcgctgggatgtcaacctgggtgctggatgtcaactaggcgctgtgacttgaactgccttcagtaaaataactataactcactcaatttttatccgattggcgggatataacttgtgtttcgaagctaattcaatgctatatcaattcatgtacaaaactccagacgtaattctaaatctatcatcgtcaaaattcacctgaagggagttacaaaaataagctccaggttatctacaacagaacccactgggcaccaaaaattggccatcacctccagaagctaattttcaccattagatcatcatcaacagtcaaaaaataattatttttttcctatctttgtgggctttcttcacctataaatggagggctcccttagctcatttttacattcaaaaaactacccacaaggtcaaagcttctctctctagattttctctctctaaaatatagagcttctgacactcagtctattgttgtacttaccgtcttgtgagaaataaaaaattgaagtagacatagtcccattactatcacgatataaggggtgaactactataagttggttgtgtctctcttaattacttaactacttttattcattcctgccaatctagcgagcgagtgctgcttagaagtctagtcaaattttttgagtcaacacagtgcatatccagaattactgacaatgattgaaggtgctagagacactccaaaagcttgggtgtaagcatcctttagattgataaaactttgggccgttgtcaaaaattctgacaaggtgtcaaacctttgtctatgtatctcattctagaatagggatcttgcccaaagccttgactacataaccactaacttcatgtcatcattgacttagatctgtgttgttgcctccataatctatatgatataggatttcaggctctccccagattattgcttgatgttggtcaatgagctaacctccatatcaaggtccttagcaactacaaaatatttctggaagatatagtgtaaatccttccagttttggctagagctagaaggcaacatttcccacaagcatttgatgatttagacaaagttaatgataaacacaaagatttcccatattcattgacttgcaccactcgcatcagcctattatacttggataggtaagccctggggtctgtcttcccttcgtacaactccatttgctacaacataaatctttcgccagttgtgcctcaatgattctatttacacatggctctggatcctcatctttcgagttagatacgactccacttttttttttcaggccaaatggtttgtgagttttgttaaagcgactatttgatcctatagttgtctggtgtgatcatctaagagtccacgtccacaaattctatcattgatatagtttcttaaatcacctctgcaaggccttaccttctcacccttcactttttctcatttggcattcaaacgatccttcaggttcgctgttgacatgctgtgttccgagtctagatcctccacatggaagctcttgttaatagaatcgttggggtagtttttccatccacaaatgttaggaccttggacattagtacccaacccatcgttccacacgctctgccccacaaatttattggttggcatagctccggggtttagtgtccctttctttctggtagggttggtcaactacatttctattgctccatggaacattgtacatgggtcttcttggaggggcaaacaatacaccctttcctttgtcattttatagggtgaacgacctaactctaagatggttaaacttcttagtatgatagttttattcaaggaggctagcctgagcatgtaaatgtgcaagagcttttttcatctgacacgagactcccttttaatctaataacctcctgtagataaccgcaagctcttactgcagttgtactacattagagtcttgcttgtagtactcttcttcatagtctttgttgtggttttctttatggtcatccttagggtaatctttgtgacctccttactcatcttcattgatgggatcatcagcgacatgccatgacacccgcatgagagttttgttgaggggagctggttcttggtgtcattggttgtgttgtcctaaccatctcgatcaagtggtttgaccactgccttttgggttataaccatttttgtagatgacaacttcggtaaatctatcttcaggtgtcaacgaaagcaccaaaatatttaccaatatttttggaaactgattataaaataaataagcttaagaaagaagtaaatttaagaataagaaataagaatttttacgtggttagagcattaatgagatttagtccacaagtcaatattattgaactagaaaagcttcaaagtattgtttttccctacttaagaaccctaattcttagcttttgatagtagatatgattatcccaactatttgcataaatgagcaatattctatttacggctagaattgggtatgggtgaaccgagactcaacagggtttagaggtgtcaagtaggccaactaatggggtaaaatgcattatatattggctttgggaatatttggtgaggccaaattcaccagataatgctcgtttgtatgagtggggaccatttggtgatgtcaggtgtcatgcacaaccatgttggtaccgagaatgtcagagaatattatgttggacaaaaagatggtttccttttggtggtgcacacacttcctgggtctaaaataagggacgagcccttgacatggtggtaccctatatatggaggatgccacataggatgtcatccagaggcttccagatgcctcttcaattacaagtatttggattaccccatgtggatatctagattcatcctgatggaccttttgttttctgagccaaataacatttctcgagccaatgtggtccgacctcgtcgagtctataagttggacttagatctggatcaagaaatcatagcttgactctacttatgagttgatttattaacttgattgggccttggaatgggcctactttggctgatattgggccttgaaagtgtacccatcatcaattggaaaacatgaataacaataatgataatattatatgtatatatattgaatattatatataaacaatataactttataatatatatatatatagagagagagagagagagagaaagagacaaaagagtctacaggagagaagagtgagactccactgtttgaccagaagcaatcgatgggggaagagtaatgctaactactagatctggggtagaagaactggatctaggggtggagggctatgttggaggtggagagattggataagaaaggacaaacatgaatgtagggaggatagggggtctggtgactcattctggtccgttttgtgttggccagctgttagagagaaagggaggggagggttgtggctggtcctctcgtagtcgcacaagagaaggggatggagcctcctaattttactttagggtatgtgaatgtgtaagtgtgtgtttaatttagtttaggttatgttagtaaatatatataaatatataagtgttatatgggtgtacgggtgggttcgggtctaacctgtacgtgtaggtacataaacttctaaccgataactcgcatgatcatttgaacgggtacaaccaaactccttcagtttttatagttttttttcttcaaatttttaggtttcgcaagttaggtccaggccaaaactactccaaatgcttagccttatgactaataacataaggaagacccaaatacttcatgaaaatccaaacttactatgccaggaaaataaatcaatcgaggtccatcaaatcaacattgggactaaaacaacttacaaatttatcaaaattaattgtctgccaagaagcgttaacataccaagccaaaagttgtttgaattttaaatagttgtccactaaagtcctagagaaggtaaactatcattagcaaaaataaatgagaggtgatctagtctcttctcccacaaagataccccaaagaatattataagcacaatcataattcaccaaaccaaaccaaacatttatgggataatttaacaaatac

SEQ ID NO: 218111 - DNA, 6812 bp, Cannabis indica
aagtagagttatggtcctgtattgtatcatatatatccacatccactactgatgacattttaatatgtatataataaagatatattgtcttttggcctaagtatgagaaaacaaatagttgactctatctgagtattaattaagttgtccacagctcagctggcttggttgttggcatatattcatttattgtatatatatatatatatatgtgctatagctacgtacaatatttcccattaattcaatctcctaacctccattttattgatgactgactgttacggctaaccgattcgaaacaagtgatgaaattagaatgttaattattttagaggtatgtaattggtggaaataaacttttctagagtttttaaacatggttttggtataaaatggatatggaaaaaattaatccaaaacaacaatatcaaaaaactaaataaaaaagctgacaaagcaacttttaatatttttctttaacaatatattcttaaaaccgtctctatttgatggcctacaatttgtcctaaattttactacaaaataagtaataatatatttagcttaacttttatactgtgctctaatactatatgttgacaaattaacttaaaaactactaaaaaaaatattttatttcacgctatacgtacttttaactttcttttttaattttataatatctcttttcttgtttttctttacttatatattttttttaataatttcttacttatattttaaatctaagttattattcatttttacaggttctctctctcccttttaaaaagtttcgtctcattctgttgatcacgctttcggccaacgatactaaatcttaaaaataatatgatgaaatcaattagtattaaattaaaatatatttaatatcatgcataaactaaaaacacgagattttataaaaatttaactccattttttagtaatagcttactccccttctagttgtatttaacttggtagttgaaaagtaagaagaacttgatctctctcgaaagcttttacaagaatttgagcagcataatagccttcttgaaaatatgattttagatcccttcataattgaattgctccactatttataggggataattacaataaaaattagtttttcaaaaactgtagaaccgtaaaaataggaaataaatgactttcttaaactgtgagaaatatataagaaaattctctaaaattaggatttgattacatgtataaaaggaaattatctttaatgaatctacctcatgcgtttttccttggtcttgtcgcatgatgtgctgactacatctctccgagcaagtcaacttcgtccatcctgtacgacgagctttaccttatttatttattattgcatctgaaaagttgaatgtcttgggcagacactcgaaagaacgtttcctcctcccaggtctcagtgacaggacacgtgtcacccaaagaaacatgccacgtcacttggacaagattcaggataatatttgccccagagtctacatgagaactttgattggtgcgtggactttcctggcccacgtactacgtgaatgtggtaacacgtgttggatgggtaatcatggcaaacaaggctgtcgctttaaattttttgaagcatcttttcaaatatttgatgcatttaatgctctgatatggattatcgtgtcttaggggcatgcactgacgattgtacttatgtagagtactcattacaatttttttggggggaaacaatcattttgtttgggtgcccaaattacggttatatcccatgaaacttttataaaaaaaaaagctcatttgacacttttacatcttttaaatctctaaagaactagagagcattctcattcccttagattttcaagagtacatttggacatttcaactagcatctctaacagtgagtatgttaatttatgtacatttttatcttattttcttgcatttgatattatacatttttttgcgaaaaatctggatttatgccattgttgttcttcactactgttttaatttattttgattattgctgctgaatatgcttgtgtggggcttaattgttgaattattgaacatatacatgtttttcttaagaaaattcattgaaatgaggctcatccagtactttggcaacttttgaatgtttacccaatctttgaatcaagttcttcgtcatttggatggagttcttccatcgatccaggcatttgtctggccagaataaaaaaagttgtttccatttgaactcttcatttttgttcagtacttaccttccgttcttcttttgtagattaattcaggcgactattgaggaggtagtaatcgtatttataaagaccatttacaattactttttgaggactaaccaaaagcatgtgcaaagtttattctttcaaacaataattcttcctctagcttcaaaaagtgagaagtgtcgagtgacgattctatgcctacgataccactcgtccaacatcatttttatccagaccagattggaggcagtgtgtacgggaggtatgtctgagagtacaatagaggcttaatgaggtttttaccctctaactagacgtacattgttcacgtaagcctcccagatactttgctagaggcgaatcctaaaccttcactctgatctagggtcaaggcagaaactgccagtactgccgtagagcatccttcatcgagctatccattctgctcaagaaaagtggctcgtaccaagaaaattgtccaaaaaattagcgcaagagactgggagtacatccagctaatggccaagcaacatgaactgggtgtggaaaactccgaaagagaagacgccttgcccgtaggggacccagaggttcaagaagttgaagagtaggttgaaaatgataggtttgccttcatgccttttgaaggtgccggttgggggttggaggatgagcgattttttgactttcgaggttgtttctttaccataggcattgactatacaaatgaagagattgacgaggccgaaccatccaaacattaggaggctgaagccccaatgtgggtttccccaccatttgaattgactaagaggcaccttcaaaacttggacaaaaagggccttcttggtgacgtacatgtcttccttccctttgagggacaactcctcaatgatctgggcaaggggatgtgcacatggtcttacacgcatgccaaagcatggtgtcctcctgccacttcactcatactttgtgaagtttgttgactactacaaaatccccaatgcagttcatgctgaagagaataaatacttagctataatgtttgccctctatgcgcaacgaggatggggaaaaacttttgtgcacgacataaattgattctttgaaattaagtcctccccacatcatgagcgcttaggatcttctacttttcacagctggagtgttcgtggctgatcggcataaatgagaaatgtgtgaataaaattagtggtttcatctgaaactactatataatcaccaagatgatgatcgagtttttagctttttcagcagacaaaaacatacatccgatttgctttcatggttggcctttgggacaggacccaagccattttaaatttatctgattctacttggcatattgtattattgacatcccccaagaatttatctaagaatggactctatctgagcccagacagtttgttcatcgagaagccatctgtgttggtcaagccatcctctcccaagaagaaaaagaccaaagccaacagggttaaggctttgcctatggaataacccattcgccccagggatcttgaggaagaacctattcgcagggtcgtccaaaatgttgaagggaaaggaaaggccatcctcgaagaaattgaagaagaatcctcgcatgatgatgctccttcaattcttgtccgggagggtactcctgcagaagttcagggtatatattattaacaagttgtgtcattttattatcctgaccatcattctgatagttttttctatttttatgtagaaatgtcgggaaaactaaagtcctcgttcaaaaggaagttgggtggtacctcaagcaaggaaaacccacgaaaagtgcagaaaattgatcccaaggtctcttctagagatggggtggtcgtcatcaacattgatcaggagatggccagaaccaaatccttagcaacccaaagctacagccacggtgcctgcagagctaaagcatgtcgaggacatctacaataactaccaggaaatgttccgtgtggaggccgaggagctactaggaggaacagacattcttccaactgacttcccaatgggtaatctacttaaggattgcacgaaggtattgccttctactgttcatattttatgtctacccaatccatttcatgtattttaacttggcttagtttacttctagctaaacttacaggcgggctatatctattctcggacaaaagccatggccaaggagtctgtgactataaagcagaaattaggaaggttcaaaaggaattggctaagaaggagaaggccctgaagcaagccaatcaagatttgactgagcaaaagaagaaggttaaggagctgacctaacagatagccaacactctgtcaactgcctagttggagaaagaccttgaggagcttaaccgggacaacaatgggttgaagactaaaaaggaagggtgccagactttgctcaaaaagaataaagagtgaatctccgagctagagactgctcaagctaaagctgacaaagaaatcgacacccttatgaacatcaacacggagatcttctatgagttttggatagctaatcatgcggccaactttgactatttaaaggatgacaaggccttcatgtttgcttgagcagaggagataaaggccaaacacatcgaagaggcagccaagttgaaacttctaccatgccagcgacttcatatcctaacttctcggtggccgaccaagatgatacccataactctctcaacccgacaactccaatggatttctaaactattttacttttgaatagttgtacggccttcaggcctttatttttagaaaaatttcggccaaattatatttatccttggtttctctttttaagacaaatggataaccagacagctttcaaacccgaacttaattcgtgctttttttccttggtttttaatttgaacttattaattcttcttcaaatttttattgtttgttatttacttatttcaattttgtatggatataggtgccctcaaagtgatcaaacagacttttgactgtcggtcacttacaattcattcttcctttttttgtcggtccgatccctttatttatgcatattaagtaagtttttatttgttgaaattcatcaaaatacatgtgttaagtaaaacagacacaatttgaacgataaaaattgttttatttgatttactggtcgatatgtgtggttacttaaaagtaacttacctttattaaagattaaagttgttacatgatttgaacggatctttagctttaattaaaaatgaacataaaataaaaagtactttgaaattggtcaacagaccttagtacagaaatttcaatcaacctttgcacagtaactgcacacaaggccatcacttagaagtgatgtttcattggtagtatttccttaaatattcaccgttccagtaccttggtaccaaaattattgtatcgaccaatcttatgggtctcgactctgtgacttcggttacctgatatggacctctccaattgggcccaagcacgccagccgcactgtctttggagttaaagaatacttgcctgagcagcatatattctacaaagaatttcctctctctcacttgtttgttgaagtaccaaactacattttgttgattgacttttaacttcaagtttgccaggtctctccattcttcaatttcatcaagtgcttctgttaaaagagcatggttcatttcttagtcgtatgtcaaccttttgtgggacgaatgatccaactccatgagcaacaatgcctcatagtcgtaggccatggcaaatggggttttcccggtggcatcttttctatggctctatacaacaaaagtacttcaggcaattcttcaggctaattacccttagcttctttagccttttctttaaggtgtccttgcgagttttattatctacttcgaactgaccattagcttgagggtgtgcgactggcaagaagcttttgatgattccctacttaaggtagaagtctgtgaacatttggatatctaactgctttccattgtctgaaacaattttttaaagaagtctaaaccaccatattatatttttcactgcaaaatctaacatttttctagaagtgaattgtttccagtagttcgtccttcgcccactttttaaagtaatcaacaaccactactgcatactacactccatcttttcctttaggtaattgcctgatcagatctattccctaaattacaaatggccatggactttgcatctgttatctcaatttttttcctcgtgatgtggcatgcctacgtggacagaactagtgccacatggtagtaaagctcactaaacggaaggccaaatcagcatccaagcaaacaaagaccccggtacccaaacggagatcaagttacagaccagctccctcttaagagctggccaaccctatggccgaccagcttagggacagcaccatggctagccagcctgtccaccacatggtcctggccggacaaggagtgctttgtaggccttgatgga

SEQ ID NO: 218112 - DNA, 10887 bp, Cannabis indica
attggtaaaaagaaaatttattaatattatatcgaccaaaatataaaaattatggtaaatgtgaaaccatctagactcctgtatgcagcgtggatcacgacccaataaatgaatttaaaaattaataaacttttcgatttgctgtcggaatctaactgtacaatatacactatactactatacactatacatcatcatatgacgacgagcttgtacaggggtcaaaactcaaagccaaacccaatttgcaccctccaccaagacatcatgaaattttctcttccgtcttccacttcaaaattttttgcctcaacaaattcgagattttggccaactagaaagtgcctaagcatttcccagttgagatgcaagaactagaagtctagaacggaactactccctcgcagaaaccaacaaccatggttcctgtgctgtattttgtcaatctcctaatctcattttgcaaaatatttctcaacatcaaccgtggaaaataactaagaccaacagaacaggtattaactattgaggccacattatacacaccctactattcaaaatttgatgttttacccttgagtttgaatctttaaactcttagtttgcataggttgtctaggatataaaattagggccatcagtaaggaaaatgcgaaaccggataatccagtaaaaggttggaatggttgagtcccagtcagccagagcgagaaattaggcttgtaagtcagaaaaccacctgtttgcaagacaaaactcgacgccaatattcctgcccttattccaattggaacagagaggcatccctgtgctttttggcgtactccacttaaactcaaagatagaagccatagccctggtaccgcccacagagacctgaaattccaccaccaattgtaagtataaatcaaacacaggaagtaatctttgtcaaatccaaatcacgtattggtgtaattttcatttttttaaccgaactacaaaagagaaaatgctttggtcatattaacagtatgaaaaagcaaacggtaatttttttcaggaaaacaaaggaaaaaaacatatcaataactaccaattaaataatcatgttagccacacctcataatgagatttgtcctttactgaccaaaatatgtaagaggagctacaaacgtactattttgtgcttgacaaaataatatactctctggaacactagtgtataaacattgtgttctgttcaagttcagtgaaaaatcgtgtttttttttcttcttcaaaaatatcaaaagaatacttgaatgcactaacaagacaaccccattaacatttaaccacttctatacaaagaaattcataaaattatactttgttgtttgttttagtgccctgttgtttaattaataccattgtggtcattgtaaattagtctggtgaatacagaaatatatgcataaccttttatcaatgtgaatatgtacaattcagaattactttatagtatacaaagtattagaatgatattaagtaagcaacaactaagtcggtctaaacacaaacaagtactaaaattgcaaaatccctaaaatatatccaaacctaaggttaagaagtgatcaaatgaagaatcatttttgaaaaactaagaaagtgagaaatgtttgtgcatttcgatttaatgtcataatttattttttgtgtaggaacatcccataattttttgaaatttaaaaaagtaattgcacaaaaaaataagcatacctttgtattaaggaaaacacaagccctgatattatgtatgctctatggtatccaagatcagcagcgatttcttcaggtaaccatgacctgaatagcaattcttctactagggcaacaccagttgccgttgcaatgcctttaccaaccatcgtaagcatttgaccatacactttgagacatgtcaacacatcaaaggaagatggagaataaggccaagagagactcacacagccaagtactacgttcacagcttgtattgataatacaagcataattcctccagctaagccttttaaatagtttagaatctgcaagcagaaggaataactatatttgagcaaagaagatgaataaatggttccatatagaaaattagcatataattggttccaccaattatttgcctctcacaggacgcaaactttaaatcctattatcaagcttctttcttataactactagcttgtcaaatttgcaggagacaatcattatgtagagaaaaagaagtgtagttatatcagaagctcacatgattgcaaaaaataaatgtggccagatacgaagaatatgtccaatccatacctgtgccaatgatgtaaaattcaggccatactgttcaaaaggattctcgtacccacgtattctcttaccccatagcataacaagtatcataacagcgacgtagagcccaattacgcaagcaagctcagcaattcttaaggggctttttgaagtccagccctgaacaagagttggaagcagtggaataacaactggtgaccataaaacaagaaccatacacacaaacccaagaatcctacacaaaaaatacgggcaaagaagtaagtcttgaaatccaggtagttcaaatgaacttcaataatgttctccaacattgctgcaacattagacattgacttcacctttggatcaagggacgctcagctatgtgaaaaactgaaataagcttattggtcaaactcatggcaccccgtataccaccccataacaaagcaagctttcctacaagcctcagaatgccacctctctgacttaaatctcccaacattgagaccagcctgctcaaaacattacacatattaatgtaaatatgaagaaagaatggaaaagcttatatatctcaggaatgtactagtaatgcagtaagacctttcttgatccactccaccatcttcctttgtgggtaccactggactagcaactgacatggctttttcagctagactggttacaaggttcccttggtgtttttcagacaccttatccttttgactgccagcactcatgtttgaggactttgatgaattaacatcgtttccattggattcaaaaagttcttgcacgttctaatcaatcaaataaaaaaatggtacaaacaaaaaaatgtcagccgaatatctgtatagtgacatgaaggaaacaaatactcttctttaaagagatgttcacaacagcaaacatttaatgtttttgccagcataaagcaaataaagtacagctaattaaaaatctcacataagcaatgactttattcagcatgtgacactatttatatatgcataattctaatagatttaaccattacctgttggttcactagtaaggcagatgcccctaaagcagcagtaacagctccaaccatgacagatgcattatttccatcatttggttcatcattttccccctgctcggggaccaaatcctcagacaggccattgctcttagttttttcagaaggtatatgctgcgcctcagcaacttcaatcttatcaagatacttttctcccatgtttccggcttcttcaatattgagagtgtcatcatcctgcagtgtagcaacactgaatttttttctcagtgcagctaatatagagccaacaatgacaccaactgggagtacttttctcaggtcactgctctcctgaacagcagaagatatagccgcaacaatgtgctctccgttaagtgtatcaacttcttccaaaatactatcaacactaaggtattcaacattggaaaccaaagcatgctccacatcatatcgaacagatagtgcgacagcatttgccacttgttccaaatcactagcaagattgggttcaaattcatccgtaccagctgcacctagcttgcgaccaacttcaaccttcaaggcatccaatattatcttctctacaaacagcgttaactccactaatatgttgtcatcaatttcaatattttcttctttgtaactagtttcaaactcttctactggttcttggtgtgtttccgaatctaatattacatacaatggttcgataactttgccatccccttctgtaggtgagctggtttgagcttctttttcaacaggagttccattatttcctggttgttccagtagtttccactgaccttcttctggaatatactcgagcaaaagagcagtagttgcatctgaatctagtgattctaaaggtatatctgaggcatgatatttatgcaaattctctttaaaggaagagctaccaaaggtatttggagtaatgtgcgatggaattttatctactttttttattttacctgaacttttaagaagaagattgctaccaactaattgatccttctgttgatttgcatccttacccaaacaactagctgtatctctgtctttcaaaacttttgtatcagtcccatttgatgatattgggtgttgattggattcctcggcatttcctagggtgctttgaaacagaagaatcacttaatttatcaggctgtgcacttcggtcattaggagtggcatctgaattttgtggttccgtattgtggattggaatatcattttgctcttccatatcttgatgttcagaatcatgtattctatcagcttgtatactttggtcgacgggagtgggcatctgacttttgtggcatattattctccattgggttatcgtttttcttcttccttagcttttatctttcatgttccggctctcatctagtttgtgatatcacaggaatcgtccatcccagtaaaggcatcgaaggcctgagaaacactaaaagttggagaagtagactctggggcaggcttagattgctctggagcaggcttgatgtccttcttctgattatcagtctcttccttttccattgattgagactcaggtgaagataccgaaggtgaaacgctttcacttaccactccagatgccgtcatcttattttgatcaggctctgatttctcttcagttttggcattattatcgtcttttttttctgccaaaactgttttcacattttggtccttctgatcttcaggattcgcttcttcagttttcttttcagcatggttattagcaattgaccctttttctgtttccttctcaacaatctcagaacttacaacaccttgtcctgtggaagaatcttcgccgatgttactttttccagaatcactagtttctttcttgagagaactgttagtattgtttccatcactacccactgaatgagattggtctgaaatgacagacttttgagagctatctgactgaggaagctctgcttccgttccacctgatggcatctgtgagcctggttgattgttagcagagctatctaacagtgtgtctgcctttttcatctgatctgacggatgatgatcctctgacaaaccttctacatttgatgttgatttttcatccattttcggcttcaatcctgatgacacgctgggtttccgagaaatattcaggagatcagttagttttgttgtgtgccttgggcacgcaaaatcccagacacagcagttgtaagcttttcacgaacatcatcaggcacagcaccttgcaaagcagtcatcactgtctctcctcgaccaatggcagttatgacctgcacacatttgatagataaacacgagtgtttagactaaagcaaacactgcagttaataatggaagttatgagctgcacacattgttcatttgaaattttaaaggttagctcatatagaatatatcaaatttgtgatacaaatgcttactaacactttcatgtagaaattaaggaataaaattctcggcaaataaaaaaaattaagaaataaaatcatttaatagtaacgtcaacacaatagaacatttttttgtttaaaaaaaacactagactctatagcattatgcgtgtataactttgtttcaataccaaaatctacaatatttaagaaccatgttacaaacttaggcttggaatttgagttgtcatggattttaccaaaccacaacatgtggttttagatgctgtaggttggacggttgtgtgagattgtggtttgcttgttcaccaatactaaataaactaataaatattactctaataataaaaacataaagagtccacaaaaaaaaaaaaaacagagacaagtaattgtagcattaggagcataaattgggaaatggtacttacctttttcttcttttcttctgttaaagtaccaggcatggttacatcaagcatattcataatgacttgtgctgtttgtagcacttcaccattttcaacttctgaactgatttcctcatcttcaaccatatctgcatcgactgtgttagtctgctccaatgcaccattttccactttctgcaatcccttatcttcaactccctgtcttttctgcaattcctttttgggtcttacgatcatgctggcagcagtgtccccttcttcaactatttcatgaataggatctgtgttatatctatttaaagaatttgaaggactaagatccaaaatcttggtatctttcttagtatttttggttgcttttccttcctttaaggttaacccttttgacgggttaatggtaatgtccacatcttcaagtagaggatgacgacctttcagaagtccaagctccacagctgtgagccactgaatcaagacaaacatgcttatcagaatacatggttcaagttatcaaatttccaactcccctcacatcgcacccaacccacagcctcttccagaaatgaagatgaattaaaaatgaatttgacatgcaacttccacccaaaatacatgaagagaaccaaatatatatcagatatagacttgtaattgtaaatatgccccatatcgcatgaggtggcatctcttgtgttttccaacttaattgtttttaacgtttttttattataatgaggcccgatttcaataacaagcaagtatattagcaacattttttttatccttttcccgttattggctctagcaactatgccaaaaactatcctaaaggtttcctcctcttacaagttctgtactttttttgaaaaacaaattttgtgaggtatgataattgacttcaaaaccaagagaaacggtgtagatgtggacaggatgcaattctctttccaacccatacagcatactccgaccaaagcattgttatgcaccacttagaaaggtttaaattctttcaattacactgtaaattcatcactgaatgtttgtaagttatttgtatcaatttgtttttaaaaaagagaatgttgtgtgtgtgtcaaaatatcaacatgctcaaatctacttttcataaagaaataccaagtcataggtacaatgatttcatatattaaatatttttatataaggtattgtatgatcctgaggtgaataaacaattaaatagtcaaatctcattacctcaatcgtaagttgctggcaccaagctatagcagacctaccaccatagatgccactagaaggcaaacacgagcacaagagcaagctggtgaatgggttttcagctatcgaactgcgtgggattgagaagagtggtgaagaaccattgtcattctgataatgaatatgttagtaagagccttttagttatgcataagaaccaagaagtattgcgtttaactacatccagacaattcatgcccaaagaagaataccataggtgaatgtggaaggccatcaaagacataaaagtgtatgcatcaatgcatgtaacagggatttggaaatttaaactttcgcattctcggtacttgctacttggcacccacgtcaacactgtctttcaggtatttccatgtagaatggaaatgaagtaggggaaagtatttcttcatgtatatctttacagtctgctgaaatgcttaagtttctagttttaaaaattctcacattgtgagaatcatctagcccatggaacatttcttgctgaaatgcttaccactttagaagaaggggtggggatgcttggtcggtaatgttttttaacagcatataagcaaggacaactgtaattttataagaacttgagggggagacaacaataaaaattaacaaaatacctgtatgaaaagaacaggaatcttcacatctccaatcaaatttcttgtactagattccgaataaaaatcttcaatggcttcaaaaccataagaaaccatagaaatttccttttcaaaatcacgaacagattttgccgatagagccttttcaacattaaaccctttagctcttccttgaaatattgcctacataatcaagcaagcaatcaagtagataagttacaagcaccattagaaagacttctgtaaattggtcggcataaaaggaagacacgacattaggacttctgcttttgaactgtcaagattccgttgtccaccttattagatctcagaatatctatcagtccactagtgagattgttatcaatagccatgtgacgagaggatcttgtggcttcctctaaatcaaatggattatctatgcatgctgcagcagtgagcggtgtcccttctccaacttcagccaggtactttgtcaacatatttgcgccataaccacagccaacccccatcaatgtactccacggccttgctttattgatgtaatgtatagctgtggagatatcatcgctgtcagcagctgtaaataacctacataaaataaagtcgtttgagaagtcctactaacagatatatggttttccaaaaacaaaaagcccggaagaaatctactgcctatagaaaggtaggataaaactttttccagcatataaaaatgattaaaattcaagagtagaatgttatgtgtatcctcattgataatcttcgcgaatatataaaataggatcggaaaaaccacgtacgcggacaaacatacaagcaagcgtactattctcacatgattcccaatctaatggtgtatgtacccaccgtatatgttcaacatactaagctcaccaaagtagttattcataacttatgaatcataagcactttcaacataaaccaatcaaaatgtaagaaataaactaataaaaaacctcagtaataagtaataacgaagcaaagctgttaccttgcagttgtgagaggtgaaccagcacaacccctgggattcatgactattggaaaacaaccactcttcaaagcgtcacaaacgaaagaccgtatattgatgtccatgctaccttgagtcgaacccggaaccagcaacagagtagtatccaatccatgctcctctctaagatccaaattcgcaggccaatccaacgaaatcactcccccatcatccgtactcaaacacactctctgatactccaatttctcctccaaaccacggtcaccgccatgcaccaaaacccgcccactatcgagcctcacatagtgcctatcttccttaacaagcttctcattcacatcctccaacaactcactccctacaaacgatatcgatggacaccgcagcaacacaaaccggttaaacggcgtcggactggtgaacataatccactccccaatatcagtaccttccagaaccctcccgtaaccaaaacgcgaagcataaagagcaaaaccagacgctaacccgatcaccggagcaaaaaactccaccgatttcgccgacggaagctgcgccgtcaacgtcagtaaaaaatcgtcgacaggccccaattgacttcgcataggaaatttccggcatcgtttgagtctccggcgacggtatactcgaaattcacgaaattggagagggtttggggagaaaaaggagcgaaagcagtactgatcacgaggattgaaattgattaaggagccgagatttgatgttgaggctaagctcataatttagggtttggaaatcagaaagacgtgtggttctgttatcatacagttgagttgagttgcagaactaagaaatgaagtgagagaaaggaagaagaaaaagaagaagggcgcgaaagctctggaaagaaaggagtgagtgggtgagaattgaatagtagaaaaaagcgagccacggtgggacccacccagtgccttcccgagccggttgtggatgtggtgaacccttttccccgggatggttcgtgtgtgtggactctggatgttgcaccaacggtccttattaaccttttttttaaaaaaaagaaaaaaaaagaaatttcctttttaagcttttcttttgtatatttatttaaattgtcgtttttgacactctattacttaattctcaccgctcgttcgtataaaaaaatatatattttacatattgggatctatttcaaaattttggttttatttagtgagggtgagtccttatgacacgtgttggaaagttatatgagatcgtcgacatagaaaatataatgtcgacacggggaatatagtcatgttatggcgtagaaaaagttgaagctaaattgacgattaagtttagggaaaataatcctttcctatagaataatacatctgcccctatattagttaataataacgctgttattttgatatgggattaaagcatagctcataattaaataagtgatgtaatattataataaaattatcttgagacttcttttattacaaataaaaaatatatatttataggacttttctaatgtgaagatttaaaaaaatactctatttatagggatttaaaaataaaatgattttcattgcattttgtaaatataaaagggggttcgtggccataaaatgtggtgtatagtatgagattggaattgctttttaacataaatctcattcatttaatgttatgtttgattgatgtaaaaaaacactcattttttcttcttttttttttt

SEQ ID NO: 218113 - DNA, 12746 bp, Cannabis indica
accaaattttatctttgattggttgaaatatatcttattttattaaatgtttttaataaacttttttattaaactttaaatcacttatttaaataacttattttattaaactttttagttttttttttttgtaaacgactttttagtttattattataaactaatttataaaaaaatttgagcaattaaatgttaaaaataaacgacagcttaaatttactaataacctccaaaaaccctaaaagaaaatcaaagtacattttagttttacataaaacttctcccatcaatttttgtggtgtgtttgatctatgagatcgtagatagataaagataaatattattatatgttttaccatcctgaattcccatttatcactcattcactcactcactgactcactttcttctcttcctttctctttagttgggcagcagcatcaggcgggaaacccactattctgcccctgagcccgccctcccctccaaaaccaatccccaattcaacagatccatttttctctttctaaaaccctaaccccctttcttctcactccaacagcaaaccacagctacgggatcaaaatttccatggcatttccccgcaaggaccaacacgacgacgccaacaacatcgacgtctacacctccgccggcgctccccttaggtaccttcctctcgaccatctctactctcacacttctccttgccttactgctaccaccactgcctcatccaacgtcatgtccaaaaaggttaaggctcgcaagcttaacgttgctgacgatgaacgtcatattgttgatgatagctgtgaaggaaaaccgccattgatcaaggctacgcctttttcttcttctaagcctccaattgtgcgcgtctatactcgtcgctctaagaggccacacccttcatcgtcattttatgattcgttaatagctcgtgtggagccaacgatgacgaagatatctggtgatgctgtggacgagggcaatggttctgaggctgggaggttgttgaagaagaagaaaaggagggcaatgggggttggtgaattaatgaaattgggtgtggactcaaatgtcttgtccagttttgataagccgcggttgagggattgccggaactataatttttgtagtcagactaattgcaagggtttgaagatgaagaagcggagttctactgagaatggcgtgaaaattctgtccgaatccgctactacgaagagatgggtcaggtaagtatctttccttagggttccaattgtgtaattgaactgctgattggagattaaaattttaaaatgtttgacattatgctattcacatttttgggcactttgttgatcgagaaagtaacgaattttgatattaataggttgagtactgatggtgctgatccaaaatcatttgttgggttaaaatgcaaggtaatcacaaattttgttttggctatatgcttagctctatttgatgcttacaattgcagttctatctgtaaatgcatgagctttttgttgagtgcaggtttattggccgttggacgctgactggtattcaggtcgcattgtgggatatcaacctgacactaatcatcatcacgtatgactatggttttattatgcttttttctgtaacattggttcttacttttgtagcttttgatgatgtgaaaaggtttttgagaattcaacttggtaaaacataatgcaggttaaatatgaagatagtgatgaggaaaaattggttctatcaaatgagagaacgaaattttacatttctcgtgaagaaatggaaagtttgaaattgagttgcagtcttcacagtgtggatagtgatctatatgactacaatgagatggtcgtcttggctgcaagtttggatgactgccaagaagttgaacctggggatattatatgggctaagcttactggtatgtgcttcttttaacattttttctttaaatatatatgtaagtccgtatggtgcttgggtttgtactgtatatgctaagatgtagtactgtgctgtttctgttgtgtaatattacggaggtgtctgccctggggagctgatctcagaaccaagtagaattctttttgtaatattacaagctgtttttcttaaagctcaaagcacgaacagctttccaatttgcttttatggtttttagttcctaatagctaggatttgtagtttctaacctcaaacagtgcacgagtgttccaattttttattttataattacaatagtttctgagtggttggtttgccataactactcatttcatttgaatatatgtgaactaactttttgttatattacaggtcatgctatgtggccagcgattgttgttgatgaatctctcattgtagatcgaaaaggcttaagcagaactgcaggtggaatatcagttccagtccaattttttggcacccatgattttgcaaggtttatttattctatttgatttaaaggatatcatttgttatttgatgtcgcaaggtttatttattctttataatttaaaggatatcacttgttttttgatgttgcagtttaattctttgttacctattatcccctcttaagctaaaatcacaatttcactttggttattcaggattagagtgaaacaggttatctcatttctcaggggacttctttcttcctttcaccttaagtgcaagaagcagcgtttcattagaggcttggaagaagcaaaaatgtaatttatctccaggctattatttagtttatgtttcatgaatttatcttttgtagatattagacttttcagttgataagcataactgttcctaaaatacattgtatgttttctacagtgcttgttgaattatcataaactatgtcctctgtggttatttgatgtgaggaaccttgaaatttgcgatactaggcttgttgaataatcatatactatgttccttgtggttatttgacgtaaggaagtttgaaatttgcaagattaggcctgttgaattatcataaactatgttttttgtggttatttgatgtggggaactctgaaatttgcaagactgggccatggagggttgtttataattaatttgggtatgaatatgcattgggtggatttaatggtttactttttatcaatgtagtgtgtttaaggacagtgggagtacgatgtttagaataaagttttaaaatttgagcacatctataacaaatatcagtgcaaaattaggagtatgggggatcatcttttgatttaaatgctggcaagagtatggggaatttaagtagttgacttattgtttaagaggatgtgcaagttagaagttattaacaaaacaattttagttgcagctatcattataattacaaaatatgaatttgagaagcatctaagtgtatgtttttctgaatttatatttgtgattaggtttgattacaattggtggtcattagtgtgagcttatgggactcataagcaataacttggccaaacgcttatagtgccacaattactataccactaataagatgaaaaagattctttggttataatactgcatagttgctgcaattttgctttctattacttttattaggcatgttcttagttgcttaaaaattacagaaaattatacagacttaggaaaaagttaaactgtgacttctagttctattatgtgtttgcagtttattgaggttcctcttaaataataaggaccttttagaaattgagtctgtaaaaatttggtactattggatgtaactactcgtaattacccgtaaccttttttttttttgtatttttggggatgttgatgtttttccaaatgctttttatcatcctagacaggttgaaaattttggaggataactttcgtactttgttgagtagtatattaatttttttatggtttcttgtgtaacggaactttacattgaatcatgtgttttatttaggtatctgagtgaacagaagcttccaaacagaatgctacgcctgcaaaatggaattaatgttgatgagtctgatccaagtggagtggatgatggtgatacagatttagatgaagactgtgtgaaggatcttggagtccagagaacgttggagagccttcgaacatcaccttatgtcttaggggatctgcaagtgataagtgttggtaattgttatttaagctctcccacgttttatgtggctttgatagtctttctatatgttgaatatcttctgctgatgcacactgtcatgttcttgttgaggagatattttgagtttcaaccatgctaggaaattattcaagcaaaaaaaaaaaagaaccatgctaggaaattatacctgcattgagtttttttttcttctttatttgatgttcttagaaaagaaaaaatcttgtagttaccattacctcttataaggaaggaaatactactaaatactaatgttaaagtaatagcttataagatctcaattcaacttaaagtgcactaaatttattgcagggaagattgttgaagattcagaatattttcaagatgatagatccatttggcctgaaggatatactgctctgaggaagtttacctctataacaggtgacataaaaaaatatttatttatgcttatttctataagttttcctgatgatgtggcttaaatatttcatcttgtgccatgtagttacattattttctccatataattttgggtttcagatccaagtacgtgtattgtatataagatggaagtgttaagagatgctgagatacagagtcgacctctgtttagagtgactttagaaagtggagagcaggtttgtgcaataataatacattccttcacacatctaacatgtatatgtttcttgtagaaagtattgctcacatataagtattactgaaggctgtagtaatttcaaatggtttttatttctgtgttgattttctttctgctaatttacattggaatgaatattaattgatttatctttaggtgcatatcattccaccatgtattaatggttcacaaacacatatgatgaagagagaagagataagttagcaagaacgtacacagatacaggaatttagagagatagaatcaagagagaacaataataatctgaaaaataatcagcccaacaatatggctatttgtagatgtgggcaagagcatgtcgtaatccaactgagatgctgataaataacgaagcttaaattcccttggaagctaattaaatgaataaaaataaataccactctaattaagttaaaccttaaggaactgaacaagtgaatttttgaaactgcagcagagagtaaccttgaatgcatctgagatatattaaaaattggttagccttgtggtttatataatgttaaagagttgaaaggagtctctttttgtctgatttcatcagattggcataatttcttgtaataatctttggcttgtgtttttaatgttagtttctatctaatcggtgtctcactatttctgtttactgtttgcttcttaaccctactttgtaacttagcttgaagtattctatgttctttcgactatgtgcccaagaggcgtagcttaaatgggtcaggcttgtggtttgcttccacaaagtttgaagtttcaatttttctctcgccagcatagcagttgctttagtttgctggtcatatttgggttaggcaagggacctagtgtttctttcttcttctaattatgtctggtttcaccaacttttctgtccttgggtgtatggtttttggaaaaacagtatgtcttacttgatagttgtccattggaggagggtccttatcatttcaaattcatgtatattatataaataaatatatattttctgaagcaggggtttcatttttatttctggttttttattgcttaagttttacaagttttgtatgttactttggtgtgtgaagtatagaaattaaaatgcaaggtcactaattttcagttcttttttcgtcattttttagttcaaaggatccactccatcttcatgctggagtaaaatatacaaaaggatacggaagctacaaaacccttctgatggtccttttaacgatcaaagattagaaagtacctacagatccggctcctatatgtttggcttctccattcctgaagttgcaaaacttataaaggtaatttgagtatgaaactatgaagtaaagatggctggtttctggtttggtgttaaaaacgcaacattgaatagatcttcatcatgtctcatcatattacttcgttggttgacttttggacgaatttatggaatggtagaacatatgtcagtaaaaaggtcacggatggaaattcactactcctctttagttccaaaaaaaaaaaaaaggaaaatggaaaaaagaaattcactactcatccatactgcttatcaattacttctggatttcagatacttcgcaagttaaatgtctatgctctgaaatactggttacttgaggtggtaatagcttaagtatccatatatgtatcatgcacatttcacatacataatttatataaattttttgtacttgtggcagaagatttatttattttctctatagtatcttgttggaactataatattttttattatataggcactataattctcctttcatagattggaatctagagaagattaagggactataattggatagaaggtttctcttctagagatcttgattgtgcaattaatatttgatggtgacctttggtaccttttagcaacaagcactgcttttcttaagtgggaatcgacagtcatgcacaatttatgttcattatttgtttgtctaaatgtggttttattttgtaatgtgtttgtttgtgtttttgtttattgtttctctctctggttttgttaacaatcagcaatataatgcttgattagatttctgctgtaagtgctcatttctagcatagtgtaattttattggcttttgcagggtttatcgaagtccacactttcttcaaaactttccatgtgcaaattagcctctagaagatatcgagacctgcctgttggctataggcctgtccgtgtagactggaaagaccttgataaatgcagtgtttgccatatggatgaggtgcacaatttctctatgttgtttttgacctatctagaagctacctagtggggttttatttatttatcttatatatgttcctcacccctttgtttgtgttgttgttatcattctttatgctctctacatgcttagttgctttgtttggctgatcgagattcttattttgcctataggagtatgaaaacaacctttttctgcagtgtgacaaatgcagaatgatggtaagtcctttctgaataagctaatctatattctgttgtcaaaatcatgtaatttcatcaaattttccgaatgttagatatttgttctgttaaacttagtgtttttctattgaagaccgaattctctgtttggtgaattattcattcaattagtgtattggtagtttgagatatttggtgattacattgttttgctaaaagccttcacattttacaggtgcatgcaagatgttacggagaagtggaaccttttgatggagttctatggctatgcaacttatgtcgcccaggggctcctgagtttccccctccttgctgcctctgccctgttataggtgcttagaaattatgaaggtttttatttgagtagaggcttaggacataattaaaatactttatttgatttttctatagggggtgcaatgaagcctactactgatgggcgctgggctcatctggcttgtgccatatggattccaggtttgtaacttcactatgtttttggctgttttaagagtaaacattctttttctttttaatactcttgaaatccttcagaaacttgtttatcggatgtcaagcggatgcaaccaattgatggattaaaaaggatcagcaaggtatttacagttcctttgtgtttgtaatctattactgcttaaagtgtttatatatatgtatgtagaaatattatggggtctgatttttctaatcatttcctataggtactattatggatttttttttttatttttgaaaataaatctttatggaagaagatattttatattaaaaagagggaatatacttctctgtactctgtattcttgaaaaataggtttattacccagtatttttaataatgttcatctagtagcttgtattttgaaattgtacatattggataccctgaagtcatatttgatcaataaacttttatcagtttaaccaaactgccctcagctataagtaattaaatatttaaatttgaatttagaacttagataattgattgtaatggtaaaattttattgatcacatatgagttcagggtaccaagcatgtatgatttccaaatacaggtaccacccgatgagtattattgaaaataataggcatcaaacttgtatttaaataaaacacagagtaccaaatgagtacaaacccttaaaaagataataatatagtatttaatataatattatgtttaacaaaatatgaaatttatagtgtattttttgggaaagcatacactacaaattagtgtatttttggaaaataatatagtgtttaatgtaatattatgtttaacatatataataaatgatttttttttttaaataaatgaaaatttaaaaagaaaagataaaattagtgtatttttaatttgccattttttttttaaaactaaatggtaaatgttagtattaagtatatccaactaatacatcagtaattgaatattgtaggttccataaaaaaaaaaggaaattgagtactgtagaattttaaacgatttagaagaagatttggaccttacctgggttaaggttaaacacttggtgttttttttttgcaagagtaaggatgtcgaggatttttcttttctatgctgctgtgtgattagaagctttgaattattgaggatcagctgaaatataatacgaatttcacatcctaacctatgtataatagattcgactatggacataataactactcaaacactttcacaaagaaagaggacataattaaattagatttattaaataaaaaacaaacgataaagatacttatagaactatggacaggagggcaataagccaaaccattttttgttttttctccatgattctgttggtccaaatgtctagcactagcacataccgcattattatcttctctttatagattacttactctctaacctcttctctttgagctggtttgagtttatcgcaactacaatggtttttcatttgtttgcttggtatgttgtgttaaattagtgtctttcttgtttaattaatttttctactgttatttaaataggatcgttggaagctgttatgcagcatttgtggtgtttcttatggggcctgtattcaagtacgctccttccttacttaattgcattttttaattttattattattgcctattccaatatggtttcccttgaattacttcgatcataccctgaaggaactcttattattatattattatatttcattcaatttatgttgttttctagtgttcaaacaatagttgtcgtgtggcatatcatcccctttgtgcacgagctgccggtctttgcgttgaggtatctttccacataagttttgtgcctatagagttgatttgtatgcatttctgttattccggcatttgttggatttgcctttaattatacattctatctcctcatagcttgaggatgaagacagacttcacctactctcttttgaggatgatgaagaagatcagtgtattcgtcttctttctttttgtaagaggcataagcagccatctaatgatcgatcagctgtggatgaacgcattgcacggactgctcaaaaatgttcagacttcaccccaccgtctaatccatctggctgtgctcgaagtggtacgtgtaattaaatagccacttgctgtgtattggaatttgaaataatcttttcccttgatcactttagttagtttttcttggctcttgaaaactctattgttcctgtctgttctctcttttgctttctttggtgtctgtaggaagcctccaaatcaatataacccacctgcctataccccactgttttttttctgagtaccctgagactgggctcatccttccatattcttgtcgtaaatcaaataactagaattaatatcaaagagcataatacaaaaaacatttccaagtatttgagaccttggatatccttacacgagtttcactctttacaaaacattaataagatgatctaactcagccactcatttaaaaaaaaaaaaaaaaaactcagccacttatgctagctctctctcttaccaagatttaaccaaataagtaccccaactaataaaaaatacaagccagccaattagaaaattaaaactcagcaacagcttctaattactttgtggcctattcttgtgcctcattgtagtcatattacgcatatttgaggttgaaactgggctttcatgtttatctatgctatattcagagtctagttttagtttttcctttgtgagttcattttgtatctgctgctaactgagatccaggctacttatgagttgcatttttattccttgtgcagaaccttacaattacttcggtaggagggggcgaaaagaaccagaggctctagctgctgcctcctcaaagcgcctgtttgtagataaccagccttatttagtcagtggtcacactcaacatggatttggtacaaattcactgccttccaatggtgttgtaggctctaagttctctagccttttaaggttaaaaattagtcagcttgagactcccaacaacatactttccatggctgagaaatacaagtacatgcgggagaccttccggaagagattagcttttggtaaagataatgattggacttatttaaagcttgatttacatgtgtgctttggattagtattccaatgcttctaacaaattcttaaagaaaataattggatatttacatcattaaatatgataagctttttctacagaaaatgatttgaaagtttgaacctcatttcatcaacaactttctttcatagattcgttgtccctcttaacattgtaaactaatttattttcttgctccatctgtgattcttgcttagtctcatcttagggtgacattttatccatctagggaatattctgataaattgacatattatatgtaacatatactgctgatggaacatgaattacataagaaaaacctattagatgtacatttaatgcaacacagatttatttttacttgagtggtttgacctggggttatttcttccattagctgtgtttatcaattagttttaaccagatgtattgctcaagtattttgtgtaccgttcttactataaacagtacgagtttattagccttgtgatgtcataagactatttgtatgaatgaatcgtgtattcatggtaattgacttcttctgcagggaaatcaggaattcatggatttggcatctttgcgaagcttcctcatagagcaggcgacatggtattataactgcaaattataatttaaagttttattgctagacatgatacccaacaagaaatgataagtttcttcttttacaggtgattgaatacactggagaacttgttagacctcctattgcggacagaagggaaaagtttatatacaactcattggtggtaagttatcagcttgtacttgatatgctcgttcagatgcatgcattattggtgatgcagttttttactttattataaaaaattaatatctctgtaattatttgatttataagtactgtgaaaaagtatgtttctgcaaccataggaaatttggtaatcattttgtttgctttcataatgcacagggggctgggacttatatgtttcggattgatgacgaaagagtcattgatgctacaagggctggaagcattgctcatctgattaaccattcttgtgaggtgcgtagtatttttattggcatgcttaagttttgtggtttacttttttgagaggccttgtactatttcccaataattttaataatcttatatcaatgataagtttttatttctacacaagtacatgaaactttcaaatcatgaaacaagcttaactatgtttgcatgctcccggtaaactaagcgtgacttttgaaaaatgactattttgctaagcacccaatattttaaatagaaaagatgacacggaccattattaacttatttttattttcatggatatgttatctatctcttttatgtgcagcccaattgctactcaagagtaattagtgtcaatggtgatgaacacataatcattttcgcaaagcgagacatcaaaagatgggaagagctcacatacgattacaggttctcctaacatctaactgctagcaatttttcgactattttcactgggtgcttagtttcttctcgtgttacaggtttttctcaattgatgaacaactggcctgttattgtggtttcccaagatgtcgtggtgtagttaatgatgttgatgcagaggagcgagcggcaaaattatacgcacctcgtagtgaattaatagattggagcggagaatgagtggtaggttgtgtttacggtctttattgttttttgatgtcattattttccgaagtagtcttt

SEQ ID NO: 218114 - DNA, 4513 bp, Cannabis indica
ggtggcgaatatggctaatgttgaagccaacaattccagctccaacaacactggtcctccaccaggcttctcgaatgcaaatcgatccagatcaaaggaagatgaatcctcaccagtgtacttcaatcattcgatctcgattaagttgaatgaccataatttcctcctatggaaacaacagatccttgctgctatcagaggcaacagattgatgagatacattcaagatcatgctcctcctcctcaatttctgagtgaagctgatcattctgcaaaaaattacaatcctgaattcttggaatgggaggttcaagatcaactgttggtgtcttggctcctatcctccatgactgaaagtttattgactcgaatggttgggtgcaacacagccagacagatctggagtgccttagaaaagcactttactcttcaggtttcatctaagatcttggagttcagaacaaaactccagaatctcagaaaaggatccttatctttaaacgactacctactgaaagtgaagcaacacgttgatcttctggcttctgttggtgaagtcatgtctgcgcgtgatcatatagctgccatcttcaaaggactgccaagcgaatatgatacgttcatcatctcgtcgaatactcggattgaaggatactccgtagctgagatagaagctctccttcttgcctctgaatccagaatcgagaagacagacaaagagtttgatctaaatgtcaatcttgcttcaaccaatgctggatctgatctggaaaatcagtggtcatatgaagcatttctagctcactacaatcgaaatttcaggggctccaatggagcccctcgaggtcagtttccctacaacccttctttttatccaccaggtttttattataacagaaatgctaattctggctttaattcccgaggtggatcgagttctataaattctgggaggggaaattacttcaatcaatttggaggcaggcctcaaactactccaaacaaaccacaatgtcagatctgccataagacaggacatttggccttggagtgcttttatcgattcgacaaaagctatactggtgtgattcctacttcagacagcaacaaatcgatgcaagctcatgctgctcaagtgtcaatccccactcaaagtacagataccaaatggtacccagactcaggggccacgaatcactgtactccagatgttaccaacctggttcaaaatgcagattacaatggtcaggaaaggctatatgtggggaatggttcaggcctcacaattcaacacactggtagtgcattttttaaatctcagcaatctgacaaaactttggttcttaaaaatcttttgcatatacctgaaatcactaagaatttactaagtgtttccaagtttgctcaagataattgtgttttctttgaatttcacccgtttgtttgttatgtcaaggatctgaggaccaaagtcacaatcttgactgggacactccacaatggcctatatatttttgatcaagatcaattccaggtgctatctcacattcccacatcttgttctacttccaatctgcaaaaccagcaacatgcctgtcttgtaacttctaatcctagtccttctgtctcgaatagcaatgcttgtaataattgtcatgattcatctgtgtctgtgtttgagttgtggcacaataggctaggacacccctctgaaagagttgttacttctgtactgaatgcttgtaatatctctgttagtaataaaaataccaattctgtttgtcaagcatgttgtcttggaaaaatacacaaaatgccattcccaaaacagtccacaactgtttatactgaacccctgcaactcattgtatctgatctttggggcccttcatatgtcacttcacacaatggctataagtattacatgagctttgtagatgcctatactaggttcacatggatttatcttctcaaaaataaatctgaagcccttaaaacttttcaatttttcaaagctgaaacagaactccaactaggtaagaaaattaaggtgcttcaaactgattggggtggggagtttaggagctttacagaaccactcaaactatctggtattgtgcatagacatccctgtcccactactcatgagcagaatggccttgtagaaagaaaacataggcaaattgtagagcatggactgagtattcttgctcaagcttctatgcctctcaaattctgggatgaggcttttcgatctgcagtatatctgcataatcgattacctactcctgtcctaaaacaacaatctccaattgagaggttattcaacattaaacctgagtatagtaatctcagaacctttggttgcctatgttatccaaatattagaccatataacagacacaaattagattttcgatcttcaccttgtacatttgtgggatatagcctgaatcataaaggctataagtgtctagatgcctcagggagattatacatttcacgtgatgtaatctttgatgaaaccaaatttccatatgcttttcccaacaatgaaccttctgctttgccttctagcagtgaggaaactatgccctctgctactattccaaagtctactactcagtatactgcagaatacttgtttccttctaatccacctgctctcacacctgaaacacctgtttatcaacctgttgccactgttgagtcacctccacaactccaaaatactgtctctgtcattccctcttctcagtccaccactcaattttttcctgatgctccaggtcctggtcttactcttgagtctcctccatcagtttccactgaacctatactaccatctgtgtctcagtccaaagttccaataacaaacaacattcaatgaaaactcgagctaagtctgggatctttaaacccaaagtttatcttgctgttcaagaacccactaatgtaaaaatggctatgcaacaagaaaagtggaggcatgccatgtcagatgagatgggagccttaagaaaaaatgtcacttggacatatgttccattaccagatggaagaacacctattgggtgtaagtgggtctacaagatcaaacttaatgcagatggtaccattaacaagctcaaggctcgattggttgctaaaggctttcatcaacaacctgggtttgatttcactgagactttcagtccagtggttaaacctgtcaccataaggattgttttgtctctagctttagcaaaaggatggtgtatacaacaactagacatcaataatgcatttttgaatggtgatcttaaggaagaagtttatatgactcagccccctggtttcgagttgccagatgctccacacttagtttgcaaactcaataaggctatctatggccttaagcaggctcccagggcttggtttgataaactacaccaatgtctactctcttttggttttgtctcctcaaaatctgatcacagccttttcatacaacatacttctcaatctatgatcttgttacttgtctatgttgatgatatcatcattaccggtagtgatgctactcaagttgctgctcttattcaggccttggatagcaaattctctcttaaagatcttggccaattgcattatttccttggcattgaagttgaacatacagagacaagtcttcatttatctcaaggcaaatacattaaagatttgttgagtagggctcaaatgcaggatgccaaacctgcccctactcccatgaccagtggattaaagctttctgcttttcaaggtgaccctgttgagaatcctcagcactatcgatccatagttggagccctacagtacttaaccatcaccaggccagaaatctcatacagtgtaaataaagtgtgtcaattcatgtcgaatcctcttcacacacactggaatgcagttaaacggatcttgagatatctcagtggtaccatttctcatggtctgactctccaaagaccaacagaacttgatgtcactgccttctgtgatgcagattgggctagtgatcctgatgatcgtcgttcaacatctggtttttccattttctttggctctaatcttgttgcttggcagtgtaagaagcaacacactgtttctcgttcaagcacagaagcagagtacaggagtttggctcaagttgtgtctgaaatctcttggatacactctcttttctcagaaattcatgttcagattcctaggtcccctgtcatctggtgtgacaacttgagtaccattcttcttactgcaaatcctgtcctccatgctaggactaagcatattgagctggacttatactttgttcgtgaaaaacttgctcagaaacaggtgcgcattcaacatgttcctgctgcagaccaaatagcagatggtttcaccaaagccacatctactcctcgatttcttttgtttcgaaccaaacttggcattagtccatgcaccaattccaagtttgagggggagtgtcaagacagttataaagttg

SEQ ID NO: 218115 - DNA, 7905 bp, Cannabis indica
atttttgtaaaaaaatagcaaaagttaatctatcatataaatttcccatatttttcactagtttttaaaaatattatgtatttttaaataaaaagttaataatttttattttttgaaggctcactcaatctcaaggttggtgttggctttttgtttttatttttatgaaaaattaaggtggcgtttggttgaatgtaatgaaatggaatgaaaagaaaataatttccatttcattcctttgtttggttgcattttaaaatatttgaatgacattttaaatttcaatagaatgttcttatttttaatttataaatgccttttttcaaaaaaaaatggataaaaagaagaaaaaaaaacaaaaatatggggacaaatatcaaacataaataaagttaaatatgcacttaaacaattagataaggttaaaacttagtaatattagctctaatttttatgataattttttttaaaaaaaaataactagcaaattatatttcaatcaaataatttgtccaatataattaatttttaaattattatcattctctattaaaaatttaattacatagtttgtattgctaacataaaagaacaatggccagaactttgttcttcttcctactttttttttcaaaagataaaattacttggccagacatatcaagtaaaattaaattagaaagaattggaattggattaagaaatataagaaaaataaatgaataaattatattatatatgatgatatttatacaatcctctatttcattcaagtttgtgttggaattgattttgattaatgcagaaactcatctatgtttacatatagaacaaaaacaagtagtttattcagttatctcaattacacatactttatcaaaagaagaagcatttattgagctatatatagaacaacacagctccaatgaattgggattggaggaagaggaaggcacaacatcaatccactctttctcaaccatctcaacatgtgaattttgttttgggatcgccacaaaatcgagtttttccatctgttctgtcagcgtcgtcttcatgaagttcatcgaaaatgtcatgttataactttcctcgaaagcatttgcatctttcggtagatgaatcccaatatctgccttttgtgattcaacaaacccgagaagtagcgggtttagaccaacatgtctttcaccggtgttcaagatctgcaataacaggaaaacttgatgacaaaaatcgtaagcctcgaattgtactagattttagaacagtttattttgttctaaccttaatgtactcgatgccaagttcgctaaaactatctaaaatatcttgtgaagaaagcaagctgagagttcctcccgaaccaacgggcgattgtagcatttcccaaggtgatttcatcagaattttatgccttttgttttctcccggggaatcgctaacaactgggagtttctcttcctctaaaaaccgtacctgtaatcgataaagcaaagacaatagaagttttaatacattttgtactcacactcgattacacgaagaccagaggtttttctttagtgaattcgaaccttttcagagtcgaatgagaagtgatcgttgtctgcaaatagagttgctaacgattcaacctcgccagttgagcagaccaaaatcaaaggcaccgttgtgcggtcttccatctgcaatggacacagatgttatctaaactgatttatatattatggacaagcatttgatgtttatgacaaatattttcaatcgaaaagtaaaagaatgagtagcacctttatgaatctctcatcatcaagtaatgtctgaagttgggaaaacgatgagttctcgatgattttcgagttcacaagatccaagtcatcagccaaaccctgcgtgtttatgtcatttaaaactaaaacaactgcaactttgccttccgatatgagctgaagacccttctctttcaacgggaagtgtgcaccgagcttctctttacttgcagttgaatcgagacaatcctctgatatgaccaatgtactaaatttctcttttctattaccactgaatagcttgttaacattcaatctgatttagaaagtaaaaagaaaaaatcaatagatcagaccaaaagcagcatattcacaacttcatggggcaaccgctgcataacctgggacccgaacccaggacctccaacacacacgcactctcttatgaccacttgagctatgtttatagctaacatttgtgtcttacccgaaaattcggttagatgatttcctatttttccggtttaaatgatatacaggaacttttttcactcatacacaaaccacacaataacaagggaaagagagtaccttttaggagtttcaatgtttttaagcgcaagttgaagcaatttagaatttacaccatcaatctgattagcaagtaagctcctttgttctttctctccgaatcttaatccatgaaatacatgtttttgctccaattcaattagtttcttctttgcagctatgagacgcttttggtttttcttccgttctttccattcctgaaatgtatcagattatgaaaagctcaaacaccttgaattcaagagatctattaatcaacaaaagtaaagatggttatatgaacatgataaaatatcagcaaaggagaccaagagagtatgcctcacaagttggcgcctttctttcttggacctctcatcgtaacgcaagtttagttcaaggagtccctttggaggcgttatctgcattactctttccttcaggtcaacaatcggaacaattggttcgacaaatggtacccacacacgatggccggatacttttgttccttctggcttttgctttccagttgcatcaactacattaaacgatgaatcaagcatgacctctagaagatcactggctccactatcgaaaatattaacaacagttccaacatgttcaccagtttccttaagaagaactctcatgccaacaagatcccgagtatagaattctccttcctccaagtctggtcgttcttcttcctttacaagtagagttgacccaacaagctgcttagcctgtacatatttttaaacactaaacataaggccatagacatagtgccttgacactgaactaaaaatttgtatttcattcctaaccttaaaactatttttgaagttaaagaaaaaattatcatgaactgaagagaattgtcgaaatctatataaactgtaattcttttatcattcgttatacatttcgaaaccctccaaatcgtaatcctatattattttgggagcgaaaaaacaatagcaagcaagccttgtgggatcaaaccataggctagaacattttagctacccctctcgggccatagtcatccaatatttagacgatgaattcgaccgaaccagcaaaaagaaaggaaaataataggattgctcttttacctggtccactgaatcaattcctttgaatttaagtatccaacttttctgaccagggtgtcctcctcttccctcctctagctccacttcttgaattacttctctgcctgaattttgttgtttcaaccatctcctcccaggctaaaggaaaagcatcaatccatcaatccaaaccgaaataagcctttcaaccacggtttacaataatcaaaattgaaagtttaaaatccatactactttgatgtataccttggaaaaacgcaattcaggaaagtcagtgctgggtttcacacgagtctccccttgaagcccgtgaacattgcatatgtatccaacctcaacgaatcccaactcggtatcagcagtttctacctcctcttgagtagctgaaatgaccaaatacaaaataagcaaacccattgcacttataagaaagcaatttcacatattggagtggaagagcatcatgtcactatcatctaaaaacaacaaaaacattcaattgcttccacattttaaacatgtgaaaatcaaatgaaagcattgtcaagaactttcagttaaaaagtttcccttcctcaaaaagctttttataaacttttgtgtaactgaatcatcctaagcatacaattacacatttcataatgtcaagtttaagaatattgctatcaagtatgttgccttacaacacttgatgcacctctctatatgaaaagtcactaaatttaagctcttataagtgtgttgggaaccatattttccctatagcaatactccaagtttatagtaaacttaaataataagtaaccttgtaacaataacaggaaactatgaaaaggttgtattttttgaggtttaactaaaccccattaaacaataatgattctattcatttcctcagttgagataaaatcagaactaatgtttcactaaatcaaaaactaaaaccaaatccaatagccaaaaaagaaaaacaacttcatagttatcctaatgaaacaaaaacacatataatttaaagataaagttccaaactttagggaactttaactaaaacccactaaagctatgtctttccacaactgaaaccaaacaaacccatttgcaacaaaagctaaatagcttgaaaaaatacctgtgctttgcagaggagagaggtgcaaacggtgaatttgaagttgaagaggagttgaaggtaggcgaagaggtgaggaaattgggagtgttggattgggatgaattcgaaatgaagtagttgggagtcgatgagaggtgggtatggctgatggtatggaggaaagtgagtttgaagaacagagaatcgaagctctctgcatatttttttctgggttgggttttactgaaactatgcagagttggagaaatgaaagagtaagtacatacaaagaagaagaagaagatattattcttatttttattttttttaatgtgaaaacataaattgtaaattgagaattgctaccgtcaatctttatgctcgaaaacacattattcgacttcttttcaaaaataaattaatagcgaattttattatagttataaaatattattttaaaaataaaaaaaaattataaaatacgattgtacaaaattttaaatttttttacgatttttatgatttgatttatagaaaatacaatttttttatgttatactattcttaattttttgttatttgtatgttactttttgttgttgttttgatgttatttttctgctacttttatataattttcttattgttttcatgttatttttattaaaaaacagtaaaaaatataaaaaaaaagaaaaaaaagaaaaaaaaatctttaaacgtaaatatgtaacttctttttcaaaaaatggtgttgaatgtaattgttgactgaggttttcggcaaccaataaaataataataatctagagagctgtaagaaattaagagagagatcttttacgtggttggggttggggcgttaatgagtcttagtccacgacccagaattctcgacccctctttaatgagctttgggtggtatttatagtatttttgcggggtgatccctagaattaaggtacatgcttttctgtaactatcagtaaagccacacattcccaatgaatttatcataggtaatgcatggtctaatccctaggttctgtagggattttataagggcagtcattaatcccttttgactgatgtgattccacacagagtagtcgtcactaaactttattgatcatagcctagtaggtacagattgagggttgtgtcgtcagactttattgcgtgtggcagttctaatacgctttctctcatgcggcattaaatgcgagatgactgttcggatggcatctgacaccctccggagatgctttgttgccatcctgctctccgggagcatatgagacttacatgcattctccgggagacaggcctaaagtaatcctttgctttaagaagtcttcgctgtttaattcaaatgctaaacccttcccatccacgtgtcatcatccggttggtccacgtattttgggcaaaatcaggggcaacagtaattatcccaagaaatattatctcaaaaaaattttgaaaatttttgtaatagatttgaagttttgaccctcatcatacataggcttagctaagcctgtgcctggaatccacctaatctaggggcaaaaaaaaatcattttaaatttaggtattcttttactgatttttaaaaataacacatttccttataaataagggtccataaatttatatttcctatggcttttaggatcaattctgaacacgtgcggtagactagaatatcaaaaaatttgttttcagtaatgtaactatttagaattaaaatatatatatataaggatgatattataactataacgaatatcaaaaagaaattgaaaaaaatattctgacatgtaatttcgaacgtgaagattgactaaaaggttttaataagaggttgtaattaattttctcttacaaatatacacgaaaaatgataattaattttctttgagtaatttgcaaagtttaactttcaattatagataaatttctaagtttattttttaacgataataatacttaagttatatttatataactcttgagcaatgttttacagataatcatataaaaaatcaagagccaaccctagagacacccatactactggtcactcgataaaacaccctcatctcacctcagacatgacacctcagagtagggagcacccaccaccacgacttgagtcaccggaacactccaagaaccctaaagccatcagccacaccctaaaatgactatgagaaaactccaagaccaaaatatacatcacattaaagaaaggtgatgaagaagccaaaagggaccttacgataaacaaggtcaatgagaataatatcactctctcattattgtaatttcgatgttggattctctaacaattggtaattttataaccccacaaaattactttattattgcatttatcgataaagaacaacttatatcttagataattctatgctttaacaacttaaaaatagaacgaatgacttagtaattcttcaagaaaaatagtattacgtttacaatattccaacaacagataaataatattaaattagacaaatatttcaatcacgacataccacaatttagtgattaaagggtgataccggtcttaaggtatatgagatctaaaaaaaaattaaatattggaatctctatatatattgtttaattattatcaaattaacatttctagtgccttggtataattgtgaagtttttaaaaactcttttaagagctccaaagtttaattatttagctacacattaaatatttattaaaaaaataaaaaagtaaagattgaaaattgatccattgacctattagcttaaggtaatactctttcttactacaccggataatattggttatattttcttactatttaaaattttatctatatattaatactttttcacaattttggagcttgagcattcagagacccgaggcgtgcacttgactcacctaccctcaaggccggtcttaagagggtgtttgttttaagtgttatatgtgagtagagtgcataccaaagtttaatattttcctccatttaaaacttaagtgatgtttattttggtgtaatggtaattgtaatagtaatgtaatagaataggaatcgtaatggtaattaattacaatgtttggtttgttgttggaatgagtattataattaaaattattgtgtttagtttggtatgagaatgtaatggaataaaatgtatattgaccaaaatatccctattacttttattttttataattataaaatggctaattaggattccccctgaactttaacatgtaccaaatcatgccccctgaactttttttgccattaaaaat

SEQ ID NO: 218116 - DNA, 2217 bp, Cannabis indica
aggcagaacccaataaatgtcataggtagggagtaaagatcctatatgtattcaaattcaactatacaatccaaccaaacatggcctgagaaaattactaaaacaataatgagaatattactgaaaatgggttattaaaaacaatatgttacttactttgacagcttcagcaaactggtttattatatcaggaatttgtagtttgaactgttcaacagtcattgacctgaacccagcagcaatatcattttggccaatatcaaatgtgtaaagagcctttgagaactcctctggtcttggcagatttcttctatgtgagcttttgttgtctataaacacacataaatatcaaaagggtatcataaaaaaacaatctttttcactacccttcaatttttttttccttaccattcttgaaaaaccaaccagtacgtgacttgaactgagtgaactgcacaacttgaatatcaagagaaaaagggctgaccccattaaggaaaactgactcatttaaacgcctaatggttgatcctccagtggcaaagttagcaccatgcttgaaatttgcaccaattgagtttaagtatgcactcaagtaaggcaatccaagctcttttgctgcataaaaataacatctttttttcattcctgattagttttttgttaccttattaaacttacataaaagtggtaacttttgaagaggagttagtagttgtaatggtagtgagtttttttaccaataaaatcaatgattaaacgaccatcacagcctcttccagatggtctatggaagaaagtttcaccacattgaggagccatttggtaaaaagcagctgctataccaccagtatctgaatttgaatcaccaaagttgtaaattgcaggaaatttacagtaccccattgaatcatctccttcaacactcaaaaaattaacccatgtaagtaaaaagctagtgaacaacaacaacaatatacttgctctaaactccattctcttcatatattagttttggcttctcatttattatatattacattaaattaaagaccatgtttgctcttttcaaaaaccaacaaaaaatctcaacatttaaaataaaaataaaaaatcccatttgactataataattaattaattgtttgtttaacttacatttgtcggtgtacaacttagctgtctttatttgctaaatacaacctagctagtttgcagttacttggttcttttcacttatctgtttttgtatttgtaaccatccacactacctactagataaggcaaatcataatcttcaaaattaacaagctatttagtgcagattgaatcattatacctataaatatagttcactttttttttttatgtattgattcctgtgatggtgcctaactttatggcttagaaaaaattggtcctatatctcatggttttcttaataatatatctcttatgagacaaacactatttagtgggaaatgcaattgataaagctaattaagcattatttaattgaatctatttgactttaatgatctcattttagtcccctaaaagatggagcctttttttctagtgattgagaagaacataattatgtgtaatgtacactaaaatgaggatacaagaacttgagttgtccaccatgtacataaaagtatataaatgcccatagttttaggagagattcttttaattattgttaaaaggaagaaaattgtggtatggttcctctaaatgaaaaggtgtccaaaagttatttgtttatagaaagttagatgtcattcggtaaagcgttttcggaaatctaacttgtctatccggaaggagtctccggaaaaaactaatctttctctgaaaaggagttccagatggctaaatgttctttcctagaaggaagtcccaaatagtcgactctaactatcgtttttcccatctaagaagtcccttcagcatacgtttcagtgtatctttcaggaagcgtttgtctcattcaaatgtactttatcttaagttgtcatggagatcacattatgaggagtatgttaagtttgttaagtagtaactgacttaacaagttaaattattgtagccattgaccttgggatctatatctcatatctatacagggtcagcccaagctttgggcagcttgggccgttacacaaggccccccatttttaaagacccattttttatagaaaaagttttttt

SEQ ID NO: 218117 - DNA, 5063 bp, Cannabis indica
taaaataaaattattaaaatggagtgtctttagaaatattttggggtgtaaataaaatttccctatatatttatacagaatcactaacaacaacaacaacacatatgcatatataatatcttcttttcagcctacgaacactatgaaagtttccaactttaacgatttaaaggagcaagacggaacaaaagtatgcgataaaaaaatatcctaattcagaggatttcctgcgattaacaaaccagtccctgctttcttgcaatttttttttctttctctcgaatacgaaacgaaacagcgcaagatacacccgatcatgaattaagactgcaagcggtgatccacctacaattcaacatgtgagaaggtttcctgtgatttcagccatcttcgtccctgtgttcatacgattaatataaaaaaatctgagacaaaggagaaattaaagttgactgaaaccatttagagaggcaaattaatgagttgtttctgctactgaagaattgagaatagtcttgtcttttgcatggttgtgtagtttttttggggtttcttggttgtgtattttggtgttgtttctgttctattttgtttttctttgattttggtacggtaatggaggaattaacaagggtggacataactattgcggaagaagaggatgttgttttgtcctacgatgtcagcgctacgagggatgatgactatgacgataggtggtgtattgtgggaagatttttgactgagaggccaatagattttaaggctatgcaacactagatggcttcactatggcagcggggaaaggggatgtttgtgaaggaattggacactaatcgatatttttccaattttatcatgagattgatatccagagaatgatgtctcatagtccttggactttcaataagttcttgttgatctttagaaggttgcaactgggggaggatcctagattgattccattgaatgagattgatatttcggtgcaattgcatgatacccgaacaggatttaaaaccgcaactattgctaaggatgtggctaattacattggtaagttcgttgaatcggatgaaagaaatttcatgggtttatggagggattatcttcgagtttgtgtcactttggatgttacgaatcctttaaagagacgaatgaagcttcgtaattctgacgggatagagttttggactaatttcaagtatgaacatcttctcactttctgttttatctgtggaataatggggcattcggatagattttttccacgttgatttaaagttggagaaggtcagttagttaagccgtatggggaatggatgagggtgaaaccacaacgtaaaaattacatgattggggcgaagtggttgaagcaatttatggttgccatggatgatggcctaggtgcgaacgttgctccaccagtttctggatatcggtcgatggcgatgtcgacgatgagtggtgggagcccaagtgctttggcaacatcgggtcaatctggtagatagatagggagatctaaggaagttaatgggattcctatttctgtggagcaaataatgctaacatataaaaatcaggaatcatttaataataatatcgatgatgaggcttgtttattggtggttgactcgaaaagaagaaggactgatttggaaggtgatgatggaatccacaacatggatgatgtggcagtgggttaagatgttagtgggtcaaaaaacttgaatttggtgggtgctggtatccaggcccaccgctcattatgaaaattttatcttggaattgccatgggcttgggaccgatgggctttacaattccttaaggatcttgtgatccaaaagagacccagtattgtgtttctctatgacactctttctagtcgttcgcaaatggagagagtgcgggctatgttgggctttgagggaatgatagctctggatgtggatggtagaagtggtggtattgctttgttatggaaagctgaagaaggactgtctttgcttggtttttcgaatgcctatattgatgtgcgagttactattgaagggatgaatgagtggcggtttattgggatgtatggtgaactgaatagaagtcacatttttctacttggaatttcttgcgtactctggctgctaactctactttgccatggtgtgtgatgggtgacctaaataatgttctctcacatgatgataaaaaagggggtaatagatatcctgaatttttaattcaaggttttcagcaagctttggcagatagtggtcttcaggatatggagttatgtggctatccttttacctgggagcgtggaaggggtactactcattggattaaagttcgattggatagggtgttagctaatcttgcttggttgaatatgttctcatctgctaaacttcataatcttgaaacatctacttcagatcatgccccgattcttatggatttggttcctactgctggctaccattttactaaacggtttcgatttgagaatgcgtggttaagggatcctcttcgctttcaagttattaggtacaactgggagctttgtgggaatgatgaggttacgaataaagtgagtttttagggacagcagttgcgtgtgtggggaaagatgttcactggcaacttcaaagatagaattaaaaagtgtcgcaatgaggtgcaaaggtggaagttgggtcgagatgatgtctcagttgcaaattataaacaagtgaggaagaacttatctgaagcttatattcaacgggagatattttggcgccaaagatcgaagcaattatggttgcaagaaggggacaacaatagcaagttttttcatgcctcagcttctaatagaagacgaaataattttgttacaaagcttaaggatcaatctggtgcttgggtggagacaggttactagcagcgtgcaaaatcgtgtttcttctgagcaaaatactgagctgctgctgccagtttcagaggaagaagttcgcattgttgtttcaaatgcatccggacaaattccaagcctcgatgaaatgacctcgggtttttttttcagaagagttggccgattgttaaaggtgacattatcaaaatggtaaggcagttttttcaccatggcttatttccaccagatctgaataaaactattctggttttaatccctagaaagaagcatcctatggatatgggggacttgagacccattgctttatgtaacgtgttatattagattgtgtccaaagtggtggctaatagacttaagaatgttatgccaagtattatatccgacactcaaagtgtattcttacaaggtcgtctaatttcaaataatattatgattgcttatgagattatgcatcatttgaaaagaaaacgaagtgggagggatggctatatggctctcaaacttgatgtgagtaaagtgtaggaaatcaagctagctgtaaattagttgtaaatttacatttaatgtatttttcattcactctagtattactaggtgttcacattgtattatatataccctttgtatatactaaaatagatcattagaaataaaaagcttttttctctcattcacttcatggtatcagagcatttgaagcttctcaaacacattattttctcacccctttctttcttaaaattagggttcttaaaattaggatttggaggctttatcctagacgattaattaaaagtagttttctattctcagctctgacccagagtgcttgtcccacctccgatcggtaaaacccaaaagtctagcgtccatctgggctgcgcgttggccctacgtgccacctccatccgtcgcgaccctctccatgcgctgtcgcgtgtatgcacgtggcagtctccagcgacattttttctgcatcgtttctctcaggtttcttcatctcaaactcttctccaactccagcgacattttttctagtgtcctctcactctattcgtctccactggggttctatacttgtgttgccttggtgtctttctccatggcagaacaaaactcattaagcgccatctctttagtctcaagacaatgcaatactcatgcacttcaggtcattcaaatccctcaagacccttggattgtggattttggtgcttgtgaccataattgagtagtgatcttaattgtgaagttaagtttgctgctatgttttgtgttttttaggatgtggaatcggggaagatgattggcgatattgagttcagtaagggcttgtgtctgctaaaaatcgacaaccccatgtttaatcgtggaaatcgttgttgtttctcctaaggtcaatctctttgttatggcattaccgtctaggtcatccaaattttgtatatcttaaacacttgttcccatccctatttgtcaatataaatcctcagtctctcaagtgtgatatttgtcaattttctaagcactctcgccactctttcattccaagaccttatcaaccctctcacccattctcactcattcatggtgatatatggggaccatccaaattcaaaatatcagtggagcacgttggtttttattactagttgatgatcacagccgcctaagttggacattcctcatgaaagaaaaatctgaaaaagtcatatttttcaaaatttccacaaaatgatccaaactcaattccaaaaaacatccaagtgttaaaaaccgacaatgctcgtgacttcttcaattctgtacttggatcatatttgcaatccaatgggatagttcatcaaagttcgtgcgtagacacaccacaacaaaatggtgtggctgaacgcaaaaatcgtcatttactagaggtagcccgatctttacttttttcatcccatgttccaaaaagattttggggtgaagcagttctcacagctacctatctcataaatagaatgccatcacgtgtattaaaattcaaaactccgctgcaaatcttcctagaagcatatccccactcacatcttgtgtctcaaattcccttacgtgtctttggttgtgttgcatttgtccatgttcactcctcacatcgtagcaaacttg

SEQ ID NO: 218118 - DNA, 3500 bp, Cannabis indica
aaaaaaaaaacaaagttcggttttaggtagtttgaaccgaccgaaccgcagtttacatcggtcggttctaaggaagtttttggattggtcggtccgttttcggattgcaccaatccggaccgaaaaccgatatttggatttttatatggaaaaaaaccgaccaaaccggccgatgttcaaccctaagtgcgataataagggataataatggagctttagttgcggctgaatccctaggcttcttttagtgatgttggcggaaattgctgctattcagttgggcattgatctggctttgcgttggtcttgcttggatgtttgggttggagctgactgtcaatcggttgtgaaagctctgaagaacggagagagtttaccaacggactggggcaacttggttcataatatcctaaggatatcagtagcaattttaataccatagactattttttatcttagaaattgtaataaattggctataattgtttagttaggtgggctagattaacccaagtgtctaatgtgaacagatgtttcaccttcttgtgctactatcatgttagcagatatgactaagtgctgctagtttgtaattgttgttttcttaaaaaataaaaaaaataaataccatgcaaaaatatcttgtctatgatattttttttttcaattttatgaggatattgtcgcagaaaagtcggcccacatacttacaaacctgcagatttctgtaagggtacagtcagctttattacattagctagggaccactttttatcacctctgaaactcgaccttacttcccaacaaccaatacaagactattgtttttctcgtattataaaccattaacaataaaaataactatatttaaacgttggtagaaatttagaagaaacttttattattcgtataaaatataacttggcaatgtaatcaaacatacatgatcaacattgttattaattattcttttgttctatgatataattataaaatatgtttcatgggcagaaagtgatgagataatttggtccgccgaagcaagtaaaagtgctggtcttatcatcataagcatagctgtaagcttcagggcattgtgccttgaagaacctagaaaagtcacttggaggacaagtttccggcttatcatgagcacctctacaacagtacttgtcctcattaaacttggcgcaagcactaaaacacccaacgacgtcgtttccagatttgaactggagctgacccgggcaggcagcgttgatgttcgccgggcaagatgattgcttgcattcacctctaccgccttgtggcacaaccgaaaccggcaagttgaacccatccacgttgctgacatcatagaaatcctgtcctccgtttccttccacggtcagttcgaccagagtggtcggtggggctccgcctgcgccgttgcactcaaccttgccggacccacactcgccgctggcacacgtgaacctgccagaattggttgagcaacggtctcggccccagaagcggcctgtccaacgtccagctgggatgtccacggaacggctagctcccggtgctaactcgaaaccagtggttgagagttggggtttttggtctccggttagggttgctggccagatgggtctttggcagttgttttttatggtaatggtagtcgcatttgcccctgtgatatatatccatgcaatgcatattataacgtataatttataagtgtatataaaactatttctgaaaaaatatatgtatatatatgcttcaacttcaagaaatatatgtaatcagcaagcacgcacatgtgctacatttttaaccaagagaaaactgatcagcaaggactatgtattattatagatggtttatcattattattacctgcaaagaagagtgcaaaagcgagcatgaagaacactcgagtattcatagtgaccaaatttagaggatacttagaatatttttgtttgatgaggtgtgagaatgattattgatgggattgggagaaagcaaggggtggtatttataggctctatgagccctttctaagtttggtattttaatttttttattatatataaatttaatttgttgcgggtctaatttgctatcttgaagaaaattacaaacaccatgttggaaaaaataacagcacatatatattcagttattcacgaagtggtcgatactcaataattaatggacaatttaatcgtcaaatatatatatagttttctgtgcaaaaaaacaagctactctcacgtgaatttattagaacattcagcgccattaatgttatctggtaatattatgaattcaattgtattcttatgtgcgaatttgagagtcttgatctcttaaattaatagggagaattttcaactaaaaactgagattttggtatccaacctcgttcatattattattgtatttacactacgtacatcttcatcttttttatttaattttttttctatctttatttgtaaataaatcccgatgcacaatattacataaaataatattaatttaaaattaattcttattaaaatcacaaaaaaaaatcataaattgtggaacagaaaaaatagctaagagggtagagagccacttaaattctttttcgttgttttcagtcaacatttacatatagagagagccatcatatattttagttaaaatattaaaaccagatctaatatatttctactcatagtgatttttttccagcactatagacgatcatgattatttttattttagtttgggaaatggaacggatagtgatgattcgtaaatcaaatcaaagaacatattacaacatgattaatgacttttatataatatgaagaaaagagattaatattaatttgcgggaaaataaatatatgtcaatagtaagttcacaaccataaataaataaataacatatacatttcaaaataaataaataaaaaaaaatatgtgtccaccgtgagtgacgggcttgcatgttgcgtataatagggggcgactaaattgctgccttagacttccgtctacgcttgtacatattcgccttataatatctactaagaaacaaatttgtttgggaggttgtatttttatttagtggttaatttttttttttttgacaaagtgattataatcactcatgaatttacgacgcagacgcctgccaccggcgctggaacctcctcgaaccaggatagctcatcgtctaaccgcagagcatgctttgccaagccatgagttgctaaattctcagaacaaaccacatgggacaaaactgcccccgaaaatttagacaataaagctaaaacatcttcaaacaacgctccaaacttgttgaaatacatcttttcgttgttgatggccgtcaccaaagctaacaaatctgaataaattgcatgaatcagaaaaccacacgtatgagacaaattgagtccaaccaacagggctaaatttcaacctgtaacactgaaatttcacct

SEQ ID NO: 218119 - DNA, 3919 bp, Cannabis indica
agaggtatgtttcaaataaatataaaagtagagataaatttgattaattgttatcatcttttatattttaataaagaaaatagaatattaaaagaagatgatactattttttaagaaaatagttaaatagctataaatttatttgagagtcccacatcattcttttgaaactctcctttttatgtatatatatataaatatatatatatatattgatatatacatacaatataattggaagcctaaagattatacagaataaataaaaagtgaaactgttagaatcgcttataattaaatcataactataggtatgtgtgttttagtttggttatgctcattacattttaaaatttgtagaatatagttgattaatgcatatgtgcatgcgtataaatatttttttttaacaaaaatgaaacactaaaaaaatgaaaatatagattaaaaaaaatatgtaacacattaccttacgttttttttattttgttccgtgtgtattttttcatcatgcatatatgagtattttttagataaaatatgacaaaaaagtatttatagtaaaagatatagtatatatcacctaaaattatgttgtttcttttatggtaaaagatgtagtacatatcacctaaaattatgttgtttcttggagaaatgatgtattttcaaagaaaaaaaataattttcatgtttatctatatatagatataaatatatattaaaaaaaaaacttaattaactgagttgttacatgaaaaaattaataaaaaaatatattgagtcattatgtcaatggtagagtaaatatattatacaaagataaaggaacatgaaaagacataaaaatgaccaatttttttaaaaaaatttgcctttgtttaatattatttaaactgatagtaaatagtatcgtcattgattagtatagataataattatgtatttttatgaatataaagtaaataaaaatatgaaattatcacaaaatagaaaaggtagatagaatgaaatgtagaatgccacataatctctctaatacctttctttatttagatatataaatttttttctagcataatgaactgtgctgataaaaggttctgaatgccctgatacgaagtaataaaaccctcgaaaaataaaacacgtcacttcaataatacttttactaatttgcgcaggtaaaatttttcctctcatcgaaaagtcaagtaggaattttctcacctacttttttcttggctttatgcgcttgtaaaagattaattgtgacgacaaagaatattcgcacgtagaaatttctccacaaaaatattagaccttttaccagcgcaaatatgcaccggttaaggtaacaaatcaataaaaattatttgcaccaaaaagcggttaggtttctcatggtgccattcacgaattgcgccgccataagctacttttaccggtataattgtgcgccggtaaaaaatttactgaaatgagttagctgtaccatgccactctttttgccgacatgtgctgccaaaagtcctctatcttatagttcaaaatgacacgcacccaaaaatggcttctaatttatgaaaaaactcgatttaatctcatgaatacatacaattatgtttttttttgtcatttgttgtggataagaataacaaattttgaagtggatataatttgtggacgagctttctaattataagaaactccaatcacacgtaggatatctctatttagttgtatatattcttcgaagactgtataccgtccgacgtagttcgctagaaaacgaatgataataacacatctaataattcttagtaatatgttgacactacacgaattcaaaaatcaaagtagctatctaaattaatgcccacttctattatttagtgctacaatgcaagaatctcaactataacattaatataatgtggaccacacttggtaggtacctaacattttacatgtgctatattaattaacaggtatgtggctaactcgtgcatatgcatgcaaaaatattatctctagtactgtactaactatgttatttgtgagtgtctccaaaggaagccacccaactctattcaaagaataataacatacaccatgatatatagcagtaattcaaatacaaataaacataatacagcgtgatatacatagcaatgttttagcttgagttgtaagattctgtaagtcaagaatatccgaatttgagtgtgctatgttatttgtgagacttcaaaggagaccacaaaatgttagaattctcaaacacgcatgaaacatataaaccttcaaatctatacacaaacatgttactaagttcaacatagaatctttttttattattattatattgaaacttttccaagacactgaaccgagacttttgcaatctaaagagctatttcacaagtagtcatggcagatattgtcaattttgtgcagggtttttttaggcagcgacatcacttgagcccaatacgagtggattgtcattaaaacaacattcacaagcattctctcttggcatagcaagcatctcacactatgcttcccacagatgccaagacatttatggttcacatcagaatcttgcatacctgaaaaactgttattttagaggcatttgcatgaagcactgaggtctgagaaaatctcttaaaacactattattagcgtttccggataggtgacacgtgtgtgtcctaaattaacttacaggccaattcacaaagcataaaaagtccaacagcccgaccaaagaatggagctggtcgggagatccgaattcaatcaatattaagttacgggtaaatctaaaccaacgaatccagaaggttaaccctccaaactcaatctgacatgtcatacctttgatgccagactcaatctaaagatgttgttgttacgaaaatatgagatatcaatagaagaataacaataagatgaacaaagagatcaagaaaattaaaactccattcaacaagattccaagcactatagattaaataaatgttacaatcccaaagaacaaaatttcagtaaagagaaagaaaagatgaggacgaagttacaacccaaagcaaaatatacacataaatgtaaaagcaataagaatacaataaatatatagttgatatatatatatatgatatatagtagaaatatagtgtatatataaaataaagaggagagcaaaaaacaataacaaaatagaggatgaagaagaactcaagttagctatgggggatcaccaaacgcttgaaaaattgttgatgtctacaagtgaactaaagacctctattgatagtgtttgaggatcacatttgaaaatcaaatcctttcatcacatggctgttaccagcactttaattggtgtttaatgggattaaaacgttaggtaagagagctggaaacatgctcaattaatttatgtacgttggacgtttttaaaaatttggttccaagtgtttgaaaagcaaccataaaatgaaaactcaatatttagcttttgtaactccttttcgagtcaaatctttctccaacgtcccaatacccatttaaataatataattgagtattttaatagcttcgaacagctagaaacctatcccattaattctataatttctatatgtaataactcaattaattccatattatcaattgtgatccttaggttacaatctattttcagatttataactctcatatgttacaattttatgtgtattattatactatatatgatataatacaacctacaacacataatatatattaatcatatattaatatataatatgccacattttaatctttattacatatttattaaataacaaatatataacattcccgcactagattaaaatttgttgacatctcattgtaacactttatt

SEQ ID NO: 218120 - DNA, 3654 bp, Cannabis indica
atatatattaatatatatatttagtcattgtttctgagctttcacttcagcagtcttataataacaaaacattttcctgtaactttgctaagatatatgtggtccagattgtcactgaaaaattgttacttatagtcagtctgtttgcgagttctctataaagttcaaaaattaattgcttgtggagccatcacagctgaaattattcttgctacccatcaatattaagtacttaatttgccgcatattaacattaagcacttaaatttcttttggagaatatttgttaatagatgctgtattgggactcttatgtcaattctaaaaaatggagatagtgtggttttctttagatgcatttgtgatctttttgtgaaaatggtatggttgatttgttagtgtaatgggtgatctgtttgtggagcagctcaatggctgactaggactcaatgcgaaatgcgaataaaggttcgtatagggattaaagggtatcagagtaattttcgtttgtttgatacaaggactagaaggttcgatatgcggtaagtttgctgggtttggtgtttactgaatcacattgtaagagctgagctcttgggagagcgcaggtctcttgaacagctggagtactttgtatttcctttgaacaataataatattcctcctatgttcccaccagttctagttattgctttattgtgtttctgcagtttactagcttcagtgtatttttatttgtcaagggtttgttgtctgggatgttttgtttgatactatgtcccacttgatttttttggttcttttggcaggttgaacattggcttaatgaattatgcgaagagttgaatgaacggatttgctctgacttgaaccaaaacagaagaattgcacgcacactgaccctgcatgctacagcttataaggtgctgatatgatatctcccatagccttgttgtttgaaccccttttcttgtcacaatactccccacctcttcagtgatgaatgtagcttgtatttttcatgcatgcataattttgttcctttttaaagaaatgaaattagtcttacaaatcattacaaactagtacatctcatacgcactttacctcctctagtcttattgtaatttttgctttcattattattattgccatctgattcttttttattattgctgtcattttacagtccagtgattcggatgcattaaagaattttccttccaagtcttgtcctctaagatatggagctgctaagatgcaagatgatgccatgaaccttttccaagctggactacgtgaatatttgggatgttacagcaccagagtgcttggaactcaaaacaatggttggagaataactggactttctgtgtcagctagtaaaattgttgaaataccttctgtaagtctcaagttactcttgccatcattgttttctcctaggaatttctgttcctggttgatgtaccccaactaggggctctagtgaataacagaggtaataggcaaaatcggaggaaattgaaattagaaggcaatagaaaacttacggagatctgatatttgaattttgaataagaaaatgagaacacacaagaacatgcagtatgcgagagaccttaactctccaagaactactgctcaattaatcacaatcaacatgctcaccttcttttagagccaaaaagaaaagctccacttgttctacgtgccctccattttatatcactacccatcaagacaattactgatataccccttttattttctatattttatcaatcacgtctcttcctttaactcaaaattcaatactattatctctaatctgtacggatgatgtgtcacttctctgggtgacacgtggaatgttttcaggatctgtgcagaaggtgtttgtttattgagattttcggaaaccaattaattagagtttaaggaaaatataaaacgataaataatagacaagtaatttttacgtggttcgagcattaataatctctagtccacgagtctgttgtattagccttgccggcgagtgtttgaatattacaaatgtttatattataaatattaactccgtattcctattatttctcttctagaagaagaaagttagtaggaatttgggcagaggttctgtaagtatgaagttgttccccctttgcacataaaaaaataagggtatttatagacatgtatgtgggtgagggcatacccttcacccacctagggtttcgtattcaacacgttacaatggctgttattacaacatggcgatctgaccgttgtttggtaggagaccttctcatcgtgtggtgtacggcttctgcaaggcaattcatgggactaagaacacgtgtcgcccaaaggttttacgttgcgaagttgtgtttagacaagccgttggacaaaaaggggctacagaggcacgtacgctcactaccaaggtctgatgcaggggacgatttgatttgatgtcagaagatatgtaaccgttgctctgatctccgaatacagctgaataggttccgggaacatctgatcatagccttctcggatcagactaacccactacccttctggaatactcgtagcttttgatccttcagaataagggattaataatggaattctcggaatcccttctaccctcgctattagggagagccttcgggtaactcctggaacataacatcttccgtgatgctgaaaggcggaaggtgcataccaactgtgcatgatctgacgtgacatccttctgtgattgccacgtaccgggcatccgagaatgcggataacagtaccatctttgtaatgtcgcccaggagaaatgacctatgaagtaactgctgtttgataactaaggtaaatgtgtcgtccagggggaacggcttatcaacgtctcgccgtctggagaataaggttatcacaccatgcaagatgagcagaatattccgatcaacatcagcgagtcaagtctcgcgtgttccgtccagggtaaatgtgaaaatcaaattagcaaagttactttcctcttttaaatataaatcaaatctctattttcatgtgtaagtgatgtacaaaaggaaagtagtaaatttcttgatttatgcattattaattttaggaaacctaattaatgtgataattctctataaatagtggagccatttcactatttaaagatatgaaatctcactttctgaatagcacttgcactgttgaattctctgtaaaaactttcgagaaagatcaagtttttttttgcttcttatctcacaagtcaatacaagtataaagggagtaggtattaccacaatcgcggggccaaacctttataacaatttcgtgttcttattttacactatattactcatattctatacgaatctaattattctcaattgctttaaaaactcagtgtcgttgaccaaaagtgaggtcaatattttggtgcttttattgagagtagaagaacattactgttgtcttgaattttttcaagacacacaaagatggttgtacaaacatggagaggtaatccaaatgatacaactgatttgatggttacagatcctaatgtccaaactcttgcaaatccaaggaatcttgcagaagtcattcccaccaataccaccccaagaactg

SEQ ID NO: 218121 - DNA, 2229 bp, Cannabis indica
aatggaattaatttgtacaaattagtagaggatataaagtttgatatggggtattttattgagggcaaatagtgaaatttccctaagaaaattcctattgacaccacttatccttttattgtgtatacaatgaaataacgtttcattgtttagtgtcttgtgggttttcaaggagttgttgggttgcagttgggttgaatttggtaggccgtgagtttcattctttttctggctaggtgcggtaatgagcatggtagatgaggataagttggggagagttgtgatactttgttgggtcatttggaaatctcgtaatgatatagtgtggaatcaaaaaaagacggcgaccagaggatgtggtgttgttttcttcatgaactcttaatcaatggagtagtgctcaaggtgtagggaatatccattcacttaacacgttactatcgtatgatgggacatagagctggactaaacttgtggtgaatacaatgaagattattgtaaatgcgactggctatttttgagaaagatagacagttttgttctgcttttgtggttcaaaatggtggagggatttgctagtagctgctgtaaggggttgtgtctcctttagcagaagcgttggtggttaagaatgttcttagttggttgaaatctctaaattcttttagagtagagattgaatcaaatagactaattattattcaagctattcgtagtttttttagaatgtttttttggttttagtttagtggctgaacattgtaaaggttcattgcgatttttaagtattgttgctttatgttttgttaaatggttaactaatcttgctggacatttttttgcgagacagtctcgatattatgttggttgtatgtttatgagaaatagagagaaaaagcagaggaaaatcagagcttattattgatatgtttgaactgattttacagaatggaaaagagggctttatatagccaaatacaattaagaaatggttagttgaaactaaccaaagctgtaacagaaatgtacaactgtaacaaagatttgtaacaaacaaaataacctttaactaacctaatccaaggcttaacaacttaatccaaaactaatcctaagagcccccctcaagatggagtgtagatgttaagtaagcccatcttggatacaatgttggagaagtgagttggtaagagtgccttggtgaagaagtcagcgaggctgttttgtgaggagacatgaagtagcttgatcgagccttgttggaccttctcttgtatgaaatggaagtcaatttccacatgctttgtgcgttcatgatagacaggatttttacttatgtgaattgcagcggtgttgtcgcaataaagcagggctggagtagtaaggttgacgccaaaatctttgaggagagtgatgatccaggtgagttcaaaagtggcattagccatcgctctatattctgtttcagcggaagagcgggaaataatttgttattttttttatttccatgacacaagagaggtgccaaggaaaagacaatagcccgaaatggagcgccgtgtgtcttgacaagccccccaatcggcatccgaaaagaaggatatttgaacattagacggggagaggcttgtttcagcatatgctgaaatagtaggtgttgtgttggaaggaaaaaaaagtccttggcccggggtggatttgagatattgtaagatacgatttgcagcatggagatgtggaactcgtggacaagttagaaattgactgaggtgattcacggcataggaaatatcaggccgtgttatagtcaagtatataagtttgcctatgagacttctataggctgtaggatcggggagaggattccctttgtctttacttaacttgaggtttgtttcattaggtatgtagccgtttggactaggtaggaccaatataccaagggtaagttggattgaaatcctagtgctcgggctatgtttagtatgtgttgatgttttcgttccacaacggagttttgttgtggtctttccacacaagagtggtaatggataatgccttttgaggcataaaaagattgtaagttcaattcttttgcattgtccgagcgaattgctttaatagacaaagagaattgagtacaaatcatattaaaaaaattcggaattatgtgttgaacatccgatttattcttaagcatgtaaagccaagtgaaccttgacttgtcat

SEQ ID NO: 218122 - DNA, 4766 bp, Cannabis indica
catttatggcaagttttttaactagtttaaagtaacttgacaggaattgtaatgataatcaaaatgctcattaccttgtttgctttaactttttaagttatgtaatctattatggttaagaaaaaaaaacaatgcaatgatcattataattacaccccattacaaaactaatataatattatcataaaagtataacaaaagaaactcacaagtccattctatctttcatttaaatattttataattttataattataaaaataaaagtaatagagatattttgatcaatatacattgtattccgttacattaccacaccaaactaaacacaataattttgaccacaatactcattcaaacaccaaaccaaatattataatcaattctaattacgattcttatttccacaccaaaccaaatattataatcaattctaattacgattcttatttccattaccattattattaccgttgcgccaaaacaaacatcacctaagtgtgtgcgatgttttaggatagtttttatgtaaatatattattaccaaacaaaatattccgatacaacttaatatatttatttatttttgttaataacagcttaacatatttatatattgtatactatgctcatattttccattttcatctcttatctctctatatataaatattatacgtgtaattagttacattaatgtgtccaagacaatagtcaaattaactaatgattaaaagatatcttttaaaacaagacaaatgagtaagaaatttgatgctgaatcccaatataagaccaaaattgtcgatgctatcaaaaaaaggtaaacatgaaagtaaaacatgcataggccagcctctgccaagctacacaatatgcatattttatattattatgttatgattgccaactttactgactgaaaattaaatcacattgaagcaattgaaagacaaggaactgataacatcgaggacaatatctgctaaacaagttgtcatgtaagcaaattataaatattatattttatatatgtataaaagatgaaattaccattgtgaattaagaagtgatgagcatggagggacacaggttgatggggttgtgtctgattgtgttgatggtggtgctaagcagtggtgccttgacagaagctttgaagagtgaaaaactatgcagccaatgctccaaatgtgaatcaagtaaatgccctccaagtgaagcctacccccacatgacagcttttgatgattctcttattgttgctgctttacaatctgattatgtagctttaaatgatagaggagtttactcagtacctaacatcaaaggtggtcaatctacaaaatacaatgtctattttggttggggttcaacttctggatcagcttcaggctaccacaggtaaagatattgaatcgctattaatctcggtaaaataacaaagtacttaactaagcctaggccgtttcattccattgtaggtttaacaattacatggacaagtgctctgatgaggatacttatctgacagtggacaagcatggcaaagtgagcatgcgtaagttgagctcgttgcatagcttagctgaggccgattggaaatcaattaatcccccaaagaaattagaccaccgagaattacgattctgggtatccaacgctacaggaaaatgcctaactgtttttggaggcaaaacaaagaaaagaactgtaggtgtagctgactgcaagtttgatggctcgaatcttggacagcttttcgcctttcgctttcattaccataatgccttttgttgttgcggagttcacaacatctaagttcacccccacaatatatatattacatttgttgtgacatgcattctaaactattatgccaagcaaactcctcaacttccaaagttgagacatatatgagcttacaatataccttttcatgttctgatataaagaaaaattccactgaggtccagacaatataatgaacggaataaatagttgtttacctcattacacttgcatcaaatcaacatgaaaactctccagattttgatcatttaaaatgttaaatgtaattaaaaatgaaacatagacttgagcattagttaactggcatgctttaccttactgattcatatatgaatctccccatcatgtttttggtgatgctgttaaaattaagaacaaagtgctaaagaagctacataaaactttttggtttactctgtatagtaagtatacttgcaaactatgtaactggacaacaaaaatttcctacgagttcattcgtttattggaacagatagaaaactacaatatacgaaagcaactttcctacaaaaatggattttctgtataaagggatatataggtgaagtaacaacatatcactgggagatcatacataacctagggatacttctaatgaaccaatggttaatgacaattatcagttaccatctgtcataagttgggcagtaattgaaactgaaggaattgcttcctcactagctaccacagtcttcaaacaaggaggctttgctgctccataataatagtatgccattatctttgaaagctcgtctgcagttcgcatttctggaaaaacagccaaagaatatttgagaatcatacaataaaaagaacagaatcaaaactgagatagtaatactagcatcaactaaaataacctctttcacgatacaagatctttccagccttggtaaaaatcatctcagggaaaacagacacttgaagtgcagaaaccaaatcagtctcgataacagcatcaacagcgacacactattcaatatgacaataatagtcattagtatgactagtatagcagatgtgaataaataccctaatgataaatactagattttctcactcttggtgaaggtagtcgacagttccagatgatgtgcacagccttctctatttcatctcgaattttttcattttcctttggcctaggaagtgtcaagaatattcattattcggagacaaatatggccaataagcatttgatgaaaacccaataaagatcaaatttgtaagaagatcgaaacaagatcatagatataagtgagaaataatagtttccaatgattaaaaattgtttatagcaagtgtatgcatgcagaagcagaattatgtgtcaattgtaagccaaaaatacttgtgcttggagatcaccctcttatcttatagaatagtctaatgcagaaatatatttgggattgacactaagtactttcattaggttagttcctctataggttgatgaaatttacataaaaatcagcagcaaaacaggcagtgcagtaaatttgaatcaataaagatataatatttaaaagtaaaaacagaaaattgagaaagaaggagcacaccttctatagcgattgtgtacaagaataatcaaagggctgatgtccttgaaaacagtctcctcccaatcagctgtggttatgtctttgatggggcgtatatagttatcatcttgccatacaatttcatttttgctatcatcatcatcgtcatcgtcatcatcaacttttttagggttattcttaatggttattttgtcaaagaactggcccaagttgaaaccccaaccatcagcatcttctggccaatcaggatcatcctcctccacgacaagtgggtatttatcaacaagctcttgtaccttcttcctcctctcctcaggcataacctcttctttaacctcaaggttccgcaccatcacttccctaatcttcctcctccattcttctcgttcttcgagagtcattaagtaaggatcattcttatcaacaacaggttcatcctcatcatcagagtcactagaatcttcttcttcttctactcccctttgccctcctctggaataggcaaatgtatttcctgtcttggggacatgtgatctactactattgaaacttaatgatagagttctacattcattcctttggatacagttgtatagtgaattcaggcaaacaattgaattagacactgcaaacttgttcttaaattgtgggaaagaatatggcaaccttgtggtacattgtagagccatttctgtaaataaaaaacacagaaaaagaaatgacacatgagcaaatagaatcaatgcaacaaggagttggaattgccaacactaatacatgtaaaggtttgaactttagtttgaccactgtactcctgaaaaccctaactcacccacaccaataaaagaaatcaacagttgggttttagtgtcaagctcaggcattcaaaacccagatagcaagtctcaaataaacccattaaaacacatgacttatccaaaccatcaatataaactataaagagttaataaatcatatacctcttttgtcaagtagttcttaagatatatcagctaatcatattacacccaatgtccttcctttagagcaaaaccttcattctgctatttcagctttctgtcaatctttgtagttttatcttaaacgaagaaaaaataaccccttttatatcttcttcttctctgttttatctaagataaatttgggcaaagatttgagcagtgttagagtcagtagagagagagacagtttgcatgtaaccaaagttgactacttttgaagaaaacatttgattaacacgaagttagagcatagatattagatgcgaaatcaaaagtgtaaaaccaacctgagcaagcagagaactcggctggtctcatcggcaaccaaattttgtatgctact

SEQ ID NO: 218123 - DNA, 1984 bp, Cannabis indica
cgatctctttctatcattttcaagataaattaacacttactaaaaaaaacaccacaaggtaattttgactaacaatttattactacaaaggaaaacttatagcactacacttacaataaaagagtgaagtgcatataataatttaatatgttaatatattgtgaattatatacttgtatatatatctatcatatatatatatatatattatatatgatgttcaacatcataacattaattaattaattataaaaatatatagcataatagcattcttctcaccacttcatttaatctattgattatttatttttcaaatttttatattacactacacattaatttttatatgtaatttaaatattatatcttattcatttaacttttaacttgtaaaatataaaatatttttatttcaatgaatagtaatttttacatttaacttgtaaaataattacaatttaatatatatatacatggaagttcaattttataattttttctttataatttaaaaattaaaatattttaccttatctggtaaaaattgcaatacaagtgagacggatagcgcataaatcccatttatatcatgtacaaaaaaaaactacgtttagtaataacgttttagtcacaacataaatttttataactaaatatgaattttagtaacaaaaaaagttacttgtgactaaaacataatatttagatacaaattgttgctaatttaattttagttacaacaagtattgtaactaaaaatacatttagtcacaacaaattgtaatttttgtagctaatatttttaatcacaaacttcttatagtaataatataagaatgataatttataattagtcacaatttttttactttaaattgcaaattttgttatcataaaagatcttttgtagtggatgtctaacaccacaattacattttagcattaattagctagagttagtgtgaaaatatcattactaactgataaaatttttaatctaaaatatattatttatttcaaattttcaatttacaaaacatcaatctcttatattataagtgacatgaaacttttacttgtgactaaaaagttttaaggaaattacattgtgtacttattttattttatatattttttaatttttacatttatttttatattttttaggatatacctacttttataaatgatgtcttcattatatattctttaagttaatgtaaattatgtgctagacttaattaaaaagtgagagtatattaggcaatccacccacgaaagtggatatatttttataaaatataatataagagtatttttgattaataaataccaaaaaaaaggtattcctcaacttatcccaaaagcttttccctattattcaataataataataataataataatctaattcggtaaaacagtaccaaaagatattcccttggcattggcacaaagggattgagctggtttgttttgaaaactcaaattcacatcttccaatctaattccactgcatataatttccagagttacaatcaaacttcgttgctattgttgtcgcagatgttcctttgatgtttcgataagttatatccttaatttttatgcttgacacctatacataataacacacaattaataatcaattagtataaaaagtcacacaatatatcaatcatccaacattcttctccaacgttcctctcttctccattcaataaagaaaagcagcggtacatctctcaatgatcaggtttagggttcttctgttattgcaaaattaatgttgacgatttttggggacgagacgaaaagaagggataattaaaaaagaaattcaatacttgcagtgacacatctctatcaacatcttaattaactagtcattatcaacaagaaaatcagcagcacgtacatctctcaatgatcaggtttagggttcttctattattggtagtgtttaattgggagaaaaagg

SEQ ID NO: 218124 - DNA, 5144 bp, Cannabis indica
gatctggatagacctaaaaatatttgatgtggtccaataaacaccccttatttctactataataatcatattacacctttaaggaattttatgccttaaataaaactcaaattcattgtagttttatttattattaataaagttcagaaatcatatttattatcaataaccatgattatgtataaatcttattaaatcataaacatatagttattcacaattatagtgatttcatcacagtagagaatagtggtgattatatgtttcaaacttatttaatccagagagatttatctgtgtatcagtattagaataaagtaaatatcaaaattgtattattgaagtgtaaaacaaaatttatatacaagagcaactcacgaggagtcggttacaatcaagaccagtggactagctgaaataacaacctataactaataacaactagtgaatatgacatacctctaatacttcccatcatgatgaggtgtagaggttggtgacactcatcttggacaataaagagttgaattgtgttgggaagtgggtctttgtcatgatgtcttctatgttgtgccgagaaggaatatgggagagtttgatgcagtgtttgatgatttgttcccgaacaatgtgacagtcaatgttaatgtgtttggtgcattcatgggagacagtattctcagagatgtgaatggtctcttggttgtcatagtaaagggttacaagttgttaatgtttgattccaaagttagagaggattttgatgagccaaaggatctcacacgtagtgttagctaaggatatgtattcagcttcagtagaggacttggacacaatgatctgcttcttagattttcatgagatgaggttttggccaatgaagatacagaatctagttatggatcgtcttgtggcagggcaagtgccccagtctgtatcagaataggctttgaaggtgctctgctaagagctatgaagtgtcgttagaatgaaaaaataatccttgtctaggagtgcccttgaggtattagaggatgcggtggacagccttcatatgtggttgtctaaggtcactaagaaattgcctaagtctgttaacaacgtaggatgtatttggtcttgctattgtcaaaaaaaatagtttagcaattaagcttctataggaggttagatttgaaacaagaggtccaacatcgttgctaagggaaatattagcttccataggtgtggtgataacttttgattctaaaacaccaattttagttaagacttgtatagtaaatggtcgttgggagacaaagatgcctaatttggatctagcaatctcgaggccaaggaaaaatcatggagatccaaggtcttttaattgaaacttggactttgaaaaagttttaaaggcagcatcatcttgattattattgctggcaatgataatgttatcaacatagactaataatgcaaggaaatcagttggagatgatctgatgaaaaatgaatgatcataggcagataaggagaagccatgcttgattaaggtggtgcttagttttgcaaaccattgtttggaagcctacttgaggccataaagacttttatcgagtttgcacactgaatttggaagaagctccccctcatgcacgtatcccttaggaagagacatgtaaacttcttcatgaaattccccatgtaagaatgcattatcaatgtccatttggttgagtgactaattgttaatggtagccagggcaaggaacaatttgagggtgttgaacttagcaataggtgcaaaagtttctgcataatcaatgacatgttgttgggtatacctttttaccactacgcatgctttgaatctttcaatttcacccttggaaatatatttgatcttgtatacccatttgtttccagtagactggaatccaggggtaaggacacaacagtccaagttttattcttttttagagcaaagaattctttgttcatggcatttagccattaagtgaattgggaagcctatttataagatttaggttccaattcagtgtaggcatgtaagatagcatttcaaaatgaagaggtaaacctgtcataaccgagaaattcagcaaggaggtgagcagtagatgagttgcatactaaatttttgagatgggatggtttggaaatttgtctccttgctttggtaattgggagctggaaagtatgaaaatctgttgtattggctggtggtgatggaatgtatatggagttgaaccagaagctaaacaaagctcatgtgtcaacctgaactgatgcaaatggaagaccagatgtggggtctgtaatattgtctagcgcaacaggaaagaaattgtccgaatgttgtgtagataaagaacctttgagagggaaaatagtttcatagaagatgacatctctagaatgaaaaatgttattagtagcaatgtcaatgagtgtttacgctttcatgccacgaggatagccaatgaaaatacaggcatgagctctaggtgaaaacttgcgccttttacgtggtaaggaagaaccataagttaggcatccaaatgttctcaaatagtcaaaaatatgtggtttgttatgcaacaactcaaaaggagttttatgctgaagtaatggaggggggttctatcgatgagatatgctgcagtgttaattaaatatggccaataaaccaaggctagagatgattgaaaagccaagacatcgacacattcagaatgtgttgatattttctctcaacaactaaattttgttgaggtctttcaacacatgagttacaaattttaatacttttttgaatgtaaaacgaggtaatgtttaattctttggtattgtcacaccttactgcttcgatattggcagattactgggtctaaactaagctataaaattgtagaataatgtgttgtacatcagattctgattttagcatgtaaacccaagtgaacctactatgatcatcatctaaacccttcaatgctagtaatgtataaaggtccccatatatgtgaaccaaatcaatacatgattgagaaatattatgttgggaattgaaaggtaactctcttgtttagccaaatgacacatggaacaaggagagagaatagtagaagtattcaaatgaaactttttatggatgatattagtagttgacatggagggatgtccaagtctacagtgccaagaaaaaatagtgttaatgattgattacaatgtaaatttttattagaagatatgtgagaattggatgatggcagcaagaagtagagatgtccaatcctcttagttgtcccaatattctttctttatgaatcctgaaggacacaaaaagtgtaagtaaaagatatgatattggtaagattgttaaggaaacttggaacactaaaaagatttagatgaaaattggggacataaagaacattttgtaaaacaaagattgttcaaaagtttaatattgcttgatttgtgaacttttatcttagtgctatttgttagagaaacaaagtgagctattgcagtatgatgtaaacttgtgaaaagtgagatgttagaacaaatatggtgtgtggcaccactatgaatgacccataaacaagaagagttatgaacattaccagatatatttaatgcaaatgggagagatgcattagaggtagaagtggtgggttgctatttttggctgaggagggatatgtgtgtttaaatatcttcatgtttggttagattagccagtgattgattaatagaaatagtggcattatgatcgtttattcccgtatctagtagaaaagctaatcaagaaatagcatttgcctttcaaatcacctggtttgtgacagttggagcaatatggtctcattttcttattgcgttcattgttagtattagatgctgatactgagggattttgggcaagagctccatatggatttgattcttggacaaaagcaataagaggaatatgggggttcttgagtttcctctatcgctcttcatgaatgatcatgggaaacactttggacagggaagggaaaggttcaatgagtaatatttgagctcaaacaggaaagaaagactcatttaatcctatgagaaaatgtaaaactttttcttagtttaaaaaagccaagttatcagcagaagcagcacattggttaagctcttaaatctcatcccacatgcatttgagtttagtaaagtaagaactaacagagtatttgccttggcgtagggtgatcaaggtttcacgaagctcaaagatccaagatccattcccttgatcaaatcttgaatgaaactcgatccatatttcagcagttgtgtcaagaaacataatcctgcttttgatctcagaggtcacagagtgaagaatctaggacatgaccatttgcttacagggaatccagtgattatgaaggggatcagtttcaggtggtggaggaagagtacctttgaagatgacagtcttgatcctggcaccaatagaaagtttgaaatcacaacgccatggctggaagttgtgaccagacataggaggagtgaccaagatcagaccagggtgatcaccggagctgagaaaaaatagacttgagctatcttcatgtgcaggtcaaggaatggggagaagattttcatgttgatgttctccaggaggattgggaattggagggatgattggtgtgtcaatggaaggagcatctggaatcgaagaagaggtatgtggtggaggagttcggccaaaattccttgaaccagtagctcgtgttctgaccatggttaaacaatagtagaaatcttttcgagagagagattgagagaaaaagctttaaatgtctgataccttattagaatataatgaatatcaaaactatattattgaagtgtaaaatagagtttatacaagagaaactcacgaggagttggttacaattaagatcggtggactaactgaaataacaacctaaacaactaaactataactaactctaacaacagtgaatatgacagacctctaataatcaaatttacactaatgttataatcgataattttgtttacttgcacttaggcaaatggaatgtattttctaggacattagtaaagtaaacttctatcagatgtat

SEQ ID NO: 218125 - DNA, 11368 bp, Cannabis indica
tttttccaaagatacaaatgcattgagtatgttatcacatataatcgcgttgcttctttttgaggatgcaaatatgagagaaattgctgcacaaaatggcattgtatctgctgcaatagaaatcctgttgagcttcaaggataaaattaagtctggtaatgatcttgttatcccaaagtgtgtcagtgctttactacttatattggataacatgctgcaatcccggcccaaaatctcgtctgacagtactgaaggagctcctacaagcactgaattatctggagaccaagtttccctgtcatctgctactggtacagagaaaagatcggtttcagatgccaatgaaaaagaatcaagcccgtcatttgagaatattttggggaaatctacaggttatttgtctgatgaagagagtcataaggtgttgctagttgcctgtgacttgataaatcagcatgttccagctgtgattatgcaggctgttttgcagttgtgtgcccgcttgacaaaaactcatactctagctttgcaattccttgaaaatggaggtcttgctgctctttttagtcttccaagaagctgttttttccctggatatgacactgttgcttctgctattgttcgacatctcctcgaggatccacaaacattgcaaacagctatggaatgggagatacggcaaagcttgactggtaacaggcattctggacgtgtctctgcaagaacttttttgacgtcaatggcaccagttatttctagagatcccgaagtttttttgaaagctgcagctgcagtttgtcagatggagacatcaggtggtagggctattgttgtgttaacaaaggaaaaagataaggaaaaggagaaaccaaaagcaacagctgctgaagctgggttgtcctctaatgatggtgttcggatttcagaaaataagacaaatgatggatcagtcaagtgctccaaaggacataaaaagattccagctaatcttactcaagtaattgatcagctgcttgagattgtcttgaaattccctttatccgcaagtcaggatgaaggctccagtaactcatcttttatggagattgatggaccttcttcgaaggttaagggtaaatcaaaggttgacgagacaaagaaaactgattctgaatctgaaagatctgctggtctggctaaggtgacctttgttctcaagttattgagtgatattcttctaatgtatgtacacgctgtcggggttattcttaaacgagatttggagatgtctcagctccggtcatctagtcaacctgatagtcctggatttggtgggatactccatcatgttttacatcgcctgcttcctatcaccattgataaatctgcaggacctgatgagtggagagaaaagttgtctgaaaaagcttcttggtttttggtagttctttccggccgttccggtgaaggtcgtagacgggtgattagtgaacttgtgaaagctttatcctctttctcaatgtcggagggtagctctgcaactactgttttattaccagataaaaaggtctatgggtttattgatctggtttattctattttgtcaaaaaattcatcctcgagtaacttacctggttctggttgttctccggacatagcaaagagtatgattgatgggggcatggttccatgtttaactagtattcttcaggtgattgatttggaccatcctgatgctcccaaagctgtcaatctcatactcaaggctttagaaagcttaacgagagctgcaaatgctagtgagcagattttgaaatctgatgggttgagtaagaagaagtccactgggttgcatgagaggtttgatgatcagttagctgcaccatcagctgagaatgtggaacgtaatcatgatgcaagcagtgaacaagccagagatgtaaatgaaaatgagcagcacaatcaagaaacttctcaaggtgaaggtgaccatcgtgcaaatgcagatcagtctggggaacaagaaatgaggatagaagttgatgaacctattgccaccgatgctcaagtggatctagggatggattttatgcgtgaagagatggaagaaggtaatgttttacagaatacagatgaaatagagatggcttttcatgttgagaatacgggtgatgatgaaatgggtgatgaagatgatgacatgggtgatgatggtgaggatgatgacgatgacgatgaagcggaagacgaagatgaagatatagtggaagatggtggtggtatgctgtcgctggctgatactgatggagaagatcatgaagatgctggtttgggagatgattacacagaagaaatgattgatgaagaagatgacgatgattttcatgagaaccgtgtcatagaggtgaggtggagagaagcccttgatgggcttgatcatttacaggtacttgggcaacctggaggtccaggtggtcttattgatgtaacagccgaaccttttgaaggagtgaatgtagatgatctatttggtctcagaaggccaatcggtttcgaacgtcgtcgtcaaacaggtagatcttcctttgagagatctggtacagagaatggtttccaacatcctctcttgtcacgaccatctcaatctggggatctagtttcaatgtggtcagcaggtgcaaacccatctcgtgatttagaagctctgtcatcagggagctttgatgtagctcatttctacatgtttgatactcctgttcttccgtttgatcatgttccaagcagtctacttggtgaacgtttggggggtggtgtagcaccacctcctttgactgattattctgtaggaatggactcattgcagttgcctggacgaagagggccaggagatagtcggtggactgatgacgggcagccaccggcaagtgctaatgcagctgctattgcacaggctgtggaggagcagttcatatcccacatgcgcagtatttccccagctgataattctgatgaaaggcaaatggcccaggtttcagcaggtttggagagacaatcagatgccccttcatcaaatgatagtcaaatagcagtagagcgtgaaaacagcagcagcctacaaagtgaaggtcagcttcaagacattggtgatcaaaccacacacgaactagtaaattcagtggctgaaaatgctcccaatgaacatgtaaatttagaatctgttgatgaacttgcaggggaatgtcagcaaccacctgagcctatgatgattcaacaaccttccctgaatggtaccccgaatagtcatgaaagtatggagcttggtgagttgaatactgctgttagtgaacaagctgcaacagttccagggttcgtggacttgactacagatgttagtgctgagcaactaccaggagggggctctgaagtgtctcgtgatgtttcggtgcagactgtgggttgtgagacatcttctagatcagatgggcaggctaatgcttcggtgaattctggtttggatttacctgatccctctgataacaacacttctgtaatgccacaaatgatgatgttgacatgaataatactgatgctgaaagaaatgaaaatggtgaagctgaggctcctccgagcaaggtacagctgagccgtcaacagtgcagaactcagaagctaaccaggccgaccaagctaatgctagtaatgatgctgctggtgcaaatgcaattgatcccaccttccttgaggcactacccgaagatttgcgagcagaagttctagcttcccagcaagctcaatccgttcagcctccagcatatgcacctccttctgctgatgatatagaccctgagttcttggctgctcttcctccagatatccaagctgaagttttggcccaacaacgagcacagaggattgcacaacaggccgaaggacaacctgttgacatggacaatgcttctatcattgccacttttcctgctgatctacgtgaagaggtttgcatctgcatttttcttgtcttcttttttagttctcttcttcttgccacttctgctgatctacggatgtatctgctaaacttctccttctattctaatatcttttaatttctttacaacttttttctttttttttttaaaaaataaaaataaatactggaccgttttctctcttaatataattttatattaatcatttattcattgatttttgtctgagggttgtgctctctgttcttatgactaattcatataatatctgttccaggttcttctgacttcttcagatgcagtcttgtctgcattgccttctccattacttgctgaagcacaaatgttaagggatcgagcaatgagtcattaccaagctcgtagtagcctttttggaagcagccatagaatgaataatagaagaaatggattgggttttgaccgacagagtgtaatggataggggggttggagtgtctattggccgaagagcagtgtctagtgtggtcgatagcttgaaggcgaaggagattgaaggcgagccgcttctagatgccaatgcattgaaggccttgatcaggcttttaagattagcacaggtatttatggttaattagataaatataataactttattagaggcacaaggactgtttgctgatatggttattgtgtaatgttttctatggccagcctcttggtaaaggccttttgcagagactcctgttgaacctttgtgctcatagtgttacaagagcaattcttctccactttttgctcgacatgatcaagccagagtctgagggctcagtcggtgaattagcaacagtgaattcccagaggctttatggttgtcattcaaatgttgtttatggtcgatctcagttattggatggtaatacccaaatttgatcgactcaaagtccctttaattctcttttggggctcaattgttgattgattaattacaaatggctttttttttcctataacaggtcttcctcctctggtgttgcaacgaattcttgagattttgaattatttggcctcgaaccattcacctgttgcgaatatgttattttactttgaccgtcaaaatgtctcagaagcattaagtacatcaaatgtggagaacaagaaggacaaagggaaggagaaagttgaagaaggagagttatcggtgaagtctactcaaaccatccaggatggtgatattcctttgatattgttcttgaagctcttgaaccaacctcttttcttgcagagcagtactcatcttgaacaggtagaatggagttctgttttttgtttttacgaatatttttcccgaaccatgtacatttatcagcattgaaatatttacagttatgctatgctgcgtaatcacacattatatggaggtgtaagaaatctatttgttatgttgttgtgcaggttatgaagctgctgcaagagattgttcatatagcagcaacgaaattggagtttcaatctaaattagagagggaaactaaaaaagctgcaagtttggcaacaactaatgagccttctgaagatgctgagaaagctcctactgtatcagagccagagtccaaaccagaagataaacctgttggtactgaatcatcttcatcatctggaagtaagagaatggagacttataacatcttcttgcagttaccgcaacctgatctacgcaatctttgcagccttcttggtcatgaggggtatgttattatctttttctctgttatttgttgtttaatagacatcaattgttttgttctcgctctttcttttgtcttgatctagcgtatagacggaaacctttgtgtgacctatgtttttactttgcttaggctctcggatgatgtttacaagattgctggtaatgtgctgaaagagttagcatcagttgctgtgccgcataggaagttctttacaacagagctttcaaacctagccaatggtttgagcagttcagcagttagtgagcttgttacacttcgtaatacacagatgcttgggttgagtgcttgttccatggctggagctgcaattttacgtgtattacaggcacttagctcgctcactatacctgttgaaaatgagagttcaggacaggaaggtgaagatggggagcagcaggaggagcatgcgatgatgtggaaattaaatgttgcacttgaaccgttgtggcaagaattgagtgaatgcattagtgcaaccgagatgcagctgggtcagaactccctttgtccaccgatgtcaaatataaatgctggggagcaagtacaggggccctcttcctcttctcctctcccacctggaactcagagacttcttccttttatcgaggcattcttcgtcttgtgtgaaaaacttcaagcaaatcaagctactaccttgcaagatcaggatgtgactgcaagagaagtcaaagagtcagctggaacctcagattcatcgactgtcatttgtagtggggatcttcagaggaagcaagatggtactgtcacatttacgaagtttgcagagaagcatcgacgtcttcttaatgcctttattagacagaacccaagtttagttgagaaatcactttcaatgatgttaaaggcaccaaggcttatcgattttgataataaaagagcatatttccgctctaggattaggcaacagcacgagcatcacctctctggtccactaaggataagtgttcggagggcttatgttttggaagactcctataatcagttgcgtatgcgacccaatcaggacctgaaaggccgacttaatgtgcaatttcaaggcgaagagggtatcgatgctggtggtctgaccagagaatggtatcagttgttgtctcgggttatatttgacaaaggagctttgcttttcaccacagtaggaaacaatgcaactttccagccaaaccctaattctgtcttccagactgaacatctttcttacttcaagtttgtgggccgtgtggtaattctctttactttcgggtgttgaaattcttattatactttacttcttttttagtctaatcatatatattgggcttgtggtctggttttatgcaggttgcaaaggcactgtttgacgggcaactgctggatgtctatttcactcgatctttctacaaacacatacttggtgtgaaggtgacttaccatgatattgaagccgttgatcccgattactacaagaatttgaagtggatgttagaggttagtagctttttatatgacacagtcaaatatgctgttggtgtttgatattatgatgttttgagtatgaattaacacatttgcccactttgtctgttctatagaatgatgtcaatgacattctcgacctgacgtttagcatggacgctgatgaagaaaaacacattctctatgagaaaaaccaggtacattccttgtaatgtttgatttgtagcttaagaacttccattaagtagccttgtttgaagttctaacatttccaaattccgagaatttgactaattccgaactttgtttttctctttaaaataggtcactgattatgaactcaaacctggaggaagaaacataagggtcacagaagaaactaaacacgagtacgttgatcttgttgctgatcacatattgaccaatgctattcgtcctcaaattaatgcctttttagaaggtttcaatgaattggtcccaagagatcttatctctattttcaatgataaagaattggagctacttatcagtggtcttcccgaaatcgactgtgagtgtttcttatagctaaattatttttcccaacttactgaatctgttcttcgggtttctaaattgtcttgttctcctcgcagtggaagatttgaaagccaacaccgagtacaccggttacacagcagcatcaagtgttgttcaatggttttgggaggtagtgaaaggtttcaacaaggaagacatggctagacttctacaatttgtaactggaacatcaaaggtaataattatttatttaatttttccattaagcaatctctaatcataatctttttacggttaggttgattctaaaaaacctctttatcttctttcgactcgttttcaggttcctttagaaggtttcagggctttgcaaggtatttcgggtcctcagaggtttcaaatccacaaagcatacggtgctcctgaccgactgccctctgctcatacatggttagtctaatcataattcagattccgatttcatgtcttgattaatgtttttactaatgcatacatctttttcattctcagcttcaatcaattagacctcccagagtataccacaaaggatcaacttcacgaacgattgctacttgccattcacgaaggaagcgaagggttcggtttcggttaaagtgttatttctgcagagacattattgttagcccagcaaacttgcaatctactattctaagttcccatgtacatgtaagtgagacaaaccaccatttcattttccttttcgatcttcatttttcatcgccattgtggattcgaagttcgaaccattgtttacccttttcgtacttgtgtgttgcagacagatagaacaaatggtctcggagcggagcagggtatttttttcagatgttctccgtcatcaaaaatttgatttcgaaaatggattcttgggatgctgggtgaacaatgcttctttttttgtagagacatcgccgtcgtttaatttttcggtttagggatcgttcgatcgatcgcgaaaaatggcttttgggaggattacttaattattcttttttcttcttttttttcctagctatatctcaaatgatttatgagggccatacacaaattttacaattggtatctctatgcttttttttttactgtttcatattattagatttttctattagttttttatctattattctcttctatcttttggccaaacagcctcattttacttcagtttatatcctttttattatgttattattattttcatgtgaatctccaaaagcttagtcttgtatatgcaattcaaggtaattctacatataattctatcttctacctcaattatttaatcaattttactataacaagaatctctgtctctctctctgtctctctattaatataatattgggatttttcactaatagaagacaagttggtctattcttgtcacatctttttaagatcaaaagtttctcaaaattgatattaaaattgagcaccaatgaaatctttctgctacttcaaaagggttctaaatattttaaggaaaatgcacttaagatttcaagagaaagatcaactttgtctcttcattatgtttttttgtcattcttatgttgattaattattaaatttagagaaaaagctgttcaatgttaaaccaaaattttatgatgatgaggattgaagaaagtaattttattaagatttttccatcataattttactgcctataatatggttaagtgtgcgtttgtttttctaattctaattttgctgcttataatatgattaagtgtgcctttgttttccgtaagtgttttattttttgaaaagggaggattgagtaaagagtgtagtgaaagattttggttagattaatgaatatattaagggttgatgagatgaaaggtagtaatgtaaactattttttatattatttaattaatttgtttattactttagatttgcaaaattagtttgattgtgattaacttttgatcattatacacataaaattagtgtggcagacagaatctagcaagtttaaaattttatgataaacttgttagttattattgactttctaatatttatttatattctcctccatcatttttgcttttttatgttttaaactcttatcatttttctacttttttctttaaaatatttgtatttgaagtttcaggtaattataattgaaccccttctacacaaaaaaaagtgttattttccctgcaaacaaagaaaattaaaacaaaataaaattatcttcaaaaacaccacaaaatgggacaattctaaaaaaagacaataaataaaatatattataatagaaatgcccaaaaattgaaatcaccgactttgtaaaaagttgaagctgccaaaagaatatatggatagtgacacaaaaataattaaataaattaaataataatttatttatatttttattatatttatacttgttagactaagacactcttatagtaatttatttttcactaattcccaacaattttttaatacacatatatgctttttctaataaaccacaattttaaatcactttcataaactttactcatagattttgcttctattaaattaataatacattttttttttgtctagttaaataaacataaatttcactccaataagtgtctcacaattatacccacccaaatttgatttatacccttttgtttttatacacaaaattattttttattcaaatcaaaacaatattttattttgaagattcatatcaaacaaaagtaatacatatgtataaatatatttatatatatatcatgcgtgtatctacaaacttgatttattttattttggggttgcaaggggatacgaatctataaggaatagtgttaatttttaataaaaattttaaaaataagaacatatttattaattaattaataaaattatattctattagagacataaaaattaaaatattaattaattaaaaaaatataatgccagctagtcaaatggtactcccatgcgagtgtgaagtaacaacaacgacaacaaacgccgtttgccagctcatcactccgttccgtttatctccttttataactcaaaaccaacattaaataacgacgccgtttaatgactcttctaccgcaaaccaacattaaaacgaacgccgttgactggactcttctaattccactttacgtcgaaaaaccaacactgaaaacgaacgccgtttagtaactctcgcaaaccaacactaaaacgacgccgtttaatgactcttcttattcactctaacgcaaaccaacaataaaacgacgccgttttatgactcttcttgttcactttactgcaaaccaacattaaaacgacgccgtttattgactcttcttgttcactttaacgcaaacaaacactaaaacgacgccgtgtattgactcttcttgtttatattaactccgttaattaaaaaccgttaacctaaattctcaccagattttcatattaggcccattttctggcccaaactttactctctctctctctctctctctctcatcttctctctctaacagtcatttcttttccgtaaaaacgttaccttctttgtcacgaattcatgtcggtacgtaatctcttttttgta

SEQ ID NO: 218126 - DNA, 4089 bp, Cannabis indica
atttttgttgttttttgttgtttttgtgcatttgtgaaattaaccctaataataatgctgaaacttaattagatgttatggtacacattgaactcttaacatttggctatagttattaaaagaaacaaataaattgaagggtctagaattcagaaaacaaagcagcataggggtaagagaaccgaataacaagacaatgcaaaaccaacagacatcgaaattaactaattaagacaaagaagcagcaaaccatgactaaagtgtggaatggaacctctacatatcatgcacacccaagggcacttcgaagaagatagagagctctcaataatcctcctcaaaacccaccaaagcatcactaattaatcacttgaccttcctacactaatttgagtttgaaggaaggataaaaaatcatccaacgctttgacagaggatcctttcaaatttccttcctccctagttgcatttttaatttgttctttgataatagagactttcatccttatctcccttcccttggcttctccatccatggccaattcaatcactctcttaacatcctcatctttaacacagctctcacttcccctcgtaagctctagacacactcccatctcctccacaagcatcttcgagttataggcctgttccgcggccaaaggccacgccactatcggaacaccttggctcaagctctcaatcaccgaattccaaccgcagtggctcaaaaacagcctcgtcgatttgtgggacaaaatgtccatttgtggtgcccagtttttcacaatcaacccctgtttggtttccgccatccttttttcgaaactttccggaagccattccgattgaaagtcttctttaatatcgaaaccaagcggaggcctcaccacccaaatgaaaggcttcccactcttttccaatcctttggccaattccatcatctgggctgatccgattgtgttctgagaaccgaaagagacgtatactacagactccggacgttgttcgttgagccattcgagacaagttttaaaaggaattcccaggtctttccgtgatgaatgtttgttcaatgaaggacaacatccaacagcccaaactgggagctgaaggaaactccgaaggctctccagtccaaggggttcgatctcctccactgtattacagaaccaaccatgagatttgagtgaaagtgagagttgtggctgcatgaatttcgaccaaagatccgttccatccgcatctctaacttcattattcaactgggagcgatgaaaacgacaccgttcagggaacccaggcaagacaaagtcgtgagaattagtgtgacgatgaggaaggtgaagccatgtcgaagctgtggctagtgttccgtaagcaccgcaagttgtgaaagtaaagttgagagttccaacgctcttagcaacatcagtggcccaaccgaaaaacatgtcggtgataatgcaaagcacaggacgaccttctttggcggctatgtcgtggagtaggcggcggaagggtaactcaagactgctggaggagtggagcatgtcgacgatctttgatggtggcacgttctctgtattctcattggggccggagaatgggagctcagcgaagaagagatggttatgatgattcttgtccgcgtcatgggaagaagaaatggttgaacgaaggtaccgaatattgagagaagtgttggctatggtgacggaaatgttgttgttggaacggtcgatgatctgggttgcaagtgctaggaaaggtgtgaggtggccgtgggccatgtatggcagcatcactacatgcagatgatccatatcgattgttatgtttgatattaagattcaagaatccattatatttgatgtgttttttttagcaaaaacatgatatttgatatatgtttcttcttagcaaagtcatgatatttatttatatatatatatatatatataaatatattatagtatcaaaaaagcctggctcatacgccaaaagtgaatacaaaaacttatgcttaagttaaaaaagaactaataagaagaaggaagctaacaaagaccgataggcctgaactcaaagcactcttaggctcatcaactcttaaacaatatatcagttgtgttaaacgtgttttaggctgttaataaggttgttagagttagttaattatttaactaactgatggttagtttgttgctgaattctatcagtcctatctgtataaatacattcactctgttcattaataaaatattcagattattactttcaataatatggtatcagatgcataaacccctctcttctcttcttcttcatcgttcacatactctgttccaccattgatattccaacatggtccgaacccgtgctactggatctcgaagttcaggccaaaatcctatgcctaatacttcttcaacaattccagttgctccgacgaatgatgatccgatcatccctccagtctctgcaatttctggagaacataaccacgcccagaatcttgttcatcgtcctcctcatgaagatagctcgagtccttattatctcagctctggagatcatcctgggttaatcttggttacccctcccttatcagacaacaatttccaggcctggagacgcgactttgagctctctgttggagcaagaaacaagacggtgttcctcaaaggcacattacctcaacctccgatcgacgatccacttcaccaccactggttccgctgcaatcaaatggtccagtcttggattcttcactcagttacccctgaaatcaagagcagcataatgttccttgaaactgcagctgcaatgtggactgaacttcatgcccgtttcgatcaaggtaatggtcctcgtatttttgaactaagggaaactctcatcacccttcgacaaggtgatgattctgttagttcttattttacaaaattaaagtgtatgtgggatgaaattcaggaattaagacctaggatcccttgtacttgtgctgcttcaatcgataaccttgccttcttgaatcaagaacaggttctccaatttcttactgggttaaatgaatcctttttccctgttcgtgcacaaatacctcattgatcccttcccttctttgtccaaagtcttctctatgattattcatgaagaacgacaaagaaaactgaaaaatcctcacatcccccttcttgcttctgtccaagaatccacccaaaaccctgcagccattgcccaaaacccctctgcctctgcagccactactcatcctcgttccaacaaaaagatgagaccatactgttctaactgtcacaaaccaggtcatttaaaagaaaaatgtttttttctaatcggcttccctcctggttatggtgataagaagaaagccgagacaccatctgttaatcatgcttcaacatcaactgatcaatatggcattcttgcaaatcttaccaaacaagaggacattcaagccattatctccttgctgactcaaaaattgcagcctacagatgcctccaacccctttgcttctcatgtctctggtaactcttctcttaaccctctatggattgtggatagtggtgcttcccaccatatttgttgtgatctttccttattttctaatgtgcataaaattcccatagcccatactgtgtcccttcccaatggctctacaataaaagttgaacaatcgggtaacattcagatttcaaaggattttatcatatctaatgttctctatgtcccaagtttcaaattcaatctattcagtgtatctagctttatcaatgatacctctaacagtatgcattttacttctaaactttgcacattacaggattttcagaacaagaagattgggacagctaaacgcataggcaatctctattttttgctgcagtctgttcctttttccaaattttcttttccttgtaaacagaatattcatacttgtaataatgcctattcatggcattctcgacttggacatccttccttgtctacaacaagattactgaataaaacattacattctactaatgattctatttccccttgttctatatgtcatttagc

SEQ ID NO: 218127 - DNA, 6601 bp, Cannabis indica
catcattttacccttctcgggtcataattactaaaattcccctggctcaccaacggggtcttaacatattaaaattcatatgaattcacatatattgaactatataataatataattcctcaattattcatagttatctaattagggttttgctaatccatttcttaattccagggtattacattggtcttggtctcacatgaacgaggttgcttacttgcctttacactcgtggttcatttcaattgtatattattttggagtctccccttccaaataagtccaaatgactacataattctctcaactttcttcaacttttactgcttaaggaatcaacctatttcaactcctcatgaaatcaacttcctctgtgacttgaaaagaagttctactcaaaaagaggaaggattctacaacttccaccaattcagcccgtacatagagaatgtgaccaagaataaatgtggcctttatcattaagcatacttttatactctggttcttccaaaaagacacatcaccttttagaaggatggccctttcaaaagactttctctgttgatcgaaataaagagaagagcagatgccatgctcattgatattacggcatgggaaagagattggaagactttgcttaccactaaaaatatctccaaagttggcctgataatgtcatgtagtgagtttacctggactcccttctcagatgactctttgatgaggcgtcttgaacatgatgaagaggatggccaaagtgaaaccatcattgtctttagaaaaatgtgagaagctgtgaattctgttcaaaataacccaaaaaaattagtgagaatgtttgtgtttttagaccgaagtgatgaagaagttacttctattaataaggtgttggagaaagttggggaatcagtgggttgctaatgctttgagttctgtagttgtaatcaactatcttggttttcatatctcttttgctatactgaacacttttcattccttctcagcagaaaacataagttgtttaggtacaatagcgacttattcgaagagaaagatcttcgtacaaaaggagacagagcctatagtcagggaagttgtttagggcatccttgctacttattttacttctacaaagaagacatctcagaaaataagtaaaatagttaaggccaccccttgcccaagactcagtcaaagggaagtctaaagtttctaaggctaataacggatctcctacttctccaattgagatttctctagatgatgtcgataatggtacttcgagcccaagtttacatttggtcgagaagttgtgtgcgcgggacacatggtttctttttggtggggatgctttcattggatctaaggctgagagtattctattgaagaagttggttagttcaaaagctcaacatgtcatttctcaaagatgcttcactgatatctttcgggtaacaatctgttcttgttttctctttgatctagctttcttatatttaccatatctgacttactttctctgttttcaggcttgtgtttgttatgcctacaccatggacaatgaacacaagaaggttgtcaaacttattgagaaacttatagctgtagagaagcgtgctaccgtttcacagaacaagtttgttgagttcgaaaaattcattggtgacttggaaagtagtgtatcttgtccttaaggagtggttgataatgcgaaagctcgagagaaaatcttgaagaaagatatagctgcttctcacaagaagatttataaggttgaagactctctttgtcaatcacttgatgagaattctttaagcagtgttcagctagacgaccaacttaacggccttgaaaccaagtgattgagtttgtgaagaaagcatttgctgatgttgccttctatgatggcttatgctttgatgccatttatcgtgcctggtcatccaatggcggtgaaaaatcattcaaatgaatggccttccctcagaaaaaaagtcccattctctatagagcattatgtgcaatgttttaatgacaacgctcttcaaaggattgactttatcttgaatggtgaggaaccaatggtcgaaaagctgccagggttgaaagcttcagccctgagcatcgtgacattcctcctcctactaatgcgccaccaacagagaacgaggaaaaaattgaagctattgttgacttagatagctttttggctacgtagggcactgtcttagtcctaatttttttccctttttagtttttatccttagtgtgttaatggattgttctgggcggccttttagtgtgaataagcctcagtaaaatgttgtcagacttgtttgaattaaactagaaattattccaacttaataaaaacttcattcagacttgcacattattctatgtcttaagaaacttgattactcggagtaacgtcaatgtttcttaatgttatctttaccatgaaaatacttacacaggagtgcaatttttttttgaatgctcttgtaagatatggctcttgtatacgattgcatatcctatgtaccccccaagtggtaaaagaaattcattcattggtcccttacaaaacaaaatcccattgggccttcttgatcatgactcctagggaaatgttacacgtgtgagcactcatccacttattgagagatttgcaggtttggagtgttaaaactcataaaagaaataaccaaagttatctcaagaccaactctacaagctttactcagggcttgagagattcatcaagtgtgtgggctgtaattgaataatattaatgaagtaacgaaaaaatttctcaacattttaattcatcaaaattaaatacaattatattattgcgagttaagttgaaagaaagagaagtagtggttgcaaattttcatttttcatgaagacataggtaaagtgatccacattgccttaatgccctattcaactagtagtgtaggggccataacttagcgatggaactcataacctaaagatgactttgcaacatctttttgatataagaggcgatcgattcacttgcacatggtaaagtgaatctcactgtgaagcgagctattttaagatatatgctttattggtaatatcatcttagatgcaccctattacagtacgtagtatgggcactggattcatgttgtattcataatgtgccaacttttatgttctgggttctagtgcttcagtgataatgtatggtctttccctagaaggtccgagtaatcatgttgttgtctctttagtgtttaggaatactagttgtaacaccatatctctaggctaaaatttcctatgtttgaccttaaagctatagtgtcttgtgactatttgctaatacacagcctgttagtgctcagacctttctcttatttcttcaatcccatctaaagactcattcaataatatattattggtgtgttggtcatatgttagtctccgatgtgatggtgttaggagatctatgagtatcattgctttgtacatgtaggttagagcaaaaggagtatggtttatttcttcaggacaattccctttgtcttgctctagttgtttctttaacgtatcgttaagagtctattaactgcatccacttttctatttgcttgtgggtaagagaccactgaaaaactcttgatgattctatgtttgtcacagatgttagtaaagagattgttgtctaattgcgttcagatgtctaacactatcttttgtgggagttcgaagcaacaaatgatgttctttacctcaaaatcacgaactttattcaatgtgatagtggctaagggctcttcttcaacccatttggtaaagtaatctaccaccacttctgcatattccactttgccttttccctttggtagtgaacctatgagatcaaatccccagataccaaatggctagggagtttgcacactcttgagtttgttcatggcaactctaggtatttttgagaatctctgacacttgtcacatttcttgacatactccatcaagtcttcaatcattattggccaaacatacccttacctcattatcttctttgagaggctttactattgcatgcttgtgactaaaacccttatgtagctccaccatgaggagcttggcttcctcttttgtgaaaaaccttagaagtggcattgagtagcctattttgtacattacttcgtccatgatgacaaagcatgctacttttctcatcagtttattagcttcattctagtctcttgagagaataccttatactaattattgtgcatttgggataatccatcatggattgttgtcgatcatcaagataggctcgaagtcttcaatgatgcttcgtttgacaacatactcaataggaactacacttagagtatcagagtctgttgtactagctagtgtagctaggtaatttgcattcgcattttgttcacgtggcactgtgaatcactgtaaatctcaagtgtcttagtattgaattctagtgctaactttagtcatactaggagtgcctcataatttactttatagtttgttgtagtgaactcaaaacttagtgcacagtgggttcaaaatttttctagagttacaacgatgagtactacgctagagtcgtgctcattggaggattcatctaagtaaagattcctagaaggtccataatgccttcttgagctctagtcttaggcgtgtgggcttggttctcacaaaccatggtgtcgtcttattcgaggcaagtgcattcagcaatgaaatctgctaatgcatttcattaaattgtagtgcgagtctgataggtgatctcaagttgacctagctctactacccacttgagtagcaccctgacgcttctagtttggtcagaacttgtcatagtggtttattagttaacacctagactgaatgagcttgaaagtatgacatttccaataccacgaagtgcgccaacttctcaatgaggggatacctagactcaactccaatgagacagtttctggcgtagtacaccgcgtgttgtatcccattctcctcacgcaccagggaagcactgtctgcatgctcagtgataaccaaatagatgaactattcttcgcccatctattggtttggataggataggaggacttgctaggttatgtttgagtgcttcgaaagcctgctcgtattcaccagtccattcaaacctcttttgcttccttttagtagattaaagaagagaacacacctgtcaatggacttggtgaagaatttgtttggtgtagaaattcgtatggaaaggctttgcacatcgtttacccatgatggtgacatcaaattttccaatgccttgatattttttgaattcacttcaatacctcttaagttgatactgaatctaagaaactttgctgattggaggccgaaggcacattttagagggttaagtttctttcgatattctcttaagatgttgaaccattcctctaagtctttggtgtggtcttaaaatatttttaacttgagtagcatgtcattggcatagacttccatattgtttctaatcaatttatgaaacatgcaattgactaatctctgatatgtagcatttgcattcttgagtttgaagggcattactgtgaagaaataaagtctgatgtctatttggaaacaagtatgatctttatctggtgcatgcatgctaatttgattgtagttaatataggcatgctttgtttatgttagtaaagtgggcaattcctctacttaccatttggtttaggcactagaacagggtttgatacccaaactgggtagaaagctttccttataaagttgttatctcatagcctttcaacttcttccttgagagctttagaatgctctttgtgaaggagcatgcgtttatgttgtacatgttcgaagttttctctttctatgttgagggcacgacagatgacctaggggtcgattccaatcatgtgctcatgtgaccaagcaaaaatgtcttatatctcctgatggcaagccatgagcatctcgctcaaagccgcagttaggtttgttccaatcttgacatccttagttgagtctgtcgtgttgagggaatttccacgcgttcctcggtcggaccaactcttgagtcaatttcctaaaatagggggccaatgtcatccttgggtgcaccttcaagtggctttgggttccatctctgtcttctccttggtttcaaccccagagatcttcgttgcctctttggcttttgtaggagaggccttgcttgtccccctggtgtcgaagtagcagaggaggtcctcttaccaaggggtaacgaagcattgtaacactcatgggcagtcccttgactgccaagaagacaaccaataccaactgtcgttgggaatttgatagacaactggtattttgacgagctagcttgaaggtcgtacaaagcttgcctttcaagcatcatgttgtgcggagacttcacgtccactactatgaacgtggccatgatgattgtcttccttggggcagtgccgactatgatgggaagtttgatcttaccacatggagctatgcttgctccactgaaaccatacattag

SEQ ID NO: 218128 - DNA, 4989 bp, Cannabis indica
taattctgaaacttctgtaggtatttagacattaaatataccaataagaaaatgactcgtggctaatgacttgacatttaactgtcaagtacttacggaagttctaaaaatataacttaagtattattactgtcaaaaattaaacttaactatttatctataatcaaaaattaaacttaggtaattacattgcaaattactctaaatgttttgaattttgtccttatcttggattggagttattaaaattcttttggtaaatattgtagacaatttctatggggcttacccaaaaagtgacagaggcgtgtaaaggtttcctcagaccagacagagattgaccctcaagttgagatatcaatcgagaattctacttactcacccgtcaagtagggatgaaagtcgaccttagtgattcgacaatgtcgagtgattttatgttttataaatatcactcattagaattttttattttgttaaataatatattgaaccatattttttaaaattgtacaatattcaattttcattactataaccaattgattcatttaaccaaatatattgttgaatttgtcatttaagggtttttattattcttacaaatcagaatgaattagcacttcaagggctcgtttggaacgtcgtattagatcatattgtattgtattgtattatatggaattgtattttatacaatatttttatgtaaaactatatgtggtattaacttttatggatagctaaatatataatattttagtataaattaaagtttaacatagtattatataaaaatatgatatataatccatacgacgttccaaacgagtccttagtattttaggtgttggctttcggttttttgagcaagttcccaactttgttaaacccaaagtaatttagatatttttcataaatatcctatttttttatatatattttctacaaatttaaaactttattttctaaaaaatacaaacaattatttttcgtgttgttttcacaacattataatgtattgtttacactttgcttttatatttgtgttatattatttgcatatttttatgttgcttttataaggctccttaattaaagataatttatgtctgagcgatttatgtttctcacaaatttctcatattcttgtgatgatttttacattaatgtcacatgtgagtgaattatgttttctttcttctttgcctttgaactattaattttaatttattgcttcatttttgtacataccttataaaaatacaaacatgataatcaactagcctagtagaagggatgtgttgttctttctcaattgggagaaaaagcttagtccattctttcctttcactctaaggatatgtttaggtctctaaggtgttttgatggattcatttctttccattccaagtgttagctaacaataagcgaacgatcaatcagtatgctcataaaccgagatcctacagtttgagagccaccctgttctttataggtcgttgaagcccccgatcaagacctatgagaccatgtcgtcgatggagttgcctaatgatacgacttatagggatccgttttcttggggtcaaccgatgttggattttaaacaggcgaggacgcttcctttgatactttctcctatgcttttgtaccaacctgctagtaaattggcatggcatctataaccgaaaaaactaacttaagaacacaaaaggagtctccttgttaaaagctacatgaaaaaagtaaagaaaatcttttctatttaagaattgtgaaacagattacaaaacaataattaagaaaacaaaacagtaaaggattgttattctttcatgttattatgtttttccctttctttacaataacattgtgacaatgtcagtccaaaaaaaatgtgaagtgaacaaaaaaaagttgtatggcttgtgtcaaagagctctaactaaaaaaaagagcacaaaaggaagaaaaaaccagaaaaatcttacttctgatattctcaatcttaccagaagttgtttggagaaggtatgtgtctaaactcggtgtcctttcgatcaagagaacgagaaaatcgtctagacttgtgtattttcattttaatagcaggtacttttcgagcaacagcttgccaaatcatttgtacagcatcaccttccttcgatggatactgaaactacgtaaaaactttcaacctctttcattctattccacattcgagtccattcctccttccctatactcttgacaaggttaatgagaaatttctctttaagagcatcacttgtacgacaaagatgcaaaactctgagtagtctaggacatcctcgtagggtagttcaatatcgtcgctaatgatgacagggacacagtggctggcaatggcatcaaagaggcgatttgatgatggggtgtcccctgctatgttgagacagaatttcgacgagtgcattccttgtgtagccttgtgaatcccgctttttgaacactcccgaattgaaaatgcacatctttttcatctttcaaaagatagaataattcttgcctaatgaagccaccctgcagatagttaccgaaatataaggaaagaacaacataactctacacaccgatacaaatgctcataacaatggctagagtggaatcgaaacagaaatggacattcttgaaatacaaaaagaaaaaactgtgtcatgtcaagtgaggatctagagcaagtttatctgtataaattgaattcataatggtatgaaattgaaaagggagtatctaatttagaaacagtgagcatcatcaacttaacccaaccatatggacagagttgagcataattgagttgcatattcataattagagcaacctataataattgtctaaactatgagaattgagattcattggaaaactatactttggtcccaatgctattctactttacatcttctaacatagtcaagcttcattgatgaccaaactaactaggaatacaaatgacaaatcaaaactcaatataatgcaaaactcttcatattcacatatcaaaatcttcacaagcaaacttttaaaacaaatgttaacaaagtagaagaagaagaagatgagaacatacatcttttctatagattgctccttggaagtacagcaaagtaggccggctatcgaaaccagatgaatcattaacaaaggttctaatcacatgtttgtatggtgcaatcacatccttttccacatttgctatattaggaggatacctaccaaaatcagcaagtataaaagtagcaggccaaagcttcatccttgcatctaacatactattaggatgatgagcaacaatcaagtgatctcttccacctgatctttgccattccttttgagcaatcaaatacctcactaacttatcctgaagtaacttgttattgctcatcttttgattcgaattcgtcttcgaatatcggttataactcaatgaagaaaagaatggtacaaaaacaatgtcagcttcactagcattataaactcttctaacagaactagccttaggtggattaacaagttctgaagcaagaatatctaatgtaagccaatattctatactatgttgtaaattcaatccaccaggataatcaggaactttcttaagaagattaggccatacttgtttattcttattattattatttccttctggttcccaacctaagagcccaaaatgaaattcatggtttaaatcatacatgtaaactttaagaagagaatctttattattattaatactattacttgtttggcatgaagaacaaggagaagaagaagagtcttctctttcaccatttccttcttcaaaatctgctaagactgattgaacagtttcaccattgttgattgatgatgacatcaccttagaatttggtaacaagctgtgatctatgaaacgaggaggagcagttgaacgcaatacaaagaaccatgaaaatataaagacgattgaagcaattgtaaaaagacagaataatgatttacgagcaatgattccaagagctaaagcattattattcctctcagccatttcgattttcttcatttacataattcctttcacccaaagtttgaatcttcacttcttctaagacaaacccagatggaatctaatcgattcaagccaaacccaccaatggaaaatgcagaacgaagaaaacccagaaggataaagtgataaagattggatttttgctgttgggtttgttaaggagggaaatggaggaaggataaagtgataaagattggatttttgtcgtttaatgtgttgagagagagagaaggaaatggattgaatggaagaagaagcgtgggaatcggattagagaagagaggttctcttctcttcttctcttttctattgttctattctatggaaccgggcaagcttggttcttaataaatttattttatttatttacttttctataaaaaagaattgagtttcaataaaataaattaactattttttttttttgagtcaatttagatttttttttgttagtcaaagtaattgctacttagtatcaactcaatcatgattattttattcaatatattaattaattagttaataaaaaaaacacagaaatcataaattgaagttattcaataatccacgttttgggtaagaattattagtgtttaatagttttcacccttataaatgatcatgagttaatagatatataacaccctatttaatttaatttcactaataataataaaaaatattaattattactttctattataattcataatatttttttatagttgtactaataataatgagagtatgatattttaatttaaaaaatttaaattgatattaggtattatgaattatttaaaaatttacagagatgacattataactataatgaatacaattataaaaattaatatcctaatatatttttaaatacaaaaattaactaaaaaatt

SEQ ID NO: 218129 - DNA, 7179 bp, Cannabis indica
aaaagtaagagagacagaggaaaagttagtaaaagctgaagagggaatgaaattgtctgaggagaaagcaagagaagctggtgaaaaagtgagggaggctgagggaagagttatgaaagctgagatggaaactaaattggctagggagaatgctaaaaaaacagaagaaatgttagaacggttgctgaaaaatttgaagatggctgaagcgaaagcaaaagaagccggtgaaagagtaagagagacagaggaaaaggttatgaaagctgaagagggaatgaaatttgctgaggagaaaactaaaataacagaagaaatgttgatagatttgaagaagattaagagagaaaaagtggatgagattgctcagctcaaggagaagaacaaggttttagagtctgggaaaagtagagctgagaatgatactgaagtttggaagaatttttttgaagaattggagaatagggtcaccttgctagaaacttatacagaaaatgtttcaaaaatggaatctctggctacaaaggtaacagccagagattccattgagtctaacaaggaaaatggggagaagggtacaagtaaaattgatggatttgctgttgtttcgggttctgatgatcttccttcatctccaacttgtccaatgaaccaaggttttccaagtaagatctttgtttgcattgcttcttgtgattttatcgaaacatagttttcttttctttcgtacaccagcttatgtggcgaatttcactttaaacaatccaattgggccaagtcatcaacgtagaggttttaacacctgagtcttaattttctgcagccacttgaatcactgaattcagactttcttagtgaaagtttatgactcaattcacataagaaacagtgggacatttgattactttgtttgccttgattaggtggatagtcattggttatatttgtattgctttattatgttcaagaaacatagcaggctgattgtttttgcctggattagtcttgtctttcaatgacttaataaaagccttaatcttaatgttgtcaaacttgtcaaagattatttcactattttcttcatatttctttactctttctctatgatacgagcttatgtttttctttgggaggtagaattagggagagtataacaatatttcagaaattttagtgagaggatccatgatatgtgcttcaggtttcaacgctgccattaatcattctataacataaatattgttctttcattatttttgaaaattgatctgatctgatttgtttaactgtctaatttgcttatatgctttgtgtatcaaaaattgagttattattgttagatgaagtaggcactgcctaagttgggattgacattaagtcaaagaaaatgttttgttaggcattccataaatataactgaacaagtatatatgtatccacacttgggtagatatgcacatgtaagattcctaacttccatgttcaatgcaggtgacaagatatctgattttgaacaacaaattattgttattattgatagtgatgatgaaagttctcctcttagaagtaatttgcatgataaaagccctatagatctgaccaattgggatattaagcccatacttgccaaacgaaaaagaccctgttcgcctaatgtaagtgggagcaagatgaggcttgatgagtgtaaaccttctgagaaccgaaaatcaccatcaagacatgttcaagttgaaagtgaagagaagataagagaagacaaaagctctccaactactcttaacaagctaacagttggtgatgagagtgatgctttcgattttgaggttagttcctcatcggacagtgatggtggcgttgatttagatgagatcatgtcagaaagccagagacctatttaactaagataagcaagtgtagatatacagattcactaaactaacacagcatgcttgcctagaatatttgtgtaaatgtctatatatatatatatatgattagtccactaccttaccttaggaacagttagaaaaaccattctttcctttgttcctcttaatgtatatatatgtttaagttaaggttgaaatagttgtctttctcttccccacatttgtacaaaattagcaaattgactggtattagtcaaagctagacagatattagtaacaagttaaagttagtatgtatatgtttatatttgctttttgcaagttaaagttggtatgatttaaagaatgtttgatgaatatatttttagtatttttattattattttgtcataaagtagaaaaatacaaataaaatttgaaaaaattccctaaaaaaaaattaaatgaaaaaatataacaatataaaattaattacattttttaatttttgtttggatgaatgtataatttttaaatttaggattttttattttttatttttatttttacactttaaaatatatatatatatatttttgatatttttacgtaaatttacatagtaaccatcgaaagaatttaaatcgtaactaaaatccacaaagaaaccattgaagtaaccaccagagcaatccgaaccgtaaaaatgaaaaaaaaaaattaaaaaaataaatatatagagtaattttttttaattttaagtatgtggataaaatttccaaaaaataaataaatataagaataatttgtaaaataaatatttaagattaatagtgatatcattcaaaaaaaaaaaaattaaattgtgataaatagctaaattttatttttaacagtagtaatacttaagttatatttatatttaaaattaaacttagctatttataatttactaagcttaattaatatttaaccaactaactaccacccttgtcttagactctttactgtttatattttaatttacagtttggaaaataaccctaattacggtgctctgctcccctccgacgactacgaccgacgccaccctactccggcaactacgaccgacgccaccccactccgacgactacgaccgactccaccccactccgatcccatttcctaaacctttggtatcttttcctaactttttcactacagtcatactaaatttatttgagctccattacattgttgtatttgatactctgtactctatttctactctgatttttgagaaattgatgttgttaaacttagcaaatggtcaaacaatcatagctgttgccttttatttggttagaacactcaaagtttgtttttttatggagtattatttgatactttgtagtgaagatctgatctgatttttgagaaattcatgttttcaaacttaggaaatgatctaaaaatcatggttctgtatatcattgccttttcaattttcatttgcttagatagaacacttttaagtttttttttcctaattttttgtgggttttggtgtgacagtgataatggaggttgagtctccgcctagttttagtctggaccaaagtgatgacgaaagagctgaactgagcatttctgagctcatttatgatctcagatcggcattcaggagctctgattttgaccgagtcgaggagattctggtcaataaagaaaacaagatgaagaaacatatcactgagttggagtctgagactatccgacttgatcttgaggtcaagagattgagtaaaaatagtagtgagagtagaatttcgagggagaattatgagatcatgagaaagagagtgaaggtggctgaagagaaagcaagagaagctggtgacaaagttagagagacagaggaaaaggttgtaaaagctgaagagggaaagaaattggcttgggagaaagctaagaaaacagcagaaatgttagaacggttgcggaaagatttgaagatggctgaagagaaagcaagagagacagaagaaacggttataaaagctgaagagggaatgaaattggctgaggagaaaactaaaatagcagaagaaatgttagaacgattacggaaagatttgaagaagaatgagagagaaaagttggatgagattgctcagattatggagaagaacaatgattttgaatctgaagaaaatagagctgaggatgataatgaagtttggaagaaaattttggaaagagttatgaaagctcaggaggaaactaaattggcgagggagaaagctaaagaaacagaaggaatgttagaacaactacggaaagaattgaagaagaatgagagagaaaagttggatgggattgctcaggtcaaggtaaagaaaaaggttttagagtctggagaaaatagagttgtggatgataatgaagtttggaagaaaacttttgacgaattggagaaaagggtgaccttgttagaagctgaaacagaaactgttttagaaatggagtctctggttactaaggtaacaacagccagagattccactgaatctaacaaggcaaatggggagaagggtacatgatggatttgatgttgtttcaggctctgctcgtcgcccttcacgtccaaccttatctaatccaatgaatcaagatttcccaagtaagagatctttgtttgcattgcttcttgggatttacttatcaagcatgtgtttatttgagttaaaaggaaaatgctaaattgctaacataaagtagtataaacatgcatcagatctaagcgaaaaagttgattcataatgtgagtttgaaaggattaaatgttatggaaatgacttttggagtttctactgataaaagtaggacatttttgtaatctattagatgggcctttatcattacctgaatgcagtaatcaccaaataacttcattaatatgttaatgtttgggatttctgggattcatatttcaaggttcggaatgtctgcaaagagtagttgtatgagatatactaggtggtaggttgatcaatgaatctatttgaaacatatgtgtaattacagccttctatttatcaaaacagactttacaatacaattgagccgagtccgtaacatagaggttttgttttaacgctgaggcttagatttctgcagctacttgaatcaccgaattcggactttattagtgaaagttatgactcatttacataagaaacagtgagacatttgattaggtgatagtcattgggtatttgtatgattccttttgcctggattagtctgggttttcaatgagttttgcagggatggtaagccagtggtacttgattaaagcgccttttaatgttgtcaaacttggcatgatgatgtgcttcaggtttcattttgttatatgcttagtgtatcgaaaatcaagttcgggttgataacgtagttattactgatagatgactaagttgggattgacattttgtctaagaaattgttttgttaggcattccataaatataattgaacaaggatattctttttttttttttctctttgtttgaatatgaagactgatctagtacatttgagtagctaagatacctaacttccatgttcaatgcaggtgacaagaaatctgattttgaacaacaaactattgttatcattgatagtgatgatgaaaatgctcctcctacaagcttgtactgtctccgaaaaagatcttgttccctgattgtgggagcaagataaagcttgttggtaaccgaaaatccccataaagacatcttcaagttgaatgtgaagtgaagacaagagagaacaaaagctctccaactactcttatcatctctcttttaaagtaccacttctcctagatcttaggatactgtctttcctatccttgctaggctccgtctttttattggatttatcacagatatttcacatttacctattcattgttatttgatacattgaggtcagcaatgttggtgaattaagtgttaatgggggtatggaaagagagggattcaaaaccacaaaagcctacatagcagttctagtgctgagagtaagaggtcattgttcgaaggagtgatcctaggctggttggtcacacaagggataaccattgagccaagcagattgccataggttgagactgatgctttcaattgtgaggttagttcctcatctgtcagtgatggtagcattgatttagacggccacataccctacttaactagaataagtgagtgttagagtccagtccagttttgaacaccatttcggtcttattgtttgtcgggccggggctgttgttcaaatttgagcaattgggtaattgaccaagataccaagcaattactgtatttagagggacatcaccagaggatacagtagccacaacatttattacaagtgcaacaccattaacagtgagctggaactgaataaagttttgaatatttgcatttatgtccccaatgatcttcatgtggtgtaataaaaaactctaaagatgcatagttgtaaaacagatgcaaatctttatcactatgatcttcctgaggctcttgaggagaatacttgggatggctaaatgagcaagttatgtaagtataataccccaaacaacataactcttaatacacataaattcagaagtaagaaacaaaaggggtggatgcagttaagttcctcttcaggcaaagcccaatggctcaattcttcttcatctgaagagacttggtccaactcgtaggacctgtatgtatgcaatggaaacacatcgcagactacttgcagccatgttatcgatagctgtcttgaaaaaaatcctgcaataagaagatgaaaaaaattgatccaaaacaattggaggaatcttctatctgggtgattgccttttgttttaattccaattttaattctacaaaatatttgcaactgatctgataagaaataacaaaacatcaatgcgcaagtaaggatagtgttttatgtctgtcaaaatgaaatgcagttaaagagagtttgacatagaacagtttgaaagtgcccagcatctccaacagttcaacagtagaagagaacaaatacaacattcaaataagtgggaatgatgagccacataaaatatcaattcattttcgacgataaatttagcttatagtaactttaaggctaattagtaatcttttcctccgaactttgacatgtactaaatcatatcccctaaacttttttggccgttagaaattctcccgaactattgagatggttaaatttaaggacttttgtctaa

SEQ ID NO: 218130 - DNA, 7543 bp, Cannabis indica
cctgaaattccttcaatgagcttcccatgttcgtcccgtgctacacaaccgaacccaaacttctgctccgccaaaaatattgcaccgtccacattcactttaatggagctggacagaggctttttccaacactccacaccagaacatgaatcaaaaaccagcaacggcccaattcgttgcacctgagcagcagaccactgctgtaaagtggctcgggcagagagaactacaccagctgtagtgcagtttttttgcttccagaagacagcgttacgggcgttccatatagaccaactcaccatagctgtatcaactgaaacctcaacagaatgggagtccagaatattaaaaaaccagcagctaaaatcgttatggaccccaggaagaacagtcgggctggccaaattccaacatgccttagcgaaatgacattccaaaagcacatgtgaaatggtttcatgaaaggtaaggcagaatggacactgaagatccacatgaacatgctttgtttgcagttgcactttagttggcaaacaaccagaaactgcctgccaaagaaaatgcaaaaccttcggaggaacccccaacttccataaccttttccaacccgaaacagcatcaatcaacgaccaattaccacgaatagcttgtaaataatggtacgcacttttcatagaaaaaatacctgaagtttccatattccaagaccacttgtcaatagagctttgatcactaagttgaatagagaggattaagcctctatctctagtctcaaacagatcattgatcacttctacatcccaagagtggtcatcaacacacagtagtgagtttacccgctggttaacaaggcctggatgcgatgatatgacatacggattgttagaatcaggcagccacggatcttgtaaaatattgatagcacgcccagacccaactgaccttcgagctcctttcctcaccacatcttgagcttcaaacatactcctccaaatgaaactaggattttgtcctaatgtagcagttaaaaaactaccattagaataatatctagccttgtacatccttccaaccagggaggtctcgttagttaacaagcgccatccttgtttagcaaggaaagataagttgtaatcacgaatatcccgaaagccaagaccacccacatgcttgtgttttgtcaaccttttccagctcatccaactcacacctttactagaagagttcgactgcgatttccaccaaaacttggccatcaaaccctctaagtccgaacaaatctccttggtcagtaagaagacgctcatagcatagctaggcagtgcctgagcaacagaccgaatcaatacttccttaccagcttttgataaaaatcgactctcccaattgaaaatccgcttcttcatcttctctttgagaaatccaagaattgcatttttattccgtcccataatacacggcaagccaagataatgactgttctccgaagcttcagtcatttgcaacaagttacacaaacgggaccgagtatcaacaagggtattcttactaaagaaaatggatgacttagcgaaattcacttgttgacccgaagccatttcatacaattgaagaacctgaagaatactagtagcctcctcaacattagccttgcagtacacatagctatcatcagcgaaaagcatatgcgagacaacaggagcccctcttgccactctaataccagagatacgatgtaaccgttcaaagccttggaaaagagaagagaacccttccgcacaaattaggaaaagataaggagacaaaggatcaccttgtcttaggcttctcccaggtgtaataggccccatactatgcccaccatgtgttaccttgtatcgaacagtactaacacaaaacatgatcaaagagaccaccctcctatcaaaacccatacgcaacaacactgattcaatgaagggtcactcaaccctgtcatacgctttgctcatatccagcttgagtgccataaaaccatctttccccattctttttctctttaaataatgcattatttcaaatgacaccataatattatctgaaatcaaccgtcctggcaagaaagcgctttgagtttctgagataacattaggcaacacaagtttcaatctattggccaaaacttttgaaattactttgtacaacacattacaaagtgatataggccgaagatcagacataagctccgcattcttcttcttgggaataagaacaatgttagtttcattcaaagaaggaggaagaaaaccagtggcaaaaaaagatcgcaccaacaaccgaacatcctctcccacaaccggccaaagtttctgaaaaaacaccggagtcatcccgtcaggtcccggggacttatcgcgatgcatttggaacaatgctttctttatttcctcatcagaaaccgactcaagtagcatcagattttgatcttgcgacacaacgcctgagactgaatcaacaacatcatgaagctccaacactcccggagtaaacaattgctcgaaataactagtcatcacattaggaaggccaccgtcccatgtttcccataaaccttcagcatttcgaagcttctgaatagaattattccgacgccgtgaggatgccatggcatggaaatacttcgaattttgatccccatctctcaaccaaagttgcttgcttcgttgtttccaaaagatctccttctgaagtaacacattattaaactcaatctcagcatctttgaagttttttaccgccaaaggatcacgccctttcttccaacgtctcatttcagctttacacttattcaatctttcctggaaatttccagaataatccttcccccaagtacacaacgcctcgctgcaatgttttattttgtctaaaacattacaacccgaattgatgttccatgtgtcctctattatcttgaaacagagaggctccttaagccaagaattctcaaacctgaaaacctttgttttgacagcacccgaacactgagttaagaccaaatgaaggggagtatgatctgaagttgtagtttctagattccacaatttactagaaggaaataaatcaagccaagcttgactcactaaagctctatcaatacgaacttcaacccactccgaactacccctcccacgttcccaagtaaagggataaccaaaaaaatcccagtcaaataactcacattcaaacagagtatcacaaaagccttctattaaccaattgggataaatattacctcctcgtttgtcagcttgagaagtgacgttgttaagatcaccaataatgcaccacggcaagggcgacttcaccttcaacgaacgaacaagatcccaagtgcgcttccgaaggcttctatttggttcaccataaagccccgttagtctccatcttcggccattatcctcagtaatctcaacatcaacatagtttcggccatatcccaaaagttgaacctcactctcatttctccaaagcactgccaccccaccactctttccttgaacatcaactgaaaaagccccatcaaaacccactgccactcttaatttttcaacaacaaccttttttgataaagtctcacataagaaaacaaagttgggcttcttttggatcacaagatccttagtgaattgaaaagcccatggattctcaagcccatggcaattccaagctataacactcataatgattggtgggcttggagaccaaggcccaccttcaacacattttttggccccactgcaaattctccagcagacaccacctcagcactctcctcctcgtgcgcgtctgactttttttcaacctccatacgcctttttttactatccagcacacacacagtatcatgttgagattgactttccttatttagctcctccagaatcatatccctacttccatccaacaactcatttgaagatttccctgcattaatgggatgaataatcttccctgctgatatgacagagccaatcacgccaggattctcacgatcaacctccataattctaggcgaattcatagcctaatcgtttgtactggtcaaaccttgcacaccgccgtccatggctgcctcgtcttctctaccagtacggagccattgagccccaatcaaatagttctttttcttcataacagctcttaacccactcccatatggcttaacaatttcctcaattggtttttcaaaacgtttcagacaaaaacgctcggaatggccaatgataccacaaatgaaacaaaaggtagggagatgttcatatttgaaattagcccatatccactcactgttttctttgcttaacttcattcttctttttagtggcttatctatgtcaatagtagagcgaactctaaggtattccctccaaatgccattgaagttttttggatccgttttaacaagagaaccaacatatgcacctgcactccgaaccaccttatccatcatgaaacctgattttagatcatgaatctgcacccacatgtcaagcttatggagatgcacactccttgggtcctcacctttcttcagtcgatgaaacacaagaggaattctgttaaacgtccatggattgccatctatcactgcttgaacatcaatctcatgataaaattggaaaacatatctattcgtatccaattctttgatatacacacctttttcgggttgccaaagcgaagccatcatatatatcatagcatcgaagtcaattgttcgacccgttaaaaacttgcccaccaaacaccacctatcatcaaaaattaattgttcttcatcatcttcccccgagatcagtatcccttcttcctcctcttccaaatgcaattggtcatactgatcctccaaagtcacgtgaaggttgctgcttgaagccatcacaaaaacaccacaacactctaacaaacaggacaccaaagacaaaaaatcagattcacaaaaacatagactcaactttctaacatgtcaatagacaagacatcctgtaattacaaaactacttttttttagccctcttgttttaaatccacggccaatgattggaattatgttttggtaatcttagtttagtatagaaattaatttgtaatcatataataacatattcatacttaaaagttattatatgataacagaggatatatttcaatcacccctttagttcacatattaaattttgtttaattgtaaaatttagttattttttagtaactaaatggtcttgttattttaaaaagataaaaagaaatggagagagaaataataaagaaatatttaataaataaataaaatattgaagtaaatgaaacatagaaatgtattatctctataaatacaagtttttgagatctcaaataacttttacaaagtctttgagagctttttttgaaattgtgtcatattaagactttatatagataaattttcatttttcattgtattagagcttctcacgaaagtcattcatgagttaaattaagtttagaagaataattttaatctaataaatacatagaaagtcaaatttcgcttatgtaatgctcatcaattaaattgaagaaattgagaataaaagtagtaccaaattattattattattattattgggattatagttagattttgtggggaaatagagtggtttcttgatactcaaactgaattggttagtaattatcatttcttgtcatcttagccagataagaaagttatgcaaatgagttaaaataaaatttgtatgccaatttcagccagaaattctcatcacaaggttagtgacaactttttttatttttatttttgggttacaatttggtttttggagttccttgataatcatgttgataagagcaactccaacttgacttcaaactttggggttacagtagaaaaacttctccaacagagcatcatttcatcaccatatgcagttgtagctacagtgcacttcaacaacaaagaaagaaggctatataaaatctctaaacagaacccacttcaacaaaaacatgttcaaattggtaacaaacaaaggctaaagttagacttagaagattagactaagagaaactgaatataagtatcaccatcattaagaactaaactacattatttttttaatgatggagactttgagcgaggttggctccctaggctgaaactcgaaaacgcatgcatctcctgtgtttagagagttggcctcaagaaacgcagcccaacctttggtaaaaaagaagctagccttgcattttagaagtttcacatcccatttcctactcccaactttaagagataccatctgagtctttgatccaacatgattcgtaacgaaactatctggtagacgctgcagcaaaaacagaagaaactcaataaaaaattcataaacaatatgtttgcttaatctactaactcaccagattatactgacgattgttgtttgctcttataattcttttgaatgatggattgtttgtatagaattggctagcttgtttgtaagctttagtatctctgtacgtattatatgccccttcattcctcctcttcatctttctagttgtctcatcttcactttcttcactaaccatggaattgcctacaaataaaaaaacagaaccaacaaattgttgaacatatcctataatttctcatcatatttcatatgtaagatgtttcaagttttgacatacctttgtaatctgagttagaagagcactcctcacttgatgttaaattaatcacaggtgatttaccattcttcttctcatcagaatagaaaggaaagtgagtgtaatcaatctcgcacgaactatcatcagttatgaaaacatcaaagttcgaattccctctataatcaaatattagtagctgcctatctatcccataatgtttgaataaatttttgccaatccttttgaaggattatattgtcattttgtttaatcaacccaatcttccatgtatggccacatggaagaacaagagacacactactggccagtgaatctccaaaaagcattccaaacttttgtggaagagcctacatgaatcacaacaagtatagttagacacatctatttaatatatgtcaaaaccgttggagcgaaaacctgaaaggaactatagatctaagaatgattaccagttgtatctttaaatgttcattcttaataattttgacaaactttaagctaaccatggttcaagttcaagatttgcctcgtttggttctgcacacaagaacataaatacatactaatatataatcattatccataactcagatgggaatacaatgaaagcttttgttgctatgttgagaaatggaagttttatgaagctaagaaactcaatgcaatttctctctttggtacaattcaaaggaaacatcacccaatgtatctttcttgtatttttgagaaattgtggagaactagaaagaagctatcaaacttaagctaaaacaaaactaatatactttctttcgcataagtttagctg

SEQ ID NO: 218131 - DNA, 1701 bp, Cannabis indica
ttttttttttttgggttataaatctatttggatgaatagcgacataaatggatgatagttgataaatgtgtataaattaaatccatttggataaatttattttgctattttatttaattttatcttgaaatgaatgaaatagtggatgatagttaaatgtgtataaattaaatatactttatcttttatacgttaatgaataatagaataatttttttataataatttatatttttatttttaattttctaatcattaaaataaaaaaagtgaaaactatttaatttatattcatttattaattactatttattgtgttactcattttaaagtaaaattgaacagaatagaataagatggaaggatcatcttactttaaaatgtatatttcgagttgaaaaagttgagactaaaaaatgctaattattgtgttaaaagattatgttaacgacgctcaacgacttgtcgtaaacttcgatcatgggccttggcccactgaggcccaaccgtcccctcaaatatctcaaagaaactgcaaaaacctttaacctaagcatatcttcttcttcaaaaaccctcctctcactctcactatctctgtaaacctcaacaatggctcaaaccctagcacgagccatggccaccataacagctcgcaaccctaccttttctctcctcctcccgaaacgacttgtctctaccataaccaagccccctaccgttccagctctcattctcggtcgtcgaactctcactcctctttctcacgccgttaagtccatttccgttaatcctaaccgattcacctcgattcggtgccgggttaacaggtccggtacatactctcctctcaactccggttcgaatttcagtgaccgtccgcccactgaaatggctcctcttttccctggatgcgattacgagcactggcttatcgttatggacaagcccggtggtgagggcgccacgaaacagcagatgattgattgctatgttgaaacgcttgctaaagttcttgggaggtctattgtcttggccttggcacatttggtttatgaatatctcaatgtttctgttttgactataaatgtacaaactttttaaactctaattttgtggttttattcagcgttgaggaagctaagaagaagatttacaacgtttcatgcgaaagatattttgggtttggttgtgagattgatgaggagacctccaataagctagagggtatgaaatttgttttctgataaggctatgatatgatatttcagatgggtattattcattgtcattgattttcattcgtacaatgttttgaacaggcttgccaggtgttttgtttgtgcttcctgattcttatgttgaccctgaaaacaaagactacggtggtaagttgagacgagctttgcttagttaattatttttcatataatatatttatggaggcttgttaagtttgttgtttgggctcttagttaaagaaaatggactagtaagaatagagatgactatatcgtttgactattctctgataagttgattagtaagaattttttttttcagttcaaccgtgatcttctaattgtcaatgatgttgagtttctgtggagatgttggtagttaatactatttgtctccgaaatgaatctattactatttttcttagtccatcatggcaatgtatgaaaccttacaaataat

SEQ ID NO: 218132 - DNA, 8272 bp, Cannabis indica
taagttaaagttaaaaaaaaaaaaaaactattttgaaatgtaaaaataaaaaaatccttttaatttattattattattagttttttttttggtaaagaaaagtgttttgtaggggtttttttttagaagttattcttttacttcacataatacaacaaattaaaaatacttatactttcttatgtgtattataatcgtgtcatttttcaagttgaatgtgtccatcaacctgagtttgagataaaaattaaatgtgttacccaaatttatttaatttgtttttattgtttttgaattgtgacgttgtattgtatcgtgtcacaaagttcagcctagtatttgctaaagctaagaatacaagtgtataaccagatggctaaaaaggactaaaataaagttgtaattaaatcagatctttggctgccgatgtgaaattcttacctaacaagttacacacttgtaattagaaaagcttggtaactgttttaagttactaatgttacaaaaatgcagtaactgatatcctaaaatgtttcacaatcatgaaaatgctagataaaatatttttatagcaatgattatggcacaaaataaaaaaaaaaaatcatacataatgatgagcccataattttttatgtgatttggatgttaaaaaattttaatttagggttcaatattatgaaggtgttgtatgagtataacagtaacaattttctcacagacagccctttttcttaagaattgaaatttgagatttttttacaataagggtgttgctctatttatagacaatgacttccatgggccttattagcaaaagtctatttaactaaacatggtttgccctttttttgggcaggttggagagctttcactacaagaaaattggtttttgtcggcgagattttgccccgacaaaagttaactagaaacgctgagaaagttttaccagcgaggtactccaccgacaatagttgatggaaataaacgatcgaaaaggggtttacgttagcaaataacattatttcgccagtaaacgtcacttgtgccggcgtgtgaagtcaccggcgcaaaagtcgtcgtcgacattgatgcgacggctgaataattttggcaaagttttcctggcaagctaagtcaccgacaaaacgtttcttgggaattttctagatcgtggaaaagttttgtcgacgcatgtaacctcgtcggcaaaaacatttccaaataatttttgaggttgcaagaaagtttttctagcgcgtgaaatatcgccggaaaaaaatatttctgcattttaaatttcttttaataggttttgccatcgcatgtaagtgcatcggcaatttttttttaaaaaaagtaatttctttaatattataaaatataaatataatttaaatttaaattaaaactaaaactaaaatttcataaataataataaaataatataatttcaactgcacattataattatactaaattcaagtaaacattataaaactaatcaaaaagtcgttgtcatagtttataaaaaatagtaaaaataaaagtcacactataaatcaatagcatcatcattgtcatcgtcgttttcactgggagaggaggcttctgatgaaggtccagtgccaagagaacatatcgatgaaatcggagatatctcgagcatgttgaagctaggaacgataccaaacaaatacctgaattgttcttgaaacatattcaggtattgattatgagtttgcatcatttgttgctaataagtattacgtgcttcctgctctttcacccttcgcttcaacacctcatattcctcgacgctgacagtaggttacggagggacctgccctgggagttgttcttttagcccatacactaagtctaggcaaagggtcaatgccttaggtggcgtgatcactcaccaagaacctatgtcttaacagtcaggtctgcaggaaactgggtgagatctacatcgtactgatgaggggcatttcttggcgctagttgagttttgcatatctcaattatttaggcctacaaaaaatattaataaattggtaaaattgaatagaaattaaatatagaacgatatgactaaggatataaaattacttacatgtctttgttgtgtgaattcattacatcaattgttgttcttctggtagaacttctcaaaagtagccacgacactaggaaattctcccgtctcaggattagtctactgttttataaaaaaagaaattagtaatatattattcaaaacttattaatttttgggcaataagatctataattatataccctgctgacgatgtggccgataatggtctaggacctccatccaccttgaatcttcaactagtttcgattttttgcattttgttcgattcttgactgtaattcaaaataaattttttttcaactaaaaccacaaaaaattattagttgatggaaattcaattttaaattttttaatttctacctgatgttttgggtctttccagtaggcgataacctcttcccacatctcctgtgtcgcccattttggacgtctcatattcacctctgcctctcccagtccagcaatattcttcttccatacctttttcgagtctgatctctaatcacgtagccattttaacattgctaacaaactgtggtctacgaatttaagattttcaagtgggaactcaaatttggtctacaaaaaagataagcattaaagtcatatatatttttttgtataataattttgtttgaagtattacaataaaaattgaatgttactactagtttgtcccagatagtctgaatgtctactttttcaacgctctcccaagtgaacttattcatgggaatatgttacaaataaagagtttgaccatgttgttaaacttgtgtcccatagctgtctatgagggccccattctatggatgccattgaaattttaatttctaccttgcaggctgcttagccagttcttcttccacattttccccttgtactgtcctctaactctatttttcttactgttgcttgcacctacaccatacattctacacatgcaagctatttttattaatagtaaaataagtaattacaatcataatcaatttattaataaaatgaatatgtatttgatataattaatgatgggttaaaatattacactattttaaaatctacaagtcatcataatcatcattaagggttacattattttcatcatcactatcactagtgtcttcatcatcactatgaacaatgaaatcctttaaattttgatgatcaggatgcccacgacatcgagtaactccagtagaatatatttgtattctagcaactccaataaactcgtccacactcctacgaaactttagtgactgtcggtttacaatcatccagcttctgtcgctcaccatgtttctacatattataaacagaggaagtttcaaataaagtaaaaaatctacaagtgtcttaatccacctttgctagtacgattcactgatgcccgttctttggtgcaaatcatctcaattcgaattatgggtgtagtatgacaccaaagtgaaggtactgtatataatagaggttatgtatgacaaggaccgatatcaatgaaactatctttatctaacatgtcgtttactataaagacctaattcatatcataacgatgattaatagtagatcgacctaaatcctgagtaatcatgaactcctattcatgttattagtttctttgattcactcgttaaagtttctcaaagaagatactccttacattctgttaagtaataatgtggatggctggaaacatgatctataattatagaatcctgactttcctaacagatcgaatgctggttaccattaagtgttaattctagaactgaaaagttatgcacaaatttagatgggatctaaattatacttccacttgtgaattaatggtactaaagggtaaagaagtaattagaagggtaaaatgataatttaactaaaactaattttgaaccaacacatggaggactaatcactagaattaattatatcaatggacagtacagtaaaactcagtaaatataattctataattactaagagttcaattgcatatttttggtggagtaatcatggaattaataaacaaattatttggttgatgagactcaataaaaaatgtagtttattggagcttaaaattataggtcattggttcctgagtcgccaccttgaaacactatcaagggtagggataaagagttgtataatatcgttcagaaaatctattttgagttggcaaaataataattatttatttttataaaaaataaacaattttcaaatttattaaatggggaaacgacaaaaaaatttaagataagatttgtcaagacaatatttattgaaaaaaaagttgtcaggacaaaagatatcatccttatcctaaacaagacaagggtaggcacctaatcctatatggtttgtctttttgagttaattaattaattaatttaatcaaataaatatttgaatttgaaaaatggttaaaaatatttcaaagttgttgagatattctctcaagtagtggagagattctctcataaatataaataattgaattcggttatagatatttacttgtttaaataattaaatatagtttaattaaagagttttcaactactctaaatagaagcctgatttgaaaaatcagacacaatcatctgacacctatttttgaaatagagagagtaaaagaaagaaattttttctctcagttgttcttgctcatgtgttgagaacttaacaagaacaatattatacactttatcctaatagcccacactattctttgtgtgtggtgtatcgattttaaagacactagtgtgactccagttgcattatcctcaccatctggattaaggatacaacatattggaagttttgaggataccctgatcgttttcaagaggtatatattctaaaattatcattttatgctttgatttaatgtacacacatatagagatccattaggctatggtacaatgataatcatcaatgtgaaacccttccgctgtgtatctgatttagtaccatgaaaactaataaggtcaccctactagttgcttctcaacaggcactccaactgtcatgctctatatgtcatcaaccaattcccaatcattcttgtcacaaattagcataattgtgcattcatatgtgcttctccaatattcggtggtgtaatatggcgagtatagtgagtacatgttaatactttattgttgagctgcagcacatgtatgaggacaaggaaacttcatgatttggaacaagccgcaagtgcaagtttgttcctacaagtccactacggcaccagtctcaactgatcctccagggtggacattcaacatgtaaggtccacatatgtcaatgttcaaatacctagatttctcaaactgcaatgccaagtcctcctccatttttggtgctagggtcttcgtccacttgtcagccttttcttttcacgtagcaaaccactgttggactttgaacctcaagaattctatagaagcagtgaccggaaagcctcttgagtcccccatttacttttcattacattgtatcatcatcatttccttcaacataccattcataatctggaccatcactaaaatcatcatgaaatggcatttgtgctacaatgtcagccatcagcatcatagtgtttaatttaagtaacacatcggccaccacctctggatttgtttctagactaaaactcccaacctcgctacgagtatccttattagtactaggtgtgggactaggatcgatacagacattcttcttcaccaaagtcaaaaacaagggagtaaattcatctggcttcttcgcaagcatagataaaaataaccttagacgcttatcatttacaatgacttcagggtgatacattaagcctttcatgtacttgtaattcacttccaatttcaagtcatactgtactttgtcaatatcaagttcttcgtacaaaagatcaaccaaacccgagaaagttacgttcatatcaatctcgaatgtcaaaattttagctcgattataaatccaatctctaccctcaagctcctaaacaccattacataacgaacgccaaaatagttgaaaatgtcgtccatacacattaaaaatttagaacaaaagtctaacagaaaagtgataaaaaaaagtcgtaaaaaaaaaaccataaatcagtcaaacattggacaccatcgggcccatatcggaccaatatcagaccacatctaatcaattacaacaaataataattggaccacaccatcggaccccatcagacacaacaccataccgaccactaaaaccacattctaattagacatcagaccgaccatcggtcatatatcggaccatctaaaccatcatgcccatatcagacacaccattagacctatatagatatcatccctaacctcgaatctgaactaaccatcggaccaccatcgaatctctattgggcaccattagattaaacgaaaaaaattaaaaacaaaaaaaaatgcagaaaacttgaagaataaccattttcacacaaaaaatagcataaaatggaaaaaaccaacgtattggacatcaaaacaatattataaaataaatataacaatcaacaacaataataatcaagaaaaatctgtaatggtgctcctgcttcctctaaaaaaaaatcccaccaccaatgcaccttagatgtgagcttggagtaggttggagtaattaaaatccttactttatgcaatattttaatgtaacttggttagggggaatgatagaaaatgtgatttgtgaagttagtcaagagaaaaggagaaaggaaagaggaggaataggtttgagtgtatggaagagtattttgggaggagaaacataaagtatacctattctaccaatatgggttaactttggtttaaatttttatttttcacctaatatatgcatgttaagtcaaattttccaattaaaattacctaggtgtagaaggtgattccagcggcactccgacgaggggctgaatttttttttaagaaaaaaatggagagggagagatgagagtggtgctggtgaatagatatttttggaataagaaatatgggagaaaatgagtagagatgggcggagatgggtggagaagaagatagaagaaagaagaagaaagaaaatggggaaaatggggtgtcttcgtggttatattcagcaagacttttgtcagcgaagttaagctcgcaagcaaaggtttttttctaaaaaaattaaatgaaatgcatcgtttcatttatggtaaaaagttttgctggcgagctaaagtgcgttggcaaaactttttctatctaatttttttaccatgtttttactatgtgggaattcaaccgcaaaaattttcaggacttttgccggcgcatttattcgccaacaaaagtaaaataaattgccaaagtttcacacctttcgatgcttggtttctagcacttttgtcagcgaatgacctcgccagtaaagctgttcctcgagctgaatttggggaaaaaaattacaaatctttgtcggtgaaacatcaaacttgtactggtaaaagtcaacttttgctagcgcagttcatgaactgcaccggaaaaagttgattttcttgtagtgtgtggtttttttttaaaaaaaaaaagtaagaatgcacacgggacggagaattagtggggagtgctcccctgtctccatccctgttaaggattttaatcttcatccccgccccattcccgcatattttccatcgaggatggggcgagcacatctcctaacataaaaataaaatttatattaaaaatattaaactgcatgaaaattaaatattacatgttatttattattcaatatattaattatcatccaaaacacaacttaaaaatttataaaaatgatactgacatactagaaaaatatattaaacgggtcatcatcggggcggagagtttcatccccgtccccaccccatttaatattcgggaacaaaaattgatccccatccccaccccgttccccatttagatgggaaatttttgtcccattagggggtccccgcgggccccattccatgggaaaatatgcatccccacttgtgcgtttgtgtgtgtacgtgtttgtcccacaatgctcatgtgtgactaatttgtggtgtttatattacactta

SEQ ID NO: 218133 - DNA, 6576 bp, Cannabis indica
agatccttgtaaaataattctaacagtctcccactcagatagtagtcaaattttgggtataacaccatcttcaacataacttgagccacaaagtgtcattctactcgatcaaatacattactcatgtgtaatttgattgctgcatagcctttggaaccatatttcctatttgtaagggagtgaaacaattcaaaagcaacaagaacattgttagtgattagccgctgagataagaaagcactttgatattttgatataaccattggcaaaaaagtttagagccgtagaataatcgacttggaaaccagtttgtcgagaacgttgcacatgattattggacagtattgggtgacatggttaggtttctttactttagggataagagtgattaaagtcttattaaacaatgttggatcaacaccattgttaagatcatccaaatctgattcagtaacaagagagtcaacaatgtgccaatagtttgtagagaacatgactgacatgccgtccaaattcgagcttttatcactgttcgttgatttcaacgcactaaaagcctcttctgcaacatagggtgctaaaatggccattttagatttagttgaaattgttgttggaattgttgcaaatatagcatcaatagagtgttgttcaacaccttgacttctgaaaatatcttgaaagtaagtagtaataacatcaataattgtaggaacgctagtttgggtgttgccatttgaatttttgagctttcgcatgcgattggtgctatctctagcatttgcatgttggtgaaatttttttgtatccgaatcacccatttgtagccatgaaattcttgatcaatgatgctaataattttcttcttgagccaataattcatctaggatggtttttgagttcttgagagcttcaaaatgattttggtcagtacttggggagttttggagagttggaacatgttcatatgatcctttaatttgtcttttcagatttctaaattttgaatggtgctatgattggagtttgatagcatagttagatatattagaagtcacttcgacactaggtattaaggataatatcagcacatgtttcctccttcaatcacattttttcaaaacagagccgtgacttaaagacttactcttcaaactgatctccaagggctgatatgtgagctttaatgactgtgtgttccgatttgtaaaaacccagatgctgaatagttggtgtgaggaaagtaaaattctagtattcattaataaagccttaatgaattctttccttaatattccccataccttggcttttattagtctaaataaaatgttcaccttcaaaggatagttgagatagatgacaaacatccacaacagagcgaaaggcttcaatttgtggtacatattgaagtggaccaccaagtttatcctcattataaataacttcttaaagtctcctaaaacaagacaaggagacatcggggccacatcaaaacacctacgaaggacaatccatgtgagagatctttgattaacataagggtggccatagaaaccagtaaagtgcatgaaaggaccatctcaactttcaacaaagcagtcaatgtgattaatagaaaaattattgagagaaacaatgacatgagatgagacttccaaagcagcataagatcacctctttggccatgtctcgatacttttaaaccattagaaaaatgtaatctaagtcaaaaattatctatactaccagtcttaagtttagtttcatgatgaaaagaacacagagagcttgcttagaaacaagcaagcgtagatgtttgaaaaaactcgggttccccaaacttcctgcattccaacttataaaattcatggcaaagcacgacgtcgctcatcaacatcccctggaaattcagactggtattgggtcgaatccaatgaagaattagaaactggtagagcagtggagtggtcagttgatgctgaagggtcagaccgagcaatgggattagatcaacaacgtttgagaacatttcgaagagattcaaaatctacttggtgcttcaacattttattaggattgcagttttcttttccattatccaatcctacaattgatttccttttattataaaaatccaacgaggttgccactttctcagtaataacagcgacattagtggcaaacaagaatagcaccggtggtaaggggtaaacatgggagttttattttgagggacaatcctgaaagagatattagtgggtaggtagtaattatgggtgatggtgataaatgtggcgggttatagaattaccactaaatccttaatggtacaaactgtaggagaaagtagtgtagtggaagtaaatgttgttgagaattgggtattaaccgaagcaatatattgatggaaaggttgtaagggggtattgatagagcagtctccctttgttaagttagttgggtagggtaatggtcttgtagagaggtttggaattgttgcaaagaaagacttttttgccaatcttttcatttgcggccaaactccccctttaaaaaagtctgtcctatgctggacatgacctgatttagggagtggggaaccaatcattaaggtaccataggataaagaggggtcaacaccattgtaaacttatttaaggaacttgtgacaagccttaaaatgatgacaatgacatcacattcaaaaaaaaaaaaactctggcaagcgttcataacgaaattcaagctagaattcgtcttttaaatcctcaattctgaccatttgtcccgttaaaagaggcttggagatgtcaattgttgcaaaaaatcgtagaaaaggtccccatccttcatatagtaaatcttcatgaacatcaatataggtacctacaatattcccaaccgattcagccatggcctttaatttgctaagaaatggtagtcgatgaagctgcacccaaaacggagatagatgtatggattctacagttgtaattagttgagcaattggtgggcttaaaacaatgtgatgattctaaaagtgtcaaggttccaaaaatagaactttccttatctatccaacacatccaaaagtgattaagagcaggcctgagtggtaattagtaatggtaatagggtataggccttttcaatgaccactcattttaatacagaaagttgtctgattaatgtctcgagacgaaactactctcatgtagagaatgtaaccttgagttgcagcacctccagtaggagagaattcaggggagagtttgaacttctcgttcagaatctgttagcaccaatgtttgattcatgtcagcgagcaaaagatccatcgacagagcagaaacagaacactgggaagagtatagcgattaagaaggaggagaacttgttatcagagaggggttggtcatggtggtgtgaacacatttttagtgataattcaagtttgaatatggcggagggaacaattacaaagaaaaaaaaacataaagaagcaaagaaaaggaattagaagaggttaagacagttaaaaagaaagaaatagataaactgccacaaaactttttaagagcacattgttcacaaatatcaacattaaaaaaatatcaaatagttgatttatgatctaaaattttaaaaaaataaaaataggaataaaacttaatcttaattttcaaaacaaatttaaaaaatttctacaatattttcttctatgtaagttcatacctttcaatgtttagtaaatatgcttcaacattaatatatttaaaatttataaaatacaataaaaaacgagcattcaaaatcaaaatattttataaatattctataaaaatttatatttagagttatctaaattagtaatttaaattaaataacattatattaaaataaatagattaaaacatatatcaaattaaaatataattctttacaacaatgagctttaaatttaaggatatttgatctccattgttggtcttacatggctaatatttcaatgttacctcaagatgctagacatcgtcccccttatgaattgtcatccattgtacatttaacactgtaaagatctcgaaagataagtattttgtaagttttcttttctattagactctcccctatggtgactacttagaaataaatttacaagtatgaaacaatggtagaagctcacaaaataagaataaccttaactcttgcctactgggagaacgttggactcttatttcgatcgaataaaaggttgctaaaatggtctccattttagatgagctgacaattctattcaactaatgatgtctttgactcttgcctaccgagacactatatatcatgtatttaaaaaatcttataaattatttaagatgtatttgttttgtattttttacatatctttattacttgctaaatgcttaataattttttaatatgtgtatgaatttatattgaaccttcattgtattttttgttattaattattgtagtatcaatttcaaatctttattatttgtaacaccctactagtttaggcgtgttaacgtgatttttaacttaattgtgcagctcgttgctaatgaacaagtttattgaaaatcatgaataattaaaactttatttaactatttataaatatcaaaataacatacttatataatattgggatcccgtttacaaaatatttacaaaagtttcacagtgcatagtacaaaagttgtcgcctagcgacaatacaaaatatgtccagctatcccaaagatcgtacgctccaagcctaaccgccctgacatgtacaatcttcatctgctcgatctcatggttgctcaaccttagccttgcccttacctacacatgcaaacaatatctgtaagtcgacagacttagtaaggaaagcatattcaataacataactataacccaaattataatcaggcgcccatgcacccaaccataaccctatccccgtgtccgacacggtactgagtcaagaacgttcatacgacaatactactgaccataatatcattctatactcggtacgactacgccagtcatactctagtcgtaccgatgtgatactatcaagtaatatagttctatcaaccataatatcagcctatactcagtatgctagtcatactcttgtcgtaccgatgtgatactgtcagataatactcaaggcagcatacatttatctatatccaatataatactaactatactgatattgctattataatgtaatctaacaggcttaactaacatgtacgctaaacatgtaaacatttatgcatattgttatactaatctaccttgtttccgaatttaggtgtgtcgaccaacctgagtggaacagctgctcaatgatttataggcccctaaatcacattatttgcaaaactggtaagtgacacactaaatcactttacggggagttaaacttgaaattagaagtttccctatcgatgggtaacatggcaataccctaaataatgcaaaaatagaaaaactagggttcccaaaattgccctaattggtacagcagttccccaactggaattccagttttgtggggtttcctggggaccaaccaaaattttggttcctacaggtccccctgaaccagaattctggtttagtgcaaaaaccacctaaacacttcaaatcaaacccaaatcacacaataacctccagatcacctaattataccataataaacataatccaagcaaaaacataaagcaataaactcagaatacaaaaacaccattaaagagcaaaggttgagttcttaaactttaaacttgctcaaacaacaccacagcccacaaatctatctcaaaacagcctaattattcttaatttaacttcagaaaacaattacaaacactactaaaagctacagaatcctaacttaccaattcatgcaatatctttacttaaagtttaagaaaatacaaaatgaaaaactaggaagcatacctaggattaaaatctcaacaatgaaggtaataatgctttgagttgctaaagagaaccctagcttcttactggcttctagagagccacaagagaagcaaacacatagagaggaaataccacattatcagagaatatgtggcaagaggggacgtactggtggagaaagtggacactgaaaacagcttagttgatccattcaccaaagttttggctgcaactacatttgaaaagcacagattgaatttaggattaattgaaatgtactgatagttttatgttagtgcaagtgggagtttgttgggttttgtgccctaaataaaactctatttcaatgtaatcttttctactcaattatcaataaagaaacagatttaatttcattacttgtttaatgtgttatttggttcatgtgatcatttatttacttatttgattaataaattcatccaaatccttatcacactgttattcttatttattgtgttgtcaaacacagtgaaaagtaatcaagattgtgtgattaaatgtattcctagatttatcaatacacagggtttaactgatatgataatctacaacgta

SEQ ID NO: 218134 - DNA, 1780 bp, Cannabis indica
attttctaaaattttacaaataaaatcttgaattaatttttttttgtcagatttagagatgtcatgataaaacttgttatatttattcgtgtgagaaattgtctgttagttatgttaaaaaataaaattattaaaaatttaaactcaggtcttatttttactattttaaaaatataaaatttattgttatttaacaaaacaaaattttaaattagtaacttttactaaaacatagtatctaaaataatatttactttataatttttattatttaaattttaatatatattaaattatacttatcttaatacatatcaaaatttaaagactcaatatttaaattaaggaacataatttaataaataaacaattattagtttctccaaattaaactacattggatataagtacttatctcaaaaaataaaaattctaatttgcttaataataaatctcaaaaatattaaaatatataactgacctcgaaaaacgggatctccatttccgaggaacaacatgttgccagcgtggcaaccggacgtgggatcaaagaaaagacgaccggactccattttcctattatttcttcttctttatgaatttctgcgtaagatctccggcaaactttagattccggcaactcaaagcacgaatattttacgtggttttgattttatttctgttatatatatatgtatatatattggtggtggggtcgggagttttagatagataataataattattattattaaaagatcataatcttgtggcggaagaagctggtactccacagtaaccttgccggcgtttccaacggacaaatacaaaatcccatcataccaccaccacttctaccaatctccgataccggtaaaaatgaaaactaagacacaaattaacgatgaacccttttggatgtggagatagaaaaggttagagaatatctcagctgggatttccggccggtggtgtagtacgtcggagactgagaaggagaagatctccggcgagagttggcgaaaatttggatggggtgttaggtgtttttcgcagctaaagtttaacgagatgagtcgagcgtcttttatactggttctcgctctgtgaaatgacttaaatgcccttctttatttatttcttttcttaattttattatttgattttttttggtaattaattatcatagcagcctagaaggtgaagtgtgctacttatattattatttatttaaataaagttaattaaggtttttgtctcacaacttttaatatattaaattttacttttaaatttttaagattttaaaaatttcttaaactattgagattgttgtatttaaaaattttcgaaaatttaaaataaaaaaattcaagatataatttagtacatgtaaaaatttgagtgatataatatggtagatcaaaatttaagaagaatattttaattagtaaattgaatgaaattagataaaaaaaatttaaatttaataatctcaataattcgtaaaaaattaagagttattttttatttttttttttaaaaatatgatttaatatatcttaatatttaactttattttaccataatatatattatcatttattttcttaacattaattgcatcgtagcagccctagagctttaatagaaatacaatagattttccttctaaaaaaaagagaaatatataaccttgtcgcaaaaataaataaataataaagtgtatagtttttcttcttattttatttgtacttctttagttttatttttaattttt

SEQ ID NO: 218135 - DNA, 2122 bp, Cannabis indica
cagttcgaccgggagacctcccagttgtctgcacctgaatctaatgcacacctttgattactaagaaataagaattctatacactttttttctttaaaatattgatcaaactattatattaactgcatagaacacactggtatatcatactcttccatttccttaaaccagtgaaatgtggtttaaatgtttttgataagaaacttatcatttttgttccattgcagtggaattttaatacgaactttggcagatgcttcgaatgatcaccatggcctttcagcaccgcaaataatccttactgttgtaggcttttgtgctgctgcagctaccacaactttcttcacagtgtatgcaaaaaggaagcttaatgatctacagacagaagatgatttactcgtgcagtaagctctctttttttttggcctttaggaaaaccatctgttatacacgaaactgaccagtgtctctcttaacgggcatggcgaatacagagatgaagtttcattattaaacaaacttcatccatgacaaacaggggttactttattataatgattgtatatataaaaacaattgaggaaaggacatacagaaggaggaggaaactagacagttttgacatgattgaaatatgtcaccaatttattatgtcttctttcctcctctagctatctgtctttggtatctatttggtccccatgcccccaaacccaacccttttctctcttcctcaattattacttgtatatgattgaaatcttgctttcttttttgtgaaggaattgaatttgactttggcctcattcttaactgtatataaatgtgttgtttttttactacatgatttgataatgagtaagttttttggggtgagctacttgaggaagtccaactcaattgaaccactttagcttgaggcttatctacaagtagttgtatcttataaatgaaccagggccaatggaagagacaaaatcagaaatctcagtgtactgcacacgctcatgtgctttttggtcaaaactgagttgttagttttatacaaaagctttaccataatggcatgatgaatgattattatattatgtattggtgtacaatgtatgattattttatgtacaagtgattgaattatgtatccaaaatcattggatttctacttctgcagaagaatctttgctcggtgacccatgttctggttgtatataaactaacataacaattatttttctattcaactaaataagagtcttagcaaaaaaaaaataaataaataaataaataagagattctcttcaactataaaaacattgtctcttggtacttctacttcagaaatgataataataataggaaatatttcagatacttttaggcagttgtataaatgggttggtattaggtacaagaactatgttgaaaatagcaacaaatgtatccatgtaatattgaataagagtaaatataataaataacatattgtttcttaatactatattatttatttaattgttaggaattatactttttaattaattttacaaatagaagtacaattaattcttttatatcattaaaattttataacatacatttcaaaaaaaaaaagtagaacacaattttattgtttatttttaatttttttaaaaaatttattagggcagggttggctatgggttaacacttgtactaaaaagtagggtcgttgaaaaatcgtaccctaataacatgcaaaattagcatcaatctttacttttattatttatttttatctcatttttattattttataattatatttagttgtagtgtaaataataatttttttagggtaaatactattttagactatgtgttttgtaaaagttactaattggaccctctattttgttgtatgacaaaatagatcttgtattttttaaaattgtaataatttttttagggtaaatactattttagactatgtattttgcaaaagttactaattggaccctctattttgttatatgacaaaatagatcttgtattttttaaaattgtacaaataggatcctgagctcaattttcaacaattttatattttaacataactaactttaaatgtaaccaattttatcat

SEQ ID NO: 218136 - DNA, 5382 bp, Cannabis indica
ttattaaaataattaattttagagtggaaataaaaatctcccaacaaaaattataaataggggtacttgtacatttttattgcaaatcaaacttccccttcaatattttccttgatttcttcttcgattgttttcatctgaaaaccctaattttcgcgaattgttcatacttgaatcgagtaaaggaaaagatgcatcgcgaatctcaccagcctcagcagatcttcgttcagttcccggacctgcaaatcccaagcaaaaccctaagcttcacctccagcgaagttcggacccttcgccagttgaagctctctcttctccccaaacctttctcatccgaagctctctcttctttttactttacattaaacggtaggcctctcgatgattcttcgccgattctgagttcacaaatcgcccctctatcgaccttaattttacgatccagagctcgcggtgggggtggagatggcggtgcgactggagcagagtcacgggactgctacctcaaaatgtacgcagagaagaagcccgataaagtcgatccgaatgagcagaggctgtcgaagtggttgaattgtgctctttcgaatgagcccttgaaggaaccgtgtgttgtggattggctcggtaatcttttcaataaggaagctttagtggaggctttgttggggaagaagattcccaaagcgtttgggcatataaagggtttaaaggatatgataaagattgagctttcgatgattcctggggtcgaaaaaaatggcgatgtgaggtctgcaccaaggtttgaatgccctataactgggcttgagtttaatggaaaatataagttttatgctctgaaaaaatgtgggcatgttttgagttcaaaggctttaaaagaagttaagtcttcttcttgccttatttgccatgttgagtttacagagactgataagattgtgataaatgggaatgatgaggaagttttagtgctgagagagagaatggaagcagagaaggataaacagaagcagagggagagggaaaagaaggctaagaaggtgaagcatagggagattgaggaggcgtctgcagtgaacaacggcgaggctggtgtctgttctgatccacattcggctcggttaagtggtacaaaacatggtgttagtgatgctaaagatgagttgaaggttccttcaatggtgggaactaatgggaaggctgctaaagctgcaagtaatggtactgtttctgtgaaaagttcgagtaataatgcagcagccaagcggttcaaagctacagatattgctccagctcatgctaccaaggaagtttatgcatcgattttcacttcttcaaggaagtctgagttcaaggaaacttattcttgtagatcactccctcttggaaggaattgattggtggtgttctgttcttgtggccaggttcttgtactagttattttcagtatgattgatatttggaaagatacattagtataatgagtttgtaatgtcctttttactaacttgtgtatttgaaccaaaacttttttctttaatgtaaagtattgatttttattgtgaaggatttaataaggcttcttcttgtttatgtcttctttatatttagaatatgcagttcaattctgatgatgatttttattgtttaatagtctaaattataactgtaaataaattataatctattcgactcttcttttttcctttcttgatattgctctacataggtacacttgggttctttttaaaaaaaagggtacttctaaattttcctgtatataaacaccactgtgttaaaatccaaaatcttcttcttaactactctcttcaccccaaaatactcttaccaaggccaacaaacgaaataaagaaatatttccctctctaatcttttttcttttcttttcttttcttttcttctcttcttcctctctgcaaatcacgtaactcaatatcaacaaaacactcgtttgttggcctctaagccgtctcataatagtaaagaaattatccacagtattcgtcactggtcagaaaacatcatttattgcaagatattcttcttctcaacgtcttgaaggggggaaatcttgactttcagagcatttgatgtaaggccacacatctctttcatatctatttcttggtctgtttttttttttttttgttcttttttaggattatgtgttgggatatgacagattgtagaatgtggatgttttttttttccttctcttgatttgggatggtgtgcttttgtgtctttttttctctctttttccagacttggatgttcaagtagcagaaaatggcagatttgttaacaaatgattcggttcacttcagggaagtttggagagacaatcttgaagacgagtttaaaatgataagagatatattggattattacccttatgtatctatggatactgagtatcccggtaagcttgtctccaccaccagggaggacagggagtatgacatcatgaaggtcaatgtgaaagacacaatattgattcaagttggtttgacattttctgatgagaatggaaaccttcccacttgtggaactggtaaatactgtgtttggcaattcaacttctgcgagtttgtcccggagagggataaatgtaacagagattccattgagttgttacgccgatctggcattgatttcaagaagaacaatcgaaacggtgttagctcttctgatttcgctgctttgctaatgtcttcaggggcagtgttgaataatgaggtgctttggattacatttcatggtagttatgattttgcataccttctaaagctcctttctggtaaaaatgagcttccaaagaaagaagatgatttctttaatattatcagagtctacttccctaatttttatgatatcaagtgtttattgagacgccaaggtttgcatggtgggttgagcaggatttcgagcaatctcggagtgaacagaatcggtacgagtcaccaagctggctctgatagtttgctcacttgctgcacatacatgaaatttatagacagaaatcggagactccctagggaacaacaagtatcactcagtttagcattaggagtattatacggtttaggagatgaaagtttttatcgttaaatagtaaaacactcctttaaacgacagaaacatttgtgaaattattgtatacaaactaaatatatgcaaatgaaaatttcgttagtacttctgtcttcatggagccatccatctttgttttatctaatcatttttagttacattattataattattttttatcattacacccattaaggtgaattgagtaagagtattccatgactgtaaattgtaaatgatgtatcatcactctgaattgttgacttggctatggctttgattttagtgtggattaattatccaaaactaccacccttttgcacttttgtttcagccaatgaagttcttttttatgcaaatttcagccattgaagtctctaacttaaccttatttgctgctaagtaaaatagatgacttgataaattagtgaatagtaaccataatttaatacactactttaactcacttaaatctagctctagtagtagtagcgtgagggagtgtgtatggccccattacaaagtagaagaaaacaaatattctcctatactattattacatcaagaaagatatcacttgaaattagcataatacaaaaatgaggccaaaatcgagcctttttgctataagatttaacatataaaatgacaattattcttcttttcttttcccacttcaagtttttttgaaaagaaacatagcaaaacaatacaaaaaatggataataatggatggttcaaaccttaaaagtctcttctatcaagcatatccacaaaggtcattctcctagggaatctagggggaagcctcaaaaccatagcatcatcaatctcaataggcaaatgggtagccaaaatcacaatcccacctttctttctatgctctgcaatgatatactcaagcagcttaactccatcatcatccaaagccacagaaggctcatcaagcaaccaaatttgcctatcaatggccaacaacctagccaactgaagccttttcctttgacccattgaaagcattttggccttctctttggccaatctaccaagtcccatcaactccaatgcaggcaaagactttccttgtttcccttcaagtacctcgaaccactgaacattgtccaataccgtaatattgctcttgattgcatccttcagggagagccagttgagttgaagcttgtattggtggaaaatccctgacttggttatgtcgtgaccgttccataggacttctccggctgatggcttggaaaacccagccagcatccggaggaaagttgtcttgcccgacccgtttgtgccagtgaggacaagtgaaccaccgtcgtggatggtggcattcacgttacgaaggatttgctgagcgtttctcatacacgaaacattgttgagaagaagccgagggacttggggttttctcagagacattttattccagagctttggaatttctcagcgggtctccgaagggggagagagacggtgtatcataaattctaaactgtaggccatgaaacaccaaatgacagagcatttaaacgaaccataataataagagaaattcttaacataattgcgaaatatttatgataaattcaatcagacatttcatcaaacactaaacatacatacacaatctccaaactgaatcagacatttcatcaaacattatacatacatacacaaattctaaactgaattagacatttcatcaaacaatatacttacatacagaatctacaaaatgaaattttcctaaaaatttatttcttccaatgtcaatttatctgctaccctataaaacaataacacatataaatatatttaggtccaatcaaaccagaggcaattactccattactactttttctccctaagatttgaccctttacaagaatcaagtataacttgtaaattcattaaaaaaaaacaacccacaaacaatagtttaacagcataataaaagaaaacccaataaaaattatagtcggaagaaacaagacttacaagcagagtttagatttgtggaggaatatgtgtcttcggaactaaaactaagccaccgatcaaatcacaccgccgccttcttcgacagtcgtgtaggccaagtaagcggcagctccgtctagttatctgattgtgaggcactgaagctagagcaatgaatcgtgttaaaagatatgtcgttacaactaaacgacttgtcgtttcaaagaataggaaaatcaatttacatataaaaaattaagggtaaatacc

SEQ ID NO: 218137 - DNA, 5287 bp, Cannabis indica
attatagtctatggccccaaatcataggattatgttagtttatgtcctcatttcaaaaaaatacagcaaatgaccctaaatcataagactatgttagtaaatgttctcatttcaaaatcattaactttttttttattcttttagaattaaaagcaaattatttaaatattatggtatatttatattatttttgttaaaatctttttttattttaaagttatgtcaatttttttaaaaaaatttatgagttgttggtatatagattttattgtacggtatatttctattttgttgtatggtatattattattcttagatatttattttttattatgatatgtataatagtggtatataattttattagcataataaaaatattttaatgtatgtatataattttattgtcatgctacatatatttaattattatttttatattttttgattgtatgattatttattttaaataatatttaattagtttttattttattatatacaatggtcatggtatatatattttaattgtggtatataatttggttagtatagtatacatacatatatatattagtaatctatatttttattattattattattttttgtatatatgttttggtgtatggtatatgtattttttgttatacggtatataatttttttaaaatttaaataaatatgtgtggattgaattggatcggttacttttatatattaatcaacatccaatctacacaagtgtgaattttaattttttaatccaatcaaattcacataagtgcgaatatacgcactttgcggaccgaatcggtaaaattatgcggattgaattaaattagctatatattatattatattttaatttgagttgagcaatttgatatactttttttatatatatgtattatatataattttttttaaaaatagaaataaaaaaaaaatatttaatgctacatagtgatttaaaattaattaatatatattaagttaaattattataataatattttttttgataaaccactattaaattacaacgtacataattaatacaattaaaatgttatatataccaaataattattattgcaattaaaatgtcacttaaaaattaattaaaaaacttattacgtaataaaaaataattaattagcataacataaaatattttggttataacacactttttggttgttacatgatcaatgtaatttgtgtgtatttttttgaatcgaataaaccactaaaaaaataaattgctcttcgtacgcacgctctccgtacatctcgttaatgagggtttctgaaatatatttcgctgccctttttgatcctctgtgatcctgggtgctttgcttgccctgtgttagattttcaagacacttttctctggttgtttagctcttgtgcttggctatttttcaatggcgagttcaaaaggaaaataagtggtggaaatggtggagtgcagtgacagagaaactctacagctttcactggaacaagacgaagaagctggtcacgattacattgaaataaaggcctcttacgatctgtcttcgcccagaaatggcgactctttacggggtggaacaagaaggaggaggacacgaatgtttacactctctggttctagaaacaaaatgaagcagcttttgtggtggaccgaagcccttgggccgtctatggtggtcatcccatactcaagcctttgctagtgggtgggagatggcgttccactagtttcgactcattccctatctgggttcaagtatatgatgtaccccttcattttttcataacaaataatgctaaagctattgcaaacaggatagacggtgttatcagtgttgatcgtatgtggaaaaaggggttccctactactaagtttatacagttcagggtggagatcaatgcttctaaaccgatccttgtgggactccattttccaatggaggaaggggtatgtctatgaggatattttaagtatgagaagcttccgtgtatttactttatgcaggattattggtcatgaggaggtgcaatgtagaagaaaaaggcggctgatacatgatgacttcaaccatactattcctatgtatggaccatcggttaggtatgggtctagattgaagcacgatttttgaatagattcaggcgaaagaagcagcaagggagtttgagaacctcaatctgggcaaggaagaagttgtgaaggggatgatgtcgttcagatggaggctacgcttattgagcgttggttgaaacggatatccaccaagtatgtttgagtaaccaggaggaggatggcatgatcgacaacggtgtggtgctagaaacggtgatttcaaatttaggggtggttaaggaaggtacaatagtacaggaaaagggtgaggacgtgggtgacggagtcattttgcccatggaaagaaggaaacaatgttgtcattccccctaatagtattgtcagtgatagtggaggtagtgtggctaacacagtgggtccctccgaggcttaaattgaacagctggtaatggtattcaagggttcgcttgatccttcgaggaccaagaagaaattgggccttagacaaaaactaaaaggcttggcaaggaaagactttatgggcttggatatcccatgtaagaactccctcattggaccaagcccatggaagaaacgtagattggatgatctggtttcggatcacggtagctggggcccagtggaactgggttctaagtctccaggtttggggaaaaggaagtgtggagattcgtccaagatagacgctaatgttctaacctatggtgattctgtgaaggcctggtggaggaggaaagcactgaagtgttgaccacccatgtctctcctttacgagaaaggcctctgatcaatagacactactctaacggaaagaattttgtcgaaaatgtgctttgtgagtcggatttttctcaggctaaggaggcgggtcagaacatgcctcccaatccaccatgttatttctatcctggaactgccaaggtcttggcaaacctcaagcagtgaaatcgctgagaattttgattcgtagcgttaatcaggatgtggtttttctcatggaaactaaacaacaaagctgggacatggaagggatttggcaaagaatgggattcaacaatggtgtggttgtttctgctattggaacaaccagaggtttggctcttttttggaaagcgaggtgggatattcaaattctttctatggatactggcaaaataattgcccgtgttggtgaagatcgtaatttcaaatcttgggtggggtgttttgtttatgctccacccagaagagacgaaagggaagagtattgggaggcgaagatggatactatcagcaactttagagatgcttcgatgctcatgggggatgttaatgcggttctcaatgaaagtgaaaaagtgggaggcaggccggttaatgaacgggaagggcgtggcctccgtaatttcatttttgattgtggtgctgtggacctcgaagggatgggtgctctttttacttggtcaaacggctaggattggaacaatataatttgtgaaaaactagatagagttttctactctactagttggatttcacagtttgtaaaatcagggactaaaaacttgcctattcgacactctggccatttggcaatagttctcaacacgtttatggatgctgcttctttcaaggctccttttcgataccttgatgcgtggaatatggatgatgaatgtaagggggttattcaaatggcatggaagcaatttattgaaggatatcatagctttatcctctgctctaaactctggttgattgcatccgctttgtcgaaatggaactaagaaaatttcagattttgcaagaaaaaacttgatctactgaaaacttttctcaccgaggtcgaaaatagggagcctacccaagagaacttacaccttgagagtgttgtgatgatggaaatagatgaagtggaagctcgacatgaggccatttggaaacaaattaaaatcaagggagctctggttaaaagataaggaccataactcgcgcttttcccatgcttctttaattgttaaaaggaagagaaattttatttgggctatttcggaggatggaaatgactggattgaggatagagattcgattgccgagtattttagatcgaatttcttatactccttcacttctacccatccgctgattgatgaggagctttattctctaatcactccttgcattagccaggaggagactgaaggtcttatagatatcccttctcttgaagagatcaaagcggttgtctgggatatgccgcctctaaaatccccgagccctgacggattccctaccaaattctataagacccactgggagacggtcggccaccaaacaacaacttttttccaggaattttttgccacagaaaaattcacaaaagaggtaaatcgtacttttattgttcttatttcgaagagaagtaatgctagtaagtttgaccattagtctttgcaatgtatgctataaaattattgtgaaaattttggctaatagacttcgtattgttttggacaagattatatcgtctttccagtctgcttttgtcaaaggtagatggattcggagaatttgattattgcccatgagattgtccatgatatgggaaggaagcagaggaagaaagctttcatgggtatcaaatgtgatatgtcaaaagcgtatgataaaattaaatggtcttttgttgataaagtcctcaaggcttttggatatcatgattgatttagaggacttactatgccatgcatcactactgtcaattttcaactccttttgaatggtggacttaccaaatctttcaatcctcaaaggggcttaaggcaaggcgacccattatcgccttatttgttcatcctttgctcgaaagtcttgtctaagctggtattggcaaaagaagaattgggcttgatcaaaggctaccagattacaagacacagccccccggtcttgcatctcatgtatacggatgacaccattttttttatcgaggcaaacttgcagggagtggttcacttgcaggatgcttttcaacaatattgctcttggtcaggttagtgtatcaatatcagtaaatctaagatcctactttcaagaaattgcagctcctccatgggtttgacaatcttagattggttaaactttgatattatgaacggagaagagttctttctgttggatatattttac

SEQ ID NO: 218138 - DNA, 10431 bp, Cannabis indica
aaaatcataataaatagtaagagtttaaggagtatgtggaaaaaataatccattaaaaacctttactttgttttgtctccaaatagttgttccaactatttttctgttacaaactttccctatttagaaagtcggttatgttagttaaaaactaatttgttgagctgttaagtatatatttactaataactcttttttttttttgtactaataactcttttatttttattctatataaaatgtggctatgtaaagaaatttttggtttaacgataatttttggatttctacattaactttaacagaatatcttattactcaacaaaatattctttattaattttataatattattaaactctattttaaaaatttaaaaaaaaggaaattaccacatatttttttttaacttttttttttttcaaatttacggtttgagtttctaaagtgcttgtagcgctagttgcaataggggtttctgtacgatttttagttacaatttaggctggagcgctagttgcaatagtttctatctacaatttcgtaaaaaatacaaaaaaaactattttgaagtttaaaaataaaaaatccaaaaaaaaaatattacctaattaaaataaattaaacatacatgtattgatgtgcattgtacgtaacatcaacctaacttactaataaatctttgaatttaatgttaattaacaaacaaaataaagatatttaagaagaccaaaataacatttttgtttttaatgcataaaagaagcggcgattttcttgattgtaacagatactgagagtttcccactctttcagtgtgaatttcaaaaaacgtaacggctaccaaagactccatagccggaagcttcattcctactccgaaccaagcttagtctctctttgtcttttctctctctcaggatgagaaaagctatacgtaaagtgaagaaaccagacgattctagtgccaaggtaagtgtagtaatcaatcaaaatgaattctccatttctcttctcttcaaaatgattgaaccctagaattgatatcggaatgtattcattttcattttcctctatttcttccggtttcgcagctggttttaaaagaggtgattggcttgacgactacgaattgcaatggattggcttcgagttcttcttcttcttcttctttatcctcgagctgtgcatatgtggcgggatgcgttgtggtggtttacaatgtggattcctgctctcaatcgcacctcatggtgactcatcgaatgccgaagcctttgaactgtgttgccatgtccgaagatgggcgtttcatagctgctggagaggtataaaatataaatcacttttctcatgttaaccatctgatatgttacactatttctgatttagattttgacgctttcaatttgattctacgattagtaaagaaggtatgtcgatagattaaaagagtttagagatcgtaattgtaatgagtgaagagctagaaattagcattatttcaaatcacttgggtggctttcactagatagatcgtaagtttaaagtctaatttgttgaagacagttctcatctcattttgccataattaggataagatcaagttttgttgctgacaattaaaagaaattcctatgaaagttccacatatgatttcctatcccctttcaatttcaaatgagatcacagaagcttgattttgatggaaataacaatgtagtcaataatgaattgatcatgaataaaagtatcatactatcacttctacattatggtaatggaggaaggtgtgttgttttgagttgaatttttgtggctatacgtgatctgatatgagtttgcagtcaggaactcaaccttcggtgttagtgtgggacagtgagacgctagccttggtatccgagctaaaaggtcatctttatgggcttggatgcattgcattctcacctgatggtcagtttgaattaatcaataacatttgattctcatctatatttatttctatatccttttagtatataatgtttttttcctcttaaatgatcattatagggaaacatttggtttctgttggaggatacatctatctttgggagtggcgaagtggtatgcttcttactaagcttaaagcaagttcatcttcttctgctattgcatcagttagcttctcgtcagatgcaaagttagttgtgacttctggaaagaaacacttaaagttctggtctgttggttcatctccgaagacttgtttaaataaagggaccgcatcgttggcagttcatggaaaggctgttaatcttggtcctcacaaggaaagctcatttatatctattgcatccaccttaagggctaatggtataaccatgtgtagccaagctggtgaacttttctcagtctacacattaactgatgcaggttggggacactttccattaatgtaacgcactaaactactaatgcattggaaaattgaaaacttgatctacaaacccaatttccttttcatgcaggtgtattatgccatctagattctggattatcaataaaaaagtctgtggatttaaaggtttgttgttgtatgtatcctttgtggttcgtgatcgatttcaaaagagccaatgtgtattaagtaaagtggaacctttttttggaggctaatctggctacacatattgtgagtttagttggtctccatctctatgcaaatgtttgttttgtaacactaggtcttttcattgtaactttattaggtgacgtataatatataattatacatgtatagaggttttggagtttgccctgtttagagacaaatcttattatgtattttgtgtttgttcttgtgtacttttttgctggttttgttcttatgtacttagatttaggtttcgacataccttttatttctctaataatttggcaattgttcgatcaaaccaatcaatagaattcatctccgacgaggaaaaaatgtgtatccattttctataataaagcaaaaggaactaactgctcgtgtatgttgtttttagattttgtaaagaatcagtcattatagtttggaatgctcagagtcaaagattctcaccataggacctgacatcggtgctcttagtacttgcttttaggctataattcttttagccaattaaccattcaaacttaattttcaggttgaaaaaggttttgcaatatctgtatctgacaagctagttgcttgtgcttgtagtaatggaatagtgcagctctttgccattgatactcttaaatatgttggaagtcttttatattcaaaggacaaaaaaggttgtgcagaagatgacattaatagccatgctaaagagccagaaaatgatattcttcctgatgccgttgcttgccaattcacaatgtcagaaaagcttggtgagtgttttctttaaaagaaaaatttacctcaactttgtatctatgaatacctcaaaatatccttccattctggtttgcagtggttatttacggagatcatagtttgtatatatgggacatctataatgtcaaccaggtaattgtttctttaatatttagtagtctttaccctcttttccttttttaatttgtttgatagaatcattatatcgttcattctgactttcttgcttttaagttctttgatgcttttttgcttcatgcacatattgagagtttgggcctttttttttgtgtaaaaccactctcatcatttcaggctagaagatgttgtgtgttgctttcacactctgcttgcatatgggatatcaagaacttgtgctgcgaaaacatgcatgatgaatcccttgcatgtgtagctagaggttgttctggtggggtttcatttgcaacatgctcggcagatggtactataaggctgtgggatctttctttgcaacctgacctattagaggatcttggagaccagcattcttcaagtttgaaaccaatgagctacacaggcttaggtatttgcaacttgtcttactgtgaattctgagacctaaaaaaatattttaaaaatttgtgagaaacttgacaattttttctttttttttatgcataaagaaacagagttgtactaataagattcaaagtgataataaatttcatgttttgcttgccaattacatttctgttgattgtaacagttaggacagggacatttgaacgagatgctatggagttaggtttcagcactcgggggtttcgatcaatggcagctagtccagatggaaagtaccttgctgctggtgattgtgaaggaaaccttcacatctatgacctacatacttttaattatacatgcttccaggtaataaatgttaaatttcttttgaattccatacctttgaaagcaaggcaatgtaagtatttttcttgatcttaaaatggaatggccatccaaacagggtgctcatgatgcagagatcctatccttgagctttaatttgccgagcaagatgtctgattctgaagaagtcatcaacgggcattatttccttgcttcagggggctgtgaccaacttattcatctttatgatggcaaaaggtcttagctattaactttaagggctttacatgtttatgggatcgtcatattgattaggcttcccccatgacaggaatttcgatctcatcgaaagaatcgatgatcattctgctgcagtgacttctgtaaaatttgcttgcaatggtcaaaagattctaagttgcagtgctgataggtaaactattcatgctttcagtgtaagcttgattgtactgaatttgtaatgaccatgttgttgtgtacatctcattccataaaggtggagttgccttctttctttttgtgctctgtgatgatgatgaattcagtttacctattaaaatattgcctcttcgtgtaaacttgtacttttttcctatatttatgagtatgatttcatttgtgcaggtctctggtgttccgtgatgttacagtcacagatgatggttttcgaatttcacattttcttcatcaaacagcatcacgtggaactgtttatgacatggctgtagatcctaagatggagattgtggtaactgttggacaggtaaatatctaaagtaataacaaaatttgtagagaggaactgcttcttttcaagtccaaccaggctgatcattcatctgaatcatttaagcagagtaatttttggttaactggcactgttattgcttgcaatttatgacaaatattctttctgcacacaggataagaagataaacacatttgacatcaccactgggaagctaattagatcattcaagcacaataaagattttggagatccaataaaggtgagttacattagtgatgaaaaaggcacctccaatttcaactcttaagctaaaacgttttcctgtttgcagataacaattgacccaagctgtagttacctggcttgctccttttctaacaagtctctttgtatatacgactttattactggggaaatggtctcacaagcaattggacatagtgaaattattactggcgccatcttcttacctgattgcaagcatatagttactgtaagcctctgttattcttaaatttcatcatttatgggtagggaattttgaagaattcagggctctctgctttctttgttaagcttgatatttgtttcattttggattcaaaacagtgcagcgatgatgcgattatgcctatatatattatgttcattcttttgcaatgcatgacacgtatgaacttctaaattttgtcatgctattaggtaggtggtgatggatgtatatttgtatggaaattgcctgttcttctgtcctctacaatgcaacagacgatgaaggaaaaatcaactccattgtccccaaaatgtttagcccagccagtagcttttactgaaataattgttcctaaagaagacttccaatgtagagatgattccatagataaattatcaccaggaatgtttgagaagattggacaaaaggaaactcatcaaggaggtgaaactcaggagaacaagagattcaaatttagcgtctcaagacttccaaggtgggcacaagacaaattaacaagctctaatgtcccgagagaacactgtttgaattcatccaaggtatcttacaattttatttcattttccaggaaatattagactaagcagtcttattccacataaatgctctcataatgtggttttatttttaagtccattagaagttttaaaattattgtgcagacaattgttcaaaaatggccttagtgattgcttataatgctgttatgaataattattggctcttgaagtaacaggagctaaaagaacagaagaatagcatctctcatttattggttcctcactatttatagaactgtaattcaggcaagcaaaatgcctgaattatgtagttttccctggttcacagtgaaaaaaatctactcttaggtggcgtttggttggaggtaatgaaatgcaatggaaaagaaaggaaacaatcttcattccatttttttgtttggttgcatattaaagtgttggaatgtcattccaatggaatggcctttccaccattttggtggaatgactattctattttgaaatggaaagaaagaccattccaatatatgatgagaaaaaaattaataattttgttatcaatttttttatgcattttaaattttattccattcctattcccattcccattccatccaaccaaacgtgaccttattttatatttatttatctaatctctaatacccactctgcttaataccagggagtagacttgaatgatgttcctttagttgctgatgctcaaggatactctctttcctctcctgagtctcatatgcgatctgatcatgagatgggatccagtgaggaatgccccagtagcacgtccacattttcttcttatagtaataataaactctattctccagtacatcgaggaacctttaggtatgcattccattcttttgtcaataatttatgttagtgtttcgtgaatttctggatggtatacttttaacagtcatgttgtcacatagctcacagtaactatgcattgcagtagctttgccatggacaagcgttggatcaatgtatatactgtatgtttgccaaattctccagaggtgcaggatatgagatacaccaatttgccagtgtcttcccaaaatacatgtaaggctaatttcttatacttctcttaccattgtaactataatggacgaataaaggctagataaatggtgagaaaatgttcatatgatacggcaggtaagataagtagtttgtttcagggaagaatccactttcacttttggactatttggccacaatatgacgttcctatgtaaatctcctttcacttttctgttagtatcagtgtttgcttctatatttacattggtcaaaacatttgttgcccatttaacttttcataacagtgtagaaatttgatgagattgctggttacattagtctgtgattttcattataaattgtacgtacgttatacaaaggtgtgtttgaaatttttatgttatataaatcccaattacattttggttacatgtgtgtattttttgttaataagtagtggggttttggcttgcagtaaaccacagttctcagcttgcttgtactgatcagcaattcattggtcttgagagcgggattatggatgaaagtaatagttacacacgagagacgagtgccaatgaatctggtactatctacaagaatattggccaataccgcttgcataatttgagcaaatgtaacgaggctgttactgggagtgttcctgaaacagagcaattgcattcagataaagctggtggcgagttacaaacagctatagatgcctgccccattaagtctgatgaaagtgatctgtttaagaaacactatagtagcttgtctttgtctcgcaaggtttgcacctttaactgaaacttagtgaagtttttggatgggaccttttcgtgcagagaaattctgtgatgcatgttatgttgtaatgaagagttgcatttatatttccttacagattgaaagaggaaactcaatcagaagaaggcattctgctcgatatgttgtccatcaggactatcttggtggatgtataagactttttgactcgcccttaaaatcttcaggtggcaaaatcttgaacttccctgaggaaacaccagaagagccatcatacccggtttcagctcattgtaaacaggtttgttgatgcaaagcaatttggttactgcattcgtcacccggggaatttcgaattcttctgaatcatgccaaatgcaaattccccattcaaaaagcacttaactttaaaccttttccttttcctttttatcatcagtcctagttttttggcagttgaacttttagattatcaagaaatttgatataaattgaaaactccattatcatattaacatattgataaaagcacatcattctttaatattattgctgctggtgctgatttcaggacacgaagaactcggtacaaagcttgagcacagaaaacaaactagacaattacgaaacgaagctaaaaatcattgcctgtggggaagcattactgtctttagatactgcagctgaaaaaactgttgagttattttcagacttacaaaaaactcataattctagagaagagatttcaagccaacctgaatctcagttatgttccaaggcagctgcactacttccatcaataatggagaaagttaatgcattggccaaattggtgcaatcttgcaacaatccaccatgtggaaaaacaagaagaaacacattgaactcttcaaattcaatctgctaaataaaaaaggttattgatctctgaaattcttcactgtatatgtatataaaggtagttattttacctaacaattacagttgacataataaagcattattactattctttcatgagcttgatgactgttatgaaagtaagtctcaggaaggaaggaaggacccattttaggactttaaattgggtagcaatctgatcaggggctcaatcaatctaaaagaaacccaaagaaattttaaaaattgggatcctttcttgtgtgaaaacttcttttctttatctaacatctttccgagcaataaaatcatcaggctctctctctctctccctctctccctctctcttcactttaacattaaaaagaaaaagggattaaaagaaaaagagggcaaagaccaacttttcttttttcacctctccctttgaaaacaccaattttctgctgttgattttcatgcaattgtaatataaaactatattataggggcaagttcccttttttgtgtaaatttcaaggcatgccagagaagagataaaaaaaaaaacataagcttaggttagctccccaaacactcataggcaataataataataacccaacccaacccaacccactccacaccttaagatctgtttggaatatttgtaaatccctaagaaggtatgcctagaaattaccctgttgttgtatgcttctctttgcttttgtcttgctttagtaacatgccaaactatacattctttcttgggattccttcactctacttgtataatcatatagttcttttcaaggctatcataggaattgcacgagtaaatttctaggacacccatgataggtctatacttctcatatgagtaccctaattgccatatctttaccttaatgatgctcattttagccgtatcaacacatgaccttagcccttaggattcttctattaaatttattttaaatacatgaaatcaaaaatcacaaaacataaacattagatccaagggctaataatgattcatggggagcaatcagcggcggaaaaggggattaggaatgtattgttatctactatgtcacacacacacatgcactaaaacttttcaaatgattaattaaacataattaaacatgaaaattctcctaaatccaaagttattatgtgtatctgtccatgtgtataatggcataagacaatgtattttcattatagtgggttgggggggcaaaatgtgatcaattgagtttgttttacacagccatgttgttggggtccaagatgtaggctttgtttaaagtggactatcattctatatatattgtttttagatttctttatatatgtatatattttcaaaaattgggcaaaaattaattaaattttttcttttctttttttggaaaaagcctttgatttatattctgctattatctgtgtgtgtatgcgtgtggggtaaaggccagctctcaattcaattgtctttttgtattcattttttcttgtgtaatgatgagtttactttttctcttttttctacagttagacatatgatatttttctttacaaaaaaaaa

SEQ ID NO: 218139 - DNA, 5265 bp, Cannabis indica
gggcataaaacccaacagaagacccagagccctgcatcaggaggaccacacaggctcccctcccagagaatttcaagatgctccaaattgagatgtgtcataggcgtacaaacttgaaaactcacctagccaaatataagaaaatgatgcaagtggccaaagtaagtgatgatgccaagtgcttatgtttctccctgatcctcatcaagttcgctgaggattggtggaagaggttgactcttggatccatacactcctagaaggatttacaattgatcttctgaaaacaattcatagttgcccacaaatatgatttggaaatgggatcaatcaccaacatcaagaagcatgtggaagaaagcctaaagggtttcattcaatgaatgatgaaggcaacagctagaaccaaagtaaatgaagacatgaagctcatggccctgtagtctagactcgcactaggatccttgttgtggggagaaatgcaacgaaagagggccaagacactgttcaaatctaaggctaaggcccaaggctttattagtttagaagatggatatcaaccggcatttggagtccctcctacactagctcctgtagtctctgcttctagattcacctcatccactcccgttcccgaaacttcatagactttaatgatttataggccctccgcatcaatacccgcactcactcgaactcatttctctaggtatggtgcagcacaaattggatgcagggtggctcctaaacaaacaaaggcggaagttcctgaataggacatgagccaaacccaaagtaaaggaggtggaaagggctccagacgaggcgagaattcaaagaaagttaagaaagagtatgagtcaaggtacactaagtactccatcttagtggacactcgcgataatgtttataaagtgacctacaatatggtccactacagaaagcccccacgaagacctcaaggggggaaatttcaagagagatccaaactaaaagtgtgaataccacaaagaggttagaaattccaccaacgactgcaaacacctaacggatgagattgaggtgattcatgaacaagtaattattctcggacagcacagtaccataaatcctccacatggggtaggtcatcctcaaggcccaggactgtaacttctagcactccctgctctgccggctttgatcgtgttaaccgttgtggttctaggaccaagaaatccatatcccccaaggctagcatgaaccactaagaactatcataagaggtccttacaatagctagacagggaaggagaaacatgcgtgttggtttagtctcctgcccaacatcctcgaacaatgagtttgcccatcactttcacagaggaggacactcgacacgtacatttccccataatcacccgttggtcattgaagctcaaataaaaaacaaaagggtatccagagtcctggtggataacgggagttccgtgaaaatcttgtttaaattcatcttccaagcaattggactcactaaagtagatttgtcaccttgtcccattcaggtgtaagattttaatgggcatgccttgatgcccatggggaaaatcgaattgttagtcattctcaaggggaaaacaattctagtgccttcaagcattgtacatttatagtggtggattgccccacagcgtacaatgcaatacccgaacgccctatcctagtagattttggagcagtaacttcattacaacatatatttatgaagttcccctacgataatggttgtattgggacagttataggcaaccaggagagtgcaaggaactactacaacgtctctatccgaacaatattcatagtccaataagaaacactcgttgctcctggaatagaaaatcaagcaaaaattgaagccatctaggagaattttaaagaaaaactgaactacccagttaggaatggaacgaacgtaaaaagaactagaccaagaatcatactgatctccccacaagaactccataggttgtagcacaaagtaagtggtgaaacacttcaactcaaaagagttgttggatcaaagatctctcacgcttgaagtgcaggctggcttcattactaccgtcagtaggctggggttacccagatcaaacataactctactagtcacatgtaatgctttgtaaatttccttcttaaatgtaaacctctgggctaatgaaatgaaaatagaagaaaaattacacaagatttcacatgtttgttcacacacaagctatgttttaaataagaaccataaacttggagacgtccaaacttcctaagtcacttaggggtagtatacctagctatgtgccctaaaaagtcttgtattaaacttgaagtctattgtatgaccaatttaattttcacctttattcttggaagcgaagccatcacctgagccccagtacatcttcaagcctccttcttggaaggaggaatcacttcaaagtctatttaagagctcaaaatggttctaaaaaaaaacatagctaatatgcctttaacatgattcctcaagaaaaacatcgtttgaatgctattacagtcgctttggcctgttggccatatttgcaagtttcccatgaggagtaagagatgaagcacgtctggaaacccttcgtgatccagcagctctcgcaattcaaacttaggaaatatttatctaagtgctaaatcagccatgtcactttggattaaggaggggagatcaaaacattaatacaagtctagcctcatctccctaaaaagaacctggctaggactctattgtatgtttggtctcccttgctctcactaatccaaataacataagagtgttatgatatcttgcttaaggtagttaattgggaagaatgtagacagaaagcaaactccgcgactcctgtagcgatttaggaacgtagtttgtaattcctacaagtaaggttaattcaccaaaagcttgaggaatgccacgctgagaactttaataaaagttgacacctatcgaatgtatgaagttgcatacttcaaaggttcaacgaagcagtgattgagtcagaaagtatcaagctttggctgttggaacaaaaaacttggccaaatcttaaacataaatatatcagttggcatagcaagaaaacaaagaccaaaaagaagcgcgcaatgaacttggaaataaagtaagcataattacaatagacgtttctaagattattatagacgacctctcagtaggggcgtaactaaattatttctacaaaactaaaattaaaaaataaaaaaaaaaagaaagaaagaaagaaagggaggagttatgagatgaggttcatttctcagtttgggggacatgctactcctacacttggcttggaaggacttccttggtggaaacacaaggctgctcctggtgtgagactaggggcgcattgtgagtcagagccaaagggtctgttgggttatcttggggaagaccttgaagaccttgggaggtggttctcgaagaagccactacctctgctgagtgtcgtgcctctgtatggccagttgaatctccatctgacttgccattattgttttcataaaagtactttctaagatacgattttttcgacagtaagaaccctctgtagacaatcttcctggcctccctctagatgcctgaggatggaaggatccttcttccacaagccctggagcagcaatgcataagacaagttaacaaatcaaagaaaaagtgttttggcaagattcactaacttgatagcatcacggattgactgttcaacagtctctctagccctttgcatggcccccaataaaataaaagctttaatcccattggctagttggtgggaaattttcctctctagttacaggatagtgttcaagtgagtgttgcggactgtgcagatgcctacgtgattataacttgctgctcatgtttaacatgccaggagtctttttctcttgtcaagtcctcgacctgtttgtttaaatcctaaacttgacccaataagccctggatcactggccctttcttgcaaacttcactttgtaaagggcacaccttgtttattgaagcgagaagagtcacatttgtgtcagcaagttgtgcttcaagcatatccttttctgtgtcagccttgcaaagatcgtcctggagagtcgacagttggaacttaagttggtccagctctaacttattcttctcatcgaaatatcactggagaatagggatgttacatcatatatttgaaatttaaagtacataactaataatccctaaagaatagggttgtatttgtttatggggaattcctatatttatgggtagtttgaactgttgcaggaatgttgaaggcgagttggaaggtttatgagaaaaacacaaatgttggttctgcacacatggtcggccatccttgttgaaggctacccggtgcttggaagctatcacccctagccggtcagctataggcccggctaggaccttgctggcttgtgaacatttctatcttagcttgtgtctatcatgcagtaatggaatctcaaaggttgggaggcagcacggcactaacgtggcaggttagtgctgagttgtcttcaacatattttttattttatgccatgtggaggtgccacgtaaagtggaaaaaatttaggataatacctactatagggtaggtgcctaccttgtctcaattaagacaaggtgtctcctatcctgacaaatttttgtcttaataacttttatcctgtcatattttgtcttaacaaattttatcctcacaatttttatcttaccaaattttgtattaacaatttttgtatttttccctatttaattaatttaaaaaatttactacaaaaaataattaattactattttccattcaaaataaatttttccaaacagcattatacaactctttatccctactcttgatagtatttcaaggtggtaattcgggaaccatggacctataattctaagctctaataaactagattatttattgagtctcatcaaccaaataatcatatttattaattcgtgattactccactatagatatagaattgagctcttagtcattatagaattatatttattgagttttactacagtgtccatttatataaccaattccagtgattagccctccatgtattggttcttaattagttttggtcaagttaccgttttacttttccaattacttttttatcctttagtaccattaattcactagtggaagt

SEQ ID NO: 218140 - DNA, 4625 bp, Cannabis indica
agtgaaagaaacgagcttctctggtaagatactcgaaaacaagattggctcttacaatgctagctgaaggatccaagagaagagatgagtcgaggagatgaactttgagtttcaaaatgtcacaaaacatttgttttatcggcattgtaaatttccttccctttttaagtttcttgagagccatctcaacgtcaaaaaccttgttgcgggttggaagtaggaagatcttgtgagagagaggggttaagatccttagaaatacttacaacatgaggatcagacttttgcttcttaagagccactttaggtttcgaggctccatctccttcttttttgctttgtttttgccttttttcataggaaggttagtcaggctctgaagaagttcaacaaagtttaccgattatgtaaaaccaataagtaagaaatgagtaaattcatagataaaattagtaaagaacaccaaacaaaaatccataaagtctcacccaggctactatctgaaaagttagttgagagtgggtcaactcgagtattattttactctctaaagttagtaatttcacaaatatctaatgtgttaattgggctaagatcctaaatttttactgaatacaaattcgagctatattggtccgggataccataatacgagttgttgctagtaacttggacatgatatttggggtaccaactatcaaacctatgggcaatgagatcaacacaattccaaataaaaaaaaagtagtatttgctatcaaagaatttaactagacaaattcattcaacttcgagaacagttggggaccatctataaaaattattttttacctcggggagccccttcaagtttttaggcaacatcccgagaaattgtggctttgataattgcaacacaatcttaatcttcttcttcggagaggacccttaccgatgatcaagaagagaattttcactctttgatattcacggtagactgatcctttccaagcaacccacatgctactaggttttgcttgtgaaggagtaaacttgatgccctcattctaaatgacaaattcactagaatttggtgacgttgcaacataatttcagatggagtgggttttagcatcattgttgttaaaagaaaaaggaggtagtgagatttgaaacaaatacaagaaaatcgtcataagacaaacaagaaaagtgagttatgaaacttacatttgaaaagttgtataagcacaaggatgtaatttcataatctagaagaattggtccttaattctttcttgttaagaatgtcatgaataactttgtgatcccccgtgtaaattctgagatagaaaaagcctctagaataattcttcttaataggaatcgctttgagggtatacatgcaagtaatctcgtatggctcgggaccatcccatcccaacatatgaaatcaggatttaagagaggctaaaatcctatatccattagggatcaaccagaatgaagcaattctaacaaaattgcaataatctttgaagtagaggaagaataaccccaacacgtatatgtatgttcaacactccaagctccaatttttacaaaacagctcgtactacactccaagtcattagtaaggcaactcctgttttttattcctcaactgatcgacatacaaaatcgttgccttgtttaatgccacatgattataaaaaaggcctggcatatgaagccatagaggttactttcgattcaaaaaatttggcctcgaattgtactgtgagatcttgaggaagtttaggttttcaaattttgggaggggccatgatttgaaaatctaaagttccaggtgaaatagcaatgttaacaaggggtcaaataaaggttttaccaaagggtacttagtaagatgaagaggctcaggccaggcaacttctcacagataactcacagataagaacgtttatccttagctatttcagttataaatcatctaaatcgagcaaaaacactagcttatttaatctcactatatgttgaagaattttcacatcattatcttcgagttttattttagggattttggggtttagtttaaagagtaacacagaagaaaaacgaatttcatgataaaaagattttggatttcaagttctgtgttagatagattttttttttcttaaaacctagaattacaaagatcctataaatcacccattaccaacgttatctcaaaccagtttaaaagaaaaaacaagactctactcaaaaaatgataagttcgtaaaacaaaataagtaatgagataaaaaatcaaatgaagtattgtggacattgtcctacatggaataaatggtagagcattgagtcatatataagaacatgggctactccactcatcactaattggttttgagatggaacctcatgattctcaacatggtatcagagacaaatcccttccgggcatgtgatcctatccgatccgtacctatagtgatcatgtccactctggtacagttcaagattgatgagccaaaaatagccaccatctcgagtgagaatattatggacattgccccacatgaaataaatagtagagcattgagtcatatatatgaacatgggctactccactcatcaccaattagttttgagatggaatctcatgattctcaacatgaaaaattaaacaaaaacttattttctctttttttttaagcactaagggaactctcaagggaatagctttggaaattttcaagccttaaggttttttaagtacttttttgatagaaaacttgtcatcccaaatgagcaccaaagacctctttttatagtatttttaatattgcaatttgaaattcaaactcataacctctcatggatgttatggactcaataaaagatgtaactcatgtacacaccataactcctatataacattaagaatttcaaattaacatgtgtaatacctttttatacacttaatatttgtgataattttggaggttactcatagtaacaagtaactcctctatatattataaagtgatgacaactaatatattatcatatgttacatattattgatttattacatatatttaatctatatagtatattctttatatataatattacaaacaatgctcaaagaaaatatcagaacaaaatttgaggagcataaaaggattattattattttagattttgtgttttataaatattaccgatcaaatcgtctgttttgtaaaataataaattggacttgtattttcaaaaccggtacaaaatagtaccatgagctcaatttaattttgatattgtttttttaataaaactaacttgaaaataatttctagcacgaacatatgacaaaaatatatctaattttgtcataaaaattctagattgaattattattaacttttattttgacaaaattagttcaaagtactattttgtaccattttaaaagatacaacatctaatttataatttaacaaaataaacagtcagggtcggccttaggtataggcgggctaggctcgcacttaaggcctactcattttaaaagtccaaaaaaaattactttttaaaaaatatacatatttttttaataattttaataaatattatttatcttcatagtaaaagcttaatttttttttatctataatcaatttaaactcataaccggtccgataaactgttcaatcaataacttttataaaacactaattcaaaatgtaatttatccaacataaagttacaagaatttattttatatgtaaaggcggaaaaattgacgccatcaattgtgaaaaagttttttttgtttggttatgaaaaaaagaccacactcatttattggaataataaggaaatacaatggtcatatataataaaggtgttataataatatcataacttatatagaataatagaaatgggtaggatatggagactatcttaatattaatcaaattaatattaattaattagtaataactaaaaactactcgacctaaaaagcaagagaatttaagagaaaaacaatttgttaaatggtttgtcgtttgtgaaaataccccacaagattaatgagggacaggacacccatgaaaaaagcctctccatattaccctaatatataaatctgtgaaatgttaaagtgtctattattttttatgtgttaatatttattggtctaattaaatattgtgtgttatataatttaatataataacatttaaagaatattagtaatcaattgttaaatcatgtgtctaaaaatactagacacaataaataacaatactctataaatatatataagccaaaaaaaaaaaaacaaagacaaaagtacttttgtggagctaacaagggagcatttttaggcttttacttatagttgtcatcaacaaatttcattcactaaattattactacctccaactaatagatcaatatataatagttacatttttattgtaaccattatggttatatttttttaagacattaaattactattaaatagttgtgattaatttggaaattaaataaaaataaataataaataacttgtaacctgaaagtaacctaatcatttatttccttataaaactttaattaagatt

SEQ ID NO: 218141 - DNA, 9719 bp, Cannabis indica
ctgtaaaagagcatgagaagtttctaactcatggctctcaagtaaacctatttttcgagtaggagcatgactccatttagttctgttttgttcatcattgtatcacctctgagcttcatcttaaagtaataaaggcaaagcctcaaggcagttcctcccaagaattagatccaagtgttaccattgtgattgaaccttgtaactcattgtgtccacttgatcatattattcttgttgatattgttcttttctagattacgtctattgtttttcaattgatcttgttaatgtttgttatgttcttggatagtgtttgattcaccacatctatgcacaagtttccaaatctgtgaagtagagtatgcacaccctacttagtaggacgcgtagggtttaggtgagacaaactcttatcctttcttgattgatgagactgtacattatgaagtcatcacttatacccttgattagcgcgtaatggttgaagaatgggtttaatgtgtctgacacgtcttttcatatatgtttgcagacgtttcctctatgttgcattaaatgctagttgactatacatctccggtaccctaaatctggagaagccggacgctatctagctttcggaggtgaataaaagatggatcccttcgggtccagtcgtggctctcggagaagctattcagttgttctgaggggatcctgcctatataagattttccattaattatctccgagtcctcgagcttaatctgccatatgtcacgttgtgggattgccacgtatattggaaaaaaattagggcaacaatgtcgaaaaaaactaaaaaatagcctaaatctaaaaatattctaaatcagtaaatctatcactaataaaacaacaaaacaaataaaatatatgaaacctataattaaaatcacacgtaaaacaataaacaaaacagagacaaaatttctaaattagggcaaaacagaaaaggagctgtcatgaaatcttagacatttcatcgacatgtttcttctcctttttaatttatggtatattacttttattacatttattcctcttcgattttttcttcattgaacgactttcatgttttattattggtttaataaaatttttattagaatcatcatctttaataatagtccgtttttttttttatttttttgtactaacgatttcacacccatggttattgttatacgttttgaacttttaaaataagtttcttaacattggttttttaaagtagaccaatgagttttatatatatatatagcatagtttattcttgggtaaatagcgacataagtacctaaagttttatgtttgtaagcgacataaacccaatgtttatttttagtgacataagtacccaatgtttgtaaaactgtaattttcttccagttttgtcattacagactctattttgaatttattaaaaaaacatatagaagtaactgatactatatatttctatctagacccaatgataaaaaatttaagccttatatgtgccatgtttaatataatattagagtttgtactgacaaaattggagaaaaattacaattttgcaaacattgggtacttatgccgctaaaaataaacattgggtttatgccgcttacaacataaaactttgggtacttatgccactatttaccatttattcttcaaagtgctgtttggtggtggggtcgtaccaaacctagaggcccttgttattatattattatttttgtttatttatttatttatatttgttttttcagcaaaagggcgctcaatttttttttggaacaaagggcgctcaaaattttgatagaacgaaaataattgagactcccgctcattttaaaagttcaaacccttttgtttattattattttatatatttatataaattcctcttttatattttactttaataagtgaagagactcccttcaatatctattcgctccgtctgcttttctttctcactctagggctctctctctctctctctcgctcttcgctctcctcactcctcacttggctttgtcccaaaatatggggaaatccagatctggaaagcgcaaggccaaggaggtcgaagagcctgagctgtctgattcctctgatatggctgagatggacagccagcccatcgctttggtagtcaacgaacccaagaagacgaagcggaacgatgctgattccgatgcttcctttctcggaaagcctattccccaaagcgaagccgccgaaagatggcccaaacgttacttgtcaaaggtcacttctttgttcatacgaatcagattgcttattgttatattctccaaacgtatttcatttctcttaataaaaatgttgtgtttgtcaaatgcaggttaaggccaagaagggagagctatctggggaaaagaaagagtgagaactcgctttcttttggttaaagcttctagtttgcttggcgacattgctgtttttgtgtgtttgtcaagctcttacttatcttatttactgatccttgactgactgactgacgatgtattttggggtttgtaggagtggaacggaagaggaggtcacacaagccaaatttcattatactcaagctttggtagatggggttgtctatgatcttaatgatgacgcctatgtcaaggttggctcttattttgctttcttgttcctgttcaatctttttcactctatttatttcttaaaacaagactgattagctaaattttgttttctttaggctgaagatgataagcctgattacattgccagaattattgagttttttgaagctgttgatggtgagctctatttcactgctcagtggttctatagagcagaagacacggtaataaaattatataaaccgttatttcaaattgaaacatgaatttctttccccctgttgatttaaacatatttgaactcttataggccatcaaggatcttagggaccactcacacattcttgataaaagaagggttttcatgtcggagatcaaggatgacaaccccttggattgcattgtttctaaagtgaaaattgccaaagtatctcccaatgtatgtggatctaaaaatatatctatgttaatgttctacattgtttttttttttttctaattatttttctgtgtagtgtttgcatgccgttatatttttaacccttttgtttttcttagatggatttggtagcaaaggagaaaaacttacccccttgcgatctttattatgatatgaagtacacagtagctaatctaacattttcaaccattgatcctggtaagtctttcgtttttcttttgttaaagtaatttttttttcttgcttatactatttccaatggatattgtaaaatttgggattagctccaatgtttttcaattgtgctccaatataaatggtgcaacttaaaaagtcaacaaatgtatttagtatttaaaaatgattaaataagaacaacaaaacatatgaaaatttaattttggtagtgaagtaaaaatgcaggaaaaaaagtagagaataagaaaaaatcacatgtttggtatggaaagaaaaaaaaaattcctgaaaattgatatatatatttaattttctaaaattttcatgtcaaaattcaatttccaaacattatctaatggtaaaagaattacattatgtttggtagaagggagagaagaattgaaggagagaagtggacggataaggataaaatgattgtttaaatcttttgtttggtaagagggagagaataagagggggggtgggagaaggaaggagaccctccctccaaatacacaaattttaatccttttaaaagtggaagaatccaagaaaaaggtttaaaaattgttgtttttttttttttttggaaaaaacatataattatattaaaaataataagatgatgattttaatgtttattttacttttacgtttaatactaaataataggaaagtaatttccatcctccctatctcttttttaaattttccatcatttctaccaaacatagacttaacaaaaaattggtgtttgcaaatttaatttccattatattttgtgttaaatttattttagtatgtgccaaatttaacacatattttggatcactatcggataaatcattttgtcaaacttagctaaaaaaagtaatttaccagttttacatcgctctatagaagatgcagttttgtctttttttttttttttttgatttagcaacttctaacgatatttacttgcttctgatgaccagtctctaaaccagatagtgacacgtcgtccacaatatcaagtgaaagtgggtcaaacaatctgggagatgatgagagaaatcaaacttccaagaagtctgagatgactctcttagacctgtactctggatgcggtgcaatgtctacaggtttatgcatgggtgcttctttaactggagtgaaacttgtaactgtatgttactttattccattactatttgcattttatgttcctatactttgaagtatcttttcgtttttcttactgtgtttcattttccatattataaagagatgggctgtggacttcaatgctgatgcgtgccaaagtctcaagttgaatcatcctgaaactgaggtgaagattttttttttctttctatttaagcatttatatattagggtaaatagtggcataagtactcaaaattttaagtttgtaagtgtcataatctcaatgtttatttttaacggcataagtacccaatgtttgtaaaactgtaatttttctttaattttgtcagtacaaattttgttattttcttaaataggccacatataagatctagattctagatcattgggtctagacaaaaatatatagtatcagttactttcaaatgtttttttaataaattcaaaatggagtctgtattgacaaaactagaggaaaattacagttttataaacttaaaattttgggtacttatatcgttatttaccctatatattacaatgcaaaacttgtgacttgaacctaggacctctaacacacatgcaccctcttatgactgaggtggatattagttatgcatattttgccctagaattgtcactgtattttccattgtttcatttttttttgattaattgtgcttataaataagtgtaggtaagaaacgaagcagcagaggattttttgtcattgttgaaagattgggaaaaattatgcatggattttaaattgcttggaccacatcaatcccaagaccaagacgcttgcttggaaagtgttgaagtagagcttgataaaaatgaagacaatacgagtgacagtgaagatacctcactttcatctgaagaatttgaagtgcaagagttgcttgcaatttgccatggtgatcctaacaaattaggatcaaaggggttatatttcaaggtatgacactataaaacctagatcatatcatctgtcggaacatttaatgaccctatgtagtgttttataatatgctgcaaacttgaaattctctattatgttttttaacttgctcatcttattagtgttcgtccatcctcaaatttattattgaatattcttgtcaatttgagaatatatacgagctagaaaaagacgtgcgtgggtgataaattgtaattttttattaggtattgattaatgtttatttttatgctattgctacaatgccatattatataggttcgctggaagggctatggttcagacgaggatacgtgggagcccattgatggcttaaggtaggataacttcaagctgaaaaagactgccagaatattcaaatatcttaatttgttattttgttttaaatattcgaatattttgcgtagtactgtcttctattctcgcgtattttattgtttttgtccatcatttttaatttttcttcatctcttcaatagcacatgtcaagataagctgaaggagtttgtcacaaaaggttacaagaggaatatgctaccacttccagtatgttcttatcagtcattttagtttattcatgtagtataatagtcctttcaaattttattttactaagcttattgatcataatttttagggtgatgttgattttatttgtggaggaccaccgtgtcaaggagtaagcggttttaatcgctttagagacaagacagctcctttaaaagacataaaaaatagtcagctgcttgtttacatgagcattattgagtatttgaagccaaaatatgtcttgatggaaaatgtcgtcgatattttaaaattttctgaggcgtttttaggacgatatgcgttaggtcgtcttgttaccatgaattatcaagctagattgggcatgatggctgctggttcttatggtctaccacaatttcgaatgcgagtattcttgtggggtgctcagccttcagaggtaaataaattagtgttctcatgtaagattgtattatgtaattcatggacttaccgtttctttctctttttcctttagaaattaccccagtatcctctgccaactcatgaagtagttgagagaggagttgtcccaactgaatttgaggtatattgtttgtacttctgtttaggttcttatttttggtttttaattgcaaccttaatcgttgaccctaaatccaatcataggaagttcttgttggctttaacaaaaacgagcagcgtcatttggaaaaggctctttatcttgaagatgcaatttctgatctccctccggtaaagttgattttcaatttttagttttaagtaaatatttaatgggtagcacaattcattgtatgaattcatctggttttaggttgagaatgatgaaagccgagatgaaagaccatacgagacattacctcgtactgaatttcagaagtatataagattgaaaagaagtggtaagcatgttatggtatttgtacagaccacgtctaggcagtttagaaatgtattgtctttatgcagatgctgttttggaagccctaattttttatttgtatttttttgaaaaacaaatagatgtggtaggttatgaaaattcttctcctcaaagtccacaaaaggcaatgttatatgatcatcgacctttacagttgaaccaagatgactatgaaagagtttgccaaatacctaagaaaaaggtttcattcacaaattttagtttggagttgaaaatattattgttgtgtaattgcttagtctaagtaactcaacttttgtttcttctatttcagggtgcaaactttagagatttacctggtttgttagttggtccagataatgttgtttctcgtgatccagcagtagagagtgttcaagtttcttcgggaaaactgttggtataatgttgtttatatatatgttatatttacttaattttgtgaaaattagaagttctcttatatagttagcttgctattttttcaggtaccagaatatgccctaaactatgtgcgcggaaaatctacaaagtaggaattctgctttattgaattgaaatatgaaatgttttactttattttagttaggtttctcatgtaattggtacatgcaggccctttggtcgtacatggtgggacgaaacgattggaactgttgtgaccagagctgaacctcacaaccaggtttgttttgtattagtctacaaatgaccattttgctttttaagaggattggacttttgaaatgactggcatgctttttattttgttagataattattcatccagagcaagatagagtgctctctgtacgtgaactagcacggctgcaaggatttcctgatttttataaacttagtggaccaattaaacaaaggtattcactaaactcttatcctgttaatcttttgcttattattttagtaatatttttatatatttatgatctttttaggtatatgcaagtaggaaatgcagttgctgttccggtgggtattgccttaggttataccttgggtttagctagtcaaggattatctgatgatcaacctcttacaacactcccattcagatttccaaagtgtatatcatcatctgaacgcctagaaagatagttgaaagatctagtatttatttatttggagttctcatttgatattatctatttcaagttatctcgatttagataattgtaatttaattaggaaccattgttttttaatattatcaaagttcattctgaatttagaacatgaggaagtatttgtgttctagactagaccttcaattcagtataatattgagtttacatgcacttcaaaattcaaatttgtccgatgctctatctccttatcttttgttttcttccttgccagtgcttagtaatccctttacattttctctagctctttgatattactgtgggcattgggattaataaccatgtttcattttgttgggagcggtatgaaaggtttagtttggctaatagttgattttcattttatatttatgttaagtgctgccattaattttggctgcttggtttttttttttttttattcatgttttagatagtttaggtttgtgcctagaacttgtttggtatgtgctgtggaaaaaattgaaaatactggagatgctatcattttagaattttgcatttaatttgtttatgttgattagcagataagccatttctgtttctttaacttttactgtgtctggccgagaatattttgatgaggggatatttgttgaactaaagttgtataaagttgatttcaattgcacaattttcactttaatagagtttgattgtatagggtttgtggaattgttattgtaatgtcttaatttagctagggtagtagggaacaagttgtagcttttagctttcttttataagtttatgaaaacaccaaaaggtttggaaggagggagacatgggtggatggagagggaaggagggagaggggtggtgggagatggaaaatccttttctttggcatagaagattgtgggagggagaggaaaggtggaatgatttacaatccatttgggcccactattttgaatccttcctcaaatgaaaggatttatagtactcttctttctaatttattttaaagttacaaatacactatcataaaaaaaattataaaaaaaataaaaaaatggataataaaataattttataagtatatagtaatatatccctccatttctccatctttctttccaaacaacttgaaagaataactaccatactctccctcccttatattctctatcctccctcaactctccatcctttatcctctccatccatctcaccaaacatagtgtaagtttaagtgattagagctaacaatattattttttttttacattgctggggttgtaaaataacattagtccacatgccattgcattaaggtgtttagagctacaataatggtgttttcaaagtattgatgggaaaatgtgcaattgtgcccaagttgcatgtgaaaaaaattccacactaaaaacatctcatagtaccttcaggccaaaaaggtaagagtgaccttgcaagtgtaaggacctaaggcaagaccatttgtaaggacctaaattgtagatgaatcatcttgagttggggtcttaaggcaatggagcccattgaagcattttggtcaatcagggataggaacatggggaatgtgtaaagcccgcttagttaatttggaaattagcagctgtttatgattaattatgaaatt

SEQ ID NO: 218142 - DNA, 12812 bp, Cannabis indica
gtggccaaagggtgacctttttgaggcctgatggttttttctcattgtatcctttaacattgtttatgctgtctatgcgttgattcaaattccatttatcttggtggttcttttcatattcgaaaaactttcaacaatagatcttttttccctttttttatataattttaaagtttcataaatttatgaacttattcaatgttttgaactatccttgacatgtgtgctttaagccataatgtgccagcaggtactcatcttatcgaagtggcagcaataggatatttcttttccccggtgagaactctatccacagatcaatctcgctgttaacattttcaaaccgctacttatgtctgatctcgttatgtttctttcgttaaaacatttaggttcgagttgatgttagtgccagaaacccgggtaaggttcaggctgcactaaccgagaccaggaggggactacacgagtttgttttagagccattgagagaagaacagtattacgaggttagcttagattgacacactatttactttactgtttttgctctgtcattggtttttttacattcaccattgtgatttcaggtaagggagcccttcaacataatgtctattgtgaaaagcccgatgggtatgatgattggatttatggtgattgtcatgtttctaatgcccaaattagtggaaaacatgggtaagtcttctattcttttacttataaaggattctactccatataatttgttttcagactccatttcctagaactagatttgcattcatatgatgggatagctcctcctccaccatgaccttatcacaattaagggcgtgtttggtagtcactgtgtaattactaagtccagtctagtaattccactttaaaatacaaagtatgtttggatatcagtgatgattacatatacattcttaatgtcttatttggcaaaataggtagtaattattatataatattttttagtaattactatttaaaatggaaagtatttattaattatactcaattttcttatgggggctatgagagttgaagcatagaattgtagttactttcaattatatgattagttaattgtgttaaattgtgtaattacttctaattacactcaaattcagttccaccatggcttttcaaacgcgtcataaaagtgaaaagagaatacaacacacataggtggagggaacggttcaatccaatcaatctcattgtctattagcatgttcggtctatctatatgctgcttgaaaaatattatgacccacatgagatagaaatgtctcttctaccgaaacttctgttcttttatatctcgcgtacttattgagttgccaagttattgttttcgattcaggactaatgtaatacttatatgttaatagatagtttgcttgtatagtagttcttttactaaccatatggtttaattaacaacagatcccgaagaaatcaaacgagcacaagaagaaatgagaagccaaggggttccatcgctagcaaacttgatgcccggggctggtagaagctagtggagcaaagagttcgttcacaccagcatgagccatcctcggcctatgctgacccaaggaatggcctcatttatatgaacagaagctcgaaagctctgaattgatggaggataggatagaagaggctttaagcgaaaactttgtaatgaaaaagaaaatctaaatcttattcctttttgggattgattttgacacaaatgtgctgcccttgaacttgattaacttgtgtttcgaatgaactttagttgaaatagttcttagtatatttaaatagtaaatctgggtttgcaaaatacattttatttacacaaatattggcctctactgaagttaagattttcaaaaattgattcattttttcactttttctccaatcatatgttgaccgacattcatcggagtaatgcaaagtccatcatcctccgatgagctcactacacctgccgattaaagctgtcgggacttggaagcgtgattttgattgcacttttttcggctaaacttcaaaatacaaatcgtcgttttgtgaatagattatgaatatttttgcttgtaaaattaactaaaggttatttttctattagtttcttactgtcgttggagaacatttgaagtggttggttggttggttggttttgtgctaagatttgaaagaatctaaaccttaaatttttcgaacatctattttgtagctttggcagggatagttgggctaataaaaatggttgtctatgtgataaaaaatgtcttcatttggattgtatagattaacagataagaagtagtattagagtttctttgcttagtcctaagaatcattgagtagttgtaatggtataagtgtgatccatttgtttgattggtgaatattttcttcttgattaaaaaaaatattcaaggattacttttcttcttgcttaaatcgaaaatttactatagagcattgctattaggtactttaagatagggctggcaaaataagtcagacacgataacacgattcaaaaccagtacgagaattaacgggtttgggtttgccttaaataggtttaggtcgtgttcaggttgactcgtctaacccgtttaataaccgacctggtcgtgttcgagttgacacggttaacacgaaactggctcgttaatgacttatttaaagttattttcgtactttaacatatcataaatgagttataaacgtgttgaatacttcataaacgtgttattggttgacatgtttaaacaaaatatacttataaacaaattacatgagccatgtcgtgtcaagccgtttattcgaattcagcatatatctattatacatggatctcgacacgacacgaatctgaattgtcacccttaccttaagatgcctaacaccatatagatgtagcgcgttgtaagtagttaggagtttcttatattatttattaaatcaaaatatgtagaatctactattaaattacactaataacgttataccacctcatgagtaaaaaaaaaacctttactatatttgaaaattattgtacaccgtattacaccgtattataccgtatagtattatattgaattatattttatacaatatttttatataaaattataagtagtattaatttttatagacacctaaatatataatattttaatataaagtaaaattaacataagaattatcatgccataagatatttgtataaaatttcctcaaaaaaaaatatatataaatatttgtattaaatttcttggtttttggtctactaaccttatctcaacacaaaggaagagaaaattgtaattgaatgaaaagaaagagaaaatgactagcaatacataccaaacaaacttttggttacccacttaacaacaaaaagtaaaaaccaatcatctttacaagggaccctacctactttaacttctatgcagaaaaacgaaacaacatgacaaaaattatacaaaaaaagtcactataatctattctactattcaaaactaataattgtttgaaattatagaaaaattatgtggtaagaataatatctccaattttggtagtcaaaataaccacatatatcaacatttccaatcaaatttaaaataaaaaataagtttataattaatatttaaaatgaaaaatttatagtaattacataatataattatattcaaaatataattaaaactcctcaattacctccaattacattatcactccaattacattatcaggtaacttttattatgtgccaaatttaacacactttctagaacactattagtaattttttattaagtatgctacaatatagcaataaaccacatttttaaccctccatccaaaaataggataatgttgaaaaataccccttttattaatcaattaatcaaatttacctttaattttatatttatttgaaacatacctctttttatatgtattatacccaaaataacataagagacacatagagagtatgttgaagggacaggagcaaaattggtaagaaaaaggtaaaaataatagacttcaaaaaagaggataaaaataaaaaaaagacaatataaaaaaagtgtagagtgtaatttcccaaaaatattacaggaatgcaagtccattctttagattattacctcattttaaaactcaacaataataaaaatggttgattttgatttcgaaccagaaattcataagaaaagcatatgaaagaaaaaacacactcaatgtgggcaaaaagtaaattcattccttttaccattttctctatattatatattatatatattgattccccaacacaacccaaaatccattccttattaaaaacccaaatccatattaaaaaggtcttctttatcagagaccaatttccatacacttcaccccaaaaccaccaccaccaccaaatataaaaaacacaccctacaaaaatcaaagttctagtattctactaccacatcaaattgtgacaaagtaaacaaatcaattcttcgaaatttttatggtttctcaactcagagaggtcattcaattgaccaaacaattgctcagtacctgtagtgaacaggcttgtatggtccctcaactggcacactgatgtagtcagcttggtccttggagagcttggtgagtctagctccgagtttgcccaagtgaagagcggcaaccttctcgtcgagatgcttaggcaagacgtaaacctccttcttgtatttcccagatgacttctcgttccagagctcgagttgggcgatgacttggttggtgaatgagcaagacatgacgaaactagggtgtccagtggcacaacccaagttcatcaaacgtccctcggccaagacaatgataccgacgttggtctcggggaagacccacctgtcggtttgtggcttgatggtgattctcttaacaccggggtaggtctcgagacccaacatgtcgatttcgttgtcgaagtgaccgatgttgcagacaatggcattgttcttcatcttcctcatgtggtcaaccatgatgatgtctttgttaccggtggtggtaacgaagatatcggcatcggagacaacgtcttcgagtgtcaagacttggagaccttccatgagagcctgaagggcacagatggggtcgatctcggtcacgatcacacgggctccggcttgcttgagagcagcagcacaaccctttccgacatctccgtaaccgcaaacaacggcaacctttccggcaatcataacatcagtggccctcataagaccatctgggagagagtgacggcatccgtacaagttgtcgaactgttaccaatcatcaaaaacacaaaattatattcaataaaagcaatttatttgattcaaattaaagtaaagtaattgaacagagcaactttatatatacattatatttaatcttatcttattcctacaaatatgtaaaagcaaaatcctttattaatgttcaacccttacatagattagattaatctgtaagaattcaaatcctaagcaggaaacagagtaaagaataatatatatatgagatttgagcagaaaaaccagagcaactttatatacattattaaattcaatcttactttattcctacaaatatggaaccaaatccctgtcccaaaaaaccaatgttcaaaaacacaattatattcaattaaagcaatttctttaattcaaatgaaagtaaagtatttgaacagagcaactttatacatacattatatttaaccttatcttattcctacagatgtaaaagcaaatccctttatcaatgttcaaactttacttagattagattcaacctgtaatagctacaatcctaagcagaaaacagagtaaagaatatacacattatatttaatcttattttattcctacaaatatggaaaagcaaatccctgttcaaaaaacaaaccctaattgaattgtttatcaatgttcaaaaaccttccttagattcaagaattatatatattatatatataattaaattaaatattattttattattcctacagataaggaaaagcaaatccctgtcggaaaaaaccataattgaattgtttatcaatgttcaaaccttacttagattcaacctgtaagacctaaaaccctaagcataaaacagattaaagaaaaaatttaatcttagtttattcctaaagatatgaaaaaccctaattgaattgtttatcaatattcaaaccctaagaagattcgaacctgtaagaactaaaaccctaagcatgctaaatatatatatataagatctgagctgaaaaagcagaagataaagtagatctgcaagttaaatgagcataaaaatccaaaataatcgatcgaatcatatcagatctgaaatcaaaaaaaaaaaagacaaaaatagaacacagatctaagtttttaccttgctcttagtaacagagtcgttaacattaatagcagggaacaacaaagttccattagcttgcatctggtaaagcctcttaacaccagtagtagtttcttcagaaacaccaacaagtctatccttcatcttgtggtatctcttaggatcagtcttcaaaccttccttaataatcccaagaacaagttgaaactcaacattatcagtagaagtaggatcaggcaactgaccagtcttttcatagatctcctcagccttaactccctcatgaatcaaaagcgtagcatcaccaccatcatcaacaatcagatctggaccaccacctggaccccaatcaagagcacgctcagtacaccaccaatactcttgaagagtctcacctttccaagcaaaaacagcagccgaatcacgagctatggcggccgcagcgtgatcctgagtcgagaaaatgttgcaggagcaccatctcacctcagcaccgagtgcggttagggtttcgataagaacagcagtctgaatagtcatgtgaagagaaccagtgattctggctcccttaaatggctgagatggaccgaattcagtacggcacgagacgagacctggcatttcaacctccgctagttcgatctcgagacgaccgaaatcggcctgagaaaggtccttgaccttgtattcacggccggcggtggttttctcgacggagagagacatgttttcagatctgatctgagctctgattcgatctgagaagagagagagagagagaaatgagagtgagacgaagatgaatggtggagatgaaggggtatatatagggttaggggttttgagatggacggtccagatttactgatttggggttttggattttttttatttaatttttaattattttttggaaagggttggtgggtggatctggtaaaaattgtaagtgagagaatagaaaatgaaggctattttgaaggtggggtccactatgaatcaatattgcttttgtgttttgtgattatttgaggatatttttaagcttaaaggtttactaatgactataattactactattatataggtaatcttgttgttgttactattggaaatttctatagtaaatctattagagttgttatggtacaatttttttttctattttgacatttaggaagtttttagatagaatgagttattgtataggtaagatagatggatgtagtccaatgactaaagctttgctagcttttttttgtagattgaactcttttttccttaagagtacattctcttttctttaagattctgcaagcggtggcggtgtatatttattacccagcgtaaatcttgaattagaaggtgaacttacgattacactgtagacttctaagtcgcccaacaagtatttgattacttcggggaaatgggtgtgttgagactagtcacacaagaaccatctttcgaaatcattgaagagattgttgatcactagaccgaccattaaaatgtaagcatagttacgatcctgtgaaagctggactaactccagctaaaaattgatctataagggtcgaagtcgaatggtttaataatattatcataaactaataatttcatttctacggatcaaggttcgagcttttcaaatcaatccaatcaattgtatgcgattagaaaagcttgcacgagggggcacctcttatgttttgtaatcagctttatttagcggtgggagagcgaggcgtatctgctagacaaggaacgattcgaatgcgttaggatggggctcaacactcaatttttcatagaaggatatgaaataaaattagggtgtgattaattattctttcaagacgggagtgttttggtggcatcgcaccgatatatacaaatattaagttttttttgttgaagtagctttatttacgggtatatatactttttccttttgttggtgtggcaatctttcttagtgcacccttaggtgagtaaagagagaatacttggtagcaaaaccgtaggagtttagtagacgagcctggagcacgcatgccaagaatagttgtccaaggtctcgttccattcagcccagtagtaaaccaatcagctagctgaagttagaaagttcaaaagtagttgctttcctagttgcacattcatcgtatataatagtatgtctgggcacaattcttcttttttgttcgtaacgagagcaagttagaagagttcatcatgaagttcgagacaattcttagatagcaaacacttgggttctccaaaaagatttattagagtcgttatggtagatttttatctattttggcatctagaaagcttttttggtctaattttttttcatgatcgcatacgttgtaattatttaggactacttgtaattttttagaaaattttaaatagtttataatgcctaaagtaaggtttaaacagttacttaaccatgcttataagaaaaaacagtcacgcataggaaaaaaaaagtaaatcttattttcggcattgtaaactagttggaattttctaaaaatttacatgtgcccttaaataactataacatgcatgatcatggaaaaaattagactaattttttttttgagtactgaaacagataagaaatctaccgaaacactcctttaagggtgtgctatagacttacccaaaactatttttatttttattttttgtaataaatcatgtaattttattaaaataccaattaactaaaataatagcatgcagtcaaatcacatcgctcccattgaaaacacaattaggattagaaacaaaaaaataaatcaattaatcgaccaccatattcccagactgtttgacaaaaaaaaaaaaaaatctaaaataaaatcatatgaaaaacattgtagtattacaattaaccttaaaaacatttatattcaattaccactcaaaagatacaatagttgaaacgttcatttaactattgtgcaaggtatataaatgcaccactaacaactccttcaactgcagagaacttgttagtctcaacaactaatagtgatttgatgtcgaaccattgaaggacaaagaagacgaacaaataatgaaacaaaataaaataaaactatgtccaaaaaataaaattaatcgcagtagcaaaaactttgtaaatatattttttttttttttttgttaaggagaaaatttggttagtttcgtttcaactttcaagagcaaaacctaataaaaaaaagttcaacaatgacagaatattgaatggatattattattttttgaataaaaagtaatttttattaatcaaagcatcgctctaaacaaaaaataacaaatcaaagaaaaaatcactctcgtaaaatgacgattagcataacatcaagattgtctatcaaaatattgagtaactcaattaacggaccggcttgaacaaccaataaattgtcagtttctaccataatctttacaaatgattcgaaggaatattattgagagaccttaactcgaggatgtccactccattacaaaaaaaatactattagtatgatagtaattgtacactctagtttaaataattaaaaaatgacataggaagaatgacatttaaatttgagagttcttctttgtgagagttagtattattgtattaggctatgtttatgaccacacagttaatttcggtccaaaaaactttagacttgtgcccaaagccaaaaaaacgaatttaaatatgaagtgatatttatatataaatttctatattttatttgtcgaaataatttgtacaaaaaatatgtacaatgtattacaaatttataaggatatcctattgttgaaatatctacttatcatatttatccttaaatgacttagataagcatggaatttaaatgataccttattaccttagtaataagaacccaaagaccacttatcatgttttgacttgtgagaatcattctatgatttataaggtgcccttatcacaacacaaccatgtggatttgtatgacttttaacttgagaatgttgactaattaatcacactagaaatggaaagagttattggttttttttgtggagaaattggtatagtagaattaagaaaaactcatgagaatattttgatggtgatgatagcatggtgaccggttttatgggctttggattatcttaataaaattttacttaaccaatatacaatctacttaatttagagaaagtataattcaaagattttgtttgaaaaaaaaaaatactaaaaagtattatttacacccaataccaaatatcaatttctacatatttaaagttaaattgattttaaattaaaatatgcaaaattagacatgtaaatatgtaatatgaattcaagctaatgactaatgttatctacctttaaacaaatattgttatcaaaaatattatctttgtaattaatcgagttgctcttttatcatcaacaaatcttttaacatgtcgctttaagttttattttttgaaataatgattggtcctacgagtttttaacgtgctttatctttatttgcacactttttaagaaaactttccaataaattactgatttgaaggatactctaagccaaacacacttaattttaagaatctcaacttaaaattctcaagtagtgacggtccaccaaaaaagaagatatatcttattgatatagatagtcctcgtaatccatcaatatatttaagttatttttaaggactcgtaatataaaaaaatactatttaaatttgtatttgtcttatttttttattcaatatttgattttctatttttttaaaatcaattacattttaatttggctttttatttgctaatgacatattgctaataagtaatgaaattgttataatttgatccgtaaaaaaactatttatatttaagggaaaataaaatattattttttgcttaaaaaaaatcaagaagtataaaagtcccatgtggaagggagtgaagtggctttttatattcatagctattatggcctttttcaatgaagtgggatccattaattggttggatttagtatcaaaattactatacattactctattgtgtgggagctaactattatgtattattatatatcaactcctcaactatgaatattaaatacatttttgaatattaataacaaaagtatgcatatttatttaagattttttattttcttttatttaaatagaggatttcaaagaataataaataaaaacatgaaatttaatagggcaagttatctgagttgtttaataaacggatcgtgttctaattgatacaaataatatgaaattgacttattaacgacctatttaaaattatttcaatattttaatatgtcataaatatagaaaatagatcattaatatattaatgagttgacatgtgtaaacaaaagttatttataaataagatacactaatcgtgtcgtgtcaactcgttataaatagtcgtgtttggattttatttttgacacgattattaaacaggttgttttcgtgtcgagcatatacttgtaatacaagagtctcgacaagacacaaacacaaatatgacatgtgagcacgaattgttacttctaaaatttatcatacgagaaagataattaaacctagacgagattagcaagatagaatgagcacaaatcaatctaccgtgttacaaaaatatgtttagatacgtcaaaaaagaagaagagttaaggagtttgcttgaatataaggcggtgggatttcacacaatacgtcacattatatatataatgatggtatatcgatgtcccctttagggcatttttaatgaggttaataaaaatagttgtcttattagtctcacctgacacactttaattatataagctaattattatattttatttatttttttaagggcaccattacttaatttgaaatctttctactacctttgttagggttgtacataaatttttgtaaaccgtcaaacctgaataatccacctaaactaaatcgagataacccgacgaaaaatacaaactgaaaaactcgacgaaaatataatctgcctaatgtgcttaattagtgtacaaagagctatttaattactatatttattaaaagaatatttaaaagtagttgatactatataattttgtttagatttaataatttagaatttatatcttatctgtgtcttgtttaaaataagactaattagtaatttttctcctaaattttgacatgcactaaatcatgctcctgaacttttttggcaattaaaaattttccctgaactattaagattgttagatttaaggacttttgtttaattttagtaa

SEQ ID NO: 218143 - DNA, 5722 bp, Cannabis indica
tattttcaaaaattcatttttaaaaataaataaaattataaaaagtaaaaatataatgcaatctcggtgggcaatgaagctgaggaggatctccttttaatccaagatgtgataactgaaccagagataatcgaagagtttcatgattcgagcgagaacctggtgattgagaatggaacagagctttgggaagtagagcaagatgttcgtggatacccgaaaccagtaagctaggctgaggaagtcgagcaagctgatttctaatccagtgctagggatttatcgagtaagttcaagtcaaactaagcaccatctccttcttctagactctcttatactgaacctatcagagttggcgatcaactcgtggctaaacttgacctagaggagattgaggtagaggcatcatactggaaaaatgctatagtttgtattgttctgggtgttaaccctccttttaaggtgtttgatggatttgttaagagaatatggggaaatttgggagtagagaaggttgttagaatgcactctggttgcacgcttgttaattttagtgatgaagctagccgtgaccttatccttgaagttggagtcattcactttgacaaaaaacctgtggttcttaggccatggacaaatgatcttgactcggttagaatggttaattttgtgccagtttggattcgtttgaatgggttgggattgcaatattggggtaagaataatcttagtgccttagtgagcacaattggcaagcctattttgattgacaatgtgactcaagaacgaacaatgtttagcttgtgcaaacttggggcatacagttgccaactataataaggaaaagaaagttgtttggtagaataaactgattgctgaaaaagagacaaagatagaaaataagaatgatcaacttaatcagggcacaggggatattccagggaaagttattttgacagaaaataagcctgaagtagattatttggctattgttcaggaattgtctaatgctcaggaggttacaaaggagaggggaatagctagttttgatactggcagcaaatggattactcccaaacgaagagctctgagacagaatgaagctaatatgtcaaaggaagctccaaaaatcgtaagttctagtaatggatatgttgttctacaagttgtaacagctgatgaggttgtgattcccagctgtaatctaattcttgatgaaagcaagtaatataatagggtggaatgtgagaggcatgaataaaaaagaaaagcaaaatgcgattcttgatgtttgtaggttgaataaaatcggttttggagctttgtttgagactaaggtgaaacatgagaaaattcatgacatgatgatgaataattttcctaattagaatttttattctagtaatcacatttttgggagaatcatgttaatttggaaagctaagtatgttcaagtggatattattagtgattttgcacagctagtgcactgtaaagtgaagttttgtggtcaaaacaaggccttctttatcacaacagtttatggaagtaactcaatggaggttcgtaaaagtctttgcgaagttgaatgagccttgggtgatttttggagacttcaactctatgttcagctttcaagatagaagtggtggaagaccaattcagaataaagacatagtggatgctcaatctttgctttccttgggtcaagttgaggaattcaaaagctcgggttctttcttcacttggacaaacaaacatgaggttggggatagaaccttttctaaactagatacaatttttataaacaatatctggccaaatgattttcctaattctgatgcttgttttaaatgggaggttatttcagatcatttcctttgtttaattcaaaattatgagcacaataatatacgggttaaaccttttaaatttgggaatcattggccttcctatccaggctatgcttagacagttatggagagttggaataaaactattgctggttttggtcttgaaagtttagtgcagaggttgtttagagtaaggctgcacacgggtcgggtttttaggttttcgggtggtcgggttcgggttttcggattttaggtgtttaaaatgtgtaaccgaacctgattttcgggtggtcgggtttggcggatttcgggtcagatttggcgggtttaatgtggtcgggttcaggtttcattagactaagtccgaatgattcatttttgggcccaaataaaactacttgatttttaaaaataccatattttttctatttttaatatttttgggcttgattgaattaatttatagtttttttttaagtagtttaaactttaaataaaataaataaactccacccatctaaaaaaaaaaactgtacacagagaaaaaaatataatatatattttggttgacgacttccccaccacgacccaatggagttttattttactgtgtatatatatacacttatccatgtacaaaccctacacatatattcatttcaatctcagtagccatttttggctgaatataacgaaaataagagagatattttctctctaaaagaagtttccatcgcttacaactgggaaccccaatcaagccataagtaccaactctagaatatgatatggaaaatggggatagctccataatcaatacagcacataaaactcgattgctggggaaaatcgcaactaaacccaactcggtttacccactcttgaacgtaaatccgagttgaaaaatgtttttctactattttgagtcttcttcttctaatttcttcccttggtctctccatgagctctgagagagacttatattcatgtacataatgtatataaaaaaatatatattttaaatttaattgtatattgttcgggtatcgggttaaaacccgactaaataaatgcattattttaaaacccgaacccgatacctgtgttgagtattttcgggttagacccgatccgaccacacgggttttaaatttttcggcttttttcggtagcgggtcagggcaggtggtcgggttttcagatatgcgggtctagatgttcagccctagtttagagtcaagcatgcctttgaaattttcaataggcatgaagttagggatgtagttatggattatagaaaggctaaggagatgtatcgtaacattcaagaagaggcagctatgaacctgactaatattatcctacaacattcagtctttgaaatgcaacatgtttttttagcagcaaaggacagattcgctcaagttctcagacagcaaagcaaggtcatttggatcaagtttagtgatgaaaatactagctattttcattctgttatgagaaaaagaaaactggaaaatagaatcaccactttcatgaagggggacacaatttttgatgactttgaggaagtggtgaaacactttgtcaagcattttgaaaattttatgggcagtaaaagttcagcttcaagcaaaattgatgaggcctgtttaaagcagggtaaatgtctggatttggagcagtaagttaactcgattaggccttctaacaagggggatgtcaagaaagctctattcagcattcactcttccaagagcccaagattaaatggtttcagatctggcttttataaggatttatggagcaaaattagagatgatgtctctataatggttttggatttctttgctagtggttatttgcctaaaaacttgaatgagactgtcatttctttaattcccaaagtggctaacccctcttttgcaaaggattatagacccattgcttgttgcaacacattctacaaatgcttctcgaagatgatctgttctagactttcagaagtgctcccctgacaataaccaaggtgcgtttattaaaaatagactattggctcataatatcatgatttttcaagacctccttaagggttatacaagaaagaatatatcagccaggtgcatcatgaaaattgatctcagcaaggcttatgacacggttgactgggagtttgtggaagactttctcatgttgctttgttttccttctcaatttatcatgtggataatgacttgtctgaagggaacaaactaccatttgcttttaaatggaagaattcaaggaagctttaaaaagaaaaaaggccttcgttaagaagacccaatgtcccctttactttttgttttgataatggaataccttacaaggttgcttagctactattctagtaaaaaaggctttggattccatcctttatgcaagcaccttcacttgactaacttgtgttttgcagatgacttaattatcttttgtaaaggtaacatcaactcggtgagacttacccatgaagccttcatgaagttctgcaatgccacaagtttgtctactaacacctcgaagtctcatatttactttggaggggttagtgaagaggtcaaatccaagatccttgatttagtccaaattgaagaaggttgtttttctctaaaatacttaggggtcaatcttctgcctactaaatggaaagcctcagactgtggaattatcttggataaattgaacaagaaccttaattgttgggctagtagaaatatgtcctttgttggccgtgcgcaattgattcactcggcgttgcttggaattaggaattttttgatgagcattttcatcattccttttaagataacaactgccattgacaagagttgtcgttatttcttatggggatcaaaagggaataggagtaagcttcaccgagcttcttgggaaaaggtttgccttccaaaaaatcttggaggaattggatttcgagaaggaaaaaaatggaataaggctcttttggctaagtttctttgggctcttactagcaagcaagattgcttatgggtcaaatggatcaactcaatttatttgagagatcgtgacatctggaactgtcctaagaaattggatgttagctgatacttcaagaagattttgagtcttagagacaatactgatgaagctagacttagccttgctgtgaaaggcaacaaattccgagtcaaaagctattataatatgcttttggaggaggacacgactgactatgctggagccatttgggataaactaattgtgcctaaacacaggttcttgtactggcagattgcaaattcccaacttcttactcgggattacttgaatcggtttatggctattcaaaacattctctgtcctgtttgtgaggtagaaattgagactcatgatcatctttttttcaattgtatatactctaagcaggtttatgttaatattaactcttggcttggagatatacagtggctagattcaattttctgaactgcttgacagatgcaggaacttgactcagcatttccaaaccgaatcacaaatgctgtcatggctgcaactttgtatcatctttggaagaataggaatagatgcatatttgagttgtcttgtgcttccactagatgtctctaagcttggaagttaagaaaattgttcattttagaattatgagcaagggtccttttaaagcttgccaaaaaaacttgtatttatttaatgtaattaaaagttggtagtggtggtggtttgtggctgctgtctgtagcagcttgtgccgtggggttttgttgtggctttgtgccttttgcttgtccttgcttgtttttgaattaaatttcctcttttttttt

SEQ ID NO: 218144 - DNA, 1848 bp, Cannabis indica
agagacaattcaatataatgactgactgaaagattagtatatatgttatgatgttaaaactttaataatatttttttattgttaaaactttatagcttgatttttaaattttaattataatgttcgataatgatgatatagtgtaaaccgttcaaaccgcaccgcatcacactatatttttgtaatgtgatttttacagttttaagatcttacaatgcggttgcggagattacaaaaatcatatatatgatttgcttagaaaaaaaattacaacccgcattacccgcgcgcgccgcgaacacatctaatacttaaatttagtataccaattttaccaaaatacatcaatattaattcgaattttttattaaaaatcttgcaataaaattattataattaacacactaataattagtataagactggtgtacaatgctaatagtcattttcttctcattttttattatataatatatatttacatactatttaacttataattacaagttagttgggaaatcgaaatctgcttgtgataattaatgtcgtggaaatttcatttgtcaaaagaaaaatcagtgttcataaatgtttgttaaaagccagcactttataggtctgtactcaaataattttgttagatagaaaaatggaaaatagaccataaataaagtagagattgttgtttatttgaacagtaacatgacttaaacatatatatgtgacttttttgttgatttaggatatatagtcaaacaaaaagaaacccgaagtttcctgcctattaaatattgatgaagatccattaattattagtacctttttctcatattttattataatattaagcatgaaactcatcatcatcaattcaaggaacaaaaaagactaataaatgggcaacattttcaaatttaagatttaaggtttggtgaatgtcaatgttaatgtcaatgtatatttattatttttctttttttattaaataattttattttaaattgaaggatgttgacgaaagagcatgatctcattcatcatatctatctacgtatatcttctatggtgaatatttgagtaggtagtgttatatattatgaaagagatcgatcatcatctatttttaaaataaagtcatggttaaaatttgatagttttatatattgtatatgaagttttttttaaaaaaaatattgtatatgagatatataattttttaaaaaaaattaatataacttttatatagaaaaatataataatgtttccataagaaaaatgctaaaactgtttactactcccccaacgcgtcacattatatataatgaatgttatattatatttgttataatataagataaattaaaatattaaaatgtgatatattatatattaataaaaaaattaatatatgtatatataatttgattatgggttatatacatgtaatattcacataatttgaaacatatataagaggtgagttacttatattttataacttttacaattatcatcaatattaagtgtgtaaaaaaagtgttacacattttaattaaaatttttaatactataggagttatggtgtgtgcataagttatacttaagtctataacatccatgggattatgagttttaatttcgaaatgtgtgaaattaaatactataaataaaggtctttggttcacttgtaaagatacaattttttgtgaatttctattaaaaatagcaccttactagaaactataagttaaataaatttagaaaactatttccatttttttttcttttctaagtgcttagagaaaataaagttttggataaaaatataaaaccttgtttaagtttaac

SEQ ID NO: 218145 - DNA, 6344 bp, Cannabis indica
aactaatttttttaaataataaaaatttaatgactttgatcaatcagggattgccacgtgataatttatttaaaactataacttattattatcgcaaaaaattactcttaggtatttatttgcaactagccgttaaacttaatatttataccgcaaattcttttttttttttaagtctcttttaacatttttcttacccttcacacaaattaggtcccacaattgataatttagaagggtcactccctactttacatgtgtgtagcgataataatttcctcaactttttgtttgattttctcttctctttatttttttagccaaaacaaaccgtttatttaggtttgtaatcattgtcaatagtttactaaaccaacccaaagaagtttttcttaaacagtccaaatttccattctttgtttcctaccttggattcccactttctctcttctacttgggaaaaaaaatactcattttcttgttctctctctctactttctatatctttcttggattttcccatttgaatcttaacataattcttttgttacccttaaaaactaacactttctaatttagccaaaaagaagaacaagaagaagaactcaattcagagttttcttgtattttttttttttttctattcaagtttttgtttttcctgataaaatcttcaaatactgagttaaaatcagctttcaatggcggcagagaactcactgaaatcaagggaagtttcggctatgttaaaacagggcttcatttctgatacaacactctcattctcaccatcaagatccatttccagattgtactcgccttcatcttcgccatcatccaaaaccctctgttctcctcctccgccgccattctccgccgcgcaatcacccaactcgccgagtcagactcagatggctcgtcccacttctcatagccaaaccctttacgacatgatgaacgatgagcaataccgcgagtctaagctctccgatgaaaagcgacggaaattgcaggaacgtgtggcgaagttactggaagacgcgccgtttcgaatccccaattgggggggattggtttctggtgatgtgaggctcacggtggtcgctagagatggttttaaggtatccatggatgtccacaagagcatactcgcttccaagagcaggtttttcgctgataaactccgccgtgaccggggagtctcgcactcggtggagatcagtgactgtgatgacgtcgatgtttatgttgaagcggtggtattgatgtattatgaggatttgaagaagaggttgattggggaggaggtgtctaaggttttgggtttgcttaaggttagtgtttttggtatgttttcaattttttgtttggttgcttagaaagtttgattttctttttggaattttgggggaaaaagttcaattgggtttttatcagatttgtgaatagagttgttgtttttcagatgatggggtagtgagattggagttcgatttggatagttgtgtttttaagtaagtaaaggtgtcttgtttttatttgtttggataaatttttggttcttttgttagatttggtttttgtagaacaaagcaagtttaagtaccaagttagattatcttggattgaagctttttggtgacccaaataacttgttttttagtatagaaaatacatctgaatctgactctagaaaatattagtacagctcatgatttgttctgaaattgaaaactcatagcagtttggattattattgttctgattcttttaatgttgaccagcttagatggtgtaatagtagaactatgataatgaaaattcaaagttcaattgtaaagctaagaattttgcatattagggaaagccactggttatagctcaaacaaaatagttgcatgaattgacaatcaataatcaagaaaatattcaaccattattcttctgtgataggtttgttcggctatcatgtttgatatggggattgccacatgcttagagtacttggaagctgttccatggtctgaggatgaagaagagaaagtcatttctaatctcagcctacttcatcttgatgagacagctagtgaagttttgatgagagtatcgtctgaaccatccacttcgacgcaaactgatgacatcctcatgcaattattgactggtgttcttcaagctaaagatgataaagctcgtcgagaaatgaaaaatgtcatttctcgtctgctcagagaagatgcacccaacaacagcaacagacttgacatttccaaagacacactttatcatctttgtcatagatgtatcagttctcttgtcctatgcttatcagaagctacaagcattgatgagactcaacgggatcgaggagttgtgatgagtgagattgctagagaggctgacaatattcaatggattgttgaaattttggtggacaagaaaatggccgatgaatttgtgaaattgtgggcagatcagaaggagcttgcactccttcattccaagattcccaccatgtaccgtcatgaaatcagccgagtaactgctcaactctgtgttgcaataggcagagggcatatcttggtaccaaaagatactcggtctgccctgctttcgacatggctggaagcactttacgaggactttggatggatgagaagagcttgtagatctgttgataagaaggtagttgaagatggacttggccagacaattcttacactgccattgcctcagcaacaagccattttactcaattggttcgatcggtttcttaacaagggagatgactgtcccaacatgcaaaaggcattcgagatttggtggagaagagcattcatcagagaacgagcgtccgagcagaataattctcagttgcaaataacagtgtgtgattatccaagctaaatggtgggttatcttttcttgaccaatttacaaaagggataaagaagaagagcaacccaaattaagtgtacataacaaggaacaattctttttttgttgttcagttggcttttttttgttattgggaaatttatttctgagggaggtgaagtgaagtgaaggctcccttatacagatccacgtatggataaaaaagaccatttaaagagttaatgaaaaacaatattcttaatttccagtttccttttgagttctgtttgattgtttttaagagaatctatattcatcttgctagttggcttggatactcaacaaattctcaagtgtagaactttacataacaaagttaccaaacaatttaacttagcatatttgtagagatgcttgtaaaaatgcagttttgacagacactagcaaaatatcatgcattgttatttaccaaatagcaatatttaaattactttctttaagaaaatagatagaacaaattgaaaaacaattaatagctcaacatactcgtatatcaatatgcatgtttgagcacataaaaaaaatcaactgaacttattcactaaaaccactaagcaagctgcataaaataaggtaaaaggcctcatttcctccaacaaataacacataaaaaagtaaaaaagaaattataagacttgcccaaagttgtagacaaacccatcactcttggacatattgcttcaatttctctttccatttacttgaagtttggttggtgtaatttttctctaaaacactaagattccaatagtctctcatattaaagctattattaatgtctagtttgtcaaaacttaaaataacttatttttaactaatttaattaaaaaaatacatctgttaataaataaaaagatatatatatatatatttgagaaatgtgaaagaatactcatgcttaatattattgtaagtacaatttaatatcggattccatatattttaatttaataaaaattataaagaaccacaaattaattataaaacgtgatctcatagtgatgctaaaaattttggtgtctaataatattctattaagctatgattcttagctactaaataaactaaataagggatataactaagtacacattactacacaaacagccctttctatcttaagtttctttttggattcgaatttttagtggcattcctaattcaaacttgtggaatatggaaatgcttgcatgctgcttgattgaaaccattttcaagtttcaaaccatggaaactttgttgattcacgtatagtagcatcatgaatcgtaatggctatttctaggcccaatttcaagcccaagcccaagcccaagattctcaccctacctaacatcatcacatgaggtcttaaattgggttcatgttcttcataccctttttatattgtcctcttttatttttacactcttttttaaagtctatcatttttatcttttttttttaaacattgtaccaattttgcctctgtcacttcaagatactctccatgttactctcttatgtcagagtattttgggtacaatacatatgaaaagaagtatgtttcaaataaatataaaattaaaggtaaatttgataaattgattaataaaaagggcatttttcaacttaccctttcatctttctcgtttacgatctttttaaattcgctgataaaaaaccaggtcaacttaattaaatttatttatttgcatctttatatttttatttagtgcattattcaaataaaggtaaatatcattttgaaccctgtgttttgtaaaagttaccaattggaccttctattttgttaaatgacaaaatgaaccttaaaaaaaaaatcatccaaaaaaagtcataatgttcaattttcatgtttcaaaaattaaagtgttagagagtcttacattaataatatggagaaactaattaccatacataaaatgtatggactactacttttattgttataaattggttttgagataaaaccttatacatacactcacttatccttactacttttttttaatcatactcttccgcattaatacctatagatttatttaatttttggaggtataataaaaaatgaatttattattttgtaatatttgatgagattttatattgactagaaaaagaagaaagagataccaatttcctaattaacataagattattaatattctagttttttaaggaaattcagatattatttaaaagaaaaagtaaattttcccaaataaaaattggtaaatatatatgctgtacaatttataaaaaaacaaagttttgacttgaaaaggaagaagatcaaaagaataagaatgtctttgatactacatatacattttgaagtttcccataataataagatactatatttaattaaaactaagtgctcaaatttttcagcaaaaaaaaaaaactatgttctaaaattccaactaaccaactaaagcatatacaaactctttttacaaaacttaatttccataatataatttataaatacagatctcccaaaaaataaaaaattaatatacagatcatgggatcactgtagagtgaaaatacgtattttattgcaatagatttttactatttgttacaataaattgcatgaagccaactatactgataacttattaggaaaataaatactggacaacaaatgattcagcaaaataaatcccaaactttccaataatattaattctagctagagaatatatttttgttattaattttattgagcagtattgaatactatatatatatatatcagttccatatctcaaataaataaataatataaatatacatataacaatatgaaatgaatcaaaaacacattatagagagagagatatagaaaaaatgggtgtttcttcattttccagagtttattataatctcttcttcttcttcttctttttcatgactgtttttactatttctaatcatgcatttgcaggcactacaaggcactataaatttgatgtacgtaccaaaatatatatacttcaatacttgtttcttataatttaaattttagtttgtcattttctaatttatatatatatataatgaatattttgtatagattgtaatgaaaaatgttacaagagttgggcatagaaagagtattgtgacagtaaatggagagtttccaggaccaagtattgtagcaagagatggtgatcgtcttgttattcaagtggtcagccatgtcccaaataacatcactcttcactggtaatattaataatatcatccattattacttttctattcacaatttccaatacatattttttggtatcttcacacttaatttgttcttggtactttttagttttatcataagtatattctgtttataatttttagctttttttattagggaaatttacatggta

SEQ ID NO: 218146 - DNA, 4061 bp, Cannabis indica
ttgttatatttacttttttacaaagtaactttactatttttacccccaacagaaaccctagaaattaacggaaacatattccaccaagctttgaattgcagcctcttcttgttcttccaccacacacacaacgacaacgctcgcgctcttcatagctcatcatcgtcggccaccgcggacttcactcgccggctcggccttcctcttttcgcttctctcggtaaatatctctaagtcatgacattcagccataaattttcttcaagatgaacacaaatgaaaaattgtccgaacaacttatgtcccaatatttataaatttgaactttctgtagctttgaattgataggcggggaattcaattttgatgccattttttgtttggctatttgtattttgatattgattgtagttgatatgtttatataatgtatctgtgtgaaaaaatggtcacagttagggcagctgacgaagctgctttttcagtacttttatggaagtttagcgtttcatgttcattgtctaattttactaaaaaaaatcaagtcttaatctaatctccttaattgggaggtgagaagtgagcttctttcttttaactcactggtgatatccttaattggattttggacccaaatttgggtttcagtcagaagtatgcttctctattgtgtcacagtctgaggagtgccaaggattgtgcttttcatggaggagtggcaaagctcccttgagcattattcaaggttgatggcgggggtttctgatttaaggcagatttccagcttattatcttttgaactggagaaatgagggtgatagccctgtttttgttatcccagggttctaagtttttaatctgtttgaggatacaactgttgggtgtgtgtaggctgtggctgtctttttgtggttcttctggttttggggaagcatgctaattttttttctcaaattgctaagttgtggttgtttctgcaattgcttttaaaaaggggtgcttgtttggtagctcacaattcacaaataactacctgtctttgttttctttaggggaatttgttttctttagtctgattttactagtaaatatataaatgtgtaagagtgtatacataagcagtcctcattcacagtttactgagattaataaatgatactttaaatttgcttacggttaggagtttggattgtttgaccacgaaaatttgcccttaaaaagtaaaatgctagtgaaatgataactggaagggtttggctgccaaaactctaaattgtaaagcataaaaaaactctaaattgtaaggcataaagaaaaacaaagtgtgacttctttttgttccttatctttctctattgttcacttactgatcattttatcttgcagccagaccatggattcatcatcatcagcactgctatacagccatctcaaggttttcttatcttccgcttactgttctaagcttcacactgcttgctttagtggcttcccagtgtgatcactctcttgtctatgttgattttcttaggctgcagacccctttttcttaatggctggtccaaatgtaattgaatctgaagatcatattatgcgaatggctgctcacataaaggcggtcgcctcaaagtatgccctgccctcatacatatgtaattatattataaaaatataggtgttgtaggcataatacattttgaaaagggcattcacgcaattttcattttttacttttgctgctgaaaaattgtagatattgatcgaacatattattgtatgtattcattgtagagtagatctaggttagttgctccactttcgaccattctattttgtacgaactttactgaagaaggtcaatttttttggatgttttccacataattgcagtggtaagaatgctaagtaagctttatcgtgattgggggtagtggctttttggtgggtcttatgtcttgaaatcaaaggaagaagaggttttttttttgaaggggttgaagaaaatgcagattttttatgggaatgtgttggatactgggtggcaatctgactatttgagagtaaacaatttacaaatgttcctttctttctctgacacatatagagactggcattttttcatgtaatctttgttttgaaacaaaacaacagtacttgaagtagagggaacataatacaaggagtagattggagtatagaaatcttactacccgaactcacaaaaacaggagattagaaacaaagtttttcctggaaaggaaagttgccactctgtattcagagaaggaacatttgtgaaagtgcaaaaacaggctacaaaatacagtcccaattccgaacaagatcggaaagaaagatgtttttgaactctttgactttgaagagccacacagtcacccagatcttgatcttttcctattaaatctccacggattcctctttatcatcaaatattctcttatttttctccagcacaaagcccaccatgtagccatggtcaccaccttccaaagcagctgcttcctttcatcaccttctatatacagacaaaatatatctattcatgtagtctttcttgttttatacatttcttctatcttttcttaggaggttttcctaatttttcttgtaataattttgtattaacactagctgtggttctgttgaagaaagaaaagttgtgtttgcatttgtagcttaaggattttgtttcttattgcttttttgtaagtgtaagtgtaaaagttgcctagttttgttcttgtagagttgggttgcccctggtctttaagtcaagctttgataaagctaatcgaacatcatcaaaatcgtttcgaggtccaggcttgaatgaaggtttaaaggtgtgtttagttctcacttttatatctcttgctgcattgtctcgttctttttaaggctttgagtcctaataacttctccattgccatgttttatccttggtaaatgatgtattaaaaacaatgggaattttaatatgttcatttcaaattattatgaaattactattctttcagtttggaatactctcataagaatatttgctagttagaaaattgacattacaatttgaaatttgatgaaaggtgggttttattaagcagtgggtctttggttagactgatgtgtccgtgttcttaatttctttttggtgtaaaagggttcaacatgcaaaattcttcttcttcttctagcaaaaagggtaaaatgtaacgggtaaaggaatatttatcaaatttttgtgtggacaaaccaaaatatcattcattcctcatgattttttttgatggcagatcttggagaaggttaaattagcatatgacttacctataattactgatgttcatgaagcttctcaggtgagttctcttaattctttttctctaaactaccttgattcatacactcttgtgcgtatttgtaatttcaaaattgttacttttttcttcacatggaaaagaatacaaaatacctactcataaaatatttacaatgaaagtaaaaagaagaattagtaatctaatttctaggctaacaaaatcttgtaaagttgaatacaaaagggaaatcctatatcgacataagattacaagaggacagctagtattacgaccatataaatatgctaatttaattatttgcaacttttccacacaacccacctgtcaagcttgcttgaaaatattttccatagctagcctacttggaagtccctttgtaagttattctaccactcgttcattatcaatccactcttgcttttatttgataaaatgtctgtctatcaacatgtttggttttgtcatgaatgtgtgccatagagattgcttcctttttaatatacatacattgttgggaattattaatcttcaattcttctaacaatcttttactccataagacctgacaaattccatgagccatgatcctaagttgagcttttgagcatctccttactagtgctgtgccaacactttgattttttttttctttttacattgtcatgtaaccaagttacctatagcaaaactgcaatgtca

SEQ ID NO: 218147 - DNA, 3713 bp, Cannabis indica
aaatacaaaaaaaaattgttttaaattgtaaaaatgaaaaaattccatttaaatattcaataaaaaaattaagttaaaaattctttctaaatcattgaaattttaagactaaaggaatcttgaaaagttccgaaacacaatttagtatttgttaaaatttgggagaaaaaaaatttaattagccataattaatttcatattattttgtttaggaaaatggactcttaattttttattttcttacaaaatattcttttatctcactcgtatattttactacttcagcgcattgctctatttgtatttaataaaagaaataaatttgttgaccaagtcaacagccttatgagtgttgggtttaaacaaatgaaaacagtgagtttctcccatggtttcctttccaccatctccacactgccaccccacccactcttacccaactcttccacgtaacgtttcccagcttcgtacaaatgatccttctccgccacaaacaccaacaacttctcgcacccaactctccccagatcctctgcggtcggtcttattctacgatcatacaacccttcattctccggacacatgtacatccacatggcatcatcatctgccgcacccccaaaataagggtgcaccaacaccgccctttcaactcggacacccgataacccgattgacccgacccgagttaaccattcatgggtgagcaaattacattcaatactcattttttgtttcatattttaaattttatttttattttaatactttttaatttatactcacttttataaattatattttcattatgtgcattaaaaagtctaattttgataagttttaagttttatgatgttatatttagtattttgattataaaagaaaatcaattaaaattattttagagttatatttggttaactgtaataaaaaaaagtaaattcaacgtgtcccttatttccctccagcactatctccaccaatgaaaactcggttgagatcagcgtattcgttcaaccaggcccgggcccattacagtctttatgggccgaaacccattggctcgcggcccatgaatcgtcgtagcaagcgggaatgggtcgatccgggaaaagcccgtcgtcgacggcggaaacgacggtgctgacgaagttgtgaaatgtggtcgagaaaggagattccatgcagaaagttccgccgtggaagtacaagaggacgggaagcttccgacccggttggagcgatttggggagaaagattcgggctgagacagaaaagttagggtttgatgatacgacgacgtctttggaacgaacccctgtagttggatcggactcggaaggtggaattttttcgattgggggtgtggttaagactatgtggccatctttatagactgtaaagaacatgaacttgtgggcaatttcggtttcaagggaagacgccattgaagctgcaaagtaagaagattgaagtgtgttttcttcttcttgtttttaattcagattgaattgaagtttgagataatttatagagcattaatcaaagcaatgactgatcaaaacgttggtattgttagaggacacccaccatatagctaccgttctagacaccattttccattaaatcttacttaattctccaaatattatattaattgattcaagaatttttcagtccaattttggcgcttaaagatattctataactattttttttaaagttatatgagagcataaaaaaatatatatatatatattaacgtgtgtaaattttgcaatatgtttaaataattataacttagatcattataaaaaatttgactagcatcggtatataaaggttagttatagaattttccattgtaatatttacttaaaaagctcaagtaataattttttctaatccattttttaatgttgtgctcactttactgttaatttcacttttaatttgtattgactttactactgttttgtttacaaaaggcattcccgccgcagcttattaaggtttaactttcttttaaggtttttgagtaataagataaagatatgtaaagctcctttaatctcattctttcttttaactgtagaattatagttttatatctaattggacaaaaaatctggggcttggtgcagtacaaagataaagaagcaattcaggttggttttactctctttctttctatttaattttatttgagctgctgtgcacacaaggtgtttgttgaaatgccttctttttttttaagaaatttgtcaaactaacaaaaatgaaatgttaaattaataaaatactcacattgaattcacactgtgcaactaatttatggttgtaattttaatcgttgtgcgaccaaacatagttttttactaataattttctttaaaagttatatggcgaataaaattttacacaatgactatttttagaaacactgtgtttcttcaattctcttttggttttgtgtctatgattttcctttgtttggtccctaccttacttatatttctccatctaactttcaatccacccagctaccaaagatttaattgaatttcattctgaactctctgtcctatcactagcattgctttagatttcaactaaatgaacacgtctataatattctttctagaattgggttagtgacctgtttggtaaaatttccatatgagttttgagttatatgtagttattttgtatttgctttgtactttgcagcagatttagagtatggatgtggcacatttctatctggacggcaacactgatgctgttgagttttgtccgcatagtccttattaccatgttttggcagcctcaacgtacacattacatgagggtgatcaacccagccgattagggagcatttcgctcttcactattgatgctgaaaaatgtctccttgagacgtcttattgtgttgaaaccgcgggaatctttgatataaaatggaacccaactgggggcaactctggtcctttactagctcaagctgatgccgatggtttcttgagaattcatggtctcttgagcagttcagatggatcgcaaagtatgtttatgatgttcaattgactagttttcgattggaagtttgattttgagatatattgtcatctctgttttataattagtttatgttaacttttggtacaggattcttattggaagagaaaaatagtttaaaggtttgttcttcaatgtgcctttatttggactggaattgttcgggaacagacattacagtggggctttccgacggttcagtggcaataacctctcttgcagagtctcatgttgagctaaaacacaaatggaaagctcatgattacgaactgtggacaacttcctttgataaccaccaacctcattttgtgtacactggttctgatgactgcaaattcagtggctgggatttacgcgagggtacatccaaagcagcatttcataattccaaggcacataaaatgggtgtttgttgtattgccaagagccccaatgatcccaacacactacttacaggaagctatgatgagaacttgaggcattgggatgtaagatcaatttcgagacctgtgaatgaagtttctcttggtttaggaggaggagtttggagaataaagcatcacccttttgttccaggtttggtgttggcagcttgtatgcataatggatttgctattgtcaatattaaagggggt

SEQ ID NO: 218148 - DNA, 8841 bp, Cannabis indica
agttgtctagcatagataaatttaaatataaagagttgtaagtttctcttttaatatatagactcggtttggctaatagaactatttgataacttttctgacgatatttattcttaaaattcttcttaattttatttaaaatattttattggggtatccattttttaaaatatttaattataacatgatatttttgcatgtaactataaattacgtcttattgcaaataaataaataaaaaaaccactcgtgcactcttacaagaatgaacaatactgtaatataagtatgaataaagtattgaaattgtgattaaaacaagtattgaaaaaaagaaaaaaaaaataaatagtgtggacataataatttgctacaactccttgcaaggataatatctacatttcatttttttctaaattttcactagtttaatttatttccccgtagtataaggacaaaaccctaggttctaccctaaattttcactgtatatatacacacacgtaaatagagaggctttcaattgatttcactgtgttaaaatacgaatgcacacattccatataaatgcagttatttattatagtttcttttttcttttaataagtaattagttcatatatgtaactatacacaatgagcattattaggtggtgctaccattagtaagtgatattctttaaatattatttttttaaattatataaaaacttaattatactaatagcaatattataaaaaaaaaatgttaatcaccctcagtgtcttttaagattttcctccacataatatataggtcaatgtttcctagcttgttaattacgtaattatatgtacgtaggcttttgttagctggacttctgttttgtttttcggtttctaagaagctttctttaagaagttgagatctagagcttttcaatccaaaaacctacttttacaagtccaactaattaaaccagtcttgtaaattcaaaacccatttgaaataaaattttgactttagtttacataataattaacttaattatacatatatatgccactaattattatatatagataataatggtgatcaatttcttcctacaaattaatatataaatattttaatcggatcacactgatatgtttatttggcactttaaggacagtttaatatcaaattctaatatgtaacacaaaataacacaatcatgccccctaacaatactagtaaaaatggctcgactagaaatttatttatcaaattattattttgccagactttaagcaactacttatttttataatctacaagtgcaataaattatatagttcattttatttttaaaagtaatatagaagacctatatatatgtatgcaaataaaatgctaacttattaatatatatatggccccatactttgtatttaaaaccagcaatataagtttactaattaacaatcctcacgcacaaagaatcattcttcaatttcattccaatcgtgctataattaaacatttgtattaaaattaataataatattaaaaacaaaaggagaatactaaagcaatcatcatcatatcacaaccagacctgtctcaacaaaaataaatacatatagaattgatataacaaacataattaaatataatccaacgatatatatgaaaagccatatcctaagcttatcttaattaaaaattatatttgaaattctcctaactcaattgtcaattatctgacttcaccagaaatcatttaaaacacacatagacattaccctataaatacttgcggtattggttgtgtcaaatcacccaaaaacaaactcatctgatcatctacaaatcaaagaatcgaaacaatcaagtgctaataagcaatatataatgaatctcaatagtgcgatttacatggtctttcccattatccttttcatttccggtatcttattaccatttacaaccgatgcagccggtggccggtggaaattcttgacaccaagcattggcatttcggccatgcacatgcagcttctcaacaacgaccgtgtcatcatgtttgaccgaactgacttcggcacctctaacatatcattggcacctgggaaatgccctgctggggccaaagactgcagcgcacattcagttgagtacaacgtcatgaccaacaaattcagaccactcactgtacaaaccaacgtgtggtgctcttctggctcggttatgcccgatggaacgctagtccaaaccggtggatcatttgaaggagaaagaagagttagacttttcaagccttgtggtggtagtgctgattgtgattggcaagaggttaaccttggattggctaagagtcgttggtactcaaccaatcaagtattgccagatggcaggcaaataatcataggtggtcgtaaacaattcaactacgagttctatccaaaaacgactgacccgaatgtccacgatttacaattcttagctgacactaacgataagggagtagagaacaatctatatccctttgtttttgtcaacgttgatgggaacttattcgtgtttgctaacaacagagctatattgttggattatgtgaataacaaggtggtgaaaacgtacccacaaataccaggtggggacccgagatcctacccgagcactgggtcagctgttcttttaccgttgaagaatattgaggctgtgaatgttgaagctgaagttttggtctgtggtggagcacctaaaggatcttataccgaagcagcaaaagggaagttcattacagcattgaatacatgtgctcggatcaaaattaccgacccgaatcctatctgggtcatggagactatgccattagcaaggtgtatgggagacatgatattgcttccaaacggcaacgttttgattgtaaacggagctggagctggaacagcttcttgggagttcggtagaaacccggttttaaacccggttctttaccgaaccgataataagatcgggtcaagattcgaaactcaaagaccaaccacaattccaagaatgtaccattccacagccgttctcctccgcgacggccgcgttctcatcggtggaagcaatccccatgacaagtacgagttctccggtgttcttttcccgacagaactaagcttagaggctttcactccatcttatttggagagaccagttcttagacccgtaatagttataccagcacctcaaaccaaactcagttatgcacagaagtttacaattcagttccggctgaggggtattgttaaccttaaatcgatttcaacgacaatggtttctccgtcgtttaatactcactcattctcgatgaatcagagattgttggtacttactcccacagcacaagtgcagagtttaggaggaacggtataccaagtggaggttactacaccatcttcggctaatcttgctccttcagggttttatctcttgtttgtggttaatggagaatttcccagccaaggtatttgggtccacatcggctaattaattagtacgaccaaggtctctgctatatttcttttcttacgttttgtgtgttataagttaaaaaaagtttaatgttggatgaagtattaattaatttgttgattagtagtaatataatattcgacaaaattaagctgtatatgtagtcgaatatatagtgtaatgatttttatatttaatcgaataaaattgtcaagacattttctgtccttaatttaatgtctacttaatataaatacatttatatgtgttacatttcaagttatgtatattaattttattttaacttttagttttttttaatatcataattttaaaactaagaatatttaatgtagtgataatcattgaaatttgaaagcataatagtgatttaaataaaaacaaaaattactattatactttgtaatagtaattaaaaaaaattattattcgttctaaatttatcttcgaaattaatgaaaatgcttatctggttaaactattaaaacattcaaatttaatttaaaataatatttaaaatttaagtactaattctaaatattaaaatttaaaaataatttgttattttttttatttaaaaaaaaagtcaccaataatttttcataaactaagaactctattatattataaccacattttatatagaacagatgtatgatataggatcaacacgggaggcgtaactgttagaattaatataatatgaaaatgaaatgtaaatcggaataattaaatatatatatatagaaatcgtatatgcgatgaaaggactgaaatatctccagctattaatgattgagcttcaatctcggcgataggtttgataagagaatttgggcttcctcgctctctgttgaaataaatccccatattcttgcacactattcagatttacaaatacacagagattacaagcagtaaaaagattaaggtggccttcggcctctattaacctagacaaagtatttaagttagttacaaagtctattaacagtttgtaactaactctcctaactatgctctcttctacaacatatatataaaccagtagagaacaacaaaaatcagagcaatataacagtaacaaccagatttgttcacagagagaaaaacacaaatccgaatacaactccagatcaatacagagcaacaaaatcagtggtgagttcatggaagaggcttatagtgggtatgccttggaaccctagttacagctcaaagatccaaaactcaggagggagttgttcatgcacaagaaagaagaaaacaacatcagtactgatttttgagagaaacagagagaaaagagaagagtaaaaacactgtaaatatttcgaattaccaatcgtacctgtgatttggaatcctagccattgtaatctcttgatcattgaagatccatagtgaaacgaggcgagctcaaagaggacgtacccaacacaatattttgagaaacttctataaaaatttggtgtcttcttctccatttttcttttttgttttactgctatattgtatctgatttatgtttgtttttctgggttttgattcggactgagaagggttaattttctggggttgatttctggtatttttgaggtaataatattgttgccttagtgttcttcagagaagaaccatgaaggagatgactaacggttagggttttttcaattaaggggttgggttgtgtgtttggttaaaagagtatatatatctgatatgtgttttagggttcaggataaataaaacgacttgtagccttggatatgtggttgtcgtttcgggtttaaatcagaaggagtcaacattgtcttttactgggtttaaaggtcagttttgaccttgttttctgattatatcattgctgtgtgtagggttatattaggaataatttcctacactctcttaactctttttagatagaattttgctatttgcacagaatgagtgaagagctcgggaaccgaaaacctatatttataagtgagatactccatcagtatttacgtcacattaattgtcagaatattttgacaattgattaagaaatcaaatcaggtaatgaatatcaaaatctgaccatatatagaatatcacctaattaattttgtctaaattcaattttatattcatctatctcaaaattaattctttattttattctaaaattagaaaatattctaatattctgccacttggtcagtatctagactaaaacattcaaacccaatgttcctcattgtataataaacatatgaatcatagtgatatgtcctcataatatgtcgtgtattatcttccatgtattataatatatttactatataacaatgtattttatgtgataatgtacttaaacgaataaaccctaaaccttatgtttgttcaggtcatcttatgataattttctcatatgaaattaaggtgcacatgaatatgtgaaaatattgaaattaaaatttcattgaattattttagttgtacaaatgaaaactacctatgggtaactgaatctcatatttaatttacgatccttaaatttgtgttgcatcatacgtttaatcaaggatatgtgatcacccaattcaacaatgtgcacttaatgaccacttatcacgcctctttatggctaaatacttaatatcgatatgctaacttcgattagtacgtactctacttatagttcttagccataaatactgtagctaaatttgtcgcaaaatttgatcttaatggcctgaaatataattctgaactctaggcctagtataaaactctataaaacaccatacgagatgtaccttcaaaacaataaacgaatcgaatttctataatgaaaataataaattctccacgatacaacttattggtaattttaaagacgtaatcacatgataatttatcaatataacaatgaagttggaatgtaagtggttaactatatttccagaatctcaattcattttaataaaatatgtatgaaagtaatatttaatgtatctcatgaaagatacttcatcattttgtataaagtggtcttaacttaagttatactgatactacttaatattcctaaaacaaatacaatgcaaaatcttatttagacttttagacatacattaagcttctaacaatagaagcaaaagaatgttcttaatttattttcattctaaatctattttcagatgctagtttgagttgaatttaattatcacagttaaagataaaagtaacatgaaatgaataatacataattttatttaatcagagatattgtggctactctctaattaattaaaattatatacattatttatatttttatctcaaaattataatttgagatatatatgaattgtttcaccttatatagaaaacttttatcattatttacaagtaacatattgtctatatataaaacaaatattactcccactgaccttctggtatataattaattcatatctcttttcaaaattaaagaaaaagatgacaagataaaataccaattgtgagaaatttattttaatcggtagactttttaagcttacatatgttcaccactattagaggaaaatctttatagtagtatgtatacattctcctctagttcactgtttggaattgattaatgaattgaaacgagcaacaaatgtcaaggttaccatagtagaatcttttataaagataagtgagacctgtaaatctcctttgttattgattcttagatcaaaatgaacttcttagcaatgacaattgttttatatctttatgtttctccatgttgcctaatgagtatttattggtaaaaaaaaccaatacttaattaacgttctccaccctattaggcaactttactaaagatagactctattattctttaggatattttcttcattcatggcatattgtacaataattttaattctttgcattccacagtttaatttgtgtctaaaattaatacattgtagctgaactcttattgtacataatataatcactaaaaatatgcatgtaatttagaattgtaagcaattactaaataacaatatgacttattagaattttatcaatgacttgtaaattataaatgattagttatgaattcttaataaccattaaacttaaaagttgttgtgaatcataataatctaatacttgtggtgaaatactcaacactaatttttttctcaatgaaatttaatttgttcattgttcaaaaaaaaaaaatacttgcggtgaaagtttaagaaaataaatgatcgtttctagaaactaggttcctagatcaattgctttcactgattaagtcaattcttaattacacaattctactgttgtgagatggataatactcatttatggtatttgggccaagatctatcctatgacaaatgtactctaactagtatacgggtatttttaaaatgtgtacatgtcataaagtcgggttctagccttatcacaacttaaaatacgtttgagaaacaattttggttagaacacgatccgatatgtacactcccattgaaaagtatcaaccgacaaaaatttaggaaagtttggagtttgctagactccagcccaatgtttagtttattaaatatgtcacactattatttgggtgtaccaggcatatgtatcgggcaatgaatccatgcttttaagaaattttacaaatagactgggagtttatccatacaccatactcacaaattttaatgtaatattttccatctatatttgatttcactatcttaatatgaaattgtaatatttctctacttaagatttaaatttttttgcttttgtagagatataatttatgtaagtaatcattaataaatgagatgattttttttttttgaaaaatacgagttcatatctacaggtgttaattgacttgtatgatttttaatatgacagaattctaatgtgcactattttagcttgttgtatacttttcttaatgcaagtcacacaagctctaaataaagttagtaaaatcaattgtaatgaatatctctaccatttattaacatttattctatttatggagatatgttccataattttttgtgctataatgtagagaaatttttattaataacgcgtttttaattgtcaaattgaacttgcatatctttatgagtgaaattattttgttggaaagacctttaaatatttttctaaatcaagtttctaaagaagcttggaacataaaggtctttgataattttaaaacaaaaccactactatattgcttattctttaaatttctagacgtgggaatcatcttgtccagtggcggaactagacaaaga

SEQ ID NO: 218149 - DNA, 3328 bp, Cannabis indica
ttttaacctttcggctggatgggcctagacgcggcctagtctgccatagcctaagcccgatcctataaattgtatgtgaagatacatcgaattttataaagtgagaggagtatatatcttatatagtactatctagttcaacattaataatgtgagattcttttaagtaacagccatttcatcaaaacaaaaggcaaattattaaaaaaaaacatttcatattgtgttcaaccagaaacattaaaaattttaaaaaataaacaagcacttcattgttaaaaagaaaataataaataaaaaacaagcatatctgcaacaaatatttgtttgaattatatgggcaccaccataaatgaaatttatatattattttaatatttatcctgacaaaaaaatatgtattattttaatataaacaaaacaaggtacaaaattatatatacaaaattacttatttatgtaggaattatcatgggcatatctttgttaagaaaaaaagaagaagaagaaatcatgggattatgaagatatatgtaaataataagaaatcttgggatcatatgtatgtacatatatagagagagaaatttgaattacctcagaaaccatggccatcaaagcagtggctaagagctcccattgatagcagctttcgtcggcggtggggtcgggtgacgtacggcccatgaatgacaacaccatgcgaccattggtcacaagttcctccgcacgtgaactcaaaaacacaccaaagtccttttcgaactgatccaaataggcctcaaccacacactctgagctactctttgacaagtatagctttcccttgtttatgacctctactccactctcattattactgttcaaaccctttggaacctatatatataaaaataatgtaaaattatttactatcaattcattggctaataatatgatggtcgatccaagtgtgttttatgtagacaataataaataattggactacatcccagttggaccagattaatcgtacgatgtatggaattaaggggtcgtcttttggaacttttggaattagaaatgataggagaaatgctcagcacatgcctaataaccactatgagataaccggtgcaattaattgtgtaataattattatggaatatagttaattacttacaaaataataatagagaaatgctaaagggtaccactggtgactagcatcctcctacgtgtcaatatcgctattggtgcaattaagtatcgggtcccatatagtttaatataataatttttatagagtatcgctagccaattgcaagtcgacacatttagaaggtgctaggcaccactggtgcccaatagcaatgctcataataatacggggcgttactaaaattacaaggtgcctaatatatataacaattaatgctctactaattaatctttcaaaccgtgcttgctttctacgcgcacacgagaattcgcaaattctgtttaattattcttcgggaaagaattttcaaagatgtatttggatatatagctatgaatataattgctctcttcatcatgacaaggatgagaatatttttgtaaatcactacttttttattataataaaattctaagtactttttcatactttatattgtacacagtttagatatagcatattacatatagtaactttatataagttaacgttctaattacaagtcttttttttttgccattgttttaatacatgttcaaaatttgagaataaattttcataagtatgtattaattattattattattatattgttgcttaaaaaagtatttaactacgtaccgtacgattgatgaatagaaaaaaaaagatctcacatccaactataatttatttactatctagtttaagggtatactgaactaagcatgaaccctaaccatttattattttcgtgatctacatcatgagttaaaagatggtaagaagttgtacaattaataaagttacaatatttgaaaatagataacacccaattcattagatagacaaagtttattattatcatgaaaatgagggagacagcactgtaaattaatgaataagattaatatagagaagatttttaagagtttaatatatatgaggtttggatttcaaaatcaacctataactaattattagcttaataataaataatacaaagcacaaatattaaaacatagaaaatgctttgtcttttatgtatatatatttaccatgaattacgacatatggagggttttgccttctaaattatttgtttgaaaaatattttcacaaaccatacgtataattacaatatgatagctcattattaattattataagtaaacttaaattaagtatattcaacttaaatattcaaacattaattttaaaattagggatacagagccccatattttgtttttagagtattatgtatacaattagtttttagcttgactctcgaattataattataatatattagccgtgaatgagtcttacatcaagaatttacttgcaaatatgaacaaaatacaaccaaagggacaaatttataaatataaggcaaacccctacaattatcatatatatagttggggaagctaaaatgttatttatttgtatataggtagggtatagtaatagtagtagtacctgagaaagccagtgaagactggaggaagagtgaatgaaatggagagagtttgttgggaacaatctgccgtagaaagaaccaggaacggcagagatataacagggtccaaaatgagagcccttctcttttctgatttggttgtagaaagttggcaaagaagcaaaaatgttgttgaaatcattgttaaagagatcgtttaagaacaatcttaactcaggggaagactggcttagggtgcagcatctggcgtgtataacatccacaatctccataatcacacccaaacagtttggtcctgctgagcaccccaagtctgctattcccatgctctcaggacttttctcaacaatctttagtatggcttcatccatcattggctttgctatcgacagtattttgctctgaacatccattcaatatttttttcattatataatgaaaaaatgaaaaaacaaaacaaaagtatatatatatatatatatatataatgtaattaagttaaagtaagtgtttggggtggggttctagtgtaaattaacctagtaactagttgtaatttttagtacataactaagtcgtccctcgtaccctcgtttcatgtgaagcacccgagctacttccatataatttctctctaaacctagtacttcagagacgaggta

SEQ ID NO: 218150 - DNA, 4128 bp, Cannabis indica
ttttttttgtttctattaatcaaaaataccctcatattatattttatttttaaatatacttactttttcaagtagattgcctaatataccctcactccttaaatctaggatataatttttattaacttaaaggtttaatgaggatatcatctttaaaagtaggtatatcttaaaaaaatattaaaatagaggtaaacataaaaataaatacacgaaaatggaaaatggatatataatgtaatttcttctatttacaacactacacaccacactctatggcctatgctcattctccccgcaaaataagcttagttgcacaatgagcaacccaacaatgtataaactgaacataaaagaaattattacaaatcaaaatgatatttctaaaaatacatactaaaaagaacaatcataatatattaatatgaaatatatattttttttataatggtccaattgagcaataaagcttaattttggtaaaatatttagctgaaaaacaaatcaaaattccaagagtcaatttatgagaatatttttaattaaattggctcttcaccaacttttgagtccaaaaaagttacacaacaatgcgtcattttcgagctgttagcaaatcatgaaagttatttttagagattttggaatttataacaaaaaaaatcaaaacaaaaatatttcgccggaaaataaaaattctttgatgtattttaattactcactctaaacttttgttttaatgtacaaaagtatttaataataatcaaatcaaaattcatccagatcagacgaactaataaaaaatctgttctgtgttactaatatttaaaaaattacaaaattaaaaaaatatcagcagagatttttttttagtttctaactgtgacccaactttctgaaaatgaccaattggctgagtcaccggacaccagttgccggagacgattttccggcgaaattaggcaatttgaagaagaggaagaagaagagaattcgaagacattaaacaattcaagtgaaaactctggtgaattaggctgtggactcgaatcccagttagaaaaatccaaagggcatcttggtgagaattcttccgatacaacagtgttatcagactcgtcatcatctttgatatctgaaacgaaggtgtgattcaaaagcatctcagccgtccatctcttcttagaatccttaatcaaacactttgatagaaaatctttgccttcctctgacaattcttctggaatttctggaacttcatctcccccaattcgaagtaacagagcccaaatgtttggttcttgtttgtaattccacaccggattcccagtcaccatttccaccacagcacaacccaaagcccaaatatccgaaggagattcgtactcattgaagtttactgactcaggagccaagttaagaggagtacctcttacagttaactgctctgtttccaaagaagaagaagtttctttggctaatccaaaatcagcaatcttaacattaccattatcgaacataagaatattctgaagctttatatcgcaatgaacaaatcccttggaatgaataaaagaaagccctttgagaatcgatcttgcatgtcttctgatttcgggttccggcaatcgaccaccgttgatcttgatttggtccgataagctgccaccagaggcgaactccaacagtaaattgtgataattgacaccattctcaacgctatgattttcgccataacacttaatgatttgtgaacaagctccgattttgtcgagtactcgcttttcgttctccagagtttggaaaccgcaagctttcgatgattttatagccattaaaggtgaaccctttctgggttttgttttactgattgttgcgaagcttccatggccaatttcttctccacgaacccacttctccattgatgattgatgatgatgatgatcgagaaagaaaatgaatgaaattgagatataaatgaaagagagagtctttatttatgcggctcacaacgcacagctaactaaaacaccacccttggactcgtatatatataggaaacttttttttgaattttaattttaaatttgatttaaaattattaaattttaaatataagtttcctttttttattaggttaaaatacttaaataataaaaaatatctttttaaattaaaagttttagttagtggggattctattttggctctacaataaaagcacgtgattttgaaggatagtaggatactttgttctttgacgactttccaaattttggctcacttaactgaaacgtgttcgatattcttgatttttccctttgattttttatttatttttttctaatttacttatacttaagtacttactctattatatatttatcttttttctatttatttagttttgaaaaagtatacttcaaccagcagaaaaaaaaaaaaaagatatttttttcttctaaatttaaaaaaaaaaaaaaacctaaacagtttctctcatgatgtgatatattaaatttccacgattttttaatatatatgaaaaaaaaaaagctaaatctaatttcccacaagattcatatgctaatctaaatttaatatattgtattatagacttactatattaaattgtttcttatgatttctattatttgtactaagattagtgaatcttcaagaggattttttttctcttaaaaaaataaagattaatttattatctcttatacttaagtaaaagacaaactaggatgtttccttttttaatacaacattatcatcattattttaaaaataataataatacacagtccataaacgtgtattggcgtgtaacaaaatatgtctctctacaactcctcaaaccctaaattccatattctttccctctcaaaatataataattaggtaaataaaattataggcatcttaatcttatttgttacttcaagaaaaagaaagaataactatcaattgaagctgttttagggtacaaaaatatgaaaagtgtggtttcatgtgtctttaacaaataccccacaaatatataataaggccaatatataatatacatatattaactatatgtatactaatccaaaatttataaaataaaataaagtaacacatatatatatatatttaaataaatacaattatttgatggaggtgccagcatgagcaacacatgtttttgctaaaatttccttggtgtaaacagctcaacaaatatgggcataaaatccttttatttccgagtcttcctatatagaaatacagtaaaaaccgacaaaaacattatatacatgtgcctctatctaatctcacttatagttacttttttttttttggtaagtaacaaatttactttcaagtttcaactctttttttttttaatgaatttatactaatatatatgttgaaaatggtaaataaattggggagaattagatgaccgacccacccatgaaatccaaaaatgtaggagaaacttccttttgtggttggcatgaaaaacaaagtggggagggaataaaagaaaacgtggtgtttataagcttggtgtagaatatgtttgtaattaattatatgggtctaacttgatggagagagattgtaaggcattgatttatttgttcatgaataggtgccaatgcaatgtttcatgaactagtgttatgattcatggattagtgccaatatatgattaatttatatttgaaacatgttagaatagtttttatatagttataaattaattatttgatttataaaatacgtcaattaattttggtatttgactaaaatattctaattatgctcactattttacctaattatgacaaaaattttaatagattgtgatattttatgatgcggtagtgtgttaattcatgaatatatattataggtttttttttggaagaaatgtattggttcatggataggtatcaaacatgatccataaatacttaaaaaataacaaattaacaaattatatgtcacatcttgtgtttggtggttcaatattttgcttgtattttagggctagctctaattttccatataaaaactcgtcaacaaataattaaaagtgattttgtgtcaaatagaatcataaatgtt

SEQ ID NO: 218151 - DNA, 3576 bp, Cannabis indica
gagttagaaaagaaggatggacttctcaagatagtttctgaaagactgacatctgccattcaaaagcgatttcatagctctaatgacattctcagaaaattcaaatgaaaaattatatctagcttttgtgcatggcaaaaaaaaaaaacaatgaaattttcatgccaagctaatggttaaatttacttcttgtatgataaatgtttgaagtttttaaacccatccagaccactattgtaatctaataattacttttccttgtctccatctactgcaagtgtgacagcaattttcatgccgatgatatcatttctgaaaaccaaacaaaaaaagttgcatctccagtcaatttaatagcttttgtatagcaacaaaagaaattttcattctaagttatggttaaatttacttcttgtattataattgcttcaagtttttgaagggtaatcagaatttgaaatattggaagggctcattctcaatatctaagtttactagataactattgaagcatctccattacaggcattgcaattttcgaatgtaaatagggaataaggaaagaaaagaatttgaaatggtgtaaatgcccaaattgtttaatgtgagcttgagccatagaaattcaacttctcttttaatactaactaaaatgtgagctcgtgaattcatcatacgttctcagaaaccatttcctttttaaatgtatacaaggataaagctaactgcattctcaagtatcacataaagtctgcaacaagaaactcatgactgataaatagggaaatgcagctgttcgttaggttcactcatcataaagctaaaccacaatcaaagagagtagaaagttgaatgacatttcatgatctgaaatcattcaaagataccatgcaattctagattatgcttatgaaagacaaatagcatgggtttgtgggtctcgacaactagtctttcctgagttccatatgttcacggcgtataccatcagcatttaggatgacaatttcaacactgtctccctgccaaaacatccatcacaaagtttaaaaacaagattctgagtggcaaaagggaaagaagaataagaccattagcatctaaacttacagtgtatatatctctctcagttgcagcaacaaagactgttttcaccaaatcaattgcttctgcttcagaaagtggagtgacagaatcctgcgattgcaagaaatttgtggaccagacaaaggcagaataaggacaatttatacttaaatgaataaaataaacttgaggtcaaaaactatacctgagcaggcaatagaagagggcttggagactttagacgcttatccaaaacaggcatgataagtgttgatccagaaccttgagagctatatccaaccttctcatatgaaccaacagcatcgtatgtgaagacgcaacccttgcctattgaaatcaatacatctaattagcatgcagaaagttcatcaaacaggaaccgtcagagttttatcaattaccttcactatcgagaccacctaaaacgttgaatgagtagtaaggaaagaaacgtttgtagtaaagagtatttgacagcaattgggccatagcagggcagctcatttgtttgttatgttgatgttgataaatctgaagcaatatgaataatagatgaaaacaaaaaccaacttgtatttttttttcttttagaaagtatgcagatatgtaaacttattcaacttggtacattatttgaagccttaccaaatgtttagcatccaattgcttctgtaaggctctcacatcagcttgaaaaccagatgaagccattatggatttatcagctctgcgagtttaagataaattacaaacatacacagtagcatttaaaccacaacatcaagaatcataggagtcaatctaaaagcttttttaatctgtgaaaagtccgataaaaattaatcaagcaacacacaagaggaaatatgattcattttattaatgctcattgaaaaatgcaaaaaatttcctataggctgataatcacacacacgaaaacatacatacatatatcttgctaccaaattatccaaatgaaccagagtgtaagtgtaaaggttcgactcaacaaagtgtaaaggtttgactcaacaaagtgtaaaacggaaccgagcactataaattcatttttacactttgttataattaaacgttcagcatactgagtctgctgcaacagttcaaataccaatttagcgaccacaaacgcactacaaccctctttcaggaaacaaaaatttatgatcattacccaacaatcgagtatttttggtaaagcattcattcatcataaaatctatccttccagctaaaaaattatcctaggcgaaatccaagcaagtaaatatctattaagatagatagagaaaagcgtacagtttgcagattttcgagtaatctcgggtgagaacattgtagccggtcgacatccgagtatctgctgcgatcacacagtaatccgctccggcgattgccacacaggatctacaaaagtcggccaaaaaatacattagacccagaaaaaagggtccgtttatgaagagaaagaagaaagcatttacccgccattgttgtcgtaaggggaccagttagcgtgctgcttgttcatggtgaagggatgagtcagagcaagagaagggtcttaggttagggcttaaagagaagtgaaattggagaattgtggtgtgacccttttcttttcttttttcagatcttgccttcggctgtctttagcttcaagaaaacgaaaatgaagaggccaaacgacgtcgttcgcgtttaagaaagagaaatactcttttgggccttaatgggccgacattccaaaaagtgaacatcctgatccgctaaaacccggatttgactttagtcgcactacagatgaatgagaaatttgtagaaatgctatatttatagttttattaaaaaaaaaacatatatatgttaataaatcatttttttcctaatttatttgtttacattttcctgaaaaaaatcattattttatcttgttttcatagttatttctaaaattactttgacaaattttcatatttttaattttctttttactattgtatattttgtattaataaataaatacaaaataaaaataatacattttatgtaaaatatagtaattagtgggggtcgatcttaataattgttaactagtgaatagatacaaattaaatatatttaaccttttttacattaatgattagaaaaactaaaaataaaagtataaattacttataaaaaaaaaagaaaaaaaataactttaattctattatttattaacataaaaattttaaggtatttaatttagatccattaatcaactatcatctaccacttcactcatttcatgataaaattaaataaaaaattatatttcaaagaatataactaactagtcctataatattataatataaagggtacaacttgactgtataaaaaatttataagtcaaaaatattaattattcaaaattatattatagaatgtacaaaaactaattatcgg

SEQ ID NO: 218152 - DNA, 3740 bp, Cannabis indica
gtatgttgcttcttacttttctagtttaccaagtttgatccaaagaagacagcaaagccaaaagttgatgttctgctgtagcccagtttgcatcacagaatgtagctaagttcgaacaatcagatttcttcaagtgcaatccatagttcaatttaacaattatgtaccttaaaattattttaactagtagccaatgattttaaagtggatcctacataaactgataaactttgttaacagtgaagctgattttaggttttgttatgttgagataataaaaagcttcaaccactgacctatacaattgcacattctcaataagatcactaccaaaagcagacgaccttaggccacttgtcataggttttgagttgggttttgcttcctgcattttttctttgcaaaggaagtcctttgcatacttggcttgatttaaaaccattcctcctgtggtatggtgaacctctatcccagaaaataactcaattctcccaagtcttttagagaaaattccttgtgtagacaatttatgagagtagaaattaggtttgaaatcactcccagtaactagaatatcatccccataaactaggatgattgttgttgaggtaggggtaaactggataaacagtgattgatcaacttgagatgattgaaaagcaagcttactaagacactgatgaagcttgttaaaccatgccctgggtgcttgcttcaaaccataaagtaccttgtttaaaggtgactagtttttggactagagaagcctgaaggttgtgtcatgtgaacctcttattggagtgttcaattcaggaatacattgttcacatcaagttgcctgaccttccacccctttgatagagcaacagtcaaaactactttgattgtaacaggtttgaccacaagactaaatgtctctgtgaagtcaaatccaggctattggtggaagcctttagcaactaaccttgccttatacttatttatgttgccatttggtttttcctttattctatgaacccatttgcatccaatagcattctttccttcaggtaaaggaactaagatccatattccatttctctcaagtgccaaaatttcatcaaacatagcacaattctactatcctgatagaagagcttattgtattgtctctagaattttagaaaccataaatgtcttttgttttcaaataccaaattttaatcttgttttcatatggtgcctgttttcatcttagaaagttgtagtagcaggagcaactggtgtaggagcatctgatactggagcagtttgagcatctgatgcaacaacttttgcaaattgagttagactttcaatgacaatagctacaagaggaataggagcagcttgttaagcagaagacaactttagtaggcaaagaagagataggcaatgcatcagcaatgtgttgaccaagtctaacagttgtagaagttggaagagcagtggaagttgaggggccatgatgttaaggtactgtgaagaaagtgcattcatcatgtagagcaactgttgggtaatattgagtatttgcaataggtatattggttgctgcaaacttagtgtacaaattttgtgatataggctacttacgagaagtattttggcatagggaaagcttctttcattaaatttacatcactttatatatatatatatataacctgccattcgagttaaggcatttgtagcctttatggttgtgactgtatccaaaaaagatacaaggataggatctgaattgaagcttgtgtctattatagagtctaatattggaataacaggagcatctaaaagttttgaattgagagtaatcaggttgaatgttaaagattacctcaattggagatttattacccattactagtgtaaccattctattgtgaagataaactgcagttctaaatgcttcatctcagaacttgagagggagactagcttgagcaagaagtgttagaacatttttaacaacatgcatgtgtttcctttctacctattcattttgttaagaagtagttggacactggtgcctgtgatgaactccaatcttgctcaaaggatcaataaatgatactcttcttcccagtcagtttgtagagccatgagcttggtacccaattgtagttctaattctgtcttaactgtatgaacacctcgaaagcatcaatttttttaagtaaatagaaccatgcgaatcttgaatatgcataaaaaaaagttgatataatatttataaccatttgaagatacagtatgtgaggggccccataaatctgatgtaaaaggtagcatgtaaatttaccaagatagtagacagaacaaacattgtgagatgtttaattgattgaaacattataagagttaagaactgtgttaaaatttctttctaagggatgtgctaatctgttgtggctgatatcaacttcagtaagaaaattattgttataattatcacaaaaatgagcaacaaaaccaaaactcttattagtgatagagtcatctttagattgagtagtgcaatatgggcactgatagtagtttttcagacaagatactaggttgacagagaggagattattagagacaccgttaaccatctaaatttcattggagttaaaagaatacagaacattcctgtgcttccccaccagcaaaatagctttactcatatggtccttaaccaaacagtggttaatatgaaattcaaaatacacattgtattctaaagtaaacttagatacactaagattttttttttatttcaagaatgtgcaataaattcttgagaattaaaggctgagtttgtgagtgatgagaggtaatgaatgaattaccaatgattttttgattgccagactagttccatcaccaacatacattctcttagggccattgtactcatagctattgagcacattctaagcttctagagtataatgatatgttgctccagagtttagataccaattgttgtcagctctatggtctgaggagagaagatttgcttagacagtaggcgattggctagaagaattggaagttgatgtaaattcagttgtgaatcttttgtcaaaacgataaaagtagtcatgagaaatatgggaaatcttgaaacagatctgatattgaggtctgttgttgtttaagatgaaccttcctcctcctcctccttttccagtattaaaaccttgaccaaaattgagtgagctatagttaaatgaggagggagaaaaattagggaaattacctctgccatttccattctggaaagaacaatgaacaccttgaaagtttcctcgaggttgttgagatctttcaagatttctatagttggatccataagaaggttgtcgaggaaatttatttaagttggtgttgtttgcttcaagttgccgatctactgcattgaaggcaatgtgagcactgagatcaagttcattgtctaacttttcaattcgagattcacaggccagaaaaagagctttaattttttttgcaattgtatatccttcagttagtgtgtttgtggatatgcaaaaaaggtcatatacactaggtaataggcctttaaacaattctgcaacatgatctcgagtgttgagaacttctccaactgaagcaagaagatacacatgttgtttcaacttaagcaaacaatcatgaagtgacaagttttctttcttgagattttgaagattagttctgaattctaagatctt

SEQ ID NO: 218153 - DNA, 9072 bp, Cannabis indica
aaacatgaatgttataattacaataggcataattggtagaggcatcttctcataccatgaacattagtattcacggggagagtaaattttgccagagcaacattattagcagatctaaacacatgagagatctgactaccaaggaaatttgacactaaaagagaaatattatttaataaacaatgaaaattttcaaaccggcatttgggaagattgcaatcctttaaccaccaaaagagagtcagtctcgataaaatgaattggtagttgaagctcatgaagccatttcaagctatgcattagtgccatagcttccatgatcatttatggtttaaagcatcctttaaaggggaccgccatggcaacaagtatatctcccgaactatttctaaggactgcaccaaagcctgtaacatgtttcgttatgtcaactgcagcatctgtgtcaagtttcagatggcctgaaggggcattcaaccatgaagcatcccaagataccaattttgcactcgattgattgctaacaatgacacagttttgggctttcctagcttcatgataatcctccagataggagagagcaaaataaaggatagtatcagcttgttttggcaaagtaccatgcctctctttatttcgttcactccatatactccaaagaatggtagcaaatttttccaactgcaatgaagatcatgatacaaaaaattgcatgattaattctttcaaactcctattgttagaaaacagaccatcgagacaaaaagaggagcgctgccacacttgtcgagcccgtttacagaggaaaagagcatgaataattgtctctttgtcaccattgcaaataaagcaagtggtcgaatcattaatatacctagtgtgaagaatattagctactggaaggcaatcatgatagcacaccagaggaaaatttgaattttcgagggtaatgacagccctcagaattttttccaccattgttgagcttgaataccactagctgaaggagattggtctttcaaatgcatagccaaagcataacccgatttgactgtgtatattccattagattcatgatgccacataagagtgtcttgttgttcatcaagcattagcggaatgttaagaattttgttgacatcagaatccaaaaataaagatcttaacatggaatggtcctattgtcgagtagccaaaagtaaaactaaaactttcaaagttttgtcctgtccttgaaaagtcaaaggcttaaaggaagtgaatcttagccaagggtctgaagcgcaaaagatattatcaccattaccaaccttctaacgaagaccggtggcaagtaattacttaccccatataatgccctccaaattaaggaaggataagaacccaattcagcatccaagaaagaacaatttttaaaatacttgggctttagaacacggctaagtagagatgaggggttagcaaagatcctccatgcttgctttgctaataaagcttgattaaaatggacgaagctcttgaaatccatcccaccttcaatcttagagtgacacaacgctttccaagtcttccaattgattccattatatgaagagtttgagccccactaaaatttattcatcataatctcaatttgtttggttaaaaatttagagagacggaaataactcatcgcatacgttggaattgattaggccacaacttttagaagaatttctttgccaacaattaagaacaatttttcttgccaagcagagaggagattccataatttttctttaatttccccaaagagaatatttttgtctcgaccaaaataagaaggaagtcccatatatctttcatggcacggtttgatgagcatttgcaagatctgatgtatgtgagcttgtactgctggacgagcatttggagagaaggataagacatatttttctgtgtttaatcactgaccagaagcactatagtaaagatcaagtgagcgcttgattgcagcagcagatttatgatttgcacagcaaagcacaaggctatcatctgcaaaaaataaatgcgaaacaattggggcaccacgggagacttgcaaaccatgtaagttgcttatgttttcttcctgctgcagtagacaagaaagaccttcagtgcaaataataaagaggtatggggacaatgggtcgccttggcgaattcctcgggtaggaaagacatgaccttggaccttaccattaacagagaaagagtaagtaacgctgcttatgcaatgagtaattaaatccacagcagctgaagcaaagcccataaccaacataatattttgaacgaaatgccactcgaccctctcaaaagccttactcatatcaagtttgatggcagcataaccctattttcctttcttaaaatgttttagagaatgtaataattcaaaagcaaccaacacattgtcagtaataagtcgagattgaaggaaggcactttgcgattcaaaaatcaccaatgagagaaaaggctttaaacgaagcacaatagcctttgaaaccagcttataaagcatattgcaaaggatgatggacctcaattaagacatagaatttggctttttgacctttggaatcaatgttatcaatgtctggttcaagctgctaggttacctccatcattaagaactttaagaacaacagtagtgacaagatcccccaccaaatgccaataattagtataaaacattagtaacataccatccaatctggggctgctatcatcactcattgaagaaagtgcattatagacgtctgaaactatgtacggtttagtgatttcttccttcatagcaacagtaatggagcatggcactgaagaaataacttgttgaagaaccccatcattaacttctgtagtataaatgtcttgaaaataatctacaataacacgactgataccagcgtgagaagactgctcaataccatcgttatcaagaagagatttaatgtggttaacattctacccgctggtggctttctgatgaaaaaaattgtgtgttagagtctcccgattttaaccacaaagtgtgagatcgctgctaccaatagtcttcctcttgagctaataaatcatctaatacactttcacttctcttaagctcatcaaagtgagaaggactaacatcataggatttattaagagcagcaaccttttcttgggacaacttaatcttctttggaagatctccaaatttagaccgatgccacaattgcaattgagatgagcaagctgaattttttttaagaatttgcttagcaggatctgtagcagtggatttccaattggttgctatgatagcaagacatgtctcctcttgaagccaaagtttctcaaatctaaatctagattttgtatttttgagggggacaatgtgctagtggtaatattgtgatctttaaagctctatggtccgattggaaaaagtccaagtgagcaatgacatgtagtgtgaaattgttaagccaagatgagttaacaaatccataatctaaatgctctttaacattgataccactagagttcttattgtgccatgtgaatatatccccatcaaaagaaagttcttgcgatccacagaagtctatggtattgtaaaaagtatcaatttgtgactcaggtttcaacggaccactaagcttatccgagtgagaaatattttcattaaaatcacccatgacaatccaaggcattaatggggttgtgtcttttagtttctttaagagttactaagtcaagtgtctttgagtaacacaaggagtaccatagaaactagagtaatgccaagaagggccataattaatagacatataacaatcaacaaagttcttgccataattcaaaatagttacattgacatcagcttttcaaagaaaaagaagaccaccactaagacctattctaggaacttctatactattaggaaactttaaagcattacaaaatttagaaagagaaccaatactaagtttagactccataataaagattacatcaggtttattttgagaaatgagcagacaaagttggtggaatgctcttgaattgctcaagccccgagcattccacgtgataataatcatggcaattggcgaggctgagtatcagcctgcaccaaaagggcactaattccctcttcccccaatgaaattttagagaatttagaggaggtgataagatgttcatgcaacaatgagttagtagaatcagcaagaggtgtggctcttatacgacatcatttaagcacatttcaaacatttttgcctgaagtaaccaattgcctttaagtgaacatagaagacatccgattttcattaattgtgtccacatcagtcgaagaagtagctggtgtgttgttgacatcagtagccacattaggatgagtattaatcaaagtggagtcagtcaaaatggtccttgattgagatgtagtaaaggtgttattcagtggtggtgaaacatgaaagtaagcaggagggactgccatagagataaccgcagaatttcttgcaggatgatgtgatgtgacagtacacatagcattggactggtcatcagatgattgattatatgatgttgttgtagtcgatgtagcacaatgagaagtgagaacaggatcagtgctgcagtgtttgtcaatcttgcaattagtatcaaatgtaggagcagcatgtggaagatcaatgatacaatttggcagttctacacttgtattaggcaagtgatcaatttcctccctagaactttcagcaatattcctttttcacggttagtaatttgtggaggggcagcaagtaaagttctttatatagggataattggagaaatagtgttgcgtgcaagatgagtaatgaatggccatggatctgcctttgagaaatcctacctataacgatcataaccagtcttgggtagtgcagcaccttctatccaaggtccataggagagatcaggctctcttccttcatcaatcttctccaaaaatagtgggcatatttcattaaggacaatagggaatggaacctttctttgctaaatactcacttttctccaattggtatttatcggatcctcacaatactgctgagttttttccaaaatcaagatctgctcatatggcatcatacgactgtaggggtttacacagtcaagtatggttttcatttagctgattccttggctgaagtagatgtgtctttcacatctaataatcgcaacagttggtggaaaagtttatggaacctaaatttgtctcccaaaataaagatctttgcttggagggttatcaaaagtgctttgcctattgccgtcgcactaaaaaaggagaaagttattgactcaatgacttgttcgttgtgtaaccatgcttgtaaatctataagacatggtttgtttacttgttggtatgaaaaatcagtttggaagacttcacaattcatgattgactaccagaaagctcataatatgtaagatgaaggatatgtgatccatttatccttactgtactcaaaaactgagtttgaaactctaatctatataaagtgggctatatggttagaagggaataaagtttttcatggtgaagctaaacgtgatggatcctatattgcttcctatgcaataacctactatggaaactttatattctctcacaaccctgctacaacgcctgctgttgtggcgactcatgtagtaactgaacaacgcccagaccgacggagggagtcccatggaagccacctaatctgaatggtatcaaacttaatgtgcatgcaatagtcaatctgaccaccaaaactttgggtattggagcaattattcgcaatcataaatgagttcttcttgctgccatttctaaaccagtccaaggttgctttcaatcagatgagatggaagaaaattctctttttcatagcatcatgctaggcgagtcaactaaaaattctcataacaaatattgaaacacatattttacgattatctacaacatctttagatttatcttcctttttagatttaatctctgatgttcgttatcttttatcttctttccctaaagttattgtttctcatatttggagacatactaatcaagcatcacatggtttaacaaaatatgctctagagttagataaaaatatctattggataggtgaaataccttaccctattttttctattattgtgaatgactcttaatttataataatagtagaattttattttcaaaaatatatatataatttaatataattttatgatttaattatcactaaataaaatattgcgatatatttcctattatgttataaaaatgaagaaaatatatatacataggttttttcttataaaaacaataattgaaaataatattattaataaaaggaaaagtaaaattaatatgcgtctgccgggagtcgaacccgggtctattgcttggaaggcaattatcctaaccgttggactacaaacgctttgatggttgatattggtaactaactgtactactcacaacatattttgatctttcaatttatattacacttatatatataataaattgagtaaaaaacttaacaagaacataatactgccaataaaccaacttatttttattattattattttaaatgaaaataatctttattagacaaaaatatccgctaatacaaaggactaaagagcaacgggaatatcactctcagaaaaaaaaacgacctgaccaataacaagcaccacgtgccatatagtgcgcgactttattagcagactgtttaacatgaccaataaaaacattacttaaagaagataaaataacttgacaatctttaacaaataaactaaaaataaaaggcatagataccgaaccacgaatagcttgaacaattaaaatgcagtctgtctctaaaatgacatttgaataaaagatacacgataattatgaattgatatataataaaatttttaagtttcgattggcatctatttatttatagaatccatcttcacaatcacttttaacccagagacattctcgtgattatcgaaataatacggaattgccatgacaaatcctttggatatcgatccaatccaattagaaacacgaagtggcatattccctttacgaaattccaatttattggttccaaaatcgtcccaacttgcaacttgatccttgaagcttagatttttcttattagttgcaagatcatacttggatgaacatttttctagcttcatcaccatattattaatcattcgttggactctttcacataagagaaagagaaatattccaaagccattttagtaccaagcttggtctcagccttctcaacgcaaagcaatgcaattgtattatcagtaataggagggttgtcttcatttgaatatttgacattaaagatgattgtttgatcatcagcagagttgtcttggctagcacttgagctaataacatctgttatatttgatgcaggagtgtattttatatttggcagataaaataaaggcctctcttttgttaccatatttttgtggatgtcagcccattttctgagaaaattttccttgaataaaatgtcaactaaaaaaaggctgcaacttatcccaaaggagtatccaccacatgcaaattttgtcacctgagaaagaaagagagatcaatcaatattattacttttttcacatttcaaaattctacacctatgtacttttatttgttttggcaatacagaataattttttaatcaatttttttttatggtcatatacgttgtagttatttacaatattctatagaattttgtaaaatttgaaaaaatttaacacgctgaaaaataaaattcaaataatatattacacgagtgattctttttattttatatatacttataaaataatctatttaaatattactttctatactataaattatattccatatttttttaaaatttttacatgatgtcttaaataattataatgtatacgattataaaaaaattggactgaaaaattctcctatatgccgaaatatagataggagttgcattaatgtatcctttttatgggggtcgaatgtagaagtaccctaccatatatattggaatatattgtgcccctaaaaagagtacatcgatgcactccctatgtgttgtcattctgaaatctttttagtctaatttttttaaataatcgtatatgttatagttatataagacattttgtaaaaattttgaaatattcaagaaaatttaacataccaaaaataaagtttaaatagtctattgcacgtgtgtcttttattattttatacgagtgtgaaataaactatttaaacactattttctatattataaattattttaaatttatcaaaattttacaggatgtcttaaaaaactaatgacagtccctataatactatatataatgatatctatttttttttaaaaaaaaaaacttatatatatctgacattaaatatggatatcgaaccgaaattattaatttgacgattcttttttattttctgttaaagttaacgattaaaactaatttttttaaaaaataattttaaatatctttaatttatttatcaaattataacttaaattattatttaaaagtataacaaaactagataattatttttttatataatttttaatttaaatttaaattagacgtaaattatttaattaatcacactttataataaatctattacacatattgtttaaatatctaaatttatttattttattgtttgattaaattatagttaaatgtattttcttataaatataaatttaaaattagattatattttatatatttgaaaaatataattaaattgtattgatataattattattatttaaattaataattaagtaatagcaactctacaaacatgcatggtatgtttctaatatctagcatacatattatattaatgtggatatgtaagaaaaatgatgttctcttttttaaaaaattgtaattcaaatttaaacatactgtatatat

SEQ ID NO: 218154 - DNA, 3830 bp, Cannabis indica
aaaaagaaaaaaaattggcatatatctaaaaccaaaaccatccaaacaaagttgagcccaccaatattatagccgttgcaagcgctgtccgtactaaaactattataacctattgactattgactactcacattttgtttagtgataaaaataaaacacagccatagtaaaagctttaaataaatcccctaaattagggtttttactaataacaatgaattactttaatataaattaagaaaatattttaataataataaaaaattaattgatggagttaaaaaagggtacgtacttcactacccaaccaataggaggtggtgaataaaaaaagcttattcccaatcaaaattctaagaagttcacattgtttatttctcatagtgtcacactagggaacttgcagtatccataacctgaaaataaacaaaatataaaattaaataagaaagaaaaaaacattgattataatatatattaggaatttcagcataaatacctctaaatttcactatcaaattagagattctaaaattatctatatttatttttttcttaaaaacaaaaacaattgccaaaacaaattcactctaaaattaacaaacagcgagacatttatgctaaaaattagttaattcattttttcaaaaaataaatatcttaataaagcataacaaacccatttgttttaatttttaatttacgcatttttctaactgggcctaaaaaataggttaaattgggcttacttggatctttaatcgtttgagtagcgagcccatcaaagtaacagctccctccagtcttcttaaactgagcccagtaagaactaaacgcatagctgacgtgtcgtatcaacgagttcgggtgacgacaatacccgcgaggttgaatcgggtcacaggttttattcccctgcgagcaagcgtacgatagcgctaaacccaaagccgtcttattggctcccttcgccgccacacaccaaatcttccccttatacggcgtattattctccggcaccggcaacggcttgtactccgacaaaggcgtctcaccgctcaggtcgatctcatacacgggcttcccatgcgggtgtaacaacccgaaatgtcgctccgtacccggaccaggtttctggttctcattgtacaaagcgaatatgaaagacggtaaaaccgaaccgggtcgggccggggttccgaccggaggtttggccgtgaatttcttcacgacgtttcggttgtaagttgcagcgttgtaaatattagctccaatctggtcgaaatcaccgccattgggccaacccgtttctgcaataaaaatccgaacatccgggtacccgacccgtttcatagcgaagatgactgagtcaaccatttggtcaaagaggttagtgtaggttaatccagtgtttggatcggtgatagtgatattcttggattggaatagagcataatccaggttaatggttttaggttcagaagaccatggaaaataggggtaaacatctaggaataggaatgattttgttcggttcaagaattgtaacatgggtttcattacagagctcgaaatatcagacctgaaagtaccattggaaggtggaaacgaagattgaagaacatccatggctaaagttgtacccaccttgactttatgggctccgtggatttttagggctttcttgatttttctcatggctgggacaatactaaaccaggatgagttatctgtaccgctaagcatttcgtttccaactaagagatatcgaatcagagtttctgggtaaaaagggactaaatttgtgtgaacccattgattggcaagtgtttgatttgtggaaatgtttttgactaattggtttggtaccattattgacacttgtagacctgtgtttttcagtgctttgaggatttctgggttggcatcgtagattttgactcgttttgcttttagggatttgattaattcaactgaatgagatggagttggtaggttgttacccagttgaccatagttgactcccactgcacctgagatctctgcacctgtaataaaccaaagatgaaatgaattagaaatacccaatatgatgtcgtattctgtgattagctttgtttagtgaaaaggagaaaaaaaaaagcttacaggatgatgaaactaagaaacagagtatgaacaatggaataagagctttttccatggcagttcgagttcgaagtactgagtcaactcagctcaaaccctgaaaacaaatataaagattgaaacttttgtcgattgtaactaatgggtgtagagcagaaattgatattaattaatgaatggtttgcttaaagaagaaatgatggagagagttgatatagaacacttaccaacgtagtgcgtggaatcgagggtaagaccaaagtgatgggaatatcacttttttaatattttcaaaactttttttctttgtgaaaagataaagaaaagaataatagagaaagaaagagaacgtgagatgagatctgagagaacagatcacagcaaaaaatgggtccctttcttttcagtcttgtaagaaaattataacattggttggtttcgtggaagggatggaaaagtgggaatatttatatgttgtagttggacaaagtgaaattagccgttgagggagtggttgttcagattaattaatatttatatggctttaatagatttgcttacctatactcttttcaacttgttattataacttttttctgctgtttaactttattgtgttgctgctaatcttggaagctttacttttcaccttttattggcttctaattagtgattattaagaaacatcattttagaattggaaagaaatgtcatatcagacaaatacaggtgtttgctaaaatgaccagattgttttttatggtactgtcaagtgagcaacgtgttgagcacataaatgaaagtgtagtttattgaaatggcactagaaaggtcaagcttaatattttctttcatttttatatttgtgtcgggttgagaccaatgtacaacaggtatatgttcgacttgaacatgattcgttatatatcctgttaaaaaataaaacttaattacattgtgttaaccgtgtcaatccgaacacgattcgggttggatgaatcaacctaaatatgactcgaaccgcaaacctaagctcactaattctcatgcgaatttcaaattgtgttattgtgaccgtttcgccggccctaatattctgggatagaaagaaaaaacaaaaacagaacatagataactaattcattattattatcactaaaaactaattaagtattattaattagaattaaaaaaaatcccattcccatatttgtagaagatatttgtttgtacggtaattccgcataaatcagcggcccaaaacatttatctttgctacaacggcaaacttgtttggcttcctcccacaaaacactgaactttgtactaaatacaggcaattattataggaaatattgttattattatagattaacaattatctcaagtcaaactgataacttacattctcattatttgatcatttccttattttatcaaccttaaaatataataatcatgcaaaattccatattgatttgcactaatgaaactatatggcacatttaggtttagatggtgttgaaaactaataatgcattttgacatttttcttattaattcatctctattatacagtagaatcgctatctaagaatacacttaggaccaaataaattatattccaatttacaaaatacatgtatatatttattaagatgtaattattcttatatagaggt

SEQ ID NO: 218155 - DNA, 9679 bp, Cannabis indica
ttttttgagattaggcatatcggtacggtgtgacgttgatcggggctgtaggacgatggcatgctcatgggagcgattcgggtgtaaactttaggtatttcaaaaacatcaacaaaatcagcaagtatttgagtcaaatattctagtaaagtttggcccaaatcgttggtatcatggtaggtgaaattaaatttcaaaatgatgccttgttgctcagcttgaagagtctttgccattgttttgaaagataccaaagatcgatcaagtgagcggtctccctttaatagaaccctttgtttgccaatttgaaattccatggtttgcaacttccaatccacattagtcattccgagtgtatctaactatcgcagccctaagattatatcgacactacccaaagggaaaggcaagaaatcgtcccaaacatccacaccttggaagtgtaggttcagatttttgcaaattccttcacatttcatcgagtccctattccccaaagtaaccctataagtcttagtttttgaaatgggaatgttcaactttgatactagagccttggaaataaaattatgagtcactcttgaatccataaggattaccacttatttggtcccgaggtgtcccttgagtttcatggtggaatttgtagagagaccagctacggattcgaaagagacttgaactttttctgtacttcagtggaatccagccccgcagtctcttcttcttccttctcggagttttgcgttgactcatcgtcttcgatgtcttcagttatcataatcacttggagttctttcttcttgccacagtgtcctggagaccacttatcatcacagaggaaacacaattctttctgtcgttttaatggaatctcggcatcagtaagtttgcgaatctccattgtggaattggcaagggaagttcggcttgagggtcttgcaactcttgttgtagtgttagggctatttaggcaacttgaactggggtatcgctgccttgttaacctattcttatcttcaatatcttgcacaatttccatggcttcatccacgttcccgggtcgatagatttgcaattcctcttttagcgatggaagtagtccattcataaaagtgcttagatgtacaacttgttccacaacattaagtggtgccaataacttgataaaagtactctgaaactaagccttcttgtggaacagtcaagaactggtcatataatgtccttttgtgagaattgctgaaatgacggagtagtaatcgcttcatttcctcccacctatgaatcgtttgcttgttacttttatattggtaccaaagaagggcatcactcgaaaaagaaatgaatgccgcttctactttttcatcgtcgtcatacccatggcaagtgaagaatctttcagcttgtaggattcatccatctaggttctctccattaaaagtaggcattttaagttttatcaatcgattctcatgatgaaaccgagtatccaaggtcggccctaaaatttagtgggcccttatttagagtaaaatgtggtattttttaaaattaataaaaaaaaatgtgtaattttaaaaggaaaattttttttgggccttggattaggtgggccctaggcacaggtctaactcgcctatatccagggtcgggcttgcgagtatcgttccggtccttctccaaagaacccctaacaacaccttgttgcaaatggaattttgacgtcaaaggtgttcacatggtggtgcaaagtgattcatgatcgagtacctgtgtggagactctaatttattcgctgacccttctgtctcatctttttctttgctcccagcagctactagtttttcttctctggtgtcttgggcaattcttgatttctttaacttccaataaggctttgaaatgctgctgaatcctttcttgaaaggattcttggagttatttttgaatccgcagagccaaaccctgaagtgaatcattgagagaatccttgagttccgaaatctctgattttaaagcttcaggatcctcttcgaacaccattgtagcatcagatttttctgccggattcttaggtattgtggccgcagtcaccgcaccaaattgatggaactttcttcagatcagaaaatatttttatctacaatcaacagacaaggaaatcaacaacacctagctttcgagagactatcacacctagctttcgagaggctagtctctccaattcaaccattagagagggttgtctttcccaagtgagtgaatactcatcttaaatcccggctgtccaaaatagattctcatccttttatttataggctttgactgaagataaaattacaacccatgccctcttattacagcagtcactaacacaaataaatcattaaagaataaaaatattaaaagacccttacaactcaggtccttttaacaatttaagtctctaccctatgcttatttggtctcctggtatagactaaacatactggggtctatcaaatgccattctaatagaatagttttttatcattttggtagaatgacttttatttttatatagaaggaaatatcaatccaatataagatgagaaaaaatttaatattttttttattaagttttttgatactttttaaatttaatttcattctatttttatttctattctaattcctattcttgtatttttattccttccaaataaatatcaccttaaggttatatcttagtttttttacctgttttcggaaaatactatttaagatttttagagctttttgttaagctttattccacgtgtttaacaaagtgtgcttttttttctttgccgaatgtgtaacatagtgttgagatgttgtatgtataatttaaataaaaattaatttaaaatttaagaaattcattttcttatcaacaattaattagaaaatttataattatttattgacaaataataagaaaataaacttttaaattttaaaagccacaccaacattttgttagtgaatagaacttaacaaaactcttgtattttagcagtgagtagtttggaaaaaattttaacaaataaatttaagaagtatgatttaatagttgtaatagtatgaggggtaaaaaatcctaatatctttcaaaaaatcttgaataatttactatatcaaaaataaaatttaaaataattaattacaagcgaataaaagaaaataatatgtgggcaacttactgtttggatattatatactgtttgttttttccgtaaatgggcaagatgcatataatgtcatataacaataatatagttaaatatagttcgttcatttatattttcatgttaattattttaatgcttcatcctatgcggaacatcatagatagatgagttttttattttttttttgacaaggaatgatatatggatgcttgtgtcttatataactggagaagattatagtttcatgatgttttccccgttacccagaagtgctaaattcgtttatttacttctttgtacaagggatttttggactctcataatgcgggttcctctatggacattcttctagacgaatactctgattttgaaagacctttaagagacactaaaagtaaatttcgtaaattaaataaagagatggaggatgactgggagcttccaatggattacttgtgagctatcttctgtcttaacagaatagatacaaaggatgggttatggatttcttatcttctgtgcctttattctttttggtatacttggttgttatggtacgtataaataaactataaaataacaaaattgtttgtaaattgtaaatgttatgcgctctaatctgatgtaccgaagtcaactttctgctgcaagaaaaatgcaatattagtttctaaggattggcgtgaggaaatgtaatacctcttgtatattttcgtgcacacgcctaattgctcaacagctatatatttatagatttatagagaactactttctaatggcatattccttatttttttttttttagtataaaatagccagttatgataaattaataaaggttatttacaataacagaatatattagaggaggaatattctccaaccaaaagaaagtatcattcaactttaaagcagatttagccaacttgtgagttgttatattggcagtatgtttgacatgtacattaataactttaggaaaaaaaaataaaagactaaaaacatctacaattaaatccttaaaagtaaaaattgtagtaaaatggcatttcaagcagtagaaaccatttaagtgtttgtctttttttgtgtgattggcaactccatctgtaaaatccaagttagattatggaacatagcttttgcttccattttatgagatgcaaagttacctatgatcggttttggaaaggcagcaacaacactaccatgagaggcataaactatggctccaactataatattcttggtcacatctaatgcagttgaacattagttcaccatgaggaggaggtagccacgatatgtgagtgtgagccgatggtagtagttttggagtagcagagtttgagtgtgggaaaaatttatcctgagcatcttggaagttttggagataagtggttgcagaagatgcaagggtacgcgctagtttgacagtaccaccgtgaacaacacaattaagcttagaccatatcgattgcatgatgccgatgatttcttctaattcaaatctgttatgaatgcttgataagtgcactagatagtctcctttaaacattgagtaggactgattccaatctaaagtcaggtctgagcagcaccacacggagcgcacatattcgcaactgaacatggcatggctaatagactcccaagcttgtttatagagagagcatcttgaattagttatgactttccgcgtgactaagtttgtagcaattgggattgcctcatgcacaacttttcaagcaaaacttttgaccttttgtggcaattgtagagaccaaaataacttccaccatgatgcaaaagaagtcgatgaggatgagtggtcaacattatcaagcttcgcagctaaatgatatcctattttgacggcacagagccctatgtgatggtgatgccaaataagagaatcattgttggggaaaaaaactcaatggcaaagttaaaattcgatctacatccaaagggaaaaagtattgcttcaatatatcaattttccattggcgctcactagtaatgagatttgccacaagcccatttgatggtcctgagtaatagatcggttggaaagatttgtggccaggtatccatgggtctaaaccactaagtatgtgtgttccttcccctacctttcagcgaagaccagccatcaataattctctaccctataaaattccttgccaagtcattgaaggggagtgactgagttaaagcatcatgaaaattattatgcgagaaatatcgactctttaacaacccgcttagaagagaatctagagtttgcaagatcctccaagcttgcttttctagtaaagcttggtgaaagtgtacaaaagaacgaaaccccattttaccttttgccttagctttacactgcaaattttaattctgccaatgtattttagaacctgtggcatttatgccccactagaaatttgccatcatggatttaagttgtttacaaaatgttattggcaaatgaaagtaactcattgtgtaagtagggatggattgcaccacaaccttaagtagcacttctatgcctccaacaaagaaaatcttctcattccatgtgtgcatcaactgccaaatcttctccttaacattactgaagagtttttttttatccctccccgagtaagcaggtaagctcaggtactgttcatgacactcactaatgggcataacaagttgtctatggaaaaggacttgtaccgctagagttgtgttggaggagaaagatatggctgacttatccaaatttagaacttggccagacgcttgatggtatgtatccaacacccttttaataggaaggcatgaattttcatttgcttgacaaaaaagcaagctgtcatcagcaaagaacaattgagaaatagtaggagcacgacgtgtgagagaaaaaccattaagattggcaagattctcttcgtattgaagcagctgcaaaaaaccttttgaacaaattaagaatagataaggcaagatgggacacctttgacgaagacctctagtggattgtagataacctgttaactccccattcaatagaaaggttaagctagttgtagttaaacaactcatgctaagggtgatccaacgatttgcaaaacccattttcctcattacctcctcaagaaagcgccattcaacacgatcaaacactttgttcatgtccaattttatggccacaactccattttgaccattttatcttgtgctttattgcatttaccaactcaaacgccaccagaatattgtcttgaatgagtcgatttgagaggaaagcattttgtgtcccagagattacagcaggtagcacatgtttaaatcttgaaaccaacactttgatattaatttgaagttacattacacaggctgatggggaaaaaatcactcactcgctagggttttttaattttagggataagaataataatggttaggttcatatccttcatgtttgcaccgtcattaagcatgctcaaaaccactctagtgaccaaatcaccagcaacaagccagttttgttaataaaatattgcggacatcctgtctattctaggactcttatcaacactcaccgagtgtaaagaaagttctacctttgcagctgtaaaaggcttcaagagttcttcattcatatcagtggtgattgtggatggaattgaattaagagtgcaatgcagagttgaatcatcaatggcactaactttggaaatatttgcaaaataagcttgaatgacaacaaccatatcagtttttgaagtcactgtatcccctgtctcagtacaaaggaatttaatcttattgtaagcttttctagctgaatctttagcatgcaaaaactttgtattgcggtccttgaaattaagccaattaacgctagacctttgttgccaatagacttcttcttgctctagaagatcatctagaattgcttctgattgtttgagtttagtagcctattctgttgagcgcaaaacaatattattaaggttaaccgattttgattattcagcagaaattttcctcttcattttgctatattttcttatgtgccattgctgtaagttatttggacataaatccaagttttggagtacatttgagattgggttatttgagtttgaagtgtgcctgcaacgagatatgatgtccttactctcagggtcagacgaccaaagtttttcaaaatggaatcgactgcgttgtttcttttgttgagcttgagactgagagggtgacaaaactacaaataatgcacggtgatccgaatgacaatagtcgagatgacgaacttgagaagtggaaaaagtatgaccccaatgatgattaataaaacaccaatccattctttccttaatggtttgagtacttttctattttttatccaaatgtagtcttcaccagagtaaagtagttcatgtagaaaatagtggtcaagagttgacctgaaagcatcaatttgagattcaccgcaaagagattcacctgaatttttattgttagataaaatttcattcaaatcaccaatatcaagccatgaaagtaaaagggccacattagccagacccttcaagagtaaccatgaagctgtttgattttgggattcaggtgcaccataataaccaataaagtggacaagaggatcaccattctcagacataaaacaatcaaaataagttggaccatatgaagtaaggtaacatcaatgttctccttccatagaagcatgagatcacccttaaggccaattctaggaacctcaagtccattagtgaagttaagagattgtctaaaatgagaaattgaattattgtgaagcttagtttccatgagaataaaacatggggtagttgttgctgaacaagcaactgtagatgtttgaatgcactcaagtttcttaaatcctatgcatttcaattaataattttcatggcaattggtacggttgcataacaacctctgcctttgagtcatagagaccttcaaaatctgcattagcatttgaaaaataggttcatcaccatctttaactgactaggatgaagatggagtattagtggctccacatttcaggatgtggtgcatggatagggagtgtttttgtcgtttcatagtgcaattcaatgaagaattttctttaccagtaacaataggatttaatatgacaccaatttgtgagtttgagataaaaatagatggtgaagttgttgtcataatgaaccttgtaggagtggttgaaacaagattggagggattagaagtggaatgttgtagaggggtgtaatgtgggtaagtggcaaaaagattagtagatcttagtttgaagtctggtataaaaacggagaataaacaaaaaaacagtgggattcgtaagtggtaatgtagaggttaggcaattaagggtgttatttgacattgtagaatgggaggtagaggtgatatgattctagtggttaagggagcatgaggctgggaggaacgctaactattgcaccagaactcaagctatgttggtctccaaaagattgaggttgagcattcaaagactcatcgaaaaagagtataacaagttgttgaggatgttcattttgcaagcttgggatagtggatgtaaaagaccttcgtgcaagcctagtaagtaaaggctacacattacctttttggaaattcattctatacttatcataagcattgttgacccaggatttggttaattgacaacagagccttaattatttttgataatcaccacatgtaaataataataacaaataataaaagtgacacgagatttatagagatttgacctccttgtttagtagtagtgacctacttctcttttagttgtattgattcttgagataataccacgcagattacatgcttgaatcttgtaatttctagctatgactctcttcaatattacagtagtgagaattgagtgttaccgactcaaaaacaagtgagactttgtgaaggaaatagactaagtgtctagtgagtgagtgaggaggcatgagagagacagaggagctataggacttgaaagacttagagttcaggtcccttttcatcttacctaatgccctttatataatgtagggtaagagtgttcatcaaaccgctcaaacctcccacaccgcactgcaccacaccataaaaaaatgcggtttgaaattctttgtggtgcggccgcggtatgaatttttcctaaaccgtgcggtgcagtgcgatttgtgattttgaattgttaatatgcggttcaaatggcaccgcaccgcataatgtaaaaataccaatttttatatttatttaggtccaatatgtgaaggcccaacctagcctactaattattgtattatgtaaacttgaaactttttttttcatatttattttcaaaacttattgtattttggacaagtttttctcaagctttgttgtatttg

SEQ ID NO: 218156 - DNA, 11105 bp, Cannabis indica
gtttgattctcatgatgttggtcagcaagccaagacaactcgtctacaaggttagaccgttttttgtgtacttttttgcgttttactcattttggaaagtttatcagattaagacagattgcaagctgaacttttctttttcaagcagaaaatttaggcagaactttagccttgttgaaagcactcccacttggatggaacctcctcaaagcacaagcaaaagaggcaaacatcctggtgagaacactttaaagaaggagctgtggacaaagtttgaagcggcatctactagtactgataaattctcccttagtgttcgtgcaacttctcggaatggattccttgatctattggaagaggcctcttttgatggagagagttaaaagttccaagttaaattttgttttgccatcaagtttgcttaacttgttatggttaacaagtttgcttaacttgttatggttaaccatgggaattgtgtgatattcctgagaatcaatcagctttatatcctaaacgactgtagtattatcatggctacatgaacttttgtagagcattattattgtactatgaaattccagtgtcataatacatgacataaatatgagaaatttacaaaatgcataacttcgatattgaatttagttacacgaagggtacattgtttagctaactcaaaattaatcacgatgaaattctttctgttgtatcataaaaaacgagtagagggaaaacaatcccaaaacttaaagtttaatcttcgtagaagaaatgatatttatattagaattggcttgtgtcttgtgtgcattaacagcaacacaagcaacaaaggagaaatgagaaatctctctatttcacgtagcacgagctcaatgatcaatagcatatttggctaaaaataaaatggcaaaatcagtaagaagagttaaattttacccatagaagaccaatgtaaacgcctctagaatctctaaccgctgcagcaacactacaccaactccccgcaaaaaaatgaaatgatgaaaatcaaaaggctaaaaaagtgatcttatttggtggcgtgtgtagcagataatttaaataacaggggtcgtaagtaaatataaggaatattaggggcttctactcaacttcaacaaaaagaaaaaagcatccagttcagtcagtcctctccaatttcttttgttgaaaacgttactaaaaccctacaagtctctattcgccaacaatggcggaaccgagcgacttgactcagcacattgagtcttacgtcgacacctctcgctcccagagtcaacaggttcacccttactttccctgttctcaatgattttgggtgaacttatgtactaattgtctgtttcttattaatgcattcctttgttgtggaagtgagaaaagtactatttggagttctggtgacattataataatttgatttattgagatgggagtagaaacaaaaagttgccgttcgagtgataatagaggtttaaattttgcgtgcttagtatttattttaattttattgaggaaataatttgatcatagctatttttcgatggtactgctactaatgccgtctttttttttcttcatatgttctgtaagtggtttaggtcagattctttcgaaaaagatctgttttttcgttattattttattttatgctgtgaactgtagcttttgtggcataaagatttgtattttcgttattattttacaactgagaatttcttaatgttgcatgcaactttaatttgtaagattttgaagcacagattagtaaataaaaaggaattgagggctgagacaattggtttatgcgttttgctacttatcctggtggtgctttatatattttactcaatgataagaaaagggatactcagttctataatttgtgtttgactgcaggcagcaagtttggattctatcactttacttgttaagaatgacttcataactattgaaactctggtaagaataaattactatcttatcaggtaatattaattgatttatgttcttatacgtggtttcctgtaatttaggtcagagagatggaaatgtacctgaccactacagataatgtcattcgagctaggggtaagttgaagttgaactcactgaaagttaaacaaagattttgccttttatttatatggacaacacaacactcctcaaccgttacaaagttgaaacataatggtcacattttgaattgcataatgattctgtttttactttagactatacttggtgaattttactttaaactgctgttctgtttgtgcttctacttgagtcgcgtttattagtttttttggtatatcagcattgtacaaaatgttctaaaatttattcctggccgttaaccactctctctttgtctcgctttttctttctttttctcaaaagcttttatttatttatttatttattttaatttagtctgaaatctcataaattgtgtcctcatctttaggcactcttcttcttggggaagtacttcgacgtcttgcttcaaagccactagacagtgctatcattcatagcttaattggattcttcacagataggctggtgagagagcactgtttccccctatgctctttgttttaagtccctatgatggcaaattgtcacacaaactacttcattgattaacttttagccgttgctgtcaatgtattatttggtaatgatatcaggtagattggagagcattacgcggggctcttgttgggtgcttagcactactgaggagaaaaagtgatgttggtgtagtctcttccactgatgcaaaagcagttgctgaggttttcttaaataccctacaagtgcagtctttaggtcagcacgacagggaggtaagaatccaaatggaagaatcaagaagttaaaaaaaaaaagaattattagctttcatgtatagctgttccccttttccaaatttttactgactaaatttaacataaaaaattgttgcagctttgttttcagcttctggaatgtgtcttagaatgctatcccaatgaggttgcttccatggtattctttccaaacttactatcaaaattaattgctggatttttatcattctaacttcaattttattacttgtttttgactgatttgttatttgaatgtcaatgtttaatatcgataatttaaagttgcaaagctataatttgtgttctctcacttcatattgcagataaatgcttacattctttcaaaataatgattttagggtttattctttgtgagcattttctcataactagacactggtgctgaatagatgtcaaaagaacatagaattcccttctaattcttttatgttttgcctcctcgtggcatattcaccctttttcttttttttttttcccactttcagtcttaatctatttttttggtgttgtcaaggatgaactccttctatatggaatctgtgaagctgttgatggagagaaggatcctcattgcttattgctagcctttcacatcatttgtgcagtaattcaactatttccagatcctaatgggccgctagcaaatttttctggagagctttttgaaactttaaatagttactttcccattcattttactcatgtatggaagccttaccttcactatacatacaaattcataattatatttattaataaaagctctatgcaagcttttttttacttttggtttgctttcttaacattatccagccaaaaggagaggacactgatgtgaaaagagacgatcttgcaagggcgcttatggtatgctgtaattgaatgtatgctccattgctatggtgtatggtgtatgtaggtcttgaacatatttatgctatttgttatgatcttccaataaccaaacttttagcattctaacaatgaagcacttgtaatgccaatgataacaatgccatcatcgacataaatcactagtatagcccacccacagtctagtctatctcacaaatgccaaattttcttttcttttcttgtcagtctctcacctgcgtgaattatagatcattccttaatccttacatgtatagttcaacagaacttttttgcatgaccagattatctatattgaattcatcttaattgttcttgctgtaatctccccctttcatgtttccaaatattgggtttctctttctggattcctattgaattattttttttagtatatcttggatgctggcttagggagggataatatatctgaataggcgagcacaataagaaatttgatagaagtaggaaactgttactaaatgcataggcatctgtggtgaagatgactaatgagtgtttataatcaaatgaataaattctctctggtacttgaaccaaatttactagtttttaatctttattattattcgagtctcgagtcaagagcactttcaagcttgccataaataacaagggttgtaaaaagcacttttgtactaataactgagctgtacaatgtttttttgttccgcagatagctttctcatcaacaccacttcttgagccatatgtcattcccttgcttcttgaaaaactctcttcttccctgtcatcatctaaggttggtaatacaaagagtttatatgattacgaaggcaactgaattaatttcgttgctgtagcatatttgtattaaattccatgctgattctttatgtttgaaggttgattctttgaaatatctgagctattgctcactgaagtatggagcagacaggatgaccaaacatgctggagctatttggagttcaattaaaagtgaaattagtacttcagtaaaagagcctactgaagctgttacatcagaatcaataaatggtcttgggtttcaggaaaatgaaattgcagccgaagctttagtgctcctaggaatagttgttttgcaaaataatgatttatatttaagtttaattctggatgatgtagacataagtagcattttcaacattattacaagttacagaagatataatgatatcccattggaaggcaaagaaaggctacatgttgttggtcgcattctatatattacctcaaaaacatccattgtttcttgtaatagagtgtttgaaactttttttccccgcttggtgggtattctccaaagaaattcatccggggatcacttcctaaattttggagctctatatctctctgtggaactcctttcagcatgtagagatttgattgtaggctttggagaacttgcttctaactctttttcagctcatgaggcatgctgttgcatcattcggaactgttttgattcactaattcaaattctctgccccgcccttgttgcaactgctactgaggctgttcatgatgtggatatttactttagaggtaaatggtttgatttcaaatacatgttttttctggttaaacaagtaactgtttttattggaaaatacattttaaacacattttgtatttcccttgccacattattgaggggaggggtgagaactagattttttatgtttgggttggcttgtagaagatataaattgcacttcggtaatattttcctttgaattaatgtcatgagatgtaaaaagtctgcttgtgtaatttctagtaaattcgttttcttcttttaagttcttatattgtatattctcattaacagtatgtaaatttttaatagcattgttttgcagtaaagagcttgcagattttggctacctttcctgaaggtcacttacctataccaaaaagtatattcgagagtattttgacaacacttgtgtcagttatactcgtggatttcaaacagatgttgttatggaagcttgctatgaaggcattagttctcatcggctctttcatcagtaaatctaatgagtcggagaaggcactgagctatacaaatattgttgttgaaaaaattgtttcatcattgtctaatgataaatttaccctgccttttccactcaaactggaagtgttatctgaacttggtgcaactggacagaatcatatgctgatgattgttgaagggttggaaggggctatatttgccaaccttgatgattattttgtacgtaactttccatctaacatagtattttcatttgaaatttttggaagggtctgaagtttatggttttggttttgttctgttctcattcattttagtggttattttaattgttcactgaactcacaatctgtgtttaggtccttgggaataaaagttctgctgaattagcaattcaacttctgcaatgctattctaaaaaggtcattccgtggtaggtactcagtctaatgttccaatgatattgccaactaagaatacataatctccacaaccaaaatcttacctcacttcattgtgatattttgtgtcttctcacacacatgatgtatagtagattgcagttataatttatcctctattattatgaagacttatgtttgaatggtctcaggatccaggaagttgacggtctcgaggaagtcctgttgcgtttcatcgtaaacatttgggaacgtgttgagagctggatgtcccatagtattcaactccaggaaaaagtgtgtagatctactattgtcttttcttttttctctagttatttatagttcttaaaagctaattaggctaaagagtgtctttcatttctattctgcctctgtctggtttttatggttgaattgaaaacaaaacttcaatcaatatgctccaagaagtggtgaagttagatttctttctttctttctttctttttttgctttaggggcttcttaatgcaacaactatggcgatgaaggttactgttgcaagttgttcatgggaactccagaacaccataattcagaaggcctatactgtacttgcatcgaatacatctcttctaccgaagaaatctcctttgactttcattccagtcgaacttgaagggctacaacttactctgcatgcagacaatgtttctggaaaagatgaattattattatcattatttgcatcagtaattattgcaattcagcctagtgttgagattccaaatataaaagagatactgcatttgtttctgacgacactcctcaagggacatgtttcttcagctcaagcattaggttctataatcaataaacttggtacgaagtcatacagagctgagatgtcgaatggtttcatgttagaagaagccattgatatacttttgaaaacaagatcatggaatccccaagacagtggtgccttgagtagtgggaacgaaatgagtcttgctgaattatgtcttggttttgtgaaccatagacaacttcaaatcaatgccatagttggacttgcgtgggttgggaaaggtttactgttgcgtggtcatgaaaaagtaaaagatgttgtcatgattcttttggagtgcatattgccagaggggaatatttgggcatcaaatttgacacaggatttgcatccctctgtacagaaaagtgccgcagatgcttttcatcttcttatgagcgattctaagatttgtttaaatagaaaatttcatacaataataagaccgctctataagcagcgtcttttttccatagtgatgcctattctgcagtcatcaataaggaaagccgattcatcaatttcaaggtatgcattcatcgttactcactttagtattacagtcttgtcagttgatccttggtgagagtcttataatgagtaaattaaatgtgtaagaactgaggcagagtagaaagttgaagagttggtgttcaaagaatttaaaccaaattcttaaaaaggaactttttattgattacatattcaactgctccttcaaaacagatctatgctgtttagggcatctgcccacatcatctcagatactcctctaatagctgtcttgagtgaagccaataaggttagtgaatagtggcagattgaggacttcagagtatctaaatctctgtttataattgatgaatttgcaataaaataccatctcgttattgcagctgataccgatactgctagagggactatctattttcagtgaggatactctggataaagaagaactgtacaatcttttgctagtcttatctggaatattaactgataaaaagggtaaggttaaaatagatttaattagtgccaaagctaatcacagtaagctcacttttgtacgtgttcttgcaggccaagaagccgttattgagaatgctacttctattataaattgtttgactggactgatggtgtaccctcatatgatggtatttgattttcttcatggttgtttattttttaaaaaatggtgtggatgtaatgctttacaatttacatgtcattgctgaacttggtttactcattacccagttttcttttaaccagtatattaaaatagcatacactgtttgatcagcagcatgaaaagttgttgcatgcttgtagtgcttgcttttctgctatgaatatagatctggattacatcattttatattttatatggtttgtttccaaactacggtattttttgtattcttcagcttgtacgagaaacagcaattcaatgtctcactgccatgtctgagttgccccatgcaagaatctatccgatgagaccacaggttcgtaggtttctgcctttcaccttatgataaactttttgttggaattgttcaacataaaccatttcttctctttttgaatcataccttttatgtctatggtgcatgatttttcttataaatgctaccttattcaggtattgagggctttattgaaggccgctgatgatccaaagagatttgttcgtcaggaagctgtcagatgtcgacaagcgtggtcagttttcgggatccatcctgtgtatttttaatgtagatatttgtactgacattttggtctttaccatttttgcttcatttaattatgttgagccaattaacagggcatcaatcgcatagagaactttccattttttcaaacggaaaacaaagagcttcacaaggccagttcaaagctccaagttcctcagtcgtgattatgcagctgccagctttgtagtttgtatataaagttaaattttattttaaattatttattttttaattcatcttgagctttgttgcttggaagtgaagagaaaaataaaacagctaaaattatattccattgtatttaatttaattgatgtttgaaattttgttcccagctaggttatttttatcctacaatatttcgccattttttttcctttccccatttggaagttcttttctaatgtgtaagatcattaaaaatgttaaaaacttaaagaaattgcttcaagggtcgatgattctagaatatgtaacattattaacataacaccaaaatctaactgctgattttcaatgataacacgagagaaacaaggaacaaatagcatttgctgaaaactcactactttctctcaacactagaagaagtcgctttgtacaatatatcactatatcctttcttccccttttttttgtatggcatggtaatgtgtaaacctacaaataacaaattgcctgcctacagctagaaagaaacaacatatttggtatataggaagatgggagtaaagtacaaatatggcatttatgactcgctttcaaagattttggcgttggagaatcgcccagaacacagtaactatgctacaaaaattgagaaacttggtccaagagaagacagcttaatttgtatcaaaaatatttattcagacaaataatcttcagcaccactataatcgtcaacgtcttcatgtcgacccattttatgtggtctttcaagaccgtcttcaacatcagacccgcctcctcttttcaaattcgaaagacttaccccttgaatttgaataaacctaaaacaagaaaaaaaaaccatatcaagtcaactgaatcccactctaccagttaaagctaaaacatcaagtagatttagggccgtacctctggttctttcaattctataacagaagtagttggtctcttccttacagttactcttgaaggtgcagggaaatgttcgatctcatcattagatcttccttctttagccctctttttccttagaacaatctttgtgggaagaggctgcaaaaaatggactgtgtaaagacacaatacagttgtacgtgtaaacccactaaattaaggtaagaaaaaatcctggttcaaactgaataccaaatagcgtgcttctgtttcatcaaacgaaacaacatatgttgtggggtcatctgcatcatcaccacgtacatcccagtggtattcacgaacccaagaaaatgtaacatcttcagtttcatcatgaatatccttcgacaactgccagcacataaagtagacgaataaatatgaatgaaaagataaaacaagagttatggaagttgcttcaaagcatgaaaggtcggtttgttaaaactaaaatactactgctacgcaaaatgattatctttacctcatctggagcagggaccatgtaagccaaaaacttctccgggttccctggatctgagcctgtcaccttgtaactttttaagatggcctgaataataaatcatgatcaataatgaataagaatcagcatttttcagattgttaatagaacttcagaaaaacttactgaagaaaaattggtttaccatacaaaatcacaaatgagctgtaatttccttggatgtcgttataactagccaaattacctgtgattcgtgagcatcacgtgtagaatgatcaaacttgctgaagatctctgaatcgcctgtaggagcattatcgaatgccacaaagacgaattgatcgtcgtatctacaatagtaacaataaaaagaatcaaaccaaatgaaatcatcaacacttaatactagccatcaaatccaattctgtttaaatagttatcaattaaatgtcttcataactagcagcatcaattactgtaactggttctgttgccgtgctgggccagacaattacttgcatgagaacctatccaatgaagttcattaactaactaattattgtaagtgccagaaaagttcagtacctttcaaaatcaggcaacagaggcag

SEQ ID NO: 218157 - DNA, 2923 bp, Cannabis indica
atattgtagaagtaaaatgctatttctttttgtataattgctgcaaaatgcatgttacaaatttttatgtctataaatttttactgtttatttaatttaatcttgtatgtagtcattgcttctgttgttgttggttaatttaggtaatactgctaagattaagactcgcatattggtgaaaaagagtgttctagaggtatatattttcttgaaagcttgaaaagatagtttcatgaatagttgtagacctttaatatgtttagatggtacagtcttaaagggttattgcaaggggttactattggtaattgttgggatagatactgaaaatgtcatttttcccattacttatcctatttgtgagaagaaaacaatagattcttgggcctggttttgtgacctactggagacatatttggagagtgaaaagccagacctatatacattcatgagtgacaaacaaaaaggcttggagaatacagttggaagaattttctcatgatcagatgttagacacaagtgttaggcatcttcaatttaatttcaagaaggaattctatggtttattgatgaaatatatattgtgtgatgttccaagagtaacaactattgctgaatttgatagaagaatggcagaaattaaagaagtcaacgagtctgcatataattggttggctacaaaacatcctatagaatggactaaggcttatttttttgaaggtgtaaaatgtgatgtgctcttcaacaacttgtgtgagttcttcaataatcaatagttgatgtcagagataagtcaatcgtaactctattttgcaacaactattgctgaatttgatagaagaagggcaaaaattaaagaagtcaacgagtctgcatataattggttggctacaaaacatcctatagaatggactaaggcttatttttttgaaggtgtaaaatgtgatgtgctcttcaacaacttgtgtgagttcttcaataatcaatagttgatgtcagagataagtcaatcataactctattagagaagttatgatactagctcatgcctaggtttcataagaaaaagggagagtgtcattaagtggactgaactagtagggaaaaacataaggaagatcatagagaaatataagaggtttgctagaaattatttagtgacaaagtcgacagaagcgatttttcaagtggactgccccatgcactatgagttacacattgaaaatagataacaagacttgttgttgttgaaggtaccaactaagtggagttctttgtgatcatgcattatcaagcatatgtaaggaagggcatgaagtttgggattataataatgactgatacaagtaagatatgatcctgaaagcttatgaaagtgtgatccaccgtttgccaggtccaccattttggccaaaatctggcattaacccaattgaagtaccagaagaaataaatatgcttcgaagaccaaaaaagaagagaagaatagatgttgatgaaccaccacatataaatgcagcaatgacaagaagacatggagaagtgtataaatgtagaaattatggtgtagctagacatattgcaagaattgtcaaaaaatagttcaccgagttcattttatttgaattttttattagttgcatatacactagttttatgttgttgtttagtaactaattaagataaaacttagtggtttgtacgtcaatgttcaaccaacaaaaaggagaaggccaccataaaccaacccaactgatcaaaccaaaaagaggaaagagacattgaggaagcaaaggttgagggagaatattaggggagtggaagatgcaaatatataacttttcagtggaaatgataaagcattgtgattaactaaaaatgttagatattttgtatgcaaataacaattaagtggagatgacatccttttgattaattaaactggagatgacatccttttgattaactaaacttttttaaccttttgatgcaactagcatttaagttggagatgtcatccttttgattcactgatgtttacgtagtagatgtttatgtcaattatgtattgtggtgactaaatggatcgttatgtaatatttagaaaatatgaccactgtattttgtgaaggattttaatgcatttgatatgtagccaaagatgtttaattatcaatttcatcactaataccaaagatgcaacatattgtaacgtaattcattaactttgaattgtatcggatatatcctatttaaaattagatatcttgtggggattacactccataaaatttgttgttatgaacaaaacttgctatgagtaaaacttgctattaaaagacttaactattcaatatattcataacctattcaatttgttatgaactaatcttaataaaacatgctgtgaaaagactccataactattcaacatattcataaatcatttattaccatacaacttacaacttatttcataatatttttcacatctttaaaaaaaaaaaaaaaaaaaaaaaaaaaaaaaacaaccccccacacaaacacatccattattaaaacaacattttaaacacaaaaattacaattaaaaaactaataaacaaagcacacaattacctttcttttctttaatcacaaaggtggtttcattttcatctccaaaattatcatctctatgatggcaactacattggctcctaaacattgtagagggacaatcgccatgactatcatcatagctgcaagatggagtagatctttgttgctgctaagaacaacacccactcataaagactttccctccatgaatacaacatccagctccaaaattgggtgaaacacttcaggatccacccactaaaaaaacacaatcatgttgataaagttacaaaaatcaaagaccaattatgttattggtacc

SEQ ID NO: 218158 - DNA, 8426 bp, Cannabis indica
ccccatgaaatctctcttccccttcccgaccttaatcctaacccaacccctcttagcgccatcacggacccggtgccagttccgagctcgattcaaatcgaagaacctagctccactcacaatattctttcattctcgatccccaagaagcggagacgaggcaggcctcaacgcggttcaacctccttcaccattcctcagtttcctacggggactttaaaccctagtagtaactattttccttctacttctaattcatttcgaaacggtgtaggaaattctaattctttgccacacactgcactagatacctctgatgaaatcattgttatcaatagagaatccacggctgaagcggtgattgcgctgacagctggattccctgcggattccctaactgatgaggaaattgatgctggggttgtaccagtcattgggggaattgaacaggtaaattacattctgattaggaatcacattattgcgaaatggcgtgaaaacgtgtcaaattggattgcaaaggatatgtttattggttctatacctaaacactgtcaaacccttttagattctgcttataattatctggtttcacacggatttatcaattttggagttgcaccggcggtcagagagagaattccagctgaacccagtaagcctaatgtggttattatcggtgctggatttgctggtttagctgctgctaggcaaatgttgcgttttgggtttaaggtgactgtgttggagggtaggaaacgggcgggtgggagagtatatactaagaaaatggagggagggggaaatagggtatcggctgcagcagaattagggggaagtgttttgacaggtacatcaggaaacccgcttgggatagtagcaaggcaattaggctcaacacttcataaggttagagataaatgcccattgtatagtttggacgggaagccagtagaccgagacatggatatgaaagtggaaactgctttcaaccggcttttggacaaagccagtagacttaggcaattgatgggggatgtatcagttgacgtttctcttggtgcagcattagaaacattcctacaggcagatggggaggcagtaaatgctgaggagatgaacttgttcaattggcatcttgcaaatttagaatatgcaaatgcaggcttaatttcaaagctttccctcgcattttgggaccaagatgatccttatgatatgggaggagatcattgcttcttgcctggaggaaatggaaggctagttcaggcattggcagaaaatgtaccaattttatatgagaaaattgtgcagacgataagatatggtaatgatggagtgcaggtagttgctggcaaccaggtttttgagtgtgatatggcattatgcaccgtgcctcttggggttttaaagagtggctccatcaaatttgtcccagagttgcctcagagaaagcttgatgggataaagagattaggatttggattgctaaacaaggttgcaatgctttttcctcatgtattttgggggacagatcttgatacttttgggcacctttctgatgatcccagtcgccggggggagttctttctgttttacagctatgcaacagttgctggtggtcctctcttgatcgctttagtggcaggggaagctgcacataattttgaaagcatgcctcctactgatgcagtaacgagagttcttcaaattctcaagggtaatgtattatcaaaaataatttataaagctttattttcattttaatttaatacccagttttctgacttactaaatctggaagaagataatgcaatgaatccgacacaattccatcattcactatccaatatatcatggatgattagaaaataagaaaagaaaacccaactatttttcatgcatgtaatatcaggctcagctgttcagggttttgatgctctcatactttcactctaaatctatagtaattattatcaatgtgtatttagtatctaggcactttttcttgtaggtatatatgaaccgcaaggtataaatgttccagaacctatccagacagtatgtacgagatggggaagtgatccttttagcctgggctcttattctaatgtcgcagttggggcgtcgggtgatgactatgatatcttagcagaaagtgtgggtgatggtagattattctttgctggggaggccacaaccaggcgataccctgcaactatgcatggggcttttcttagcgggcttagagaagcagcaaatatggcgcgctatgctaatgctcgatcactgcggattaaaggtgataggagtctatcaaagaacgcccattcttgtgcctctcttcttgcggatctatttagggagccagatcttgaatttgggagtttctctgttatttttggtcggaagaatgctgatccaaagtcaacagcagttttaagagtgacatttaatgaaccgcgaaagaagagtcaggaaggttccacacctgataagcagcattcaaataagttactttttcaacagcttcagtcacattttaatcaacaacaacaactgcatgtttacactttgttatcaaggcaacaggcacttgagttgagagaagttagagggggtgatgagatgaggttaaattacctctgtgaaaaactgggagtgaaattggtgggaagaaaaggtttggggtccactgctgattctgttattgcctccataagagctcagaggggtaatcggaagcctacttcgacttcattggctctaaaaacaggtgagtgggtgcttaaccaatatttctcttcaattactattgttacaaagtttaataatgttccacatccttttgtgaaggtacatcaaagttgaaagctggcactttaaaacggaagttagtgaggtataagctgcaaatcataatattcttattgcttggatgtctcaagtatcttttcaatgttcttctcccacgtattctactaaatggatgttaaaatattactgtcccttatttttaaattcttagaagggcaaaaatagtgcggagtggcaatgggatggcaccttcttctggttcaaacttggtaaatgacaaagtatcggaggaaattagggctacacatcaagcatcttttgatacacatgtgtcaggtaaaacattcaagggttttttacagttatgggtggatgtgtcttggaccatggaccatctagcaatagtgtatttcatctcttttgcagattatgaattctcattttctttggttgaagaattattttattgtagttactgtcagttattttttgtttccttatggattttagaacatatgcttgatatttttttcgtgaaagttgatgtcaaagttctcaacagatctaattttgtttgtattttggcaggccaaaaatcagggtaacatgtagagcagtgaacataatgccacatcttgttaagaggtgagtatcacactaacttctacagtcaccaaagtctgctctctttccccatctgtaaatgttggattaccaaactgttgtctttactagaaattctaccatctcaagttgaattgcaaatctttgagtcatcgctatcccttgtgatgacctttctgctttagagctttaatttcctttcccatctgccctttttctttttgatctttttcagatggggttgtagagttttatggaaagtgaagggacatatgtgtgaatatttttctttttagcatataaggggaataaaagaaaaagaggaatggagaaatcagtttaaaaatgtttcagttaagctgcattctctctctaatcatgttcactatggacaatatcagaatatcctattgggtgaagactttctttataatggtttgtgtggtaactggtaatgttatttggattggtcagctggagtacatgccaactccgaagacggtattcaatcgacgtccattgtgcctgtgaatatctgaggccacaggtgaatctccggaaaatttccccagtaaaagaaaacattcttgcaatgacacttactgacaagcttattgtgcattgaaggataggtcctgctaaattttgggatcctaatacaagtgtcgattgatgctctagtgataaaatattggatttggaagagggtattcatttttaggatctcggattggtcggtgatttataactactgggacaccttcagtagatgtaagttatacaactgtacagataattttgtaactaactataaagcaaaaatatgttttagactagctctacgggcacttaaaatatttattagaatagttgtaccagtagttttatgaaggaagactagtacaatgatgttgttaactaccaccattaattgagctatgcaaacaaacttaaaaaggaataggtctattatttcgaatgtatggagtttttttattattattatttttgaataaaatgtataattccagtggatgtttccttcattggagttttttacttttcagtattttagtgttttactgttaatcaaaccagagacgtggtggtatttattcaaattttgtggaatgttgctgtcgtaattattataattacaaaaaaaaaaatggaagaagatgtggcttttaatttctataatatggactaagatagctaattgtaattgtagtgacatgaaacaacatctgttgggacttgggttccaaaatttaggttgtttgcttattaattaagttggagaatttgagaaagcaatatattaacacaattttattggacaatgataagagcattcttattgggtgttagtggtacttaataatttttagacttgtcgtcttgtgattggttaactataccaataacaatattaacatataaaaaggtattaaacatcactgagagcttttatcattaatgatagtcataatcatagcataaaacaatcaatcacttattcatttatgagcattgatattgggcagtggtgcccaataccttttataggtgacattccttaatttttttttttttaagtttatataagactcaatatttaattatatcaataatactataacaccgaggatagtggcactaataatattttttagtaattctctttatttattgctatggagacaaattttttagtttagagattttagaacatttacaataaatgttttataatggataattttatattttaaaacaaactaactaaaaagtttgctagttatttattactctactaaatgtgtttaagttccaacttttgtggatgtaaaatatcaaataatttaatgtacaaatcagagtaagcatgtaagcatttagttgtacatatatctttgttttattattttttttatacacatgcaataactattttaaattctgtttttagtaccatacattatttagattttttttttttgaaaaatggcaagaccctgtaactttaatataatctttcatataaaaaaaatgtggaaaatagaaacactctacctatagaagtaaaagtgacacttgtattatcattatggagccaacacatgggactggataaattgtcctgtcccaatctttagtctttaagtctttcccaccaaactttacacgccctttatgaactatcattattggaagtttggaacaataaacaacaaaattaaatggaataaatataaataaatacatattatatatagtgtgtatatacatttacacatatttcaattgaattaaataaacaaaggctaacatcaaattacacaacaaaatgagtaatgattagaaaacccaaccatagtaatttaaatttgaaaagacatcacattattaacatttaacattatattaaaatatatttttttcaattggtatgtttatgtaaaatttccataaatataaagctatcacagaatatcaaagtttagttgcttctcaatcactagcacttttctgattatccatgttgctattcccttctaaccactcctctagttttgctgctttaacagccttgaactcgtcaaagtcctctgactgtggtaccaaattaggagacggtaaagtcgcgtctatttgttcttgtgattcatctgtaatcttacttgacaagggcagttcatcagcttccacatctggctgagatgaactagtgctagcagcagactcaactgataaagaccggcttggatagaacatcgacttgtcatccttgctctgcagcgactccccagaatcaagttgtggccactttatgttactagctttcttcctagcagatttaaatacagttgaaaggtagccacttttttcaccatctagctggtcataaactcccgcacgaccccaattggctggtccccaagagcttgttttttctgcctgaaaacttgatctagagtcatggatcaaccctcttcttggttgtttagtagacatgatcaacaaagatttctttatatctctgatcatctcatctgcaatggggaatccacattctttcattgatctcaccatggttattgaatcctctgaatcttcagtgtgcaaagttgtttcatgagacttctctacaacattgtttctgagctgaattacagccggcactgcattctgagtgtgctgctgaacatagaaaagccctagtgagggttcatttgcgacgtacttaatcatctctgccaaacactcagttatatccacaaagccatcaacagttgagaatccatgcattgtttgaggaggttcatcactggttttgtcaagaattagaaaagcctactatcaaagggcgtaaaattagagataaaaaagacatatgaaaatagaattcatagaaaatttataaactaattgctctttgcctaaatggtatagtgtagtaacatttcatatctcaacattttttgaggaaatatatgatgaaaaaaatgtgattatcaatgatgataaacataagtagaggataaaaagaagggggtagaataggcacagcaacattgcttgtttcagcagcataaaaacatgaacttttgggttactaaaaaactagaagtacacattttatattgttattgccaacagagtttatattcaaatgagccacacatctaacaaaaatattaagttgtcattgttactaataatcctttattctacaaagttataggttaactaaaactaacaaattctgctaaaccagtccgtttctcattattaagttcaataaaaacacacatcaaagcgttctaaaaattaagaccaacattaaattgcatttgaaccaaaccatcacccatttcacttaaaaaaacaacctctctttttatcatgaaagcatccctaacatctcagcctgaaacttgattaggatcctcaaaactatcgatttcatgacttaacaactttcacttatccttagatttcaaataatacttatgtccacaggtttagtgtctagataacttacatgttctcacgcctccccgagtgagagcattagcataaatataaatccaacatttttttaatggaaacaacacttgaatttcaaaaacacgaaatcaaagaacagaaaaccatcccttaaaaaaaaacccagaaacccatgaaactacaagtgcgaactacataaacaattttgaagcccaacatggtcatatgcagtttactaatgatgaacttgtataccaaatcaaaataacaccactacttcattcttcgctagttagaaaaccaaaagtgggattggaaaaaatattgatttgtaggtcaacattccaggttctaaacccacactctgccggaaaaagcatatattgaaaaaccattgattttccaaaaccagtgctgcaagaccgaatattgtgcaatataatcaacacccatctcaagaaatcacgcaatcagttcccagaagcatcattatgaatcaatttgaatccaaatttaagagcctaccaacgcagagattcgataaatacaaataaaaaaataaaaaagaataaggcgatagagataacttacagaaaaaccctagagggtgatatgttgattgtgtgagaaggaattaaggagtaaggagtgttttagagatggaacatggtaatcgaacacgaagcttctctcttcctatctgacatttgtttgtttctgatgtttttattttgtttttcttctccaataaatactttagctacaagttaataaaccaaaaataaaataaaagatttttttccttttttatttaactacaaaagttagatttttattaattaattatgtttttaaaaaattgcctaatctctattagttgaagatgtcgtttttccagaataatgtcgtttttcagagtttctttttttcttttttcttttttccagtaaggtccagactccagacaaaag

SEQ ID NO: 218159 - DNA, 5448 bp, Cannabis indica
attttatagttatttaagacatcgtaaaattttgtttttgaaatttaacacactgaaaataagatttaaacagtctattttgtgtatgagcctcttttattttatacgcgtgtgaaatttaaggtcgggtctaaactaaagtggactaagcccatgcctaaggccaacccaggctagtgaccctcaaaaaaatatttttcaattaaaattatacatagtttcgaaaataccacatatttttttttttaaataaaagatctaataattttttttcccctaaagtctacttaatcttgggaccgactttagtgaaattgactgtttgaactctatttttggcgtgttaatttttttaaatttattaaaatattgcaggatatttaaataagtacaacgtaaatgactatgaaaaaaaatagataaaaaacttttagggatcggtggacttttttaaaaggggtgtattattaaaattttttaacttttttttgtggcaaatatacccctaaacttttgttgaaattacttgaaatgaaaaatgaaaaataacaaacaaaaccaactaattttgtggacattgcggccacgatttgtgtttgaacagttttgtatgattttgactaatttcgtcaaacacgtaactgtttaatataaaacgacatgtcgtttttatatatcatatattctttttctaactaaatggggattaggtggtgtaaattcatttccgactcatttccgacgcttttgatcattttgacaatttcggagatcacgtgtcggggccttatacatcagtttgctttaattgggttatcaataattacttaaaatgttctcatcacacgaatgacaccacctacaacaagctagtctttagaaggatcaagcctttaatctctttcgagagaggttgtagtgggtttcgaacctcgacccaagcaaaaaagaatgttagtaaaaacaatccttaccactacaacatacaacacgtggtatataccatacaatcttgtgttccaacaatctcagttttttttttttttaggaaaaatgaaatgaataaataagatatatttcccaaattatgatttttgtagagttttgcccctgaacttttatctgttgcaaaaattttcactaaactataaaaatcgttgcaaatgtctccctgtaattgtattttggtcatttatttaaacaattttattgacatagaattaatataacattaatttagcccggttgaaaaatccagacaaaaaataaatacataaataacaatctaatggtaaattatgagagtatgtatgtgtattcttaaagttaatgtttgtatgtttaatatcaataaattagattttaggtagcttaaagctattaaataagtcattgtactgcaattatacatgtaactcatagtcacataactaaattattttaataaatgagtagaatgtaattggatgtggatatttgcaacaatttgcatagtttggaagagaatttttgcaatcagagaaaaaattcaagagataaaactctactaaaatcatagtttaaagtacaaaaatcttatttattagcgagtcgaattccaacactacatcatgctagcctttcttttaatccaactcaatgcttttttgatgccaataacttctacaatatctagagctaccacgtcaagtcgacgaatctaacatgctttcaatgatctctccagcaaaattttgagctactatattagcaaacaaagcagcatcaacattaactttaatcgtattttctaattctttgatccaatactcagctccatcctcatttagtccgagatagtagaatatctcttcttcgagcatttatccatggacactacagcactaacaagtggtattttttccttccaaaccacaatcaaaagtcgaactcctattccacatgagtaggatcctccaattttgatatgcaccgccaagattttgacacgtaccgaacaatttagtaaacaacataataaaatattatttttagttattttatattttaaacccaacatttctctcattgattattttgattccagttatagtttagtaaacctgccatatgttaaattaaatataatccttaataatccaaagtaaactatatttatcaacttaataatccttgttaatcttcaaaataattatagttaaatatatgtatgtacaaaaagagcataaatatagttgaaaattctcaacaaagcaaaacagctgaaaattctcattgcatcccaaatgtagagctaggcattagtatcaaatctcagtatctgattttggttttcgaggccttcccctgtcttgacgtcggggttgttgctctttctgattttgaacacaaacccccgaaatcgagtcttcatcagtcttcggtttaggaggtcttcctcggcctaaacattttggtaacttctctttcatttgtgtttttggtttagaaggccttcctcgcttccttagtgctttcggtttttgctcattttgatgtccagaagatgcagcagattcagaaacagaaggaagcattggcggttccaaaatcgttgtctcggggactaatgcaggtatgttgagtctattatgggatctcagttgcctcttctgaacatgacattgatcatgctttcgtttcaatacgagacataacttcttttcgaatgatttaagcccgggaaaaacttgcataataggaagctctgaaatctgttccatattgatctgctcgcccttactactcggatcattagaaggggtaatggctgtttgagcagatgctgatcttgttttgcaactgaacctgattttgtatagttgttgtttctttttcactttagtatgttgtgtttgaacatcatttcggtcaaagctcattccaggctgttgttgttcttctatcacttcatttttttgctccccatgttcaacattttcatcattcaatgcagatgctgttgttgttgtatcgtaactcaacttcgattcttcgtcttgctgctgctgctgttggttttgtgcctcagccaattgacatgttttatcaactagtttagtttgttgttcttcagtcacttcatactgtctttcctcagattcattgtgttcttcattcgatttatcattttcagttcgcttcaagcttattccaagcggctcatcaaccgcttcattatgtttttcttcggtttctccttcattacattctttgttcaagttttcactttcatttctttcaaccaaaacctgaggctgttgctcttcactcatttcattctgtttttcccccgcaacattaccttctttgttcagtgtttcggcttcttcatatttttctttggtgatttgttgtactatttcttcattgttcactaccaagcttgttctctgcattgcagcctacaaccatttaagaacacaatcttaaacgaaacttatgttcgtgttggaatcgaaatctaggcacaaactaattacaggtccatccaagagttgagttagctcacaatcaatgtctcgaaaacttactaaaaatcctcatatcacttacaagagttagggcgacactaaaaaaccgctaaacttgtattcaagtgttccgaggaggctcttaacgatcttctgattttctagaaaaaatttgtacttgtttgatttggctccctacagtttctctatcgaatgtataccgaaaatactaaataggaaaattgttcataaatttcctcaacaaaatgggacccctttaaggacaaaacatgatgaatgatgagatataatcctataacaccactcattaaatgtttttaaacctaagagtaatcaaagataacatataggaatttttaattgtttccccacaaagattacaaatcaaatgctattatttattcccaatcataacttatcaaataaccattagcaaaccaagcaatacatgatcatttcatggcttcttagaccacttcaaagtacacaaatcctaaccatgtccaatacacaagactttccctaaactaatagatagccaagcaattctaacaaagaactttagaaccatgctttagctagctactcaaattatcaaattatgaactgttacataattttaatagaaacatatgcaaagttccatttagaaaacaatcatcataaaggaattttaccccttgatggtagagtggctaaaccagggaaaacgaaaaaaagaaatagtattgaaatatatttttattgaccaatcagaattgcctgaatctaatcaaagggaagaaatgagtttggatattctaatgatttagaaaaatgtaaatattataaaattggttaaaaggagaatattatttatcgaacctgttcgtccatctataagaaaatgaaggaaagtttactgtatatcaaactattaggtatttcagtgtgttattagagtgcacacacgattgatcaaaggtaccgaaaaaatatgctaaaatcacaatgccaagcaaagatgaagcacatacctcattttctacatcattcacttgtctttctaacttagattgctcttcagcaatttcggtctcctcttcctttcctttgtcaacattttccaccaccgccacctccctctgcacttcttcatcttcccttttcttttgctcatcattctctttaatgctcacaccctgctcttcaattcgtcttcctttcccgatctcttcaactgccaccttcattttgctttgtgtccccactttcttccccgattttcgacccctttttctcttcttcgactccaacccctcatccggaagaatgtacactccatcattcacaaacaaaacctctcttctcccacaaagttttcttaaataatgccttagaaatggaccaagtgcaaaaggcataacacaatattccctctcaataaactcaaatatttcctcataacttgatccatttccttcatttaactccattattgccctaaatatcatctgttgtttcataacacaatcaccattagcattctcaaaacctaaatttatccccaattgcctaaacctatctaaactacctaaatgaaaaccaaatcaacccaagttcaacatctaattattacattgggcatttaacaaaatgcataaagttatgatcttttaaggtatgaaattcacatgaatggtaaagttaaagatctaacattgaaaaccaaaataacccatgttcaaaggttggatttttctcacataaatggtaaattaacagcttattattacatgggcaattaacaaaatgcataaagttacgatcttttaagatatgaaattcacatgaatggtaaacttaggatctttaacaaataaaagttagtatcgaaattacaagaatgtgaaataagagagattagattaccagg

SEQ ID NO: 218160 - DNA, 2889 bp, Cannabis indica
ttaaatagcttataggatttatgtgtttaatgtctgttgcatgtttaatttatcacgagagtagaaaatttgcatgtaattgagatttatatatctgagaagattataaattaccttagtaaacctgctattgcatagaaattggtaataggaagataatcatattaggtcataatcagtagatacaattgaagtcgaagccctaactttaatcactactaatttctcttttgaattattttctttttaatttcgttgtctctttagtgttcttagatttaattttctcttaattttgaattcaccaaacagaagtaaagatttaattttaaagtatttaagtacaatccttctgggatcgacctcactcctggtgaggctattacttgttacgatacgtacacttgcgtgtgaaaattaccacaacagcaacactgccaatgccatagtctaatcctcgaattggctcacctggtgacacaacagcacccctacctccactcacactaataccacaagactacaccacataaacaccagattagaaagtggtattcacaaaccaaaagcttatactgccaccaaaaatctacttcctaagtctattacccactgaacctaagtcattaaaagttgccttcaacagtcctcaatggtttgcctccatgaacactgattttactgctttaaagaaataatgcacttgggcccttgttccatatgagcctcacatgaatgtcattggcaaaaaatgggtacataaagtcaagttaaacagagatggctcctttgataggttcaagtctcaattggttgctaaagggtaccttcaaacacttgagattgattatgaggacacattcagccctattgttcaaccagtaactgtttgaagtgtcctaagtcttgtagtatctcacaactcgccagtcaaacaactagatgtgagtaatgcatatcttaatggcaccctccaagagatagtctatatgcaacaacctccagggttcattgatcaaaaccagcccaaccatgtttgtcttctacataaagcactttatggtcttaagcaagccccaaaggcttggaatgacaagctgaaacaaacattatatcagtggggtttccatgcatccaagtcagatacatcattgtttattcgtgattcttatggcagtctaatttatctcttggtttatgaggaagatattctcatcataaggccaaactcgaagttaatcaactccattatctctaatctcgatgctgccttctctctcaaagatttaggtcttgttcactattttcttgctgtggagatttacagagatgatacaacaatgtatttaagacaaagtaaatacattgctgatttattaacaaggctacacatggagggagctaaatcctatccaaatctagccaactctactgccaaactcagcctccatgatggtgatccctttgaggatattagcctctatagaagtacacttggagctcttcaatacttaagtctaaccaggcccgatgtttcctttataataaataaactgagctagtttatccatgcccataccattactcattgggaagtatgtaaatgtttgcttcgttacctaaaaggcactatctcggatggattaaagcttcaagcctctgatagcttaactctttacgggtatagcgatattgattgggcaagttgtgtgggtgataggagatcaacacggtgttatgccatgtttttaggcaagaacttcgtgtcgtggtctgctaaaaaatagtaggtagttgctcgatctagtactgagagcgaatttagagcattggcaaattcagcagcagaagtaaaagtggattacttttctcctatctgaaatccaagtttcattgccacaagcacccgttttatgggtggataatcaaggagcaacaaccttagcagcaaatcccgtgtttcatgcatggtgcaaacacattgagattgacttgcttttcgtacaagattttatcattagtaaacaacttcttgtacatcatgtacccttagtggatcaaacaacagatatccttactaagtctcttacaacttaccgctacaattatcttaaaggcaaacttcacatggaaaaatcatcatttcgttttaggggagatgtaaatcaataaacttgtgtttgttacaagttagttggttgttgttgttagttagttgtagtctttctatttatttaaaaattctgttatttgacttgccttgtaattgttctatataaataaaaatatatcagctaactattttggttaagctctttttggctatctctgtttcttgctatgcattatttttttcttcccctcttctctgtcaccttgagcttctacaaccatcatttccccctctctctctatcatatttctcttaatttctccctccctctctaattaatttttgataaaaataaaaaaaataaaaaaaaaagccacgactgcccaagccttcaattctatcaccagatttcctactttcggttaaggtaacctccaacttttattttaatttttatttgtgtatagtgatttggatttaattttgtgtatatatatgtatagttagaaaatatatttatatgtatgtgtgtatatacgaatatgtgtggatatatatgagtgtgtgtgtatttttgtgtatatatatgtgtatgtatgtatatatatctatgtgtatatatatgggtattttacaattttgtatacattattttaattaattacaaaatatgtgcaaaaaaacttattatcattttctcatacatttttatatataactaaaaactttttttcaatttttttttataatatgtatggtaataattattgattatt

SEQ ID NO: 218161 - DNA, 2538 bp, Cannabis indica
ctaaaaaaaagacctaacacgtttttttttcttattcacatcaactttacattatttaccccggcacaaatcattcccactcattcaatcaaaagcttatgacatcattcaagagaaaataatttttaaaagaggttcaatagactcaaatagatgtaaaacaataaaattatagattaaaactcaaaaaggaaaattagtgattaaataacctaagttagcatgaaaggcccaatcgtttcaaaaaaacttaaatcattttcctaaacatgtgtcatctaggatttgaaatagaaggcaagaaagttctaagagagctacattttgatttcattttttttcttcagaatattcagcaagcataaacattttcaaaaaacaagaaatttatccaaaaatcacgattaagctctcaaatatttacccaaactcaagcaaactaaattaagatttcaattaagcacacaaattttaaagtggcatttgtttccatccaactattcaaataatttattcatgtattctcatcgaattatcattatcagcttgattcacacacaacttaacttgatacaaaaacaacagtaaaatacaaaacatatgagcaaactaacccaatacataaaaagtaatatctaaatcccttcctcaaacttaaatttaatattttcccaatgttacgataaaatttaagggaaaaaaattacttgacattaaaaatctcacaaggatggactgacattattaccctcatcatatgggtaaccaaactttgatgatggagcttggaagtggaaattcttagaatttgaagaaatattaatagaggaagatgaagaataataatttagaatgagaattgtggaatggaagaagaaaatacaagaagaagaacaacaacagaaaagatttttttttggaattttcttttttgaaaatgggcccagcggttttgccaaacccctatgcagctgcacaactctactggaagacacttttttggcgtctggtgtgagcgcacaacttgctccatttggcttgtgctttctactggtacgggcatgccaaacacctatgcagttgcacgacttgcccataaactcaatttttctatttttttagggactaaagcttttgtgtgcccataccaaatcccatgtaaccatacaactttcccacaaatgcttttttttttttcacgtattgaacgattcaacctttacaaaactaatgaaaaataaaactaaacctataaatgaaataaaaattaaaataagttccataataataacaattatgaaaacaaaaacacacaaaaacaaaataacgaaattgggttgcctcccaataacacttaattaacgtcttcagctagacactctctcttttttattctcaactcgggtcaagtccacctcgtgcatccttaagtgcaaaagtatcataagtgaaaattcttcttttgacgccacaaattattggaacatttaccctctcatataacattcgagccttcccactaaaaactcatttccaacaatgacgaactgcttgactaacaatttcaacattggtttttctcttattggtttccaaattactaacagcattatataccacatctactctacaacgagttgaaatatcaattgataccaaaacattaaatattacctcttcgttttgcactcgcacctttaattcccccttttgtacatcaattattgtccttctggtagctaaacatgccctcccaagaatgatcagaatatttgcatcttccttcatatgaagaataatgaaatcaactaggaagatgaattcaccaattttaccaagacattatcaattactgcctagggatgcttaaccgatcggtacgccatgtgtaacacctttttacacacttaatagaggtggtaattgtggagattaccacggggccttcctcacattcgtcccgtaggtagctcttcctgcattggtactgcaacattttgagtcactcaagctgcagttatggcccattctagttcctcatttcttcgattggattctacgagcctccaatggagttgtcaattttctaactccacaatggggacatatcctgtggggtcatatgcatttgacttccttctcttagaaattttttccttagggccacttctctcggagttcctggtaagatctcatccttggttggtctgagtttgtgccccctagggctccttcttggttgacgtgtggtctcttcttctacgattggttcatcaagttgagtatttttcatgatgaaatgaaacaaggggagatgtgtttcaatttttttttctattttttacaaaggctctcaatgaaagtaccaaactgtttaagtcatatttttgttaaccataaataaagccttataaataaaaattaagtatttataattaataatatatatatgtcaaacactaagatttttgtaggtagttttgtaattaaaatctacatactttacgagtcattattatttctgagcatttcttggta

SEQ ID NO: 218162 - DNA, 3150 bp, Cannabis indica
gacagtacaaacctgcaaaccctgtttgcttatttagatactgattttgcatcatgtggaactactaaggcaaaacccatatgactaagagcaaataccagaagttaagaataggaacggttctaatccactaatcaaagtgtgattttactgcagaaccaggcattcttgtgtcccagcaaccatatcagggcgagaattattgaaagaggcatccacttcttcaatagtttcaggatcaggtttggcttccggctcctgagttgcatcttcactcccatggtcaacagaagtaatggcttcaaatatgagggccttgacttcttggaacctttcctctgaaagagagacctcagcaagtagcttccaggcattttcctcagatgcctcttcgtagtccttcttcctcttcagcaccatgtgcccactaatttcccacacagcaggattcacttgagtgtccagaagctcagcactcacttccccaagagcttgtttctccgcataacactgcacatttatatataccaggagtatgagtatttgcaccaattaagcgataaaaacatatattgaatattaatggacgaagtcatgaaatatttcaaggattttgaactaattacctgtggcaagacaaagatccggtttccacaatcagcaataaggacgttgtatggtatgttattgtcttgaaggcaaatgcaggcatcagagactgcgttggacaaatgctccacagtatttcccccctcaaagacaagccccctaacaggatagttcactatctcagagattttcacaccaccatccagactggttgttttcttggtgggagccttctcgatgggaaagggtacagccaaatagtaagcctgttcagtaatcaaaaccgcatttaagtaacttataatttgtaaaaatacaaaaactgaggatcaatgtcagatataaaattcaagaatctatgagcaaggcataaagtttgaaacctggaagtgaaggtgattgattgtggcaaaagcacctaagctgttgtaacccagccggaagtaaggactcccagcttcagcagccatgtgaattgcaagcaacaagctttctcggtcaatcctttgtgggaaacaatcaagaatgcgaggaatcaacagcacatgcccatattcaataggactgacctgttaggatatacataacaaccaataacttttcaaaatccacgttcacaagacttcttataactaataatccaccaagaaaaaaaaacatacattgatggcaacaacacttggagaattctcagcataaatgggtgcatttggtatgaactggacgtcaccatcttcacttgcttcaaactggaagagcacctcctcttgtccaactttagtgaaattgaacttgctctcatcaaagggctgaaggaccttatcaacccggaactcagttggcctcttcttcagatggcggccctcattcagttgggcaatgaaaccatactgaccgggaatcacctaaacaaaagaaatcagattcaattcattaagttcaatatggaccttatgcagctcggatattgagatcattgtaacaaaactgaggagaaaaggatgaggaatctagaacagaccttggtttcacaggcagtgacatcgtatcgaaacagacccctctgcacgcgttcctcccactgcaaggaaccacacaaaccatattaacaaacaacaatcaactacatccaaacaacaatcaacagtttgaaaattcgatcttcatcaacttttggcttgtttacctgcccgagaacaagtgactcaagaaagtcaatggaagcctcttcttccacctgctccggtgagccctcacaagaaaccttgtctagcttcttgtacgcatataatggaagttttgaccctattaagcatacaacacagctataattcaatccttgaccaagtagcaggcacaaagatttgattttaattttattttaagaaaaaaaatacaaacttttttcataaaagagtatgagcaatacctggaaggcaacagcttctgaggcagtttcggccacaacctcctttttgggcctcttcgttctcatccttttgataattcgaaacaacagtaggaaccctcttgatccttagcatcattttggcttcttttttctttttggtttatatatatcagtagattatacacaacccaacacccaactcaattcaactttaacccaaaccccagcaaaaaaaacagacttcgcttaatgaaatcaatggagattttacttgctctaaataagatttttttttttaatcttactagtctaaaatctaaagagatgaaaagaaaaacacaatctaatctaaaatactaagtaggtagagaaagatgaagaaccaccacccgcaaggaagagaaggtcagaaggactaccgccttcggacggcaaagcgccacgcccaccgtgcggcgaagggttgctctcaactatacaacccctgcgtcgtacagagcggacatgaatgagaggccgagaaactctgtgtatagccgtgatgtctacaacgtgtctatcctgggtcttacccctctcaaagatttcaaatctatcttctcttttttcttccaacgaatcccaaaaaaaaaccctctttctcaacccaacaagtaaaatgttttttttttctctctaaacaaaatacaagaaacccaggtgacagcaattcccaaaaatgctttcttttcacacgtcgtccaagagattcaggtcgaattcaatggtacccagatgggaatctaaggagattgtggaaaaaggaggcaaatttggcaaattggtaaaatgtttgagaaattggttggtgtcgtggagaaagtggaggtagagaaggctaccttatatagatagagataagatgttgtgaacgtattgttgtggttgtagttcagcctcgggtctctagtacagttttcgtggccttagtttgagaagaagacaattattgaaacaaaaccaaaaaaagatttattttttttttctaaaataatattttcttaagattaagaccgaggatgcgagttgctcgacccaaaagctttttaccgtatggtttttctttttttttttttagcaaaataccgtat

SEQ ID NO: 218163 - DNA, 2291 bp, Cannabis indica
agcgtcagcctagttatagtgaaaagtcgcccactttgatagttttggtgggatctgtatcacagtgttgacctcttctacatcctctggcagctttatcactctctatatcccaaccctaggatctaattcatcttcatactcttcttggatggctttagcttccgcttgaacggccttttcgtgagtaaaatctatttctccccgcaccatgaacacggatcagacacaaacattgtaacaactacttgcactcctttggtcacctctgaccactccaatgctttcgttgttgcaaggaaacttcatgcacaaatgcctggtggatgtgattgccccaaaattaactaagacatgtcgtccgagtatagcgttgtaggctgtgggacaatccacaaccataaaagtccagtgcttgaaggcataaatgttgttctcccctattaatgtgactagaagctagatcttccccatcaactcgattacctagaatgagaattcgaacaagatgttaatagaattcccattgtccatgatgagcactcatgatactctgttgttggaaatctgagcctcaatgactaaaaggttattatggggaaatatacatgtctaacgccttccttcgtgaaagtaattggatagtttgtcatcttttgacgttgtgctcgcgactacactagagcgcacatctccccttcaccttctaaatccttcaaatatctactataggaattgcgggtccttcctacaatatgtggtcccccaaagatggtgaccattgataggcagtagagccaaacctggtagataggggctccctggtcttggagccaaaattgggagtgtaacgtgagctagcagagcaagcagggatagaagctgtgttctagaagcttgagggtaacctactccttgtagaggatttacaatcccatactatcataggacgcgcaactgtttatgaatgaccccatattcaggataaataactgggatttagatccattggcctaggtgtctgactatgactagagattcaatctcatatttcaagtagtcaaactcattggtagtgtgcccttcatctccgtggtactcacatctcttgctctggtagtggaccatgttgcaggttgctttgtcacattctctcgagtgtcaattaggttagtgtactcaaaaaattttgattcatactcttccttggttatttcaaagtttcactttggttctaatttgttgcttcgactgcctaggagcgctactacatctaatttttgtcgctccatgcccagagaaatgggtttgtgttggctcttgcctggaagcagaaggtccatagacgactagagagtattgggttctcgaaagtgtaagtgttgaaatcattacttttagggtgaaactgggtgtagatgcggaaagatttggagtcgaagggactccaaaagcttgtagataggcatcttctaaattgatgataccttgtggcttggccatgaactcggacagagtctcagccctttttctttgcattttctcccccaaaaaaaggagccaatattgtaagtccatatagaagggctacgagcttcatgtcatcgctaacctttgtcttagttgttacctccgtcatcctttgaataaaggtttttaggctttcacttagttattgcttgatgttggtgagtaaatggacctccatatcatagtctcttactgcaataaactgcttccaaaaagcagattataattctttctagctatggattaatttgagagttaaccttttccactagtctttcgcaaaacttagttagcgttaatgaaaaatagatacaattggcatcatttcttgctcgtgctacttttatcatcttcttgtattttgacaggtgagtcctaggatctatacaaccatcatacaactcgatctgtggcattttaaaattcttatcttaggtagtggggcttccgtgatccgcctgacacacggtttcaggtcctcatcctttgaatctaagagggctatactttgctttcgaataagttttgtcaatgcaacaatttggtcttccaatatctttgtatcactacctggaaggttgcatccacgagccttatcatttaagtgattcttaaggtcattttcacgtggcctcgccttctctcctttgggcttttcgtatttagcgtcaagacaccttcagaggtcatattggaccaacttgttgggttttatgccctaaataaaactctatttcgatgtaatccagattattcaatat

SEQ ID NO: 218164 - DNA, 2668 bp, Cannabis indica
tttttttttttgaaaaatgatatacagaaatatattgtaattaattccaaaagaagttttaaaagatgtctaagtgttagatatatacatcaaacattttagaaagtggcgagtgtactcatatatacaaagaattgaaagagaaacttgaaaattaaagtagggggcaaagtagtagaaagtcaaatatacaaatgtttttccatttccttcattaaaacattaatacatgataaagtggtcatttttttaatttccaaaggaaaataagtacgaagtagagtgtctctatttaaagtagtagggaagatcaaggacatagaggaggaagaaagcccaagtaacacccgaaattccaccgaagaagaatccaccggtgaacttggcccatccctcggctgtttggagctgatcaggctccttcttcctcccagttagggtcaaagaaggagcaatggatggctcaccttccttgaatgaagcaactccatacattgtcaagcaaatgcttaggatcacaacaagtccagctgcagccaatgacccagctccacctgcatagggtgtgttcctcaaaggcccagctttcacaaatgggcccaccaggagaaacccatgggccaagcccacctcaattccccttagaagtgggttcactgcggtccggtatgctgggaggttggataggtaccatgccaccaatgggctggatgttactggagtctctaagcttccaatgaaagggtcaccattgatgggttgaatcacttggaatggtgcctacgaaaacacaacattattcatagttattacttattaccaaatatacttaataatatagtatttgtcacgagttgttgtgaccaaatcaaacgctagctactttagctaaatgaatttcaatcaattattcacaacttattggccggttttcttatgttatttttaacttacaaaaatatttcatttaaataataacatttgcataatttaatcctaataagatataatctcaaatttaaataaaaaaaaaaaatctcaattatactattatatgcttaaaatttggagcacagactagagtgtttttcgtctgcaactagtcaagtatcaaaatcaacaagcttttataaaatatttgcttaaagttacttacaaaacaaatcatgaattaagagcgtgatttaattttttctttttgtttttgttttttttagcttacttcaaattataatttcacatgcaacaaaataaattattatttatttatttattttgaatgtataaattagattattttagataaaaaatataataaatggtgaccaaagcaaacactattagttacaacaatggcaagtgtgtaaacaattaagtaacattatagtttatatttgatagatgtatgatttaccttttcggattgaacagcttttacagagaaggatcttttggtagggaaaagcctaagaggagaagaagaaaggcctttgggggataggagagctcttgagagtggggaagaagtgaagttggatttgagcattggtgaagaagttgctgaggccatgattatgccttttgctcctctcacttacactttcacttacacaacaaaaaaaaaaataagaaaactgtccaagtctcaatgaggagttgcagagaccctaacataaaacactttatttgattacatagatcttccatggaaattgtggctctatctcattcttggatttcattagatgatgtgtggaccagaaaccttatccccttatccaactcttcactcttttgcaatttcatcactttgagatttcttgggctggacctggatagcttatgggcctatttttgcgtcatgtggatatttactcttttgggtccatcactcttctggtttcgacctagcccaaggtaaaataggatagtacctagccagccatgcatagtagtaatgggctagtttgtcttttgtattttttgtttttttatatatttaaaaataaaaatataatatttatttaaatatataaacatagaaattttttcaataatatacttgaaatataaattatttacaaaaatactttaataaatctcaattacaataataccacgtcattaaaatatactgtaattctaaaataatatgcctgaaacgaaattaattcaaaattatatatatttttaattattttcctagttttttaaaagtaactttttggttactgataatgctgataagagactaattagttatttttacgtaaaaaacttcatttttaaatgatataatttgagatataatttagttacatctaaaagtaatttgtaaacatcttaataatgtataagctatttttaagatatcatgctatcatattatttaaaatatatttgagtaactttaaagtttatttttgaaattaatgagttgtcatataatataataagctactatttttatttaccaattactttatatacacttgtattactttaaaatttatgtgtttatttttacattatattgattaatttgtttattttaaacacttttactttacttttttttaattttgtcttttataaaatattatgttattttaaagtctattaaaaattaataagttataatatttttttaaaaaaaaactttaactat

SEQ ID NO: 218165 - DNA, 2927 bp, Cannabis indica
taaactcttatgtgtttatttcattgttttagaattcatattaggatgttaatcaaacatacttggtagtaaatctagatcctggtaaaatatttccaacagatcagcagatgcaggagctgctgcttgttgaggcagagtagcagtatgctgtgttgcaggagctgctgcattttggggtaaatcagtaggggagcaccagtagtatgatcctcagcaaaacctgtaattgagtgagagactaatttatgagcagtaaaactaacagtaggaaataagggaattggttgagatgctacctgatctggtgtggaaatgcaagtgtagggtaatcatcttcattgaagatgacattgcgagcaatgtaaattctgccatccttgttctcacataagtaccttttgtgttgcaggctataacccaaaaatatgcacttggtggatctcagattcaacttatttggtaagtatggtctgagatgaggataacaagcacacccaaagcaattgagaaatgtttaatcgggtgtcttgtgaaatagacactcatagggagatatattgctaatcacaagtgtgggaagcctgttaatggtgaaaacagccgtgtgaaaagcatgccaccagtattctaatgtcaaatcagattgtgcaattagagtgagccctgtttcagtgatatgatgatattttctctctgctcgtccattttgttcatggtcatgtgagcatgggtgctgaaattgaataccatgttaagcaagaaatgaagcaaaagacctatactcacctccccaatcggattggaaaatctttacaggcagttgaaattatttttcaactagagttttaaattgaagaaatgtagagtatgctcagatttaacagttaaaggaaagatccaagtaaatctactaaaatcatcaatgaaatggatataatatctatagccatccttaaacacaatgtgagaaggtccccacacatcggtatgtattaattctaggggttgaaaagctctagaagtggataaagggtaaggcagtttgtgatgacttttgcctttttggcaagcttcacaaaagctgagatttttttgagatcctgaataattgatttgggataaaactctttttagtgtgtgaaatgcagggtgcccaagcttagaatgccatttatttatgtgaatagctttggccacattaaaaataacaatagaactagaactaggaagcggagaatcaaatgggacatttttattatcattgtctgaatgtttacaattaatggaggcagtagagactgtctaattagtacagacattagatacagaaggtgtatctgaagaggaactagaactagtactaggctacttagaagctaaatgacattcaatttgaacttgagattgaggaaaagtgtgatgagagagcttgtacatgccatctttctcccttcctttaaggagaactttccctgcgagtttgtccttaacaaaacaacaagaagagtgaaactcaagaaagactttgttatctttagtaagtttggagatactaacaagattcttggttatattagggacttttaaaatagaattgagttctaaagcatgggaggaactagatgtaggtaagaatgaatgactgagatgagtaatgggtagtttcttaccattgcccacagctaaggtttcggatccagagtatggaatttcagtgtcaaaaagttccattccttgagcaacatggtttgtggcacctgtgtcagcataccagtcatgatcaacaccaaaatctggtactgtagtgggagaatgagcctgtggttggtctgtgtcatcgagctcaataagaaaggctttggcttcattcattcttggtgtgacaaaatctttatcaaatctgtaatgacagacagccgcggtatgacccattttgtgacaaacttgacacaaaagtctggaattggtgaaaccagatctgccatatggacgatttgggggtctgtagttgtttgagtagttcgaaccacgcccagaaaaaccagtcgatcttggaggaccatgattgtaggatcgtggattggggacaaagagattggcagtcatttttgtagaaagatccccaatattgtagtgacgttcaagtcgactttcataagtaagaagcaaagattgaatggattcaaaggaaagattgtcaacaagacttgtaacgtggaccacgactggatcaaattcgggaccaatgccattcaacaaatgcataatgagatcattttcatcaaagggatgacctgcagtggatgaagaatcagcaagtaatttgattttatcatagtaatcagatatagaaaggttgcctttggtgatggtagacaattgggacttaatttgaagaacacgagccttggactggctagcatatcactgttctagggctttccaaacagagtagcaagaattgtgttgggctatggatccaagaacagtctcagacttagacgaacgaaaccaactgagaagaagttgatcctttcttctccatgtaatgaatttggggttatcagcccctaagaccaatttcgcaagaggagcaactccagtaaggagaatatcatcaaggccatggccaattacagtgggaatgacctgcgatttccatgcaagaaagttggtgcgatccaatttgaccgtgagagatgaattgagggaattctgaaatggattccattgagatgaagaggcagtagcaaaagcagcaggagctgtagtggtggaagtagcataaggattttcaagaacaccaggatcaatggaagacaactattgtcgatggcaatctgataccatatggaagcttatcaatacaaggctatcaatgaacacaaagaaatatttgggtacaaagtcttgcaaaaagcttg

SEQ ID NO: 218166 - DNA, 6211 bp, Cannabis indica
aaataaataaataaaacaattcataccaaaaacattgttcattagcattagctttagttgtactttgaaaaaaaaaattgaggttcagacccaaaaacacctcttctcgaatctcagctaaatctctctaatcctggattttcaggtatgtatatgtaaagatcatgggagtttgatttgagtttccttataactatgtttcactttttactcgcaccattttttgagtctatattattgctttgatctcttgatctgaaagaaaaaacccatttttatcggtttgttttctttaaagagaagagtaaagattgagtctttttgggttttagtgttttttagtttctgggttttgtttctgatctcgtattcgtttgggtttttgaggttttgttgttcgatttgttgagtgatttctctgacccactttttgttttctgagaaaagtgaagaaatttactcaattttggggttaatgttttgttgggtcttttgattttggtttggaaatgagtatagttgttacctcaacttagctcaaaagcttaggtttctctgttcttttcagtatctatagtatgtttaggtagctttcttccccttttgtttttggttgtttaaatttacagattacatgcaaatttaagtgtattccttttcattttcatggcttgttgttgcatgtaaaatttaactcaattggggcttttattgaagatttgatcttgatattgctgctgttgttgtgttattattagatgtaggtttgtgttattttgatagagaagaagtagaagtagaagaagggaagagtgttgttgctaagaatttagaagaaaaggggttttggaaggtgtttaaattaatggatcatcagagttttggtgaagattcttctactcctgttactggtgcatttgataaatcaagggttttgaatgtaaagcctttaagatgtcttttacctgtttttccaaatgcaccaaatggttcaacattttcaactccacaaggtggtgctgctccttttgtttgtgctactccaactggaccttttcctaatggagtaactcccttttatcctttttacaattcacaagattcatctcaaagaccacccgaacaacatacatctaccccgtccggtgtccaccatcagagctttaacaatgcaccgatatcgaatgcagttccaattaattcgttcaggactccaccaactgctaggaatcgagctaccggggttgctaatggaagtgctggctcgtctaaaaggatgactagaagccgtgctcagacacaaagctcgcctgctgaggaaggagagtttactgataatcaaaatgagagtggcgagtttttatccgaagaaggacttacaaagtcggggaggccaaagcgtagaggtagaaaacggggtagtggtggtggccagggacaggacattaatgttgcctcttctgatgctgctgtagatttgttagttgagaaaattcaaacagcatatagtgatgtgtttagacaaactgaaggtgaccgaagctctgttgactatattactctggtttatgatttgcttcgtagaaaaatttcacaaatggaagatgttagtactccaggagggaataagcgtcccgatctaagggctggtacactgtttatgaataagggtattcggacaaatactaataagaggattggagctgttcctggtgttgaaattggggatattttttacttccgaatggagttgtgtttgctcggattacatgctccaagtatggctggaattgattatttaactgtcaaaaactcttcagaggaagagcctcttgcagtgagtattgtttcttctggtggatacgaagattatgctgatgatcccgatgttattatttatagcggtcaaggtggtgttaacagaaaagatagggcaatgatggatcagaagctggaaaggggtaatcttgctttggagaaatctacacataagggcaatgagataagagttattcggggtctgagggatcagaacactgtagctggtaaaatatatgtctacgacggtgtatacaaaatacaagaatcgtgggtggagaaagaagggaagagcggttgcaatgttttcaagtataagtttgttagactgcctaatcagcctgaagcttttaggatatggaaatcggttgaacaatggaaaggtggagatacttctcgggttggtgttgtattgcctgatcttacttcgggggaagaaaaagtaccggtttctttggttaatgatgtagatggcgagaagggtcctgctcatttcacttacatttctactgtcaagtatcccaatccaatgaacttaaccattccttcttctggatgtctttgcgtcggtggatgtttaccgactaattccaactgtacttgtattcaaaagaacggagattttctcccatatacctcaactggacttattgtgactcaaaaggccttagtacaagagtgcggaccttcctgtcaatgtgcttctaattgcaaaaaccgcgtatctcaagctggcctgaagattcatttggaagtgtttaaaactaagaacagaggttggggtttaaggacacttgaccccatccgagctggaacatttatttgtgaatatgctggtcaagttgttgatcctactaagatagataagttcgggattgatgtagacgatgaattcgtttttgatgctactcgtactcctcaaccacttggagttatgcctggtgatcccgttgaaccttcgaaactcccatttcctcttgttataagtgcaaaatattcggggaatgttgcacgttttatgaaccacagctgtaatcccaatttgatctggcaaccagtttcgcgtgaaaacagaaacgagcctgatcttcatgttactttctttgcgatcagacacattcctcccatggcagaattgacttatgattacggtgtagtaccagacgatgaaatagaccaaaggaagagaaaatgtctctgcggggcagcaaagtgcaaaggcttcttttgtctgtagtctatcaagggtaatttgggtaatgatggaccttgcatacaagctttttggaaaggttagtgatcatataaatgatttttcatttgatttcttttattgcttttatatgcatttattcaatttcatggcttatgtatgtttgagttctaaaatagaccagtcattaatttgcttactgaattcggaagaaagggcttgctgcttaccctttcactcttccataaccaagtatatatatgctaattattatccctataagtgtaatttgattatggaaattactcccgcgccattaactttggtgtcaaatttcaaaagcaagatttgtaacgccccgttaactcttatcagtacatgaacttcgattatatattttctctgtattttcgtttatggtattattgaggtgagccttatcttaatctcagactttggattcatattccccaaaaaatgtatgtgttcttcaaaacattgtgttttgcaattgtgggattcatgttttgcaactctagtcaatcaaggtatataatatgactatattttaatgtcgatggctatcaatcggccgccttttttaactcgagaacttgtaatactgatagatttttgtttaatattttttgaaccgattcccctttttcggttttctgatactaatcttttgtagccaggaagaagagctctctccaacggtagtagcgctgcttgtgtgtgaagttcgtgaccttttgaaagtatgtagttcttatttaagttttattttctaccgattcctgacagtagtagtttgtggattcgccgatgactgcagtgttttcccttcatcggtgtactaacattatgtagctgtaacataaaaatcaacaggaatgcgttgttgctgctgttgttgtttcgatttttttcctgttatcggtttagtttctctctattgtatcaatgcagaactactaaattctaggataagattcttgtattaatggaaaatttgcatttcttcgacgaaagaaaagcgaggccacgggcctttgaagcttgtgtggttacttgggacacaaggcaccttgtgtacttgttgtttttttttgttgagatatttaaggtgagatggaagaaagtctctgtctttttgtgtgcacaatggaagaacttcaaatcttcccacaccacctcataaaaaatgctcttttgatctttgaaaattaatgggtaaaattagattgtttgttatttattttcatgttctttccctagttttgttgaatgtggattttgatatattttttttggaccaatccacactattattttgccaaatttcctaaatgggttttttttttatatctttggttcaacgtaattgttaaacttacaatctcaaattggaatctatttccacttttttctagagaaaaaaaaaatcaaaattcagaaaagcagccataaagaaacacggcaaaatttgaagtgacatttataaaacgatatagtttaagaaaaacgacaataattttagtgtaaagtaataaggatcaatgggggaaaatagacagtgattattagagactcaagaggataatgtcttaaattactagccgttggataaggcataaattttgctatgagtttgagctttcaacactatctcatacaattttcccaataagtagagcatttgctataaagcactatatattggtgtgtggttgttatttttttttttttgattaatattgcctcaagcgagcaaaacaaactaaccgactccaactactagccaaaagacggcagcgaaaacaaacagacaaatcagaaacaacagcttgaacaaactaacagtgaactcgcaacagccatctgcagcagtagcacgcaggaaactgtcaaaattggacaattcaatctcctcgaaacggcaagaacggatcgcccatttagccacatcatgtgccacacagttcaacttcctcgggatccagcagacatcccaaagatcgaaattcttagcagaagtatggaatcttaccactaaatctgtaatgttatagtgcaagtcgaaatctttggagttcatacccttgattgcttccactgcgccttttgaatcactctgaaaagtaacgtgtttgagggccaacttggcagcaacctctgccccccaggaaagattgtagagctcccccgccaaaggatcacactgcatgattcgagttgtgtgaatatgggtgatacttccatcatcaattctgaatatagctgcaccaactgatcggttttcgcccatggcaacatcagtgttgcacatatgccaaccggttggaggagggagccaggttgcataaataatctccattgtgtcgtgatcctgtaccagctccaagagtcttctatttgtatgattgatgagttggttcaagggagttacttaaagatcatgtctttaattaaattatatggaactggatagttaattagaataataacattggtgcattttagcattttcccaataagtaaatataacaaaatattatgagttcattatttattgttaatgatactgatttttgtagattggcagatttggattgagatgttgattactggtataattgttgtggtctactttatctatagaaaactttgtgtttttgaatctagtttgttcactgttcaacatgttagtaatatgattaaatcgaggattaaagttcgttttggttgtttagatagaaggagaatgtcctttaaaaaaacttattgctaatattgtgagcagttggtagtgattttctgggctttcttaagcattggttaatggtgttgtttgatgtaattttgttgttgatttaatgaaaattcttttcttttcataaaaaataaaaataaaaattgatctaccactatcaaaaatcttaactaaaatgaatatataaatagcattctaatgctaatgtttgtattttatcaaaggacaattatacctgtaacttatggtataagtaaattgtttttgaaaaatatgcaaactaaaaatatttgtaatgatttttatattattgaaaaatatttacaataaaaaaattaagataaatgttttggactttgggaattaataattaataagattgggtaataatttctaggaaacaa

SEQ ID NO: 218167 - DNA, 4054 bp, Cannabis indica
atatattggtttaagaaatgctttatttatttcgtcgtcgtggttgttcgaaaggtatttggttatatgtgtgtggtgtgagtctaataatatataagatttttttatgtgtatatgaaaacaaatataaatattttttctctttctccttcatttgtattttgttagaagttattctgcatcgtccaactccaacctatcagaatatgccatattcttaaaatgaataaatagttttgtcaaagaccaaaaaaagttaattcgcatttggatgtagtttgattttgtctcagaaaattaacagaattttcaaatgttcatgtattttttttttagaatttgtgacataaatacttaatattattaaatttatataattatatactaatatttttttgttttatcattccatccttagctttcatttatgttaagaatttaatttttctatctaaattatttgttcatattactacttaaatattaaggttatttattttctaagcatacatttttagaaattgatcatgcttatatttcttttccaagcaaaatcttttagtttatgtttgtaatttgtatgtaaaattgatttaattatgaaaatgttcaaatatattgatttaaagcaattagaggcatcaaagttaatgtggatatgcatgcgtctattttggtgaggataggaagtttggcttccgatttgtggctcgatatggtagtggtagattggtcgagacaagggcacgggttcaaattggtatagtagatccattgttggttgaggctctgagcattaaggaagcttaagctagttaaagaccagtgtatcctaactgtaatagaatcagattgtttagtgattgttgagtctattcttaatttgttaaaaatgttactttgatcttgttattgagaagtgtaaggctctttttaggtctttacaatttgttgatttagttattgttaaacgttttgttaatcgagttacttatttgcttgccaaaatttttcatgttatggttgatcgcctactggtaaaagtttctgcttcacctaaattattatttattctcctgagtgattcctttgcatgaagattattttactaaaaaagaaattgggaggcaaaagatttataagttttctatttataagtgggcattagaagacgagcaaaattacgttaaatcgaatagttcaaatataaataaagtcactgtccactcaaacaagttattgattgctgaaaaaaaaggatagaccacaaatagaatgtatggtcatgtctagtaattaatatacgagtatgtcataaaactaaagtttacttcaaatagcatatgattaagcattgaatgaattctgaaaaattgttaaacattggcagttcactagttagtgatggagcttaattaatcgtaatattggtctaagaaaacatagtaatcaccaatggaaaaaagtttctccaagtacattctaattacggttcaccaaattaaatatgggctaaatggttgtggatactattacttaccagataaacagtttttattgttgatgaaaataagttaaatagtgacataattacataaagttttaaaattgtaagggtcataaatttaatatttatttttagtagcataagtttgtaaaactgtaatttttttttttagtttcgtcaatatagattctattttgaatttattaaaaaaatatttggaaataaatgatattatatatttttgtctagactctataatctagaatgtgaggcttatatgtacctatttaagacaataacaaaatctgtaatgagaaaattatagaaaaattatagttttataaacttaaaattttgaatacttatgtctgaaaataatatcttaaatacaacattgagactgctacaatcagaccaactatttcaattaatcacaattctagtctctagatatcaattgaatggatcgatcaatcacaacacagctctgcaaagaattataatctatttaacatgaataaagggaaacacaggtaagaacaataaacacatctcatacaattaaagtacaaatatttagatcatttgcccccagatgattaaatcaagtatttattattagtaaatcaagggggtagtaaaaacaatattaagtacaaaaaagaacttattgctgtcatcaatatagcttgttccaaaatacattgcagttctcatagtgcacaaagtttatactcagtttgagaattacaatgaagaaagtatattatatataaaaagttttttaaatcgttcagaaagatgcatgtttgaaagaatagcgcagagcccaatacaaatacctacacagagatcataaccatgcatttattttcttcttctttttttcgaaacactctctgttttttaactcaagacaaggcattggcaccagcaacaatctccaaaatctctcctgtgattttggcttgacgtttcctgttgtaaaccatagaaagatttttcttaagctcagatgcattatcagtggcactgctcatggcgctcatccttgcagctagttcactcgccaaagactcctgtaaagctcttagaatctgactgttgagatataaaggcaataaggcatcaagaatctgaactgggtcttgctcaaactgcaagattggtgagaaatctaatgtctcagtcctaactgaatccctttcaacagtcaattttccttcttttgttgttaacctgaagaactcatcctcagctgcatcaacacagactccattaatgtcacaaatctctccttttggtgagagaggaagaagagtgtggattacagggttggatttgactaaagatacaaactttgtgtacaaaagctcaactttgtcaacttcttcactaacaaagagagaaaacacatcatcggctatggcttgagcttctttggctgttggaagattacccccttcgagaaatttatctactggaatataaggccttcgaagaaagtaagagttaccctttttaccaacgctaatgactgtgtaactcaatccaagactcttcaattcggcgattcttgcctcggctttcttgatgaggaagttgttgaaaccaccacagagtcctctgtctccagtcacaaccacaagagcaactttcttaacaggtcttactttagtaagaggggattctacatcgtccgtttggagttgctcgttaatgttgtagagaacttcaaccagagtttcagagaagggtctgccattaacgacggcttcttgagctctacggactttagcggctgcgacgagcttcatggcctcagtgattttctgggtatttttgacagacccaatacggtcacgaagctcacggaggttacagtggatgggagtgactgaggatgatctagaggaagggtttggggttggggaagaagattgagagggaagctgaaaaggggtgatgaaagagcgagaggaaagggttgaagcttcggaaagggaaggttttgatgagacccacattgttagatttgagcaagacatggttgaatttcttcacgaagctttggttaaggaggaagaggttggaaatggcggaagaagaagaagaagaaaagagaagagaagaggaagagggtgtgtgttaagtggtatttttgacaaaatggtatttggtaatggtgaaatgaaatcttatcttgttcatgtgtttattagttgtgatatggagtgggaaaaatgagtggaggaagaaggagggaaaggatgaggtttggagataaggatttcgagcgttggtaatctaatgtttggacaggaatttgagagtggggtcctaataagtaacttccatggcatcatgatcatccgagttggctcagtgacagtaaccaccacactcatccttcaactgactgaatctcatacagtatatgcggctatgcgacttggacttttctttatgctaaaagtctaaaaaagttagtcaccaatgatatttcaataatccaaatatttactcttattaaagtaactaaagatt

SEQ ID NO: 218168 - DNA, 2544 bp, Cannabis indica
aagatcaccaatattagcttttgcttactattttctactactacttgaaactctccctcaaactttagttacatatttgtcatgtcttatgaagtcatgagaagatgttttgatagaatcttcaatggttaaaaaaataggagtgtcaaaatagttgtttgttgctcattttggttgatgtggcatgtaagatttgtatctataaatgagaaggttaccaaaatttggcattgttggcaattttttattatatgctttgggatgctcaatggctcaacttgctcgaatgcttaatgcgtttttgtgttgcttccataaagaataaatagtttaataaactcttcaaaatgagttcattcacatttcatgccaactagctaccaaatcgcttattatatttcttgtaaaaatatgacgtctggagaaaaattgaactgaaattaaaattcaactaaaagtgtaatgccaaattataaggctgtttgattgtccgagtcataggtcctaggtccggaaccatgtccgtgtcctaggtttgggattgggttcgagttcaaatcctaggtttgagtatgtgtttcgatcctgaggttgggaccaagtctgtgtccagagtcccgaccgggtttgtgtcttgggtccaagtcttgaggttggggtcagtctgtgtccgggtcttggtcccgaggttgggtctgtgtctcgggtcccggtcctgaggtcgagcccgagtttgtgttccaggtccaagtctgagtttgtgtcccgagtttgagtcttgattggggtttcaagcccccaagtcctcgggtcgagactaggtcttaatccaaatatatgagaaaaaatataaaaaaagtatgttagaaaaaaaaaaaatttgaaaatagaaaacaacatgttttctattctgtttttaaaactgaaaaccatttttaaccttcttcctctctcttctttgtctctctccggccacttctccacgacgaccgaccacccagacctacagagctgcttctcttccggtcaccggagagctcttcctctgttctgttccagttcaggtatttttatttcgattttgagaacaatttcagtgatgtaatgggaagaattcacttcacctgaatcattattttaatacgagactgagaatgagatgattctttatgtatgtttttgactgttatttttaatctgagatagagaatgaagtgattcacattattagaattaattaatcacttgtttacaatcattgatccctaaattttggggtcacagaacaccaacctaaactccattatcatcatcatcatcatcatctagcttgagctccagcaaggcagcattaatattattctctcctttttattgtaattattttctcaaagactctacctttatctatatgtatcttgattacaaagaaaaagttttctctgatttgggtttactgaagattagtgagtgtagtaggaggaggacattggtggtggagagaagatgcttagcagattaagtaggcggtctttttgcactgttggtggtccaagaccatggctttttgtgggtttgggaaacccaggtgataaatacaaaggaactagacataatgtaatgaactaattatgcttctcaaattcattttttcaaccaaaataaaaataaaatttgagatggtgttgtttttacttgaattttgtgtgtgttttggttttgaaaacaggtggggtttgagatgattgatacttttgctcaatcacaaggcattgaaatgaacacagttcattgtaaagctatttttggacagggtatgtttctattcacttattcattatacttttttgtattagttttatgtttgataggtgtttgctttttttgttaggttttgttggtgacactcctcttttccttgcaaagcctcaaacctatatgaatctaattggtgaatctgtatgtaatcgagccttattcttcttaactactattttttctagttcacagctttttattcaatctatagatggtataaatttttgaatatcaagtagttatatggcctttgaattggtgtctatataaaaacattatctgttcattctttatataagatattcataatacaaactcaaaccccacattagttacccattctcttgggagatcagaaagagagaaagagaagtgacattcatacttttttaagcgacacagcaacctaggacgtgatctgttcctacagtgatttgaaaggactcccaacatcttgaaaaaatctattgcttatctccaaccaaaccaaattatctacatgataatcaacacttcacaccaaattatctacatgacaatcaacacttcattccaaagtatcttttgctttatattataatccccaccaaaatcttgacagattacttactctttcttcttatttttctcccattgatatagatttagattttgtcatacattacaagcattggggcttcttgttctaaatatgtgtataatacagtgtttgatgaagaccgaaga

SEQ ID NO: 218169 - DNA, 5107 bp, Cannabis indica
taacagaatattcttttatttttatttttaagtatattctgttaaaccaagaatgttaaaccaagaaatgccgttagatagacatttttaatatataaagatatataattagcattaattggttggtaatttataaatgaaaatatcattatttatgcttgcatttttatttttgaaaaagtgatttaaatcatatttaaaaattactacaatatctataaaaaatggacattttcatatttgttcaagttttatgtgttcgatttcatgtatcttagagcatcttcaatggtagtgcttagaaaaagtacttaataatatagctgaaagaaactaacaattagagatgttttgttgccaaattaaaaaggaatattgatgccaaaatttgatattaattgctgaactcatttttaaataaaattaaaataaataatatattaaataataataatgatgtattaaaattgaagtacttactatttgtgagtaatttttattaaaagagaaagaattacatgtcaacaagacttgtgtaacagacaatttgataaattcaatttaccaaattatcattgttaaaaaatatgtcaaatttgaggtacaacaaataagattagaatacaactattactaggaaaacaaatcaattcaaatctatttttcataatattttagaacagcaccaaaagatttaagatgatagacccttaatatgcactcatatggtgaatgtcatcattatcaaccactttcacaagagttacataaaaagttaagagttcataaaacacatttatttacaaatatttacatcacttggaagaagaagatattaagttggagtttgatcaatttgaaaccccaatttgcataaactgaaaatactttacaaatagttcacagatgaggaacaaccatcttcttcatagagccctcatcacaactttgcttgttgtatgaacacccattgccacgattttcaacacagcacgagtctggtacaatctgcaattcaagagtgtgtcaattcaaatctgttttatctagtcgcaaccataaatattaaggtcaataatggagtcaaaatagtaaaaatatgaccctgaactcaattttttaaaatgtaactaacaattactagcagaaacagatgcagaaaatataacaagttatgttataacatttctaaattgggtcattattaaattttattttgacaaaaaaatcaattcaagatcttggtccattttttcatttaacaaaacaaaaaattcaatcaataacttttgcaaaatacaagtccaaaaaggtatttacccttgaataatttatgatctaaggagataaaataatataaaagttgtcccaacaaagatttcaaacaaaagcagaagacattcgaaataatatgtgggcctacatatatggctaaataatgggctaaaagcatatctatacatcaaaagtatgcttctgctcttatagtgtttctcattattcttttatgttcttgccatggacagtattaggattaattatgtacaggttaaaattcattaagatattgatgcattcaaaaggctcatcgatgaattgagagttttaagatatcaaaaatctgtttctgtcaatttacttggtaagggaagcagttgaaaattcataacattgtagcaactgaaagaaaaaacttacccggtcagagcaagtccccaggtcgccaaggcataaaacaatttcccggcatgccaaatttcgaacatctgggtcagtttactcacgctagctaatgcttttgtcatggctgcatattttcagcaaaaagataagtaagaaaaatatcaattctctgctatccaaaaagatataagtgtatgaataaaggaaccccaaaccgagctgctagctaaaagacaccgcccacttacataaccgaatgatacaaggaagttgcccaacttaataatactaaccaataacaaatctttgctataaaatctaccaacagggaagaatgaacttatatctcctaaattatctaaccacaagaaaaagcatcaaaagctagaagaaacactacaaagtaaattccatgattccatcctattcatctgtagttaagacttcttccaggcataaaagaaaaatcaaacaaatataaaaacccgaatgtgctattataaccagaaaggatagtgaaaatctgttcatgaccccaactattatcggtgtatgtaagtattgaattttgaatttgaaagacagcctgcatcattcatgtaacttttgctagagcaattattattaaaaattatcccattagattagcaaaacaataggggcataatgttaaatctaaatgttctaatttaaaattttcaagtggtaacttactcttttgtaattcttctggtgtcattttctgcaaattacaataaaggcaagcacatgagatgtatcaaaacatagaaaataacaggaagaaaacaaaagataattagataagaaattaacctgagcctttgggttcgagacaatgcatttcgcaataaagttcgcaacaccatccaccacgtgctcctcgctaacaattacataactgtcgtcatcgattccactccgttcctcaacattgcttggaaccatgtcctctgtcacccaaacccaccaacttggttctttctggtcaacatttacaagaatttcagctgcctgcaaatcattttctatcgaaaaagaaaacccaacacaacagttactaaatttcatagaataagtaaatgacaccaaaaaaaatagaatcatcagttaaaatctaaacaacctgtggcaaccttgaaaggaaattcataaccatctcctttggctgaagcgagctggagggttttgatacgagccaagaacttctcagaatccacagtagcaactaaacgagcatacaactacattgcaaaaacacaacaccccatttagcccaacggaaaatttgccaagctaacaacatgaaaatgttaaattagcaaaataaccacattgaaaatacactgtgccaccattaaacaaccatgatggtctttttatggtagcgttgtgtaatttttgatcatttgtgcaatcaaacatagttatttctgatagctatttttccaaatcactcacattttttcaagtcacttctactaatttaagattaaaaaaaaagaacctttgttaaatagtaatatgattctatagaaaagtgtatcatagtaactttcatctgaggcatgggaaatttgccaaactaaccacattaaatttacattgttttatggtcaaatagtataattttatgattattttgctaataaaaactttcattacgattatttttacaaaacactgttcaattattaggggtttcaatcaaattctcatccacattaaaatagtaagacaactctaaaggctcaatatctcatctgagttcaattttggggaattttcaaccaaatcctcatccataaagtttccaaattaaattcaaaaaactttcaatatagacaaaaagacatacatctggagggcaatcgttcaacaaagaaggagaatcagaaagattctgaagaagcttgatattctggtgaagcaagtccctcaatcgatgattctcggatctgagatattccaattcttcctcgggagaagcgtgttgaatgggctcatcggaagagtcgttgtggtggcggtgtttgtggcaggtttccatggcggtccaggcaacgtcggcgacctccatgactgtcttggctacctcgatagctccgtggccacccatggcgatcgttaattcggttatgtgaaagaagaaagagagaatttttgagaagaatgaaaggaatgaatgaatgaccgcttgggcttcggtttgagtttgggttttgtgttattgcgtgtagcaaaaggagatgaggaagacgaagggtaaatttggtattttgctaactatattgacacgtgtaactacaaattgtaagcattttcgatggtagggtgttcataaaatagccgatccaataatctaatccaatccaattcaaaattttaagattttatactattggaaaattctacaatgtactcccttaagagaggtgtatcaatgactcttatcttttttcgtcatctgaaaaaaaattttagtctaactctttttatggttggttatattatagttatttaagacatcttgcaaacttttgagaaatttagaaaaatttaatatgctggttcaaattgtctggtacacacatgactcttttattataaacacgtgtaaaatagactatttgaatattgttttctatgttgttaattattccgaatttctcgaaattttataggagatcttaaataactaaaatgtatacgattatgaaaaaaaatggactaatttttttttccttaatgccaaaatagattagggtgcatcagtgcatctattttagaggtgctttcatattctacaaaatataaaaatatagttttttttgtgcttctacaatgcactctcttaaaataaaatttttgagaaattcagaataatttataatataggtagcaatgttcaaacaatctatgttatatgtataaaataataataaaaaaatcacgcatataacatactgcttgaactctatttttggcgtattaaattttttcaaattttttaaaatttaaccgaatatcttaaataactatatgatatacaatcataagaaaaaatttgactaaaaaattattttgaatacctaaataaatagaaatatatcaatatatctattttaaaagggtatacggtcaaatattcggtttttcttttcaaaaaaattattaaatctacacaccaaaatataatagatagaggtgaatatgtgcagttattcatataattagatgatacacataatagtcttttttgagataaagataaatcttttaaaatacactcttcaagttagtactaaattccaattaaattaaagttctattttctattttctttctaattaataactacataattatatatttaggtggcttttgattggaggtaatgaaatgg

SEQ ID NO: 218170 - DNA, 7056 bp, Cannabis indica
aggcttttttttttgtaattagtcgctaggcgacaagtattttgtataggcagtgaacttttttttaattaatcacgatttctataaacctcgttgattagcaacgagctgcacagtatgtttaaaaattacgtaatacgcctatgctagttagggtgttacagcttggttggtcatggtggttctttgatgagaaagaaagaaaataagaaagaggaagagagagggtgatctgcgcgagaattagatggagggaaagagattttgataaataaaataagtggtgggtcccaccaatatagaaaaaataataatagatcttttttttctgactaggtattacagctttagtgtttaaaagataaaagagaagatttttttaaaagatgaactaaggtctctattgatagtatttaggatcacactttgaaattcaataccctacacaccataactgttaccatctattaattgagtgtagatgagtgattttgttgttatgggagcagttagaaagcgtccacattgttaaaaaacgttccaataaaacagtaattagctactaattaccaaaattttcaaattttataaataactctccaaagcatccccattttattttatatcacttatacacaatataaatgataaaatcaaatctccaccaaatgtacttgtaatatagctttgaattttaaaggattaagttgtctaaactctctttacaaacttaattagtgataatgtagaacttacaaagtgtagtaatcccacctcttatgttacaatctatgtgaatagtatatgtatgtaactcccaattacattacatagtgattattacatgtgtgtaactcctaattaaattatatattatactcataatataatatataatattttataattttaatcttaaatattatattattaactaaataataaagaatatatcacaccaataaaattttcgcatgcaacttggacacactattataatgaaaatgtaaattaattagtttatttatgtacgtaactaataagttatactaactttgaattaagtaataatttaagtgacgtttagatgggaggaatgaaaatataagaatatgagtgaaaatgagaatagaaatagaaatagaatggaaaaagaatataaaatgcataaaaaaaatcgataaaaaaattattaatttttttctcattatgcataggaatagtcttcactttcatttcaaaatagaatagattccattaaaatagtggaaagaccattccattagaatgacattccaatgcttaaatatgcaacctaacaaagaaatagaatgaagattgtttcctttctattcttttctatttctttacctccagccaaacatcaccttacattttaattttgtagtttggaaagaaagttacttaggagagggacttgtgaaagttgcaatcagtggttagcaaaattaacacaaaaaaagttatatgtactaactagcttttagatttagactttcaattttagaaaagtatttattttgtgatctaaatttttatgatatactcagacttttaagtgcttatcatgttgtaaactttaactttgttaatataattaaattgtatttttatttcaaattaagtctctattaatataattaatttataattatttcaataaaaattaatatataataattaaaaataatattgagaattagataaataaattcaaaatttaaaaaaaaggcaggacctacgtctttagttattatataataaccgatgtacttggttagtatgtagtaattgaagacgtagggtctgctctccatgcgcatttgaaaattagttcaacttctatttttgattattttgtaataacctaagacataagttccccttacattccagtattattaaaacctacgtttttacttcaattttcttcggtagcaagaattttataaaactaagataaatgggcttaaaaattgaagttaaacaatagtagtataactcaattaaaagaactcaaaactatgtcacagaaacaatactaattgcaaaaacaaaaacctgaccaagtcacgcctaagtgtagggagggctggagaaaacaacaacctctgggtgctatacatttaagaacaaaagccttagtagaccttatatatttactcatatacttttgtttattaacacttgataaattttaaaaagatataataattaatttctttgaaagaatctaataattaattgatttggttgatatggttgatgattcaaacctgttatttctacctccaaatctaggaccgttggattcggcaggagcccttttatttgttataatgtattaaataaaaaggaatactacctttttagattaaattttgtataaaattaattattacaattataaattttattaaaatagaatcatataattatttaatacataataaatgatttgtgttatagcttataaaggtctagggctgtggtctagagtctgggtttggagttcgaagtccattttcgggactatgtttcatctctgggttcgggtccaggtttaggtcaagattaggagttcaggttttgatctgggtcccgggtcgaggtcggggtccgagtctagagtctggagtccgtgtctgagtttaggtctaagcctaaggtcaaagtttagaaataggatttaggtcatgatccgagccgaaattcggtcgtggccagagactggagttggggtggagatcaaggttgagtttatagtgaaactgtataacttttacataaaatgttgctacaagtcaatatcaaacattttattctactattaaaataataatacaataaaatacaatctaataaaataatatgtaatacaatagaagatggtgtatcaatgaggcttacgtaaaaagtttattcacttaggcgcatcatcatttttctgttcgtagtccgtatccttgaaaaagagaatcccgtaaacaaaaaaaataaatggataatcgtttggtttaatgcccagtcttgtttgtgacagatgttttgatgctcatgcaaacctgaatattgtattatattttaggttgttggatatgatacgtaacaattaatgaatattgcagagcatatattttgtgatcactacacatctcgatactttttattatttatgttttatttgagaaagaaagaaagactcaacaaattcttgtattatatatctatacggaaattgcagtagaaatgcttatggggattagtggtgcttaacactctcttatgtgtcagtattcctattggttcaattaaatattagttcctacataatttaatataataacttttaggaagtatcgctagccaatcgcaacgtaacatgtcaagaaagtgctaagcaccactggtgcttaatagtaatactcattttacatataccattatatacattatagattatacttataggagatttttacacaaattaaatttgcataaattataattaattattgctgatgtgaagatgatcgggttcatataaattattgtagtcggtattatttaaatcaatataaatataaaatacaatttttttatattcatatatgaaaaattaaattacaagtgaaccaattaatgtttttttttcgcctgatggacaactttacgagtatgttgaaaacataagaagaccaactactgactaattttctacacaaattttgtgtttcctacaataataaatatctaaatattaattagtatattcgtttttgaaaattaacaaggcgctaaccacatccattggtatataatatcttatacaagacttggatcgttagttttttttgttttttattttctggttcatatatagtaccaaacactcatgttactaaacaaaagtttacagtaattttttttgcacagctttcaaaactgcaagtactaattctaaatggatttgtacgagtccacatatacatatatatatagatatatagaatgttgtttgtatatagaaagatgaaaagcgagtgagagtacgtatatatgtttgcattagtgtcatgatcagatatatatggaagagattatgtaattaggcaccatatgttacacgtgtcgtaggaaggaaaagccaggtgtagattaagtttccctgcccaaaatggtaaagcatatgtaatatctactttcaaataaagattcggttctccaaaatgggtaagtctaagatggaatatagcattacaccaatcatagcaactttaattaattaattgattctccaccatgctttgtatatattttgtcacacgttttctaggaatatttaattttgtaaatagaatatacacttcattttcacctttatttttggtttgactaatttctttggtaccattttctttttctctcttgtcacttccgtcgggttcgttttagtagatatttacgatttattcatctcgagaatgctctgcctcataatttttccttttatgatatcaaatattattggagatattgtaaatgataatgcttggaacaactcttatgcatgaaacatgtcaaagtttctacatcagacttacaatacttgcccaaaataaattttaacttgaccaataatttatggtcaaatttaggaaaataaatattcacagataatgatcactgaagtctgaaatctaaaaagaaaaaaggaaatctgagagtcaattggaaaactgaaaatagaagtaaagaaaaaacaaaaaaaaaaataaaaaaaagagagagaacaaacgaaatgaggccatttcagaagctgacagttggaatacgggggaaggaacagatcgatggaagctaacactgtagtgaatgtatgatttatactccaaaaattaattggaattggcctctttttgtgtatacatattctataaaatattttcccacaccccatataaatgcaataaataattatgatagtattgttaactaaggctaggtatccataatcattttttactaaagagattttagtaagggttaattaacgactttgaactgaaaatcagtattaatttatttattttttttaatgaaagaaatttctcattaggccttaagcgacaataaaatctgaaaattacatcaattccgtagttttggccaccaaaatctctcattataaaaaaaaaaaatctgtatgtattaacatggatattttaatattattattactattttgatatatgattattattgttttttcgtttttgtagtgttcgaaaaaggaatgttgtcgaaaaagaaaagagaaaaaaaggatgaaacttgataagacttgtgtggtgggggattctagctatctattctatgtgtttgatcacatatatcttttgaaattgatttttctttcctttctccatgcttcttggcaacttgcaagtctggtttgcagaataaccttatccttgacgccactaatgaatgcatctgtctagaagttccccagccacccagcttgacatttcacttccaaataagcaaatacatatatctttatatatatatatatataatgtaattatactatctctttatctcatcataatcactaccgacaacaataaagtattaaaggggttcacctttacattccaaacacaataaacttattcatttagataataatggaatttaaagcacatgccaacttttcaatttcaattttgaatttctatatatgaataattactctccaaccaatttctagctacttcttccttcttttcaatgtgtatatgtatgagaataaaattaataaaaaatatgtaacgggataatattaatatcattgttcaaacttgaactatcagacaaaattgaacctaaatcataatttttcgtttttggttacatgatgtgtatatgttcttaaaataaacgattgtattattacaagtatatatatgaaacccttttataaatttaaattttcatccaataatttagtgaggaaataatattatatgaagatattattaaagcttcaaactgttccttctgcattttctgactcttgtgaaaggataagaggcacacatattaatgcctgacggtaatatttgtatccatctaattaacacgatcttgccgatcgacataatacatatggattttagagatcttccaatccatcatataacaattatataaatatatctgtacaaaaagataaggttctttattacatgatccagcaaatattgttctattgatttaaaccatattattcaaaatgctaggattaagaggaattcagtataaaatttatttttatcacatatcattgctgtccgttaccctctataatactattctaatgatctagcttaaggctctctaattactcttcatgcaattaattaattaaattataatatatttatacatacccaactatattggagttattttctagatcgagttttaccagcctatagtgtcaccaattaaaaacaattataataacattttcttctgtatgtgaatatttatttattttattattattattattattatttagttattttcctattacagatcgctggtaacttttagaagatataagcatataaaaattcccaatatagtctagtttattccaaggtcgatcgatgactctagtcaatcataaaagaaaagaaatttgattggcacttccacgaagaatgattcgttaaaagcgaaacactgaatgggtcagctaaaacactgtataaatatataagtaggccagccagggaagatttttatctgagaaattaagcttaccccttcaattatattatttaataaataatcttattatgaaataatgtacatgttatcaccatcatggcatggcataaactttacctataaatagaggtatgagaaagtctctcttacaccatccaaactagattcttatcaacagcttctacacatatatcccaatcctcaccatatctctctctttctctcttt

SEQ ID NO: 218171 - DNA, 1612 bp, Cannabis indica
aaatttcccttttttttaattatttatttctaacataaaaaaaaaagttaattatacccttaattctatctttatcaaaatttctcatttttaaaactagtacactagattcaagaaagaaagaaaaataaacgactacattcacaagagtacacttgtgactggattacaagtactaggtagtgtagtgtagtgagttctcatcaaaaagttgaaactagaaagaaagagatggcaagtgaaagagaggtaagcgtagccataatcggagccggaatcagtggcctcttggcctgcaaatatgccctctcaaaaggcttccaccccattgttttcgagtctcgaagccgaataggtggtgtttggaccaaaaccatcgaaaccacaaggctccaaactcccaaacccttataccaattctccgattttccatggccatctacagtgcctgactctgagctattccctcaccaccatcaagttctcgattatgtggaatcttacgcacgccattttgatttagtgaaacacatcaaattccacaccagagtttgcagcattcactatcaaaacccatctcatcaaacagacactacttctgggagttgggctctttggggtgctctcccttctgcctcctctggtcaatggaaactagttgtacagaacacttccacacaacaaggcctttccaattataaccaggtaattatatatgactttgtttatattattattaaaaatattttattttctactggtttagatcttaagaattttgtataattattaagaatatgttggaatggtcgatcgtgtatgtgtcattagttaagagtaaatacgtgcaagcactgtgttttgaaaagcattatatcacatcatcattgtaaatatcatctctcagtcgtgtcattatttttgaggagagagatttggtggactctttctccatttatacagaattataataattgcaaaatgaaagtgtgtcaaggccatacaaaagcaaaatttttggattgagataggatttcatatgggcacacacaggatctgattgagaatgcatgtacatagagatatataatgagtgattttatatatatatatatgagacaaattacatatagtgtctctcattatcctctcattataatatgagacaaacaacaatatagtcccatcattttcgtacattattatattaaggacaaacaattctaaactcccatcatttttgttagaagttgtttgtgctatcttattatttcttatgagttataaagttctttttgacattggggaatgggattttgatcactcgactttgtgtgggaaaggtgtatgatatgctcttttgaatttaatttttattagcataaaaaatacaaattattataaattaaagtatttacgaaaatttcaaaaaatatatatatttttaaaaaaattattattaatatgtttgaaaattgaattttggtgtggaaagaaaaaaataaagaaaaaaaaagtgaaaaaatacaaaagaataaattttcatgtttagtaggaataaaaagtagtatagaaaaaaacttgttcattttttatacctaacatgtaaaaa

SEQ ID NO: 218172 - DNA, 5850 bp, Cannabis indica
aactaaacatctagggatagcatgagcctgatggtcttgtaattaaccactggtgaaaacacctttgtgaagtcaataccctttttctaagtaaacccctttgctacaagtctagccttgtacttcactgaatcctttttttgatcttccttccttatgcttgaagatccatttgtaggtcacaacattcttgcattttgatcttggaaccactttccacgtcttgttctcgataagggaacccatttcctcatccatggccttgttccatttggctggatccttactttctatagcctcttcataacatcaagttcactcttgctcaaacccgttgcacagaggagagcatatgcaaccacttcttcccatgcattgaaattgtacttttggtttggcttgggaaccctcttagatccatcccctgctaattgatagtctgacagctctccaacttcctattgaacttcatagttaggttccacctgagtgttgtcttcttggtccaggtcttgagctatcggagtggtgtcttcctagcatgttccacctgaagtgttttcacctggcctgaatctggtgcttcagttaggttgttggtccttgtacatgagtttagactgactattgcatcaacaagtggcaacaaaagagcaagtccttcatcagcgtggcaagaagacgataactacacagaggactacatgaatctcaatcactcacatgagcccattcacaaaattgaaaacttctgaaccactacaaaaatacccatctgtgtttatgaagtgtttgtcctatgtcaataatgaagtggagatgtgacttctaaaaaagttagtccattattttgtgtgctttgacgagtgactactcacaagaccaatagagattccctctcataaaaaaaaatgacaattaacgataaggaatcattcagacaacaaagattcctctggtcctctgattttgtctgtttgtagttataaaaaaaatagagtctggtatgctagagattccctatcagtgttagaaaactgatggtatctatttcaatgaggattagcattctaaattctgtttaaatttagaatttttttggtaagctatcacgtagaatgttagccacgagtttttcctatgaatttgtgtgctttgtcactgagaaattatctatatttccaaaaaagtaaatttgaaataaaatttaaattttgcatatcaaaaattatttttaagacatgattggttgtaattatattttttattctcgagttttaaaaagtttaaaaggtgattgattggtaatcacaaaaacaaaaatcaaaaaaggagtattttaagagtttttgaaataaaatcattatatttattttttagcttaaaactaataaaattatttggatttagattgttttctgctggggatgtgatcaattaaggttgttatccaatcaattaacacatatattatgaattcattcaaactctataaaggcttttattaagatattcataggatgtatgctcacttttggtgagggaagaagaatgatgttaaaaaaatgcattagtatacatgaaaaagactttgtatgcatagtcagaaaggtggtgatatgggttttagagacttgcatctatttaatgaagctaatttgccttctagactctacaattttccttctttgctagctgccagagttctagaaggtttttgcttcaggaaaaataaatttgatgatcttgatcgttctaataagggttcctttgtgagaaaaaacatcttatggggaaataaaatttttgactcaggggtgattcggcgggtttaaaatgagaaggatatctcaaatttttgggttcctactaagtcagtttcactgttgttgactcttctaattttgttagtgaccggagcaaggttttaattttaagagatgcaataggaggttgggataatgatttggtttgtggtattttctttcctaatgaagcgactactattttataaatccatttgctctcttctaatgtcttcttctttggggtcggcaattatttcatttctcacctctaattttttgtactattgtaatggaaatctttttttatgaacttaggtacttgggtagaagttgaggtgagaggaaaaagagagttgaaacttctgaatcgtgaagagacttatgtgatgaagtcgccaaatcttttattcaagttctttccacctggagttgagtggggaggtagtgatcgactcagatgccttgaaacaggtcttacagctgagctaacctacggagggacatcctttttaggcctaagaggaactcctagatcaatcaaaggaaagatcttcaattcttattccaatgaaccactttttgagatcaatggccagtgggataagtatgtatagcttatactatattacattcatattatatatatgtggtcgtttactcttttccactatcattgaaaataatgtcataactattgctttgtatgtttacttggtaatgcagaagtgtgacacttaaagatctaaataatggagaagtcaaagttttgtacagtgccaaagaagcaatttcaggacttcaaactcccattgtcaaagatccaaatgtaagcaaaatcaaccatatatattaattaattccatttgaggtattgcacttatttgcattttgtgcatttttttagggggtttggaaaagtgaatcagctgtagtttggagcgaggtgagccaaggaatcatgaatagagattggggaaaagcaagagaagcaaagaaatctatcgaggaaaatcaaagggtgcttttggcagaaagaaatttaaattctgaaacatgggttcctaaacattttactgtgttatataacaaggaaaatggatgggactgttcacctatagtgaagactgtcccacctgctcctattgttgtaccactaaacaactaacaaaatgtaaaattacaaatgattcattttgttgttttactaaacctacttttaaatattagtcgtagtaattagttagtattagttgtaatatgtgagtaacattcaattacaagttgttgccttttattgttttgacactatactcaactccaaactcagtaatcatctattgaagttgtatgtatagtattaatgcaaccactgtgcatatagttatttgctgaggaaggttctatattaatctaaaaatagttttaaataataagaacctacagatcatgtgttataactatagtgaatcaatagcctactaaaatgagctgagaaatcattacagaaaaataatagtaaatattaagtacaatctcgtggttgagtttgtataaaaagattatgtgacattaatgatgataatgttggtacaaaatctgaatccattcactaagataatgcttaataaaatttctatgggaaacatgcaaaactaaaaggttagagtttattatcattgtaccaccccaaggatctgccataaatgacatacattaaatcagaaagtaaatactgtaaaagaaaaattaccacttaaagcttatcaagaatcatatattacttttttttcatataaaaatttatcacccatctaacaagagagcaaagatgcaactgaaagtgatttttcatgttagtcacggcactcaaggaataaagtgggttaataggactcacactagtgataatgacaacatgatcttcctgatcgctcttctttaccgagattttcagaaaccaatgaaagagaaagctaaagaaatagataaagaatgaagaaataataccatatttttatgtggttgggacataaacgagtcatagtcaacaaggtaatattattacaatgaggcttgaaaagtcttaggatttacatgattgtttgaaccctagaattttcctaagcaattgaaaaatgagatttcaaccatttgcatgggatgatgttcttatatttatagtgctacggttcttatttatctcccttttgcatactattagggtaaatacaaataacatattgacttaggcccatctcgtggagcccgaccaatgaggtgttgattatatgctgatgtggatctcacataatgtttgatagttgtccaattcgtgtcctataaaaaaggcttaaagatacattaaatgtttgatactcaattattatctttccatattaggaagatacgactcacgagtgagatcatgagagttaaatccttatattgtgggatttggtaattaatgagcatgatacggagttgattgtctggatgtctactgatgaatttttcgaacgctccaaataatgtcttctggattctcactgttgttggaggaatacctcacctggacgagttgctgcctatccattatctggaagatcaatcttcgctaatggatgtggcccatcatcttggttgggcctattattgggcccgaagtaactgagctataactggctttggaaattatacgtgtcctcatccaaaaacactgatcacatttaacccctaagcatctagagctctaggggttatataatattgtaccttgaggacaagtggaggctaaaggtgaaacatttttgtaatccaaaccaaaattttttctggttgagagcttcttaatttttgaaatgaagcaacacatggcattatatctttggcttgtcgggatcatttttctgaatggagtacatgcagtagggcttcatgaaacgatgatggattgcattagaatgcataccaaggagaatataatcattagatatcttgttcccaagcatcgcattaaatgcgtatctaacagttttcttagaccgtaggatttttcttgtgtcttcttggacgtgatcttaaccattgatctagaatcatgtagatcacctcttttatttataaatatagtaaaagtttcccatttaccacttttcccgaaatttcaaattgagtacttgttggaaattaatttactttgatctaaatttactaacatgtatgttggattataattctataatttaacattctaaatatgaatttgctaaaacaatgaaataaacacataaaagttgtagaaaacattacattgatggcagcagaataatatgactcaatctttacagatctctaacccttgatcctttctattgcagagtatgatcaagatctaaactaggattctcctttagttaaatatttgaactacacaattttccgcactatgctgagtatattgctttgaattgtgtgggaaatttcttaatactaaggaggacaaatttttgtgaacaaacagtaatagaatttcaaaaaaatagatcgaaaataataagttttctttttgatttaatttgttagacaagagagattatattagggttctacttgaatcaaaagccattatgttctatttatagggattcattaggtttggggttagaacttaatgggctgatttgaaagatccaatggcttaaaatgctccctcacggccgaacccttatgaaggcccatgagttacatttttgccattactttgcttccttaatgaagtaaacttatctttcttcagtattgccatttttttagctcttgctatttaaatactaattctatctatttaataattataattaattatcaaataaaattaccatttaaatatatttattaattagaccttcaaagatctcttaattaataaataaaccttgaattctgttttcttctcaattatgtccttccttggtaaaattcacaaataagacatagtctttatttagattcctattgagtaactaaatcaattaattgagac

SEQ ID NO: 218173 - DNA, 10831 bp, Cannabis indica
attaaaattttaatataataacatatatattaatgatgaagtcataatattcaattctttaaaaaataataatgtacacatatatttgtttttatgtaaaacaaatcgtatcgtaaaaattagtaattttataatgtatatattacagtgagatttaaattatattaaatttaaaatcacaaattgtaccgtaaaaatataaactacaaatgcattgcaaaagatttcaattcgaatttttttatgtgatgcaggcaatttgtgtagtgtagacaattgatgaatatccgtcttaagtatatataatggtcattcatttaatatttaatgataatatttacataacatcttaaaataaatttaaaaggattttaccattaaaaaagataaaagaatgtataaaaaataatttatggcataaatacataactttaactttaaattgtaaataaatatataaatacttaaatatttatactgtaaattattgaaatataaaaattaaatcacaagagttggcctacgggtggcaattcgtgttcgtaggtcgtgttcgtatcgagatccatgtataacaagtacatgtttgacccgaacacaacccgtttaataatcgtgtcaaccaatgaaacccaaacacgacccgtttataaacgagttgacacgacacgatccgtataacctgtttaaacatgtcaaccaataacacgtttatgatgtattaaacacgtttataattcttttatgacattttaaagtcctaaaataactttaaatgagttattaacgggtcaatatcgtattagtcgtattaacttgaacacgacctatttattaaatgggttggacgaattaacctaaacacaacccgaacccatttaacataaatcggctaactctcgtgcgagtttcgagtgatgttatcgtttcagactcgttttgcgaacctaagttggccgctaattcccctattatttaacattattaaaaacatagcacaaagctaacatgttttccttccaaaatgttataaagtgccaattaaaacgagataagagggaggagagtacactaaagactcaactgaattctggaaatggcgtccatggagtctttctcttcgattctctcctctaccgcgctcaaatttccttctccgaaactctctcatatggcaatattcacaccgaagtttccttcttcctcaatcgcttcaatggcctcctcacatctaatggcaaccactacgaagcactctgctcaatccacgaaaaccatttctgtaataccaccgccgacctcaacttcccaaacggactcaaccaccatcaccaccgcttctgttcctaccaaaaaggtttttcccaaatacccatttctccatatctataattttcagaagtctgcctcttgggttcaaatccttattgcatagttaagttcactaaaatccataacaggggacttagtataagctttcatgggcaggtgctggtaccaattggttatggtaccgaagaaatggaagctgttatcattgtagacgttctccgccgagctggtgctgatgtgacggtagcctcagtggagccacagctggaggttgaaggttcaggtggtacgaagttggtagctgacacctccattaagaactgttccaatcaagttttcgacctagttgctttaccggtttgttcttatctttttactaatctagacttagtgctttgtaaaaatagtatttatgaagttttttattagcaaaataattttttaaaactttttattagcaacataatcatgtttagtcgtagaaatgatcaaaaattatactatgctaccataaaaagagcaagtctttttccgaccataaatttacaatgtgcttatggtcgcttagtgtaaatttaatgtgattattttgctaattttgttagaaaaataaataatccaagatactaatttgcatataatatagaacacaatttaagtatatgttcttgattgattcatagtaattatcgtctttctccttaggtctgtaaattagaagcagttttatttatctaatattcaattgtgatgacacaatatgtattaatagagttagggaagagactttgctcgtcaaagacttcaattaactagaaaaattcacacttttacttcaactagattttacacacatagatgctaagccctaactattgatcactaacaatatgggctagcacaacaaagaattatctaatcaattattttaataaaaccaataaaaattaatgttaatccaaataaaaattctaacaaatctaacattttcatattgatagtttggtaaattttcctcactataacgttataaattgttgggaagttgtgtgttcagctttagttaaaaaattagatatgaactgagaatagaattatgtatatcattttaagggaggaatgccagggtcagcgagattaagagactctgaaattctgaaagaaattacaagcaaacatgctgggaaaaatggactttatggagcaatatgtgctgctccagctgtaacacttctaccatggggtcttctaaaaagaaagcaggtgcattaacttggtttgttgtttgttcatgttattaattttgatgaatttgttgctggtcaaagtttgtggatagctaatgttaatgtagtttgtcttgcaagacaacatgccaccctgcattcatggacaagcttccgaccttctgggctgtcaagtcgaatatccaggtttctggagggcttacaacaagtcggggacctggaacttcttttgaatttgcgatttgcctcgtggagcagttatttggcgagtctgtggccagagaagttggagaattattggtacgccatactactttgaattttcattatgttggagtgggagagaggaagttaaattaaggatagattacttaaaatgaggcttcctgtgttagaaaaaaataacattgtagttcaattaagtatcattagaagaacaagctgcaaagattgtgtgattagtagcataggtttgaccactaagcattgcttttggcttagaagggcagaattattttgtcctttcactggaattatttcttctgtgttattcaattaaactctccctttggtcagattgtatgtcatatgtgcatactcaccctacactaatgctcttgccactttcgttttagatggtctgtgcttcagaaaatgaatcacgaaaggaagaattcaacatggtggattggtccgttgaccacaaccctcgtgtaagtagctcttattcgtaatctatatttgttttgctgttatcttttgttgttttattcattacattgcttactaatatagggaaagtcatttttctgcatattgctcaccttgaccctttttaaacacattcaaggcaattcatgatgtggactgcatttccaagtagatgtatagtcaatgatgcaggacataatatgttaagttttgtacaaattttacaaactgccctataatgctgcaagtaacttcgagtagcctagctttacagttgttccaagtccggtacgagagccactttttatttattattttgtggtctaataagttatgtttgtcattatttgaatgttagacaggttcttattccaattgctaatggttctgaagagattgaagtggtaactattgccgatatattaagaagagctaaggtggatgttgtagttgcttcagttgaaaaatccctaaagattaaagcctctcaaggaaccaggatagttgccgacaagttgattcgagaaacttctgagtcaatatacgatttaatcattctcccggtgagtcagacaaatacttttgcagtgatggaactaactataattgcatgtccccattgatgaaaaacaagaacataatttctgttaatagacttctgatatttatattgatgaatattttgccaagtactatattaaatgtgtacagtatagtctaagcatttaatgtatatacaaggcccattgctgcttgtactcttgggaatgaagttgtgaatttcagagagatgttatgttcaagttttcaagatgcatatacatcttaataaattgccttaaaactgtcataaactatattcttcaactttctggttctttgtaacatttcagggaggaatcgctggggccgagcgacttaacaaatctaggattctaaagaaattgctcaaagaacagaaactgagtggaagaatttatggagcagtatgttcctcaccgcaagtcttgcataaacagggtttactgaaggtaatgtgatgaaataaacttattaatctcttcttatagtgatacctcacttgcttatatgctacatatgccaacaaaatacaggataagaaagccactgcccatccatctatcttaagttcactgaccaacgaagtagtcaccggtaccaaagtggttattgatggtaaactgattacaagccggggactagcgacagtaacagagttcgcattagctataataagtaaactcttcggtcatgcaagggcaagaagtgtggcagaaggacttgtgtacgactaccccagaagctagaagttctgtaattggaacacaattttcttatcaagagtatagattctggacctgactttgtagtagaggaaaatataagctgaggcatagtggactggacccttgtcacgtttgaggctatatatcttccttttcagaaaaatggttaccttgaaacttgtaaagccccattttatgaatatagaagtagaggcatcatataagtcataacatagcttttacaagtcgtagttctttgaaagttgaattccagtgttataacgttgatttctttttctttactttaggtgaaattttgtggccaataataccatataaggtgaacttatgttacatgtttattgttgtgtgatactcaatattaacgatgttttttttatgtgaagataaacttaatgtttgtttcgtaaaagaagaatgagagggggaaaaaatggttgaaaaaagaaaaaaaaaattgaggttatattttttgtttggctcaaaaaaataattaaagttatttactaaacatgcaaacgatataaatgaaattttgtgtaaaaaatattccgttgccgggacttgaacccgggtctctcgggtgagagccgagtatcctgaccaactagactacaacggattttgatatcttatgttcaaaagaactttatatatatccttatttattttgttaacagagataatcttattttcaatccccgtgttcttgtgtagttttttttttaatggaagtgttcatgtgttatttattacaggggaagcaaagctacttatagtaattgagtacaaacgagaataccataacaaactctctaactaccttattactgcttaagaacaacaactaacaataataactaactctaacactatccgagcaagtttaatactccccctcaaggaggagcggatgcacacttgaggctataatcgtcatggttccccaagaaaatatacgtttacatattttttttaactaaataaaaatatttagtcctagccaatatgaacatacattttggagttacttgtgtattgttgggtgatactcaataaccatgtctttttatctttttctaaagggaatattaactatatgtttgtttggtaaaagaagaagaatgagagagaaaagaaattggttattaaaagaggttaaaagaaagatggaggttatacgttttttatgtattttttattttatttatattgggggaaactgattttattattattaaacatgcaaatgataattaataaataataatgattaaaaaatttattccgttgccgggacttgaacccgggtctctcgggtgagagccgagtatcctgaccaactagactacaacggattttgattttaatagttcaaaacaaaattatatactatattagtatttttttatatttacttatttattttgttaagcaagataatcttattttcaatccctgtgtttttatgtgtaataataataataagtgataggaagtgggaagaacagtaataataataataatagttctaaaacttttgtctccataattttgggctttgttggaaagaagagacttattattttcatttgcataaattgaaactgaccaatcaccatacatttgtcttgccgatttgcttattcgattaataacatatataataacatatggtcgtatcgtattgtgcatatattattgaaactactcaccattttctgccttcaaaaataaaattaaaatcaacaaaacaattatacatttatgttgtctatgtttatagttatagatgttgaccattttaatatctcttatgttattgtgaccccaaactactccaaatgtccaacattaacatatttacatttaatttcctataaaattttacctctttaataattttttttacccgacagattgtgtcgttttagtttaattttattgtttttactaaatattttgtaactttcttcaaatttgaaaacgtggaaaatgtcaatgattaatttacagaaaaaaaaaatagttgcagcagaacttcttatgctgctatttactatttaaattaaaaaaaaaataatagccaaattacttaattagccatataaaaataatttaattagccatgtaattaagtatttgattaatattgaaatgaaaaacattatttgctaaataagtaaagcgtatgggagaatggcatagaaattaaaatataaacaacaaaaacttattgaagaggaaaaaataaaagaaaagaaaatgtaaaaaattctaagctatgaaatggaaaccaaacaaaaatcacacggccgagttcaaaagtttaataataatgtacattaatatgataaactaaccttagcttataatttacaccctataaaataaactaagcctatctaactttttggtacaacacagaatttcatatcattgagatattttgcatatataatatattatatataaaagtccaaacccactcatcattttttcaccaaggacctgtcaatgtcctcctcaagcattgccttttgtttccccatccattcattgtctccaacatctgccaaaccaaacacaaacttacttagtatgtcaaatatctcttttgcatccactagtaaattgacaggtgtagtgtgtatgtaaaagagaaagatagaaagcaaatctatgccagctcaaagctagttctagatattttcttgttcggttatcaacaataggctaattagaatttttgttctatgaactaaatcatgtcccttaaattttttttatgttaaaaatttcttcctgaacaattgagattattagatttaagaatttttgtccaatatcatctaattttactaattcagtgattatccatgtactaaattatactctttagactttaatgtctaccaaattatatctcttaaactttgacatatacaaaatcatgtcctatgaactttcatccatgttaagtttcacttactaaaattgaataaaactccttaaatccaacaatttcaatagtttacggaaaaattttaaggggcttaaaagttcaaggggcatgattttgtaaatgtctatgtcttatatttaatgactgagaatgtgtagtactcattgatggtcaagatagtcctaatcaacatataataagctgaaacagtactaaggtgtcttttaactactttggctttaaccaactaatgattttgtttttttcttcattgaagagtctatccataacatcaaactaagtgcaaacatgttcaagattcaaagttttgggactcagcttttaactcaattagttcagataataaaataacagaagaaaatatgtacctgaactttctgcatttccatatactcttcctgaatagaccaaaaatcaaatgaggttaatgagcaagagtatacagatagaacatgataacatgtaagttaaagaaattacaaacctgttttttcagtagctcttcattcacttccttaagttttgcaatttctgcttccaattccaaggtatatgcctaccagtaaacaaacccattaaataaaattaatccaaaattgctagagaaacatgttacaccaagaagacttataataatgggaaacaaataatgaaacattggttggtaatgcaagaaagaagattggggtatttgggataaagaattcaactttctctaaaaatgaaataaggaaaaagaatatgaattatgtgtgtgaaaatcatgacagtgcattcctaagttgcagctagcctagctagaatctggattcatgcacaaacagctgccattccagacatccagcatacatgttaaactacaacccaaacattaaacactttggttagaagcaaagtcaattggataagaacaatcaaattagtacttacaatgcttaatctaaagtacaacaactaacaatggatctcacctgcttacgagcacgagatcttgcagctgactcgcggtttttgatcattcttctatgccttctttcaataactttctccaaaccagggccacacttgcctcctctactgaacatataagggactggtggtgacacagaaggtgaatccactgcactagcctttgcaactacatttgaggagatgtgatttgctggagacctcgtcccaactgtaacagtaccagtggcagcaccaacattagccatgctgttaatcccccctctgccttgttgtaagcccctagcttggactaaagcagaactcacagctggctcattaaccccaactattgtttccctagttgctgggcttgtgagctgagcattgcttaccaaatgcattggtggggtaaaggccaaggttgcaggcttgggatagagcggctgctgctgctgttgttgttggggcttcagctgctgttgctgtagctgttgctgctgcatttgtacttgttgagaagatctgactccaccattgttaattggcaaatttaaaggccggtttgtagtaggattagtcatcgtgggcattcgattatctactaatccattgttccgacttggctgttggaatccaaaagctaaagcattagcattagcattggcattggcattggcattggcatggttgttacttccattattaatggaaggccttccaatttcatgagcatcttctctcacaatccctgctctgacaagaaactcctccaaagtcatctctcccaaagtttgttgcctctgaggcatgtttgcttcccccactgaagtagtaccattactaccactaccaccaactttagctccattatcactgtctttaaacaagtctctccacacctcatctactgtcatttgactcagtgttcggggcaaagttattgagccttgtctctgtatatttccattcatattcacaccaccaccactaccactgccaccagcaccaacaccaacaccattaccacctcccattccaacggaagcagacaatatttgagtctcttcagcagtccagatatttttcaagagttcatccatattcattgatccaaaatcttttccataccctccacctatggtgttttgaaactcatcaaaagtcaatgagtacacagaagactgcctagccaacatattattattccctattggctttccacttcctccaccactaccactttcacctaatggtgcatccccaaagccattgaagttcatgtgtgaccccatttgtttagacaaattgagaaattgttacaacaactacctcagctttatataaagtcaagtttatatgcccatccaataaagcactacttcagttttggtttttgctttatcttggtctatacaaaacagaagaacaaaaacattaaaacaaaaagatgggattagtgaaacatattactaaaactcagattctaaagctatgatatgaaataaatttaataataaaccgattaacatcaaaacagatatagcataagacaatttatgaacaaagtaacaacaaaagaggggaaataaaggaaaataagtgcagcatgtcttttctcacatgagaagtacaaaaatggtcttgttaattactgattatcaatacatacatacatagatacacatatagatagctaaactatatattgacttatttttcttccaataatagccttgatacatgtacatgaaaaaccaatatttcttcagagaagatctcatttttaagatgaggtaaaaaaattgcaaaaatgatcagaatcaaacaaatccaaattagctatatataccaaaagatatacagatcgttagctagtactactattactacttctagctctttatgtatttattcagatccaaataaatcaaactaaaacaattaatgcataacaaacaaaaaatactttccaccttcattaataaacaaacaattatccctgatctaacttaacataacaacatgatcaccattaacaatcattaaaacaaagaaaatcccatacaaccaaaaactatactaataaaagcatgaagaaaattaaagaataaaaacccagaattggtaacagaaattaagaatagtatcagaaaagacaagtcaaaagtgagaaaaatcaggaaaaataaataaaataattataaaaaattaaaattggttacaatgagagagaaagcttggatttttatttagttttcttaaaaaaagaaaaaaaa

SEQ ID NO: 218174 - DNA, 13474 bp, Cannabis indica
aatagattggtagaatgagaagggggctttgaaagagcatgaataagatagtataaaaatgagcctcaaagaatgaggggagatggtgatattctaattgggccttggatctttggagagtgatgagtctcttgaatgctcgatgggaagagttcattcctcttgggaatggtacaccaatttacaattttcatcccaaattctatatcagagtacatcactgtagtctgcttagactggtgcatctatgtttacatataatttgaaaggataaaatacaagatatagcatgtgaagcatcaaacagacatcataccttcatttgtgtaatttcgtgttccattttcttgtttttatcaagaagaagagactccattttgctcatctcttccccgctagtagcaacttcccaatcttctgcctcaattgaattataacctactgcctggataaataacatttttttgttaaacagggattgatgtcggaaacatttgtgtgagttgtcatgagttgtcatgaatcaagagtaatggttgagatctcaatgcaaacaagaagaaaatgaaccagccacaacaaaaacaatacctatactatcacaaaagaatttaaatcaaaaaacattcattcatgatggcatagcagacaaagttcatacgtttttctaaaacatgaccttataactaagttaagggaatgattctcaagagtgatgaaactgaatagctaagttagctagtattattatctcatgaatttttaaaagcaccacattgcaccatcagccgttatgtctaacataaatatgccaaataacttctctaaggcgaacatagatatgccaaaataataattataattataacttatgaatgttaagaacggtacctgcaagatcttcacttttttacgcaaatcatcaaccaacttttctgttggccttgcctgaatctctttcttcatctcctcaagggctacttcctttattcataagaaagacaaaataaatggagacacaaagaaatcaatcagtaacttgtagagcatttcaagatagtattgtgaatgatagtttgctgaataggaatcaatgaatatatataaacaagtaaatgactacacaaaacatcaagacattcccatattcaatcacttcacaagatacggtgtatacttaatagggaatgagaaacacacaatagggaataataaaaatataccaaatgactaataactaatgaaacagtaattgaaatagggtgtcaatggataagtttgtatttctcgtaacaagaaaatacagtaatgatccaaatattcgagagcttgacccctccatacaattcccctcctcccctctctcccttaaccccaaatattgcaaccaaaacagtacagagtacattctcacacctctacatgaaacatctactctcaccactatgatagacctcttcaaaaatatacaaacgtgtggaggaagaatagaggtaaggaagttaagtgacagctgtattgctgactcataggagagagattgagaatatgttttctatactattgtttttgtaataaaacggttgaggagtttgtgtgggactttttatgcagaaattgggtgggaaaatgggagagggcaggctctcgaacaacatggtgtgattctcttactgattgtaattgttctttgctattaaataccaagcctcttgctggagataacttgaacttttcagtagagtttctcttaatttcttctactattctcgagtggggccagtctaggacaagtggtcccttcctctttttacaaaaaaaaaaaaacttcttctacaattcttctacctctgtttttagttcaattcatatcaacaaggaaatatatcaagtggtaccagagtagttgaagtccgggagtatggcataaaaaaaaaacatagaagctgtggaggagagattaacagtggttcaagaagaatggtagaaggggcttgaatgctcaagggaggagctgactgatcacaagattaaagaatatagctcagggactacccaagttggagcaacaggtagaggaattacagaaaacacaagggaaatacaaataacttggaatacatggtttttaagctgcaccagcttgtaaacggtatccagtcgagttcctccaaggcaaaggatctggtgcccaaagtgcaaatacatatgccacatggaaggtcgacgtcgatggagacttcaaatccgacaagaatcaatggacagcagaattcgagtgagaacaagtatagatcaaaatttcaagcttctcgacgcttagagttttttctttttgctggcttagatcctgatggttggctttcccgagcatagagatattttcaattgaattgcatgatagaagaggagaaattagaaacagtggcgaacactatggaaggacaggctttagcttggtttcaatatgcggaagactcaatccgatttcgtatatggccaaagtttaaggtgactttcacagtgcgatttagatcattacacaaaggatctctttgtgagaaaattttgaatattcgacaagacattacggtggaggcttattaggaagagtttgaaacgatggtgtctctcctacatggtcacctatctcatgaggtgttggatagcacatatataaaaggcctcagatcgatcgtccgtacagaagtgagaaatatgaagccacaagggctgtcagaaatgatggaagcgactctcacggtaaaacaagaatcgagttatgcaagtggatagggttggatcaaatttcaattgggcccgacccactaacttgagcctcacccagtctagcccacgcccttacaactctgggtctaacttacccagcccatattccacttagaacaccacgatacccattaacgcaccatcaaggagaagtgcaatttctatgaatagaccagtcgagctttcttgtcactcgtcgtccaggcagctacaagaaatacaccaacatcaaactccaagcacgcaaagaaaagggacagtgctttaggtgtgaagagaaatggtcttggggtcaccaatgtaagaatcaactcatgcaagtgttgttcgttaatgattccttcatttgtggggaaggtgaagaggagaacatactctttgaagattgtttggaaaatgttccactgaagcaagttgacggtaaactctcaatggactcagtagggtttcactaaacaccaagaaaaatcgaatcacatgaggtgacgatactcatagattgtggagcaacccacaatttcatcaggaaggatactgttgaacggcttaaaatacctcacacaattgcatgtatttgtaagaatctattattgtccttacttgagatagatgtggtagaggatttcttccactcgaatcgggatattcacatgtgatcctgggtacagcatggctgacaaagttggggtcaatggaagtggactggcaaagattgattataagatttaagctaggacgcactactgtcaccctttgaggcaagtctagcttaagtaagcatttgatttctctccaggccatgttgtgaacgctgcaagaaggtgatcattgtttattaatagagctggcgtcgtttgagtcacaactgagctgtgaagtatctcctccaacagaggtacaacacttaataaatcaattttccaatgtgatgactgccctattgccctccctcctaaaaggatcccgaccactgtattgaattagtgcaagggactgctcttgtgtcaataagaccttattggtaccctcataagcagaaagatgacatcaagaagatggtgggtgacatgcttatagcaggcattgttcagactagtcgtaaccatttattgagtcccactctttagtgaagaaaaaagatggcaactggagatttcgcatagactacagggctttgaatagggtcacagaactagataaatttccaattccagtcattaacgaactgttagatgagtagttcatggtacttctattttttcgaagttacacctgacatcgggttatcaccaacttcgagttagaccaaagaacgtgccaaagacaactttccggactcatgaagggcattgcaagttcttagtgatttaagccctatctctgaaagtttgatcttgtattcttcaatgatattttggtttacaattcggatctccaagagcacttggtccatttacaataggttttggaaacccttcgcactcattctctttatctcaattcaaaaaaatgtttatttgggcaacaagaattagaatgtttgggtcatattattttcgccactccattaactcttgtaagatccaagcaatggcagaatggtcggtccaaacaaattagaagcagctccaagaatttttggttttaacaagatgctactggaagttcatccgcaattatggacaaatagctgcatctttaaaagattaatgaaaaaggacaatttttggtgaaatgaggaggcccagcaagcccttgaggagctcaaattggccatggttactattctgatcttaactcttcctaacttctcaaacctttgtaatcgagacaaatgcttcgaggtcgggatagggggctgtgttaatgcaaaatcagtgccccgtagcttacttcagttttgagcaatcgagcatgtttaaaaattgtctatgagcgtgaacttacggtcattgtgttggcgattcaaagtggcacccttatttgcttgggcgaaaatttaaagtctaaactttatgctttagcaaaaactggtagttgaggaacatcaaaagtgggtcaccaaattgtgaggctacgattctgaaattgaatatcaatctgcggtggacaataaagttgtcgatgctttgtctccccaaagtgaacaaattaaccttgctctcctttcgctttcatggtcggatcattgggaagtcttgcaaactaaggttgataaagatccaattttgggccctaagaagcagagcttgctagctggtgcagccttaattgatggtcatacattgcggcatggaaatctcatgctccatgacaagttggtcattccagcaacatcttcattgattccacaactcttagaagagtaccacagtggcaaaattggggaccattccagtgcttcaaaaactttccaacgtttggctagaaaagtggtttggtcagatttgaagaagtgagtgcaacaatttgtggctcaatgtgtggtatgccaacaagctaaattcagttctctgtgtcccgcgagactcctccaacctcactattgcagtttgggtatgggaggatatatttatagactttgttgagggtcttcctcgctcaaaggggtatgattgtctcctggttgttcttgatcgcctctacaaatatgctcattttttgctgtcgaaacacccctttattcccctactattgctggtttgtttgttcgggaagtagtacgtttgcacggaattccatgttccattgactcggatcgtaacaaggttttcttaagcaaattttggtctaaattgttacgtctccaaggaacttgccataatcatagctcatccaatcaccccaaagtgatgggcaaacagaagtggtaaatcaaagcattgagactcttatcttcgttcttttgcatgagacaagccaaaacgcgaatatcattggattccatgggctgagtattagtatgactttattctgggcaatgtaccaccatgatccaccccctcttctatgcttggagttgggtgccaccctactaatggcagttgatcaacaactgcgagaccatgacactatgcttgatgatctcaaacacaatttgcttcgtgcccaacaacgcatgaaagacatggctgataagaagcgacgagaggtgcatttttcagtagacgatttggtcttatgtttaactctgcccttaccatcacaagtccttggctcaatgcaagaatgaacaagttcccctcattactttgggtcgtatccagtggtggcttccattggtttggttgcttacaagctactacttcctgagcgggttccaatacaccctgtttttcatatttctatgttgaagaaagttgttgaacctaccaacacagttcttacctattattcttcatgctgacttggagtggaatgtgtaacttgaggccgtggcagatattcgaaacaatcagtaggggttgcttgaggttttaatcaaatggaagcacttgccttctttcaagaactcttaggaggattttgaattggttaataaacaatttccctctttataccatgaggagaaggtgcgtcttcaggcagagggtaatgattaacctcttctaaaatatacatacaagtagaggaagaatagaggtaaggaagttaagtgagaatattgctgactcataaaaggatactaagaatatgttttttgtgttgttatttttgtaataaaaggttgaggagtttgggtgggattttttaggcagaaataaggtgggaaaatgggaaggccatgctctcgaattctcttactgtttgtaattgttctttgctattaatacaaaacctctagctagttataacttgaactccagtagagtttctctaaattacttctgctgctcttctaactctgtttttagttcaattcaaatcaataaggaaacatatcacattacaattatgttagccccgtgctacaattcacctattgctaagtgttagaacatgagttgtatattagttgtacattagttgggggcagtctgatctcttggaagagtaagaaacaaaatgttgtctagattcagtgttgaattagaatatagagctatgacacagtctgtgtgtgaggtagtatggatttatcagcttttggctaaattcaggtttgacacttctattccagcaaaattgtagtgtgataatcaagttgctcttcatattgcctcaaatcacgtgttccacgagcgaactaagaaaattgagattgattgtcattttgatcgcgaaaaaattgaacaaagtctgattttcattggatatgtgaagaccggagaacaattaggagatatttttacaaaagctttgactggggtgcgagttgattatctttgtaacaagttgagcatgattaacatctatgctccaactagagggggagtgttagaatattagttgtatattaattgtaaaaattagggtaaattgtatttagtagtttcttatttaatctcatagctttgtatataagtatatactattctatggaatacaatacacaattcattcaccattttctacactaagattatgcttgagctcccttcttcttctcacattactttaaaagagtcaatatagtgtcaagaggagtagtagaaggttatgcttgagctcccttcttcctctcacagtatatcatttcttccatcaccattgttacattacttgtggttactattatattacttatcaatcttacagaaggagttaagttcacatcaattggtatcatagaaacaatttcattgaatgctttcaactcaaatgaaatcaagagtggaagcgaaagaagagactgtaaaatcgcattcccacgatttgacagtgataaccaagaatcttgaaatgttgaataagggacaggtgtttattgcctctaaaattgtctcgagatctcttgctcctagttgaaatctcgagcccaactcaattcatctaagaaaaaaccttatggcaattgttcttgctataaaatggcattcaaacttgctaagctaaaattttgtggtgcgtaccaatcaacaaggcatcaaatttatgttagggcaatgtgtagttacacaggagaatcagaaaagatttgttaaactactggtttacaactttgagatccactataggtcaggggcagccagctatgccgtcgatgccctatcccgtgttacggtggagtgtttggctctcaactccaccacttgcttaaattgggatatcgtggataatgaagttcaccgatgcatttctctctcaagtttgcactgatttggcctaaggcaattaactacctagttttgcggtggaacatgatcatttggcatatcaagggtggttggttctttcttctactttgaccttgattcctcatttcttaaaagaatatcactgttcaccaattggggtcatttcgaggaattatgttccaacgaaaggctttacaatgatgtatctttgacaggtatgaaacggatggtggtcgagttcgtaagccattgtggtgtatgaaaggaatagaattatggtcatgtcacctacaagtttgttgttataaccattggtgctacgtgagtgtgtgtaggaggacttgactatggatcttatttgaggggttgcctaagtctgagggtgtggataccatctttgtcattgtggatcgaatgagtaagtactctcattccatgcccctcaaacacccttttactgttcatattgtcaatgaagccttcctccataatatggacaagctacatgacattctaaagcttatcacctccatttttggatcgggtagccatttttggaccgaactctttcacctccatggtatggaattgaagcaccgaacaacttactagcctaagaaaattctaagttttagtgtaacacaccttttcactcttccttaggttttaccccattcaaggtaatgtatggacaggggccccctctaaagttctaacctcttcaggtaccacttctaccattgtcatggatcaactgctagaggaatgtgattctttcttgatgaatggaaaatgcacttgttgcatacctagcaaaaaagaaaaagaaatcctttgttgactcttctcgccgccatgtgaaatttaatgagggtgatttcgtgtttgtgaaggtacacccatatcaccaaaagaccttggctgtcccaagaatgagaaacttgctgctcgtatttatggcccattttgggtgctgaagagttgtcactgacgcttatcacttagactttcccccatccttggcggttcaccctatgtttcatgttttccagctccatgccgcaatgagtgtgataagctcatttcccctactgccctcgacactgctaacttggaattaattgttgagcctggtgctgtcctagatgtgctccatcatgaggctggatcaagatctatcatcaaagtgattatttagtggaagagtttgcctttacttgaagccccttaggagaaatttgacacgatttgtgctcaatttccgcctttgaccttgaggacaaggttaaagaaattggggagtggggcgcgtggtgcacttcacctaagctaggagaagcacgggtagtttggtcagtttctgttgtggcaggggtattcttgtaattgttgagttttgctttgagagtcttgacatagtgtcaagaggaatagtagaaggttatgcttgagctagtaaattgctcttagcatcattggagagactcaggctctagaaacatgtgcaatggtgactgtttagctattttcttttcaataataactcccttcttcctctgaatttataccatttcttccattgccactgttacattgcttgttgttactgttatataacttatattgattattaaccttctgcaggagttcatttcacatcaaattcattgagccactacactacaattcagacagccactactgccaccaccaaagatacaatatagaaatcacacactaccctgtgtacgtcttattcttccatctaacaagtaagtatttcaggaggggcctatcatacacattaagagaaaagagagaataaaagttgaccagtaaaacataatttaaatcaatatgatacaccaatagaaaagaacatagggttctgccattgtccaaatcaaccaagcccttttgatgtgaggcaggtgctaggtaatattaagctttacaaattaaaaagtttaaataccttgtgaaaggattataaacggtaacacaaagaagaatctctgtcctttccccacattatttatatttatatatataatttagaaaaaaaaataataaacaatttttctataatttagaaaaaaaaataataaaaaaaaaaataataaacaatttttctataatttagaaaaaaaataataaacaatttttcttagtaaaactaacttatcagccagcttatcatagtaaaagcaagcaacacataataaactagttaagtggagagcttgagaaccaggcagctgatccttttacacaacatgtttcataatataattctatgtaggagctgaaccatttatgaaatcatgctaacatcacagaggattgtacccaaaccacgtaactcaaatgtaaagtatcctagacctaaggaagtgaacccaggtaccatgaatatcatgatgcaagtactgaagagttattttgatttcattagctaagtgaaagcaaagaagtataccttttcatgaagcagggaattcaattttttgatatcattaatgtgttcttctcgctcatttgacaaggtagtttcaatattgtgaagttccatgttgagctcagaaatgatcttctcttttgctatcaatgaattctcaaggatggtatttgaatctatatcatcactaacataagaaccgagcataagtcaaaaaccataactcaaacacaatacttatgatacaaatatcagagactacgattataatttcagacacagtacttgataaatgaataatagtaagcccacctctttttatcagtgtcttcattggctgactgcaactgggtgcgtagaattccctgcaatttgaattcataatggggcatcaaatatcaaaagacataattcacaaagtccaaatgagaagcaaaatcaacatacatgccaaactgatcaggataaaatagttatgtgaaagaagttttcaccaatgcttttagttaaaaaaaaaaaaaaaaaacaagaaaaagtgacaaagaaaacagaaaactaatttagaagcaaaaactaagtttcatcaattaaaagcatcatgactagtgtggctaattagaattgtaaataaataaaatagtatactagtcttgcattatagagtataataaaaaattaatttccaagtaaattatcttaaccaactaagttgcaaaacacaccttttccctctcaagactaagaagccgagtttgagcccgttcaacttcatccatcagaagattgacctctgactgctttgctgccctatcttcatctgaatttatagatgaaaatgtgagatgaaagcagattctttcttttttctctttattatgcagttagataaggcaaaagtttgaactttgaaccacaaatacttcacaaaatcattaaagacaaaagatgactagcatataatctgattgagcacgaagctcaaatgtttatagatgaggcaaaagtttgaactttgaaccacaaatatttcacaaaatcattaaagacaaaagatgactatcatataacctgattgagcacgaagctcaaacatttggctttgtgcaagttcgtgcaacttctgcatattggaaacactctctttagcttgtcgtaattgatcttgcaacagctgctctctgaagaaaggttgataaatcatggtacaaaagctagaatttagaaattaatacagacatcaaaggtatgagaaatctacgtaaagacatggcaaccctcaatcattaaacgacgaaattttagtatttaatatgaataaaacaatccagtttacttcaattttgttggatactcaaaaacatattgttaattacctatctttcaggacctcaagtgttttttggttctcctctgccaagcttctttgcttaatctccacaatctctttcactttttcttccatctgagaaaatgtacccacatttctgtattaaaatgaaaggctcaataaattgtctttgtgtcatcataatttgtttattagtgttgtttctaaattttccaatgaaatttttccaatttaaataataaagaaatctattattttgcttcctgcacagtatttgaggcaaaaatagcaattcttcaactaaatcatgagtagaactcatatagcaattcttgttacacgagaatatcaaaaatacagattggaaaatggcataaaatcatatatttgcagcactactcgaaatagctcacctgttgttctaactggcggttacgctcctcaagtcttcgtattgttgcctgctgattcttcaaatgagttgcttcggtcctgaattcttcaagctcaactttcattttcctgttctccaattctaggtcagacaacttcatatcttgctcctgcacatgatttgaggcaaatgtgacattgcataaagtactaacatacaaagcacagcctgcacacagaagcatttctgaaacgacacagcaccaacataaaatgacaagtagactatcacaagttcacatttcatccatttgtacaaaacaactatagaaattttctggtagctcaaataagactgcaagttgatctctaattatacaccgattccaccatatctatgcttgattcctccagtgctcgtcttaccaaactttcatgctcacaaaacagtcaagttgcagaaagctatgataggagttaagatgatgccatcataaataaataaacctttgctaattaccgaaattgaagcaagagacggatatggatctggagcctcataaattttttgatagatgttaagaaatgcattctccgcaaacttcgctcgtttcgtgagattgtcaacttcgtcttgaaaacccttgagtaaagaattaaacaaactagacttttcatcggctgaagcttttttaaactctgcacagaatcataatggtaataatataaatatatttatgacgaaagtaacatatgataaaaagtgcttaacaaagtgcgtccaccagaaacaactgagttatcaccattacctcaatggaaaaggaagttagaaaattctaaagtaaattctattgtcttttattccttcaatcacttagaaaattcagagatgtcactcaggatgttcgagtatagatcaaccatatacctttatagctttctgcaagcttccgcctgtttttttggctattttcctgattgtcagcgattttaacaccttgctcatccaacacatatctttctttctccaaatcgaactctgtaaaatcaaagcatgcacataattgtattgaattattacaaacaagatacaccttacaacaaggatgtccaactttgtaaaacaaataaattatgatatctactcaaaccacaccgaatcacaagacattgttggcttgaaat

SEQ ID NO: 218175 - DNA, 5312 bp, Cannabis indica
ttttttactaaaataagacaaaagtccttaaatctaacaatcttaatagttcagggggaatttttaacggccaaaaaagttcaggggacatgatttggtacatatcaaagttcgagggaaaaaatttctaattagcctaagttttattttgaaaaaaaaaaaaatcagttcatggtcttatttatactattttaaaaaatacaaggcctattttattatttaacaaaatatagggtccaattaataatttttacaaaaatacagagtttaaaataatattttaatttccataataatgatgatgcagttaatcaatcatgaggttcatgaggaaatcattgaaaaagtgaagattgacatagaagaattctctaaactgtcattagtgactaaaaaagattatgcacagcagccaaatgatattgaaggctatggccaagcctatattcagtttgaagagcaaaaaaagcttgattggggtgatgtattattccttagagctcttcctgtatctcttagaaatatgagatattggcctactcaacctatttctttcaggtaaaattttaatcaaacttcattattttcttacatacaaaacaaaaaggaaattttataatacaccccttaaaaaattatgtatgttctcgttaacattgctgaaaataaggttcaaatattttgttgcacgcataactgttttttaatacaagtagtaagtaactgtctgaaatttattttcgacattataaacttttgaaaagtgtactatagaacttttatatgcaaataacaagtgtaagaccataaaatagttataagaaacaaaccctttaaaacttagatcctaaaatgatcattcatgcactgaaaatttcagagaaaatctggacaagtactctagggaagtgcagaaagttgcattatgtgttttgaaattcatgtctagaaacttggggctagaattagacacacttagtagcaagtttgaggatggaagacaagcaattaggataaatttctacccaccttgtattcaagctaacaaagtaatggggctcactccacattctgatgccactggattgactctattactccaagtgaatgatgtacaaggtttacagatcaacaaaaatggtaaatggatagttgtgaaacctgtcccaggtgcattcatagtcaacattggtgacatcattgaggtaaactaatgattattacatgaaactcttgaatgataagagaaactgtttgagggtgaaactcaactcataaatgtatatatgtaacagataatgagcaatggagaatacaagagcatggagcacagagttgtggtgaacccaatgaagcaacgtctttctattgctgcatttcatggtccacatgctaaagacattattgggcctttacaagatttagtaacaaagagtaaggctaagtataaaactattattacagaagattatcttaaacttgtgtttaggaaaaagcttgatggtaagagccaactagattttctcaaggagtgagtagtagtggctcaaaaataccatagcctcttcttacttttttgtactataacaccacaagttgtttatcaaatttgtttcatggtttgaaatttgcaattgcataatatatgatttaaggtctttcacaagctagtaccaaaccaaactagtttttttactttttttttttttttttttttttttttttttttttttaaataaaggtcaagactcaaagcaaaatcatattaatttgaccaatagcaacacacgcaaaagattaacaacaaacaacaccacatagatttaggattaactttccaaatgactataattactactagaagtggagaaatcaattctaattactaaaatataattgatataccagaaaataaataataaatccaactaacaccaccaaaccccactccactaattagtggacccatttcgaatgacatgctaacttctttcttatttctccatcttaattaaataaaacaaaaaaaacaaagcattaggtaaaaaaaaaaacaaaaacaaaattctggaatagaacataaaaaaaaaaataaaaaataaaaaattaacctaaaagataatgtttgatgacgggtttttttcgagacaggataaacctcttaaaatacattcttcaagtcagtgttaaattctaaatgaaccaaaattctattatttcattccatatctaataatagctatacaattacatatttaggccttcacactacttgcaaattattaataagttcctatagtaattttattgtctaacagataatttcaaaaatcatgtgccgtgtggtgttgtggtagagaaatatttatgtgtttgggtcactgattcaactctcagtatgcccctcattgtgagagaatgtacttggccctcgaagactagcttgttgtgatgggtcatctttaagatggtaaccctcatgagttgtaagtatgtcaacccaagtaaagcaggatgaagtataagacccctatagctagcatgtgatactcggtattattaaagcatcaaaagaagggagattagatctgcaccacgtgattctttttgtaaaaaaaaaaaggataatttcaaactatatcttaccacttgccacgggtgatctttagattcttattttctgtcttttcaattatatgtcttattactttcttcttcttcttgtttagtctcaccaaacatacaaattcactttaaattttgacattcattattctcactaatgatcatttggtcatttttattatacaaaaaaaaaaatcactcaaattgtgattacaaagatagctgtgatcatataaagagctaaacagaaatggagactcaagatcaagagcttttgagtgaaggttatggtggttctctcccggttgagaatgtccaagatctagcttcaaacaaccataaagaaatcccacctcgctatctccggcctgaagctgaactcaatccagtttctgtcctacaatcattggagcttccagtaattgatatgaccaaactgatagctgacaaccaacatccatggtaccatgatgaattggcaaaacttcatttagcttgtaaagactggggattctttcaggtaaactcaaacacaacttttgtccaaaattcagttgtaggcataatttgatcatgactaatttccatgatgatgaagcagttaatcaatcatggggttcctgaggaaatcattgacaaaatgaagattgacatagaagagtttttcaaactgccattagtgaagaaaaaagcttatgcacagcaaccaaatgatgttgaaggctatggccaagcatatgttcattctgaagaccaaaagcttgactggggagacatgttattccttagaactcttcctctctcacacagaaatatgagatgttggcctatttcttttaggtacaaaaattaaatctttactatttccctacacctaaaacaaaatttgattgttacccttattaaaattttcagagaaagtctagataaatactcaagggaagtgcagaaagttgcagtttgtgtaatgaaattcatgtctaggaaccttgggcttaattctgagatactatctagtaaatttgaggatggaacacaagggatgagaatcaattactacccaccttgtgttgaagctgacaaagtaattggtctcactccacattctgatgccactggattgactatgctacttcaagtaaatgatgtacaaggtttgcagatcaagaaaaatgggaagtggatagttgtgaaacctgtcccaggtgcattcatagtcaacattggtgacatcattgaggtgagatatactgtatttttgtcttgtctttttttctacaagtgatgtttgtacttataaaccatgtaatgtatacatgcagataatgagcaatggggagtacaagagcatagagcacagggctgttgtgaatccagagaagcaacgtatttcagttgctgcatttcatggtccacataccaaaggcattatctgtcctttaccagatgtagtaagaaagtgtaaggctaagtatatgactattagcacagaggattatatcagacttcagtttagtaccaagcttgatggtaaaagccgagtagatcgtctgaagttggagtaaagttatgactcgaagccaaaaataagaaagaagaagaagaagaagctatttatacaattattatgacatgatcatcacattttctcttctgcttcaatgttgttaattgaatttgttaccactataataacacaacctggaatgcacaaaacactagcaaagaatgtttatagttagaataagaatcacattccaatactttaaaataaaatcaaacaaaaaatagaataaaatttatttcatttctattctattccattttattccttccaaccaaaggcgaacaatataataacataatgcaagaaataccattatcttcttggcttttaaattgcctcaatcattatgcaaagaatacaagtagcatactattgtcaattatcaagaactaaacagaaatgaagaatactcaacagctttcaagtgtagattatgggggttctctcccagttgagtgtgttcaagatcttgcttcaaagaaccagaccaaaattccacctcgctatctccggcctgaagttgagctcaaaccagtttctgtactagaatcatttgagtttccagtaattgatatgaccaaattgatgattggtgacaatcaacaccaatggcatcatgatgaattggcaaaacttcatttagcttgtaaaggatggggattctttcaggtaataaactcatcaaacacaacttttgtccaaaattcaattgtaggcataatttgatcatgactagtttccataatgatatgatgcagttaatcaatcatggggtttcagaggaagtcattcaaaaaatgaagaatgacatagaagaattcttcaaactgccattagtgactaaaaaagcttatgcacagcagccaaatagtattgaaggctatggccaagcttatgttcagtctgaacaccaaaagcttgattggggagacatgttattcattagagctcttcctctctcacacagaaatatgagatgttggcctatgcaacctatttcttttaggtatataaaacttaatcttcactatttccctaatatagacacaattaaaattgtaacctttactaaaattttcagagaaaatctggataattactcaagggaagtgcagaaagt

SEQ ID NO: 218176 - DNA, 7151 bp, Cannabis indica
atatataattagatcggatcaaatagacctaaaaatattagatgtgatccaatgaatatccctaaacattactattaagtaagagtgtgtccaacactttctagaagtagaacttcgtaattatttagttatattatctaaaattaatttttaagttatactcatacaccaaaaataggatgccaataataatttttaagaattatcgtgtgtaaggagaagcagcggtcaaagcgaaagagagttgagtagtacactagacactagagaccagtgtagtactttctctgtcagactcagatccactttcctttctcttttgcttttcccttccctccttccatttccagatcaataaaataaaaaaaaaaaaattgagtaattaatattaattaattataattataaattacaaatacaaatttaaataaaaaaaatggatataataacattcggcgtcataattggcataattgtgctctttctggggattgtttgtttcatcaccattgaaggcacttgcagacgctcttgattcactctctaatccaaacactcccttccctttcctcttccaatgcctttttctaattatacaaaaatgcttactatgctctttctccttttcgctttccctggtttggatctgagtcacgcttctcaggtctctccctctattgatgttcaccgatgtagtcacggacacgaccaccaccaccaccacgaccacgaccacgaccacggtcatcatcacaaccatcaccaccagagttcactcgaatcgaatcttcttcccgaggaattggctgaggaggaggatatgaagctctacgggtttggttctcacggtcatcatcacgatcatgaccatcaccatgaacatttcggagttttacagcttaccggtcctggtaattccttcgatttcattatactcctttaattagttttggttgttgagctactctgattgataattgtttgtaattaatgcactgctgtggtttttttgtttttgatttcgggacattactttgttgagtaagagtggtccatttttggattgggaagttttggctctcaacctggggaatcaatggagatttaattcgtttgttgactttagataagattgagttcacattttcttttttgagtgttgggaggtttaaacaataattgtatatttttctttgaatttgaaatgaatcattatatacttgagcttgaagtggtagtgaatatgaaagtgaatttaattccatagagttgtgattagtaaagtttagcaattgtcttagtagctggatgtttactttgctgactcaagtgatattttcattcaatgaacaaccagtgatggagctagaatttgaggtgaggtagggctatttataaatttaaattgagtgctgcttttatatgtttgcaacctattttgaagtgtaaaattttcacataaaccaaactttgaggtggggctaaaagccttgctggctccatccctctgaacaaatctaagtcacttaattgagcaagattaagatgcagagtgatatagatcttcggtgacagaaatggcttaacgatatgctggcctgcaaggttattagactcaaacggtacaatatagtccatttgctgatataattatgtatttcaaacatatatgctttaaagtttaaagtaaccattctaactttgtctttggtaaataagcaaatttatttagtctttctgaaattttcactcgatttcacatctattattattgtcatcattattattctgcttattgttggcctttattgtatgtagtcttatatctattcttcagcaattgatagtcatttcattttataggtctttggctacatgcgttgggatgctcttttttggtgagcatggcttcccttatttgcttaattatcttgccagtagtgtttggtaagtgatttaattgttaaattggaaaagttactttttcatttctactttgataatctgaaactaaatctcccgtgttattgcagttcaagggaaaccatccaagacagttgttgattcattggctttatttggggttagattctcaaggcctacttatttctttgttaatctagtagctccttttgctgctaatattttacttatatctatttttttgttaaaatctgttaattagtcatgaaatgcatacgcttaggtttagcagttgctagcttatcagttgtcaccctactgattttgagtcatattgcatgaattgaactctatctttctcttttgggaaagctgcggacattgggtttatctaaaagttcaaagctcaaatgctgtttgctgtatctgttctagaatatattttggtacatgtgtataagacatgatcaaaatcatcagcaacacagaaatatgtaaaaactatgatttatgtctgggacttggggcgagagggtggggatattccactgctcattgtgcaccataggctttaattctggctgtcttgacatttctagtatgctgaactctcatatttattgcacatgtgctcaatatatatgtgatattttatacatgctgagagaatggatatgagattagccagcacaaagaaacaatttatagagtgattatgaatgccttggcttgagttctgaattttttcttattgaatttgtactatgaatgtgcattacacggcgctgataaaggcttaaatgttaagtctatctatcttattgaaggaggaaaagatgaaaacaaaaataacataaaaaaaagaagggaaaaactctacctgactgttaatctgccttgttactggcttacaggatacctaaaagcaagcctagctgttaatttgctatttgaaatgatgtactgatatgagtgccctccatttcaggctggggctatgctaggggatgcttttcttcatcaactaccacatgccttcggtaatgtactgattgatgccacttttttaccacaccaatgatttacttgtttttctcattaacaaacatgtttatgtgacagaacttaattctgtgaattactcatccacttagatttttggtttatgctttagagattttatgggagaatcagtaattttaaggtgtttattgggcagtacaatctgtgatagtttatatgtctgagcagtacaatcagtaattccttgtgaaacattttgtgcttcaaaaagattgtagggttcaacagacactccagaattaaattcaatcttgttaagtgggtttagtagatcatacatctacggaacttgagatctatattttgaagcatgtgtgaggtttttttttcactacttttggcaactcaatatttatagattcatacatagaaagcttaatgttttgagtgttggaataagttaatcatgtcattacatatcttgtaaataagttatatccaagataaccatacttctctattggttatgccttccacatatttttgcatggttcaaattattcttatgtgttgtcattttttctattggttttaaaagctaattccattttaataaccacacttttttttttcatacatggctacagattaatatttatgtgttgcagggggtggacactcgcactctaatgatcaccatgaaggtcacgaccatgatgatcattctggacactcacatgcacattcactagcagatctttctgtggggctgtccatcctgggttggtattcatatactttgcacttcaagtttattttgtacatatttgattttctctttgcatttggagatctgcataatcagatgcacatgttaaagcactaccatgattctgggtctctagtttgaataaagattctgacatactaattaggttttgctactagtttttcatttgataataaatgaaaactccaaactcaagaagacaataaaacagtagccaaacagtaggaaattgatactgattgtagtagaaaatctaattacaagctattggagcccttaggcccttttgatgcaaagagtgaacacacaatacattgcatagtcctccaattctccttagtatcctatatatacaattgtgttccctcccaaacactacgtataaagacccatatacccttttatttaatctcttgtatcctattctactaacttggggtttatcagcatttctgtgctttgaccggttgatataaccaagcaacctagccaaaggaaattcacttttggatattttagattgtacctacgcaacgtgtaataaattctatctgatagatttactctttgctgattagttgggtaagcttgtaaagaaagttaagggctttggtgtgtatacaataactttattgtttcctctctgctgacatctaccagtcccccactgagtaaattcataaatgccctctgctgttttattaaatgataacttctccatgccattcttttttcatcatgttgcctgcacttcttctcattgtgttgattttctttttttgctttttaccaagtatttatttatttggacacagtgcattaattcttttcttttgaattggttataccagctggaattgtactttttcttctagtagagaagttagtgaggtatgttgaagataattctggaggagctaatacatggggtcacactcaccaccaccatcacaagaaaagtaagaaattgaaggatgatgatgaatctgctgatgacatccagtcaaagtcatccactggaaatgataaaatagcactggaaaaatcatctgaagtttcagatgaattactgcacgattcattaaaggaagatgctcaaaatggatctcatattaggaaggtgagctacttgaaacttgtattcaagttagatgataacatctagataatgacatgctgtcattatcttgcttctatggtcatgccctgccttgtgtttagtggactacttatgaacacttgtgaggtgtagacttgaaactgtaggttgggccagtttatgccatggacatagtctaggactctaggagaagtaactgatggtataaaaagatgaagctaaattaacgtactgcacatatgactttaggtctaatgtttttgatgcaaactttaaagaccatatgcaaatgcttctttttcagcacttagaggcatcaaaattttaaagatctctgaatcgattagtcacatatggtttgctcctggcgttggagttccttttggatatcccacagagcaatctattgtttcatggtcctttgaagggtcaagcagggaacctagtttaaaattagaaaatataagggagaacattcttcgtactgcatcttcctcttttatgatcattttgatcatcagacatttggaccctctagctttcctggattaaaaagttaaatgaaaaataattacaaaatgctggcccaacatgcagactgtcatgctacgcccagtatgttaggacttgttttatgttctgaggctcttgagctatcctagtttcgagaaaaaaattgacatatttatcattttataagcttattaattaaattggaatattagtaataggcttaacatgaatggaataagtggatttcatatcatacctttattgatgttgagacattgttgcgagctgcagaggcgcactactgttgatggtaaggatgataaacaagatgtagatgctgctaaagtctcatctgctgatattaaaactccaaaagaagaagatgttcaagcaccaagcaatcttgtcttcggttatctgaatctcttctctgatggtgttgtatgtgtcgctttcaagtatttttgtctttaaaataatattttcctttgttaaattgtgttatgctggttggtttatgtagtttggattggaagatgtttcatgtactcaattacatgcttaattgttgttgcagcacaattttactgatggagtagctttaggaagtgcgttcttgctttatggttcagttggtggatggtctagaactctcttcttgcttgctcatgagattcctcaagaggttggcaactctcactttatttatttttctttcatgtacttgtaaattttaatttgattatattgctttggaaaaccaactacaacatgacaaaatgatttttcattcctttcatattttctaattgtattcttctggtctcgtgtataccattttctttgtatccaaaaatgaaagtactgtggttcggttggttaatttttcttgattaagaaatttaatattgaatcggttgtgagtagagcggggatgagggagagtgagttattcatcgtgcgtctaattttgttgaatgcaggttggagattttggtatcttagtaaggtccggttttagtgtatccaaagcactatttttcaactttctttcagccctagttgcactagcaggaacagcactggtattttttccattaaccgagtctttcccttgctttaaaatccttctacaatcatcgaaaagaaacttaaaaaaaaagttcataatttttggtgtgtaggctctgctgttgggacaagatccaggacagtcatctttgatcgaggtgaagtctccatttgataattcttcggtttcgttttccaccattcaaagtaatttaacattatttttcttttctttccgaattcgatttgcagggatttacagccggtggattcatctacattgcggtggccggggtgcttgcagagatgaatagcagtagcaagcccaccctgaaaactataatagggcatttgacctcattgatacttggcatgggggttgctctttgtatttctcttatagaatgaaatgtaaatttgtaatgaatatttttgtactttatttttttttcttttttagcaaaaaagtcttaacattatatttttattttattagtagtcagaagtttctgaacggtggactcttcactaacttatcaactaaatacaatctgattgtttttagtgatgaatataataataaaaatatgatagaagaaattttgaaaaagaaaatagaaataaaaataaattcgaagatgtagcattgtctcttttccaccgctgtttatttattcaattcttttacttatatgtgtggaaaattataac

SEQ ID NO: 218177 - DNA, 2442 bp, Cannabis indica
tgagattaatggagtaattagggttaaaaataaaatgtatcttgacactcatgtaccctaatacccatctaatatatcacaaaatacattcggtaaaatatataacaagataaaatcatatccctaaaatttatattattcaacacaaattttatatattattgggacccaacaattaatacattattattctatttttgggaatcttcaaacagatccttttcctgcgccgctagtggtctcattgactattctctctccttttcaattttttattgacaatttaatctgaattgctgcaatttatttatttaacaaaataaattaaacattaatttttctttttctgaactgcaataaattagccatttacagttgcaacattttatagtatccattttagcattttaaatttcttaatctcagatgtcatttttataattaattagaggattcttatattatttattaaagcatattaaaccaaaatttaaaattttggtactaaatttgaaaaataatgagtgtgttatatttgattcattatttataattatactccaatgcacaaaatataaaataaaaaaaattaaggaataatttaaaaaaaaaatacaaaaacaactaaagattttaaaaaatatatggtcagtacagaatttttattatttttacggtttttttagattttatttacataatatactgtatttttatattgtattcttgttattttgttgttgattttttgttatttgtatattatttttatataattttgttattattttgatattatttttgtgatactttcatgttattttttttaatattttttatagaataccgtaaaaatattaaaagtaaaagtgtaaatattttacaaaaattagttttttatgtaattatatatcccaaaaaaataattgattatattgattctgattaaatattttattgagaatacagaaaaattattattttttattcttccattattgaaataatattagtatggtaaataaagaatgtggtttagtataagtcaatgaatcataataattagtgatattataataaataaattgccttatttagcacatcttttagaacatcattaaagtagtactttttcttaaatgtgctaaattataacaatatactagctttttgacccttgattagagatgctcttatattaaattcaatattaaaatgtagtatgttatattatttatataaatgatataatatatagatcaaatatgacacaaactaataagtgtgtatatgacaatttatattagttgttatggttttgtaacacatggtggagttacttgttactatgtgtaacttccacaattatcacttatactaagtgtccaaaaaagtgttacccatatcgtttactctcattgatcagttcataacatccatgagaggttatgagttagaatttcaaatggtgatatcttacactatataaagggtctaaggcgctaagattgtgaataactaagtttatatcaacaaatcactttgctagaaaccctaaaaggcttgataattcctaaaattattttttaagagttcccttagtacttagtgataaggaaaaataaacttttagataaaagtgtaataccttgttcaagtcatagtgaccccattaatatacactcaaggttgtgagtgagtgtatatatatgtatgtatatcttcttcttcacgttatattatatatgttgtatattacgtgtgttgtaattcattttttctactttatatataatatatatagtgtacatatattgtatatatgtgttgttatatttatgtaatcaatctcttatttagtccttgtattatttttacaattgagttgtaatttatcttgatttatcttccattgatatataaaatctctaacaatcaaaagcttattcagtttcaatggaagagagataaatcaagattttaagaatacaaggataatagattttgtgtgaaacccattcatgagtgagcttagtagtgtatattatgttatttactctttcaaataataataataatatatgtattaacatattttctttgttaagataggaaaattttacatgttaatatagagataaaaatatatatgtaaatgtgacatatatatatgtatacatcatattaatatatagtgatatataatataatatatttgaatttgtagcatgttattatatgtatgtatataatataaataatattatagcatgtgtataaattatgtgtattatatatgatcaacatactataatatacatatatattacgagattaaatgtgtagaaataattattttcaatatatttaaatgacatgcatatataatatatattatgtgcatataatatatatgatgttagacttctatttggtcttaca

SEQ ID NO: 218178 - DNA, 3262 bp, Cannabis indica
aaaaaaactaaaactaaaataaaattaacatacgtggcacgtaacatctatctagtacatatatatatatatgtattttattctttgtcagtcctttctgattctttttttggtgtcccctgctagtatgcatatctatgcacttatcagtggttttgttatctgcgacaggttgacatatttatggatgcagcttttggagcagtttgtgcagccattaagtttcttgagagcaagctatcatctcagaatactctttcttgtacgacctcaagcttgacttctgaacaagtagtgaattatctttgccaacaatgcgaggcttcattacagtttcttcagtctctgtgccagcaaaagctatttagagagcgacttctcagaaataaggtatccaagttaggattttttattcttaagattcggtcaaacttatttctgaaagcaaattccttgtaccttaccactattatttctatttaagtatttatgtaaatgcaagagagctttcagtgcaaaatgaagtcatactgttagtgtgaggaatgaaagtttctaaaaactaaatttgggtcggtaaaatattatttattttgaactccccatataatgcaatgttgaaccatttcatacatttgttgttagttgtatcatagaaaattgccctgatagtaaattaaaaaatgtcatatgctcacttttttttgtaaggtggttgagccttctgattttgttaggattttttttcctaatctgcttgtacttttctctattattgatttgtagttttgtttcaaaaatgaaaaaaaaaaaatgccctgatggattttggcattttttggaggtaatatgttatttggtacatgtcatgcatgctgttgtccttatagctttttttttcaggtattaagttgttgtactttataaagcatgctaaggtaaaatttggcttcgaaataatgcaggagttgtgtggaaagggtggtgttttgtttgtggctcaagcaatcttgaagttaaatgctacacattttatagagtttcccagagttgttgccgctgtatctaggctgaaagctagaatgctatcaattgtgagtcttgtgatctatttacctatttcgtatgaaggctcaagagtgttcttttttgtactctggacaaaagaatatacattaatccaggcttgacttcttttatgcagttggtgactctgtgtgaagctgaaagcatttcctacctggatgaagttgccagcacaccaggtagcttggatttggcgaaatctgtcgcttcagaggttagatgtctggtggtccatacatgatgacccttattattgtagtgaatgttgtagatctttgtactaagctgatttatgttatgtctacatctacttactccacaaatgataaaacaaaacagcaatactatatattatgacatggtcgattcactgctagcttttatccattcctgtaaataatgcttgatattgaatccattttactggtataggttctggagctattgaaggcagctctgggtagagaacccagacatctttctacatgtgccgacagaaattacccgatgggatttttgcaactcaacgcaatgcgcctagctgatgtcttctccgatgactcaaattttcgatcttatatcagaatatactttgtaggcaattattatcactcatatgttctttttctatttacgtatttgcaaaagctgctttttcaactacgttttttatggtctttgaacttgctgagtttgtatctttaaatccattgcacaaatttcatgcatgtagcttgcatgcataatgtacttgtcttgaatatctgtcttgaagaaatttgtgacaatgccttctctgcccctccagactaaagtgctgactgcaatattttcgcttcctcatggggattttctatccagttggtgttcttcagaactcccactaaaggaagaagatggttctattgaatatgattcatttgcatctgctggatgggttttagatgtactttcatccactgacctacaaaatccaacaagtttagaattaaccatagtatcaaatagtatgcctcaggcttcttatgctcatcagagaacgtcattatttgtcaaagtaattgcaaatctccattgttttgttcccaacatttgtgaaggttgactctttgccaaaatttacttggtttatttttacaaattctaaagtgtacactttttctagatgtactgattggagtttaaaactttattcacagaacaggagaggaacctttttcttaataaattcatggagtgcttgcaaattgatccatctaatgcattgtcgggtttttcctatacttctgacattcctaaagctgcttctgtgtgcaggaatttgcgtaattatctctgtcagattattttgtttaaatttacagaattttgtttgtttcctttcttacactttgtatgggcaggttctttgttaagtcacgcagaatcattgactcctaactttttgaacgatgaggatgtacagctcttgaggtgattttattctcctttactatttttcgggtagaattttctgctcaattttcttaggatttcctgacatctatactcacacaatggtgtggggtaatttttctccagattaagttaatacacaatgtgaagctaatctaatactataatgttgctttgtgtgcttctaatctttcctcctaaatttaacattttagagtacccctaagaagtctttctcatgcattggaaatgttgctgctgttggaatcttaaacctattatattgttctctgcttataaatgactctagaaataattctagagtttcagttagtagatgccatttttcatgtgggctaatctaagttgccaaaatgttctatggatcaattatgatttagaagcataattgactacttacagattgattcttgtaagataattttgtaacaaatagcatttttgctgcctcattttgttttcatttgcattttatgtaatatatgacatgaacatgctaaaattcatcacttcatagtatcttttagttacttcatgggttatgcagtatggcttactttggcaattgataattcttgttgcagggtgttttataaccaactgcaatcatcagttatttctcctgaaaacgaagaaaatcaagttcaagtaaaatctagcatcctgtagatttttcgtttttattttaaaagaaaaaata

SEQ ID NO: 218179 - DNA, 5625 bp, Cannabis indica
tttatctaattattgtcattatttatactgttgttgtttgattaaggttgtagaaatgccagcatattcaggaccattaaatctctgccttgaattaataacaaattaagcatgtgaaattgtacttaatcatgttggtgttggtcataaaatagttgataaaaatcatgccttaattcaagtgatatataaaaatatgcttgttttaatactaactttttagataaaaactttgtatgagaagtaatatatgttgaatatgtgccttattcattctttttgttgttcttctgtgacacatgctttgggaagaccgttaatgtgatctcttgtttcttttgttatgattgccttggtgattttttgtggctactatgtggttatatgaaattttatgtacttattagtaggcataaaggttggtggccaattagccagtctcatacatatcagcataacagctgttttttatgtgaatggtcagtaagctcacctaaagaaatgcttgtcggtggcctttttgtagtaaacctaatcaactatggctttactgaatggctactaactacattccttatcattcactttattttggatttgttgttttagaataattgttatctcgtcaggtgtatttgtttttcattagggtgatagaaagtaacatattgaggatcataaaatttctgtctaacaatgataatattttaggtatgtgaagctgttcttaatcatactggttatcagaagttgattaaaaccatgttttaattcaagcgatatcacaaaatcatgtttgctttaatacttcttgtttagctagtaatgaaacttttacatcagaagtactatatactatgtgtcttcttgttcatgctttttgatgttcttattgtgctttctggtttgcaaaacatgctctgggtagactgattctatgatctattttgttttaagaattgctttcataacctttttgttgctactttgtgagttttgtatgtaattgttccgtaggtataacgttaagtcttggtggccaattagccagtcacatacatatcagcttaacagctgttcctttttatgtgaatggtcagtaagctcacctaaagaaatacttgttggcggccttttggtagtggagcttcttggtgctggctttactcagtggctaatatctacatttgttgtcattcattgttctattcttacatatgcatgtttagatactttaaaatcttttccttaggttggtattgtactatttgatgccatcatcaaaatcgacttaaaaatatatatatatatatagttgtactaatgcaattaattgcaattttggagtggtgcagatggatcctgcttatcggccgagcttactgcagaaagaaggtggtgaatatggtgctctgccttttgctggatcagacctagttttaagtccttctcagtggagcagtcatgttgtaggtatgaacatttgggagtaaagtcaattattttggaagcattccttgtgttgtattttttcgtcatctgagggagaaaagatttgttggttgttgcttcatatactttgtgaatatttttttgtgcatatgtacatatatgtaaactaaaattggtattcctccatatataatattcttgatcaaatgacaatcttgaaatatatgtttgaagtcagagtagtttcgaatgtataatttaatgttgtctgatatgtggtcagttgaagtggatatctacaaatttatgttgtctcccaatatctctatttgtacgttgttcgttgttcctcgaaaatatttctctcatcttcttatcaactattctttttttattttccaagcaaaattcagattcattaactgttaagagaatgtctgaatccttgcaaaaggataattcaattactttaaaaatgagcaatcttggaccaacaaaaatcattaatgtaataacaatttaaattattagtctcggtgttagtttcattatcttaatttcttcgagtttcagctccattttgagtttggtccaaagtatttcattagctttctacttgaaattatgttagcatgggacctatgagattagtgaattgtgtgatccaaatatctggatgaaaatgttgaattcccattagtgtggctaattaatcatattagcttaagaaactgattttttagtatcaagtaggttttggtttgtcctaggccatttaaatttcgttgtgacatgggaaatgtgcacgtgattcagtttggcatggcgtggttaataaaattagtcttagtgcactgtattgcttcttacatttcctgaacattgagtacgcagtgtttgtgaaatacatacgcttttctatcttctgcatcttcaataattcattgttgtcagttttcacttttaatagacatggattggtagagattgaacctctttcttaataaaatatttttggctttaatatataatgttagcatcttgttaagaattacaagaacaaagaaccaccttactagatattctatggactgagtgtttttctaattttactgatctgctttcttgttctttacatctgaaatattcttgctcaatacctgttatttttgttgatttgctgggttggtggatcaatacttcctgctatttgtgctcctccctttatctttttaatggtattattagcacattgcttcatacatctgcatgcatattgatgtaaggccaagtaaataatgatagtattagagatttatccttaatagttctgaaattttattgcaagtgatataatgtctaacatcagtgagccacatctatacacgagccttcatcatgataagccgtacacaagcaaagcaagcctatccctactgggaaatggactataaatacaatgcattaaaagaagctaaacttttatttacttattataattagaaatggtactaggtataataaattcatatccaataacataggtaaataattctaatttttaatataaagtcatatcctttataagtatatacttgtatctcattttgcattatgtatatatttattggcataagcaaagcttattttatggttgacagcatgacagcatgagcaaaagcttatatgaatggcttttctattttcaggaaaagttagctcatggattgatctagacgctgaagatgagattcttcgattagattctgaaaccaccctaaagcaagagattgcatgggcttctcatctctccctgcaggtgcacattattgaacttgaaagttcccttagcagcatacttttttaagtttttgaatttttggaaaagtatatattatttatattaatacagccttttgcagttaacttcttgcattttccataatctgtatggtatgtagatttaagtaaaatttagccactatttgaagtagaataaagggaaaacattttttttgagttaatattttacaagaaggggattacgaattgagtatgatacgtgcacccgaaatatgcataaagaaattacatataatggcgtgatagtttatgtaatcaatcacattttatctaaatggggatccactgttttaaaaagttgtgcaacatcactgagtatattgttttggtgcattttttgagtgcacttatcatcactcttatgcattgtggtcattttaatttaatcttcagttatgctcagctttttggttttggattgtttcattgatcccttaattgttttggttatttgcatctttattccaacttatcaattgcacacatctccgtacttgatgtaatgcaatttaaagattatttacttgccaattatcttaaatattatttttaacacattttgtcaacttagtgtgcgcataaaacaaaaatgtatcctttatactttatttcctccatgtatatcaatgtcttgagagtggtcctttaagaattaagtactcatactgcaggcatgccttcttccagctcctaagggaaagtcctgtgctaattatgctaggtgtgtgaatcagattttacaaagtctaaacaatatgcaggtaccattcatcatttaattatcaatatgtccatataattttttttatattcatggtatgttgtttcattattctgttattacagttgtggcttaggattccgttggtgaaatctgatgaagactccacggattccaattcagatcaattggtgagtaaaattcattactatttaaggttaatctttaatttttcacattggctgactaataacttggaaagtaacttctttttacaaaaaaaaaaataacttagaaagtaactcttacactctttttctttggaatcaaatatttgtgagttgtttatgaatctcgttagtgcctatgaatatgattcaccttgaaaaatttaggaagtataatttgatttcctttggtacattctgcgtgtctgcttttatagctggtttgttctttgcatgagttttttttttagcaatttatgtcatcaccaaagttgtccaagttttaaatggaggaatattatctgcttgcgcttgattcttgactagattaaaaaactaaccactatttctcctgtgtcagcattataggtaactgaaaactaaaaataaaccgtcttttctgtcttttatgcagattgattcatgggagatttggaattcttttcggctgctttgtgaacatcatagtcgcttatcagttgcccttgatgttatgtgggtttaaacaaacctgagatgaatttctttttagaataaaattttcctgcaactttggatcacttctcaaaaggcttcgttgtagattgcatttctaatcttaattttttgctaattcttaggagttcattgccttcaccaaactcccttggacgttggtttggagagtctgttcgagcagccattgttaatactgatgtaactatatattaagcagcattatatctgtattatataaggtttttactgcatgttgtttgtccttatttagatttgtaacaatactattattaatttgccagtcatttttaacaaacacaaggggttatccatgcttgtcaaagcgtcaccagaacctaatcacgggtttcttcaatcatgcagtacaggtatctatagagaagtatttgccaactttttcatttaagttttcttttacacattatacttcaattggaaggggttaatctgcttgcttttgaattttattagtaagattatttgccatgagtagttaaaatttactgtagctttattgaattgcttcagatgttgctatcaattattgttagtgtttgttaatatgtgaggcggatgagcttttgttattgattaatttttttcatatatataagagggagtagtgttataaatagaatggagaacttacacgtagatggttggtatcttctagagtttcaaggcactcttgttattacttccaggtgaggcaggtgatacaattaccaattgtatcgggttgcactcttcgaatcagtgccaaactccaataggaataatcctaattttctctcatttcattcgttttttttttttccatttgtgtaatagtattacatattt

SEQ ID NO: 218180 - DNA, 2850 bp, Cannabis indica
aactactacatgacaaaaaaatgcatttcagaattcaataataacagtataataaattatttaaataattataaataattttataattaatcaagattaactgctaatttctaaattaaactaagcggtctttacaaataccatccaagaaaatacaagaaataaaagatggggacattcaagaatctcttaggcttcccaatgtttacaaaataatccacatcctatgcactcctctcctttttatttattcattcttattgtacccatcctcattctcttgactaacaaattaccttgccatttgtccgctaacataacattacagccagctgtcccttaacctgtgtcctaacatttttgtactacatgcaagctctgtatgtgacatacaaactatgaagtgactgtgtttcttctgttcctcttcttttgcacttgggataagtatattgacgcttgaagatatgtttatttttgcagcccaacatttgaagtttcactgctctttgcagaaatggttcagcatggacttcgttgcatcacattctgcaaaacacgtaaacaatgtgaacttgtcttagagtgcacgtaagaactgcataaattttatgagtttgatgcttgttgacattatctatgggccttttgggttgtgccttcttttcttttttttcctcagtatttattgtgagttttgagtgttaggatatgtaaacaatgaaataaaatttccacggtttttataggcgtgatattcttcggaagtctaaagtgacaagccatctggttgattctatatgtgcatatcgtgctggctacattgctcaggtcagtgaatgtactcgaggcatgttacatttgtataatggcgttagcacaatatatggggcctaaggagctcatctactgtgtttactcccaagtgcatatcctttttcttgcttagaattctaaattgtgcatcacccaacgacactaaattgtgtagaaaatggtgaatggaattgtgtatttcattcatgtaaataacatatatttatacaatttgtatatatattttttatgtatatttatacaatattagagaaactaaattaggaaagtaggagagaaaataagaaatgaaataagaacaattgaccctgttttctagttaatttacagctaatattctaactgttcataagttgctcatcattactgaacactagctttgaagttatttttgcaagaacatcttgtattttacccagaaagtaaaatttaataaaatatttagttgtaaatcttaaattcagcattgcaggaattcagtgttgctggaaaataaagttgtagaaagacttgaaaaatcaataaacagaattaatttagagcaagtggagggatgggtttgaaagtgcattgcccaaatgcaagtgacacattaaaatgtaagaaataaaagtttgtattaatatgtgcctctcttcatagattgaaagttaccacaagagataaaaggtggagtcattcaaaacttgtgaaagcatacttggtttgggaagtttggtcattttcctaggaatgtttagaaattttgttagaatcacattaaagacttgagattgagtactctatttactagtaggtatcagatgatggatataaaatttggttagacttaatcgatttgcgtaaattttgagaaattttatgagacaagacttaaacagaaagtgtgactgcttgtggaatattctgtgcatatttgtatactttgcatttgagagaacaagatgagaaataagatgacaggtgggaggtcgaatttggtttttttcaaatgaaccaaagttcgtttgttagatgcatgctcacatacagagtatttttctttaattcctaaggagggggattttcaaatatctagcattctaaaaatgactacctattctgtactagcttagtgatttgtactaaacttctgtttcatttcagcatacattcaaccaatactactttacacatcaagttggtaattttgtaaattttgaaagcccaaaactaaataaaaaaccctaaacattcatcactttccctcatcctctataacttgccttgcacaatactctcctcttctctcccttctcttcacgcacgcagtagcaacaccaacacaaggctcttctctctcccggaatatgtcttttaatctttatgtttgaaactttagatttcaaatatatgactttagttatattttaagacttatagctagtaatttcatgaattgtatgactttattatgaaattatgtgttttttgttatgaattttatgatatatatcatgtttatgaattttttattcttattgtcgaggcttacgccttgtggtattatggcaaaatgcctctgaacccgttttcgcctttcaaaacattacttcccactatttactcattgaagatggtgttgtagatttttttaaacaacgcaaatatacgctattgcaacaagtaatatagagtaagtagagtatcaatcccacaaagactatattcctatgataatcaaaataaagtaaacttcattaagcacatcttctcaaaatggttatgcatgccatataggtatattcatatccgtatagaataaatttttgcaacaggtgcaaccgtctcttgataatcaattccataggtttgagtaaagcctttggccacaagtctcgctttatacctctaaatacttccatcagctttgaattttcctgtgaacacccatttacaccctacaatcttcttgtccctcggtaacattacaatctcccaagtcccattctttatcaaagcatccatctcttc

SEQ ID NO: 218181 - DNA, 7269 bp, Cannabis indica
gctaatcattctcagaattctcaaaaagaggaaatggagttagtctaaagcaacagttaacaagagaagtgaaattagtctgcggttttatttttctattactgcttctcctggtgaacaatctttgaaagccaaaaaggaatttgcacttgcatacaatgatggtcaaattttgaaaattgcatcagaaaacttatttaaagagaaaatacaatgtataaccgacatattataagagtgtctcacatcgaaaatatgtgaggacattaatacacttacaagaaccaaaagtcactccacttattgttaattggttttaaattagaaccttatggattaagtttttgagccttatagaaaaataaaaaagaaaacaaagctgctagacatccaatccaaaataatattgagtaaaaaaaccactagagattcgattcaaaagaatagcgagaacaggaaaaaagttgctagagatccaattcaagattagtgagcccaaaaagtgccattatcttaagagaggacacataagagtgttccacatcaaaaagatatgaagatattattacacataataaccatgagtcactccattaattgtcaaatcgattttaggttggaatcccatagatcttaattcttaacacatatttatcttcttcttcttttttcttttgttaatgcaaacacatattacctttatgccagcacaaattattgatcaggttcaagatttcataatacaagtctttaaaaagatgcaatatcattatatatacctctataaaatcaatggaagatgctagtcctggaaatagtttcttctctaatctgctaatgatttcatttgccacaagctccttcttttccgcatattcttttggagagagtccctataaaataattcctcctcaattagtggcaactaaacaagctcttcttattctttagaggggaagacgattggtaataatttttttgtcactttttaccacaccattgcacctacctcccaatcttcaatggaagaggttgtaaatatgtgaagaatatggcgcccttctggtgcaagtgatgaatccagaacagtaggaatacttaaaaaaatgcttccatacggcttctcaagtctagtccaatcattctagaaaagattaagcataaaaagaaggtgattatatcagctaacacattctgattctaatgtcctgcgtatttccatcaaaattagactaccaagatgtttaaatacctcgagaacaaagtgatggcaatctgtatctggcggtagaacctcagctttaactcccatgtgaatggaaagaaaagatggggccttcacataagctttttgaaaattttcctcttcctttggaaggtcttttcctttcaaaagcttccctgtaataacgcgaaattgaacgcaactacatattactgaaaaaccacgtagcgcaccagattgttgttctaaaactagtcatgtaaaatgtttagatatcctagctaaaaactaaccaaaggtatcccatcgagtagcatttgatattactgttttggcaaagaattcacgtttatctgacatccttactcccacctacaagaaaatattcatatatgtcaagatcatatttttggcttataaaagaattaaacataattatattaacattgctcattcaatcaatagtaaatttgaactcacagcctggccttggtcaattataatttcagtcacatttgccttgtagagtatctcacttccttggtcaatgagacctttagctaatgactctgctattccaccaacaccaccaatagggtagttaattccaccatagtgcctgtcacacaaaacctaacagaaacacataaaaatatctttcgtgagggtcaataatcatgagcttaatatctcctataaatatataaggaacatttatcagagaaagcaaaatggtccataaaacatgattgaaagagaaactcaccatgcctgcatttatcattggtgtttgcaaagcattgaccgtgcttactataaaacactgcaaatccacgacaagtatattatcttcatcatatcaatgcataggtcttttgtggacctccaaagccagaaaataaatgagcataaacttctaaaacaaattttaagagatgaaaagaagttgaggctaacctctgcatctatgaaagacaacaactcaggatctttaatatacttcctagctatatctccagcattttgaggcaaatagtaggctgcagaggattataacatcatgtaaactgcaaattcatctaagaaatattgatactgatatagatagaaaaagatttaacttaatcatgtcttagctttctaatactctttttttaacacataactaaccagaaaatattgtagtaagcaaatgcaaaaatcaacagattctatgtcagcataagtaattaccaagtgtcaagcactcaacaggcttctggaaaaactgcccgaaaagatagattggctcctcaagtgactttagttccagtgagtttaaggcattgaagatctaccaaatgtttaagcaactgtttaaggtaagttatgtattacatgtaaaggccaaaatgccccagaggaagttgcagccaatctaggagataaaaacaaatatagaccttccagcatgcgccgtagaatttgaagattccttccttttcatggggaaatttactagtaagttccgctatgaattcactgtactctttatgaactagcacagaaaggttgttgggcagatggaaatggactgttgttggatcaggtatcactggcatttcacaaccaactgctgccaatgcttgtgtaattaaatttagattaccctgctcagattgagtaacaactggtatgaaatttccagaaaatgaaaacaaaacaattgctaatttctaccgatcatagatagaaacataaagctagtgcctagtctatgtaattctcttttcattacttggaattcaactagcactttaatactctagtctatctagcccacaaatgtactgaaaaatagcttaaaattgaccaaggaaaacataccttatcactgaaaccgaacatcacagaagaaccaacatcaaaagtataaccatttctctggtaatatccagaactcccaccaggaatcacatacttttccaaaaccaaaacccgggcacccttcactgccagttgggtggctgccaccaagcctcctattcctgacccaataacaatggcatcatagtaattatcaccaccccctttgtttttctccacagctttatccatattcagtgctgaagtagaatttgaaatgaatttattcttcttattattatttctatctgaacttcccgctgaggttatgcctctgatagcccccatctcatttgtactgtgatgaaaccttggccctgtaccagtgagcttgtaattactgaagactgagaatttagaacacccaattgagaaatttttacatttttggcttctgggtctggttccacttccacccaattcaacaccatacaaatgagaagaattcttggggttaacaaacccagatttcaaatagcaaagcgggtcgtaatcactaaaaacaaggagtttatcacacttttgattttgacttgtgggttttaaagtgctcaactttggggaactatggtggttagtgggaaagcgagaagaattgataggagttattgagaaggagcttaattcagccatggaaagggagttagaaatgaaccttaattctttctgagatgggtagaatagaagaggttgtggtggcttaggctaggccataaatcaaccattaacaagccaaagttggagaattgtttaatgtttatgtgtttttatttaagtaatttcttcatggttagggtgtgacttgctgtggtgagcaagtgggtggtgattccactccatgattcctccacaaaatgagacaaaatccagatagccgttagattcgaagtgtcttttctctcgaagtttcagattatttgatattaaataaattcgtttacacaaaacctaaattcccatttgatgaataatggggttctatctcaaaattaattggcagtagagtagtccatgtttttatatatggctcaattttttaccatttatttcatgtgggacaatgtctacaatattcccccttaagattgacatgatcactatctgtataggtgcggatcaaataggatcacttgcgcaagggatatggctctaataatcatggggttccatttcaaaaccaattggagtgaagtagcccatgtttttatattatgactcaattctctatcatttattccatatgagacaatatccacaataatatatatagttaatattacatgtgtaatgtatatatatttagttataatttttatttttattttgattaggtatatttttaagtgtataattagattttttttaagtttactttatattatttttcgctagttaatttttacactcatggtgctggagatgtagaactttttattttaccgtatttcagtacattttaaaataatattaatattaataataatttatatgtcttgtcttttgacatggtgtgattgttagtattttgatttgtgtgattttcgtgttttggttcgtgtgtttgttcgcaattcggttcgtgactcggttcgagtgtttgttagggttttggttcgagagtttggttcgtgattggtctgtgctatcctttagccttctgctggttttttgctgtagagaaaatggtagctgcttataacaataatcacggaggaaaagagtttaatgatcagtttgctagaacagaaaaggaggtggaggagagactactcttggacgatgatgggaaaggagagttgacggaaatagacgatcattgtgcttggtgggccattctcttacaaggcgtagtatagattttaatgttacggaacataaaatggcatcattgtggcaaccaaatggaggtatgtacgttaaagaactcaactcgaatcactgatttttgagatcgacataggaagagtcatcgagggaagcccgtggacatttcatcaagtcccactgatttttgagtagttcaaaccacgaaaaaatccacgtcaagttgtcttaaataaactcgatgtttggatccaacttcatgagatgacaaccgggtttatgtcgaaacaaacgattgggactgttgccagggccggccttgagaatatatgggcctaaggagaattaaattttggggccctcaaaaatatatataaaaaaatttaaatagagtgttatgggatttaaactcatgacattgtataatatgccatacacctcaaccaactaagctatgactatttgttgtttacaatacactttattttactttaataaaagcctaataattttttttattttgggctcccgaaatgagtgggccctcggcacgagcctagcccgcctatgcctagggtcggccctgattgttgctaactatgttggaaagtttgtgaaatttgatcctaacaattttactagcttttggcgggacttcttgagagtacgtactacaatcaatatcgaaaggcaactaaagaagaaaatgacattggagaagaagaatggacaagtttgtacaatgcaatttaaatacgaggtcgtactaacgttttgctttatttgtggggtcttaggacattccaaacgattttgtgaaaagctcttcaacacaccatcagatttaattcaaaaaatgtatggtctttcactcaaagcagcaccacgaagataacaacacatagctggttctccatggcttcgatcggggcattaccgctaagccaaatgtgatggtaggcaaaggaggttctcaggcggggttaacctgcaatgtttagactgttcatgataaggagagacttcagggattggcaatcaatcgtcctgatatcagggaattgtagcccgatactgttggtatctcatcccatgtaattgttgaagatattgctaataaaggaaagttaatggtggttgataacaccaatgtgccaggtgatatttttcaaaatgaggctttaatgattttggaaaataaaaggagaaggacacgtgtagatgaagacattaatggaagcatgggtgatgttgggccaaatatggtaactattttggggcccacaagcaacatatatgataactcgaccttggagaatcatgatgttattatgccaaaagttgatagtaactgcccaacaaactcgcatggggcgggctctggtctctaggccgccaagcattatgaatgttttgagttggaattgccgcaggcttgagaaccaacagacagttcaattccttaaagaggttgtttctcataagaaatccaattttatttttctgtgtgagaccaaatgtaataaaaaaagagtcaaactggtgggctgtatgctgggctatgaaggtatttttgttgttgaggcctaaggtcttagtggaggccttgcttttctctggacagacatggacgacagctctctcttggggttctcgcatcaccatatcgacatgcaaatcaaaatggctgaaggaatttcttggagactcacgggtctttatgaagagccaactcgtttgctacaacctcagacttggcaattattgagaactcttgtgggtgattcgccccttccctggtgtgttataggtgacattaacaatgttctttgtcaagaggataaaaaggggggtcagtcgtaccctcggtggttgattgacgactttcaacgatgcctcacggattgtggtctagaggatatggacttgttgggatatccgtttacttgggaaaggatctgtggcactagtaaatgggttgaaatttaccttgacagggcgttaacatcaagtgaccggacgtaactttttcctgatgcaaatctgttcaatttagaaatgtcaccatccgatcattgtctgttatttttggagcctgtggccagaggtaattttaatcattgtcacctagcttgccgagcccatgtgttttcaaatcgtaaaagattgttaggagttgagtgggaacctcagtattaatggaaagcttgacttgtgtgccaacaagttgtcgagatgggggagagagtgttgggttttatgccctaaataaaactccatttcaatgtaatctattttatttaacatcaataaag

SEQ ID NO: 218182 - DNA, 3881 bp, Cannabis indica
ttattaaaattttaacattataataatcatcaactcattatattgaaattgtttttaaaaaaaaaataaagtaatatacacatatattacatatatttgtttttatatgaaaaaagaataaaaatcatattataaaaattggtgactttataatatatagtgcggtgcggtttgaaccacaactataaaatttaaaatcgcaaaccgcaccgtaccacacagtttgacaaaaatacaaatcacaaccgcaccgtaaaagatttcaaactgcattaaaatttctatacaattcttaaccaagtcaaagaagatagccatcatacactgttggaacgttgttggtgcattacatagtccaaatggcattcttcgaaaaataaatgtgccatagggacatgtcaatgtcattttctcctgatcttctagtgcaatagctatttggtgataccctaagtaaccatccaaaaaatagtaatactcctgacccgccaatctatttagcatctaatcaatgaatgaaagggaaaaatggtattttctcgttgccttcttgagcttgctgtaatcaatgcatattctccaaccattgaaagttctagttggaattaactcatttttagtatttttcaccaccgtcattcctccctttttaggcacaacttgaatcgggctcacccacttattttcaaaaattgggtaaggcgctcccgcatcaagctactttaccacttcctttcttactactttcttcattgacggattgagtcttctttgagcatcaatggttgttttgactccatcctccattaaaatttggagcataactgttaaggggacgatccccttaatgttggccagtgtccacccaatgtcctttatgtgtgctcttaaaactcttaacaattttcagtctccacatcagaaaataaggctgagcatcgatcggtttgatcgattttttttttccatacaaaaatttaaattctggttctcggcttgaattggtgcaatccaaaaattgatcgaccaatccaaaaacttccttagaaccgactgatgtaaaccgcggtttgatcggttaaatctgtctaaaccgaactttgttttttttttttgtaatctataaaataagggtttttttttgtttgttgtcaatttcttctcttgcatctcttctagtttatgttccgcaagaattaaagaaaaaaatgtgtgagagataaatttgatattttatgaggaaagataatgaatatcgagagagaaatatttactaagattgagtgatggaggaaagtggagataatacttaaattttctgaagaagtaagatattatcttgatatattgtgagttgctagattaagattgaaaaaaaaggcaaagagaatagcaatagtatatatttaatttgtagtataaaatatatataactttaaattgatgagatatatataatataaaaatcaaatacatatataaaaagtaatggtaggtttcggttttttggtcagtttgttaccaaaataaaaccgattattcaatggtggttttttcagttttaacagtattccgtaagtcgggttgaatagttttttcaatttttttagattttatactccgccctaccagaagtgaagccaaaactataaccgaaagtgtttgttctcacccacaaaatcatacctcaaatggtcatgaagtatttttaactctagcttcgatggcttctcaattgaaggcaatggccttagcttttctaaatatttcctcttcaatgcccgtaagaattaaactctaactttaaaggatcatcaatcatttttctttcttccactaagttaaccaccacatcaacttcaaattgttcccattacactctcaacttcaactcatccttttgaattaataccattaatattgtttttctctaaaaaaaatgaaaagaagtagacgtataattaatcagaatttatgtgataatatgtaaatatgaattggaattggaattggatactgctgttaataaaataaaataaatggaattagagacttagaactcgtttggaatgccgtattagatcgtattgtattgtattatattgaattggattatacattatatttttatataatactatgtcaaactttaagttatactaaaatattatatatttaggtgtccataaaagttaatgtcacatatagttttacataaaaatattgcataaaatacaattcaatataatacaatacaatacgacttaatacggcgttccaaacgagcccttataaatgatatttttacctttagtctcaaaatgctacctgctataatgacgtattggcatttgaaatttgactgtggattaaatttaaacaaatagaaaaattgactagttttgttacattagtttactaattttattacttattcctggtaagacaagagaaaccattgtacaatacatcatagagtagactatgtttgcctaccttttttgaatagaaagacatttgtcacaacacattttgtagacattttcaagaatcaaattgctcactaaatagtggtaacactccaagttatatttgcaaaacctctgatctcacccaaaaatcagacatggcaaccaaaacacaaaaccagcttcatgtattcttcttccctttcatggctcaaggacatctaatcccagctatagacatggccaagctttttgctttgcgtggccagagatccaccatcatcacaactccttacttcacaccttttctcaccaaatcacttgaaaagaacagaaatttacataccccagttgacattctcacgattaagattcccagttctgaggctggatttcccaaagggatcgagagtttagacatggctcctacgcctcaagtacaaggcaagttttttgaagctagtggcttatttgagccacaaatcgatgagcttttagaactataccgacccgattgcctagttgctgatatattcttcccttgggcaacagatgtagctgccaaatatggaattcccaggcttattttccatggtagttctaattttgctatgtgttgtaatctatcagtgtttcgatctaagccttataaacatgtgtcctctgaatatgaaccctttattattccaaatttaccagacaagatcgagttcactgccagcagagtagctgatttcattaaagaagattctgaaactgaaactgatcacttcacaaaaatgtataaggtaatgaaagaagttgagttgagaagctatggcattttggtgaacagcttctatgaacttgaaccagcttatgctgatcattacccaaaggttattcagggaataaagacttggcaaataggtcctcttttcttatacgataaagggctaaatttggaagaacatgactgcttgaagtggctccattgcaagaaaccgaattctgtagtttatgtaagtttggaagtgtagcaaattcaacgatgaacagcttatggagattgctactgggctcgaggcttctgggcaacaattcatttgggttgtgaggagagaaaagaaagaaggggttagggaagaatggcttccagaaggatttgaagagagaatggaaggaaagggtgtcatagtaagaggatgggcacctcaaattccaatccttgagcacgaagcaattgggggatttttgactcattgtggttggaactctactttggaaagcatctgtgctggtgttccgatggtgacttggcctgtttcggcagagcaattttgtaatgagaagttggttagtgaaattctgagagttgggattgaagttggagctaagaaatggaaagtactggtgggtgattttgtgaagagg

SEQ ID NO: 218183 - DNA, 7479 bp, Cannabis indica
ttttggtggttaaaggacaaaaatccatcttcaaagatgacaaaacagcctccatgacagactcaacgtccctggtggttgatccatgcagagatgaccttcaagttttggaagcagaagaaacattggctggggttaaagcacattgcagttcgagtccagatcatatggtaagcataatttggtctaataagctgtacatgcacaggtgaaaataggccctaatgtttttaaaacttgaggatatatttgctagtgaaatcacaataataatttttcttatgttgtttcagatactcgggtatcgacggaagggaggtgtttaacaaatctcaaggcttttcaacaaattggttctgcataaaatatagtgaaaaaggttgttcataaaaaaattcattactgacaagggaggtgattgaataataaataattttacaattggaaattcaaattttatatttttatttttacatgtttgcttcagtacaaattggaataataaaaggaggaatttaacaaatttcaaggctagttctgcataatattgtaaaataataaaaattcattactgagggaggtttttttttttggatggacacaagggagtggaacacaatggtgcaggagtagatgatttttgatggaaattcagaattataaataatttcacaatggaaattcatcttttatatgatctttgtacaaatgattttttttggatggaatacaagggatggacaatggtgcaaaagtagatgatttttgatggaaattcagaattataaataattttacaatggaaatcatattttatattttttattattacatagttgcttcagtacaagtgattggaattaattaggaggatttttgatgtacatatgatcttgtacacagcagcagctacaccctagtagcttagctgtatctacaataacaaagaatatctatctaagcaaacaaatcaatttttatctatctcatattggaagcagcacttgaagtggccgaatgtacgatcattcttttcttttcttttctctgtagcacccgaagatttggtgactttgcctttgttgcttccttaaccgacctataataataataataataaataataatcagtaccaaaaaaaaaaaaaaactgaaaatatataatctgaaaactactgattataatctgaaaactactgattagttgttagtttaaacgtgtggtcttacttctgtgggcagaatggattgttaaagtttggcactggccttgcatggggaaccattgtcctccttagctgtttcaaggccttttcttcttcttgctgcaataaaagtttacatcaattaagctggtatagttattattacattagttattagggatttgaaagaaagaccaaaactgaccattctggctgcctcactctcttctctgtatctcttatacatcacttccttctctttaatctgtcacaaaatgggggaccttttagtatctatctatatcttgtagatgcaatgtttatcttcagtgaggttttagttaccttttgatcaaattctgctctatccacagctctatgatccacatgaagagagaatccttgtacttcagtcaaaggcttgcgcaccttttctgggactggaatgggatctctgtagcaacagacaaaatgataattcgataatcagttctatcttctaataactagttatgatgatatatttgtgtttactcttcaatcaagtggcgggtccttactctttaaggactggctgtgccttgaatactctcatttgagcttcttctctttctttcctctccctctcctccctttctctttgcatttcctcctcatgcctcaccaaactctccaattgaaaaggatttggctttgtgcagtttttgggctcgggtttgggtggaatctgccatgaagcatacaaatattaatcaaatattgtagagtggacgctgtgctttgtaaatgagtgtgtgagaaacaaatttaagtaccacagggtagtccgtggtataaggatatggattagctttgggaaccctagctcgctcttcttcccactgcttgtgcacaacttccataataaattttttctctttctcggctcctctttcctaataaatagtaagacccagaacatagtcgtatgaaaactgtctacaagaaattcttctaaagcaaaggaatgaatgaaatattatttcttgatgtgtacctctgtatgcagatgaaatggatttggtgttgtgttttttggaagtggattatggcgaggttccatgttcaaagataactgatcatatcatagaagtcagtaacaattaaaattcagaagaatcagcattatcaagtgtagtgcaagtacataccttgtcaaaaagatctgcaaccgttgaaggtggtggaatcctctcatgagtagcaaaatgaaattcttgaggaactgtgatatgtttcttgacattacagaacatacccaactcacccttactttcaaatatctacaatatgggaaaggaaaaagacccttaatatctgttttgttctttaaggcacgggaaaataaaatgaagacaagtttatatataccttcttgttgagaggcttagccttgaatttaggtagtttttcaagttcctcctgctcaatttcccaggagcttttcaccttggttggtcgggcccttagcgatgtctgaagtagaggagttttaggttcagttagatgacccttccattgattattctgcgatgagcaaacagaaatgtcagctaatggacattaccaattcttcaaagataaaataaatacaagaaaaatgttctctgcctgatgtgacgaatctgttgaaacaactgatgccgattctgcattatggcttgcccttacggaagtctccaagtgaaattcctataacaattacgaaacatgaaaacttataagagtcaacttttctcttactaacactcatttttaaacgtttgcttaccttaaattctggcagctggggtgtacttcttggtactgcaggtaataatggggcttgcaaaatctgtttcaaagagacgattaaccataaaacatacaagagcagaagaaacacttggtcaagacaccagcagaatatataaatatatgtataccttcttgttcaagggacgtgctttaaactttggaattttggccatcatctcttcttcaagctcagcagtgcttttaatcttaacagagcgtgctctttgagatgtttcaaactcaggttccttgggcctcgtcaatgtgagtctaggcttcgtctggataatagaagcataaacaacatgggtatcaagtaatatgggattgaaaagtgacaagaaagtgtaaaaggacaacaaaaatctggggcttcattttattaacgaacctgagtgtgaggcaacgacaggtctctggtacttgattggaacttcttcaccatttcagcagctgaaacaaatggaggagcttgtgctgctggtgctccttctcgaacataaatctattttaggggtaaaaaaattaccagttaaaaacttaaatccatgttcaccaaatttataaagttttcaaagaattatagtgagaaaaccatagaacaatttaataaaaatcacaaacctttctttcatcttttttagctctattcacagttgatgagcagaagttagaactgctactcacaagacccgattttgtcttgtggggcagattatgaggtttgaggctaagaatctagattttgaagagacaagacaagacatcatattagttttgaaatgtgaaaaaaaaaaaacaaaataagcaaccggggaagacaaaataagaacaagtgtagagaagcagcttcataattacctgtctagattgtcctccttccaacttctgtcgcttaattgcctgattctcttgggccagagtgagagtcccaccagtgtttttcacatttgtttcactacaaggtttgagttgaataaccaacataaatcagtaaacacttgaaggcccaaaacttaaaaacctatatcagaacaaagaagaatgcacttaccttttcaaacaagatggtttggggtttttggattgtgacgacttgatctgactttttggcttcaatgctgttgggtttctaactaaactggctatctttttagctgtctgctgcttcttggagttggtcccaaggatagatggcacaggtgtgcaagcttctttttctgcctgaacagaaggtttcctattctccttatcactattagcttcgtttttcacaccagaagaagaagaaactatcctagctgatgcactgagataagcagagaaagcacaaacaaacttggaataagaattttgacactaattactctgtacaaaagtactagtttcacggcatagattcctggggacaaacctgtaatgtttctcagtgctcttgctctcttctttgctgtcttcctttaaacctttatcaacggaattctgaaaagacaaactagatcagataccaaaacacaacaaagataagagttgaaagagttcaaaacctacatacctctatgacattttctactttgctctctacagtggctactttctttaagtcaacaggaagcagcacggtttgaggcgcagtttccaaagtatcattacttttcaaatgggacgatgaattagaagtctacaaaacgtttaaccgtgaataatatcaaataaaaaaatcattaataagttcttctaattgaagatgaaagaataaaaaaaaaacagaaagtcacctccttctgcatctgatctgctacactaaaatcgcataagctttccacggtgaaagatctaccagtcttgattctaggcataaaagctgcatacatttgggccaaaagaatactttgaaaagttacaacagaactccgactccgactcaaattctgaacaattttttatcatctttgtaaagcaattaactaaattgaaggcaaagaaatacccagaatttagtaattagcataatcaaactcataagttccataattactatatcgaaccaacgttactatctcaaaacatgaaaatatttgatgaagaagatcaagaaatctttcgttcgttcttggtcatacaagaaacttagtcccataggtcttaacaccggaaacaaactattcaactaatcgtgaaacttaaattaagataatcaagaactaagaaaaaccctagaaactgagatgaaagaacagaaacgattgaaggaaaaaggtacatacgagaaggagcgtgagtgagggcggtgtcgaaccagagctcggccttgcgcttgtcctcgtctgattcgccgtttacgaaatcaaagaatcgaggggccgagaactcgtaggcctcgtcgatcatggtggagatggtgaaatttgttggattgggttcttcagccaccgacatggattgatgataagaagaagaagtggagtgattgtgtgtaaaatgtgtgagaggagaggagagactttgattcgctctgtacagacagaatcagaagaagaagatttttggggttaatgaaatgtaaagatactgaaaaatctgaaacgttgaagaattagagaagagagttaagggatctaacggtcatatttttcaaatttgggtaagcctcttaatgcaacgatcacttatacgaccaataggtctccccacctaacggctatatttcttcttattgtcttaatgtccttttacggtgtcgtttcgcataccaattatgtttttatttttattttatgtaaatatattattattattattattattattattattattgtattattttacatttataatatgattcatggaatttttttttatattattcgtcaaatttgattcatagaattagccttctgtaactaacggaaatggaactaatatacaaatacagtaatacaacttgaaagcgatctactggaaacaaagggccaggatttcttggctcaaagatggggataagcgttctaaattcttcttcctttcggctgctattaagggtcggagaaataccattgagagtataatgaataaagataatgtatggatttctggccgcgaggaagttgggaaagagtttattgatttcttcaagggtatctttacggagatcgcttctagtatggattacaattgctctcagttaattcatgagcggttcccgcaagaggagttggaatgccttgttagtactcctagtgctgatgagattaggaggactctgtttgcaatgaataaccataaagccccgggtcctgatgggatgtcggttcttttctataaacattattgggattctgtcggacctgacttctgtgatgcaatttgagactttttttgtgaatggtaacatgcatagaggaattaatgctacaaacattgtgctcatcccgaagattcaaaatcctactcgtaccaaccatttcaggcctatctctctttgtaatgtggtgtacaaagtcattgctaagatcttggctaacagaataagacctatccttccttcctttatctgtcctacgcaagctgcctttgtcccgggtggaacatccatgataacaatgtcattgttcaagaataatcactgttaacagaagaggagggtttctttgctataaaaattgaccttgttaaagcctatgacaggttgagctggaaattcattgaccatgtcatggagtgttatggtatccctctaaaattctgtcattggatctctcaatgtatttctactacttctctcaatatctgtcttaatgggggccctgtaggcaaaatcaatccctcttgtgggcttcgatagggagacccgctctccccttaccttttcatctgggcggctgatgttctttcaagattaatccatgatgccctcgactggggaaccataaaaggtgttaaactcagcaggggcggtcctgttctatcccatattttctttgcggacgacttaatcctggtgggtagagcgaacttaacagaggcaaatggattctggaactgcttagaaaaattatgcttggtctggccaacaggttaacaagctcaagacgacaattttcttcagtaaaaacacgccgacgaacatgcgtagagatatcaaggaaggattgggaatagattatcgtgagggatgtttaaaatatttgggccttccccttttccggtctaggcaaaaggacgctgattttaattttattttagacaaccttacagcaaaacttcagggctggaaggctaagaccctatcaaaggcggggcgtgcaactcttatcaaatctgtgggcttgtctttgcctatgtatgctatgcaaactactaaactctcatctcgtatggtcaaccggattgatagtttggtcagagatttttggtggggattcgagaaaggaaa

SEQ ID NO: 218184 - DNA, 14190 bp, Cannabis indica
gcttacatccgggaatttcggtggtatgtaaggtttggaatcatttatttgttggtagcagatgctgtgctcctcaatcttgtcctttcagccaagaattactacagtgggttagttcatctctcattcagggaataaactagtctttgcaagaagtaattcttattataatatttaggaaatgatacacagttattgtctgaataaatagtcctttatttctagttataaggaacaaaaaagacatagttttttgattacaaaaaaaaaaaaaagacatagtttttagagatttcattctgtttatttgttttatatttcaacaagtgttgtgtgggaaggataaactcatattgggttagaaattaattaaaaggaatagtcattgttggtagaaactcttttgaaagagcaagattatataaatttatgttctttcttatataaaaaaaatatacatgcttatagttgtttaatcttcactcttgcagatatgcaatgtatatctacacaggaaaggtcattttccaggtttgtttctcctcagcattttcataattgatctttcaactgaagtgtctcttgttctataatatttgacatattgtcgaacttacttgatgcccttactaccggttaaaacctgtccagaactcaatgttaaaaattaagaccataacacaaatctaactagtaactttctactaccattatcatgtaggttttatttggagttcttctgatcatatatcttcccaatttagatcctcatcctggctttacagtaattcaacccgagtctcttgacaacaatgaatatgaagaactacctgatgaaggagagcaagtttgtccagaaaggcgtgttaatgtcatctctagtgagtagaattggaatgaacaagaattggagtatatgtttagattcatttgatttttttttgttactaacattatggaacactttcagatgtatattttggatggttgaatccacttataaagaaaggctacaaaaaacccctcactgaaaaggatgtttggcacttagacacttgggatcacaccgaaactctaattaacaagttggttttcatttatcttcttatttcttatatatgcctttattatggatactgctatatgcattgtgtttgttgtggctttttcaggttccataaatgttgggctgaagaatctcagagatccaaaccatggcttttaagagctcttaataatagcattggtggaaggtattggcttatatttcttaagatatcttactttttcgattagtttgttagtgaaagatcaattcctagaaatatagttaatttaattgcttctttttaaattgttctatgcaggttttggtttggtggcctttttaaagtaaaaagctttatccttggatttttttccttttcaaatattatattgcattagcacagtgcagtaatgaaacactgtagactttatattgcattagcacagtattaaaggtaacatttttctcatgttttaatggctgcaatatttctaacttgactctaaacttcttgtagattttttatgatctacttcagtttgtggggcctgttttattgagtcagctactacaggtcagttcctttccttttatatgttgctcaaaccaagttgatttttttgtattattattattattattattattattattattattattattattattattattctttggtaaatgtttttataaaaatgaagttactttcttactaaatataaggattatattactttactattcttttgtttgcacaattaaggtttaattaatgtcaaaacacctatattggagttttaaggctgtagttcctgagttatgacaataaatattttcacattcaaagaactcagtaatattaaattatcttgatgtgaaattaaacctttcattacttgttttcttctgttaccacggttttcctccgccacaaatgaggcttcataataaatttgggagttagatcagtctatctctttctcaataatattacaaagttttcttgcattgtacaatgtagttcttgtgtttcaaatcctaattctcttgttttgaggtgcagtcaatgcaaagaggggatccatcatggatcggatacatttatgccttcttgatttttgctggtgtggtatggcttggcttctcctcaatgtgatttctgtataagatttgaagcaatttgttatggtagtggaaagctgaactaaatatatttgaattagtttagggggaaatgcataaaaatttagagaagattattgattatgctgaattctgaacttgggttctggtaactctacactaaagttttagttgttaagtaaattattgttatataattgtttaccaaacaactttaatctacaacttttaaataaacagttttcagtttttccaatatctaatatattagaacttgtactgaattagtgaattttacagtagcccaaagtacaagattttgcttttttgactacttatgtaaaagatttaatggaaatgaatgctcaaatgtgtttcatgttactggttttgattcataagaatatttgactataaagatatattgatcaaatcttggtataacttttgttcagtcagtaggggtggtgaacgaatctcgatattaccagaatgttcagcgtgttggtctttggatgagatcaactttggtaaaattctctggtttttttcgaattaagtttctttcatggagattatgaatgaatttgttggttttaggatattgtctgatgctttctaatttctaggtggctgctatttttaggaagtcattacgactcacacatgagggccgcgaaaatttcccaaccggaaaaataacaaatatgattacaacagatgctagttcacttcaagtatgttcttatttgattttctatattttttagtcataagtattttccctaccttcttctccatgtataaatttgtaatcatatttattagagttagtcccacattactaatgtgtggaaataaattgccattacataagatgaatgagctacccttcccattgccaattgattttgagatgaacctcattcatcttatcacaaattctaacatggtatcaaagccacttgtgatccgttgtgagcctaaatgccaccggtccaaaaagctgttgtgagccaaagtgctgccggtccaaatagatgtttcaaaatccagatcacctacaaatttctcgatatttagccttttgggattctttcaaatgtcacgttcggccttgtggtcaaatgaatgagctatcccttccattgccaattgattttgagatggaacctcattcatcttatcacaaattctaacaatattaactttttccttaaaattatcagctgttcctagattttgtactaaatcatatgctttttatattgttcattgtgaatgactgatcaaagtaatttcataatgaaagtcagtaaaattacaaaaagccaattggacacccaatgcctagttttcaccatagagactctgcacaatcttcatcccccttcataatttatttgatttttttcatatttttttccaaccacatttcccaccaaatagctaccacctcaattctccatagcacttttgatgcttattctctcaacataatggataaaaacaccaataattcatctagaaatttttatcatactctcattgctaccaagcaaagaagtgaaccttagaatgcagtgggatataactatggtagtttttgacatttttcagcaaatgtgcccactacttcacgagttatggtcagccccatttcgtattatcatatctattgttctcctgtaccagcaactgggagtcgcatcgcttttcggggctcttgtactaattctcttgatacccttacaggtagggtacactttttgtaatgtctgcaataattcaaactctcatgtggtataagttttgctttatttacctatattttatcagttttttaatttcttgtataatctaatttaacatgttcttcctttcagtttgtgaagttatatacattaaaaagtcctaattgatcagtgaattaaatgttagaaccaagaactaacattttcttgtaacataggtttcaatcctttttagcatgctcctgtttaattctgtgtaatttgaatttttctgagtgaaaaatatagacagttgtgctttccaaaatgcgaaaagtaacaaaggaaggactggtgtgtactgacaagagagttggcctcatgaatgaaattctcgaagccatggatattgtgaagtatggttgttttctaaaaaggatattgcttttatattttctgatttatttttatgttttaccacattagtatacattgctctgaatctatgctgaatatgtttccaatatttttgttctttatatccaatttgaatatgtttcagatgttatgcatgggaagttagcttcaagtcttgtgtcgaaaacatacgaagtgaagagctatcatggtttcgtaaagctcaattactatccattgtatgtcggaaaatagtttttccttgaatctctaaagccattattttatgatgttgttggtagttttacagttcctggtttcatatgtttcttaccatcacatttttctgattgtttttcccttttgcagtttaataattttatcttgaatagcaccccagttttcgtgtcgttcatatcatttggagttttcactttgttggggggagatttaacacctgcaagagcattcacatcactttctctatttcaactgctccgatttccattgattgtgcttcctaatctattaagtcaggtacaatgtgccacctttaacactaacagtcacttttttttatcatatcaacagaagtagctgaactggtttgtgttgcatttttagtatctgagaccattcttctttgacagattgtgaatgcaaatatatcattgcaacgcatagaggggctactcctagctgaagagataattttagagccgaacccacctcttcaacaagagctttctgtcatatcgattaagaatgggtacttttcatgggatgctaaggtcagctttggacttgcctcttattttcttactccatcactataagatctataagttaaggagtccatattttgatcctcttgattatatatggtgaaattttgtttatattttgtttttttataaaacatttgagaaatacatcagcatagtggctagaaaatggtgagtgttatgatgaacttaagaatacttagtgtcgcaacactacaccggacacaagatccatgtgttctagttccccataaggcgtttcttcaagagcaaaaacataattccgaaatattttctcatgcactgaattggacaaaattgttggtacttaagtatgtttctttccaactaaaatattagtgttttatattatattagtattagttagtgatggctgagtgagtcctttctaccgtgatgaactgttggcaccacccctactttaggacatgtttttctattacaatgctaaagatcttcctttttttttctttctttcaggcaaataagcctaccttatcaaacattaatttggatattcgagaaggtagcttagtggcaatagtaggtggaactggagaagggaaaacatcactcttatcagcaatgttaggggagcttccatctgtgacgagtcaaagtgttgtaataagagggaatgtagcttatgttcctcaaatttcatggattttcaatgcatctgtgagttgattttcgtacattttgagtgaccgggaacttttctttattgccatgtgatcggtgtactaatttctaggactattcttctaggtgcgcgataatatattatttggatctgaatttgaacctgaaagatattggaaggctattgacgtcgctgagttacatctcgatcttgatttacttccagttgagtgtatcttacaaaatttcacataagcaattattggtagctcttattaacatggaatgttctaatagttgacttaaaatacttgtttgttgttaatttcaggcacgcgatctaacagagataggtgaacgaggagtgaatatcagtggtggacagaagcaaagaatttctatagctagagctgtgtattccaatgctgatgtatacatgtttgatgaccctttaagtgctctagatgctcatgttggtagacaggtactcacttattcagctaataagtttatcattgttgctatttcagtcatatggtaattttttgtaagtgaaatgtatgtgtagaattagtatttctacttatgtaagtcactttcctctccaggtttttaataagtgtatcaaacaagaattacaagggaaaaccaggttattggttacaaaccagctacattttcttccacaggtggatagaatcgttctagtttgtgacggtacgattatggaggaaggaacctatgaggagctgactaaaaatggaaagatgttccaaaaactaatggaaaatgcatcgaaaactggagaaaatgtaaaagaaaaagtggacaataaaagctgttttcagaatataccagtcccagctctaaatggattattttctgatccaaccaattcaaagaaagggaatttggagaaggttgtcctaatcaaggaagaggaacgggagactggtgttgtcggttggaatgtcttgatgaggtaatatggtgcccaatctaaactttatgattaaaaagatttaaatggaaaaagaaaaaatcctaatgaaaataaaaacatgaatatgaatgtgaatgtgcttcatttggactgttggataccaagctccaaacaagaacacaaataacagaaacaaacaaaacaaacaggtgataaactcaaagattcttatttggaaattaaatcaaaggtattttgaattattatataaacattatttcttatatggaatggaaatcaaaaatatataaccttatctgattaaaattctaaatgggaatcatgcaatatgctcttattacctaaatttgatattttgaaaatattgattttgtttctatttgcaggtaccaaaatgcactaggaggattttgtgtggtcattgttgtctcgattttctattttttaacggaagttcttcgagtttcaagtagcacttggctaagtttatggacagatcaaagcagatcaagaagtcataaacccgaattctatattttcgtttatgcactgatttcatttggccaggtgctctaatcattgatccatatttggcaacaatttcattttggttataatacaatgacatggtttaaatgctatgctgatcactgcaatgtgttgattcaggtgacgatgacactagcaaactcttttttgctgatcatatgtagtctaggtgcagccaaaagattgcacaatgccatgttacattccacattgagagctccaatgcttttcttccactctaatccaactggacgaataatcaataggttttcaaaagatgtaggcgatatagatcggaatgttgctagtaatatgaattcatttctgggtcaaatgtggctgcttctttcaacttttgcgctaataggaattgtgagcacggtatccctctgggccatcatgccacttttgagcttgttctatatggcctacttatactatcaggtatgcttgacattgttccatgttccactttctttccctttatccaaatttatacacctaaaggagttttttttttattcaagtaacatctttttagactcaaagttctcttattactttcttgctaatcagttatcagacatgtcattctcatgatcttatgaaaagtttcacttttgttggggtatcaaacctaatcccacggaagaataggtaagaattgccttgattataagtgttccacctactccagagactttttgggaaagtgttcaaaaacaaaaccgtgagggttaacctttttcaatttagaaaaataattacataacttaatgatttcaaccattgttaactagtattaatcttacaagattgaaacgaagatccttctctgtaatacaaactataacactagaagctaacagaagcttgatgaaagaaagttgtcacttaagtttagtggaaattggtaagtatagcagtgtttttcttttgcacaagtcaaacaaatgtaaagtattattcagtatttgattaagatctcctgaagccaataaacattttttctgctcaccattactaatgaaccttattcatgcagaacacatctcgtgaagtgaaacgcttggattccattacaagatctcctgtttatgcacaatttggggaagcactaaatggtttgtcaactattcgcgcatacaaagtctgcgatcgaatagcctatgtaaatggaaagtctatggacaacaatacaagatttgctctagcagacatggcttcaactagctggctcttcataagattggaaacattaggaggtattatgatttggttcacagcaagctttgctgttttgcagaatggaagagcagaaaaccaagctgaattggcatcagtaatgggcttacttctcagctatacattaaatatcacaaaccttcttagtaatttattaagagtagctagtatagctgaaaatagtttaaatgctgtcgagcgtgctgggacttatattgatttgcaacacgaggcaccagatataatcgaaaacaaccaaccaccaccaacatggccatcattaggaggtattagttttgacaatgttgtcctgcgttacagacctggacttcctccagttctgcatggattgtcttttaaaatttgtccaagtgagaaggttggaatagttggaagaactggtgctgggaaatctagcatgctcaatgcactatttcgtatagtagaaatggaagaaggaagaatcttgatagatggttatgatatttctaagtttggattgacagatttgcgaaaagtcctcagcattatacctcaatcagctgtcattttctcaggtatgcaatgtatatatgaatgttcattagttggcttgagggaaggaaagaacacaagaaaacatttttttcttttcgttgcaggaactgtacggtttaatcttgatccattcggtgagcatactgataatgctctttgggcggcgttagaaagagcacaccttaaggatgttatcaaaaggaaaaccttttggtttggatgcaaaggtaaatataatcacataactctttttctctttcccaagaccaaaacttaagaagctgagcatatatccagaaagttgccctgatctttttctccttatttccacaaatacaaaaagcataaatcaaaacattgaactatatagattccattctctggtctcctcaaaagttcttaattactaaagcataagccaagagatgagagtcactaaatctagctaagtatcaatccaatacatatttgcaccaaagtgaaatcagttactaacagcattaactgtcaaactaactaaccactactttgttatattagtgctgggaaatctagcatgctcgatgttagaatttgagataggtaaaggggttccatctcaaaaccaattgactatagaaggagtagtccattcatcttatacattctattatctttccacacattagtgatgtgagactctctaacactcaatgcactgcttcaaatcctaattgcatagtattctacttgcatagtattgaagattgttatgtacttttagttatatattttgttgtaagttgagagtatgaaaataagtcgaatgaactgattttcgcttaagtactttgcatctacttgtgtctaggttgttgaaggaggagataattttagcgttggacaaaggcaattactaagccttgctcgagtattgctacggagatcaaggtacttgttcttgatgaagcgacatcagctgttgacgtcaaaactgatgcacttatccagaaacaattcgcgaagaattcaagtcctgtactatgttgattattgctcataggttaaacacaataatcgacagtgatcgggtacttgtacttgatgctggtcaggtaaatcaaacttcaccaatttttgattgagtaatgtgcattaaacatcacaagattcacaaaagaagtcaaggttttatcttatgatattgttaactttttaggttcttgagtatgattcccccgaagaattgttgtcgaacgaagaaagtgcattctcaagaatggttcaaagcacagggcctgcaaatgctcaatacttgcatagcttagtactaagaaaaaaacataacaagatgggaatatagaaaaactgatcaaaccaaccaagtgttgcagctcagtatgcacaagatgcttctcttgctatttcacataatgatcttcaatagctagatattgagcacaaacaatgatatatccttttgaaaacaaaagatgcaatcactatagtcgaagatgttggggggaaccttgaataagatacaaaatagtaagaaggtacgttactaattagtagctatgtcacataagcataattatgttttaagtaataaaaaatgttatttagtctctttttgtaatggttattatctttttcatattagtcttagtaaaaatatcattattttctagaacaattagtaaatatgtcaattataaaaaaaaatagtgaatatgtcccctcacttttgtcattagtgttagtttacccctcacttttcacatggtattgttttgcctcctatatggcaaagttagtattgttgaccccctatatgataaagttagtattgtttttaccccgtaattttaacattgttaaaattaaaaccttaaattaatattttttgtagacataatagtattttactatagttattctgttaaccattttgtaaacctataacaaaaaaaattgagattatacagtagttaacaagaattgtataacaatatttttaacataaatacattatatttataaaaaataataggaatttttcatttatacattccaaagcaattttctttttgtatttttacaaaatatacaatgtaatccacgaagtaactaaaatcgcaactcaattcaaactgcaatttatattgcaatttacgtaacaactcagataacaacttaaatcgtaaaaataataataaaaaaaaaatcaaaaagtagtatatgtgatgattttcctttataatatttaataaattatataataatattgacaaatcatatttttaagtggttttattgtcaatatttttttatatatatatatttaagtgattttaatgatgtgaaaaataaatatttaattaacattaaataatttaattttaaaaactaattaatttaaaataaccgattcaattcatatttatgtggattgaattaaatttgaactattgcacaaattgaattggattcaaaatataaattcgcacttagcgtagacatttacattataagcaaaatagtgcgaactgaaccaaatgaacaccctactcccttgtcatttacttctggttctaccttgcacacaggtaattcttaccaagttaagcaagaaatgtgagaagaaaagctaaggaaccagtatcttcattaagccttacaactaactcttataactcctccctccatattactttgtggaaattcaatggcaagaatttttaccaataatcatgatggtccaaattgtcattagtgggaaacatggaacaacctatgagaaacttctttcttttaatttttcttcaatttagtaatactataaatatatatatgtaatcaccaataaagattcttctttcttttaacttttctcttatctcaaagccatttttaaggaattgagggatttttcaaattttaagatcaaaagtgaaaagaaggaagtggttttggttcaactgtggaccttatatttcaggttggtcccagtctaaggatgtgtcttcaaaattattttctaaccgctgaaatctactttgagagagtctgctcatcacagcaagacctgaaacacaaatgccaatttttgatcagaaagagttggattaaaagcataattattcttttgactctaaagattttcatgttttagaagttttttaacaaagagattcacaagaacatgatgagaacacaaacaaaatccaagagagaattgaattgacaccaaagaattttcagggaatataaagattaaataaaacaaaacaaaaaatttatgtgttgtttcatgaattgtggttgcagtataattagatatgtaccttcaactattctgtaaagagctgaccaccaattatcgcttggaacctcaaaacggtttagtgcttcatctatattttgctcgtatttcccctccaaaactccttgcagtgttacgactgcatcctttgttttcaagaggatattgctcttatcttcaatatcagattgttgaagatcattctgtgaaggagctagagaaacagttagcgcgtactgagcagcagccttccattgggacgaggctagccatcgcctctggtttatcaactgcttgtgctctaaatcacttcctgtcatggtcgatttttctcctaatactaagctacgtaagtagtcagcattggcaggccctgtactttgaaccattctagagaatgaactttcttcgttcgataacagtttctcgggggaatcatactcaagaagctggaaggtaacatttagaatccactgttagaaaacgatatatttgtacaaccaaacataatttcttgcaagcaggcattatcttttgactactagaaaaatgaacattacaataagaaaatgatgagtttgagaaaacacaaaggtttccatgtacctgaccagcatcaagaacaagaatccgatcactatcaattatggtatttaatctgtgagcaataatcaacatagtgcaggatttaaattcttcgcgaattgttttctggataagagcatcagtaccaacatcaacagctgaagttgcttcatcaagaacaagtatcttcgatcttcgtagcaatgccctagcaaggcttattaattgcctttgtcctacactgaaattctctcctccttcaagaacctagacacgagcagaagaagacaggttatcttccattccatttaacaagttccatctttcttttcttaaacaataaggtattgagcacaaagatacttcataagcttcaaaaggatgacaaacgacacgcaatgtgatcaaccacattgctgtttcatgcttattattttgtttatacgcattcaaatttcaagatatcatgtggctatcacatttattcttggtaagcatttatttccaagaaataatacatctgactgttctaagcattctttacagtaaagaagtgaaagacaacacttttaacatatcactgtaactatcttgaatgcagaaaagaagaaagtaatcatcatcttcaatattgtaaattagggtatgtgtatgggtatacctctgcatccagaccgaaagggtttcttctaatgacatccttaagatgcgctctctctaatgcctcccaaagatcagcatcattatgctcacaaaacggatcaagattaaatcttaccgttcctggaaagatgaatttaccattagaatgacacgctttcaacaaattctacataccaggcgtacaaacacaacaacacatttaggataaaaacccaggattgattgattttacattgcatacctgaaaaaaggatgggagattgtggtatgatactaagaatttttcgcaaatctgtcagtccaagcttacaaatatcacaaccatcaattaagattcttcctttttccatttcaactatccggaataatacattaagcatgctagattttcctgcaccagttcttccaactattccaagcttttccgttggagaaatttcgaaggataacccatgcaaaactggaggaagtccaggcctataacgcataacaacactctcaaacttaatagatcccgatgatggccaccctggtgggggtcggtt

SEQ ID NO: 218185 - DNA, 1898 bp, Cannabis indica
tccccgccccattaggggcgggtccccccggggcaccatccccatgtaatttttgattgaattaatggataacagttcatgtaatttttcaaatagtatttcttatttagtttataatgttagtatggcttgtgaaattaaggttcagataattcttaataattattaatatttttgggttattagattgcaatttaatttttgatacttcttaggtcaaggaaatatattgtttttgttctttaactttgtaaattgactatagtttcttcttttgggataatatttaaacatggtgaattgggagaggtttcacccctatatgtaaaactaaaagtacttaaagtgtgattcaagaatcaagaaaatgattttcttatggcaatgaatgtttccaataaacaatttatttttattcattattaatgtagaagggagtccgaatgtgatttataatttaaggactcattatgtgtagtctttagcttataatgtccaacttttcagtaagaaatcacctcaagtaaataattacataatagaagaagaaaagaaagggttataatttgtctcactgtttctctaaagctcattccatgatttcaagtttagtcagaaacatattgttggattaaacctctacttacactgataatcacttacttacaaggataaaagagtaaatacatgcaaatccctaatttggccttcgacctctatatccctaacagaaattagttagaatggattaggttataatccacacctaactaatttctgtaactaactaactattaaaccagatcagaaacctagtgctatatatacctgctgcaaatccagctatgacaacggttgagtgatattcttcaaaatccaaggttgcaaaacttgaagaagaaggagaagaagctcatacatgcacagaaaacaaaagagagttagtatagtgtgagaaagagggattaaaacccaatacatgtaaaaacagagagattaccagtcgaattcatacctgtgacttggaatctcatccttgtaactctaaacatcaattttatagtggaatcgagctctcaatctgaggagcagctcaacggagaagtagccaatttatttggtgaacttcaggaaaaattttggtgttttctaagcctatctttactatttttgtgtgtgtttggggatagatcagatcaagttagatttgatcttgtgtttgtgtatggtttgagatttctgggtgtttagggttagcatcgagtttctctgagagagaaactctctgctagggtttcgaagcaagacctaaaactaagggatttgattgagaaggttctcgatccctgttggttttgtcttggcctaaatggggtcgtattgactctgttgactttgaaaagtcagggttgttaaaggtcgaaattgaccttggttaaaagtgattatttaatgttggtgtagaacaaattggtaaaagcactaattcctacaatggtatcagagcttggttaagctggaagaatcaacattctaaataatcaagaaggaagaacactcaagcaagaaatcaagaaacacaacaagaatttcaagaactcaaccttgatctaaagaaatctttaacaaaggatttctgagaacatttctcaaattaatctttatatataaattgcttattatttatctttatctgattttattaaacatgagcaatttaaaggtagacattgacaaatttgatggttctggtgattacaagatttggaggagaaagataaaatcactcctggctcaacagaaacttttaagagtacataatgaccctatagaatggccagaagggatagccaagattcaacaagaagaatactggaaacagcaactggtatcatgat

SEQ ID NO: 218186 - DNA, 3140 bp, Cannabis indica
cacgatcaaaagccttactcatacccaatttgagtgctgagaaactttttttgccccgtgttctatgctgaatgttgtgtacaagttcaaaggcaacaagcacattatcagtaattaaccggttggaaagaaatgcacttttgagtctcagagatgacaatagggagagcttctttgaatctcaacacaatcatcttggaaatgatcttgtagatgacattgcataaactgattgggcaaaaatcagccatgactgttggtgaattgacttttggaacaagggtgatgatcgccttattaattaaatccatgtccataccatgattgaagacccccaacactacatcagtaacagaagaactaacaatatgccagtaattttggtagaacattgcagacatgccatcactaccaggacttttgtcagggctcatggtttttaaagcagcagttatctccatttcagtaaaaggggcagtgagagtgtcattgattacaagtgtaattgaagtgggaatggtggatgtaacctggtctattgcagtcgggtctgctgctgtagcagtgaagagattggcaaaaaattctgtgataatgttggacattccttcttttgaagttgttttggtgtcgttgctgtccaagagagaattaattctattagcagctttacgtgaggaaggatgtgcgtgaaaaaatttggtattttgatcaccacttcgtagccaattgacacgcgatcgttgttgccaatattgctcttcttgttccaataattcatccaagacgctttcagacttctttatatcattaattaaagtctgagttcttgcttgttgattgttcaaacgtgacacttgcttctgtgctgtggagatttttttccttcatattgccaaatgtagacacatgccattgctgtaaagaagatgaacaagctgcaatattatgcaaaaacttatccatggcagaacctgatgcttgggacgtccattgcttctcaataatgttggcagcctcttcattttgaagccacatttgttcaaacttgaacctagtgcgtcgatggtgttgctgctgttctgaactttttatatgaacattgactgctattgctcgatggtcagagttatagtagtcaagatgtttagtcacaattggagtgaactgggaggtccaacaatcatttacgaagcaccaatccagcctttcttttaccgtgttcactgtgcatctacctttgatccatgtgtacgggtcaccctcaaaaggaacctcgtttaaatggcagcagtcaagtacatttagaaattgttccatttgagcctcatttcgaagtacaccacctactttgttatcattagaaatgatctcattaaagtcactgataacaagtcaaacagatagaggtgagacatctttaagtctttctaaaagagtccaagtttgagagcggagttgagtgagctccatagttgtaaaatctcagtaacagactgcaatctattgtcatcatcagcgtcacgcaatttgttttcaatatttgctatcctttctctaaaagcttgaaagaataatagtattttaactacacataaacaaacaatacgaatgaaaaataaaaataatgagtaaataaacattattgtaaatttatattttattttcactatagataaacaaaataagcatcaatagatagaatttatagaaaactaaatacttctaatagataaaattaaaaagaaaatataaaatgacttatcttgtcaaatacaattagtgtctcaagtagaagcaataatttaattgtttaaataagtattataactccaataactttataactcaaatagttgataacttaaattatgtttataataagctaatttaactattttacataaaaaaattaattatagaaaaagaaaataattgaaaggaaaaattattaatcaacacaacagtttttattcgaaaaaaaatacaatatgataaaattagagacactgaaataatatccttaaaagaaatgtaggcgcaatcataaaaagacgaacttttattaaaaaataataaaatcttcaaagaaaaaaaaaagagaaaacattatctcaattgaattgttgaaacataataaaggagatgtagtaagacatatatttgttcttaaaaatatatcataccaaaatattcacatgagtttagtacacttgttacatctacttcacactgccccactacaacatgtctactgcgatatacatgaggttctcaaaaaacgtccagattgcttgcttcaaggaatgcaatccattccttaagaacctaaggtagtggcaataatacaccattaaacaaatttctttttaatagacgccacttcagattcaaccaatttcaagcaaaagaaggttctaatataataaatatatatacttcatcagataaaggtgctcctccataggaatatagctctgtctgcaaatattccaactgctgtctcattgcatttcattggattctagacctatattaacctatacacacaaaagggtaaatttattcgatgttattttgataaatctaaaatttaaaaaatatcatgtttaagacagaaagtgagttttttttttttgataaataatagcaacagaggagattaggaaaggcttaaagattacaagatatagtgtatatcatgtggaaagaatattgaggctattgttatttcaatagaacatcacacatagctcagaagaaaggatcgtctcatgtcttgttcaaaacaaggaagatgaaaattagaaatcataattattagattgacttttgacactgatgattctagtgtgaattcattatcgtcatccttattaaacaaatatttcacagagaagtacgagactcaaaaaggcagatagttcacctatttatcgatatttgtacaataaatgggtcttgccactcagcgttagggatttgactgttgttaatatgggctcgttcatccttcatcatcgacaatatacctcaacaaaaaggcagagggttaacctgtttcctaatattttgtcgatttacctcaagagtgttggaatcgacttcctctccctttctatgtcgttttcttcagaaat

SEQ ID NO: 218187 - DNA, 10522 bp, Cannabis indica
caaataaaaattataaaaaaacattgttaaaataattaattctaactatagtagagaacattattaaattcttttggagatacagtgctctcttaatataaatatatttatatattataacaaaatgttaataattacaaataacatttatgtttgaaaaagattgaacgtacttgttttagaattgacatcgatatatacaggttcatgcataattcataagatgttttaagaatatgtattttccttcttaattttctataaatttaaacatatattcactattacaaaaaaaaaaaaaacttcttttatagtcatcaaagctatagaatatggtaattctttcatgatgataaaatgcatatgatgtacataatatcaaagaatataaaaagaatattttttattttcaataatgatagacataaaaaaatatgtcttgtacaaaattattggacatgacaataagatctgcaatgattttttttttttttcatatacaacgttgctcgacgtgaagtgtaataatttaatattattatacttagtgtaggcatgaaatactttttttttattaattttaaatattaaataattaataaatataaagttctaagaaattgaattttatatatataaaaaataaaattaatattattttagattttgtatttcttaaaatcacagatttgaccttatgttttgttaatttataatttaggccctatatttttcaaaataatacaaaataaatcaagagcttaattttttcgttttttttaaatataaccaacctaaaattaatttctatcatgaacagtgcaaaaaaatgtaacaattcttgtcataatacctctatgtcaggttattattaagttttcatttgacgaaaattaagctcaaggtctattttgtaccattttaagaaatacaatgtctgcattgtcatttaacaaaatagaagactaaattagtaacttttacaaaacatgaaattcaaaatggtatttgcattaattaagaaataataaactaacaatattaaatactatttctttcactatataatattaaacactatttctttcaccaataaacttataaagtttgaacatttgaacaagagtaatgaaaaaaaatagaagaaatcaacaaccaccgctgcaagccgcacttgaccaacctcagccaccacctgtcgacctagaaaaaaaagaaagagaacaatattacacaagtaaaagagatctaagaaaaagaaaagaaaagaataaagaatagagatgcaatcagagtcaagaagtctcaaattcggcaagttgaccttggggttgggtttcggtcatcgacaaaggtcatggtggacgtcgacgaaggtcgtttggcctaacaagccccggagacgtccaaatctaggccacatgatttggatctaatgggcttaggaaacagtgacatagacagtggggacctagaggatcttgtggtttcggaggccaaggaactcatttatggcctctatttagaccatagcaaagcggaggaggccaaagccgcgtcaagccaaagaaaacgaaaaagaagagagagaaagttgaatgttggtggtgaagctcgtgggacctaaggtggccggagaagatggcgctcgggggatggggtggatgtgggctagagtttccattggaaagaagaagaagaagaaagaatggggtggagtggcattggtagggttcttgaagaagaagaagatggagagagaggatgggatagaatgttttttgcatttgttttagctaataataaggttttattgcaagtgagtataaatgttatacgcttgattcacatatgcagtttcaactttagtttttttatagtaagattcacgtccaactttcgcttgatgcagtccacaagtcacgtccaacaatgtaggacattaaccgctgtaccaaaatgaaaaaaaaaatgaattattaccttatcacgtcctcacatacttttcatgtcaagtattgttggacgatgaaattttttttatgtccagcaatactagatatgaaaactcgttataactttttcatgtcctacactaatttttctagacatgaaaaatatatattaaatgagttttttgtagtagtgattgtttaaaaatcatacattaacattatttttaagtcaaaacaatttttgttgtacaaatgattgtgttttcaatatttgaataaattataaccttaattaatcttaaaatgtctaaaagttttcattatttagaatattttatgaagtgaaaatagtgttgaaacacctttaagtgcatttggtacgagagttagaattggtaaaaatgagaatatcaaacttaactcatgtttggtaaattaaatttaatgactttgcatggatttatattatccagtctcactttttaactttaattaattataacattaaatccctttaactttactccttcaagtcaaattcccattattttgtacaggtataaaagtatgagcaaaatattattcgaattgtattttggtcacatttagttagttataactttattgaaagctggtaaaaaaatatactataactataatgtcaattattatatagaataaataggacttaatgcgccacactttcaccaaaaaaaaaaaaaaaaacaacataggactttcctcctacattatgacaattttatcttttaaacttttttatgtcgcgaaaatttttcgtgaactaaaaaaatcgttacgaatatccctctttaattacattcgactcatttcttcaaaaataattatttatttggctatgagttacatgtataagtgtactatgatgatttatttaacaactttaatctatccgaaatttatttggcattaatgtagaaacattagctataaggatgtgtatatataatattctcataatttatcattaaattgttatttgtatatttatttattttctctgaatttttaaactgagccaaactaatatcaattagtattacatcaacaattatgaaaaaaaaaaatgaccaactaggaaggtagctaaaaatagatatttacaatgatttttatagtttagaaagaatattttgtaacaaaaaaaagttcaaagcaaaagtttactaagatatgaaattaggggcacaaatcctatatatttcgacaatgagaaatgcaaaaaggcatcatagttgtttagtaccctcttaggttttatatcgctattggtgcaattaagtatcgagtcccatataatttaatataatagcttttaaagaatattattaacctatcataaagcaccactcttctgggagatactgaacaccactagtgccctatattaatgctcttctactatataacaaaattaaagttataagtttctctactcttgattcacctcccatactttgggattttgtttttttcttctatgaaattgatgttttgtagttcataaaaaacacgaatatgattgtcgtccaagtcacatgagcataagtcgcattatataacgagtattattattaggtaccaatagtgtttaatattttttataggtagtgctctaagattaagtagagatattttctaaaagcttacattaaataatatgagatttaatacttaattaaactaataacaatatcacacttaacagattctaacacaatataccttttaacattgctcttatataacatctctataaagaaagcagcaaagtaaagcaaaacaatttaattattattattaatttcgataaagacatgaatttgacctttctcccttttccttgagagaagggaaagttgtataagttaagctagctagtaattaattaattaagagaagaaatgtgtagcaatattcttaaattcgaaattaaatggctatatatctgaagctagagctacttaattaatcagattacattataagtcttctccattaattatttatttcaccatcattatcttatatattttattaatttcgtgattaatggatgttcattcaaaataaattatttaattatatgaaacaaatttgaggtatataataggaaatactattccattatataaattatagggtaagttaacattacattttgtaaggagtagtctctttcgccatttaggagaactttttaatctaattttttttttttataattcatgtatattataattatttaagactattttatataaatttttaatttttctttataaataatttataataccaaaaataagattttttttacatatttttttacccgactattttttcttatgatgggccccacggggactcatccttaatagagtggggatttcccatctaaatggcgaacaagactagaacgagcattacttttgtcctcgaatgttaaacggaacagacacggagatgacactccccaccccgatagggatccgtttaatattttattttatatttctagtaacattttacattttataatttatgtttgtatttttagtatattaattagtattctttttatgaattataagttgtattttagataataattagttcattaagtaataattaatgtgtaatattttaatttttatatagtttaatatttttatatatttaaatttttattataaattatttttttattaaaggatttcgcgctcccttcccgtctctattaggggagtcctcactccatcctttatgaggaataaataggaatggagattaaaatctttaacgggaatagaaatcggaggagcactcgccacgaaatctccatcccgtgtgcattcctactacaacgtacgcaatcaaaataataaaaagaaatagactaattttttttaaatgacaaaacagatataaaatcgacctgtctactacataaatttccataattatataataaatactgcaagttggttgataaaggtatattattcttgcaagttgactaagatacttggaatcgagtctgtattgaaaccattaattaagcaccatagaaactataaagctctctactgccaatactgtccacatcactcaacactagctggctagtgaacaagcactctttatcaatatataagttcaaattatctttcttatttttcttcactctttaattaaatattagattatgttatgtgtaccatatatattaaggcaactatgtatctcaaaatttagtagttgtttgatgcaaaaataaaaacacaacttatttaattttaaaattgaagggaataaataaaaagtatatatatatatattcatatctttgttatattaaatgtggttatcaaacggaaattgttagtttaataatattttttcgttaaaattattggttaaaattaatacggttaaatcaatcaattaattatttttatctaaatttaatttatttaataaaacataactttgataattatttaaaagtatcactaaaattagataattttttaaataattttaatttaaatttgaattaaatgttaattcatttaattaatcttactttataacatggtgatatataggcataccctaatggacctgcacttctcctcaccaggaggttccaagtttagatcccccctcccccaaagtcaaaaaaaaaacattctttataacaaattaataagttatattattaaaaatatttaaatgtatttatttattttattttttaataaaattggtttgacatatttttttataaataaatttaatactaaattacatttaaagtataactgaattgtgttagattgaatttttattattattaaaatttataattaggtaataataattttaatacaaatttatgttactaatacttaaatatatataattggtttttacaaaaaaaaatatatattaaattgggtacaaaaattttatttaaaataaaaataagcactgaattagttcggatttggacgtttgttaaattttattttttttctttctatatatgtatatataaaggaaattggatttacaaaaacaatataatactccaacaaaaattacaaaaagcatccattcctaagaacttataattaatttcttgaacaaaaaaaaaaaaacttatagttaatttatctcttgcaatatgaagaattctgaatctgattctacgacacaactcacgagtgcttcaaaatcacttggcttgttaaacacatcttcactcttggcattgaactaaatttggtgagctacccaaaaagattaaattttctcaagataaagttgttgcgttacatgctagtttttataatccatatcagagttataaaagtaaaaaagatttataaaaataatttttatccaatatgtaccataagttcaagaatctcaacataatatatatatatatagattaaatttgaaataataaaagaaacacaatacttcttaagcctatcagagtatcctttctatcttttagtacaattgacgatcatttaatctgagaactattgttgaagaattcacactttaatcttctaagccaaccttaacactcaagaatagagtgggttattacattcgatgtgttaggaaagtcatgattccataattataaatcatgttcccaaccatccatattattagattttgaaaacaaaagttgtaagaattatcttctctgaaaaactttaacgagtgaatcaaagaaattaatacatgaacaggagtttatgattactcaatatttaggtcgatctaatattgatcatcataatgatatgaattaggtctctatagtaactgatgtgttaataaagacaacttcattcatattggtctttgtcatatataatttctattatgtacgacaccttcacattgatgttatactacatccgtaattcgaaccaagattacttgcaccgaagaaccggcatcagtgaactatactagcaaccattgattaaagattcccaaactttaatatgttgctgactgttttatacatagataagtggcctcagttctctatacagctacaagtcataaccttatatatgaataaggcattttctgatattgaatataaatcattgaatactaaatattaataatttaacattcaagcatatatcaaaggtttaactctttatctaataataaaaaatttctttactggctttttagggcataaatcctaacaatctcccactttttctaaaagtaaattggacatctcccttagtttgtatgacccataaaagatttcgctagtagcgtttttgtgaatggatctacaaggttatgtttcgatgcaatctttaagaccgtcacctctctatactaaatctctttgtatatggtacttcctctcaatgtgcttgcctctcttatggctccttggttccttagagttggccaccagtccactattgtcatagtagagtaccagtagtttttctacttttggaactacttccagagcaatgtagaatttcttcaaccatatcgcttcattagctgctttgcaagctgttatatattcgacttccatggttgaattttctatactagtttgcttaatacttctctaaattaaaactccttcaccaagagtaaatactgacctagatgtcaatattttagtgctttcagtgagagcattatttataaactcaatcaatcatcatggtcgtaacaagaagaactaaaacttctagttcttcaagtcttcctcaagataccatgactgttgatcttaatgttcgtgttccagccaccataggcgtttccacgaacccaactgatgcatccaaccctaccaattctatcaacccaatagacaaacaaacttgaccaacacatctgatccaattgcctcgactaactagctaatcctaatcaatagcctttgccacccaaagtagatccaccgaaacacctcaaacagaaggcctgtcgacatggaacaacctttatagagcataacagcacgttccccagtatatgcaggggaaataggactagggatcggcgaactagctattggtgagccttatgtggacctgggagagacatcgaattggctaggctcagagaggtcgtaggccaagttgaccaaactgagtaatcatgagatgtttcttgcgatacattcgcccagtagagacacaaattcttcaggtggatggacggctaggaggccatcctctaggcctatcaggcagagctggaccactgtaattgggaggctagtaacctaataagggagttcaatgaaagaactactgagagaggatatgatctgattaaagatcctttgcaaggaaggctcgtcaacagttcgggcagggcctatgggcaggttgacattgtgcaagttgtccaaccaagccccttagttgcaaggacagaccttcccttgcctgaagatagacaaattctactaaacaaatcttatggcgggaatagctagtctctggcactaggtggtggtgaggtgcaaccaagtattcctagctcagtaacaacaccactcagttatcctctggctaaccaatagaatgatattcctctccaaaacatttgggagcaagtcattctaaggcatatctttgatagactaggtctgggaacatttggaaaaaccaaagacaacatcaacttaaggagtgagaatcgaagtgacattattccactaatggacaatcatttcagacaaatgaatccaccatacacgagcacttagtgtgatcaacgtcctgtcaacacacatgccattttggccaatcaaggaagaacaactggccatacaccacccagtgtagggctgctcagccatggctagttacctaatccaatgtcagccggccaaagctagttacctagtctggggatggccagccattgacataccctcacctagggtatggccggccaaggtttagctgaccaagggcttcagcccaacatataaaggccactcggtcaagttcttactacatcagatccttttgtacaagcataactgaatcaaataagagatatgataaagggcctagtcaacccaaaacgattagaccttgaactagattggtcaagggtgtctccatttttgtcatatattaatgtcttgcccttgcctaagtttaagatgtcagtatggaaaatgtatactagaagagaagatcctcttgcggacatcaagtactggagaagttgacatactacctactttagcatcaaggatgctcagactgtacttctaagcccacccaataattgtgtacactgaccaaccattgcgacaggtattacaaaaacatgaagcatctgactgattacttaaatgggccaactagctcagccattttgagatcatataccaaccaaggatggccataaaaggccaagctcttgccaactttgtgtatgaatgtacaggcatatctcgtaaaacctccgaagattcaggagaaaagaaagagaaagagcagaagcaagagaacaaagatttagcctagaagttacacgttggtagaagctgtactgaccacctgtctggtgtaggcattgctcttattacacatggagggcaacagctgcacaagggaatcaagttcaattgtaaggcctccaacaatgaggttgaatatgaagctctgattgctggccttaagctagcgcatgaagtatggtccgaccacctagacatatacaacgattctcaatagttgtaaatcaagtcctcagtgaatatacaacttgaggtgaaagaatgatagcctagttgagcaaaacccaagacttataagtcggcttaaaggctatacaataaggaaagtccctaaagaagagaatgaaacagctgatgcactcgctcatctagcaagaagcaccataatcgacaagggaaatttgggcccatacagttcttaaaagaaccaagtattgccattctaaaagaggttgacatgttggatgacagtccaacctagatgatgcccattgcccattgcagcatacctccaaactggagccttgcctaaaaacaaaattaaggcaagagaaaaatgaggagaaaagctgctaaatacctaatcctagatggagtaatctacagacgaggcttctcaatgctgctccgaaggtgtgtcactaagaaagaagtcgagcgattattgataaaagtgcacaaaggcttcttcggcaatcatgtcagtgttagaattaattttaccaggatcttagatctactcacaactatattgaattaacaacctaaatatgaacttctaaaacgataaataaaaacacataaaagttaagaaaccttacagtgatggcagcggaattaagtgtctcctctatgattgaggtactgtatgctatgtgtgggcacttctctctcacaaagaatctcaaaatttctcttccctttttttttcttttgatttcgtgtataatgatgcctt

SEQ ID NO: 218188 - DNA, 4889 bp, Cannabis indica
ctttattctttgtttcaatggctaaacgattcaacaacttcaacatggtatcagagcactttccacctttggtggctaacatggcgacgatcaacaacaacagcaccaacaattctcaacaagggggatccaacaatgctaacagatctcgaaacagagaagctgaagattcaccagtatacttcaatcacaccatttctgtaaagctaaatgatcataattacctcttgtggaaacaacaggttctcgctgccatacgagggaataggcttctgaagttcatcgaagatgttactccaccaccgcagttcctcaatgatgccgatcaagctcgcagacattataatcctgagttcttggattgggatgtccaggaccagcttctggtttcttggcttctctcttcaatgacagaaagcctacttacaagaatggtaggatgtaactcagcaaggcagatctggagtgccttggagaagcacttcactctgcaagtatcgtccaagatcctcgagtttcagacaaaacttcagaacattcgaaaaggatccatgtctctcaatgaatacctgctaaagatcaaacagggagttgatcttttggcctccgttggacaagttctctctgcacgagatcatatagctgccatattcaagggattacccagcgaatatgacacattcatcatatcctcgaatactagaatcgaagggtactccgtcgctgaaatcgaagctcttctccttgcgtctgaatctcgcatagagaagacagataaagagcttgagttttctgcaaatttaactaccacagatcaagaacttgcgtatcccagtcttgaagccaatgcagctcaatttggcaggaatttcagagctcccggtaacagtcgtggtcagtattcttctcctcccttcccttactttactaataattctcattttgctagtcagaggaatgttggcagaggcaatactgctctctttcgaggctataatggctcttttcaaggccctggtagaggccctggcatttccaacagaggtgcacgtacagcagctacacaaaatcgtgtgcaatgccaattgtgtcataagatcggccacacagtgctggattgcttctatcgctttgataaagcattactggtgtctttcctcctactgacacccatcaagctcaagctcaacttgcacatctttttcaaacatctgatccgaactggtatccggattctggtgcctccaaccattgcacaccagatcctaacaacctgatgatgtctactgaatatgaaggcacagataggctttatgttggtgatggcacaggacttccaattgaaaacataggtcattctcttatctcatcttctcaaattaataaaccacttttacttaaaaatctcttacatgttcctgatattaccaagaaccttctaagtgtgtctaaatttactgaagataatgctgttttctttgaatttcacccgaaattctgttatgtcaaggatcaggtaaccaaggatgtcctcctgactgggaaccacaaacatggcctatatatttttgatccccagcagctgcaacttgtctcaccaaccagtcaacaatgtcctaaagcacctcacttgtctcctcacactgcctctgttcatgtcactactgcttcatctagtattcccagcaataatccctgtaacactagttttttagatgtctttgatttgtggcataaccggttaggccacccctctaagagaattgtcactactgtactcaatacttgtaacatctctcataataataaaatgcttgatttggtttgccaagcctgttgccttggaaaaatccataaactaccttttcctcaagcttctaacactgtctattctgcaccattacagttaatagtctctgatttatggggccctgcctttactaaatcccacaatggctacttttactacatgcattttatagacatctactctaggtttacatggatatacctgctgaaacacaagtctgaagccttaaaaacatttcaaatattcaaggctgaggcagaacttcaattaggcaccaaaatcaaaacactacaaacggattggggggtgagtacaggtcctttacatctaccttgcaacaagctggaattgttcatagaaatccttgcccaactacccatgaacaaaatggtctggttgaaagaaagcacagacacatagttgagcatggccttacccttcttgctcactcttccatgcctttaaaatactgggatgaagctttcaggacagctgtctatcttcacaataggcttcccacccctgttttgaacaacaaatctcccattgaagtcctccttcaactcaaacctgattacagctccttaagaatctttgggtgtacatgttttcccaatattaggccttacaataagcacaagttgcaatttaggtctactccttgtacctttctaggctatagccttaatcataaagggtataaatgcctagattctttaggtagactttacatctctagggatgttatctttgatgaaacaacattcccctttgctactactcaaccagctgtcactactcctattacagttcaggatttattttcttctgtccttatacccaaagtcacagcctcacagctcaccaatgtcaacactactccacctgttcatatttcctctgtacctacagatgtgtctccttatcctagtattcccaccagctttccacacattgctgttgtccctagtgtttcccaggttccacctactgttcctactgatattgctactagtgtttccactaattctgatttgcaggtgacagtaacagcgcctcatatgccatctgtccaacagcagccatcttcaacaacttcagtgttgaataatcacaaaatgcagactaggtccaagtctggcatttctaaaccaaaagtttatctcacaaccactattcctacatctctcaaacaagctttgcttgaagctgtctgggttgaggcaatggatacagaggttctagcattgaaaagaaatggtacctgcatacttgtccctctcccacctggaaggacagccataggttgcaagtgggtttataaaaagaaggagaatgatgatgggtctgtcaataagtacaaagctcggttggtagcaaagggctttcaccaacaaccaggttttgactacactgagaccttcagtccagttgtaaaacctgtcaccattcgtgttgttctcactttggctctatccaaaggttggatgatcaaacacttgatgtgaataatgctttcttgaatggtgatttgcaagaggaggtttacatggtccaaccaccaggctatgaggatccccaaaatccccatctgtttgcaaattaaacaaagctatatacgggttgaagcaggcacctagagcttggtttgccaaactccactctgctttactctccctgggattcatttcatccaaatccgatcatagcttgttcattcaacacacatccacctcagttatcatcatcttggtctatgttgatgacatcataatcactgacagtgattctaatctgatatctgagttggttcaggctctcaacactaagttttcacttaaggatcttggccccttatcatactttctgggcatcgaagtccttcacaaagatcacactctccatctttcacaaagcaaatacatcaaagaccttctgcatcgtgctcagatggatggagccaaaccattgcccacccctatgaccacaggattaaaactgtcagcatatgaagaagatccatttgaagaccctcagctctatcgatccattgtaggtgccctccaatacttggttattacacggccagaaatctccttcagcgttaataaagtttgtcaattcatggcacagcctcttttacctcactggaacgctgtcaaaaggatactttgataccttgctggaacaatagactatggtctgcaacttagcaaatccaactctctagatgttgtggcgttttgcgatgctgactgggccactgatgttgatgactgacgcagcacttcaggtttttccatttatcttggctcgaacttagtagcatggcagtgcaaaaagcaacaaactgtgtcacgctcaagcactgaaattgagtaccgcagtttagctcaagcagtttctgagattatatgcttcattctctgttcgctgaactgcatatcactttgccctgttcacctgttttatggtgcgataacctcagcactgtcttgcttactgccaaccctgtgttgcacgctcgaactaagcatatagagctggatctttattttgttcgtgagaagattttacaaggctcagtttgtgtcaaacatgttcctgcaattgaccaagttgctgatggtcttactaagcctgtctctagccctcgttttgtggaattcaggtccaaacttaacattgtgcctagctcacattgtcaagtttgagggggtgtattagggagcctttctgttagctgttagttgtaaccgttttcggttagtctggttcttccagctactggttttgttctgttctgttagtctatataatgctgtaacagtctctccctattgtaatgaattcttctctttggaatatcattcaacctttcttacagattctttcttctcctttaatctctttcctctgttgtttccttggttctttaattctctttattctttgtttcaatggctgaacgattcaacaacttcaacagcttgtactcttactgctacaacctcgacccctccaattgtctcccctagtcctcattaaccatggacgccacttgctagtggaggtctaa

SEQ ID NO: 218189 - DNA, 8718 bp, Cannabis indica
  modified_base (5723)..(5723): a, c, t, g, unknown or other
ttcaaatttgtgatttcattattcgttattagatcaaaattcgatggtttgatatttttaaaattaatatttatagttaaatttgtttagtaacctttcatgggtaatacccattaagaagtgttccttatatatatatatttttatctttgattagaataaagttataaaaggaaatctatttttagaaatgtacaaaatattttcattaaaacttgaaataacatttttttgttattttttttttctttcaaacgagctttctagggaaaatgattttgactttgataagctttttcttctcataacttacaagtcacacaccaatggttgaaatccttcttagaaatctttattcacaatgaattagaacattacaatcacaagctttggagaggcttgttctttcctattcccaattcgagaggcttagggctctccacaaaaatgagtctacactctagttttttcctcacctctcaaaatgatctctcacccttatatatccctactgtacataacagccacatcagtctaaatgacaaatatacactttgccgtcctttgatacctgaatttgacttggggcttatctgacttacttccttataatcacaaaaaatactttctaaaatttatctaaacactctccaaagtagcttttaagctctggaagcacttttgaagcgatgctaaacaggccctatgcctagctgtcctaattataatatctaattgattgttagaggctgtgttgtataagatttagttgggtagttagagtcgtgtattttcgggttggggctgctaagtttatccaatctagtgtgtatcacataacataaaggaacaaataattttccagaaaaaatgatgcactgttcctttctcaacacttttacttgtattatttcactcgttaatgcaatcaagttatatttcttataaaaatttgtcgatttaattccttagtatgtgagattaagacaaaatcttgtacttcagttttcttatatgaaagtgtagtaagtatgccttcattttgatgacatgcttcataatgcaaacaagcatctttttatttttatttactcacaaacaatgtaattatctcagtgtcataatggtagatgaggctcatgaaaggtctatttcgactgatattctgttgggtctcttgaaaaaggtactttatatgtatgtgtataatttcttgccatgtatatttcttgtatcattgatagtttaagtaacaaaaacagacaatataatcattttcaatgcttgtgtgattgtcataggccttggttatgtagtgtatatgttagttttgtttatatggtgctttagtttgctgtattttatgcttgcatttttggatgtaatcaaacaattttgatagttttttattttatcaacgcatctatttttcttaaaagaacacacatgcacacacaatatacaactatatctttgtcttacggctctttctattatgacacttgctaaatcctaaaattctagattcaacgaagacgacctgagttgcgtttggttatctcttctgccacaattgaagcaaagtccatgtcttcattctttaccaggtttgtaagaattatctgatcactgttaaatattatttcttccttttgatttttgttggaatattaccagttactacactttttttccccatcatgtgtagaattttcaagctattttgttttcatgatccacgtgaatacagtgtatcttaaatcctagtcctttttacgtctgtttaacctgtttatgggggatgatttgaggtctagaattgaatgctaacgtttgtgtacatagaagtatgtcttaaatcttttttgggcaatgcttagtatagatttacaagcatttgttaaagtaagatataattatttagttttcttctaaagcaaaaggcgtcggcaaatggaagatgagactgtcggactaaagatggagcctgcaatcctatcggtggaggtattgtttaagagaacatgacatctcttgtctcacgcaaaagttaaacaaccttattttatggagaaggttattaagtgatatgatatcagattgttatacagagactgagatgccaccacgtctgccttgcttttagggtaggggctttacagtacaaatccaatatgttgaggagcctgtttctaattacatccaagctgctgtttcaacaatattgttgattaatgatcaggtaccttaaattcaggttcttgagacactatagtgggtctacattttattaggagaccacaatcattttcgtggcaatttttcttcttgtgataggaattattcacaaaattcactgtttttgttgcttaggagccaatgggagatattctggtgtttcttactggtcaagatgatattgattctgctgtgcacttgcttcatgaagatattcaaaaccgtagtaaaaactcttcaggtaactagtcatgctgtagtcagtggattatagtggatagtgggatgagtattcttttgaagcatcaatttcaaaggttgctttcaatgttatagatttgtacattgtatatttaatttcagggttgctcattttgcctctatactctggtcttccacgagctgaacaggttagttatacattgtgtttttatctaactggattaaactgtatttctttttggaaagataattatggactttgcttttcttgcttttaggagcttgtgtttgctcctgctcctagagggaagaggaaagtagtgatatcaactaatattgctgagacatctttaaccttggaggtaagatatttccttaaggaatgttcattgaacataatgaattcttggttggagtgaaactgcttgttatcatctgccataagtgaggactctcaacatatttgggataaggtcactcgtgcatgtgacctttgtctctttgtcttttctttattttcctttataagaaaattattttaccgtttctgtgcagggaattgtctatgttattgatagtgggttctcaaagcagcggttctacaatcctgtatgtcccttcccttttatgtttaaagttgtaacttgtaacattttagagtatattagttatcaggtatgttggttatcgatattcctgcccttataaatctcttattatacatgtagttttgcttgaaagtactctttccctcttaatggatgttcattgtgttagtaatgagtattcaagtaaattatgatttgaagcaattggaaaatgaattttctgatatatttactttgtaagtacaacggatttatatatatatatatatatatatatatttataaaatacaatgtaaacacctagtatcctagagaaaataaaagagcattaaatgtatatttacatcttgcttgatttcttacactcccccttaagctagatgtatgctaaacattcttaatttggaaacggagttctctaaagttaggaagattgagagcttcggttaagatgtcagctgcttgtggtcttgagggaacatgtttcaaggtgatgatcttattttcaattttctcatcgatgaagtgacatcaatttcaacatgtttggtcctattatgatggattgctatggttgattgattatcatagagaaacatctattaggctttcaagtctgattatgagttcatcaagtaggcgtttcagccacattccttcacaaattccatgtgctatggcacgaaattacgcttctgcactgctgtgagttaccacttgttgcttgttgcaccaagagatttccccaaacgtagaagcagtaccggaagtggatctttggtcagtaagagaaccaacccaatctcatttatgtagattttaagatctttgttgagagttttattgaacattaacccttttctcggtgttcccttgaggtaccctaagaatcttatagacaacatccatgtgttactcaaagggattattgagaaattggccaacaacactcacaacgaagcttatgtcaggcttagtgtgagttaggtagattaactttcccacaagaccttgataccttcatcgatcaacttttgttctgtctgtttgcacatcaagttttgtattagggtccatcggagtttcaatcgccttgcatttgatcattccattttcctgttagaggtcaaggacatatttccgctgagtgactaagatgccttggatgaggatttctgctcatgtgatttgactgaatagtttggagcacgagcaacaaaagggtttgttggtgtttttgaaacaatggtgttgtcaggagaattagttatatgaatgagtgaactaaactcccaattctgcagttcttgactatgattctccacctgaactacaaatttgggatagtacgactgttcttaaaagaaagtgacatccatggagttgaacaccttttgtgtaacatgacagtagcatttgtaaccttttttgcaacacagccttttttattggatgactagccaaggatacatattgtggctgatgcattaagtttgctacgatgtgaggagtcaacatggacaaatgcatcacaactaaagacatgaaggggatcttgatacacgagatgtgagtgaggatatgcttctaggaagatttgcagcgaaattttgaattttgatacctgagatggcattttatttatgagataggtagctgtgagaactgcttcatctaaaaatctttttggaacatgagatgaaaaaagtaaagattgggctatttctagtaaatgacaatttttgcgttcggccacatcattttgctgtggtgtgccaacacaagaactttgatgaataatcccattggattgtagatatggtctaaggacagaattgaaaaagtcacgagcattgtcagtttttaatacttggatgtttgtttggaattgagttgggatcattttgtggaaatttttggaaaatatgacttgttttcaaatttttcttttatgaggtaatgtttcaacttaggtggctgtgatcataatagtcataaaaaccaatgtaacctcactgatatttttggattttggacggtccccaaatatccccgtgaatgagtgagaacgggtgagacggttgatgaggtcttggaatgaatgagtggcgagaagcttagagaattgacaaatatcactcctgaaagactgaggatttatattgacaaatagggatgggaataaatgtttaaggcacatgaaattagaatgacctaaatgattatgccataacatgattgtactaattttattagactgggttacagaggaaagagactgacactgagagagagagaacaatgatttcaatggtgagaaaaaaattttgttgtacccaaaaattggattttggtttggatcattagcaaaaataatcaaatgattctgttgatacattcgaatacgcaaaaaggaagagactcatagaatggcctgtggtattgttggaacatttgctaaaaattgtaaatagtgacctgtcccttgccatgtggtcagaagcacctgtatccacaatccaaagagagaggcttgaataacctgagtgttgctttgatgtgcaactgaagagatacaattgaaagtgatatagtcttccatggagagaaacatagtggcagatggaggctcggctagttgggggccggccggnagatcgagacggcgcgaaggtgcgacgacgaggatgcaacagtgaaggtgcaatggcagatttagggtttgaacgctggaggaggagaatttgagccgagatggacagatgtagtgtcttgtttgaacaagatggactgatctagggtttgaaagttggagatctgagctggaccggtgcacctaagaagatgatgataggacctggtcgcctgagaagatggtggttagaggcgtgcgattggttggagttggtgactttacctgaggtgcgactgatgtgcgcctggttggagacgtgcgagtggtcttcatgtgactaggacgtggcctgaggtttctagaatggtcgcaaagaagaatggtgctcgagtggtgcgcctgagaaaatgaagagatgtggctatgggtgtgcgttaaaaccctattaagaattttttttttgaagtttgatttcatgaagcaatgggaaaatgaattttttatatttatttgtattagattttcaatataatacaatgtaaacaccttgtgtcctagaaataatgaaagaggattaaatgtttatttacaactagcttgatttcctgcatgattcatgcaatatgaatattgagtgttccctttgttcctttctttgttgtttttccttttcaaataaattttattatttatgattgtggaccatcattgtatcattgactagaatccttgattaatagtctctagattacttggttcggattaacaaaaaatctctcttttcctcaattatttgtttgaactagattttacttttcctgttctcctgaagataagggctattttctgcttttcaacagataaccatccaatatttattttaacatgtattccatatcttttgttcattctttttgcttcagatatcagatattgaaaatctggttgtggcaccgatatctaaggcttctgctaggcaaagggctggtagggctggtagagttcgtcctggaaaatgttacaggtgtgtaacgaatgttcgctactgtttcactgaatgattttcctatggcaaactaatatcatataatgaaaagggatatgtgagaatatgcttaataagttaatatggctacctaattaaaaaatattccactatatgaaactacttctactatatgcttaataagctaatgagtatactatgagaaaaaatgcccatgttatacccctgcctaattctttcttctctcggtctctcttatcattctccataatggacccagcgaaaccaacacccaccttatttctgtcaaggagcacaatatccttggatcattgtaccaaacaaagaactgattaaccgttattaaactgcaccaaaatttataaactatgattcaatggggtatacaataatacaaggtttttagaacaaattaactgcaagtatcatgggtcaaatgggacggaaaacaatgcatgactagattcaaatgttttctgattgataattgacgtgtactgcaattggagcaaaatccaacatgtgtatagctattttaaaaatcacatgcacacccacatatattttaaaaaaaaaggggataataaacaataatattaaattatcctattcataaaataaaaagattggtcccttgggggacattctataaaagaaaacagattatatgccccagtgttgttctttgagtaaaaaatgcatggaccttgtggtcagagggacgctgcgagagaagagggcttgttgattgtggtgcccaacaagacatgagacgatgcaagacagtgtgtgcaattgagggagctacagactggtgtcgtcgcggggactgtcaaagataggcaagtagcagattggagggcatcgatcgggctcagtcgccggagatggacaaccatctgagtatgaggctgttagttggaggatagaggaaataaatctggctatagggctgagagaaagaaattaggagagtggtagggggagttatgagaggggtaatttgggtaaactttgaattactggaataccatccaactttaattatatgataggaagaaaagcgatgtaggccaaatgtggttaagcattttagtatgaggtgttgtttggttattgggttttaattgtaattagttgctgaggtggcaagtttattctctctatataaaaagaataaacatagtttcttgtgagaattaagacaagagtgttttcttggattgatttactccacttgaaagattagagcagggcattcaagcctctcgaaatgcttggttaaggttcaataatgcttttccttgtgggatttctctactcaatgtgtgtactagcttggtaaactctttctagtttaagaaaagtatatcaaattggtgcagtgaactgtggatacaaaagaaacttggagacaatgattcaaccctcgacgatgaagttacgatgttgaagatggaggtgctagtattacgaactccatcaaagacgtggtcaatgagcctattctcgaggtggggcgccagatgcaaatgatacaacaaaatctcaaacgtcttttgagggctcaagaacaagcaagaatggtccaagaacggtcgaaggccattcaaggatcgtccaagaatcgactgcaactgagtttccaacgtccagcgactaggagccatctgcaactaggattccaaggactttaatgggtgcaagaagcaacgactagagcaaggtactgaagctcctgaagtgccacaagcaagagaattatgaggaaatagtctttgaggatcgttcattggataaaggacatttaaggtctcatttcagacttgagttgtgattgatgaaactgaaaatgcccacttttcacagggacagtccaaatgggtggattaatgcaagttgaaacttcacttgtcataattatgatgaagaagagaagattcaagcagcgtttatttcattacctctatggtaccaatattattat

SEQ ID NO: 218190 - DNA, 3414 bp, Cannabis indica
aaatagaaaaaaaaaaacaagttaaaaactaagtctacatagtaggagacttggatggatcttcttggtctgcctccatcctcgccgagctcttcctttctggtgccctcgcaataagcaagcatagcttcagctccatgacccaaaaaattgaagtccatctcgggattagctagccagacctgaaagatagatctcctagcaacattgttgaccctattcttggtatcaactttggcctcctcaagtttcctatcagcctcagcctgctgggtcttggaggcatcctcaagctctttaattttcttcttttacttctcaatctcctccttggcgcgagagagctcagactctgaatcattccatttcttgtccatgacatctccatgttctctagtctgatggagttcaatctcgagcatctccactcgttagagccctcgatgttgagtagcaaaagacaaaagaaatgcctacgagaaatgaaaaagaagctataagaaagaagcataaagatgaaggagaggaagagaaataagggaaagaaaaaagactaacccgatgcataaactcataactgctttgtgccaagccttcaaagctaccttttgaaagtaggtcccagtcgttaggctcaaaagtttgataatgtctccatccatttgtagcatgtagcgagcagagttgtgaacctttcgtcccggcttcaagaggcaaggggcaggagggctcgagaaggaccatctttgggcgagaaccagaaaacttcacctggtgaacagatccagtgggttgttcactggcgttcaccacggcaagtgcaacttttgttggagattttgttggttcaataataatctggctcaagtatttttttcttgtttgcggttgtttttgtcctcttgggttgtttagtagaactcaaggcttcaattgcttgagaagctcattttttggattttttgtcaacaagaggaggactgttgatcatattctctaagtcaagatccatatctgcaagacaaaaagatacatcaaacacttgccataaaacaattaatgaaaaaaatggggaatacactcccacttagagaaagttaccataagaatcagaagatggcgaggaaaaactataatagttactaaattccctagatcttgtgatcataaatatatcataggggtttattggatctaaatcccaacctgaatctagatggctcgccctatctaggttggtttcgtattgttcagcgatcccatagtatgagctagtacaactaagttggacgaagaaccttggataccaactgtcaaatctatgggttatacggtctataaggaaagggttccaggtataaaaattatattgactatctgtgaaagttactagcgaagtacactctgccctaagcacagtaggagaccatccacactgattacctcgggaggctccttttttagcttcccgagggatcattccctggcgatagtgtgcacgagccacatagtcctgactctcttcatcaacaggaactgggaccttctcccacgaagagtactttgggaacttgtagtgacaagtgtactcgtctgagccaagaagaccaacaaacctcagatcagcttcattcagaagaaagtctgatgatcgtaatccgaatggaagacttagcaagattttgtggcgctcggctatctcaggtgtagggattggtattgtagagaccgttgtcaacacaataagcaaaataaatcagcaagctcaaagccatgaacatgaaaataactcaaaaccaagtttttgagacaaattttacttaggcatcatacaaaatgcagtggtgcttataggagaaaaaccagtcatccaaaaaaaattctccttgaacttggttttatttggcaagctcacaatgattctatgattgtttgtgtgggtgccaagataatagaagccccctgcacatcgcttcctcacagggattgctttaacagaatagaaataaactatttctagaggagtggggcactcccatcctaaaatataatacaaaacctttaaactcgcaaggattctgtaagaaattggaaccaactgaaaaggggcaatttcaagataattaatgaactctttgaagtaatctctcaaggggagaactgcttcagtcttaatgtgctcaaggctccaagcaccaatcccagacgagccactagtactagcaccactgcattcctcgcaaatgattctttctggggggaagcagctaaactcccctagagcaacagatctgatacgacagcctcgcctttgctctatgttgcaggactttaaaacaccgcccacatactctccaataattctgaccttggattcaatgagttcagcctcaaaggtaacactggggtcttatggagtctttgacttacgaggcttggtgggcatgatttcaaaatcaaggtcacctggtgaaaaagcaatagtgactttggataaaaacattggtcttgctaatggaatagaagataaagttggaggttcaagtcaggttgcatcgcgcaaataatgacgtttaccttcggttatctcttgtagaaaacgcctatagcgactagtagtttcatccttattggtttttattaaatggtccctaatttttgcaccattgatctcaagtttggattgaggtttttggattctaggtttaaatggaagagctaaatccttaaggcattctatttctaagaattctggagttgaaattttaaaacttgattgggacatttctataaatcctaatttctagaagaaatttgtttaaaccagaaacttacgattgcgataaacctaagttttccctctgattaaaaccctagaaattacccagaaaaataaattgaaatcactaaaaccaaacaaaatgaataaagatgcaattaattacataataaggatcataacttaggaaatagaaaagaccagaaagaaaggaataaatcacttactgtttataaatgagttcttacacgacgaagagctctgtgataggagttgaaatgaatggtgtgatgtattctaagactttctgagattgaagattaagtctgaagagattcgcaggaaataggtcaatgataaagagggcatgcgagattttgaggaatcagaaaaagggtttttcgcagaaaagctcgaaggttttttgaaaacaaaaatggtgaaataatggtttcttttcagttttataccttgagatcgatcaccgttagattaagaggatagagatctaacggacaagaacaaggaagaattggaaaagatggataattaatgctaatgatgtgcctcgaaattatgaaccgccaaaattcaaaagcatgcatttctacaaattgggttaagacaaatatacc

SEQ ID NO: 218191 - DNA, 5464 bp, Cannabis indica
gggaaacagttagcactggatctaattctgaaatggattcttaatcgatcaagcttgtgctattaaagaaagatttaatcgtcttaagcgtccatctatagaaaaactcaatctgatgccatcatttgacatcagtgtttgttatctggagttgaacttctttgcaagtccaaaatcctcaccagctttttgacatgtgatttttctctctttaatttcttgagtcttgatcaatatttgaaattagtatatgtttttgcaatgacgtgtgctttatttgtctgatgagtagaaaataggcatgtgactagattttggtagaattaggacattctagatattgtattaaataggttttgcatctagttacaactagatttctcattttctttgtcttggaaaaattttccttgtagcagaattgttggcaatatttttattcctctgcttgaaaccctcatggttcaagatgatgtttctatcttctttttatttgattctcattgttcccaatcaaatcgttcggagtgattactccatgagagttttgattccggaagtaagattcgtaaggggcctttccaagaagttaaaggaaaggattcttttagtccatgctatcttctttagtatgggtaattaactgcttggtattttctttctttttccttttcgagcttgtcatgtatgaagaagatcatcataaggaggtgacattcaatgaggaagacattgttgtggaagagttcgctgcacaaaaacctgtactgagttcttcaccgtgggagatggatcaataccagaacaagttccagaattatgataacctccgaaaatatgagaccaaaaggggtctccaaagtgttctaagattattctggaatagactccctgttcatggagagatgcctagtaagtgtgtcgaaggagatttcaacatttggagttggggtcatgtagagatggaagcgcatcttccattatgaagctactttgcaaaattctgcactgtggttgaagtggcaccatttcaattcatcccacaattttatcatttgattgttgtgtggtatatcttgtggaagcaaggtgggcattccaacctcgaaggagatcttgtacttctacaagatcaagccctaaaatatgcagaaccataaatagaagaccaacttttataggttggataggtattccaagtccctggtttgtccagttagtactatgaagcattcttacgacatccgggactactggttctacacttttgacttcccattaaagttctaactctcactcttgactttgacatagcaagtaagcatagctatttactcagctctttcttgtttttttttcctatttttattattccaagaacttatccaagttagttttgttacactcttttagattcccttcctcgatcactttagactctattttttggagacaaagtatatcttctatcagagccttactgacaaagatttacaggtacgagatcttgtgactactgctaatctcaaagatgctggtctgctggctccctatcagagcattgatgcccttacagtgaaggacgccattagagatctccattacagtgatcctcctggggtgaaagaagtaattgcccaagttacagcttaggaggtgttaaatgttgttaaagttgaccaagagtggttaactgagtggagtcaaaagtttttggagcctttgaatgaggaggaagaaattcacattcgatttaaggatgctatcgagaatgagggtactccaggagtgagtacatcttgaagtggtaagacaccattcacttagtttgaattccatatatccttggaaaatttagatcatgttgaccaagatagattgacccttattttttagacttagatcatcatagatattcggtaattagatacatagatagggtggacaaagttgttaggagcctgaatcattttgttcttccagtacaaactgataggatagactccttccctaagatgaagtatgtagggttcttccagtatgggagctttttagacagggaagacatcttccaatttgatagagggaacccccagtatactagaattaatggtttggaccatatttgtgtattattttccatattgtttatcgtttactgcttctgtgatattaaaacttacatgttttgttttgtgtaaaatccacacacttttcagatgggtctaattgacaaatttttgggaaccatcaccaaaaagtccaatgacataagagaggcttccaaaggtggcaaaggaaagggtaggcagtgcagccttcaactgctagactaaaaacagcaactccagccaagggacacgaggctcttttttaggccttggcttcaaaaattattgctctttcccaagttcctctggctatggtggacatttcttcacagggagaagtagctggagctgctctaacagtggcacatctttagctaagataattattagtacataaaagatgagtttttagatgatattagaatgaacaagaagttagatagaaactgaacaccacataacacacacacacacacactctctctctcttgcttgactttatgaaaactaaggaacccaaagaatttctgactaaattcttcagtccttagcaaggattttagctagaagttgaggtgaaattgttagctaagatcaaggtatgttcttagcctctttcttctttgaattttgagggaaaaaacatggttttatatggaaattttggagttattttctatagtttatgttgggttttagaattgttttttgactaccttacattgtaaatattgttgagttgggggagtagtagcagctgtagtaggttttgagttttagaactcaagctttgctcttcaatgaaactttttgatttggtatttaattatggtatttgagttgtggaacatgtttagtatgttatattttggtgttctagaaagtttggtagtatttggtaaagtttggagcaagtttttgaggcttagattttgaggtcttactgcccaagaatcagtcatctgggttgtacaggactataccaaccgaaagtccggttggattgtatcgagaaaggccaatttttgtactttggccataacttttcacttgagtgtccgttttgaatgttctatataccgttttaaagtttgtgaaaagctctatagtatggtatataaattaaagctaaagtatctatattattttagggtattttcaccacgtagtttggtagaaaatcctagattttatatatgtgcattaagaagtgttttagagtaagaacttattagttttacgttaatatgacttagggcctccaatcgtcgagtattttttccactcatgttgatcaaaacactaattatggaattaaggtaagaatagtataacaaatgtacatgtttagcgtacatgtattatgtttgccaattagataatatattaaaaagagcggtattggtatacgtagaggtgcaactggatattaatggtatatatgtttgacaattttaaagaagtataaattaatgctaccaacactagtacgcctagagtactgagtgcattttggtattatggttaattgtatttatagtatggattgatgttatcacattagtgactagagtactgagtataggcttatattatggtcaattactctatagttaagaacgttcgagactcagttatatgcactggacgcggatagtagactcatggtaattaagtgtatgtgcacctaattacaaatcagatatatgtttatattttatatttttcttactgagtcggtcgactcacatgtttcatgtgtaggtaaaggcaaagctaaagctgaatgacagtgagtggcgagcttagtgaggattgtacatatccagaaaattgaacctgtagggtaatgattttcaggacatcatatgcttagttttgtttgtcgctaggtgacacttttgttattcaatattttgtgttttgtttttgaaagataaattacgggatctggactcctaaacattttgtaattatgaaatatgtttggtaaagttttatttaatgcaaaaaaatttattaaacgcaactttatactaaatcttttgattagcaaatgttagcacagtaattaagaaaatatcatagtgtgcctaaactagtagggcattacaatttggtattagagccaccagcttgttcttagacaagctcaactcacgattcagtaagcctttatacgttttagtagattaaattagataagtatgatcagaaaaatgtgataaaaaacgtgattaatagtatgatatatgaataagtgtatgtttaagattttcatgatatacgatataaattgtgattaggaccattacttaatttacctgatttatggatcgtggaatctacgttatgaaataagatttgggaatctcgataagaatcattgtatagaagtaaaggctagaagtggtcataaggagtagaattcccctcaagttacagctgtaattgaggtcatagtaaaagcgttatgggtggaaatatagatccaccatatgcttcaataaattgggaacatagggttgcaaaaatatgaatcaaaccccaaggataaatggagaggtacatcaaattagatggcagattccattagttttggtaattctcatagttttatcaaaagtggatatcatgaaggattaaattagtaattacattatgggtggaatttctagtactatgagaatcaccggaagtgattgggggaccagtattatcttccaatagtaggaaaacatactttatcagtgggagagggtatcccaatcaaagatgtagcagtaacaacatggaaagagtttgtttagtccaatcaagagaagtcaatgtcaatgacaaagaataccactaagtctgatagatttttcaagttagcctcgagaattgtgccaacagactttggtaagagagaaaaggaattggtggaatttaatgccaagatcagatatgacttgatgatcacagcggatgatgccatcacttatgttcaagtggtggagaaggatttttgagccgaatgtgtggtggagttcatataggagtctagagtgacttagaatgttagggaagttattgttccccataattttagttttgttagggataatgtgattcatcatttggttagaaaaggaaagctcgaatggcatctggtggctcaaaacaaaataagaggttcttagggtaccagaatcgagatagtcgtcagggtggtcttgaagatcaatatacttacccagaatgcctagttgcagaaggcatcatttaagtgagtgtaaaggtagggtttgtgataactctatgttatagagttaatttttatgcttttaaactaaagtattgtgaggaga

SEQ ID NO: 218192 - DNA, 6180 bp, Cannabis indica
ttaggcagccttttggaatcattttttattgatcccgaggcttccaaatcaagttttccaacagtatcatgccccaattttctcctagatttcgtgatgtgatgtactctagacttattctccaacccactcattcgcaagtggggtgaatccttttgtcttgaatcgagttgttgacggaggtcaggcttttttaggttcaaatacttccgtagatcattcttgtcatgattgtggctaaaccctgcccttcctccagtttcctcaggctgcatcccctgagagctctgagcatacccctgggtcatctcctgccacttgacttgtgagccaagaggtttgcctcgtaaatctcttttctcaaggtcaggttgtttttggatacaatctcccagcgttgcctttacggcagctatttcacgctccaactcggcattacaccggtttgcttcctccaaccgacgcctaagatggcgattttctaattccacaatcggtatgtatatggttgggtcgtaagcgccatcctcatcaacctgattaaggagtgaccgattgttgctcttccaaggtccgtcgagccaagggccccaatactgggtctttctagggcttgcattctattcaggcgatgattcagtagatctgaggacttaatggttcttttctaggatgatgattgattccttcctaaggactattaccggtggtgtcgtccattacttttatgtcaggaggctttttttaagatttttcacagaggctctccatgaaagcaccaaactgttagcgcagatttttgttaaccaaatttgagcctcaatatgattcaacacagaaaaaatatagaaaaagaaggaacaccagatttttacgtggttttgcagttaaaattctacatagtccacgagtcaatcttattgagatttcggagtttttttttcttaggggccttttgtatatgagcctccctcttttgatcttatctgccactatttataattgcatagtgacagttaattacagagctgacaaaaattcatttacggccagtatccctaaaattgtgggatttgattacaaatcaagccaaataaatgaggtttttacacaattttgagtatcctgcctttaacggaccgagatgaatgcataattaatgatataagataagtcgtatctcatagggatgtctcgccaagggggtgccaagatcactttgataacgagcagctggttgtcattttggcttctcgagactaatattgtcttaactctgatggttacaccttctggggtcgagaatattttcctcaattgcaaaacatcttttagcaagataaacgcctcattgtttgttatcttgactcgtcatactatctatactcagtttttatatcgaacgctaagtatttttagtgttgtcggtttttctttcacgcagtgaggctgaggcctcatcatgaacatgtgcatccacatggtttctcgtcaatatataagttagcagttcgcacgtttctgtctcgcaaaaggctattcagccagccgagttataaacagaccctgcaagttgcatttccaacgagttgttccatgctaggcacacttgtcatttgcgtgtttgagttcttcctagctcgacacgtgtccccttcttatgttctcaccgaacttcgggtatagcaacagcttttagaaccactatggatagatgtttcttgaaagatattcctttttatggtgatgcttttacatgggctaagaataggaaaaatccatcagctttaaaagaaaggttggactgctgccttattaacaaaatttggtctgaaagtgtagtaatacctacacttactcatctagactattttggatctgaccaccatgcatctttggtaaatctttgcttctcaattccctctgaacttgttcaacatcgcagatcccgatttcgctttgaaaagatgtggttatgcgatttctgatataattttcagtaattggatgcaacaacaaacaggggacattatcaccactttacaatcaaacctgcagaatgttgcagatcatttacaaacttggcatacccaaaagtttgggaaaatgaaagttgatatttccaaggctcaaacacgtgttaatcaactcaattcatcatctacttcggatatgtctcaagctcaacatatacaatttgtagaatccatacttgatgatctcttagctagagaagaacaatattggcagcagaggtctcaccttgattggcttcattcgggcgatcacaataccaagttttttcatgctaaagctagtgccagaaattctaccaacaaaattacatctttattggatgctaatggtcatcttgttactgacagagaaggcatttcaaacattatttccagatatttttagaatcttttcactgaaaaagatgaggatcattgggccctttctcatgtgctatcgaccattcctactacaatcaacaatgttcacaacgagtctcttttgcgtgattttactaatgatgaagtgcttttttctctgaaatctatggcttcagattaaagttcggaattagatggtatgtctgctatgttttaccatcatcattggcatattgtagggaatcttgtatctaaggttgttttacatatcctcaatgatggtggaaatcctacatcattcaataaaacccttctcacattgattccaaaggtcaaaaaactgaaatccatgaaggactttcaccctattagtcgttgcaactttgtatacaaagctgtctcaaagatgattgttatcaaactcaaagatgttcttcctcatgtcatacccgaaatgcaaagtgcttttcttccaaattgattgattattgataatgtgttagtagcttttgaaatgattcactccctcaaacatcgtgagaaaggtgctaaaggctatgtagccatcaaattggacatgagtaaggcatttgatcgtgctgaatggtcttttctgacagcagtcatgggtaaaatgggttttaatattcgatggatttcacttattatgagatgcttacacacaaccacgttctcctttaatgttaatggtacagtcactggatccatcactcctctacgtggtttacgacaaggagatttgctttctccatatttatttctcatttgctcagaaggactatcacacttattacaatatgaagaaaatattggctgcctcaaaagttttgttgtctcccgtagagctcctctaatttcccactaattttttgcgaatgacaatctcttgttttgtcaagctgatgaccgatcctgtggggctattaaacatgctttagatatttatcatcgtgcctcaggtcaagaactaaacttggacaaatcggttatgtctttttcacctaatacaccggccagtgttcaacgctcattccaaaatatcctcgcgatgcccattagtgaatgccatgaaaaatatttacgcgtgcctgcttactctgaaagggataaaaaacaactctttagcaacatcaaagaacgcatctggaaactaatgcactcctggaatgatagacgtttttttaattggtgggaaagaagttttattaaaagctgttgtccaatcaatctctacttatttcatgagttgctttaagctgccctctactttcagtcaccaacttgaacaaatgatggcccaattttggtggagttctgacaaggacagaaagaagactcattggaggaaatggaaactcctttgcaaaactaaaatggaaggtggcatgggatttcgatctttcatccattttaatcaagccttactcgttaaacaagcttggaagattattcaatttcccacttcacttctcagtcgagttttaaaaggaaggtatttttccagcaatgattttttgcaagctcaaaagagtggctgttcttctttaacctggcaaggaatatgttgaggtcgtgatctattgggaaaaggattaaggttaaagattggtgatggttctagtatcaaatgtggctaagctccctggattccaaggcattcggtgtttactcccttgagatatactagtgatagtcaaaatcttgtctctcattacatcactgacacaaaagaatggaaccttcctctactaaaacaagatttctcccctgttgatattgattacatactcacgattcctctatctctttcgaatgtcatagatagatggatatggcactttagtaatacgagtgagtattcagtacaatcgggacatcaccttgtaaattctattgaagaggttgatcttacttctacctctactagttagaaaagatggtggaaatatttttagaatctgaaacttccctcaaaagtaaaaatattttcctggaaggtgttccacaatgccataccaactgctgcctctttgttctcttaaaaaattatagactcagcagcttgtagcctctgttcgaatgcttgggagtcagtggaccacgccatgtttatctgtaaacatgccaaaacagtctggaaaacagcatgcatttcacttgattatggtgcatgctctcgaatgaacattggtgattatctagtacttttgtccacgactaaaacaaaatcagaattggaacaaattctttgtacaatgtggtttctatggaatgactgaaacaatttcatacatggaaaaccgactctccattcatcacaaatttgggtaaaatctgctgcctatttctgcaacttccaacaacatacaactactcagcatgcgtctctcccgacttccacaggtgcggctgaaggttcaaaatggcatcctcctcctttgaacgaattcaaaatgaatgtggatgcagcatgtgatgtctctcaaaacaaagttggactgggagttatcatttggaattctacgggtcaagttgttgcagctttctctaagactctaataggtagatatagaccacaagaaatggaagcaaaagctttactcactggactagattgggcttctcatcataacttccttattatttctatttaatcggattctcttattttagtcaattccatgatagatattcgaaatcatttatcatatctctcctttgtttgtgtatctcatgttaggtcgcgagatactaaccaagctgctcatggcttggctaattatgctttggtgtcggataataattgtatgtggtttgaggaaattccttctaccattttctctgttgttgtaaatgactccttttgatttataataacagattttttttttcaaaaaaaaaaataattatttaagatttattaaaaaaatgttgaatttttttcattttaattttgagagatacgatttaatagggataaaattactaatttataaagacaagtcaacctttagtggagttgatgtggcactttacatatcattttttttttcaatctctcttctctcaattttctagatttattcctatttttaaagatttaattatatatttagtctattattattatcaatggaactttttttttaaattaataatcattcattaataatggtgatttttattttttattaactcccactattattattattattattaataactaatctcatacctattatatatacctatatatatgcttttataaaaatagagagattctattgttatgtaatatttgataatatattcattcatctagctttgggtataggaggtaagcattatatttttatattatttttctttaaatttttgtataaataaccatcattgataatttgatatgatatctatatatctttataattcttttgttgggaaggatgatgtggcatcttttatgaacttccttaatttctttgaactctcattttttttacctttttgttaattttttcatcattttttgtaatttattatttaatgactattcattttcataactcttattttaataatattttatttttacaatgtgacaattaaataataaaattaatgtatctcatttcattctaattccaacttttcatttccataactctcattttataatatttaatttttataatgtataataattgaaaaaaattaatgacttctttcttaatgtcttcattctactttttatcttctt

SEQ ID NO: 218193 - DNA, 4469 bp, Cannabis indica
agtattagtttttgttttttttttttttttctttttctttttctaatagttaaaatgttatacttacaaggatatgattctaacaggatcttgaccattaaagctgcaattaagaccttcccaggtgtatgattttggagagcatggatccccttgccaatttttttgtactccatacatagacttgatattaagcatagcaccaactatcaatacacattataaaggtttaattaagttagtttactattcatttaaatacaaatatatgtactacataatggataagacattctctttaattaattagttatttttggaaaaattggtataaaattatagtgtgaataataataaaagcctcatgatcaattaattaatgattaataatctcaattaaatcatatatatattttttaatttttcaaatacttatgttattaatttattataaatattttaagcaaagatcaatattatatattaaggctaattagaacttttacttcctaaatttaaatatgtatcaaatcatgttttctgaatttttaaggccattaaaaatccatcttgaactattaaaattgttggacttaagaattttttttttttaattaaggaaattgtctaacatggatgaaagttaaagagcttgatttgaaacatgtcaaagtttgaagatcatgatttagtagatatcaaagtttaaggaacatgatttagtatatagacaataacagagttagtaaaattgaatgaaactagacaaatatccttaaattcaacaattcaataattcaggaaaatttttaacgactaaaaaattaattcaacattataaatgtcccaaagttcagggagcgaaaatcttaattaattaaccttgtattaactacattttgcacaaataatacatctccaaaatttattacattaatatagtttattgacaattgtcacattaatattattacattttagacagagaacacgactaacataaaataaattaatctttgaagaggacaatttatattaacctgaagaaagtctaaatatccaaccaatctgtgcatagatggtctaatggaacaattttttttattatatatattatagcaactaggtactattcaaacatttcaaactctctgtctccccattctcattaagcacttctagtccatttatccaattccaattttaatattattaacgacaacaaattatttgtaatcatatatataagtcatgtatttggttataacttgtatattaatattgcacaaaagttattatttgtaatatttaatagtaaaatttgcatgagaatatataacaaaaaaaattatttgaaaacctaatatattcttgccatagatataatatttttttactataaataaaagttttgcagttgcatgcacatatctatatatacgtaccatcttgttcgtgggtttgtggttgtgagaaattctgaacaatataaacctcaaaagcattgagagtgggttggtgtgtagacgcagtggttttaaagagggtgtagtcaatttgatcgccacttataggtgcaagtgcaacattgaataaagtggtagtacgcaagtactgaggactaaaaggttgattatcaacattccataactctagattttcatagatgaagaattctcttgactcatttggtttgagcttttccaactcagcaaagtgcatgtatacatagtattcagctgtagggtcatctggcttcatgtggaaggcaaacataggattactcacctttgctggggacatagcagtgctcataacactagatggaggttggtaaatgttagaactcgaatcaattgtcaatggtgtacttaacactttgcgttctggaaaattgaacggctgccatatacgatcataaacatcatctttgtaccttaattttacacaaaattatcactttataaattagtcttccacgtttgaaatttttatgtacgtactaattaacttaaaaaaaaatataatatatctgtatataaccgaatgactagagtaatacaccctactaaaaagtaatattggcgtagaatagttataatttaatttatatgataatatattataaatagttacaaattaggttacaagtttttttttttttgaaaaaaaatatccaatgtacttcaaacacattaacacgttcttgtttttaaggaacaaaatgatttagaatattaaaaatattatttccaaatgctctaaatatctacaacttgcatactattatgaaaatattatagacaaaatcaagtgacaaatccgtcttagatttaattaaagaagctatataatcgttccttatatacaaatatgagaaatttatataagtatttaaaaattttatatatttttaatttttaataaataatatgttgttttcacgttgtcatgatataacatgttgtgacaatataaaagtaacctttaaataatatttatttttagaataaccaaaaatcatttgtgcgtatgttaaaaaaaaactatagagatcaaaagggtaaacttctattatttttaggagtattgtgttcagcattttttataagtaacgccttacaattggttagcgatattgtttaaaaactattttcataacttatataggaccggatacttaattataccaacataaaaaaaaaatgctaagtgataccttgattttcttatgaaataattactataaattttactttcaaggtgaaagttaaaaactataatgttgctggcacaatgatgagcgcggtgaatagtttcgttcgttcacattgaattactatgtccgatgacaaattttaaatggtttagtaatataaagtaaaatatatacaccaataattatataatagttaccttactgatacattacttgtggaccctacatccaatcgtcgatatagaacagcagcggtagcagaagtataagtagagttcttcaaaggcctaagctccaaagctgagataaaaggtgtgccatggcctgtatttactacacacacaaatatataatccgaacttggaatgtgtatgatctccttcgtcaatgatatgtttgcattatcaaattttacagaactccatttgttagctccaaggtagagatcgaagactggcagtgtcattcttccatcataatttccgtacaagaaccttgcccttatcaaatatttgttcccttttccatctctaggccttagagtgtagcaatttttgtctccttgaggaaaacttcttaaagttgaaaattgttggtcaagagtattgaaatggtattcaagtgatatagtatgtctttcacctatgttgttttcgatgaaacctgattctgaaacgtaatttaattcggttgttttgtcggtgtaagtcatattttctgtgattccacaatctatactgataaagcctgtgaaataataataaatcataacatataaaaattcattcaaatgagaagttgaaaaagaatgatgtggggtggtagctagatttgtattattcttcgatgtttatgtattgcatgatagatacataaataaattaatgttggttagttagtaggtgattttgaagcattatatgttaaaatatctaacttttgtgtacctgattgagcgcgaactgttttgaaggctagcataccactaacatatgcaataaagaggaaacgtaatatcgtcatccttttccttcttgtttcatctaagaaagaaaaaaagaattaggaaaaagaggaagactagaatgagctataatatagtatcgtacatctattatatataatcatagtaattatctttgcatgtatgaatattgtataagaggatgaaacagccttgacatatcaaataattacatatatatatatataaacacagattcgatgttttgtgtcatatgtaaatgtaatactttaatgtatggcctgtaaatatttgctccgggctactgattaaagctgttgactttcattgttttatacttattgaaatcataaatcatctgtctacttgggctttaattagtcattactagttttatcatagttaagtgaaaataataaaaaaaattgagaattattaaaaagtattactgatctctaatattttatttggcgttatattattattggtgtaattaagtattaattcccaaataatttaagaaactaatttttaaataatatctctaaatatcacctataaaaaggtgttaggcaccactagagtgcaatagtaatgctgtaaaaaattatacatgtcccccacataatatttagaaaattgttaaaaagcattactgtgcctaacactttatttggagttaatattattattgatgtaataattaagtattatgtctaatataatttaagaaaataattttagaaaatatcgctaatcaatcgt

SEQ ID NO: 218194 - DNA, 9632 bp, Cannabis indica
aaaatatttttttcataaatattaaataatttaatattaaaaagtaaccgatccaatccgcggttttgtggattggatttgagttattgtgcggattggattggatctaaaaaatgaaatccgcacttagtgcgaatcggatgcactatgagcaaaataatgcggattggattggatgaacacccctaggtattgtagaattttcctaatgtattaacataaataaacattagacataaaatgcctaaatattttcacatacttcatattagtgtgttttgtccacactctacaatagtcgtaatttaggaaaacaaatcctatatattctttcaaaattacacgtacaatttgcacccaattccacttataagtagaattaaagattaagatttttatgcaaaaaaaagaccactctatctccaagtttgctttggtcgatgttcaatagcagatttataaagaagaaaacaggggaaccaaatagaatggattataagagcacttgaaaaaaagaaaagatacacagggcaaccaactccttcacataaatttaaaaacggtaaaaaaaaaacaagactgcaaaactgaagtttaaatacttcaatataacaaattccatagacgagcctatgtgccatactaaaaatctggcccccgacaatgacgaattcaaatgagtaattcatcccggaaaaaagagcaataaaaataatttctttaacaaaaaaatcctgatcacacgcagggtagggtagagagcagcagctgtactatgtttacccaaatttgaagccaccagggggtagggtgggttggcttgctccaaaaggaaaaccttgttgagtaccgtctccattatcctgcccgttctgctcctcatcttcttcttctgcccaatatctctccaagatcttcacagccttctcgtaaatctcgtggttgtcgtggttctgaagattctcgattttatccaatccttcacattcatcaattgcctgcccataaatattgactccaccgttcagtcccatttctttgtctgcctcgcccaccttcagaatgttctccagaccctcgaggcatactgttacaatccttgcgtctggacagcttaggagatcacagagtgggccaatgcaaccttgggtgaccagaaatctgcaggtgaatgtccatgttagtgaaatgtcatgcctaatgcattacagctacataagctacgtatcagatgtatctttcgaaaaggggttgatgactgttgcgtaatgaaatgatcaacatcaatcgactaaaacagaaatctcagtttcaggtctatactggatttgttcatgagagccaccagaagtggcattggagatggcccatgcagcctcctttttaatatcaaactctgcattttggagaagatgtacaagtggtagaatgatattggcctcaattacagcctgcaaaacagaatttaaaagtaaaaaaagttataagccaatcatccactggtatcctcccggatctaattagaccaaaacaaatcaccatgattccaacttggactctctcaaggtgtaaaaacccgtgtgtagtaatagagaaaataaaacataaatctaagaaagataagaccgcaaataaaagaatttaaagggaaggggttactcagaaaaatcatcaaataagggattagttagtggtttacaatcacttaggcaccctcctctcataggctagttaagtctttttgagtgggttctacctaagtggtcttaactaatggtatcatagtcagaaccctcaaataggacaaacactgagggagagggttgatctgtggacaggatgtattgataggattccacatcgaataagtagggcattggttggtgatttataactacttgagcatcctcctcaatactcatataggctagtctttggaagtaagttcaactaagtggttataatggaaaccagttgatttaagtttggaaattatctctcatcattcttatacaaatacataagtttgacaaaataaatatacgtaaaacatcaagatagtacttaaatgatacctgtattttgtgctttaatgccagcagtaaatatttgagatcgtccaacaagcttccttctttatactcttttttatggttttgtgtaaggagttgaaagaggcaagggagcacttgattgtcaattacaaactgaaaaaaatgcaaatcaggttatgatattggtatgtttaagcagggaagcagaaagcattccttttacaatcaccaaaagaagcaagatgccaaggccctagaaatataatgtttactttacacaatctaaagattataacaaggtaatcaattcagcggtaaaaggtaataatttactgcattaacttgacccaaatgagcacagaaagttaccatttccataataatttgcaataagtaaacttttgtgaaactccttttcttttctgatacaataaataactcttccccctcccacactcacatacccaaacacttgagctaagccccaagaggagtaaacttttgcaaaactttaatataagtttataaataaagatataaaagcatataagccgacacatcatctaggaaacaaattgactaaaagtgtacaagttcattaaacaaaaaataaaacaattacccagcagagcagactactgaaagaaactggacagtgcatggcttatgtatggttaatacctgagtctgagaatcatcaccagtgacaatattacccacagtccgaagagcaggtacaagaactgtaggtgacggatgccttaagaataaattattaaaaaaaaagttagatagagaaagcgagaaacctaaccagtaacaagtactaaaactaccacaaatgaagacaacaggcatttacagagaaattacatacaataatatatgttctcacaattactatattttgtacaccccactttgtcaaaaaaagaaacaaatggttaacaagtttacaagtaaaaagagcttacatcagaagttccacaagccgtggacagacacctgattcaattacagcctgtattttatcattgggaccatctgagagataagaaagagcccagcaggcatccgtcaagacttcttcatcattcaggaaaataagttgccgaagaactggtaatgcaggcttaacctgagaggtaccaagataagttttatcgataatagttacattaacatgacaagatattgctgcacagtgcacagatatgatcctaccaaacatctccaaatggtattaaaaaaaagttaaaaatagatgagaaatgcaaccacctgttcaaatggtgtaggaggcttgccacgacagaagttagataaagtccatgtggcattccttagcatggatagctttgagtgctcatttaattgagctaacaaaggaactagggccccatgactaagaacaagatctctacaacttggtgagtcaccagcaacattacctaaagcccatacagcctgttcaacacgagaatttgattataggagaacagaaacattaagcaacaagaaaattttagattataacaaacaataattatcatttgaaaatttaaaaataaattagccagaaaacctgaaaatgtattgaatgtttcacaaaataaaataaaaaagcaactaagtttgaccatatctgaaaaaacattatttatatccacttaaaatgactgaaaaatatttgttgcaattcgcaataggtaagtaatgtgaatagaaaggtacctgctctctgacatcgtcactgccagaactaagaagttgcacaaacatggggacaacactatgatcaataacaacccgtgtatgctctgatgttccaaatgcgacattggtcaaagcccatgcagtctcaaactggaattataatagtgttatgtcatgcatccatctatctccttttattattaatctgacggaacaaggaatattaaaactaaacaaaaacaaataggcgctcctacttgcaactgaggcacttcattccttccaagaaactcaacaaaccgaggcaccacgcctgctttaataacttcatcaattggagggcaacgctctgcataaaatacaaaccaaagtaagaactaaatggatatgctcttgatggttcaagcatagagattatgaccagaacccctaccaattgataatagctttctaaactgagtagttgcctctaattgtacagcagaatcatcagaccatactccttgaaccatcccaggaatactttccaactgctcagaaaacacacattaaaaacattgaatataatgatccaataaaaaactaaagattcaactttctgaaagaaaacttcccataaatggatgttattagccaattgtttgccaaaccatttatttctcaatcaaacaaaacacgaatgattaacatatagatggaataaaccttggcaatggtcgacacaccatatctccaaattattactcatacctatcatctcaaagcctaatttcaaagagaaatttcaacttctcagcttgacactaacttgagcaagacatttagcctctccaaaaaccaaacatgttattttacaataacgaaatcatgaattaaaaaaaaaacccttccctaacaacaaaaagctaaacccatatactaacgcagaaagagacaaccccacaacaacggtgtccccatttcaatgttatattggaaattgaattcaagcttcatatatcaataaaggaaatcagaaacccttccctaacattcatactgaatattttgctttaacacaaacaacaatctaaggttcgtactttcatttcggatttcaaccacaaaaccaaataaaaagacctaaatcgaacaaaataaaaaaaggtacgaaacagaaactgaaatcaatcaacatcaagaatcgaaaaacaatcaaaaaccattaatcaaaacgcaaatctgaatcgaaattctgcaaaatggggaacgaccgaacgtaccctcttctccaaaacggctgcattttgtggaccatcggaaacctgagactgagaaacaaggccgaggccaagtccatccctcctcttcttcaagagattatcttcacgcttgttcttcctgatctcaaccaaattatcctctctcctcctcctggcctcgtcggcatcaacaccggtcttgtaggacttcttacgcgcctcggttcgggaactgggtcgcagagacattgttggttggtttagtgaaggagttgcttggaatttgcagaccaactgttcgaggaaattcgaaggcggagattggattggattggattggaagaagcaagaaagaaagaaagaaagaaacagtgagaaatgaataaaggagggatcgttaatccaagtgggagtgccaaagatatattattctaattgtaaaaacctcattcataaaatatatttatttatttaaggcataaataattaaacttaagggtttttttatttttatattttaaaataattttttttaatataattttaaagaattctaaacagaaatttttatagcaattaattgagcaatttaaattgtaaccaaaatatttataacggctcatataaaaattactcgagcaatcctaaattaatctccctaaatttaattatcgttcaaatttatatttgtatagtaataatataatttatgtataattatttttggtgtattaaattattttaaaattttcaaatatttacaaggttaagtaattatgatgttcatgtaaaaatattgattaaaactatatgaaatgtcaataacataaaaatggtgcatgaatacattcttttttagggtgcagtagaattttccaaaatttaataccttcagaaataataaacaatgaattaacttttatatagaaattgtaggtttttatttttatttcaaaatcttataataatatttattttattatttttattttgtattaaatatatataacttaaaattataatcattttaaaaaagatacagtgatgcactatttatttgtttcggcatttagaaaaaaatttagtttattttttttatattcgtgtacattatagttatttaagatattctacaaaatttttagaaatttgaaataatttacaatacattattcaaagagtctaaaatagtcaccagtgtttgaaacttatttttcgacgtggttaattttttcaagtttcttaaaatttttcaagatatcttaaataattataacatatatgactgaaaaaaaaaatgactacaaaattatttcagatactaacctagaggtacatcagtctacccattttgaaagggatcattgtaaactatactctaaaatttagaatgcatttattattatttggattagactttaaaagaatgaaccaaatttgaattaaagtaggtatcaaccattttattttatttcattgtcaaatttcttaaaaatacttttttttttgggacaaagtattaaatcaattcaaaaacatgaaattgttttataaaattttgttttcttgggaagtaaacgttgcgcttatgaaggttggaaaataagtccaacgacttcaatttttcttactccttccttttcttaccaatcaagcaaaaccagctactcatctactagtttacatcatcaacacacaaaaattctcaattaatatttaataataacaacaattatagttcaaaatttaattgactctgtaatttcaaatagtaaattaatttcaaatagtaatttcaaattactattaaagtcaagctattactctaattataatcaatttttattttttaacgaaaaataaaatattattaaccaataaactctgtcaccaaaacaaaatagtaaattaattgagacatccttcaaactaaaaaaaatcaagaaataacatagatgctcttgcgaaattatgagttaccatattaactgactgtttaacaaaaaaaacataaatattttgtaattcaaattggatacttttacattcttgaataacatacccaaaggcaaatagaaaatcatattaaccttacttctcaaagcttgaattacgaccaaacaaacggactccaattgaacttgtggccaatctttcatcttgatctaactcaaagtctcacgtatccccatggcttatgccaagacgagctcgacactgccctgaagcaagcgagtaccccttcaatcaagagtccattatcatcgcgagcctcaaatccaaaaccaaaggactgaaattcattaaaaacttctgcatctacatttaccttgatactattagcctgcaatactacccataactcagttccatcaccagtctcataaagagagtgtaatgactcaaaattttgatgcttgaacctttctatatttgtcaggatactcatgtcgaagcaacaatactagtaattctagaaatcttattatttcacaccatctcattcttggctccccaaatagcccaccacaaagttgataataaatagcgtttctcattatcaacatgttgaaaatacttagtcacccactctaagacagagtcctcgattgccacatttgtccctatcccaaccctgttccaagcaagttgaacattttgacaagcgactaaacagtggagaatagactcctcttccgagttacaaatggggcataaggaactcaccttaactcccttagtaagaagttgggtcatagttggaagacagcccacaccagcacgccacacgagattcttcaccttacgagggagcttgagcttccaaaaacttgagaaatcattctcctgcctacgcccttgagttttctgcagaaggttgtagacactcttgattgaatatactccaaagacttcttaattccaaacatagtgatctgccgcttgattaggatgtaaagggatgcctaagatgagattaatgtcacgctagtcaaacaggtccataaacagctcctcatcccaactactcccatccatattcatcaaattactaactttagcatgaaataaggttgggtgtgaggataaaccatcaggtttgcttcaatggtaagccatggagaatttagaacattaaagttttcactattgcacacacacaccaacggatcccttcctttacaaacgactgagcctcacaaatgcttctccaaatgaaacttgggttagcaccaagttaggcagtaagatatgtgtcattgggaaagtacattgcttttaaaattcttgcagccaaagatgatggccttgtgaaaggacgccaaccttgcttgcccagaatagaaagattaaaatctcgcaagcaacagaaacctaattgatacccttacctctctaaaataaattgcccatttgttgttccatatcccggtgatcaaacacaataattttggaaaaaatcaccctaaaacttgggctacatccttatgagctctccttaggaagatttagctattttccactatgatgaagcttcgacagttacaataatgttggagattccttgtcaaaaactttgacaagtaatctcaattcactctctttatatttatggttttggtttcctctcttttcttacagaaaaccaaatttctaactatgtttcttttcctcactttctctctctattattcttggagcttctctcactagctttcagagaaaaattcttgctttgatctaattaatgtcattaaggtatttaatctcatctactgaggtcggttgagtgactaggttggtggttggagttagttatgccagcttggatcttgttattttagttgagaccaaattgatgtggctttagttgagtctaagctagtcttgagtgatcaagtgtggaaaagtgcattgtaagtttgtccttgcttatgatggtgttcaattcaacaatttccaccttgaactccttcaaaagcatcttggttgagtattcttctcttccttcttctttttgctaaggatcttaactctttatggtaatggtcaacctccattaccttatcctagcaaatccaaacagtgcttgaacttggctaggtttagaattttagtccctacacctatagggttctcttttgttggaactttcttaatctaaatctgctcttgtgtcactttatctctgatgaagtggtacttgatctccacatgcatagttctatcatgaaagacatgatttttacacaaatagatacaactctagctctcacggtacacagtgggaacttcattgagtagatgcaactcttataatatgcatttaatccagatagcttcctttatagcctctgtgactacaaaatactcaacttctgttgtagataatgctacaacaggctgtagctagactctcaagctgatgcaattcccaccaattaagaaaaaataggctgagatagacttcctgtaacgccctattccatagggacgctacatgtatgactttacaaactagtttaatactaatatattaattaattattaaaaaccgcgagaatattaaaaacttgactaaaagaaaacactgaaaacggacattataacggcagtaaaa

SEQ ID NO: 218195 - DNA, 16811 bp, Cannabis indica
aaagcagcagcagaggcagaaaaagcagcaaaacgagagcagcaaatgcagaagaagaagcaaaaacagcagcaaaagcagcagcaatagcagcaacaatagccaaagaaaaagcaaccgcggctgcaaaagccaaagaaagagcaagagccgcaacaaaagccaaagaaaaagcaaatgcagcagcaaaagccgcagctgaagcagccgatttccatgttctaaagaaagaaagtgaaagagcaaatgacacaaataagaaagacaaaagcaatcaatactcattctctgactcagattctacagacacttcttcttcttcttcatcttggtcttctttttcttctgattcttcttcttgctaggataatggaagactcaaaaactatggcttccattagtgtaagcacaatttgctgctcaactgaaaagtaacaagtcaatatatttctttgtaatcttttttttttcaatgtaaaaactcataatatattgtggtattattctttaaaccaccgatcaatattcagttaaattagttagtcattaactaatacaattgtcaaaaatgacaagcaacatattagatccattggcctatatgaagaacacttatccaaaaaaatgagagagacacaacacagtaggaagagaagttagagtgagaaagtaaaaaagagagattgggaaattatattgcgcaacattgatgattatgttggctcgggttggtgatttaatgagtgttgcggaattacaccatgaaagatttactgggattatttccttgtatctcgtgatattgatatctcttattctcatcaaagaaagattggtggcagaattttaaaactggagtaggaccaagtttacattgaactttgaatatggactattataattcttgtgtgttgttgtgtttggaagctatctagattcatctttgtgtttatgtttctggtttgatatgtgtttgttggttttattctagatttgtttgttttttatttaacttttgtttgtttagtgtaatcttgaaactcgaattacagaggttaatttctacatatcagagctagatttcttatatatagggtaaatgacatcataagtacttaaaatttctaatttgtaagtgcgtttatttttagcgggtgtaagtactcaatatttgtaaaattataatttttctctaatttcgccagtacaaactttgttattgttttaaacagggcacatataagacccagattctagatcattgggtctaaacagaaacatgtagtatcaattatttctaaatgttcttttaataaattcaaaacaaagtctgtactgacgaaagtagaagaaaattacagttttataaatattaagtacttatgctgctaaaaataaacatttaatttatagcacttacaaacttaaatctttgggcacttataccgccggctaattactcatatatattgtttgtgtttttataaaaatagttatgaaattgacattttcttgttgtctttgttcaaccacttggcttggttggttcctttgtgagcaatttgtaaaagattctacattgattgtgatgtcagagattaataagccatagccaaacgaacctcaaaaacagcagcaacaataacagtcaaaacaatgaaatagtagtagcttcagaagtattaaaaaagctaacttgagactaaagtttcttacatgataagatgcatagagatttgttggagtatcactctaagtcccacatcaaaataatatgttagagttgtgagatttttttaggatgtgtctaaaaataaaattgtgaggacttagactcaaaacggacaatattatactaatgtagagaaaattgcaaattttataaatttttttaggggaattttaatttttatagtttttaaggtataagttttgcataaaaaataactttttcacaaaagtactattttataggaaaattttagaaaaaagttaaaaaatatgggaaaaaacagtattacataactaattatctctctacttaccattaaagtatttgttacccttaattcattttctcatattattaacattttcttgaatttttcccacaaaatatcttttttgaaagaaaaaaaacctaatataaaaaagtatataaattaaagtgaagtgacaatccgacaaaatttactccaaactttgcataaccaaatctcacaacttaatttctataaaataaaataaaatctcaaactttcctttttcttaattacaaatcaaatacaattaattattagatactgtagttactaataatatataaaaaaaaaaaataggaaactaggcagctagctaaggagcttatatataaatatatatatacaaaattatatagacgaaatggtattgagagagaggtaggaaaatatccaataataatatgaaagctatgaagaaaaatgatgatattaagataaaacataagtgtaaaaaagatttgatgatgaacattattttggttggtatgataagttggggtatggcttttctcaatgcatataaatttgcaaatatttgtatgagttatggcttaaaaaaactaacacttcccattgttattcccataacaatgattggagtcattagtttttccatgacaagattgaaaagtataataaaaacaagaagagaagtattaataatgattaatgaagaatttgataatggtgatgatgtggaagcaaatcattggtgtaatgttacattagatcttgtttgggtttgttattgttggtttattgtgtcttttgtttgtgtccctttgtttaatttattagtggtgatttcttctttagatgttttctttgctctctttcacttttatctcactctaatttttatttatggtggacttgttcttgttgaacttcattttagtgctgctaagagaagatatcatatcatggagaagaagaagaaaaagtgatcattaatttaattacaatttcgttgtgtttaatcttgttttattatagtttgttttttgagttgtaatttttcttttattttacagcttataatttaattaattgagctttcgcttaaaaacgttgagatttcaactattttaacgaatattttatgtaataatggagatttaaatttaatatatgtctctctcttttttatcaagagtattttgtaaaattaatttataaccaaaaaaattattagcaaaataattatgaattataatattataaaataactgtttgtgacaattcttttttttttttctaaagtaaaaaaaaaatagatctaaaattgagtgtcgttattttacaataaattttcctttcacaaaacccatttcttaaatataaaagccccaccaaatactttagtaagtagatgagaaacccattaataacatttctatattttagttttttcttaaaaataaaaaatcatatttttacaaactctaaactcaaaaatcataaaaatgaaaaatttccaataaactgaactgagtcggattcggggcttgaaccaaaaccctttactgagtcggactcaaactcgcgcgaacatgaacactccatcaaatctaacaaaaatcttaatcatctcctcaaattgtaagtttcccagatctgggatctttccttttattctcgcttatacataattgaatcacggtctttaagataattctgctatattagagagctccattgaaacaattacacgaataatgtgtttttttctttaatgggtaggaatgagaatttgtggtgagtaactatggagaaagagactcaacgttcggtatctttccgtacatacagaagaggagagcgaagtaatcatagctcgcattctaaaggtaaaagggtatacttgttttttggtattttatacaaaaatgggggaaagaagtgatttttagatttcatatgtttaatactcgaaatgggtattgtgtataataatctattagctaatgtgttgaaaatggcagatgttgaaggtggaaagttgcatcaagattatcatatgaagattgtttggaaaaaggggtttattcggttgtttcttgttggagggatcttgtggatgtttcttattcttttcgcttctttgattcatatttggtcttgccattcttctataacatttgtttcaggtaactttacttaaagcttgaaactttgttacgtactcttatgattttattgttatcttttcaatgtttatatgtggttaatagagtttttagccaattgattcttaactgactggtccataggttggctctgaagttggaaaggtcataatgatgaaagtattggtatatgttctaaagataatttacgttctttttcatagctaccaagccttaaaccatgattgggttttggtaattggacaaatgctacgtgtgtgattaaaatctatcaaaaacaaaaaaaaaaactgattaaattacatttctttctagctacatattcagcttttcagttaaaacattaagctaatgatatggacatattttgaattccaagaacttactttggtttggtatatgaatttctctagatttatagattagatgcaaacgaatacgaagttatcagctactcgcggtattcttattttcctgtgaatattctgcaattacctgcatttattttcactcaggttactgtgctaattactgtgaaaagtgttacaccttagtattagtctcattagtttaattgattagcatttttagtggatgagttgccaagtccttgatggcttagatgattgtttaagtgtgtctaatactagattgctatggtttggctagctaggaatctttgttagtgtagcctataaattctaagagggagtcttatgacaagattatggaattttgtgtgacttatttagagtcaacattgctctagagagataccaaactatctcgaaaagtttggaaaattgtaattcttactttgatatctacaaaatgcctattctctaattctttcaagaactcaattggatcaatagtggatcaaaaagcttctatgttcttcaagattcaatttttttgaacaatatatgttttgtctcattgacttgcaggtatgtgtaacaaagagagtaaggttttcacaatgtggagcaacataggacttgtaccaaagtcacaatcccaacaccgtaagaactttgcaatcttttgttgttatgtctcaatttatgtatagctgttgtgaatctgtgtttaataatttagggtgctttatcatttagggtgttcaattccggttctgagcgatcctgagaaagtagttattccagaaggaagaactcctgacaaaattgtaaaaaaattgtcttatattacaaaggatgagcattcgaataacggatctcagagtactccactgtttggaggacatgaaagctgggctcaaagagaagagagtttcaagctaagatcatccatgaaggtaaagtttttgcacacagacatgtttcggttatcttagctttatgagaagaagagaaatgcagcattgtcaaacaaagattgaagctttgtatttctagtttatgggaaatcgatgtaatttgctcttgtgattgcatttcgatttacctgatttatattttctttgcttttctttaggttcattgtggatttattaaaggtggtggggctgaaatgtctgctgaagatatgaattatgtcaagaaatgcagatttgtggttgcgtctggcatcttcgatggatacgatattccacatcagccttcaaatctaagtcctcgttctaaaaagctcttctgttttcttatggttgttgatgagatctctcttgatttcataaaggaaaatgtaaccgttaaggaggatgcaaagggagggcaatgggttggtatttggcgtctcattttactaaaacatccaccttatgatgaaccaagaaggaatggtaaggttccgaagattattacacaccgattattccccgaagcacagtacagcatctggattgatggtaaaatggagctattggttgatccattgctaatgctagagaggtatcttaaaagacaatctctttgttttctcattggattttgtgtatgagacgagtgaagtaattacaatagtttcgttctgcagatacttatggcgtggaaaaaaatcaatttgccattgctcaacacaagcatcatcacagtatctatgaggaggctgatgcaaacaagcgaaggaaacgatatgctcggcctcttcttgatctccacatgaaaatttatcgttacgaaggaatggagccttggagtcccgaaaagaaaacagttagtggtaagaagaaacatcatttttgttctacaatttgctgacttggttttcatgaattaactgaaacttgaataaaatgcagatgtgcccgaaggagccatcatcatacgggaacataccgctatgagtaatctgtttagttgtttgtggttcaacgaggttgacctcttcactccaagagaccaactgagtttcggttatgtagtctacagattaaagggttcgttcgagttctttatgtttcctaattgcgagtacaattctctgttcgtgttgcatccacacatacgagagcattcttctcgtatagagtgggtaacaaactgggatcagcttaaaggaaatgctaagatttcaaataagggtaaagattgggatcaagctagtgggagcaaggataatttggttgaaagccgaggggggttaggcttgtggactccttatcccggaaaccttgattcagttgttcttcccccggtagtaagagcatctaaagccggctgaggttatattcttaagatttcttcattgtttcatttaccatctcatgtcataacagttttgttggataaccgagacgaagaagattgacggtgtttgtggctaccacggagtagagtcgggaaaatctcgaagtgcctgccagaaaattcttgtaaaagattgaaaggtgaaagtcaagtataaaatggatatgagttagtttgcatatattgtaacattgtttaagcttttgaaaaagaagctaatgttgcctttgcttatttgtgatttcaatgaaaggaagaaaaaaaaaggaaatgatgcttttgcaaactaaaagtaattattccccttgtttttttatgataatttcctcattattaggcagacaatattataaatttagtaaaaatatgatgcaatatatgatgcaatatattttcttaacaaaatttagtaaaaatttgcctttgctttatacttaaatatgcctttgttatctctttctcttgtgagtttggcaccatagaatgtgactactcgaataaatggtcatattcaacccacaaaatcttttaacactttagtacaggggtgttgataaaatagtcgatccaatttaatccgcacgattcaattcaatttaatactattcgcaaagtacggatatccgcacttacttttatcatgataatactaatattatgagtattcatccaatctaatccgcactattttgctcatagtttaaagtttaaataatctatttcacaagcgtataaaataaaaaagcatcaactctttgaatcctactttcggcgtgttaaatttatctaaaacaaatacaagtgtatcagtgaatctcttttaaagggtgcattgtagaagttcaaaactttccaaacaactaaattgttaacaaattcataagcaattcatcttgatagttatctttgaaaaaaatagatgacactttaaatttgctaacatttcagtagcttgaaaagttttaccatcaaaatttaagagagataagtgcaagtggaatgataattgagaaagtttagccgtaaaaattatttcatttctatttcattacctccaacaaaaaactacaagtaatttgtaggtgaatatccaaatttaattctttgttgcaaataaatttttaaatttatttttgcggtaataatacttaagtgataattctaaaactctataagtactaatcattaaatgtctcgtcattatccaccttttatttttttataggcatatttaaattaatttttcaacaaaaaataaaaatttaataacttaaaattactatttacttacacttaaccgttccaaaattataacttaaatattattacgagaattactaaaagacattattgttacctaatactcttcttagtgtcataccactagtagtataattaagtattgaatctcgtataacttaaaaaaaatcgctaactaatcctaaaacgtcatgtataaaaagtgttgcacactcctaatgcccaataataatactcgtattattccagacgaccgagaattaaacttaaaatattccaatttccaaaccctaaacccctaactctgcgcataaatattcagagataagaaaacaatgtgttcttattctactgagtaaagctaagctaacccactgagctttctccactttcacaagctttctcctttactttcatcgccaccgtcaatggaatctctcatcctaaagctccacgaaatctcagccgttaaattcggtaacttcaagctcaaatcaggcatttcttccccaatctacatagaccttcgtctaatcgtctcatacccttctcttcttcgtcaaatctcccaaaccctaatctcctcaatcccttcctccaccaaatacgacgtcgtctgcggtgttccttacacagctcttcccatcgccacctgcgtttcaatctccaatgacgtccccatgctcatgcgccgcaaggaggtcaaggattacggcaccgctaaagccatcgaaggacacttcaaaccggaccaaatctgccttatcatcgaagatctcgtcactagcggcgcctccgttctcgaaaccgccgcgccgttaagatccgtcgggcttacggttactgatgctgttgttttgattgatcgggagcaaggtgggagggagaatctcgagcagaatgggattcgacttcatgcgatgattaagcttactgagatggtcagggttttgagagcgcatgggaaggttggcgaggatatggagggtttggtgcttaggtttttggaggagaatcggagtgtggctgtgccgaaggttgagaaatcgccggttatggtcagggctttgggatttgaggagagggcgaaattggcgaagaatcctaccgggaaaagactgtttcaggttatggcggagaagaagagtaatttgtgtttggccgccgatgttggtaccgccgctgagttgctcgagattgctgaaaaggttagtagtcagagttatttgaggaaattttctggggaaaataatgctttttcttacataccaaacagaacaagtaaataaattttggcactttttctgctaccgttgaaatatacattaaaattgttaaaaaatgttaattgaaaaataagaaaaattcgcacgtgtgagatgacaggacacacgtgtttaagaatgtcaggaaaaaagattttatgttccaattaatgtcggccaataattgtttgttggttctaattttttctttttcttattatataaaactgaaattctatataattaattaccaatgtaatttaaattaatattcatttattataaattttatttgtgactttgtagtttttagaatatagaagaaagaagaataatgtagaaagatagttgttaatattttggggcaaaaatactaagttattaggtgaaatttgataccatgcaagtaggggcggacccttagatatattctatactattaaatttgtatatgtaatttattttattttcttttttttaagatatttacttttttctctaataatattaatttactttgtaagatatgctattttagattttcccaattatgtataaaatgataatttttttctcttactcattcattttttatagctaccacaaagtaatctttttcaactaccaatacattaaagactaccttctccaaaaaaaaaaaatgaatttttacgtgattgtttattaatatacattgaatgagaaatcgttaaaaaatttagtataaattcacttatcgatgatttttgtgatatacaagaaaaaaaattatgtattttaatttaattatgaatttaataagaaatgtttacaatgaaacacccataatataattctaataaaaaaaaatagcgacaaaattatcttatcttacaatattaactatttttttttaattaaaaatatacaaatttgaatagaaaaatgaaatcaatttttctttagttaaataaataaaagctttttttagtgaaaaaatggtaaagtaaaatatttttgttgcttttttttattaggatcatatgtgttataaatgtaaatgctaagaaagttttactgcgaatatctcatttaataaagtatatctaaaatatttatcacctaaatttgtaatatagtttggcctccataattttttatcctggctccgcccctgactgatgcaaccgaacaaatcaaaccgaataaacggataaaaaacacaactcaaataataacgaaaaatcaaaaccgtccaatgaatatattaggtgggttgaatcgtttcggtacttaagtgcgtggttaggttttcttgccttaatttatttaattgtgtgttaagtaacaattttgttgaattgaatgcaggttggacctgagatttgcttattgaaaacccatgtggatatactgcctgattttaccccagatttcggatctaaaattcgctcggtacatttcttattttcaacaatctaccatttgatcattgttgttctttcacttaattgtgggagctgattatgtattactctatccaattcaagattgcagagaaacataacttcttaatcttcgaagatcgtaaattcgctgacattggcaacacagtgactatgcagtatgaagggtgagactcaaattcctttctttgtgttctttttcataaattctcactattcattgcagctctgatatatatttcgttcttgttcgcagcggtatcttccacatattggattgggcagatattactaatgcccacataatctctggtcccgggatagttgatggactcaaattgaaggtccaaactagtctaaactgaacaaaaattatgtctttaaacaaatcgcccactactcttttaccgtttgtgttgtgttgttttatgcagggattgcctcggggtaggggtctgttgcttcttgctgaaatgagctcggctggtaaccttgccaagggagactacacagcagcagcagtgaagattgcagaggagcattcagactttgtgattgggtttatttcagtaaatccggcatcatggccgggtgccccgataaatccagtgtttattcaggcaacacccggagtccagatggtaaaaggcggtgatgatcttggacaacaatataacactcctcgctctgtaagtaaaaaatttacatactatgattgtgctttcattaaattaaaagaaaaaaaggtataatttcttgttaaggattacagttttaagagagagatcacttgataaatgattgaaaaggattaattgagtaatttgtttgaacaaattttcaggtaatatatgatagaggtagtgacataataatagtggggcgtgggattataaaggcggcaaaccctgctgaggcagctcgtgagtatcgtctccaaggatgggatgcatacttgaataaatgcagcagttgaagaagatatatatatataaatatatatatatttatataacttcactatgtgattgttgtcattattctgattagaagcctattccccatccttttgaggtttcagtgcttacttttcttcttttctcataacttgaaacagtttctggtgtgttgaaaaggtgttttccttaataaaaatgttaaagattggttttgacaaattgagagttttgtacggaataagataggcattgctatctggttcaatataatatgcaaaagaatatatccattttcagtagatgaatgtttattatcaatctgaatcaaaacatattaactaattaattatcagttaataataaaataatggcttacatgccgccacatccaaaacctattatccatttcatgtgatcattaattttgggtcccaatatttcctcatcataagtcaacatcttcataaaatatactcagtatttttacagcattaaaacaaagcaaaaagagttgcaacaatattaagataatcaataagaatttggtcaggtcagctcctcaaatggtacgtcaataagtcaagttttttctttgaaaaacttcattggattggctctatggagatgtagtgtagtcactagtgttcataaagagcttagaaaggaggctctatgcagatgtgtcgattctattatggcgtgttaggtatcgaaggaataagtacttcttccgtgaacataatcggttttgttgaatttattgtgcaatcgtcttttgttgaataagtacttcttcccaagctaatagtgacgttaaggcttgcccgaagctcaatgttgatgttgttcccctgacttggtgattgaaaaataggaaaccataaggaaacagtaattctctcagctatttggtcatgcctttccactaaacttgtcaaaatttaaacacactatagctacaaaaactcttaataagcaacaaatatgattaacactaatatataagtgattagtctacaatgatttataatacaaacactataaataatgtttagtgtgcgtttagaaagtcactgtgtaattaaattttttatataattagtgtattggtgtttatgttcctaaagccatgattgtccttctaatctcttaaaaaaatctcagcttggccacagaaaaatcaatcacaagtgttgcgatgacaactttagtcaagaaaaattgagtttcccttttcttaatttttgaaaggataaaggaaagtccaccttattcagttgataattttccattaaaaaatttgaaaattaattatttgagtaattaacttgggagcattgccactagtcccaacactttatatattagattcgatatttaattacactaatagaaatatgacatcgaaaaaagtactaagcatcaataatattttttaacaattctcttaacgtgaatatattggtcaaataatcaattagtgccttatataatataacttttaacaaaacaataaaatcattcaaaattcttgactaaaccaaagaaaatacattttattccaataaataaatccaaagagaaaatacataatatctaattatatagactaataaagtaagattagattaattacacaataagatcatcaaactcatcctctgaattaggattattatcacttgtcttcttctccatcatcatcatatgaaatcttctcttggcagaactgaaattaagttcaacaacaacaaccccaccataaataaaaacaacacaaacataaagatgaaataaagcaaagaaacatcttaccagacattaaacccaatatcaaatatacaccaaatttagacacaataaaccaacaaaacaaacacatataattgaaaatgtaacaattcccaaattctctgctaattctttctctgataataatccaatcattattatttcccttcttgtaatttgaataattcttctcaatttcaccacaaaaaaccaataactccaatcattgtgattaggaaaagagtggaaaataattgagttaggccacatttaatacaaatatttgcaaaattaattgcattgtaaaatgccataacccaagatatttcagcaaccactatacaacttatcaccatcatcaaattataacaattattgttattattattattatcatcatcataatcattcttcttcttcatcatcatcatcttaacccaacactatttttttttgtatatttttacatataataataagtatgtataattataaaacctagtgtagtgtgtctatatatataggaaaatcctccatagctagtttcctgtttttttatttatttatttttttattaaacacgaaaagttataaagcgccttagaagaataaagttactcttaataaaagaaattccctttatattatttgtgtttattttaataatttttttaataatacattttttgccttaatatttaaaatatatttatgtttattatatatatatatatatatatttgtgtttttttaaaatgtattttttaagatttttttgtttaatgagtataaactaaaaaacatatatatttacatttaagacaagaaaattttcctatttatttattttgcatatgtaattagactagagatttttaaattgatttgttaagcttggaagtttaattaactttattggttaatgagtgtaatatgccttttttctaaaataaaaaataatataaaggaaagttactttcctttttttttaaaaaaaaaaaaatgggtacatgatcaaaatttccattaataatgaatttgacataatccaatccgttacataaaaaatatatattgcttcaggaatcaacaaaaaaacaaattgattttgacataactaatgaataaataatgttgtttcctaagtttttcaaaaaccatattaaaagaaaattatgttgaagaaaataagattaagaaagaaataaaatgagatgttttacataattggaacattaaagaattttaatatacgcgtcaatattattaaacccttttgctatggaatatatactatttttttatacaaaaatttctaactatctatatgaagggacatcttatttataggcgggctcattagggtttgtgtggtggaaaaagtctactcgtgggataaatacaaaaaaatatttgttatttggcccgacaagtaagatccagtttgtaggcagtcgtcatttgtacacagaggtactgttgacaatgacaacttagcatgaagtgtcatttttttagggaatgtgagagtagtgggcgttggcctaaaaatattattttcgtttgttacgcgcctttccaaggcctgacagagaggacgtgacagtcagagtcccgtaattcgaaggggaaagactgggagttgtacaatcctccatcgcctggggaaggtcatgtgtgatgattctgagactgtgtaggtatgggactacatagttgaagaggacttaaatgaattgattggtactacctatatcaacaaggtgcatcttattttttagtagtccatcacgaaagaactctatggttaagcgtgcttgatttagggtaatttcaggataggttaccttctgggaagtttccctgaagtggagtaaggacaaattggtctgtagggtcagtcgtcattccatgaagcagccaaagtgatgtactcgtgtataagagccatcattctgtgggtgtaagggcccaatagaagcttgaagcggggacattataaaggacatgctgccaaagttttgggattcttgtcggagaagtgccacataggctggtcccccaaatactatatgttcccaaacgccttttcaacttttggtcctcgacaatctttgaaggtattcgtctttgtctctttgagtgcctatcaactgatatgagattacttctcgagaccttgtgtccgattttctcattgcagttgtgaaatccgaacaatacatctagcttcgcccataggttgggtggtttacctatctagatccaatgaataggctcgacaattttaatgagtttattctaaggcttatgtgtcatttatccgaaaatttgaatagtaagtaacttttttttattgaataatgaacttatcattcaaataataattagagagtacaaagaagataaaaaaaatttatcatcgaaaagtgaacttgtgaaaacaagtaccatgatctttgagtattctatttcaagtataatgagaatttattttactttttccaaaaattcaatattgtatgttcccaaaatttaaatacattcttctcaaaaataaattaaatacatgtttttatttatggtatgaaaagcaacaaaactaaataaattctatcccttttcaaatcaaagacaaattttaatatttttgactaattaagattattgctcctaaatattttagactgttaaaaaatttatcgcgaactattgagattattaaattcaaggatctctattcaatttttttaattttactaacatagtgattattcatttaccaaatcgtgctctccaaactttaatatgcaacaaattgtgctcttgaattttgatatgtaccaaatcgtattttctgaacttgtatccatgtaaggtgtctattagtaaaattgaacaaaaatttttgaatccaaaataatttaagaaaaaatttttatgacttgaaaagtttgaagaacatgtcaaaatttagttaacaaaaatcttaattatacataattataaaacaccagatcaacaccctatataaaaaaaaatcaagaattcaatcaaaactcaaataaattctaaaaactcaaactttaagtattattccaaaaccaacacatttttagatatatttttggggaattattttatatactatttttttaactttttttttttttctttaattaact

SEQ ID NO: 218196 - DNA, 4636 bp, Cannabis indica
tcttgatgatgattgttcaaccaatgattattattatagtaatttatccacattgagtgatataattcttcatattaaaatctctttgtagtgtgagacatttaaattaaaattttctaaaagaagaagaccttaaaatagtttcaaaatagttcacaagcaataaattagtgagtaattccaacaaaattattcatttgccattgtaaatattagacaatataagaaaattaaaaagggaggaattacagacaactgagctttctacaatttcactcaaaaaaattcctaaaaatgaaagcaagctctaagaaccaaatatacagcttttactttcccagcacctacaaaaaaaatgttacatgaaatttgattatatataataattatatatatatatatatacaagctaatcttcactcctcagtactctcacatgagctaccaagattaggcattatatcatgaattaagagtctaatcatattacaccctgatgatctacaaacatccatacattcttgtagatctgcatcacaggctataagaacccattcctgatcatcatccatatatttgatatcaaaaatacccacctccatttttaatctttttgctacttcttctctgagctcaacaatgttacaacttagagataatcgaaatcttatgatatcttctctgtatgttgcttttatagtcacacttctcatctcttggctaactctattaacatttggttgagtttgagtaatgattatatctgttgttgttgttgttgtgtccttgggagctgcgaaatcagagcgtggaggaagaggtggcgggttcatccaacaatactcgggaactgattcgtctagtattgcatctgttgcgtggcataggtttctcaaatcttttgaactcccagcatcctcaactagcattgctccgaatggttcttgagattcggctgttacgagagcttcgggtactgagaagattaagccgtttgttggttggggcgttggctcgggagaaccttctactttaatgcattgctcctgaatggaatatgaaaatggatcctttagcattatgtttccatttgcaggactaccttggcatgagccatgagaagttggggtccctacactcacttctcttgagccacttcctgatttggagtggtttgagcctctattattctcgggtatgtaaaatccaccgttttcttgaacaaggtctttctggattaatatccctcctccttgcagttgatcttcgatttcggtctgccctcttctgcatgaagaattggttggtgagtctttcctttccaaaggggggtcatagtgtacatgacatggcgaattttgctgattagtcccgttcgaagtgaaggccgtgaaatggaggtaacggaacaggaagaggacttgtggcaataggagttaatccaaatgctccttcagcaccttgcacagattcaattacacgttttagcttagagagggaacggttaaccttattgattttgcgagaaggccatcgcgagataccatgctgcctgcaaatgcgcttcattgtagttgggcaaactgcaaagaaagaatcatcttaataacaatcccattctggttcgtaaaggttttagcaaacattaaatagcattttagaaaggaaatgaaaaaaagcataccaccaaggcttttggcagcatctttaagactcccggcaaagtactgttgaagaacctctagactaattgatttttcagttttcccacgttttctttctgatttctttgtctctttatgatccgaaacagacccatgattcatgtttccaccatcatgagcagtatcttgtcccccatttgcagaatcatgctctaccgtcgatggctgtttcattaaatctcgctgcaccatgtctcctccatttggtaaggcactatgtccttggggtgattcagcaatttgaggtatccgaatacattcaaggtttgattcaagtcccccgtttgcagaaactctaacaacttcaacaatcccttcttcctcaagaccaattccagaagcaactttaagactctgaaaatgtttcttcattgttgccaatagggaccccaatatagtatgttgttcagaaggatttgtgttaggaggcagaaaaaattcaagcacgtaattatcatttccagtgtgactgctctgtaagcagaccgcaaagcagctagtcaattcgaacatacgtgcataatgtaccaacggatactcatttttgcaaaactgagtaatgtcactgctgaagcacaagttgcgagaatagaaagccctcccagcaaccccttgccccttttgcaagtgatgctcaagacatgcctctcgaaaaccccacatccgagcatctacaatgtagaacgctacttcggttgtggacatacagacttgtcccatgcaactaccatcaatactagtacagtttttcttcaggccacctccataagcaagaacattacgatgcatacacggaacccatgtctgagccattggtaatttgtgtgtttcacaagctgctgtcaatatctccaaaatttcagtcaacgcgctttgacgaccttcattacaaatctggtttacaagaattgccaagtatttcaatctgggagagtagagagagaagaaatgaagggaaaaaaaatccaggcttatcttcttgtttccaaaaggaagcctaattaaaaggtacattatagttgcaactcacctgtgtatcagtatgatccaatatctctgcacttctcaaatttactgcctgcaatagaaccaaacttatgtgactatcacaattcaccaggtttgaataaatttgattacaatatcatataggcatcaaattttacttatacaacactcataagcggtatactgtaaaagcatgcaccaaaacataatgttgtgtaagtagttgttggaacttttaacaaagtttgtgaattttacaaaaaagaaaagtgtgaagtgtgtgatagtgaatagagtctgacatgtgataagagcactttctcacacaagtgtataaaagtgtaactttgacacttgggttgggcccccaagaggtacccagtcaatgatccttcgaattcttttattaagtcgactcaaaacaacaacagaagaaaatattcatttttacagaaacaaaaacatttttcctaaatcaatttttctctgagcaatcttagggatgtaagtgaccggtctccttcagtgcaaaggaatgccgtacagtgaactgggctgttttatcctggaatgacgtgattgctagactcttgtacaatctgtgcagagccgccaatcttttaaagagatcgacgttgtcagcaactcaacccagaggcttcattcagtaatttcgttccattacttatttcagtataacagtagagttaataagcttggcaagggaaaaagggaaaaccaacctcaagtgctttgcagactttatcaacctcaggtgcataattgatcttctccgaagtcattataagctcaagtacgccaacacaagattgtccagaaggttcaaaaacaggcaaagccaaacttcctctcacgttgtaatgctgagcatgatcaagtcgagggtactcagtgatggaatagtactgcacatttggagtccattcaggcaatttttgtcgaaaaacacgaccagggagaccaagaacttcattggtctcacccccatctacagaaaacgaatacatcaaagacaccatcctatactgatggagtccattactgtcggatcaagaacaaagggttgccctgaagttgaaagtacataccgacacccgttcttcactggtgcccaaacctgagccagaacatgctggtcagttgactccttcaaatatctaagtgcttgagtcatcctctctttaatccaataatacccatttggattgtccactggtaccaatcctgaaaatggtgaaggaagtgatctgttctcttcgttcccaactggtctttgtgctactgaattagaattacctgtacttgtgatatttcaaagcgaaaagaacaaatgagtactccaacagttactcaacaactcttaatttaaacaaacaaagaaattaagttccaacatgaaattcaaatcttttctgagctgaatttagcaaaaacccaaattagaaaggaaaagaaaaaagtttcaatcttcaaagttctatatgaacaagtgaccaaagcacagctaattcagagtatgtgccttcatcttaatcttgtatgttccttaaaaaattatacagcttagaaaaaaactacaataaaaccatataattccaacaattaagcgccatttatgtaagaagaaacacaatcaatcacagattattttcaactcaaccatagcaaaaaacagatcactagctagagaaataaacaaacgaaatctagtcaaacacaaaacgaacaggagcgattcaataagaaaaactcacaggaaaaccgagaagagtcagccatgggtgccgaattcgcatgtcgaccaaacttattagaattgttattactattgctactgttattgttattactattacaattattcgtattattattactattat

SEQ ID NO: 218197 - DNA, 1900 bp, Cannabis indica
aaaagaaaaacacatcatttcattaagattaagttgacacattaggtgactaaaaaacacagtattaacatccttatactattgtgaaaacataaaaatgatcccaagaagcaatatttttgggaaagatttgttagccctcacagcaagaagtcattcttatcatcccaaatttttccaggaataaattactttaattgaatgtcataattatcttttctaagcaaatgctaatctatactcaaaaaatccattaatttcaattcaacgctattacttttaaattcgaagttaagaactccttgttgtgaaagtgaaacaatttacttccacatttaaaccaagtggcatctaaaaagagaaatgataaagagtgttcagtaccattacgatatgttttactattattatgaaaaactgttaatcattcagaaaatgctattttgtcgtagtgttggacaccactggtacctaatagcaattttccactaaaaatagactatcacattaatataaacaaagctatcattacttaggttttgtttgtcttagaagaaaagagtcacttacattggcaagaactatatgaagaggaaggtattcacatgacaccatattaatcataattataacttttgggggagaaatagcttaaaactatgttatctcagcaatatttttattattaacacctgaccaattgatagcagttggccaacccttttgagtatttttaagttcaatcctccaatggtaccaatttgacctcttgaaggggtcttagttttgctcgtccgccatactcttctggcaaggtttcttctccaacttcttttacaaaatctcttctttcgtcgtcactagtgacaatcacgatctgcattttaaaaaccccgccaaatactatgaaacttcattttgaataaacaacccttatcttttttcgaatataacagaagtgagacttgagaaccaatgggaaatggtgcatagaaaggcttacatatcttattcacaaagaaaatggaaagttcttaactgtgaagtcccaaataaattggatttttaatggttaacttaccataatgaatattttagggttttcatagaaaacttgttcataatatggtgtgtcctaaaaaaattggcaataaccagtgtccaaggttgaagtaatttgtcaatcaagctctcgaacaatgaatcgttatagttagattctcatattcgaggcacgtgtacttgcaatgcaccatttgatgggctttgacaataatcatcgggtttcatttcaaaatcaattagtaacgagtgaagttgataaatataccttttctagagttgccttatcaagaaatcgcgaaatcagcctccaaacgcttacaaagaaccaaggcatgtttaaaatgaagcacttcgccaaacgttccgggtagtaagcctacacaaatggtgattattattacattataattacatatcacttttactaatatagagttaaagaagatcacaatggaacctccaaaaatttcaaccataagctcaatataggaaatggtcaaaccttagctacaaagaattctattgtagaaaaatttagttaaaaggaaaatttgttaatcccacagttgcttcaagaaaattcatgagaaatttcaacaaccgaaggagttcgaaacacagcagctaaaaatctgttatatcattgcataaagtataaaacagaggaagaagctaattgaatagcatgaacatgaacacccaattatatattatgcaacttaaagtctagctcaagtagttgggtgtgtgtaaagtgtctcggattcaaaactcgctagactattttaacaaaatgagtaactactaacatggcgtttagttagaaagaatgaaa

SEQ ID NO: 218198 - DNA, 3508 bp, Cannabis indica
  modified_base (3425)..(3425): a, c, t, g, unknown or other
gcacatcaaacaaagcaattcttgaaaacaatttcagatagatttgtgagcggttgaatactcatgtttgtttgagagtgttaccttttcagaatcaaggcctaattccttcgaaagattctccttcacatctctagatggaagttcattctcggcaaaaacttcacgaagcctctggtgtagtacaaaagtatgtatttaattagtacaagaaaatagagctctaatcaaaacttttgtggggaagatagactacctcaacagcgatccgaggaattctgaaaaatgacctcctaatttgtgcttcgggagggagttgcccttccacttcctcaacatcaacatctgaatttactttctcactttcaaaaagtgtcataagggtactagcagcatcagactctttcgctcttcgctttcttttggaaggaccccaatcttcatcttcactaatttgctcacatggaggagcatctttcccaaacatttccttttacaagcaaaataatctcattaaatctattactgaagtttggaaatactaaagctaatatttttatcacatattgctcaaggatccatgcataatctctttcttttactttgaaaacaaatagatactaaagtttaaatactcacatcatataactttctataatcaacatctcttctctgcctgcggccacatactatgccaccatctgattcgtctgatccaacactaccatcagtcgaaaattcaccctcccacacatggtcatcagtatcttcaccactaatgctgctgctattttcttttctctctgggtcataattttcatctccagaatcatctgaaggccattccacatctggatgaagtgatgcatttgcatcttcaggcaaagcagcttcctcctcaaaaacatccttcacagaaaataactcagctatttgactactggtaaaaagagaactacatttaagaactaaaaccagtttcagaatgactaacctcccaactattattcatggaaaaatatgtcccgagatgagcattaactgcttctagaatttccattctacactcgcaaaatctgcaaaaccatccttgatctcccggtggaactgtaatttttccgtcaatatagtcaattattaacctatcttattgattagaaaccaaatcaaatttacaagacagtggttaataaacttactactctcagtgtccaatggaggatcaagacatttctgatgaaaagcagaattgcatgttccatcacagagtataatatcattatcaggaaaagcttcacgtaacttacactttgcacaaaatatctaggcatttcaaagacaaaaacatgaatatagaagttatacaacatactttagagtaatacaaagtacttaaaaggaatttaataaccaggttttcctgagccaagttcataaagatgtagcacatctctacactagatgaaaattcaaaatacaaaaagaactagagcgataagaagcaattacatgttcatggtaaacagatccatcaggagccataacagaatcttcgatacttcctaccgaactaagggaatccaattgtctaatggcatctcgaataccaagcttatacttcaaaatctgtttcttcgccctttgaagttcattttctggcttaatcttttctcgactgtagcaaaaatttaaaattaaaaacatcaaacaaacaagtaaccacattgaaaacatttggcttaatcttttctcgacttgcaaaaaattaaattaaaacatcaaacaagtaaacacattgaagttgaaacaaaacaccaaaagtttatgctcattcatcaactgattctacaccgcaagttatacaagagttgcacaacattatcaaaatatagtaagataattcaatgcaaattggccatacattgtcccaatgataatatacatgtagaccagttaagtatcctcagcacacacatacatgttaagtaactttaaattgtcaacattaaagtgaaaggctgttgtatgattcataaattgttcaaacttaaaagaagataataacagatagcctcattagacatcttcaaaacagcttatattttttataatacttgagctatcaaaaatgcaccagcaaaacggtttttaaacaatagacataatagaggttatctttcacatacctctgtcctttccagccttcaccagaataagcatcaataaggttctgctccagtttcatttggttcaagagataccttgttctcctctgtaatcgagaagcttcatctaactcttcatttctagccttcttccttttctgtctcctcctcctcttctcattgtttggttcaatcttttcatattgacacttcaataaagagtgtttctttgaagacttagtaccacgcattctggactctagtaagtattcaccctgaaaattataacagaaataatatctacttatatatattaatgaaagagaaaacaaaatcactaaatcagagacttcaggaactatgtccttctcggcaaactatttggaaagaaaaaaaaagcagtaattccaactccagctaaaaagattttttttttccttttgggaattcgggaaactactaacaaaaatgtgataattgatgttgcattgataaaagaatatttttcagagattttagttcagaggcaataaacttaagtaaactgttctccagaaaaacaaataaggcctataagagctgctctaagcacgaagagatcatttgagaattccagtatactagctaaaaaacagaaaagcttgatcttttacaataacccagaaatcaaaaaagacaaccatttcaagtaattctgatcacttaaattgaaatcatagtgatacccaaatgaaaattttgcaagattaagccaaaatcaaagcttggaatcaaatgtaaatagaagataaaagactgacccaggaaagaaacgaaacagtggaagactgagagacgatctatgaattgatactaaatagaagcaatgggagggtatatatacatggaagaagaggcatttgctgtgattgatgatgggatttcaaaatttgaatttgaaattttctctttatgagatttcttgtagtcagtagaaggcttcaccggtgatgctactttcgaagcgccacccaaacccaacggtctctctctctctctcaagttccttccgtttaccaatctagttcgtctcaaactaccacttacttgcattaccagcacacttttgtttcattttccaattttttttcccttagttatgtttttttttcctacttatattctatgagtgaaagatatttataatagggaaatttgaatttatatgcttaaatattaaaaattttattattatccaaaatttacactataaaaaactanactttttttttcaaaccccaaaataccccctcacaattctctctctcttctctgcatcatctctctctctctctctactctct

SEQ ID NO: 218199 - DNA, 3110 bp, Cannabis indica
agaacccccatctgaaaaatgatggctaatctcatgatgatctcttattgtccataacaagaccagtgtcaccattatcaatgagagtaacaccattgatgcccaaaccatgtgaacgaatttcttcatgggcttgcagtgtttgacaaggatctcagaaaaggcatccttcactaattgacattccaccaggttctccatgcctgggtaagcatttagtaggttttgtattgaatttgtgtaagactccacagtttggtagtcactgtcggatatggagaattgtccatttccacatgtcatgctgtttgcatctgaacaggtgaatacctttagcaccttcaaaacaagacatattatttaattgagaaattgagatttgagttggttttgactatgcacataaggtttaaaaacaaaagtaagaattcatttattgtcattcacttatattagtaatgatcaccaaaagagttttgcccaatcactatgttatattataaggtagaatgtagttttgctaggctaagtacaagcatagatttagcgatgttaatagtaaggagtatgagtattcttattcagcttgaaagtttaaagacaccactcttgctggaaaatctcatgaattatcatatatagacaacattttagctgaactgtgtgtataagttcagtacattgcctctacaatctgccaaatgaaatatgtcattttaagacttgtttgtaatttttcttattgttttgtttaagacttgttgctgccatacctttgggatgtctcctattcttattgtgttagatgggcagttttcgggctggtactggtatgctggtggatccgagaatggattgcagatagaaataccatttgatgattgcatgactgatatgtttgcattcacctgaagattaccacaagaagacatgttagaactcttcttgtacacaccttttttcgggtgaaatgtgctctcatagatttgtctactgatagtgtaaacattaaaatattaataaactttgcagatgaaattgaaaacaaacttttaaacttgcctcattaacaatgttgtggatccctgcactgatgtcgtgtagaacagatcttgctgagattagttcatcacagggcaggatagagctcaagctattgttgtagggatttctttggaaattctcaagagctgtgcatgtatcaccaacaaatctgaaaaaaaaaatataattgagttattctttggtctatgaaattattgcccacataaatgttgtgaaatgaataaattagtgggcttacttgtttaggaaaaagtagatcccaaagaacagccagcacaaaacagttaggaaccaacatagcatgatgagtctacaacatgagagagaaaacataagcttccagaatttcagtagctcttataggcatttgtaaattaaataaattttcatgtacttacaggcgaagtgcgcgctgcaacctcagaattccagagactgcaaaagggaaaatcacatgttcggtgagaactacacttgatattgaagctctaatttatgccttttcctaacacgtcgagtattggtttttctattgttcttgctcattgtcaatgaaatttaagacacatatataacagaattggttctaattcaagtacaagaatcagttcttcagagttgataaaaggtatgctgaagtaaaactacacatacttgatagagcaatcactgcagccaggttcagggtaacagtcatagtggttactatgaaactgcagtttaaaaaaaaatctcattagctatattcaggactaaaaggtgacaccaacaaaacaatatgccttcattttgtacttgtctttggttctttagtgttcaaaatttattgtagaaaatagcaaccatatgaattgctgtgagaaaagggagaagtcttacactatctttagacctttgtcaattttatgtctattcttcttagcctgcctgtaaatatctgcagcttcaagatcaagttcctgggatgtggaggtaaggaagacttcagcttcattgtttataccagaagcttctaagttatctctaacaactttcattgctccagttgtgttgtaaatggtttccgatgcttcattcgctgtgtttatgacaatgtccactactgtttttgcttctgaatggaatctagcattccctccaagtactacacccgatgtcactctgcagatcgaaattaacttttgttacagtttcttctaaatgaaatgtcaagtttcatataattcattttcaaatggaagtcaatgactgactgtctgttatgcataaagatttaaatttggtgacttacatggcaaggagtgtgaagaaaatagccagtaagatgggccaaaggtagcactgcctgtgacatggtgatcttttgttcagcttctcactctttctatttctgtaccataccatttttgctaatgaaaaacttccatagagaattccacacacaagccatagcaaccctgggacatatccataaacccctgtaaatatagttgactgtataaaacagaacccaagtcaggtttatgtacactttataatcttacgtgtatatatttatgttgtacaggcagagggagagagtattagtgtattacactccaataatgcttgttggtaatgtcgtatcctcctctgtatttcttaaaatgatctagtggatccaccctcactgtatcatctggctgatccatgggatcagatacattacttctctgatcaatcaaactacttcctaaagtgatttcaaatttaaagaaagtcagtgaatgtttcaagttttaactgttatgtatcaagtatattctttatatctatttttccaaatataaaatgaacatagtttagtatatgttaacaagagattaaagcatgaaaaaacttgttttctaagctcacctgtgggttcagaactacttaatgtaaatatattttgtgctgatatttctgggacacttaaggctgaaaccatcaccatcatcatcaaagttaggtaagaagtcaattgattgccatgcttggatcccatatttgatttgagcctatca

SEQ ID NO: 218200 - DNA, 7832 bp, Cannabis indica
atgaaataatttctctaatttttttattctaaatttaattatattctcatttcatttttatattttaattccatccaaccatagaccacctaaatttaatatttaatactcttgtcctcatatcaaattacaaagtaacattaatacgttcctcctattaaaaaaaaaaaaaaaaaaaaaaaaagtacatggataagaccatgatattaaaaataaataattacatcctcgcactaattactgacttattaccgaccactactgcaaatccaaggcagtattagctcaaaaatttcaagatacaagtgaacaaccagtcccaaaaaaaaaaggtcaatgtttaaacaattttgttacttaggtacttagagaacctaatatataaacaatgtctaaatgaaataaaatacaagactgcagagtgaagacagtccatacaaaacgaagtataaagttacacacacatatctatctgtctacctatctaatccatctacttactgctcctcttcttcaatgaagaggtcccccttttcctttttttattggaagattgatccctggttttgcttttaatacactccaagcaaaaccagtcatcctgaggaatatcttcaaatggaggatcacagcaatcaatatggcaaccaactccacaacctttagaaccatcttcattaccgcatatcaacatcacatcacctctatcacgagacccacatgccaggcatggtacatcgttgtgatctggtggtgtcagctccaccacaactttctcctctgcaatttcttggagtttggcaaatgatttctcagcccaaccgtgagtgttgtacagcacatgcttgttgagggaataccctggtttgcatacgtattccaccaagtaatcagctaccacacacggtatttcgtgctttagaaactcctggatccatgcatccacacgtggcatgccgggagagataattgcaaaatcaacgcttgagttgaggaagcgagtgtaaggtggagatgttgcgagtatggtcccatccccagccttcacgacacgcttcagggtgtcctgtttgataacattgcatatggcaaaaaattagtcctctttagtactgatttttaaatcgtaaatggtctaacaatctgaaccaattgatgtgaaatgctaacatgaaaatacacacaaaaaatatgttaatttcaaaactcttagccagagcgtgagccattctgcctacttacaagacaggttgaaatccaactccactgaagaacaccgttttaggattatatatgcatatacatataaagtgaaaaatgttaatgagaaaaagggtcttcacatgttaagcgaagagaaagaaaacgcattatgatcataatcacttatcaattctaaatgcaataggctgtgttaagacaacgtaccaaaggtggtgctatacattcaccataaatgagtatgcgcattccatgaagagcaccatgacctgttctttgcctcaagagacgccacttccttggagcttctaagtttatagcaccatcttcattaaggccattcttgtaccattcataaggttcttcttccaagaattttcccgcctggttacaagccgttaaataatccatcttaagaatccacctgcatgaaagttgcaaacaagagttataagcaaggttttaaaaaacgaagaaaaactacaataaaataggtttacacctaaaaaattagcagaaaaccttcataaaatatcataaaattcataacaaacaacacataatccataaaaaagtcataaaatttatgaaaagtactaattaggtcttcaaatgataatttatattcataaaaggttcgattacttatgaaaatagtaaaagttctaaacatatatagaaacatattcctcattctaactcaaatgtcaaagaagtcataatgatcatcactatcttcttctgaatgagagagaggagggaggagagagagagagagagagagagctggtgagattgggggaaggaggaatggggagtcggagaagaagacagctgcttagggtttactttttaaatctatctactctattgaaattatgttagaaaaggccccaactaacacccataaagtcaattacaaatgaaacccaattggtgaggactgaggcgtgcacctcatacgcctcaacacaaatcgccttagaggcatacgcatcaagaccgcctcatcagggttaagcataggcctcaagtccaatagctgaggcgttgcctcagaatcgttttttcaccgacacgccttaaggcgcgccacgcctcgaccgattttaaaacaatggttataagttcataactagaaggaagtccatattaatcaaaagacaaacatcaacaaatataccttccagatgctgctgcagcaaaaaatttctcagtccggcgaataggatccggagcaatgaagtgtgtggcctggtaagaccactgatgcgaatcacgacaaaattttcctttcagccgcctaataacactctgaaactctttccgctgaagtcgatgtccacttaaaataaacattgcaggttcatttttaacactgtttgcaactcctccctcttcctttgaagaattaggtctgcagtttgaatccctttccttaaccttcatttgtgtaatattagattgaacaaccgactgttctccatgctttttatcttgacttccattttcattaccactgttagttggcatgctctccttctcttcttccgcagagttctttaacttcttctttctcgatactttttggggttttggtttaggacctgattgttctccatgctttttagcttgactgtcattttcattaccactttcagttggcttgttctccttctcctcttcttccacagagttctttaacttcttttttctggatactttttggtgtttaggtttagaacctgtaacagctttgttttccactttatccagcccaccattgttttcaagctcaatctcttcgctattaacaagttcatcagatttcactacatctgccacatccagaactttcctcttagtggatttcttctctttagacgttttcctcttcaatccatctacctttgagcttggtctgaccagagcagaagtagtgctatccactgcattgtctgtttcatttcctttctggtcttgttctgaggtcatttccttaatattagtgatggcttcatttgatacatgctgcttgcttgcagatttcttctgtgtcccattatcattttgtttgttgactacattctcacacaactgctcaaccttttcttctggagcttctgtttcatcatcaagagattctatttgaggcatagcattatctcgagatctattagcatgttctgccactgcttttgtgggtgcttcattgttgacaataggagaagacagttgagtcttcttggtcataggagatttgtcactctcttctccactcaaacaagttgctgcattattttgggacgtattatttttgcccaagtaaatggaacccttttggttagcaatagaaacattcttcggtcttgtacccaatgtcttctttgaacccgtcttctttcccaacggtttagtaactgacttctcatcttcaaccaagttcaaactagaagggccattagagttattagtatctggatctctgttactttcataacagataccaacctgctgatcattctgcacttcccctgtaatggcagccacaggtgtagaattcttatcaacattgttaaagtccagaccactagataaggttgtttttacttgcttgaaagaagatggagatgtcttctcatgtttagaattagaacccttgggatcattcatgtcattcttgggttcccttgtgttggctacaggtgtaaaattctccttaacaaaattgttaaagtccagaccactggataaggacgtttttagtctcttagaagaggatagagatgcattgttactttcagaacccttaatatcctgctgaccattctggggttcccctgtaatgggagccacgggcatagaattctcctcaacaaaattgttgaagtctggaccacgggatgagaaggataaggatgtttttacactcttgaaaaaggatggagatgtcttctcatttgcaagagcatgctgcccgcagtctgaaattgtaggttcagaaatagggaggccgctttgtggcgatttagttaatttagaggaatgaatggtaacatcagtagagtgtgattcaattgcagagttcacttttgcaaatacactattagagcatccactaccaaaaggagctcggctagcattagtctcatggccgccatcacaagaaggcgctgacctcagcccaagaattttactgtttggtgatggactcttcctaaagcatgatttcacattatcatttatctttcgcaaagtgggactaccatagccatttcgtatctcttttggaggcgaaaaatcagttagcttaactccagaatgtaaatgtagtgtgtcaacataatcagagccaattcttctctttgcttgcgctaaggatgaaagattattgactttgggttcacccataatgtctctttcaaagccactttcattgcctgataatctcttcggtgtcttctttgaagaacttgcagcaccaaacctctcattagaaggaaccctgtcaacactccgagaattagaagtccagtcattccttgcattcttaccatcaggagattcataacgagactcaatttccttgctgtagtaagtccctttaaggatgctagaattctgattcccaaaatccaaacttgacgctggagacattcttttcccctctccatgcactgaaaacttgtcgtcagtggcattgacatttaaaggaatcttagactgtggtaaatcaggcagaatatgtggcgcctctgcagctattttgggtgacgtatgtgtctctggaaagctagttgctatattgataggacttctatgcacgttttctactacatatggcctaagagatgcattttcaacctcatcctcagaatcctttgcctcagcttccatcatctccaactcatagccactgttgagagaaaatgaaatctaagaacaaaagtacgcataaaaaagcaactgataatcatatgaaagtgaggtaactgtctttgagcgaataataagtaacatatgctgaatgaataattttccgaacattgagaaagaaaaaaatatattttaacgatcaccacaccttgtggtatagtcaacttctggaagaatttcccactcccttaagctgccagcagaagaagcacgagaagaagaaaagtcaatgactaaaatttgggaaacttgtgttattcactgtcaatgataagatgctagatcacaccaagaattccactaaaacataccaatcttccagccaacgatgattgaccaactttatcttgtttaatctcttcgcaagctcatatttttctcctacacaaataagtctcattaatttcgattgctatttaaggcttatttagtggaagagaagagaattactgtagaagaaatatacataacataaaacgtagagctacacatgcaatatatgtgattcttttttctcctcttgagttgcacattgaattcatccgagaacaaatggtgtaagcgaattgaaaagaatgattacttgacaaaaacaaaagcaaggcacatatatgtgtcatgcacgtttaaatcccatcaattatggtgaaaaaaataattaccctcaaatttgtagcaaatgagatgagtgactttattcgccaccaatggcttagaaaaatgtgcacccattaaggcaaccatattctgagaaaatcaaaagaattgattaattgaagtaatgaagtatctagaattccataatcggaactcaggaaaaagaaaagaaaagaaaagaaagataggtataccataatgtcttctctgtcttgtcgctggtatccagtcaagcaaattataaaacttttagcacccggtatgccattcaagtctctaagtggtctgtacattacctgcccaaaaacttaaatctcaatcaaactagcacaaactaaagagaacccaaactcagtatcaatgcatgtataaaatttcaaaatcaagctacatatgaaaatctcaattagtattccttatgggcgtttggtatgagatttagacttaatgaaaatggaaatgtaaaatttaaattaaatttgaatgacaagagatttgtgtttccaagtaagtcttactttttaaattaaaatagtgataatgttaatcccctcaagcttatgggtttcatattctctccaagtctactccctccaactctattctttccaactcaaactcacataacaaacacccaattaagtggtgttcggttgaaaggaataaaaacatagctagaataaaattaacattccaatactttaaaataaaaccaaacaaaagaatagaataaaattgtttccttccattctatttcattactccaccttagggatttaatttggaaaggtatcaaccataggtgatggataaaaagcatttcactgttgatctattaggcggaattcatcaatgccagactaattattctaaatgaacattgtcatgcaacataagctgaaattaacaaaaattattcagactcccttgtaaacccaaaatcaaacaaccatgatagagctaaacaataatgtataaaccctcaccgtagtggcgtcaacaagcattccagcgtcaaaactatgatctacccacaaaccagtcactactgttttgcaatcttttcgagcagcaacacatagaggatcatcctgaacaaataataaaggttttagaccacttaaatttcaaaactaacatatgaattttgaaacatagttacaaaactgaatttatttctttattttcccaccatttcaagaaaacaccaagaaaaataaacccaatttacttaaagtaaaacagaaaaatccaattacaatggataagcaaaacacttaagagcacttacatagacaactttatccacaatcacatgtgtgcagttttggcaatactgcccagtatcaactcccccaccttccacaagcttagttcgaatctacacgttttattcaaccaaaataggtgagaaaaaaacaaaacccaaataccgaaaagaaaattcaacaatatatgaaatgaaaagactgaaataccttgtgttcattaatggagtcgaatccaaagaggacgaaacggacgccgtgaaatagttgaactaattgagtagtttccattgtcgaatcgaaatgtctttctgggaaaagcaagaactaggcaaagaagaaagaaatctaacacagtaacaccatgaatgagaatcagaagcttctaaatctaaagaagaagaagaagagaagcagaaggagaaatgggtttttggtgtgttgaaacttgttgtggaagagtcttaactaaaggagggaaattctgatattttgttttttcattcaaatgaataagcgcgataataattaaaaaaaaaaaatatggcggaatttggacgttccacgtggcacaaccaaggaccgatctataacacgtggaatgtccctgacttggataaggctaggtgaatgatgggcttgaacttgggagtttctctggcccgtgtaagaaattacatggtaactgtgatcagcctcagcccagaaccccttattttccttttttcttaaaagaaataaaaacaaaaa

SEQ ID NO: 218201 - DNA, 3074 bp, Cannabis indica
aaatacatattataacaaatccggacagccaataggaaaagaggatagatgccagcaaggaaattggtacaattgagcacctgaaaattatcttcttcttcagacacagagagttgagttgtgtttgtctcacaaacacagaaagaggccatggcttctccttcttctcatctcacagctattccacaacgcttctcaaacccctccctctcccactgtaactctctctctccctgtacatatatatttatagtagatattagtacctttaattgagctttgttgagaattattgaattataatctgttttctcatcttacttgaagttttatttgttaccccttttgagtataaattctgggcaatcttctactttgtcaaatttggtgtaatttatgagaaaaattccaactaagatgaaattgggttttatttatttgagaatagtttcaagactagacttttatgtataggaaacatatttgtctctgttagaagattgtcacaaaatagttacaagactttgttacacaacattttgtttttgttaattacttcaataaatttaatcatatgttagaaagtagagattcaattcattagcagcctagattgatttgtttatgtcattgagtgtttccctttgaatttgtttgattatattttccctttttttcaaagaaaaaaccttacacccttactttcatgcctaaatttggtagtgaactcaaagccagttgggctcaaagtgaggtcaagtttggaaaatgagagcaatggcactgaggattctggtaactcatcatcaaaacctcttaaggtaagggcttcattcattttggtatctaactaattacaaaaatactgaagtgctcgttcatatctcgtgttgctgctcgtcctaatgtgctcaaccaattatttattgttttttacttgtgaatatggtcttagtagttagcatagagaaatgttgtgctcattatgggcaattttcatcacattgaacatgttgaacacacttaagctgtgtttggaggttgaatttttgggttgtattttccatacttttttcttgcctacattttccttgttgttttctttccccaccaaaatccaacttccaaacataacattactttttcatcacatggtcatgatttagtgtttttgggaattttagttagtacttcagattcaataggcttacaatattcttgtacagttcaaaattgaactccaaagcttaactttctcttgctgctttagcttttaactatgcaaagtttgaaagcatagacttcaatttgatctattttacgttcctttctgaccacagggatctaaaccagcaatcaatcgacgcttatgtcttgcgtgtctgtgctataccgttccattaataaacgatttcagcaattctagttccaaaaccaaagctttggcaatggatggaaatggaatggacagaccaggatgtcgaaattgtggtggcagtggtgctgtactttgtaagtatgaaatatttcccattttgtttaaccatgtttgtgattatctgtgatgaaatcttggttctttttttggtttgatttaggtgatatgtgtggtggtacaggaaatggaaagcactcaatagaaaaagagccaaagatgtttatgagttcacagaatgtccaaattgttatggtatgtatgcactttctgttaggagtgggtaacattcaaaccaatccaatccagttcagttacagaaagttggatattcaattacagttagattagattggatgtgaatagttgaattggatcggttattggatgacactttcaaaatccaattaaaatcgatccacatccttaaaaaaatcctaaaactcagtgtagtttttataattgtttagttaatgttaaaccaattcaatctattactaattgagttggattgaatcagatgcccactcttactttctgttgttgcatatgaaatttcacatccatgaaacttaatgttatgtggctcatggaataagaatagttgtcataagttttctttctcgattaatcgttcatcttaatcgttgtttccatcaggtagaggaaagcttgtttgccctgtgtgtttagggactggtgtaccaaacaacaaggggcttctccgaaggccagatgcacaaaagttgcttagtaagatgtacaatggtcatctaataccgaattcataacccgtttcgactgccatggaaaatcccacagaaggggtcttacctccttacctacataccttgtgttgtatacagcatgtagaagaagggtcatatatgtatagattattctaaagatagagctcccatctataaaaacattaattttgagggatgtaaactattaccattgttacttatttttggtgctatgttttacacattgagaaaaatgtggctatagatagttatgtaaggtatgatttgagtagcagatagtcaaaaggattttctgttatttttatataattctgtttctcttattttcagaacttttgagcacattggcaagttttaatcattaaaattcaaaataatccaactaatataaattaaattctccttttcatgtcattgtaattagttagacaaaattcacaattttgcatctattttactttatttgaacaagaggagtgctaattgtaactttctattacaatttcttagtcaaccttcatgtctaaaattatatgtcggaatatatattttttttatagtggtatttgttatagttacaatatacctcttgtaaattcttacaaaaattcgaataatttataataccgaaaacaaattttttgatatttcaatttatcaagcgtgttaaaaaaatttcaaacctattttcgacatgttaaactattcaaaaaattttgaaaatttataaaaataatattgtaattataacgaacacaatcatacaaaaaattcgaacatgcattttcaaacacaaatattgacttaaaagttagacggtgatacttctttacacaattcataaagcattacaatataatgtaacattg

SEQ ID NO: 218202 - DNA, 11035 bp, Cannabis indica
aagaaaaaaaaaaaagcaaaaagaaaaatcattgtgtagagctttgatgaaagttggagatggtaggatgctaaacgtgagatgaaaattaaacaaaaacaaaaaataaaaaacagtgtataatatatattgtgtaatttattactctaaaattaatatatagtggatggaatgatcttcaatcttcaaattacacattttttatgtgaaatttattcgacaaataaatatgtaacagaataaatttaaatcactatctcaattgttatatttagagtgattaaataaaaagaaacatgaaatttggtaacattaaaaagatcaaactaaacatctattagttataagtatataaaactcaaattatcaataattaaaattagtagaagcattagttgtacaagaagtccatgcagaagcagtatacaaacaagtatctttccaaccaagtctaagtgtcccgtcatgcccttgaattaaagtatatccattactattactattaccattaccgttactaaacatatttaatatcaattgagcttgagccatacaattcccgctcattgccacctgtcctaaaccaacgctgctaccaccactgccgccaccaccactccttttaactaactcactcctccaatcccttagcttctcctccccacttcgaccgggcccactgatagccaacatgttattaatctccctatgaaacaaacaatgctctaccacatgtcgggtcgggtcatcagggcccaaataagctccgattgaatcaaacatggttgaatagtattggagcgacccgacaaaccgatccaaaaatgaccctgattgggcaatatcctgctccaccaaagtgaagatcctcggcctaagttcctcaacaagcccgattgttctccaatcgggtccagtggagtcataaagacaatgtcggagccaatgcacggctagggtctcacctctcctgacccgaaacgtcgaaaccccaacatttaacaacccagttttagggtttctcacaaccgggttaaactcaaacgagttaataccaagccgtttggcgaaactcgagaggtgttgacccgtttgagacaggagttcaggcgaagacccaactccagtaatccgcacgtgcgaaggcggaccctcaacacgtgtggccaagatatgaaacagagcaggccactgaagaccctgcatgatatcgagatcgatgacgtggacgcgatcccgacgatggaacgattcaagtatagcttgattagaagtgaaatgagcaaacttaacaaaaggggaaacattattaaacccttgaaaagcttcatgtaaagatctataatttatcaatggcataggaaaaggagaagagagcacattccccaaccaagaattgacaactctactagccatagctttagcgaaataagccaccacgcgctcagcagacgacggcgcgtaaggagaacttatatgggtaagttccaaaatcatccggtgagcctcgccgagattgtcaacggagattgcaacggcgcattctaagagaagtgtcatcatttgggtcaagctctgttcttgattattataatcattattggatgatgattctgttcttgggatttttcttggtcggaagttatcaccggaaactgagtagttcgccggaaaatttgatgggttgataatgtgaggtgggtcgttgttgtcgatgatttgtttggtgatttggtcaacccaatctgagagttggttgtttatggggttattatgattatgataattagaagggtttaagtaatattcatggtgttggtgttggattatatcgaaaaccccacaaacactatcaccatgaaccatttcgaaagttccagctttcattacagaatgaaagaatgattatgtatatatgattttgtgaattagagagagaaagagagattaagagtttaattggagagagagagagaggaagggagggtgttaatgagaagagagaatcgtatttaaagagggtttaagcattgactgagatggttttattttgagtatattgcaagtaataataagtgtataagcctttatttaacggccaaaaaagttcacagcataatttggtacatgttaaggttgagagaaaaaaatcttaattaatctttatttaataaggaatggtaattataacttcttagttaacttctgtacttgaaattatatgtcggaatatcttttttaaattttttttatagcgatattcgttatagtcacattatcattcttataaatttttgaaaaatttaaatagtttataataccgagaacagagtttctgatatttcattttaccatgcgcgttatgcgcgttcaaaaaacttcaaacgtattttcggcactgtaaactattcgaaaaaatttcaaaatttacagggataatgttgtaagtaaaacgaacatcgctatgaaaaaaaaattaaaactaatccgatatgtatttttggacatggaagttaactaaaagattataataggagattgacagtaacactcctcttatttaatataaatctcacttatcgaaagtaatttatgtgttatatttgctatgtgtaaattatgtgtgcacttattatttttgttgttattaataagcaaagacttcattataagatagcgtattgtgagtgatgaacgatatattacaatagtttgaagtttgttccaactgttttgttactaagtttagtaataaaatttgactttttcgttcaaaaaaaataccacaaacaaaatgctaaaaaacagcaatgatgtttaacacttttttacgtgttaatattactagaggtgcaattaagtaatataataatttttaaaaagtatcgctaactaattacaagatattacttctataacgtgttaggtatcacgtgcccgttagcaatgctctatatataattaagagagatagagagaaagagaggagtttaggcaattgttcatcaaaaaggaaagaattagggatcgccggcagaagcaagacatatagaaaaagataagtaatgtaaagccaaattaagcaacgtcaatttggtagtgattttcttcattatatttaatcctataataataataataatgataattacttagagattattataaattttgatttttcaaatgccatacaaagtcacgattttgatagacacaattataaattttaaaacatcaggaagatgagtttttgtctcaaaatagaaacagtactttgggacgtggaaagaacaactaatccactatataatgtcatatatatgtatataatataatgggggtaattttacattaaatcttctaaattttcagaaattttttggttaatttttttaattgcgtacgttatagttatttaagatcatttgtaacccaaaagatttcaaataattaacattgctgaaaaataaaatttacatattttgttgcatacgcaactgtttttctttatacgtgtgttaaataattgtttaaatctaatttttgacactgtaaactatttgaaattttctaaaaatttataaatggtcttaaatagctacaacttatatgatcatgtaaaaaaaaaataagactaaaaagatttttttagataccaaaacaaataagaagtataccaaaccgaccctttagggatagtgatggaaatttgacctacggggaatggtactcacgagtaccaacccccgaatgggacggagattattcgccttattcgacctagatatatagtttttaaattttccatataattttttaattattacgcatgaaaattattgactataattacaaagttaactattaatctttcttaatttattttgtaataaatactttttaatagttagaatgtttgtttattttaatctcaatatgttagtttttattttcattttgaattacatactatcttattgacgatataaatagatcttcatacttaataggaattctcctactctgaacccatcaaaaattaagcaagacgggagcaggaatagagggcataaatgaaaaatggggacaaagttaagagatacatttctcaattattacccacccaatttttatgcctgtttagagatttactgcagaaatttccaaatgtatattaaggtttgaatttatgaataattaaatgattaattcagctttcattaaacaatacgtcacactttacatgttctgtaatttaaatataactacattaatcaagttgggcagcagcaaagattttctctctggcttcaagtcttaatttttaggggcattaatggcattttacatatattatatatatagatttataagcaaggcaggagaaccaaaaccgtccttgattgattgggtcaaggcattaaatttggtttcatatatataataggaaattgggttagttggtcaacttgtctttgctgcctttcctatctaaaactacaatctttataacaaatatgtgattgagatatataatagtttctctataaatattgaatcaagaaatggtaattgtgatgtcctttgattaatttacattataaatttttggtttaggcttttaaacccacccacccaaactttcatttcatttgtatttaatcttttaaaattaaattttaacgataaaactttttgaattattgaaccattaacaaatttaaaataccatccatttaccatagttaactgttggacacaagtatgagcctctatattggctaacatgtctgccaaacaatttattaattaataagtcactgatagttttaaattatttttattggacactagtagtatttaacatcttctagacatgttattttgcgattggttaacgatactccctgaaagttattacattaagttatatgagacctaatatttaattacaacaatagcgtattgacatataagagagtgataggcactacaagttctttttagcattttttatagttatacaacaagcattgttattaaacaccagtagtgtctaacaccttctagacgtatcaacttgtgattagctagcgatacttcttaaaaattattatattaaactatatgaaacttgattagacaaacaacaatattaataggtaagagtgctatacacaacactattatctttttaacattaccaaatgctgacaaagagtttgaccttagtttaagagtaaaattttgacaagtggcagtcatatatgatgtctaatatctatacacacaaaatgtgatgttttatgttatttgagcaatattacataaagaaacatataatgtccaacactccttattttaattggtacaatttagtaatgaattctataaatgtgtagaattcaattcatatcatgtaaatttggctttggaatttggataatagtaccctttaacaatattcaaaacacagtgtccaacactaccttataatgagtatcaaaaaatcatattaaattacactaatatatataatacactcacacaatcaatcaaaccaaatagagattcctaattgtcatatgtatccagcaagcaaaatctctgtgcattaccatttcaaacccctcttattttcaaaacgttgctttatcatggcccctcaacaacaacagctcacctttcaccacttttttttttcctactacccttttgtttttattgtacccttatttatttctccattcaaaaaattttaatcttcatttatttttgtttttataattgtgtatgttatatttattaaaactaaacctaaaaatttttacaaaaaatttttaaataatttaccgtaataaaaataaattcaaaaattacttacacaaatataaaaaagaacagttaaacatgaaacaatatattttcatcttattttagacactaaactattttgaaattattttaaatttttcataaatttataaataattttaaataaaattgaacataaaatctctcttacatatcaaaatatatagttaacttaaacctatcttacctatgcaatgcgatccaattttaaaaacttattttatgtaaaatattactcaatataaataaaaaaaaaaaacaaatatatattatatatataaatcaatttagttggtaagttaaatttaaattttgttgtcattgtacccaaatagttgagtaactaacacatgtgcccaaacagtaaaataaactaaaatagttggagaagaaagtgaccttacaaagcatcaatatctgacaatcccatttcattttcaacgttgtatcactctctgttctgtaagcatttacaatcaatctgtcggcattaaacgaatcgttttatcaaatgggattttactttttaccttacttttttactacttttggcagtactacagtaaataagtattgaacaaattgttattgtgtgtctcctctcattattagaaaaatcagaacaagatattacaaatggtacgagttctcaggcaactttgtacaacatttttttgggtaatttactagtaaatagtaatagatttgacttaaaataacaaaatgggaaacaaaagaaaaacaaaaataggtatcagtagagaatgaattagaattagaagtctacttacttccaagttccctctgtctgtagtttttcggtatatagaaagaaaaaaagaacttacaggacctgttcttctttggttgcgtgtcaatggtgtgtaattagtaagcttctttgattacgatcgcctttgtttcaggcttttgatggagcttttcggtaaattaaaccttgaagctccaactgataatgaggctgtgaaagaagtgtcaggcgcagcaggaatagcattgagaattacatatctaagcactctgaatgaaaaaaaattgggttcccgaaacaagctcctacgccatcaaatagactggcgagatttagggggtcttttggtcctcgggaacttctaatggggtaggcaagaggttcagaaaactcccttgtgttgatgattggtcacttgccggtgtatctgatgcttcagatgactccgagtcaccatctatccaagtgagccccaaaggaatgagaatgatgatacatgtgtatataaatatgtgtgtgtatatagagagagggaaatgaaacaggttttagcataccgaaaagggtttttatcgagggtcgctttggcttgttggttttcttcttcaactcagctacagggagaaagaataccatataatcaagttgtcgtcaacatagtttcgtgctcatacaaacctatgtacttctgtgattttatattgcaattcccatatatttaacatcacccgcccgaactgaagatatacttttcagattactaaaatactaacaagtgaaaataataatacgggagagaaaaatatacccatcccaggaacttgataatcgttgatgatttcaaagtttttatacgtgtatcccacaaaattgaggtccttggaggagagcatctgagaaaagaaaaagattaatgtttcccaaacaaaactaaaaaattgatatcagcagcgcccccaaaaaaaatgaatggacagatcatcatacaggcaggccactacttctccataaatagtatatattaattttcatcttaaaaagatcagatggtatggaacaatagtccctgcttaagacttgggtgaaaagagtgcatatacttcaaaataacaaacaccaatgacaatggaatgaatataccaatgcttgtataaattactagccaataagaagcatataagactgcgtacctttctccaaggaccagttttggatgaagtatttgtttgattttccgactgccaaatccaagaaagagcaccgtgactaacatgaaattgccatcatttagtttgacagaatcagaaagaaaatgaagcataagtacctcttcaaacttttcaaagttttgagtatccaattcgtcattgacctcggggataaatgcagcttccatctgatagagtttgtcccattcaacacctctgaaccaattatgcgcctaatgaaagcatcagcaccaagatgattctaattatatgaaagttgtttagaggaaaaaaattctaagaaatctagaataggacacaccataaaccacctttatttcgcctgcgcctcttgatcctagcctctggttgacattacacaagagtttagtaataagatcttttgcctcttgagttagctttgcctcttcagggaatttcaagtgagttctccaattaactatctgaaaaaaacaagcaagaagtaacaaataatcacacaaattaagattttcttattccttattcaatgaatggaatggtagttaaaaacaaacttaagcattacaaaacatattacatagttgaaaaattggatatgatataagtttaccttcctgcacgtcgacattggatcatcagaatagaacggtgggtacccaaccaacatttcaaacataatagcaccaagtgaccacctgcatatcaacataacgtatttatgtcaacccaataaaatttaaattgtagtccacaaattcgaaaccaacaaaactcatgctaaaatagtttcatgacaatgtaaaagggtattgaaaagctaaaacatctaaagtccataactacataccaatcacattccatcccataaccttttttcaacagaacctccggagcaatataatcgggagtaccaacagtagaataagcctgcagtaaccaaatatttcagctcaagagaacattttccaacaaatatgctttacaggcctatggtgacagaatggaaagaaagagaaaaaaaggaaaccagtttgcctcactagcattttttgaaccatatttaaaaggggaaaaggagaatgtaatttgtgaatgaaaagtaatttacaagcatcctcctattcttctgccaatgttgcagttgttcttgctgggagcgcgctggattctgatcattttgtgcaaccccagttggattgttcgctattgaaaagtcctcttggaggttactgcagtctaacggtttacatagtccaaaatcagacagcttcagatgtccatatcgctcaagtaacaaattgtcaggcttaatatccctgcaacattaaggactgataagatcactctcctccggtcttgaatccaatccaatccaacaaaataaattaattatgtttaagccatatcacaatatcttgataaatcatgaaattttatacccacaaacctatgaatataattgtgtttatgaatagattcaatagccaaaatggtttctgcaatataaaatcgagcttcatcttctgtcaaagtgtcctttctcataagtaaagtcatcatatctcctccaggtaaatattccataataagataaagatattcatcatcttgaaatgaacagtatagtttcacgatatatatgctgtccacctcagcgagcagattcctttcagctttaacatgctcaacctaaaattatcgagatccaactaaaattaacacccataaaaagatagacatctgtttggatataacaacctaaaaagatagaaacccatttggaaataacaacccaaaaagatagaaacccatttggaaataagtatgataagaaatccataataccaaatgcagaccagttaactgaatacctgacccctacgaagcatttctgatttcttcagctttttcatagcatatacatgaccagttgtcttttccctacagacccgaacctggacattaaaaccaagttaatattgataaacaaaatatttagaaaaaccccactactatactaatgtaaagtgtagaagcaccagttggacattcacacagaacaaaataaatatcctcattaaaaaaatattgtacctccccaaatgcacccttgccaatcattgtcaataactcaaaatcatcagcacccattttatgcctttgtaatcgcatgtattcagtttccttcttctccaaaaatttaagaaggttgttttggtcttcttcagatacatcagcatcagctaatttcttttccaaaatatttctcctgtataaaagggaaaaaaaaggaaagaaagaaagaaatcaataaaaatgttatgtgaagaaacatttttgatgtttctatacattatgaaattttggctcaattattttacaaaattaaaaaagggaagtgaccaacatccaatgcaactatcatttacaacgaagcctcataaagtaagagatagcaaagtagcaaaaagtagtgtattctagtaattataaagctaactcatgcaatcatgagatccaaagctttttctttttaaataaaaattacaacagtatatatacatatatgcatatacaattttctttttttggaaaaacagatataaaaatcctcagtcttaagattttggtcaactatcttaacatttataaattaataaattaagatatgatgagaattcaagaaaactttgtttaacttacaaacaaaatttataaattaaaatcaaaaagagcaaatttcaataagtaaaagatttaagaaatcaaatcaaggacgaactacttaccgctcctttctctcctgcaaattcttcatttgttccttgtaatgattctcaatatactgcttagcagcagcgaccttctgcttcgtgatattggaaagcgcttcctcatccatttgtggatcgatttcctcatctagatctccagacaaactatccttcttcctagaagaatttctcaacttatctctcggttgaagcttctgaaaccaactcctagccgaatccatttccttctttctcactcttatatcatcaaaccagcaaagcaatatattcgtttttctcaacgaaaaatctcaaaatgcatgtacaaccaattcaacgccatctacattccgcatcaataataaaaaatcacacacaaattcacatcaatttgatcaaaatca

SEQ ID NO: 218203 - DNA, 4602 bp, Cannabis indica
tgggccctaggcacgggcctagcccgcctatgcattggattggccctgcaagcctccatgtccacaagccaaacgaactgaccaaactaattttgcacatccagaatcaccattttcgtatatacacaatcaaagataacacgctgatcaattttgtcagaggtcgcacaaaccaatgagctacgagaaaccaagtccataaattttctaagatgatcccttgtgagcaaatgattattaatcgcttgccgaacatgaagcagtgtttgggaacacaaagtctctgcgaggtagatcgagaatagaaaactctatcacaagcaagaagagaaaggtaaatatgttttaccttataatgcccttatctctcagcctccatcaaggaatgatgatcaatgtaatttctcaagttaagaagctttataaaataccagcaaaattcacttttaagagtaagactccggaaatcttagtccttcaagtagacaacattaatccatctcacccaaagacagtcttgttttgtagagtgagctcaaatgtacttagccatgagatccatattccacttccttccctaaacccaagaccaacatactttttgggtaagcaaacatgctcccatgaagttagatgaactttgctacgatttcctttagcaccccaaagataatttctacaaagcttgttaatttaagtattattcgtgtttctgaacagacgacatgtggcgtaaaaggggagagatagtctcataatctcactaattaaaatcactcaataaaacccagtcgctgaaaagtttcactgatccgggaacaagtctagatcgagaggtgtgcggaggtctacctcgtcttacttaagcttcccagacacggaagacatattaccactttggaacccaaagtggcccaaactcaaagtctgcctaaatgatcaccagacggctactcgaaaggcctatcgcagacgatgtccacccaaaataatcgcagacatctaccttggatgcaaagttagatcgcccagcgacggttatgctttttctaacatgagatcagatcttgtcccctgtgccaagacatggtagtgggcgcacctaaaaaacctttttgccagacgattattctaggcatatacttttaaggttaaaccttttggcgatatgcattcactacatacaatggtcccctattgtccacctacttcaacgcacgagaacaaatccttcctagaggctcaacagtcagctcgtttttgcatgtatttactccattagtgaatttttttgcaaaaaccctaggtgggtcatgggcatgtccacacctgtccttagcctatatatatctttctattttcatacaaaaggaggatcacaatctagataatcaaagctctgctaatattattccaagctttcctcttcttcaagagaaacaagaatgcagagttagggtttcttacttaaacgctgtaaaaacatcaaacacgccctttgaggctaatggaatgacttgtggactagggttaattaaaacctgaaccacgtataaatctccatctcctttatttctacattttattatttcttaagctcttaaatatttagtttttgaaaatctcgatgaatattttgggtctttcattgagagctgaagaaagatttaaacccacactgttgttgtaaccatggtttttactcaaacagctgttactaagaagattcctccagatggcctcgatgttgttaaggcagatgtatcccttttataataaaacgctcgcttagtcgagggatgcgagatgaggggatacatctaacccttacaaccaagaggctgaccctgacaagcagcatgacagtatcgatgaagaccgagatgctaagaacgaggaggaagacaatgatggagaatatgtcaaagaagaatattacaaagatggataccactatgagcaggaccccaaagtggttcagatgtctaaagagttgctcgagaccaaacaaaatttggcccatcaagagaatttttctcaaagaatggagaaaatcatggctcccctccaagctaagttcgaagatctggacgagggagattcagatgatgaaccctcagtaaaatgtgttggaggatataacagggaaaactcttttgatgctagaacctctgctcttgtataggacaagggaaaagcataagtaggtgaccttcaaaacccttcagctcccgtacctcctcaaaaaaaaaacacgaatctagccaataggccttttcaggcataaaaggccactgacaccttcgggctcggatgcccttctacccagaaaggccttgttgcacaaaaagggactggtatgaaagtactaaagcctaggggaaggaaaaattgccccagtgattctgttaaccaagacggtgggaccaaggaaaaatattcttatgatagttggtccattgtagatctttgaaggtgtcttgacgccaagtaagaaaaagcaaaaagtgaaaaggcaaagccatgagggaatgccctcagaaatcatttaatgacaaggttcgcaaatgaagcctcccagacagtgacaaagaggctagaggagtaaatcgttgctctgacaaagttggtctgaaagcaaagtgggtccctcatcgtgtaaggagaatcacaaaagcttcactcctagagaactttaagatgctctagattgagttgtatgatgggtacacagatccgaagacccacctggccaagtataacaaaatgatgcaggtggcaagcgtaagcgaagatgctaagtccttgtgcttatccataaccctcaccaagtctgctaaagattagtggaaaagattggctcttgtatcaattcattcttggaaggaattgtagtatgccttctagaagcagtcaaacaacaggcaggagaaagcctgaagaactccattcatcaaatgatagaggtagcagctaaaaccaaggtgactgatgacatgaagcttgtggtcctgcaatctagacttgcagttggctccttgctatggggagagatgcaaagaacaagggttgagaaaatgtccaagttcatggcaagagcacaaggctttatcaatctggaggatacctatcaacaagcatctagagtccttccggcaccgacaccgacccctattacttctacttctagattcgcctcacaagttcctatctctagaatatagtacacttcaaaagtctatgtactttttgcatctgtggaggcacctacgcaaacccatttttctaggtatgaagcggcacaaactggatgtagtatcactgtcatacaatcaaaagcacaaatagaagttctagaatagaacatgagccattcacaaaacaagagaggaggaaagggtcaaaaatgaagtgaaacttcaaagaagtcaagaaagaagtatgaaccaaagtacacatagtactgcagcctggtggatactcaagagaatgtgtagcgggcaacctacaacatggtccattatagaaagcccccaaagatgccccatgggggaagtacaaaagagatccaaacaaatggtgtgagtatcacggagaggtgggacactcaaccaatgaatgtggcaacttaaaagatgagattaaaatgctagcaagagccagacacttgagacaatgggcctggattcccattatttatcctggatagggggtgactcacggaccattgattgttccaggacaacatggtatcataaatcctctgcaaggagtaggtcaccctcaagctcctagatcactactctcggcactccctccactgccatctcaagttgtagtagctgtattagctccgggactaggaaacccatatcctctaggtctagctctgccaccagtagacggacatgtagccacaaactctggaggactacatattgtgggaagtaccaggaactcccagaagagatacttgagggagctagccggagaaggtaaaatgtgtgcactcgtgcagtcaccagcccaacatcctcaaaccatgaacgaacccatcatgttcatggtagatgatgcaagacatgtacatttcccccataatgaacctttagtcattgaagcccaaatcgcaaacaaaagagtttctagagtcttggtagacaatgggagctcagtgaacatactgttcaaatttgcagttcaagtgattgggctcacgaaggctgacctatcaccttgtcccattcagatgcaatgatttaatggagatgctctaatgcctatgggaaaatctagctcccaatcacgctcaaaggagaaaacaatatttgcaccttcaaacactgcacctttgcagtggcagattgtcccacgacttataacaccatactaggatggccaatcctggtggacttagggcggtaacttctataagacatgtgtgcatgaagcttccctgtgacaatgagtgtgttggagtagtaagaggtgattataagagtttcaggagttgctactgttgggttttatgccctaaataaaactcatttcaatataataagatttacttattaataaagatcagaaataacattttatgtt

SEQ ID NO: 218204 - DNA, 11307 bp, Cannabis indica
tctaaataaaataaaataaatccacataagattatgattttttttaaaaaaaactatataagattaatattataatcatgggaagataagataaatagatgagtattatggcagagataaaagtacgcatgacacaactcaatgctcctcctactttcccacaaattttgttgaaaaaacattcaaaacattattacaaataacagatgctcgattctagaaaaataacaactaaaaacagagattcgatcattctaagtctataaacgttaccttgctttattaataaaacgatatatacatatctcattcgagaagaaataagatcatggcagatccattaacaataaatcaagtattaacggtagtagtggtgttggtggtggtgtgaacaatctcttcttcttctggatcttcgaagtttggatccttaacatccatgacttccttctggaaacccatctcagagtagttagctatttaaatgtacctcattcatgttcaaacaatttttgtgtccgtttaaacatctctttaacagtataataattaattatttagtttgaataattaattaattggtaattataaaaataaaatttaaaaataaatataaattaaatatgtattttttttagaacaaacgctccaaaagaacccacctctcatagcaaagaattccaaagaaagggggagaagacaagtattcattaattaacaacctcagctataaatacaacttggtaactacaccaccaaaatttgctaatatcgaccattaaattatacataacaagggtatgggctacaccattaataattctaaaacaatgagaaatactggaaacttgaaaatgaaataaactacaatcaaaatactgaataattaaacccagaaggaaaccaaagaaatgttattattcatttttttgcacaacacttgggtaatcaggttcaaaatgaaccttgtcaaagcccaaaaggcaaagcttgagcccaagtgtttctcaaagctagagctttagcaacttcaggaataaagataccttccaaatgtcaaatagcaaacacaaaaactgttgggaaaaccttatacaaggtcatattatttttcatgaaaattattaacatgttatctaaaactctaaaattatatgagtaacggaatacttaaagtgattattgcacatcagaaaatatcttctttcattcaatgacttaacccttgttcatatctatcccagaatattatcaatcattaaatttggatttccatagaacttaccaaaatactaatttcatcacaatcttccacaaagattaatcaaattatgtgattatatgtattttatgcattataaaccctatttttttttaatgaaaataggtgttatgattattatttctcagttttggagattttgttgaatataggtgtgatatgcatgctatatgtgaatttttatatttttacatttttgtgctcggtaacagtaaaaatgagtcggatggcaatttgagtcacatgaatacaaagttgtatcaagtaatttacggggcaatattattgaatctttttgataatcagagtttagcaaaataatagaattggactattttacatctagggttacaagataacttagtggggaagtaagggcattttaatcttttttccctaagtgattagtcaccttatttgaagcttttagaaggttgtgactcaccatttattggtgaccaacagcttgggaagaaaacaaaaaataaaaacgaaaggaaaagaaagtcaaaagcaaaagaaaagtcaaaaccaccaaatcaccttcttcttctccctctccttcgtggtttctgaaccagggccaaaactagaagtttctaccattttcaagcatatttcttgcagaagttgatcaaagagttaaactcctagctcctccaaacttctaaggtaaaacctaacccgaatttattggttttcaaagatttttgttagttttcagtggctgtttgtagttagacctgttaagaaagtttaaggaggttaggaaaagcttcttagggttatttaggcctgtttggatgtgctttaggtggttgtagcaaaagttatgcaagtttgagttcaaaaaactcaaacttgaattggttgtataacttgatttctgttgcaaattaggttaaggtttcttcatgaaaaatattcattatgatgtgtataggtgctctgcaaaatttggtaaggtttggattagacttgaatgagttatgaatgttttaaaatcgggcactagagttttagatggccgaagtgggagtttcggaccgtccgatttaggcagaatttggggtccgtttttagaaaggactgtacattttgagacttgttctgggaccctaattgagtgttttcttaatacttagggtattgcgattctatctatcgatatggaaacttttagttgtgaatttaagtccctcaaagtgttagggcaacacttagaggtagtggttgaccgacacacctgaaatacgaattgaggtaagactagtataacacacatacatatatacatatttatgtttgctagatgtatgacatatcagttagaacgatagttggtgtatatatgattgcatcttattattttgaatatatgtgtttggcaattcaaaatgtatgaactaatgctaccaatactagtatgccagagtactgagtgcatgtggtaatatggttggttatacttctaaaaatatgaactagtgctaccaacactagtatgccagagtactgaatgcatgtggtagtatggctagttgtacttatagtatggattgatgctaccaacactagtatgactagagtattgagtgcatgtggtattatgatcaatcgtactatggtcaagaatgcttgagacttagttctacgtgtttgccatgatttatgacttgttgataggtgtatgggcacttagctgcaggtcggttatatgttatgttttatgtttttcttattaagtctatcgactcacaaatgctatgttacgtgcagataaacgcaaagccgttgttgaacgatagtgagtttagagttggatgaagattgtacatatcgagatagtttgacttggactattgaatcttcgagacaactaggactcacgattttgtagtcactgtgtgacatcttttaattatgtacaataaaatgtagatacgaaattccaaattttataaacgtaatgcagtttatgtatttattaaagtttaaattaatttatgtttcattaaactcttattagcaaaataactttacaaaattttttattagtaaaaataattttctttggtcgtaaaaatgactatgaattgcattgtgcgaccataaacgactattatggtaaaaagactataaatttacattgtgtgactgtgatggttgcttagattaaatatttgaaggctcgtttggtacgccgtataagggtcgtattatattaaataattattatattaaataataaagaatattatgtttggataaagccatatattgtattaatattacaaccaaaatttttaatacaatgtatattgtattatttaatacataacaaatggtccgtattagcttgtattataacatttacaaaaaatttaggatcaacaccaatctccgacccgaacccaaacccgggacccgaacctagacggggactcgaattcggactcggacccagacccataattagtgttggggtcgagtgtattgaaaatatattataattttactcaatttattaatacaagtcaattatattaaataatacaccacaatccaacacaacacaatacaatacagtgtaccataagaatcggactcgaattcgggactcaagactcgagacctgggaccgggaccgggacacgggacccgacctgagaccccaacccgaatctggacccagacccagatccgtagttagtgttgagatcgagtgtattgaaaatatattataattttacacaatctattaatacaattcaattatattaaataacaacccaatctcacacaatacaatacaacctaccataacaatgttgaaagagttatttggcaaacttttcatgtgtttttaatttaggtttttaaatattttagaaattcattgctcttacataattaaaattgtgctagtttcttgttcaggtagaaactagaaaccggcgacgaacactaaacagtcaacttagttccgtccgtttgagtgaatggatggagtcgacatctctgcgaattcgaagcttcgaacaacttccttcgcctatggagttcgagtctttgatcgaatcctctaactctcccgccgtaaatttccgattcaaccacataatttttctcttgtttttttttttgttcaatcaatggtaggactctcaatctttcgtttatctatggcatacaaggtttttaaaggttgcgttaacgactggaaagctttttccaagtggaagccctccaatggcggtctcgactatttgctggtaaaactgtgtgtgttttaatttttttagtttgtttattcacctaagggatagctcacttgaaaatttggaatcctttctcttctcaattgtttttctttcttaatggaagctcaggaacgggtaggatcatgtgttgtggaggctatgctatctaaatctgcacccgtcttctacggtgatcttagaagccatgagagggtaatttcacgttccttcccgttaatggcattgtaagcattggataactgtaagattttaattagcttcacaacttactatccctctactttttttaggttgctttaccattttctgatttcattggtttctgcaagctacgtttgcaaaatgctgaagatggtgccggtagtagtttcgaattggaaagccatggtataacagagtctgattctgttgatgggtgtttgaccaatgacggtgttgctcaacaaatatacttagcacaggttcgatttcaaggatatagagattataatttttctttccttgttatttttaggatcatgtttgtgtcggttttgcttttgaggtgtacttttcctgctcgattcatttggcacaagaatttatgtgttctccacacaattcagatagtactgttttgcaaatattgtttgtttgtgtatatttcaggtgccaattctgcacgtagaaagtgaagataaggttcagttggaaacactgagagaagatattaatacggtttgtaaatctcttggaccagtctgtgtttactactctatggccatctaacaaagagtcctttgttctcactctgaatctaactaccagttgtctacttctgcagcctgtatttttgaaggaaaaggttttagcttctgtcaacttgtggatgaacagtgctcaagctagatcaagtactcattatgatccacaccataaccttctatgcttagtttctggctgtaaacgaggtaaaactattgtatttagggaaatctctaggtggtttatttcaacattattgcattagctgttacagaagtttggatatctctgttcgcttgcagatgtttcatcttttggacgtttatatatatgtatatttatatacattattaagacattttataaatttataagtctcatatatacttattaagactttatatgttcaaccaaacattactttttatgttctttgaaatcataaactggatttttatgccacaaccaaatacagctatataaacattacaatcatatcctcctccttacaatctaactattcagaaaattttgaactcttcataatattatcatggcccatttagatttgttatttattaaagagcagatttagctattttgacaagagctggtttttatgtcttgattgcaagagtaatctctgtctatatcctatgcatattttctggaaaataataaatcattattttctgaacattgacaagcttgcgttctttacagtgcttttatggcctccttctgccagtcccatgttatatcctatgcctatatttggggagtcatcaaatcataggtaatccaataatctattcttttttccttgtgtgcatatcaatttttttaatttaaaatttattgtgattggggtgtgtgtgagatagtaatcaggtatctgttcttgatgtcttcaacttttaattacttttttcctttccatttcttttgtttttggttttgtggcagtttgcttgctgtagaaaatccagatttgttagtttatccacgagcaaaatgtttaatggagtactcacagaagattattctccatgcaggtgatgcccttttcattcccgaaggatggtaagctttaattcagctctgtgaaactgtttatttgatttggagccttcttgttcctgttataatcttatggagatacattgtgactatgatctctacttattcttgttacttgctcattatctgccagttccaatcttatttcagttgtttatttagttgatgtttatttttactagtactatgaatcctctattctcgagcaactagaattgatgcatgcatatgcatttattgatatttagttgctaggatccttgttatgtgatttattttgatcgtcatatttttttagtctctctagtttgttacttgaatagtgttttgctaattgattttcttacataggttccaccaagtggatagtgatgatttgactatagcagtgaacttttggtggccgtccaatattatgtcgggcatgtcagaacatatggatgcttattatttgcgaagggtattaaaaaggtggtggttgattaattcttttaatgaaatgatcgggttagtaatttaaaaactaacttttgattgtttttctttatatgggtacgtgttccttctttcaattcaaatttacatgaaagactggcagacaaggaaatggtatgtatctcattcacatatttatatatgtgtagtactttttctttacttttccaaaaaaaaacgaaaaaaattgtatttgtaaggggaacatacaagagcagaaaagtggtcgaagaaccacaaaaacagaggtgtaatgtaaaagtttgaagtaaaataaatgaagtagagttttggtgaagtattttaaaggatagagtagagaaaccgatatgagtgctctaactactttgctaatatacataaatagtcagccaattagctgttctacagctttagaagagtcattcctaaaatagtttaaattttcctacatcatcccttaagaaaaatgtgtcattcgcaaattgcatgtcggaattttcaaggaacaactgaccttggaccaatgggttacttctttatccatttgttaaccatttaacttagtttatgcttcaatctgttttatagtctgggaaatcaaattcactttgctttctttttttaatatttgtaatgcaatgtttttactgagcagtactaaatatttgtttgcacatttttaactataacagaatgaagtcctgtgtaagttatcatcttcagagatacagagtatgaagaggcatacatgtgcactgcctagtagtggggaagcaggtaaaattttttaggattctattttgagatttggtttcattttctcgtggataaaaaggtagaaatatacagctgttttaatttgatatcaggttctagctccggtgaattgaatttggcatgtggaagaaaaggtttcaaaggaagagagctggagcagaaaactaagttgaatgatctggaatcacatgccattcaggctcttcacgagcttgtttctttagttcatgatcgcattagcgctgcagattgtggtgaacttgtgcaatctgaaccaataagaagttctgctgttagtgctgaagttgaaagcaagaaagctacgacaactaattctcttagcttagaagatgatctggccgctaaaatcctgtggaaccttgaagcaagcactcttgaaagtgtctttcttgccatggcggtgagtatactttcaatctattttgtgtacacagctcatgtctcgtgtagagctagattttgtattttggctgcaatttataaattgtacacccatgaggccttgggtttgatatcttgtggggacctacctaggagttggactacaacgattgttggttccagtgatgggacatatatgatatatttattcgtttgtatctattgcactttaatatgcatcccataccataaaggtgggatagttcaagaacaaaatgtcagtgaagaaaggttttgctttctaaactataaagcagtaataaaggaatttagaaaggtggcagaatttttgtgtgggtggtgataccatttttggaacttgaattcgggtgctataaaataatgttctggagttctttgtttgcttttattttgaattttgttctttatatggttctggagttctttgtttgcttttattttgacttttgttctttatatggttgtggggctaactgtttggactacgactactaagttcaagaacatgcctatatctgatgcagtcagatataggtttctggaacatttgggtagaaagagtatctttggttcaactctatcagtactagaagaaaatgcagattattaaacaatggtgatgctagagttttaatttgcagtacatttagtctttcatgaagtgtttaatctgagattcactgactaattcttattttgttcatggaaagttagtgttttatttctcgagtctttcttaagtatttacttctgcacatatctttttttcagtttaacttcccaagaactctagaggctttaatacttcacttgctttcaccagtagcagcagaagtccttacacgtaaatttgacgagcttgatcatctgaccactaaggaagatcggtacatactagttttctttattcatatgaaaatttcttccctacgtagtgacaaaggaaagaaatcctaaattaattatcattacaggaacaagttctaccaggttttctatggtgcctttgatgaccagtttgctgcaatggatgctattctaaatgggaaagaatcattttcgctccaggtaataagtcacttctttctatcgaaccatttctttctttcaaagcttcaacaaatatagcacctcaatttcttgttggagtttgcaattataggtttgttgaacattaaccttctgaatgaaagagtattgttgataagctcctggttcagtgattctcaaataatagaacactttcaatagcagcagaatacaatagagaaaataatggaacagtagcaaattgtatgaataatgatattatggaagctttattgaattaggaaaaagagactcaagtctctaacaaaagagagagagagagaactctccatgatgctgataattatctcaattcttgcataaaacaaaacaatagctcctctttggcactaaaaaggcttccctcccaaaataactaactgccagctcaaatcccaatagaccaagcttaaccctgacctgtgtatcttgcaccccttctagttctagtgtaggtgaattaggtctagcaatcttgagcccgtgagtccgagaaaacccttcagctccttaattgacgtaggcagcggccaatcaagcatcgcttgacttgaaagaattatgcacttaattgataatgcacatcaagtaaaaaaaaaataaataataataattaataaaaaactaaaaaaaatgggattccttctctttttatccacagattatagaattggaatcatttgaggagccttattaccggattaatttgggattgagagtacaaaactctttatttttggtgcaggcattcaagaatgtgctggacaaatatttaggagtaaacttcgttgggtcttcaataccagggatcagatgaagtgtctgttgagccacaatactttaaacaagttggtcctctagaatcttaagggagcaaattaatgcatattttctgtaaaccttttcttcttttaaaattaattccaattttgactataacagtaatgctgtatgagtcctaacatgttttttttttctttagttggacataccttgtatgttttcatggaaaacaatttgatactttagtactagctttctacagctgtttttttggttaataaataaatgaactgaaaatatttgaggtatacgacaacaaacagaacaggtatgtcgaataattgagatattatatcaaattaggttaatgttacttttatttaattatattcttagttttcttttaagttgtgtgtattttcgatataggacccgaatttttaaagcagccaaattgtaagtccgaactgttttttcttgtcatagtcatctaaaatatatagaggttgatcaagagggacatgtcgaagttttgtcagtttcacaatgacttcaaccacgacaccaatgagtttcaaaatttaaatagggagattgaattcctcatagaaaaaaaaaaatcctcatctgtgttgttatgtgtagaacgatcaaacttaacaacaaggtacctaaaatggagacccaatgccatctccagtggtacgtcacttaggggtcattattggcagactccatattgcaggcgagaccagcaaagctagggagagctatacttagacactccgtcacgatctcaaaagcaatatcctagctatcaaagaaaagggctctaagcaaccaaacttggagagcccacgatctcttttacagaaggagatgctgcccaagtcactttcccgcacaacgactgttatatctcagaaacctaattataaataattacaatttattatatattatggattaattaggtagtaataagtaggattatgatcttactaacctaatttagcataacttataattttttgttataagtggataaataagcgtaatttgttaatttatagagatttatttagaatatgtggatataatgtaaattatttgtgaaataaaaatatttacaggttcaacgaccttggaaacccgattgaaggctaaaattattacaacaaaatattagtgagattattgagataagttaattttaaaattaatgtggtattttgaaatactcagaatttaccaaataccctaaaattaaagatttctgagtggctaaaaaataatgagataactattaataataaatttattattattattattgtattatattat

SEQ ID NO: 218205 - DNA, 5546 bp, Cannabis indica
tctctaagtttggtttaaggagaaaatataaaaaggtaatagaaaagatatattattatttgtaactgaaaatatagttttgggtatataacacctcggaaagaaaatttcaaaaatctcaaatagaaagagaaaaggaaaaaacgaagatctagttgtggtaggtcaaaccgatttctactctgcgtgtccgatctagcttttccttcttcctcaaaaaggatagggttttcctgaattttaggttttttaatcttccatttatcttctctaccttctcgcctttattctccctctcaaaggttttgcctctatctttctctgaactagggtttgaagcatttttattgcgtatcttccaaacgccgattatacatgtatatctccattctagtttatgggctttgagttacttataatttttttattaatgtttttttgtagtgtcttgtattttttctttttttttttacttttcttgatttttttagttataagatttgtggtacttttgtgcatggttttgttttggtagttgaatgaataagattaaggttttgccgtaatgtgttaagatctttgattttatgagtttgtttgtgctttactgtttttctcccgctttctatattgattgattgcaatcttgtaatgttcaatcaggattcgaccgagtgaagctatcaagcataggaacaaggaaaatttcgtttgaagattcgatatttgcttttgggtgtttagtgcgttaggatttttctttgatattgttcgagcatattgttttggagaagaaggggaatttgcagtgatgagcacttcatgggcagattctgtagctaactctcaatctgagagtgcagtacagtgccccctctcgtccttcagatcatcatatgttccaccacatcttcgtaacagaccagcctcatccgatgcacctgctgtctcgaattctgctccattacaagccggcactggctatggtgtaccatctactgggtctcgctggaatggtggtcctcggcaggatgttgggcgccctggatatagttccggtggtggctggaacagcaatagaggcagaggggggtccgggtgggaccgtggaagggagcgtgaggtaaatccatttggaaccgaagatgatgcagcagaaccttcgtttaccgagcaagagaacacaggaatcaactttgatgcttatgaggatattccagtggagacaagtggggctaatgtgccaccacctgtgaatacttttgctgaaattgatttgggggatgcattaaataataatatcaggaggtgcaagtatgtgaagccgactcctgttcagcggcatgcaattcccatttctctagctgggcgagacttaatggcgtgtgctcagaccgggtctggaaagactgctgcattttgtttcccaatcattagtggaattatgcgggagtctaatattcagaaacctcgtgggactcgtactgtttttcctcttgctcttattctctcccctacaagggagttatctagccaggtgggataccaaatttgtacttttagagaatttttctataagagacgtatttgtttcagtgtgtaatatacttgttatttttgttttgtcttccttgcagatacacgatgaagctaaaaagttttcatatcaaactggtgtgagggtggttgttgcttatggaggagcaccaataaatcaacaggttctgataacttcattttattcttctttgatgctgttaattttgattggatataggataaatttgttattgtctgttattttcactaggaagtttataccactgctttctttttccattactattttattgattcaagagttgataaaatggaattaaattctccattatgttataataaaactggaatttcacactgattataatttttttattatatatatgggaacctcactgtagcttgatttgggtgactgatcaggcgatgcacctcttgttgttaattctgtttatttttccagttgcgagagcttgagaggggagttgatattcttgttgcaactcctggaagattggtagatttacttgagagagctagagtgtcacttcagatgatcaaatatttggctcttgacgaggcagatcggatgctagatatgggttttgaacctcagattagaaagattgtcgagcagatggacatgcctccacctggcatgcgtcaaacaatgctattcagtgctacatttcctaaagacatacaggtttgtctttgttttttttagtattaaaatttatggtgttgagtactattaattcatctgtgtgactggatgatgtacttcatgtgctgttagcattcttgtatgctttttatgtttgaacaggtgttcacacactgagggtttgatcaaacacacattgatagtactactactatttgtacttctgacttgagcaattttaatcatctaactttacaatccttctactttgcttgttttgtagagaatggcatctgactttctttcaggttatatatttttggctgtcggaagagttggttcaagtactgatttaattgtacaaagagttgaatttgttcaagaagctgacaagagaagtcatctgatggaccttctccatgctcagaaggaaaatggaacccatggcaaggtaatttcagacagtttacatgtttaggtcataagatgcacattgcttggaatttcttttgctgctaagtattagctttttatattgataattgtgccttgaatatgcagcaatcgttgacattagtttttgttgagacaaagaaaggagctgacgcattagaatattggttgactggctctgggtttcctgctacaagtattcatggggatagatctcaacaggttagttatacttgttcctctcaaaaccaaacagttttctagttttccttggatgtgtttgtggtcatgtgtgcattgcttgataagtatagtttttagttgtttgctctgagaatataaatttcttaattttacttgacaactgtcttatttaggaaagagatagtgaatattattattgtgaaataccaacttaaaattttgctcgaggatgaatatcagtctgacatatcaaatttcaattttgtttaacttatgtgaaaagtttatggtgagtgagatcagcaacgttgatgattttcttttatggcgctagtataaacaacattgagattggttaggttgtagtagatgacaatattaagattgttttttgtaggccatttggtgttttcagggacatttactgaaacaccttaaataagatttagggaagaattggattggtaacattgatttgatttgttttgaaagaatgggattttgggcaattgctacttgtactagagatcatttggtcggaacttggggtttttcgtatttaacttgctgcaggaaaaaaaaaacccttagaaatggaagaaacacattttgaagatagccaattttcagaactagaaggatccatgaaaggaggatctggaaaaacttgatgaaatggaataagacgagtggatggaaccaaaaaaaaaaaaagaaaaacagtatcattgttttgattagaaagtgggcagttgttagtgtgaatgcttttaacactacacaagattgcacataaaaggatgcttgtgaagtttcttacacattttgatgtgctctccacccacaatgcttacagatgcttccacctaaagtatatatgaatattttatgtatcaaacttctgcaatagtggggttgactgcaatttttcactgtaaaactttatttttaatagaagcgtctgtaaattagatttttgagttacattgctgggatttgatcccatgacccatccgcacacacaccccaatactctctatatggctacttgagttagcctcaagtggcaggtaaaactttatttaatcacatgtttatatgcaggaaagagaatatgcattgaagtcttttaagagtggaaaaacaccaatcttagtggcaacagatgtggcagcgcgtggtcttgatattcctcatgtttctcatgtaataaactttgatcttcctaacgacatcgatgactatgttcatcggatagggcgaacaggccgagctggcaaatcaggtctggcaactgcttttttcaacgagaacaatgcatcattggcaaggcctcttactgatttgatgcaagaagcaaaccaagaagtgcctgattggcttactcgttatgcatcaagggcttacggtggtggcggtggtagaaatcgccgtggtggaggtcgctttggtggtcgtgatttcaggagggatagttcttacaataggggtcaagattactatggtggaggtaatagtggtggtggtggtggtggtggcggatatggagctggcggtggttatggtggtggtggaggttatggaggtccaggagtgagcagtgcttgggattagtctcctgcaacagggtttctctaattttgtctcggagaatatatattttttcttctttaaaattcaatggaaatttctttttcttttttcttttcctagctgttcattgttgtgatcttcttgattctgatgtggggaatgctttatccaatttgtgggaaggaccataggttttggctgaagggaaggccttgcctgtaaccagagatgtcatagtagggccaggttgatggtgaagaactactaacaattttggttacgggatagtttttgcgtgttttgtccttatgaacacaaaaaagtacatgtctgggagagaccgataaatatcttattacttactaacccgggcaacttagtagaaaagctcagttagagttaggtacaatacattctacatatttagtctgtagatgaggctgacgctttttttttttcttataaatttcttatagttttcccaatcccaaaccctcccctcaaagcataaatttaatgtattctgttttgtcctggataatgtaacaactcaagttaaattgaaaacgtccttttctccttttctgtttatatattattattctttgagattcatctgttatggttcaaaatgggcattttatgtttgtacaatttacttcacaaaatcttccaattagtttatgacacgttgtttgatactaataattggaacttgtcttcgtcttttgttttctcaaacatttacatgtcaaacatgatctagtcgaaatagtatttgcaggtaatgtttgtttatgatacttcgtttacctgctagatcattattggggttgggcttgtattgtgtttatatttgtgcagattcacatgttgtcaaacctaatccaacttgtacatatagagacatatcatcctaaaatcaaaattattccaaaattactttttcaatctctttctagttcttttaattttaatattttattaaagcataaatctacaaattaatattttactattattttaataatttttcataaaaaaaaaaagcataaatctatatttaata

SEQ ID NO: 218206 - DNA, 3573 bp, Cannabis indica
atggcaaaagttagtataccatctaaatttcccaataaataagcataaaagcccagcccagcccagttcgtagcccagtccaacccagcccataagacttgattcgagggagagactgagagaagcaaaagcatcaaccaaacaaacaaacaaacagacaaagatcaacaatggcggaccaaaaccccaacaagaagagagtcatcgtcgaatccttaggatggcttacggaatcctcaattatgcccagaaaacaccgagccatcgccggtgtcggagcttcctctatcctcgacctcaaggcccagctctaccactcccaagaggaagctaagaaagccagggaccactccgcttcagatccccatttccaacgccccaaaaagaagataccttctcatcatcctctctccgccgccaagaactctggcgttgaagcccgtgctttcaagtacgttactctattttcattttttcgattcaatttttgttggttagcaatatatgcaaactattgagatttgtcattctgcaattagctatttggtactcgttttcatgatcttgcttgtacagatttgaacttgcttgaacaattatgggtagaaaattcgccaaactaaccacatcgaatcgaatttacactctgattttgtatgccgtatatgctatttttttataatgcaatgttaaattttgattcatatcacagtttatatgcaaataaacatagtacttattagagtatgatatatgattcaattacagtgtatcaagcggtccgtacattctgatatgagaatgacatgatttgtagtgactaatataccacgtaaaatatactaggatatgggacacaactaatgaaataacagcaagaaacaaatataggaatagatgaaaatggatctagaattgatattactaataatattggagaattacagtgataaatctagacaattcgagaggcctaggtcctctccatgatgtaatatactcacctatttatactattctattcccactcaaacactatccttttaataagttaattacccttttgtttaatcattgacttaactacaatgatttgtagtgactagaacttcagattttgtgggcgcaaaccatatgcttgatcggtttgaaaattaataagttaaactaagccaagatgttgagtagctgcagagatagaggagagaaaaaacgcttacaataagtaaactgccttcactgtaggaaatttgtctctttccttgttttgttattagtaagtaatagatgataagatgataaatggttcaaacaagcataactgctttctaatcatatattttagtttcttttaggaatcttctatctttttttggacattaagattaagttgtcttgcttctagatgattaatttttgttatttgaccaataattagagacaagcttgagctaaaagcagttaaggatggatcagctagctatgctgcattagaaaaaaaggctgaattgtatgagaagctaatgaggggggaattgtctgatgaagaagagaaagagaagtattctgtgaatttttttgccaagaggcttgacgatgatgagtcacagaagattcaacagcctcaatcttctgatacactagcattggaaaataaagatgctgacaatgatgattctttgctgtttaacatgaaacctgtgggacttggccgagcagcctcaacaatggacaataatgaacacaagcgttttgtaaggtactcgtttaaagctatttctatgcactagtttatttggttgtatgcatttctttaaaaaaatttatggattcttcatatatgaatcaatgacctataatggttcatattgtaaaacactcagaaaacacaagaaacaaattacataatgcagtaccagtttctaacaaagtccgaatataaaacatttttgaattagtttacattgaacaagcacagccacccaaatcctgatcttccccgataacttttacccagattcttcttcgttatcaattattctcttatttcactctagccacgattcccaccaccttccaaagctgctgctttcattgatcaccttgtataaacatatatagaatgtctatgcattccccattccatgctgaaattatcgctttgaactttaaaccttaacagaacgaacaatgaaggaatatattttctgtgtttgatttacacaacatgatggattattgttggttttgttcgttgcataccattaaacatcattgtattactattattttgaaaagtggtcggttaatttattattcagaagataccctttgagaatatctcaattttgtaggtgttaggatagacctgactacactctgtctattattttatatcaagcataaaagtgtatggttaataaacttgatgagcaatttcgtatttgattggaaactcgatatgtgaaaataatgtttgatgtgggggggttcctccagggaagtacatcaagaagcaaatcaagcaagagagaaggcatctgagctgaaatcacgaagagaacaacaggtgaatgctcgtcgggaaaaactaaaacaggcctatcttcgaaaacagttagacaggaaactgaaagctgcatcaatccaatccagttctgacaaaacatgatatataagatgaggaattcaggatgtactaccagcaatcttaacagtttttagtattacactgtaactaatttcttgtacagatatattatggtttaggaattaaccagagttatgtattgaatttagattatagtttttgcttattttgtctatgaaatttaatgtagggaaaaagctaaatggggtagtatggaaagaaacccattacttggaatggaggtaggaattcaacaatttttttttaaaaaaataagaaattaaattaaattgatcaagtagatttgttagactaatattgtaattattattatttaaaaaaacaactaaaattaagaatgtgtgtattgaaaattaaaatattactattatttttcaaaagtaaaaataaataaaatgaaaatgaaagggaatcgactctgctggggatcgaacccagaatctctggttccgtagaccagcgccttatccattgggccacagagtcaatttgataggtaaatgtaagacgtgattttatcacaaaatagttttgttaagtaaatatattatatttcaaagaatattatatgattattccattatacattcattcttcttctaaaataaaattaaattatccatctattagggttgatcataaaataatcaatccaattcacaattgaattggattggaaaattaaaaaatatgtacttgtgtggatttgatattgattgacatgtaaaagtaattaattcaagaggaaattacatggtatacccattttactttatttgttttcatttttacttttattttcatattctttaagatatacccacttttaaagatgatatcctcattaaacctcttaagttaatgcaaattatatggtacgcttaagtagagagtgagggtat

SEQ ID NO: 218207 - DNA, 4148 bp, Cannabis indica
agtttggttatctttctcaaaagacctgaaattatttctctgcgccttccacaagattcaacatctatccattcaaagaacttacatcctccataagcctgaataaattttgaaacataactactgagtgaatagaaataataaaaaaaaaattaatataaggagaaaaatgtaatccttacacttgaaaatctgcacctcctgaaacgacgacctgggtttgcctatgtgttcgatgttcttgcaattcacgggataccatagtagcaattttgaggttccctttcatggattgaaccaccagctactctcaaccttctattattgacaccaaaactactgtaagaaccttccccatccattcttctcaaccttcgtccaagcttcgttgttcttaagcttcgtccatcatcgtcgttctcaaggcttcgtgctacgatttagattcttaaacattcgacctagggatttaggttgatttagggctttgggttttgagtgtcgataatggttctgaaatgagctaagattttatttttttgaaatgttgaaaggtttaagattaattttagatttgttttattaatttgttttatttatgttttttaaggttttattaatttattttacttattagttttatatttaagggaaaattaaaaagaaaaaggggattaaatttggtgcgtccacgtgtcacgttagttatactaacgaactgagtatgcatgaacggacaaacaactttgtcgaccttaggtattttcaacgtcaatttttgaagttgaggactaatcggtatcaaccacaagtttttgaaacttttaccgcaattatccctaaataatataatgaaattatataacatataagtttctttgatatacttcaataatatctaagactaatatgtaattgtactaacaaccatttagcaatatcgataaaatggagcgaaagtacaaagctaatcacatatgtactacactagtcaactgtgtactttgatccctctaaaaaagtcaactatatatacatgcaattatgagtaacttttacttctaatgcaaatccttcctcgatatctatacccaaaaaaaataaaaataaataaataaataaacacacactggctatattatattagaaaattcttttattagtattttttttattactatcatttagtttttttaattactcatataatcctatatgttgcagtagttatatagaatcatctttcaattttattttttagaaaattttaaataatttactaaaaataagttcaaatattttgtttagatccttatttttcttatatgtatcatcattataaattatttaaaaaaatttaactaaaaaactcttttaaatatacaaaaacggataatatatcaaaattattactattttaaaaggtttactatagaattactagataataatacatgagtctccacattttacttcaatttttaagtaagggacagctggacaggtacgtttgaaatgtatgtctgtgtaaaatagatttacagttttttttttattttaatctatataagataaaattatcacaaaatcatttatatacagtagaacctctatctaagcatataatataacaaaccaaaaatcaaaaaatatcaatgtaacaataataataataaataatcattaatactatatcataatagaaatattttagagtaagtataattttacacatgtattatataatttaaaataaaattattaattttacataaataaatttacaaaatacatatatagatgtaactatttttatatagaggtatactttgttaatacgacacttagaaaatgtataactaattataatttagaggttatttatatttataattggcccaaatcggaacttgattttttttataacaattagaaattattttaaataaatattcttaaatagaggttcttgtgtatatagcatgtattgttgtatttagtttttgtagggtatagttatttcatgttcttacactgcatcagttcccaatgattttaaaagaatatccattcattaaaataatatatatatttttaaatgacgatgataattaatgcttacacatttcattatcagaataataaattgtcttcatcacgagaatgtcaattatattctttttggtagaaaatcagtataaaggttactaatgggacaataatattacatattaatcataggaagccaactctaattctcaatatatataatcaagagggcaatataatttgtaaagtaataatatatatgctcaattttttggtcttctaagttctgaattatttatttactaattttaatctgtaagtagccataattataaaagaagtgtcaataaataaaatccatttttgtattttaagcatgaatcatgctctttcctcatgacacatgcaagtatatatatgtatatgacatgtcatataattatgcctcctaataaggtgtagatacaatatatacatctatatataaacatacatctcattaattaacactctaatattatagcaaacattctctaaactgtttctaggcttatctagaaaagagaatcgaatgaagatggataaattcagggtcttaaatatgattttccttatgatgtttacagggtggttaatggtttggattttgttacctacaaaattttacaaactcaagtggacacccaaattgcaaagccaccttaactcaatatactttagagaacaaggttgacatacatataacttgtaaatatattcttagaagtattcattctttctaatcattatatcaacattattaattgatttgcagggacaaatattctgcttttctcattcccaataatgttcatagcagctttgagctgtgtttatctccatctccacaagaaatcacctaactccaacaggtatatagagattgcttaacttaattaaactacaatattatgatttatctattacagaatcgatacttattctaatactgaaatgctaaacaaagagtgtccaactctatcttatatatacttttataccattgctcctaattatctgaagacttctaattagtatgattgtatacttaattattataattatgatatatgtttcagcaatgaaatgaggggacttggtcgtcgtttagcgttatggagaagtccagtgagtgtaaaagcacctctagggattgttagctcagtggagttatgttttgcagtcatgtttgttgttctcctaatatggtcactagccaattatttatatgtcagttttagtggccacctccacatgcatgcaggagacaaaatgtacgtaatatatatttaatctcttaattaatcataagcttacaaatatatatattaatttgtttgaaggtgttgtctatatatatacagatggcaagcaaaatttaggagtgtatcattgagacttggatatattgggaacatatgttgggcatttcttttctttccagtgacaagaggctcttcacttttgcctcttgttggactcacatcagagtctagtattaagtatcacatctggcttggtcatctatccacagttctctttgctgcccatacagtaggattctttatttactggatcatggccaatcaaatggttgaggtaattataatatgatgtgccatacataacatacttgcatatatatatatatatataacaataccttacaattatatttctgttcctttcaaaagtcttgctgtacatttaactacaatatagaccattatataaaataggttatttaggatttttgtttccaaactatgatctatatatatattattgtattctcaaattttttagtgtgttaaaaaaggtctctgaactatttatactagtgttttaaaatgatcattttgtcaaattttgttacatgtcacaaataaaataatgatgtaattatttagataattttcatatgagcaccatttaaaattaagaatatgtatttttaaaggatcattaaactaaaagttaacattacaaaaaactactatttttagtgataactttttagtcacaatataaattttttgtaactaaatataacttttagt

SEQ ID NO: 218208 - DNA, 8810 bp, Cannabis indica
ctatgcttatgaccacacgacctttttttttatgtcttgggcattttgaagaagatctaggatttagttagttctttttagcttcagttttacaatattgtgcaactgtttattaagtgtaattgctttactggctgtttaggtggagcaactacataagatatacaaactatgcggctcaccatctgatgattattggagaaaagcaaggttgccaaatgctaccttgtttaagcctcgagagccttaccggagatgtataaaagaaacattcaaagatttcccaccatcttcactgccccttattgattctcttcttgcaattgatccagctgaacgtaagacagctacagatgctttacgtagtgaggtgagtgttttcccgctgctataatcagtatcaatatgtctatattgatactcttttgcaacttaaagtgaattttaatgtcttggaaaatgctggatgaagaaaaaattatgttcaaatatgcgctatgactatgttaacctttgctggtcccgttgtacaaatagttgaaacaactgtaacagaaattatttgtgattcgttctccattggagcaaccgtctctcgtaaatagttaaagcaatttcttttcaatcatgcaactaagccttattcattttggacataggcattattgagttttccattttagaatgataattcttgcttgtttgttgtagttaattatgttttaattaacagtatgattcctagccatttcctgctgcacttgctttaagttggtcttaagtttctccagtagttcaattatggtgctgtatgatcattttgcttgtcatgaaaggttgcttgtttaacaaaaattagcttttttgtggagaaaatgaaagttgaaatgccttttgaagtatgtaagtatattcttaactttgctcttgctttccgtttttgtagttcttcatgacagaaccatatgcttgtgaaccttctagcctcccaaagtatcctccaaccaaggagatagatgctaagcgtcgagatgatgaagctcggaggtataaatgatttgaactctgcttttgtataagaaaagtttacctatgtatttattggtttacatagacattgcgcaattagctcaatcctttcatttattaggatatcaaataacttggatgtgcttaattttttaaattgttatggatgatctcgacgacagcaatagtaatacttataaatagtctcattgacaattttttgtgtgcagacaaagagctgctagtaaaaaccagcctgaaattgcaaagaaaccacgcattcgggagcgttctgttagagctatgcctgctccagaagccaatgctgagcttcaagctaatattgatgtatgtcttttaattccgtcttgcatttttacgaaagattttatgatatagcatttgctctctgacagctcaggattcatacaaaatacaaatctcagttttacatcaatgatatacataacatatgtttggttttaatctcaacagcgacgacgtctaatcacacatgcaaatgcaaagagcaaaagtgagaaatttcctccaccacaccaagatggggcagttggctttcccgtgggatcttcacatcatattgatccctctgctgttcctactgacgtacctttcagttcaacctcattcacttaccagaaaggaccaacgcaaacttggtcaggtccattggtagactcaaccggggctggtgctacaaggaggaagaagcatgctgcaggtgatggacgagatacttcaaaatctcagtcttcccatagagatagacacgaagatgctcgagttaaaggaaagaggagtgtggcttagactttcacactgcatacaatcaaaatcattgcattggtctgttgggtgcctctctgctgtctgctgatataaactttgggagtggcagcaggctattcggggcaagtgaataagcaaatcatcacagcttctcacaggatagtgtaactgtaatgtttggaaaaaaaaaaaaaaaagaatgaaagaaagaaaggttcagggataaaagcaaccaatttttatttttatttttattttttataataccccattttcatttttctctccttttcttttccccttccttatctcaaagaaaattatttttgttgaatttgttggatggtaagacactgcctctattatgtatatcttgattctttctctggagattgtggtgttgaaaattgggacacttcgttaaatagtgaagagatctaatatatgctcgagagcctctttttatgtctcattttcttttccttctatgcatttgtggtactgtatcattttttttttattattattttaacaaacaatatcagaaggcaaatccttcattacgttataccaaataatacttgtagtcctttggtgttaaataaatatttatttttttttttttttaaaaaaatttacaagaagaaattgatagtttggtagttagtaggtataatgaaaagggaaagtatattgttacacagctcaaaaaccaacctactctcttcaacacatggcataaaaactgtttggttggttaattggggtgacttttatgcacaagctgacatgaagattaattaattaatgttaacctgaggaaaaaaaaaagagaaagaaagttgtggcttgcacatagaaaagtacatggcagtgcatgaccacatattctatggtttgatgaaaaaattgagctatatttgacataaaatatagttttgcatgtgccttaattatccataattggttttctcccaggagtgagatgttggttttccaactgtgagttattttttagctctttttcggtcccaggtcttgtttggtctgtgctatagatggagggtaatggaacagttccggtttcgagggatgaaggtgagacgtcgaatccggtggatgacaatgtcgaagctttacgtctacagtttattgaagatgcttcactggaattagaagctgatgttgagattaacgaagagttatctaaaacagccgttttggctaccctcgtgggatccagaagcttatcaaaagggcggatgaaacaaattttatctggcatatggacgttgaaaggaacttggagaatcaaaacgatggagtctggactgtggggttttttctttgacaatatgtcagataaggaagaaatactgaatcgaaggccatggatagtggcgggtcaactccttaatttaagggattggcccgtggatggccattggcagggaagctctatgaacaaggcggttttctgggtggagattcatggattaccaacacctttccttgctgcccagaattctgcggtgataggggccaaggttggagaatttattgaagctgatggggtcaacaatagagttattgccaggagaggcttcctcaaactgaaagtggatatacgaatcgacatgcaactgccggcaggattctacttaagtattgatcggggtaggcgcgaatggattcagttcaaatatcggaagttacctaaagtctgctttaattgcggttttctcgctcatgatagtagtatgtgtacaaagcctcgagctcatgcctaccctccggtcggaaatgctgttcctttatacggaccatggattaaagctacggtgccgataaggaattgttttgacaataaaggcccaattctgatttgtgaaggtgaccgaccgatgtcacagcagggaatttcgaatgttcaggccgatagtacggaaaaagttatcgtgcatggtactagtgatggtgtgacggccactacgtgtacgacggatacggagattcctcctacaaatcgaatgacagctgcaacaaacgaaaggaggacacctggcaagaaggttggtgggggaaatgtggaaaacgtgacccatcctatgaataaattgggtattaatcctgatgatagtaatgtgatcctaagtatgatgccccatgttgggccagtagcggcccaaatgcttgaaataccccatcaagaggtttgcaaatctagaaccccacacttacaccccgagcccattatcgttactgggcccattgaagagattgaggggctggaaaaggtggccctgtccaacgaaaaatttgagtttgggcctaatgggaacaaggacccttggttccacacaaaggacataaccactttagtggggtctggttcaagctcaaagaaacgcaaggcaacagggagtgttgcacctttgataatccagaaccaggggaatgctactgggggtcgatcattcacgatggggagtgcgcctcctcgagcaaagccaagcaattcaaagaaacccgggaatcgcaaaaaatcgtgctcaaaaaatggtggagaacaagatcagaaaatccagaaaagcaaggatatcacgggtatggccactaactccatctctgaattgggggatatgtttattgaagttaaaattgatcagaattttttcaagtgggcgaggaggcggcccttatcaagccccccaccgtaccatgattgccttatcatggaattgccgaggtcttgctagacctgcggcaatccaagctcttggagtttggattaataaatggaaggtggattgtgtttttttgatggaaacaaaaattggggaagatcagatgcggcggttgtgtagaagacttcagtttgattatgggagctacattggctcgacaggcatagcagggggtttctgccttctatggaagactgggattaatatcaggattttgagcaaattcgaatcagggttctgctgcttggtttcggacaatgcaacccaaaatccctggcatctctttgctttatatggaacaccatacatggaaaaaaggaaggatttctgggacgatatggcgagttgtattaatcagtgtaatggaccctgggcagtcatgggggatttgaacgtgattctagcaaaggaagataaaatgggaggaagagcatttgcctatcgtgatggttcaattctgagaaacttcatgtttgagacagggggagttgaccttggctttagtggctgtaagtacacatggcaaaacaaaagaagcacagggcatctggttcgggagagaattgatcgggttatagtggacacgggttggatgtctctatgcccttctgggggtgtccacaatctcccgatagtgagttctgatcatggggctataattttcaattcgcatgctttcaaaccaaaaggaaaaccaccttttaggttcttcgatgcttggcttacggattcgtccagtgcggaggtcattaaagaggcttggaacgatgtgactgagaacggggatggaacgactttgaatatgaagctgataaatactcaaaaggcccttcgcaggtggagtaagaacgtttttggtgatacggaattacgacttcaacaaatgaacctggaactccaatcccttcaatccagggaagagaatgatctggatattgaagcggaaaggagggtccaacaagcaattcttgaattatggaatcgaaaagaatctatgtggaaacaacgttctcgggagatatggctaaaacagggagacaggaactcagcttttttccatgcctccactatggttcgtagaaagagaaatcatatttggaaccttaagaatacacaaggtcaactttgctcgaaggagtttgagaaggggagaattttgatggaacatttccaggaaatttacaaaactaatggtgctgatcaatttgacgggttggaggaattaattcaggcctctgtttctatggaggagaatatgatgcttgcgagcgtccctgatatggaggagatcaaatcccacgtctttagtatgcacccacttaaagctccaggtccggatgggttttcggggtgtttttaccgaaagtgctgggatgtaattggaatcgatgttgttaattgtgtgcagaagtttttctcttcaggggttttaagccatggtctgaatcacagtttcatatgcctcatccctaaatgttccaacccagatagtgtcgatcggtttcgtccgatagcactatgtaactttgtttacaaaattatagctcgaattcttgctcaaagactcagagtgatactggacagattgatagcgccaactcaatcggctttcctcccgggtagatggatagccgagtcgaccatgctaactcaagaaattataggggtcattaaaaagaagaaagggaaagggggtcttatggctcttaaggtggacatgaacaaggcttacgatcgaatggaatggcgctttcttgaaagagtccttcaactatttgggttcagttctacctttactaatctgattatgtcttgtgtcactacggtatcctatgccattctcttaaatggacggccgctcagaaagttttatccgggaaggggattgaggcaaggggatcctttgtccccttatttgtttctcatttgcaacgaagtgttttctagattgcttcatcttgaacaacacaagggtcttttacatggcattcgggtgactcgaaatgcccctgatatttcgcatcttatgtttgctgacgatgccattctcttcctcagagccaatttacatgaagtggagactcttgctcgatgtatcagtagatatgaaacctggtctggccaagtttgcagtaagccaaaatcgggcctcttgttttctagtaattgtcaatcgtggttgaaggaggagatacaaaggacactgggggttgacaaggtacttgattctgaaagacacttgggtaatcccctcctttttggacgcagcaagaggcgggacttcaattttattaagacaaaactttgtgagcgtcttgagggatggagattaaaacacttatccaaggcgggcagaatgacgttcatcaattctgttgctctttcgatcccctcttacaccatgtctacctttaaaattcctcggacatcctgtaatgagcttgactcgattgtgcgcagattctggtggacagggtctgttgattctaaacggtttttggccactaagtcctggtctgctttgtgccagccgaagcagagaggagggcttggatttcgccgatttgaagatatcaatgattctctcttatcaaaacttgcttggcaactagcttcaaatgataacagaccatggtgcgaagctatgaaggcgaaatattaccccagggagagcttttggagtgttaccgaaaagaatgttgatagtttcgtttggaagggaatcctgaatgctcgatcttgtgtagctgaaggggcatgctcagttattgtaaacggcgaaagcatcgatgtttggtggcaaccttggattccatggttggaatacgctgaatttcgtatgcttatggaaacaattagaggaagggcgccttttttacgcaatgtggcggatttgatgtaccgtaacacgagaagctggaatcatggttttttgtgctttgtctttggcaatgaaattggaactaagattgggggaattcaaattgtgaagaacggtgtagaggactttgtagtgtggaagaactcaacttcgggtcacttttctgttaagggagcgtattgggctgctcaagctggtcgttttaatgaaactaataagttgtggggttggatttggaagtccagcattcatcctcgtttgagcatgatgctttggagagtttgtgcaaatgttcttcccttagctggtgtctttaactctgcaggaagcaagtgttttttctgtgactctgggaccgagaattcttttcatctttttgctgaatgtccctttgcttcagctctctggttcagtagcccttttcctgtgagattgaatctagtcactgttgaaagcataccggaattattgtgcaagttgtgcgaaggagtcaagggtgatgttaggggacagatgttgggatgcttcgccattttatttgagactatttggaacataagaaacagaattgttcatcaaggggaggcggtttggagcattgatcaagcaagaagggtcatatctaaccggtttcaagagttagtttcgtcctatactgctcatagttccattatcccctcaccggtccatgatgtttctctcaagttatcgtcgaagtatttagtggttgtggatggatccttctctcacggacactttgggtgcgcggctgtcttcatgagccgtgattcaacgaactggaatttcaataccgccactggtttatgcgacagtgcgcttgcggctgagatggaagctgtgtctcgtggtgtgcaatgggcgaagaactatggatgggatgacttcacaattgcttctgattctaagattcttgtggaagccattgccaccaagaattgtccgaattggcagctcactagcgttttctacttactgctccaacttttagactcttgttcaaagtgtaatgttgtttttattggaagaaagacaatttcttttgttgatgaacttgctaagagtgctagacactccaaaagtggttctttaaactgtcaaggggagggattgccccctgtgaatcccagtttcttttggtgatttaatcgaactgaggtttccttttcaaaaaaaaaaattaacaagcacactaaatatgacgtgtatatattacagaaaatcttggtaattaaattatacatatatatgaaattaacaggtagtgacattattgtttctataatcactaatattatgtgtgttataaatattaataattatgt

SEQ ID NO: 218209 - DNA, 3732 bp, Cannabis indica
ttcccattcctgtttccaaagtccgacctaccattgaaatcaccacgaccaccatatcctcggccacctccataaccacgtcctcttgttccctcattcctgtatccattaccccttgcaggttgaaaccttcccctattccctgcacgaaacgaaaccatatttgtgtgaataaaacaggtaacaaaaaagacctacactgtatcccgagattcaaataaattataacaaacatctactgcttagccaatttaattgagttcagatatacactaccgtcgcccaagcaagcctataaagttcatgaatactctaatctattccctatactaacaaaagttgcataaggtctaacatttatgcttcgaccaagtcatatacatcatgaatgccagtattgccccaaagaaaacaaagcttacctcggttggtagacctcttctcctcaacaactacttgacgcccattaatagtaactggtgatgcctgcaacaccaatcagtacatcaatataagcatggttagcgtctggaaatatgagatgtataattctgatggtagggagacatggttgtcacaatgaaaaataaataaaaatgtgacttaaatgtagagaattcataacccatcattgtgttaaaatagctagaaatacctctatagcactttggacagcagtagcatcctcaaattccacaaagccgaaacaaaatccctggtgattaaaaggaaaagaaattcagatcaactttctgagtaaactgttaagagcaaacaaagtaatatgtattaaaagttgtgaacataccttttggcttctaacctgcacaccattattcttaataggtccgaatttcacaaattcattctcaagtagagaaggtgttgcatttaatggcagacctttaatgtaaattgaatgactctccgctgttccaaaaaatcaaggtatgtgaagcaacaaattggtctcaaaattgttttaagtttaccagacctaacagaacagaaactacacaccttcagcctcttgattgttaccgttatcatggttaactgtgacgaaagtaactgactctgaaacaggaggtggaggtggtggagtagctgacacgggttgttctttgttcttttgtgcagtcctcaaaggaggtgtaggagatgaaaatggcactgcagtctccttcataaccttaacctgaaaaggcagcgaaaaactttatttaaagccaattctaaccaatatacttaattggggtagagggcagaaagaaacacggctataataattgcttttgtccaaatctgaatgatttctgtgagcattaagaaacaaaactgcagccattttagtggttttataaaatcagatattggaaggaaaagatgttacatggaaactactcacgatcgaggcataagacttctttggcagatcttcaattttgggattggtttcaggcatcttcaaatcatctggaatttcatcaaccacctcagccactggtgattcctcttcttcttcttcaacaacttctccatttgtaaaattggacacttctgtgccgttagcataatcagacactggaatctccagctcaggtgtgtggttctcattcaccgaagataaatctgcaagaaagattgtggtcaatttgcagaaattcataatttagttcaaaaaagaactgaagttctaattaccatgttcagcggtaggcagaatctcaacctcattaaccaaatctccgttcccattttgaggctcaacatcatctacatatctgaacacatcattcaaaacaaagtatcctgtgtcttgtggtgccaagaagaaactctgagtaaatttccgactaaaattttcctttccagtcagatatccagttacaagaacaagcacaccgccattgtacgactcttgtgaatccactgttttgatatcagcaataagatttccataatcaattgaaagaattttctcattgattgcctgcccacaaatgattcatcaccaatcaaacaccaatgtaattaattcaaataaggtctgttgagtaactatgtaaaataattaccaaaaaaaatccaaaaataattgaaacaacaacaatgcagaggatataaaattaactgccactaaacaaatgtatgtatattgatataaataaacacaaaattatattaggacgggattgcctcaaagtcagaaaccaaatcaattttagaccaataaactataagaaggcacaaatccaagcaatggaaaatcaaaatgtagatcagataatttgcaaccaggcataactgaagttctaaaagcataaatgtacgaaataaagtcataaggactcacttgcatggtagttgtaatgctcataataccattctcttcaacacggccaagcttactaccatcctgataaaacctatggacaagctcgggcgatttaagcaagatgaggtagtattgatgagcaaaggcattaccaacctataccaaaccaaaagctcaattagatgtaagtaacaatatagaactatcaaaatacaattaaaatgtatttcaaatgacatacaacatcagcactcggtggtggtgcacttcctgccggggcttcctgcaacatagacgccattctttccctgtctgatccccaaaaagaattatcaaaaaccataacatcatgtgagaatgtctacaattcatttaaattttcacgaacatactttctccaattcaaatattccatctaacacacagttcaatcctaatttcttctaaccattaacaatacccactaaaaacttaacaagagtattaactaaaaatcacgcaagaactaataatcactagttcttgaatacgaattatcacttcctccgtaataattttcttgcaaacacataaacacacatacaaaaaagtagggtttcagtttcaaacgattctacgatcacagcaaacacagaataaccctaagtttagaacttcgtgtattcaaattaataatcaagatagtaatatatacatacacatacatatatatatataaactagaattacaatcacgttttacacctaaaaacgcacttaagaaaacgtttctcgctatttcttcctcaaattttcccgataaacatacaggtgaggagcaatgactccgaagacattgctcaaaattacaagcattgacaactcaaaatcacagatgaaaagcaacagtacagtggcagagtgagagtgagaaatagatacctgaaggaaagcgaagatggatcggcgataatgaggtgagagaagggatatgatcggaggtgctcagtaacttctctcacctccgtttagcgatggaggtggttagggttttgctagggttgcagattcctgaagaggcgagagagtgtttggcaaggaaaaggagggagaacaaaaaaacacaagagacaataattaaagggtttttcgctatttatagggtaacacgaaatttcattccatcatattttttttttttatttctgaattttataaaagaaaaaatcgtagttctataattttttttaatttaaaattagttttattataattattattaatttaaaatttagagaaaatataagttattattttttttttgagaaaatactattattattattgaatagaattcataacaataacagagtggattggagatggaatttcccccaaccaagaacaatcattat

SEQ ID NO: 218210 - DNA, 6019 bp, Cannabis indica
gtggggcaatattctccaataagttttaacaatacaaaaaaaatcttattaaaattttaccatcataacatatatactatattatattgaattgtctttaaaaaataatctaatatacacatatgttacatatatttgtcattatataaaaaataaaaataaaaataaattgaaatcattaatttctatgtattacaactaaatttcctatatgacacataacattcaccatatttatataagtattatataaattcaccatattcaactaaatttatataagtattatgtaataagtttttgtgtatattccacacacaaaaaaattgtgatagtttctctcataaataagtggtttttttttttggtagcctttggttttctgaaaaacaaatgatcaaatatttgattgactgaaatgttaagctgttgttggcaacatggcatggccttctggcttttagccattgattaccagagatttatcatagggcccattaataagtaaacccactcaacatagcccattttcactactcaatctgggccaaattgggcctctaaagttggtccgtattcattataaagccttaccactgttctttccagttacaacggtaaataacgatcagttgaagtcatcatcattatcctgcacacccgcgcaatctagcactactgcattgacactgctaacttacaccaatcttcttcttcttcttcctccagtaacaaactccaacctcacttgcattgcaaacactgccttatccattaactatggagtcttacctcttagacacctgttcatggggatattctttaacgtccaccacctattcgacaaaattccgcaatgacagttctcacattccaatcccacaaattcgatgccttcatgtattatcgaaacgcagctcccattcttcaaaggaaatgcataagaattccgataaggacctgtctcggattttgcgaactgatgcagctattaaaaacattgagagaaaagcgaattccaagaagtataacaaattgtggcctaaagcagttttggaggcactagacgaggctattagtaacaatttttgggagactgcactaaaggttggaacttttttttctttattaaccgtttatttacttttcttgagctctttactgaacaaaatccaaaacccagttgcgtaattggttctgttttataaatttaagtatgcaaagcagctttttgaaactacccttttgatatttttacttagttatccaaaatttgatgctaaaaatgcttactttgagtattatgaacgatttaagtgtgaaaagattgagcctttggttataaagtgccctgctttgctgctgagcttgagaaaatgcatgaacaaaaacaaaacaaaaggcgaaacttgtaagcaagggaactttatgaaactatccttttgttatttttttcctagttatctaaaatttgatgccaataatgctttatgaacgatttatgtgtgaaaagattgagctttggttagaaaatgccctgctttgctgttgagcttgagaaaatgcattaacaaaaacaaacacaaaaggcaaaactagtaagaagaaaccatgattttcagtcctaatttcttttgagacacatcaaaacaattaattgggttttgtagatttttggacttaagtgtgaaaagattgagctttgattataaagtgccctgcttttctgctgagcttgacaaaatgcattaacaaaagcaaacataaaaggccaaagtaataagaagaaaacatgattttcggtgataatatccttaagacacataagaacaatcaattgggttttgtagatttttggactactgcgtatgcaacactggtatgagccgagattccaaacctacacgaaactcttggtgatgcttggcaggtgtaagcaacctcagcaagccagcttgttgttcgagatcatgtcctctgatggtttgcagcctacgcttggtgtctacaccgcccttgttggtgcgtatggccaaagtggtctcctggaccaggcattttctgctatggctgatatgaaatcagtctctgattgtgtaccagatgtatatacatatactattcttatcaactgctgcattaaacaccggcgtcttgatctgattcaacgtgttcttgatgaaatgtcgtattttgggatcgaatgtagtactgtcacatacaatactcttattcatggatatggtaaggttgagatgtttgaacagatggagagcacattaactgatatgattgaaagtgggaacacccttccggatgttttcacattgaattctattcttggggcttatggaaactatggccagattagtaagatggaacaatggtacgatgagtttcagcttatggggattagaccagatgtgaagaccttcaacatcttgataaaatcatatgggaaagcgggcatgtacgataagatgagctcggttattgagtacatggacaaaaggtttttctctcccaatgttgttaccttcaacatagttatcgatgtatttggaaaagccggtgatgtttcgatgatggatgattactttaagaaaatgaaacatagaggactgaagcctaactctatcacatactgctctcttgtgaatgcttatagtaaagttgggcttatagagaaagttgattctatatttatgcaagttgcaaactctgatgctacactggacacaccctttttcaactgtgttatcaatgcctatggtcaagttggcgatgtcaatatgatacatgaattgcttttggctatgaaggagaggaattgttaccctgacaatatcacttatgccactgtgatccaagtctacaaggctcaaggcatgaatgatgctgctcaagctatggagagtaagatgattaacctgaaggagcattcaggtagcatgaaaggactcatttgttaaatcggttctaatcactaatttactagtcatttgccacaatgggccatgcatacagggccaatgcattttaaatgagctggacttggtgccatattacaaaggctcaaaagaaactataaaaggatggcttgacttctgagtttgggcttcatggaaactattattctgttacttcctgtgaagtcttaaagtgaatgagttcaatttggtttggttattggactccaactctgtgaccatggaatagattttcaagtcaaacatgggtattggttcactaagtgacaagctcagcccacaccaactatgcaaccaatgatgcagatggcaatatagttggaagtccctatctgaggatggtttgctaagatcttttaccctttaaagctttctttattctgtttcaatttactgacaaaagttaattaactatgaactttgtccaaaagtatgttttcagtcatagctcaaattatgtttctcctatttcgagagttagacacatgatgggggttggccccgaaagactaaagcaagaatcttctaattgatccatcaaaaactaacacatataaaagaagctcgatcttagaaaaatgagcatacactctgtaatgttctatactgaattgtagtatattaaattcttttagttatttgtggcgaaactctcttatgttatgattttttacacttaatttctttatctaaatagttatttactttttttttttacaaatttgagacgttagttgaatatcactgttacatactaactagtatatacattcacaggtatacacagtggtcatcccgttagtatttaacagtgatagttatttaactgacgtcttaaatttgtaaggaaatgtgcactgttatgccaaaaaataaaataggaacgaatttaccgattaataatttgttactgaaaaaaaaagttacgtatataaaaattaaacattcaattgtacatgtaatgttcttacaaaaacaaactctgcacctcatttttaacagtctcaatcatggacaattaattattattgaattggaaattaagagtacacactcacaatattcaattatattaacctcttgagtcaatcaatgttcaatcgatcaatggatagatcgattaattgattaatggatgtagtgcactcatgtattttatgattacaagttggatctaatgtctcatattcactacgaaactcaaaattgagcatattaacccctttgtagactccatcatccatgttgcgaatgaggactttcccatcgtacaaaatatcacgttgagtataagagaatggaacatcacacattccttgagtggccacaagagtgacttttactttagtcttaccaggaactttagctgtgtaaatagcctcagctaaagtttctgttgttgttgtttcctcccaatgatgcttataactatagtcaacactaaactcaatccccgtttcagcaatgaatggaataaaatcaacatccaaagttgttttactacctaatttgagtgaatggctggatccaaaattactagagcttgttttttggtaggaaaatttaaggcttacttcattctcttcattctcatagttatcggccgatgcatagcccttttgaacaacattgaggttgtagactttggcttcgtctttgtggaattcgacgcggcttatgctctttgagatgatgttttccactacttctagcttcacttcatttgtaatggttggtgcatgagcgttaaggcagtcgaaaaagacatcactcgaaacactctgacaaaagtttgagttcttcaaagcacgtagcgctatgatgttgtcagcaagtttgacaggccaaaatagcgtatccttgtcctgtcctgtgctgtcacgtgattctgataagatccatgaagtcagagaagtcatccagtacattccacttgaaatgttctttatgcgaacataaccatcaccagaagtagagatctcattacttatcctcacatctccaatgtctttgggaatgttgtattgtagagtctgatgatccatgatcttactagaacatagataattatgattatctttccccggaaccttgaaggcaacatgtattgttttgggaaacaaaacaagtgattcccaatccaagattttgaacacattgtatttgaaggtgctaatctctcctaagcacaagccatagtcctcagcagggtagtattcattaggaggagaaatacatacatataagccaattgaggggtgaagaaattgaaagtattcttcttcttcttgttgtttgattggcttgaacatagtacttgtgggcccatctttttctataggctctagagctgtagcctcaattgacatatcagactcatctacactcaagtatttgttgttgtgacaacacttgatgtgcaccaattcaccatttttctctgctgtcactacctcaaattttatgtatcgacttgtaatatcatctccaagaaaatttagaaaagtatcgggcacaccctttttcttactctcttctttacttactcttttcaagtatttgcctaagtctttagatttgataaccacaaaccttggcaatatagaagaagacattattgttattaagttattacatacagaaaagagtttatctttatatatagacacagaattatatgcatattaataaagttatttacaactcatcatgtaatgacaaagtgtactaaagtttaactactactaattattattttattataagcaatttatttattcacttgcacaaaagaaagagaagactttatattattatttatttaagtagatttaaaagaaaatgcatatgagctgacaatgccatattaattacattattatatatatatatatatatatatttatgtgatatactacttgataataatactcctcgaacaattgcaattatggtaacgtggttccttttttttgttcacaagtattgttactgttaatttgacccaaaataaacatacatataataaa

SEQ ID NO: 218211 - DNA, 2260 bp, Cannabis indica
aaacccaacgtttcacgtttaggttctacgataaagcaaatcggccacctaacgaagagcatgagctttatgacgtatcccttccattatttctctaaattcaccgtaattcatccacgggatccatggctgccactagatatcaatatcttcgccattatgaatgatagtactcgctccttcaaaatgacttgcttgcctccaagatacccttccaaccgggactatccgaagccttaggataacttgccagaaagattcaaaggggaaatatttagctttgagagaatatgaatccaaggtctatcactgccactagccaacatccaagccagtttggacaacaaggctaagttgaagtcttcaaatctcctaaaccccaatccaccacaacatttgggttgacaaagagaatcccaagatttagtggcaaggaaccttgaatcatcaagattacctttccaccagaacttcctcacaatagcatccatctccacacaagaggaagaaggaagtttgttagtcgtcatggcataggccgggagggccatggcaacagagttgatggacaccatcctaccagcaagagagtgttttcatacgccaaccttctaacctcgttagaagttttgatttcagaaactcaaaatccttccttcggcttctagaaaaaagaaaggggttccccaaatgtttctcacctcccctgatcgtatcaatgcctagcttcatcatgatctctcttcgcataatatcaagacactttcttaagaagagaatgcctgattttggtttactacaacgttgagccgaccaatcttcaaaaacctttaaacatttaccaaggttttcagcctctctgccatttgctctgcaaaaaaggattgtgtcatccgcaaacatcaaatgagtaacagccagtgctcctctagccaattggataccatgaattctccccaactcttgatctctagaaatgattcttgacagaacatcattacacaagaggaaaagaaagggagacatcggatccccttgccgaatgcctctcttaggactaagcttaggaagaggcttgccattaagcagaatagaatatgtcaccgaggagacacactccattaccgtcttaataaagtgagaattaaacccatgaagttggagaaccttctcaatgaagcaccactcaagtccatcataggctttgttcatgtccattttgatagccatcagtccaccttttcccttttttcttattaataacatggaccagctcctgagaaagaatggatgatttagctatccatctccctgggatgaaggtcgattgatacggagagacgatgcaatccatgataagcaaaagccgttgagaaataatccttgtgataatcttgtaaatgaaattacatcgagcaataggtctaaattttttcacggaatccgcattatcacattatttacaataaaaccgtgaaaaacaccattatttaattttttttatttttttaaaaaaaaaaattaacatattctaccaattaatagaaaaataaaatagtaaattttatatgctaacaataatatgagaatgataatttattattattttatataatacttatttaataatgattttttaaaaaataaaatatacttttttatagcaaaaattaagtcattattaactataccgtaatatttttctcaacttttataaactactacaaagacacattctaaaaagagaaaacaaaatatagaaagaaaagagtaaattccttcaaaaaaaatcttacactaaaaacaacaacaataattttgttaggaacaaaggcaagaattttgaataaatgttagtagttgtaagctgtaacgtcctgatttcccgatttcccaagacgtcacacttgttaatctgtttaaaactatttataataaagacaataaactaatttattaaaaataacaaaagaatgaggtctcattattttgaaacaaaaacacttgattcattcacaaacttttataaaagtaatcggaccataatctttaatgtgataatcccctaacatgtaattcacacctcgaactcgccatcctcactacaattctacaattctacatgtaagagctcaatatctcccatcttcataccccgtttttgtagaaaccatataatacacatgaactaataatgtaataaatttcttattcttaagaaaaacaaggcaatttaacaatattaagatagagagaaaaa

SEQ ID NO: 218212 - DNA, 3856 bp, Cannabis indica
ttgatttttaaattttcattataatgtttgataactataatagtataaactgttcaaattgcatcgcaccacactgtatttttacggtgtagtttttgtaattttaagatctcgcggtgcgattacggtttgagaaattacaaaaatcgcatatgtagtttgatttgaaagaaaaaagccacaaccccaaccatccacaccgtaaacaccactagaataaattatatattcatatacatcattactgaaaaaagtactctattaataattttctttaaattttacgagattcaacataattttagtgttgttcttgattatgtaactgcagtttattagaaattatagggatatataataactgggcacccaaataaaagttggactaccacaacaaaaagaacaatcgtgaatgacttgtttatagtggttttactattgttttgtgtatgttataatgttaaattattaaaatattgtcaaaatatagggtgtggaatctgttaactcaaaaatctagactagacttttaagccacacctacttgctagattggcgagaataaaatagtttttaagtaattataagagagacacaataaatttgtagtagttcacttcttgtatcgcgacagtaatagagctacatctacttcgagtttttatttctcatgagatagtattacagaaataggctatgtgtcaaaaattttaatttctagagagagaagctttgatcttgtggctagtttttctgaaagtgaaaaatgagctaggaaactctcctttataggtgaaggaggcccaaaaaataggaaaaaaaataaaaagtagatgtttttaattgtagatgatgatcaataaaattagcttctggtggtgatagtcattttttgaagtctgacgagacctattgtgggtaactcaaagcatatttttgtaactcctttggagtgaaatttggtgctgatagtttcaaaattacaattaaagtgtgagccatgacttgataaaatattgaaatagcttcaaaaattaagttgaattgcgtcaatcggatcaatattgagtgagttatgactgttttattgaaggtgattgtaataccctaaggtttaataatcggattagcaaccctaactagattaattatctattaatgaggaattatattattatataatttaatatttgaaaatattttggtttattgcattttaagacctcgttggtgtgttaggggcatttttcgtaattttaacccgagaagggtaaaatcgtaattttatgatatatcgtgcttatggactatattattatatattatgtttattctgtctatctgcatgtgttttctgacaagttagagcggtatagtcacaatcaggtattttagactgaactgggttcagggcccaaaatatattttcgggatttatttatggcattatgataaatgagaaaatttgaattaatgtgttatgtacgtgtgattgagttgacaatattgcccttgattgtatgagtatggttatatttggccttaggggcattttggtcatttgaccacacaatgcattttcaaaaaaaaaatcaatttttataaaattggaaaatcatttcctagttcttcttaacccttacccgacccttatttttaaatttctggtatttgaagctctccaaagctgttcatgatgttcatatgtaattgaatgcatgttgttaagaattgtatggattgtgatgttttagtgtgtttgtgttgttaggatcatgtaggatgcatttagactattttaagagattctagggttgttttatgttgataaatttctggaaaaaggctttaagttttgggttttcttggaagctttgaagctttgaacattaacttgtgcaagtgtatgtaaattgtggtatttgtatggcatacttttggtatgttgtgaaagtgattttgtgctttgttttagcttagaattgctgtaaataatggataaaattagtgtagtattgaatttgaggttatgtatggtttgggtaagtttggtatgaagttatggttgatttttgaaggaatgtaaaaatggtattttgggggttccaagacccctcgccgcggccacggctgggctcgcagcggcatgggcaacctggaaggtgccgccggggccacggcctagctcgccgcggtgaggccctattttccctaggattttttaatttttatttttgccataacttttgatttgggactccgttttggacgtttttgatattgttggaaagctcattttgggctccatatgttaatatgtaaatgaaatgcaaattatatgtttatgtgaaagtgatgtcggtattatccctatttgtgaaatcccaggaatgtgtgactaggattactgacgcttgcttaagaacacccaaggatttgaaatcttcatatacttggattaccaagtaagacagtagactagcacgtagaattaagtattgtggtactcatgtatgttattatacttatgttaagtgggaaatcaggattagggttattaccctaatgtaagcagttatgtcgtctagggttattactctagtatgtaaatgattttgaatgcaatactatactatgtatgttgagataaagaattatgcgggtaaggcctaattgggttagacttagtaattagaatcaagacaaaccaatctaaggccttattgtaaataaacgagtgagtgcaacacataggtctatgttaaatggacaataaatgtagtggcatcgatatttattcgaattgtgattatattgcatattgttaatattactgtcctgctaggcttggctcacgggtgctttactgtgtaggaaagggtaaatttgttattgatcagccatgagtttgagggcttgacggtgtattatacatgttcggaccatactagaccacgtgggttgggtctaccagaagaaatattttgtcttccagtttttgctgctttggttggcgtgtaaatataacttgtaatattttgaaaaagtttttacgagatcccggaacaaatgtaatcttttggaatgtttgtaatgttaattaattacaagttatagttttattctgtatttgtttaaaagtttaaaattttcgctcttagctttagtaatcttgatttagcgagattagcatatgtttagtcactgttcgtggcattcctattattagggcattatagtagttcatgacccattgcctaagttgacatcctgcgcttaggttgacatcccaacgaccagattgacatatgacatctgtaaaaacatccaaggaatgtaatttaagattcttaagtgatatttaaatatcacttagtctgtttctgtgttatggaaaagcaggtcatcaattctcaaagatgttgttttgtgaaaatgagagactcaaaactcttcatctccgagtgagtgtcccatgttaaaaatgagaaatgcaaagttgtgaatttaacttctctgacttcatggatcttagttattgtgaaaaactagatagacagtcaaaatggaatcagaaccggataagtataactcaacctgggcattgggtactcattcgtaagcacttgggttctcgttttgatacttccatggttcttgaacttgaggacaagtttcttacattgtttttaccattctaggttcattggttgaattagatttgtcatttgagtaatcgaaagcagcgcactaggttcattgtcaacttgggcgttgggccgaacaccaagtcaacttaggcgctaggccttgttgggctcgagtttgtagttttctccctgagtttgcttgaatc

SEQ ID NO: 218213 - DNA, 4902 bp, Cannabis indica
ttagtgcaactttagcctttctcatagaagctgaagtcttccacattaaattcagcatggctctcgcatgcacgtggtttttcatgcgtggaagatcactggggggtttaatacatcttttaaacccctctttcctaaaggagaaggagtgcttggagtctttcacgcgcccagtgaagttgcaccctctagtctttgaaagcgaagtcattacttggatgttactgtaactttagcctttcctcgcaatagctgaagtctgccaaataaaatgcaacgtgaatctcgcacatcaaagcacaccacagcctgcaatagttgttcaagttgtggcgcagccttatctttccctcaaggaaacaaaaattctcccacacggttcaacaagagttccacggatacctacacctccaccacgtggtctctatcatgataaaggattactttccaaacttatggaaggaggaaccgcttgaagtccgccacccactttggtttccacctacaatttcagatgtgaagcctttgcttgaatttcagtgcaaaaaaggccttcccccgcagaagttgggagaccactaccgaattccacctagcctccatcaagttttggaaagattcccttctaagtgaccatagaaggaaaaggcacggtctagatgttagcataagttacgcctcctagaaaggagtttggctaaaactttaacacgcacctcgatcccccctttgggacaaagaagtagtacggtaatgccacacattgggctttaagcaaatgaccaagaatttagaggagtctaaatctctcagctcatttgggggggggggagggtgatatgccttgtcgctgatatgcctagttgctgactactgcaattccttcactcaccttgtaaaatatattaacacgacatgcacatgtaacaaaagacaagaagaattttcaaccaaatttcctatgggaaaacacgcttgaattccttcttcaaaattaaaatttagagtaaatctatagatgagatgcgtatttggccaaaattcttgagaagataaattcccctgaatcccttcttattaatctcaatggatttcctaaagtttagtatgttgggtttcacaaaaaagataaaaattcatgctggcaaggatcgaagtaagaaagatggctcaaagtcaatatggttccggcttcattcttggaccaaggaaagtgcctaaaagtctaggaaacttatggccatcactcccgaaacccgacctcgtaatggtgcaaaaccccatgaggtatatgaaaaatgaaagctccctcttccgtgaggaaaatgatccctgggctagcgttcaatgggcagttctaccaaatagataatcaattttcgggaaaaagtcttaagttcccgtggaaacctggtcttttggggacaagaaattgaagtccacgaacgacccctgaattgactaataaggtgaaaactgatgggaaaattttgtaagtattggtcgttggaaccatgtacttcaagatgtagaaaacgcttaaaaagactagcaaaacagaagtaaagctccaaaaggaaatggtaaaaagcctactgctattacaaccagcccccgcggtcagggaaaagttgattatctcctcgaagaaaaaaaaataacgaaggggagaattgtaaaaacaataaaattgcaaaaaataaaagaagcttgttgtgtattctcgatgttcaaggatgggcgctactggacaggttggaagactctaccccagacatccactccacagtctccttgtaaaggttgtggatggccctcatacctcgtatgtggtgagtctgatgagtgtagttggcttccaacaactagttttccttcttcaagcccctgatttgaagcttggcctcagcaagtttggcaagaacggtgtcattggcattatgcaggtcatagttgttagccttggtctgctctagctccgtgataaatgtattggcttctccagcagccctctttgccagcagagccacctattgtaataggcaaaaaaagagttgaatacagcaaaaggggtcagaatgaaaaagcaaaaaaaaaaacatcttttcgaaatttaacccaactgcatttgcttagtagcatgggctaaggcaaaggcgtcaacactactgcatgacgcccaagtttccatgggtagctttgaggcacttctagccacccagtccaagagctcggatcggaatggtgtagcttcactccctaccttgggggctagacgattctccaaggcctccacttcaactgttagcccaactggggttaaggcatgaaggccatctgagattttatccttccttacggctaaaagcaccagtgcctacctatgcaccaatcgtttctcaacttccaaatgcgccttcaaagccttgtttactttcttctccctatgcatagcgtgtggatcaaggggtatggcctttttgggcaacttgaaccccacagaaggtatctttggaatggcagaaggatgatataggcagagtcggccaaacctcacttataggtcgtgccgcgggaggtggccccctgtaccagcatcagcttcttgcctctatctcttcctaccaagatcgttgtcacctacggccttagaagaactagctttttccatagcaaacctaaatgtacctacacgagccagcgtgaagttaagcgagtcattgcaaaataagacccaaagtctccctttttgacaaagaccatacaaataggaccaacattctcaaaatagtaaattgcatgcaatgtacaccatctcaacccctaaatctctgcatcaaataaatatttgtaaagaacacttaccgattaatgacaaaagtataacggggtatggttacgctacactgcgtttggaaatgtgcgcatctaagggtggggcggttagaaaggtcttgcaaggtaagttagaggatgagataaattgccacagctccgatgcaaaagatgaaaaaaatgtgaaacttaaaaaatgatggttgttgtaagtatttattgagcaccaagaagaggttccttccacgaggagcaaatagttcgaatcattggtaactaaagatttgacaaataggaagttaagaagatgtgtcagctcccaacatttagcttccatcagcgcatgcttcgtgaaaagtgctcagtaaatgaaagttctactcattcggttcgacgccattatggcacctccccaggcacgcaccctgtacacaggtggattgcaaaagtcagcattgaaggttccgtcagtgagaaaaatgataccttctgccaattacacttcagctggcaagcacctacatgatgtaataagaaactcgaatttatgccctgtgtttggagcaaatcatgaggaagcactgcaagctcccagaccacattacatcccgggaacttgggggtaaatgttgtccagatttttttaagcttgacacatggaccctaatccaggaaggatcaatgctaatcagccaatcacatagctttgactgttgttcctggaagataggagccctagcttgataaaaggttcttcatgaaaaaatttccccctgcaaggcaacgatgcaggggacatccacgatacaaaacctctctagttctaggggctgaagttctacgctccttcaaaggataaggccttgtcgccaagcacctataaaggtcctagaggaagtctagttgtgctaaaatcctattcattatcacaagaaagctctgatcgtacgtcttagattacagacatggccaccaggcttttttaggaccggcgtcaagatttgtcccccacgatatgccatagtatagagcatgcacacccaatcaaacctgcttgaatgatccaaggaccattgacaagggaaattcaaaaaggaagaccctggcacgacacatttatgatgtctggactgtaccatctgacacccttaaatgtcatgtgataaaacgaccacctactaaatcaacggtcaaatctcctctaaatgtgatcgatccagccaatgcatagagggaagctagcctataaatacccctacattccataagataaaaaaaaactctttgaagacaaaaaaacactatatactacttaactaaaaactctacaaaaattcctattaagcttcttcttcaagaggaacgagaggaataaagggtttaatccattgtacacaaatctgtattagaattcaccggccaaagtgcctaataaaatggactcgtggactaaggatagttaacgcttgaactgcataaaaatctcatatctattatttaatttgttatttatttcttaagctctaaatatttggtttccaaaaatcttagtaagcagatatggttcgcaatttgaaattctaactagattatctttaatttgtattaatattttaatgtcaaaatatgatcatttcaaattttattaataaaataagtaaatatctgatcttataattaaaattattaaaacaaacaaaaataatcaaatttcaaaaataaccatataggcaagtttgtgaaaaaatcaatattttaaattcaaaggctactaatatctaaaactaatttaaattgattaaaaattaataaaaagtaatttagatttttattctaccaaaatttaaatttttttcattgaaaaacgatttctgaaacttgaaatatcacaaaattaaggcgacacaggggagtatgtaatgtgtactaccccgcgcacgcatgggagggaggatgccaagggagacgctgcattgcagcttggtgggtcgagctagcttcacgtgagcacccttcgaacaaaacctatccgagaaacctcagtcaagaggttgtctgaacctcggt

SEQ ID NO: 218214 - DNA, 3848 bp, Cannabis indica
tatgtaattattccaaaaaaaattattgggcccttattataaagataaatagtatttttaaaaattattaagagctaattttttaatttgagctcctaaaataagtggactctaggtgcgggcctagcccgtctatgtccaagaccggccttatatctaatactataattatgagatatagtatctgtaaataattagtaattttttataatatttgttaaaataaaataaagtaaattttgaattacattcaaagtaatattacacatgatgctaagactgtcatacccttttagcatatatttctctatctttaattatgcaaattgtactacattgagtagtttgtagctttttcttgactttattttgagtgacacatgtcagcatagaattaaagggaccaaaaaaatgggacaagaaacttattatgtgccccatattcccacttttagattttgaagattctttaatttagatatgtagaagaacttattatatgtatagagatatccttgtcgcataggcaattgattaactcactctgttgtaaataaatccatcattatataatcagaaagaaaaaaaccaactcaggtggtgtggtatatagtaatggtgactgtgtcccctttgttgagtttcattattttttgtaataatttcatttaatttcgacctatggacttacatttacatgcaccctaataatcttcaacaaatcccaaccaaccacaatgttttgactgtttattgttatgatttctatatgattaatcatcaaaagaaatattagtaatatctaataaaaaaaaacagcatggaaattttatttgattcatttataaatgtatatatgaatggcacgtgtcttggtgagtgggggacaatacatgcaattagatctcttcacgtgggttcgagaataataaaatggcctgaaaaagagacacgtggtgaaaatatatggtaccctccactaaacgatactctcatcatacttggccatggccactgcaccaacaacctattcaattccactccaagttaccaggctatataggaattttgttccaaagaaaaagactatatacagtaaattaattattctatcaaattttaccatgacaaacaaaatataatataggtgcttaatcaattactattaattaattaaaaaaatatttcctccttttttttttttaatttaattttacgtaattttttttaaccatattgatattagtttaatgtttttcttaaaaatacatcatttttatttttttaatattaaattatatatatgacgctaatgtgacaaatattaattagctaagcatttataatatcattttatttgccacaggtgtgactaaatttgatagataagaaccaatttacaacattgtgaatagttcaacactatttttaacatgttgaaaagttcatcgagtacaataatacatacgctaggaacaaaaatcttaaatagccaaatattcattttatgtattatgtatatatattttttatttaataatttacagcgtaaatatttaactttaattctcagttgcagatagttacttgccaaaaatttaataacattgatcaatcatagattatcacgtgaccattaacttgacatttaacggccaattattcacaaatatttttaaaaataaattaaatattatattttttttagtgtatttaaattaattttttgtcaaaaaattatacttaaatatttattcgcaacataaaattaaatttaaatatctataacgcaaattgttttattttttttcattttcttcctcaagtcaccaagtgtcaaacatctattggaatttctgttggttcccaaaaatgaagggcaattattatttatgtggattatattaagtttagtgccggccatgaagtaagaccagcaaagcagtttagaactctatatataaaaaaaaaaaaattatacatttattactgaaaatatgcggtagttgtttggagcaatgttctcgtagggctgaatttcttgaatagaaatatgtgttaatattgttattagtttaattaattattgggtgtaataatatttaaaaactatggttagtcaatgcaaaacaatatatctaaaggtacccaatatagcaatgttctttcttaaaagcttgattatgtttcatggatatacaacaattttttgacaaattaaatttgtgaaattagtggctatataaataaatataatacattattaattaagttgacagtatatgtgtgtcctgctttatttattaaaaaaccagtttgcatctcttgtttttataaattaaaatccacaaaactataaattccttggagaaaaattgaggaaattaaaactatatataaggaggtccaaagctaagatacaattttttttattaccaatttacacatgattgtaatataattatttgaaatattaatatatatatatggtccaattaaagtaaaataaaataaataagaaaaaaaaattcaaatctcttttaactacacaatctatatatctttgagattcttaaaaattaatacaatttgtattatttttttaatatacattttgatattattttctttctttctttctgtaaaaaataatattttcttatttaagtattgacttttggttgatgaagtttgttacaactcttataattaagtcaaatttaggggtaaataatttttaaaaagtcaatgtggaatgatgtagtttagctaagaaaagaagatagattttttttaattttttttaactttgataatatatggtaaaactaattaatatttgatgacttgatccttaagtgttgattaatagcacaataagcctctaaaattgaattaatatggcactctaataagttgttggactttgaagaagaggttggccactaaagggtacccacttattaaattaagaaagaaaaaaaaaagaaagcaaatcaaaaaatcattatcactactactactaccagtagtactgatcagtagtagtatgacatgaacacaagcaagagcacattctcattattattattattattattattgatattgttattattcattgccaatgccaatagagatatcagatcaatacaaaaccacaaatgtcacaaaaatgaagcagaagttcacgtggctttggcccaatccaaactgtattgcattatacagaattgtcactctcatatgagaataatatatcataccgcccaaatgtatatatatatatagtttttatttatagtagtaattaatgaataaataatctttttaagttgtgtatcaaaattatgtaatcttattttggcatctaaaatggaggtgtcgaattatgtaaaacaataaattaaggcaagttttatctctatttttagcatattatgaaagggggtgttcggattgaatcagaatctccggttaaaaattggtgttttatattgtgttaaactaattaaagtttgacacgtcatttaattttttatttataaaaaaattaaactccaataaaatcaacaaaattagttaacatatttaatataaattagattagttaatgtgtcaaattttaataggtttaacacagtataagaaactaatttttaacaagggattttaattcgtttggattaagttaaggtatagagtttaattattctacaattggaagatttattaatcttaaattctttaaaataatatgtgttccgaaggataatatattaaatgatataaattaaatttttaattttagcaccttaaatactcaatgtttttaaaattgtaatttt

SEQ ID NO: 218215 - DNA, 4564 bp, Cannabis indica
attcacaattttttgtattgatgtccaaatatttgaaattatttttcatccaacgattaaaataaaataatacttctaaaaaaataaaagtatttttcatttttattcctcaaaacagttattttttactttttttacgaaattctacatagaaatttttattgcaacaagcgctgcaacttaaattgtaacaaaaaatcgtataaaagctctattgtaattagtggtgcaatcactttagaaatccaagaaaaaaaaatttaaaaataatttatgagtaattcccaaaataaaatatattttcacagcaaaaattgtaattactactgtattttctgtagaaaaaaaaaaatagatatgaggtgtggatttaattttatttattatttagtagaaaaaatgagttgatgcatcggtgtgttgtacctttggaaatatgattgactattgacgcgtataactggacataagagatcgcagcctgcggctttgcatttattgtctcacttggtctcataaaaaaaaaaaccctcaaattattttttacttcttcttcttttgttgcgcagaatcaaaattattatcatcgtcctccttctatttctccctcaaatcaatgccatacccaggtatatcttattaacataatactttttttttctttaattataaggaaaatgagaattacatgttaaattgatcatttgtttcgtatttttttttggatacttttcgtgggtcatttttttttctttcttgggttcgtttttgcttgatcttagatgccttattctaatagatcattgaattttatgaaagtcttattatgagaattggatcttagcggcatgagaaaatctgctttactgtacacaaagaagaagggaatacatatttaatttgcattttctcagatggtgaaatggaaaatcatagattgggtttggactcaaatcattacaacttgcttgccaagccaacttgtaaataagcgaagtgtattggcgaggctataatccaatttcttctaccatcttcgctatgttttgtgatggctatttctgcaattatgcattgggggtctagattaattattataaaagagagggactttttagcaagctccactgaagctccgctcgctgtcacgcgctgtgtcgccgactagaacccgccaacattggcctcgtatggctattcgaagttgccgttcggcaatattccggctgtagagaagtgcggttgagactatcatgccgtggcgaagccacattggccattctagtcgccgttgagagggacgacgcggtgagtagtagactttcctcaactcgaaaattcacttcagatacgtcagaggaggactctttccgacgagctcggttctcgagaggatagactcgatttaggtggacccttagtcaaggacgattaatagtttcttttaacaaagaattttctctttttttttcttctttacaaactaatttttttttccttttcttcttttacaaacaaatttgattgtacaaaaatgctgttaattgcgaacagttgaaattataatggagttgatgtcagagtagtacagtacagtgtaatcttgatagctatactgaggattaggttggaggatcattaatttgaataaatatccccacatgagttatttactcaaattctaccatggcctaggctcgtgaatcgtgataagttttcttgaatattgttgtttagtttgtacttcgcagttctgataatttgtgctatagtgtgtatttgatgctaatgctacgcgtaaatatatggatatatcattagataatatatttattaaatttcatttaattttgaatcacgagttaataattttagtagttttaaattcttggatttaaactctactgtgttccttctctccctagaaattatattcttattttctttctttctctagatctgttctctttgttgttttctctttgctctatctattctacattagtactactacataagtttgatcttatgtaactgttgacctattgcagtttaagtactagagcaaggtatttgggtactcaagatggtaaagctaacgatgattgcccgagttactgatggtcttccactagcagaggggctcgatgatggccgtgatataacagatgttgaattctacaaacagcaagtcaaagcattgttcaaaaacctctcaagaggtcacaatgagccgtcaaggatgtcagttgaaactggaccttacattttccagtatccttgtgtgttgtgtctctgtttcccccatatttgcttcttgcattcttttcttatttttcttgttatagaaaaatttggttctgattcattggattatcctacagattactttctaggaaaatttgtttgattgggttatgcatgcagcagatgtcggttcttcctaaatttattctagaacttatgacagtcttgcttgcatttgcatcaactcattctagttgaaactttactaattgattttggttcgatctacaccagtaaagatgtatttcagccatgctctatgactactgtgtgtgttgattttagatattcccatgcacatgagctcactttgcaagctttcctgtggactttcatttgtaactttctccataacttgtttacgtgtattccaattttgactgcagccaattctcaatgttaccttaacctagtttcttagctatataacagaaggacgtgtctgttacttgacaatgtgcgaccgtgcctacccaaagaaacttgcttatcaataccttgaagacttgaagaatgaatttgagcgtgttaacggggtggggcaaattgaaactgctgccagaccatacgccttcattaagtttggtgtgtttttgttattgatgtttttccttctcttccttaatctacagtggtcttactgtgtctaagttatcattttttatgtgtttatagatacattcatacagaaaacaaagaaattgtaccaggacactcatactcaacggaatatttcaaagttgaatgatgagctctatgaagtccaccaaataatgactcgaaacgtccaggaagtccttggcgtcggtgaaaagttggaccgtaagatttttcgataacttcataatcatgtcattaatatgcatcaagttatattaaacacatgcactataatacgatattgttcatataagtagcattttcttaatgttttgcaatacactaatgcagttcccttgctcactacatgatgcatcttccctttctactccatgaaaaattgtttttgtacaatatgaactgattagatctctctcaaattcaattttgcagaggttagccaaatgtccagtcgattaacatctgaatcacgcatatatgctgataaggcgagggatcttaatcgacaggtcagttctatcctctgattcaatttaattacctatcagatgcatttggatttcccattaacattgtagatttttttcatctactgctcttttaggctttaattcggaagtgggccccagttgccattgttcttggagtagtgttcctcctcttctgggttaaaaacaagctctggtgatcaagctgccttatcccgattttggaggttatgaagttttcaacgggatattgatattgactattgaggaatgggtgcggggttactttccagacttgaatgcttgaggctcatggaggattaatttgatggctgagtttgttaacttgtaattgagttcatagaggtaccctttgttgtcaaattaaatagtatactgttttccaaagaaaaaacaaaaatagaaaacctaccgtaccataaatacaatttaaagttatcagaaatttcttttttgttatcttctgtcattttcattctattgtcagttttaaattttgaatagaatgacttttgtggacacaaccaactttcaaactttcacgagtgggtgccttttaaatgttaatggacattgtaatttattatgaattgtttcgtagtacaaattttgaggacacaaataaaactaaacatgttcatttgttatgctaaaactagtatggagaagttgaaccatgaaatagttcttgaaatatgtggtttatagtgctctcatattaagtcgaaaactgaagaacaagttggcacaacactattattgggagatcaatgatagaattacacattttgtgaacagcaaagcttacaaaagcaagtcttttaattttcattcttctttggaagtgaaaatactaggtgataattagggtataattgtttaaccccaaattcacttgtaaggcgcaaatacaagagacgagttctgtccgccgaaggccagtgagttggacaatgctacctttatgtccaaacgctccttcttctttcccactagagcattcatgccctgatcacaatcacaaaatccaaccatgaaaacaacactgaaacattaactctcaacatacttataactcattatacataccgtgccctcatcgaaattatcaagatttatgtttgggt

SEQ ID NO: 218216 - DNA, 6666 bp, Cannabis indica
taaaagagtttctccggtcctccataccgttgctgcttactcaggtgacaaagattacatcgctgaccctccggccaaggcgcttcgtcgaattcttgaatcgccggggatttaccaaggccccgcttgtttcgatgctcttagtgctaagttggtggagagagctgggtttgagttctgctttaccagtggtatgtacttaatctcagtcctttcaaggccagtaattcaattaattccgttaattgagttttgtggttactttagggttttcgatatcagctgctagactggggttgcccgatacgggttttatatcttttggagaaatgatagaacaggggagacttatcacggaagctgtgtcaattcctgtgattggggatggtgataatgggtacggaaacgccatgaatgttaagaggactgtcaagtcttatataagagctggttttgctggaattatacttgaagatcagtacatgattttttaatatgctctctcacacacatttgtaaatgtgtgtttgctctgacttttctattcatgtcatgaaagtttgtgttcgagacatttgttaatgaacgaggattgctacaaggggcacctagctgccttgcaccgagtaattcaatattgagtatcatttattttaatttaataaaaattatagacaactgctaactaattataagaaatcatgtcacagagatgttaggcaccttagcaatgctcattgctattaggcaccggcaccaccaccacaaggtggattcttaaaatgacttgcaatattccataatagtaattacattaaataacgtgggctcgatacttaattttaccaatagcgatatgagacactgaagtacggttaggcaccaatggtgccttagaaacttttcagacccaataaccttcaaccttttcatttggttcaaactgaaagtttttgtttgtgaataaattctggtttcatgaagaaaacataatcggcagagtgagtttgacatagattgttgactatcaattcaatgtctttaaaaataaaagcaaaaggaagaataaagaagtacagcttcccattttcacataaaatgtttagcagtaggtattgtctccactgaagcaggatcgataggatcgtaaggatataaattaccttgtatatatgagacctttaaagtttgaagttgtcaactgacattaaagtaaatgaatggctagataatcatatcaagtgttttcgcttgtgtgatattcatcatatttgattgtttggacttttcctggcctaggatcttacaacctcatgatgtttagttcttaagctggtctctagtctcaaatatttatcctacattgatttctcaatctaattaacatttgatatttcccttatctgagttgtgatgtcctatttgcaactttgtccctgcttaatgtgcagtttgcttatgcacttccattgcaaggtatctcctaaagcttgtggtcacacacaaggcagaaaagtagtatcaagagaggaggcagtgatgcggataaaagctgctgttgatgctaggaaggagagtggatctgacattgttattgtggctcggactgattcccggcaagcagtgtcttttgatgagtcactctggaggtcaagggcgtttgctgatgctggagcagatgttctttttatcgatgcactaacttctaaagaagaaatgaaagctttctgtgaaactgctcccttggttccaaaaatggtatgccatgtatacatgttttgtaaaatactgattaatggacaaataattttctgttgaaacttagagcttccaaaatagattgtattggtgatgaatttacttgattattgttaggctaatatgcttgaaggagggggcaaaacaccgatacttaatcttcttgaactcggagatattggatatagaattgtggcctatccactttccttacttggggtatccatgcaagcaatgcaggttaagcatcgacatctcttatattcaaatattgcatacttggtgaactagaaaaataaagagaacaatattatctatatgcggtccaatttttggatagtgatcttgacatcttgtaaccaataatttaatgaagcattaataattaaaaaactcgggtaattctggatgaaatgtaaatctgacatctgtagaagaatattttacatattgtacttcaatgggaacatttgaagaaggcaagctaatttagtttgccttgactacctacatttcttaacaaaaattacatgccccccaatccatctcacctgattacgaaataccacattgcctcattttttgttattaacaataactgttttttgtatttaactattaatacaagtggattgatgtgacacttattaattggagggactgggatcatgaaatatgaaagcagaatatttttattccagtactttgtggggggaaagaaatttaacgatttatggatccatatgctcaaattttaaatattgcagattaaacgtttgtggcttgacatttatttgcttccctaccgagaaaataataagcctactggctacttcttctagtatatgatttcagttgatttcaattatgactctaactgcaggatgcacttactgctattagaggtggtcgtattccttctcctggaagtatgccatcatttgaagagatgaaggaaatcttaggtttcaacatctattacgaagaagaaaagcggtatgctaccaggcctaggcccagcacgagccagctatattcacggagaggtaagaaatacttcttagtcaagtacttttgtttacaattgttagtcaaagttgatttgccctcggtcagtagcagttttctacattgaaacataattactgattggaagttaaacttttcctctctatttagttgaatcttgattagtactactgagcaaaggtatgaagaagcatcagtattaacttgctgacaacacacaaatctcctagtgggagtgattcttgtctttcttgaatgatctccacattatgctaagtcaagagtttaactccgtgatgatttctattctacttcagacattaaaatgtaccttttttatattccatttttcttgtgtgtatatttattttgctatattgctgatacaagttgaagtgatcttagttttttttttcattttattttctaccttttcttttcagtttttaacataatttcttttttggtaatattaggaagttgtaacctttattactatgtaagagtatattttttagaaagaaaaagcctgttatagatttataaaattaccattacagagtcttaaattattattttaaagtaatgttaatttttcagctagcagtattgtaaatgacattcaacagagggctcaagataatgcagagcaaagagatcgaagtcgggaagatcctgcagttgaagtaataactcctgaagtgtacaatagctatcgtaccgatggttcaagagatcctttttctgggatctggtctcggtcattgagaataaagttaacaggaaaagatggatttgagaaacttgatgttaggattcctgtaagtcatctaccctctacgggcttcaaaaacttaatcttgtcacatgtttagtcactttatcacatcattgttttgaaataaaatcttgttttttgcttagtaaaatatatatcttcttggtttctgtatctctttcttgaataaaaagaatagtgtgctgtcatacaaacatgcagatatatactcttttattctaacatacacaataataatccgaatagattcacaatgtacgaattgtcttctgatttgtttttgatgttatttaattaatatgaattttaatttgttaattatgtaaccaaaactgtttttgaagatgtcaaagacaatgaagagtgttaatggggaaaaaatagatattgggtgactatctgtttatttgatgcaaagaattaaagggttttgttttctgatttagcgatagcgaggattggagattctagtttgtgtattgttctttctagtgtggatacattcacacttgtattatgttctcatttatacaagtttcgtttcttaaagttttgttaccatcttcaaaaacttcttaatcagtatatggtaccaagatctcacacttggtgactatatagaagtcaagtatgagtatgtattgactggtcctcctttagtgttgtggtaccaccggttaccatttaatgttggtcagccattaggttacgttgaaagcttctatagtagaacacgtttgagagggcttggtggtattaagaatggtttgggtggacctcttcttctttccgagagattgaagaacgaaacacacttgaagcaattgaaaagctccgccgggcagttcaactgaatcaagaactgaaacagccgtcatgggtgattccgtaggggatcttggtcctttatttatagttcttgcattaactggtggttatatagtgaatgcagcttcatgacttgccaatgtgggctttttttttgtcctgactgtttgaccgggagacctcctagtggccccaaggtttttgagtctctgggtattttaaccttggaacagatgcctactggcactttctcctcactactggaccaccaccccatggggttaggacttgccagtgttggattgaatacaatgctctgtttgaccaaagtttgtgttaatcttcctcttcgttttaaggacgtaactaaatcttccattgctttctagctttcatggttgatggatggcagtgctgcttttatttttcatgtttgactacttgggtttcaaacgtgattgttagtttcactgttggaactccaagatcctatcttggacctttctctccctgcattataaaacaaaaaaggctgttgaagagaatcaaacattgaattgcagtaccttacgaaaaaaaaaaaaacattgaggtggcgtttggttgggaggaatgaaaacataggaataggaataaaatgagaatatgaataggaatagaatggaataaaattaaaaatgcataaaaaaaattgataaaaaaatcaataaatttttctcatggtaccttggaatgatcttttcttctatttcaaaatagaatagtcattccacctaaatgatggaaagggcattccattggaatgatattccaatactttaaaatgcaaccaaataaaggaataaaatgaaaattgtttcctttccattccatttcattaccttcaaccaaatgccacctgaatttcagtagttcatcaacaaataatgtaattatttattttgtttcaaacaggctggattcttggaaggagtcaccagtatagtcccaggtatttcctattttattgcttgttgtaaaaggattgttgatgttgttaagtctttaaatctcagaactcattctgttatacagctttggggggagtaaacctcaaagagctgttggatgatgcagcttatgaaccaggagggaaactcttgatagattttaatgacacaattggcgatcgtattcaagtgtttctggagtaacagccttgcaaacatactaaaaggtttgggaattacctcttgtttgcaagcagaattctattgaatgaatatgagctttcaatttctttcttcattatcttatttatcgaaacaatatcatcaatgtgttttctcttccaacaaatcattgaatttggcattaacatcaccgaaacttatttctaattaataagcatatgttgtccattagtctatatagattgatttaatctaaataatgacattttatctccagtaagataattgaaatagtgaatatatatgtagcagacttatctaatataattggtgaaatttcgctgtcctcatgaaaagacatgtaatatgtatatgttgagactgacaaaagtataaaatttcagcatgtgtaatggtaagaaagaaattgtttagtttagagaaaacgaaaccttgttttgattttttaactttttttctttgacacttaactattttaatctctgttgtgataaattgtcttttagagaggatgtatagtaacttttagtgctttcagatgtttggacatgtggaaattgaagaactgtaacatcctggagcttgttatgaatcatactgcaaggcttggcaaactaaactatgtgtgtttataatagggctcgatctaaatccatgcacattcctcctatataattgatacaagggtgagtttgatatatagtcaattggatatctgaccctcattgacatgtatatgataaatgcttacaaaactataggtaggaatacttgtctcgactctagaatactgtatttaattatctattgtttttctacaaaaaaagaacaagaatactagaaaaaggttgtagcttgggacatctcctttacaaacaccttttcttctactttttcttgaaaatattataggttgtactaaaaatagagatttgaatacgactctataaggttggaagggtcacttcttttctttttctttttttttttttgaacacaggccacttcttttcaaaacaaaattaaacttgtgttgaaccaaaaaaaaaaaaaaaaaaa

SEQ ID NO: 218217 - DNA, 5689 bp, Cannabis indica
aaggctcaagctgccaattttccattttgtacaatagagccaaatgtaggaattgttgcagttccagatccacgccttaatgtgctttcggatttaagcaaatctcaacgagcagttccagcatctatagaatttgtagatattgctgggcttgtcaagggtgctagccagggagaggtgagacttctcagccagtctaatattgtgtatctttgctttttctttctaacacgctgcttgtaaagttatggtatgagtatgttggggtaaatatactttatctaactatctttcttaatattcctccagggcttaggtaataaatttctgtcacatattcgtgaagttgactccttacttcaggtacttgttcaatgcaataatttcgagatactgtctattctgttgtgtgatcagctgttagtaacttagtaatagaagaaagcttattcaacacttcttttggtatttcaccccttttggttatttattttttgtttttatatctgtattgtctgttgtttagaagttggaacaagcctgtacttttggattgagtcgcttatatgttatcgtgggccaaatgattgttgttgcaggttgttcgatgctttgaagacaatgatgtcattcatgttaatggaaaagttgatcccaggtctgacatagatgttatcaacttagagcttgttttctctgatcttgaccaggtttgctacttaaagcttgcttaatgcactctatactttgttcttttgatctttttgataggaatttcctatcatttcggtacaaacattagcaaaatagagataatagagctgatatgttgatattggaatgaaaagagaacaagttgctgggtattcgatagatctctctctccagagagctaatgctcactttaacaaaataattctctaccttcttaccttccttactcactcatatataaccaacccctccaattacaattacccaattaccctcttttttttatttccctaaggcctaacaccttcctactaacgttttagagtttcttgtctgtcaaatattgtaaatttagtacataatctaatatggctgtaagtctctttgatgatttctctatatctctctttctcataatgtgtaatctaattaaagaatggatattccctatcattatgtcttttcacgagaagttattgagcgcatagactctgtgagctgaagtatatatatactgatttttcggttatatggtctgacacagctacaaaaaattcttcttgtataggtgaaagttataggcaatgccttgattagttaatcattggtggttgtaaacttcaaaagattcttaatgcctcagaagaacttctaactttatgctacatttcttgaatttatttatcacaaatgaggatttacattctttttttggtaccatcaaagtttattaggatcaaataaactgatgaactaaattttaccatctacaagaatgcagattgagaaaaggctggataagctgaaaaaaagcaaggggagggactcgcaatctaaagttaaggcaagtgttataccgaatttttttactttttgttattaaatgagcatgatctttctcctgttgtcctaacccttgatcccaacagcctcttttaatattaattccgaggctagttttgatgttaaacaaaacttttatttcaggaggacgcagaacgatctgccttggaaaagattaagattgcacttctggatggcaaaccagcacgatcagttaccataacagattttgagaaagaagctgtgaagcatctttgcttgcttacaatgaaacctattatatatgtagctaatgttgcagaatcggaagtagctgatcctggaagtaatccgcatgtcaaagaagtgatgggtcttgcatcagagttgcaatctggactagtgaccgtttctgcacaggttacaaactagcatgttcttactcatctgttggattcactttcattgtttggataaatctgtcaactttgggtgacacttggtaaatgaatttcatttcaggttgagtctgagctaactgagcttccttctgaagaaagaacagaatacttgcaatctcttggtgtcagtgaaagtggtcttggaaaccttatcagagcaacatacagccttttagggcttcgcacttatttcacttctggcgagaaggtgaggatggaagaaattttatatggctgctccttgaaatttcgatttttttttttctcctttatatagtgtttgttttcttctcacaggaaacaaaagcatggaccatacttgcaggttagctttgtttctgctcggcataaattctatactacttgacaacttctcatcacttcatgtttgtacttgttttctttacttaataaatctatatgtttctgaaaaataaaaagaaaaattatggaattggatgttaaagtctgtttggatacttgttcatcatgctaagttatctaatcttttggtgttgatgaaattagggatgactgcacctcaagcggctggagtcattcactctgactttgagaaaggtttcatccgtgctgagacggtacgccacatttatagaacttcttacttttcttccccctttttcaagagcatgcatgtgaaataataaaaaaggaagtatattatcgaattacgaatgttttggtgccttgctcttgctatgtttcagcttaactatttatttgtacaagatacttacttacaatggcaacacagtgatgggaaaattaggaaaatcaaaattgttagggccatgcaacaattgttatgctttattttctgcagtactaagtttacctgattatggagagaataccttcaaaattcatccaaatattcaagtaataatattaatttcattggaaatgaatgttgcatcatcaacttacttcttttctagtttgcctaccagtcaattcaatcgatggttgccatatattcgcagatgaaaaattattgaaaattgttttacaagtgtcttgtattgtttgaaaggtcatatctttgaccaattactcattgatttttttttctcctaatcaggtggcttatgatgattttgttgctgctgggtcacttgctgcagcaagggagaaaggagtcgtaagtttttggctttagttttaaatttcgcttggtcagtagccatgcttgttagagagttccccattgataatgtgtgggaatctaataccatatataagttgtatgagctacttctctcattgtcaattagttttgagatagaaccttatattctaacaatgcttgaccaccctcaacataatcatagatttactatgttttactcactttcacataaaattggatacaattggaaagatagaaaaagataacaaacataggtctttcatcttcattatatgaatatgcactaaagataaggtctaaccacaaaatcccatttagaaacattcagttctttacttgttcgcgtctcttagatttggttatcaaattagagaatgcatatgtatcattaaaaacagctctgaatgttggctctactttgatggtggcagttgagatcggagggtaaagattacattgtacaagaaggagatgtgatgctgtttcgattcaatgtttagctcggttttagcagatggaaggacttttgttttctccgaaagtgaaggtgaaactggaaatacaggtatggcaaaaattggtcttggagatttgaaaatacaaatgcacagactatcaccatcatgtaatatgattgttagtagttacatgcagagagagtactataaaattttgcttggaaagttaaatatctcaattgattgattaaattttttgtaacatcacttgtagaaataaacagaaaacagatactatggttcccattcaattttcaattttattttattttcagtaatactctcatttcttgccaaatttcatgaattaacattttatcttaattttttagagactaatgtttcgaataattagtatttttgtccttgaattttctacattactaagttgtgccctgtatgatttatggcttgttttcgaaatatagcttttatagtacatggtctttccatcacattttatccatttttttcgtaaaacgaatgatgtggtggatggtagttgataaatagatacaaattaaatacttttaactttttttactttggtgattaaaattaaaaataaaatttaaattattttaaaaataaagtcttttatgttattatgcagaagagtatttaatttgcatccatttataaattactattgatcattctacttatttcgtgataaaattgaaaaaaatgtgatgactatattactgtaaaaattatattttgaaagaaattattaacaagccgtatactctaatgaacacaatttggtagtgtaaaaaattaaaggagcaaaaatactaattattctattaatattatctttgattatgaatgaaagtgataacaacaccttattaattttcattaattaggctaaatcttaagtgataattttttttagctgatttgtaaaacaaaagtgttctggtattagtcaaaataaatgtgtatagccagatatcattttggtgtaaattataattataatacatgggtgtgaatgtgattaaactaaaacaagagtaatattgtatattaatttttaaaggtgaaaaggaacaaattagtgacactatataaagatatgtgataacattagaaaacatacttttcttttctataatctaatctattctaattatggatgaagatgaagataaggtgtctttatctgtaacagatagcatcatttgtcacaagaactaagtatatacacacacacacatatatataaatatatatattgtgttagaacctcctttgatgtgatatgcatgattggttgcttttgcttctaagcaagcaaatctcacagctgttgtcacttgtaagcaaagctggtcttaataacacttttattaaaaaacaaaatccttaactaattacagaattagaagctggtttggtgtcatttgtttgatatggtcaatcaatttcagttgaggtaccattttgtggttgttatcaaattagggttttcaaataatgccaaccaagggaaaagaggggaccctcttcatatcattttcattttattttatttttgttctcatctcatcatgcaatgcaatccaatacactacagttttttttttttgttttaataattatatgatgaaaatatttaagaatagtattataggaaggtggtatctagttccttgtcacaatcattgtcccaccttgtgattttgaatgttcccttttcttatggtggaaaatttgataaaattaagtaccatacaaaaccaattggaaattatgatgatttgggatattacaaccagagatgggagttattagcttaacatgagagtcatatgattttgttaagttgtttttagcttttaaaattaaaaaaaaaaaaaaatcatgtttgtcagtaaaaaatgaaaaaggtttattttttttacctttgtaaagttaggaattttaactttttaataacatcttttagaaggtataggacagctctaatggaggtactttactttcaaatttat

SEQ ID NO: 218218 - DNA, 3276 bp, Cannabis indica
tatgccctccctcccaaataatcgagagtctacaaaagctgctgcaatcaaccacgaagagccacatggctcgggattcagaaaaaaacttacatcatgaacacattcaaaagcagagatcatggcgttaatgttgccggtacactctatgctcctatcaacaccaccatgagttatttctgcaattacctgtggattttcccaccaatttgatgctatgtaaaggccaagccatgcttgaaaaacacataaaagagtttgcatacactattttgtacctcttgtactggtctgtcatggtctttcgggttcacaaactcgtttataccaaattttctagctgagatgacataaacaaagaagcatgagccaaaatcaagtttcttattgtcttaacaagacaacaattaagataataaacaaaagattattataccttcttcaaaccttgaagggttcaaatcaatccctataatccttgatgccccagcaattcttgctccctcagcagcctatatacaaattttcattagcttcaataaacaaattaagactaaaaagagaagattaaaacaaagaacatacagccaagccaactgctccaagtccaaacactgcaactgtggatcctttctttggttttgccacattcaaagttgcacccaatccttcaaaaaatcaaaaccatatatcaacattacatacaaaacaatgttttgaatttataaccgaaagagactcatagatcattttgagtgtatggtaaggtgtatgggtttccaactcaaaatcaatcgacaatgagaagagtagttcatgtttcttatgtatggtatttagttcccacacattgtcaatgtgagactctctaaaaactcaaacgaaacatgttgggacaaaattgggtggttttgagaccaaaagcaaactaaaactttaggtaattacgccacagatatctttaataacaataataaaaaaatatatatctaaagtgagagaacatgcaaacctgtggagatgccacaactgagaatacaaactttgtccaaaggtgccaaagggttgatcttggctagacaaccagcatgaacaacagtgtattcactaaaagttgatgtgcctagaaaatgacttataggatttccattaatggaaaatcttgattttccatcactaagcataactcctctatctgtattgattctaagaagatcacacatattgctttcctcagatttgcagtgcccacattccccacattctcctgtgaacactggaagcacatgatctccttccttcaagtccctaaccccttccccaacactctccacaattctgtatataaccatacatacacataattatataaacaacttcaaaacaacttaatcatcgaataagtaacatacccagatgcttcatgaccaaatatgcgaggaaacaatggtgtttggccctacaaataccaaaataacaaaagaaaatcaacaatatttgcaccataattgtgtatttttattttctacttttacttattacaaatacgaaaataagcacaaaaataggattcaattatcaactgtttattcgaaattcagaagatgtaattactgttagaataaatggtagagaattgagccatatataagaatatgggctactttactcattctcaattgattttaagatagaaccgattctcaacatggtatcagagccatatcccttatcggcatcaacatgggatactccactcattgcccataattttcaacaattactaatttactactaaagtactaaccttggcttcccaaaagtaaagatcagtatgacaaagtgaagtgtatttaactttgatcctaacttccatggcttgtggtggagcaacctcaacaatctcaatcactaaaggcttccctgcctcccatgcaaccgccgctaattcaacaataataataatcaaaaataaaatctaattaagaaactgatcatgatatcatcatcatagttaattattaattaattagtagtgtgttaattatatacctttacaggaaattacaagaccagcagtactactcgacatggtttctttcttttcttttgatcaaattaaactcagtactcctaaagaagtaaagattttataaacttgttatacattattatgtaacaaacaagtgaatgtggatagatagagaagattcactagaaacaaataggaacagtttttgtattttggcttgattgaaattgtcaaaaaagaagaagtattagagggattgattgattgcaacgtgttgagagagagatcatgacaatgtatgggtatggtgtaacgtgggcattgtaatttcttacattattcttacctataaatataaggaataaggtgttttcttcttctgttttaatttcccaaaattattattccacctctaaagataactcatttagcttttatgcacataggatgctaaaacctaaataatatagtgttaaattaacactaaagaattcgtttagtacactgtattatactgtattgtattgtataatattatattaaattatattttatgtaatatttttatttaaaaatatatgtagtattaacttttatgtacacctaaatatataatattttaatataaattaaaatttaacgtagtgttatataaaaatatgatatataatctaatttaacgtaatacaatacaataccacattccaaacgaactcaaaaaaatataattttagctttaacttttttttctttctaactacaatacttaaatttacaccaaaaaaaaaatattccttataattttgttatattattaaactatttgacattataatatatatatatataaaaaatatgagtttgaccataaatacattactttaatattaaaaactaaagaaatataatttatagtaattagagtttttttagagtaattttatgtccaaacttccttatttttttagattttacgtcctattggaaaagcaaattcactttagtataaattatcttatcttcaaaatcctctctacaaaatactctatattcacttagtatgagttaacgacgtgtcgttttattaaaacttgataaagaacgacaagtctagcttattagatagaataaatcgcaatctgatatggcagtctttagattcttctattcgattttttttttttttttatcttcctgaaaaaatatatatttatgcaatttttttttttttttgtagtaggtca

SEQ ID NO: 218219 - DNA, 2831 bp, Cannabis indica
aaataaaaaatatgtattttttccttcccatagatttttttccctttctttcttttttttttcttttccagtatgttcattgcctcgctatctctctcatgatctcctctctctttctctctcagtcctgatctagggttttcaaaacccggtatctacaaaagttcttaaattataacttagatattattaccgtcaaaaattaaacttaaggtatttatactgtaaaatactctagtaaaaactacagatattgttagttttatcccttttttttctggacattccaaatgtttttatcaacgtttctacactacaacttttttttagtcacaataaaatttattactaaaaataaaaaattgtgactaattataaatatcattctcatgttatcacaaaaatgtccataattaagattattagttacaaaaaacacaatttataaaactaaattaatgacaacttgtatctaaatattatgtttttagttacaagtaacttattattgtgactaaaaatcacatttaatcacaataaatttatagtgtgacttaaaaattatcactaaaagtaaatttttttagtactaggaaggaacaattaatgcaagtgttttgagtttttattttattttattttatgaagagtattatctataaatgagtatttattattaggaaaattaaagtttttctgtttaattttactatctaattaaaataaatattttacttttacattatatagttaaaggttgttccatcggaagagagacaaaaaaaaattgagttcaagtgaaaaagagaggaagaataaaaacaaagctaaatataaacatatcttcaaatatattgtaaaaatacatggtttttttttttggtattagttattagtattttaagattgtaattaaattattgattaattagtagaggcggctttggatctattttaatacaaggtttgcttctaaggcatatattggtttgtgtgttaatgtgattgtaaattgttgtttatgagggacgtgtttagaagtgttatgattgaaataaataattgttaaaaagtatcattcatacttagcactttcttcaatgttatactgttattattgtaatttaatcttaggttttatatgtaacttaagaatataatttttaaagaatattattaatcaaaggctttgaaatattacatctacagaattttggtcaaacccaattaattagtgtgtgtagaatttgaatttagtataaaaatgtcttaagatagaagtgaggatatataagttataagtatgtataatataacatgatacatatacaagttattactatatatatatacgtaatagagagagcagagacagatattaggattagtgatcaacaccatgaaaagagctccaagaacttgtttctctcttcttcttctcatttttctgattccattgaagatttcatgctcaccaagaacacaagcagaggctctaataagatggaagaacaccttagtggtgaagccatcttctctggattcatgggacagcaacaacatcattaatctatgcaattggactaatgttgtatgtgatggttccaatggagaaatctcacaaatacatctctccaacttggaactcaatggaacattggacaacttcaacttcactccatttcttaacatcactgccttcaacctcaacaattgtaagctctctggtttgataccaacagccattggtaatctcaccaagcttactttgttggacttgagtgacaatgattttaaaggaggaattccagtggagataagccaattgtctgagcttcaatatctgagtctctacaacaattctcttgagggaccaataccttaccagctcagcaatctaaaaaaggtatggtacttatcccttggagcatgctattttgagaatacagattggtctaaattttcaaccatgccttccttaacatatcttgatctttattggaacaaatttaattcaacattcccaagtttcacatcaaagtttaagaacttgacttttctagacctatcttataacagttggactggttcaattccagaatctgtgttttccaatctgatcaaacaccaaccaactatcaggagagttgcctattaatatttccagtctcagtaacttggaggccttctctgcttccaacaataatctcactggttcgattcctttagatattggaaacttaaagaaacttaaaaagttacatctttctaggaacaatctcactggtccaattccaacatctctgtggaacctcaaaagcctcatctctttgaaccttttcaacaataatttaagtggaactatcccaccagagattggaaatctagaattcctcaaaatttttgatgtcaagtccaatcaactatcaggagagttgccggttaatatttccatgcttcataacttggagttgttctccgttctcagcaataatttcagtgggacaatccctagagactttgggaagaacaatccaaatttaaactttgttatgtttggaagcaacaactttgttgggcagctgccacaaggtttgtgtagtgggttcaatcttgaatcttttggtgtagctaacagcaacttaataggaccattgcctgcgtgcctgagaaactgcacaaaattaaacagagtaaggcttgatgggaatcgatttacaggcaacattaccgacgcttttggagttcacccacatctcgattccattttcttaaacacaaccgattcattggccacatttcaagtatgtggggacaatgtcagaatctca

SEQ ID NO: 218220 - DNA, 6609 bp, Cannabis indica
atgaaaggatttaaacaaaacaagaaagctaactagattgggggatagaaaccatagctacaatataaccggacaatgaagtagtttagtgcaactgctaacaagttttaataaaataataaataacaagcaaaagaaaaaactgagggagcgttttctttcctagtgtgcttttctaaataaatcaaagcattaaaccatccatgattataatttgaatgcttaatcgaggtattattaaagtatcagaactcccttctttcttgttgcaattgctaaagatagatcagaaaagtatcagtatggtgattcgaagagagtatgactgcatccatccttctataagaatctagaaggattatactcggaagttacagatattggtaaaacatttcataacacctgtaagttctttttgtcttatgggctgcacagcaggggcggcttgcctgaaacattgtaaatcctaaacagtataggctcagataaagtttctgctacaaatgcagatttctcaatttggaacaaaatgtagcaatctacttatggtgatttgcttctcctactctcaatgaatctttattaatcattcatggtgtcgttactcttttcttataaatacacatataatcatttttaaattaactttgaagaatgattgaaaaaatgaagaaataacataccaaatttgtgtagaaatcttcaacaacagcagtattactttgaagaaacatagattggagatgagttttagatctatgcaacattcgagcaacaagagatatagtgtcagcacctgcacatctttcctgcatcgtaacaatgatgttatttataggcccatttaaactgcacataatcttgtgcttgtattaacctgaagacagcagcacaatgaaaatttattctgacttgaagacttttatattaccaaattatgtttttcattgtgtttttgaaagcatgaaatctagtaaataacttgggcaacaacttattttattgacagatatgtcttatatcattgctcttatggaaaatcttgttctccggaaaatggggaccaaagtgatggcttaaaattagtaatccctttctaaggcacagtagaataagcagcacgaattcatatatagataatgcaatgagttggggcatgaaaaatataccgaattccaaatacattatctctaattctaatataaatacaatgtttacttttaatgtattgcattacaagattccataaataagattgtgtaccttgagaccaaaagatattcctggtgcatgaccgaaatttgaattggggggacttggtgtgacatccgcatgtgtatatgatggagtcaaagatgtttgtgtagaggatgagggttttatccactggtcacaatcctgtgttattctagataatgccatcttcagtcgacctggataacacaagataagatctttcagcgtgaattgcatatcaaattgaaaataaccatactgcagataagttgatgtctaagaaagttttctaaagataaggcaaggctacaaaattaccattatgtttgtttttaaatggcgaaagaagagacaaaatcacttactgctaatgaactcaaccgaaccttttccagctgaaatattgctttgttgaccaaacgtttcaaatacaaaatgaaaaaataactcgaacagctggcatatcccctgcaacaatatactgaatcaggaaatttttcagagaaaattgaaaaaagactagtaaacattactcaaagtacatgtaaattataaggttttctttgaagtaagaacttaccttgaagaactcaacattgattatttttaacttctgcataagccttgcatacttatccatggatctgacaagtaaatgtacttgatcaatataaatatgacccaaaggaaaacataaactaactgtttgacacataattagagcaattttctccaaaatatataaaatattatctcaccgaagaacacaaatagaagatcctgtttgggctacacactcatcatccttcaaacttgaatgacttcttcgaactttaggctttgaaattctacttgggagttgactatcctcatcaataaagtccgcaagaagatcttcattttcttcttctaaaacagaattagtaccattcaattggcttgagtcgctctttcgtggagataccttctcatcaaaaagattatcatttagatgtccaccaagttcagtaaagactgttccattaaattgattggagtgaccttctttggaagtatgaactagtttagtcagaaatggatttccacttattgcccagtgagaaaatccactcttattcgaacgagtatctactgatttgacagacttgtcaaaaatagatctggagtgaccggatttgccatcagatgaagcaagtagaggtgctccatcaccaacaagcccagcaaagctgattgcctgtactgtatctggtggcattacaagccaattttctctctccaaaaccattttaagtgcctgaatttaaaatatatgtaaatcatgtgaagataacattaaatgataatataaacacacggaaattattgaaatgtgaaataaacaaaattagatagaaattcaatacatagcatgcaagtaaatcattttaagtgcctggtggcattacaagccaattttctggtggcattacaagccaattttctctctccaaaaccattttaagtgcctgaatttaaaatatatgtaaatcatgtgaagataacattaaatgataatataaacacacggaaattattgaaatgtgaaataaacaaaattagatagaaattcaatacatagcatgcaagtaacataattcaaccgcttcaactccacaaaatgcttacgtgtatattctgccggtgaaatgctatgaagtaattatcacacacaatttttagcttttgtctaaattcaactgcttcaactccacaaaatgcttccccagccaagatgaagacattgagatcttcataatttttcaagaattggtggatactagcggaagaaacagcagaagaagaaagcaggacagatattcgactagttgtgagttgccaaagattcttgcgtcctctttgaagggtttgtgaaacaaatcctgtagcatcttttcggagatgataccatggagatccactggttgatgttgccccatcatcctttgtatcttcaacaatggagtcatttggacttgtatgtgcggaacttgtagaccgagtatcctcagataaagatttcacagctgtagcttctattgtagaagatgaaccagaaactctatctacagattgatcaagagagccattaaatctagaggaatttccagaggcagacccaactttctggacctctcctgcattcctagagttatcattttcccttggcacactatttgatgtttgactggctgtatcctggaacataaatgtaaagttgtctcattcacatgaaataatgagaaacaacccatcaatcagaacaaaacaaaaaggtattaaagttaacaattaaaaaaaaaaattaaaaattaaaagagtacaatgagggatcaacaggcaaaatgattagactatgtgaggagggtgtcaaagtggtaatagccaccaatcaatcccaaacttagttgatgagggatctgaacaatacacctctctttaaaaccaatgtacacacaatggcccactctaagcttatatttgcaaaagttgagctaatgagaatatattgctcaagtgattgataaactaccgacgtcgtacttgagatacagcttgcgatggcaagaaattcatcaaagacaacttgagaaggtcaaagctacactaaacaatgtttctgatttatcattaagcaatggttaaaccataggaatagctaaaaggaaaaagaccataagcaaggggagaacactctagaattagaatatatcagtttatctaccaaaatatagggcactaaatctcattaatcaccacaagtgagtaataacaagttttaaattctaccttattctccagctgaaatcccataatttcattgtaggagcacattagcctaaaaaggacagctagtgttctcaacaaactctgcctaaacatagattcaggtatccgaaggcaaagatcactgtatgtgagtctggaaagaaaattaaaaagaaaacatcaggaagcatattgtgagaaaggtaggaagcaaatcaagagtcattattaacaaatactcctgcaagaaaatatatgcaaaattgaaagcaagagaagaaaaacaaaacctacctattattttgtttatgcacttcctgatcctgtaagataaaagcaataataatataagtatattaagaagtacagtgtataaatagataattaattacacaatttaaaagtgaatatgagttgtcttccattgtcaaaaagtttgggcaagtttgttggtttactgttttggccgttagctttgttgtttcaaccctgatttctgagagttcaagatctttttcatgtgttttaattaattagaatttgttttggtttctaaaccccctcttttccaccaacaaaaaaaaatatacaatcgtggctcaccatatctttcccttttctgatctagttataattactgttcgtgaaaaaacactctgaaggcccttcaatggctaatcactttctatgacttatagtaagtacataagccagacaaatctagtaaagagagtaagaagcacacctcttgcacagtatccttcaatacagagtgggtttctgagagaacttcttgcataaagaagctttgtatcttctcagcaagaccggcgatatcaccaataagtgcataagcatcaatcacctgttttgcattttaacaatatattaattttaataaataattcaagaaatacatatttcagaatgtaatgacagctaaatatggataacactcacagtaatatagctctgttcattaaactcctggcatactcctaacaaaagtgaatccaacttttgaagggttcttcccagccaaccctggattgaaatatacatattaaaactcagcccgtgattgaaatttgtaaatgtttagtgaaagaaacatggaccacagtgaactcgtttacaataataatgtaatatccacctctactccacggctcatctcttgtacagctgaaagctcggagaaactatctaagagttgcaaatactcagatagaacttgaaaagcctgtaaatgacaaacattagcccaattattttttagtattaagatttcaatgtgaccacaaaaatgaatagagtattgacacttgtagatcataaaatgcaactgaaaagtaactctcaccttgcagtaatctccgtcttcgacaagtgattcaagtgctgcttgcatgtccaatgcatggcgaagctcagttaaaacaggaactatgtcctaagatttacaaaaatttgaagtttaacatttttgaaacaattactctttctacaaagactgacatcccatgagatagttatgattttctaggaaaacaaaatttgaagtaaaagtttagggtaggtctgtcactgactgctactgtctataggaagagcaatgtaccagaaaagcttgcttctttttggaatgggaatttacaacgagatctcttgaaacctcattgatagatgagttaagatgccttcttccattctgtaaaattagatatatacacgtaaggaaactataaataatggcaacccagcaaaataacattgtttttcaatttattaggttcattgcatacagatcaaaaatcaaactacgacttaccatgcagatgacatttgcaacctttaagtctttctccacttccctaaccaaattcatacccttcactggccaaaagtaagtatcaacatctcatttgaaacttcatcttctatataaagttatcatagcaccaaacttgtgggaaaatggtgatagaatgtgggaaagtacaaaagaaatgtattttctattttttttataataattactaaagactcacccattacttcatgatgctccataacttgtcgagacaaccgttccgatactctatccagttgtgctaatcttagggtagcctatgaaaagtttcatataaaactaaatgctttaagtccagaaatgtaattgattataataatacattcaaatccatgagctccaagagctattggcaaacttgaaacactcaaagatcaaaaaacatgttgatacttcatttaaaaagaaacatattgtttatggaatttatcttgtaaatttctttttttggaaaagaaacaaaacaacaagaattcaaagaaataggataaggtgtccccaacagaagcaaaatacaaattaaagctactctagcaaaaaaaaatttattagacaaccaacattttcaaggtaacttgagcatcccacaaatgctaccttcctcaatctttacataatctgttaaaaggttgaattaggaagtctattttggccttattgtaggttgcacatctgttccatttgtttatagg

SEQ ID NO: 218221 - DNA, 4975 bp, Cannabis indica
gaagatcattcactcttgctgttacaacaaggagcaattgtctggagtagggaggatggccttgcgtcaattgtagatgtagcaacatcagaactacctgtggagaaggagggtgtatcagttgcaaaagtggaggataacctctttgaatggcttaaggtataaatattgagttcataataggatgttaagatggtattcaaagtttgaaggctttttgcaactatagaattagaaaaggggtatttttgtgttcctggcctcttttttttttatagttagtatttcagatattacgttttaaaatttgttgactggcatgcatttgatttacttgttccacctcacatgatttatttggttgatgtttgctattcaaagggtcacatgctgaagcttaagggaactttaatgcttgcaagccctgaggatgttgtagcaatccaagggatgagattaaagaattccgagaagagcaaaatgacccgagatcacaatggtttccggaagctgcttctagtcctaactcgagcaggaaagctgtttgccttgcacagcggagatggacgagttgtttggtcgcttttactgccttcactgcgcaattcagcatgcaagtatccaagtgggcttagtatttaccaatggcaggttccccatcatcatgcattggatgaaaatccatctgtactcatagtaggccggtgtgggcaaagttatgacgcaccaggaatactttcttttgttgatacttacaccggaaaggaaataagttcattgagtcctactcattctgttgtacaagttcttccactgcccttcactgatgcaaccgaacagcgtcttcatctactgatagatgtggaccaacggacatatttataccccagaacacctgaggctattagtatatttcaacgtgaattttcaaacatatactggcactcagttgatgctgataaaggcatcattaagggtcatgctttgaagagaaattctgctggtgaaaaccttgatgagtactgctttgactctagagatgtatggtcaattgtatttccatctgactcggaaaagataattgcaactgtgacaagaaaattgaacgaggtatgcttttattggttggtacaactgttattgatatgcttttagtagtgttgaaataggtaaataaataaaataagttaaatggatagtctggactggagacaataaatgttattttatgaagaagaacaagaaatatttgtgaacctaatttcaaatccctttggatgctgctgcggggacctgtcaccttcctaactgaaatttgaattggatctttctatgttttttccttttacattctgattcctgattacatttctattgcattgtgatttgcattttgtaggtggtccatactcaggcaaagattataggagatcatgatgtaatgtacaagtatatctcaaaaaatttgatgtttgtttccactgttacgccaaaagctagtggtgaaattggagcagctaccccggaggagtcgtcattggttgtttatcttattgatactatatctggtcgtatattgcacagaatgactcatcatggttctcagggtcctgtccatgcagtaagctttcaaatcccctatcacttacggtcttgtaacgtataaaagattttcacttattgtattatccattgtataggttttcagtgagaactgggttgtctatcactacttcaacttgagagcacacagatatgagatgtcagtcattgagatatatgaccagtcccgagcggtatgctgtgaagctcaaaaatccttgtgtaatcctgtcttttaaatttaatactgatcaaaatacatttaaaattgacaggccaataaggatttgtggaagcttgttcttggaaagcataatctcacatatcctatttcttcgtactcccgaactgaggttgtgacaaaatcacaatcttactttttcactcattctgttaaagctatatcagtgacatcaacagctaagggaataacttcaaagcagcttcttattggtactattgcagatcaggttagctgttgtttttggaatattcttactttggtaattactaatctgaaatcctcaggttaggtgctgcatggattgtttttcttaacacattacacataactcgatggatgacaactctatgcaggttttggcacttgataaacgttttctagatccccgtcgatcagcaaacccttcccaagctgagcgtgaagaaggccttgttcctttaacagattctttacctatcattccccaggtacatattgtcttttttccattatactctgttttcagtgtgatttttcttcaagcttggtgcattaatatatctgcctagtcctcgataaataaataagaacctgacctcgaagttttatcatactatctattaaccgtatacaaataaaataaaccatgttcaccatctataccacatctttctttgcagtcagatttgttctcttaaaactaatataactttatgtaaatagttggtattaacataggctccaattttgcagtcttacgtaacgcatgcccttaaagtagaaggacttcgaggcatagttactatccctgccaggttggagtcaacaacacttgtttttgcatacggagttgatctcttttacacgcgaatcgctccttcgaagacctatgattcactcactgaagattttagttatgctttgctcctcatcaccatcgtcgtactagtagcggcgatcttcgttacatggatcttgtctgagaagaaagatctacaagataagtggaggtgatttttcccactcctgtattctaacttttttcttcttcctttttcctttaggctgcgtttgattttagtaaacttattaaaattaaaatcatgaatctctgaatatttagatttagtccatcggtggctatttttgttgtaaaattttacactttcataagggttagattttgattaccaggttgtataactccaagctacaatataaattatgcataaactcttttaatatttgacatgggtgattgttaatgaagataagtgattttattctctgcaaagaaaatttagggtggcttttgaagcaacttttttttttatatatatattgggtataatcattgttaattgctaaatttgatgtatttgtttaatttgaggtaattgaagttgtattggctaaataatattttttacgtcccttgagacttatacaaataaataatattggtaaaatatgatatgaattttataattttttttttttggatcttgtaatagtaatgtaggacaaaacagacaaagttttttttttttttttttcacaagtagcaatccaattattaaggtttaatgccaataagtgtactttatttatttttttttttgaaagggacaataagtgtaatttaaatcttacaattcactcacacataaatgatatgggacgaaatatacacaagtttttttttttttttttttttgtggataaatttcaatcttgcccacttgattttgggttaaataaagcataatatccttgtacacggtaaataataaaaatggagaaaaaaagatgggttgatcattggaacttgatcctagcggtagtagtgagcctgatgtccatcacttgagggttgatgttgtccgtttagctcttcactttgaaattttcacttccaagacgaacgatagattgtgacgtttccatgagtagtacaaacaaccacagtatgtctcagtaattaagcactaagttgaattttgaaggcatatagtacaggggccatcccatccaggtccaccacaaagaatttagccatatataggatatagctgggcgtacgcttcttggggatgaataggtccctagctactactgtgagtgtaaaaagtttattgtaaatccatacgaatggtcgtaacctctaatagggcatcgtaaagcatcgttgtgagttgttgtgatgagagaagtgaacctctttttgactaatcatgtccaccttggagtaatatatatgtcaaatagttagttatatttggcttagtggctgaacgtgacttgctattataatttagttgggtattgttatattaaatgtacatttaattatttaaataaagatgaaaaggacttgtcaaatatttttacaaagtaaaccgtgtatttattctcatggatgtgtgtgtcgaatgattctaattgtatcttattttgtcataaaataggtagaaccaaaccaaaccaatgaatatgtatgtggttgtaccagaacacacactcgatgagatgaccaagtcagatcaaatcaactcctccgtttatgttatagtatctacttctttgggtccctttgaatccaaggccggccggcccatcctgacatgacattgtttgtgttagcccagaggcccagaaacaaaactttctgcactccaaattattgactgtctctctgacactaaccatgttaggtaggccatacctgagtacgagtatgagtatggccatgcccatcccactctcatttcagacccttttttctcttttttcttcctttacctgaaccctaagctgtaagaaaagtaaaagctgtaaaatagtattgagttatattacaaccatactaattactattactatatactagtcttagtctactctcactggtcttgaatctggatatgattacctttacaagattaattataatataatattagcaagattaattataataaataataagtaatattgtaatgtattaattattataattataaattttaatacaatgtgataattgtattattttatacattataatattggagatggacttgggtccctgacctttttcttaaaaaaaagcgtacttataatagatagaaaattagacctcgtggtcat

SEQ ID NO: 218222 - DNA, 8305 bp, Cannabis indica
gttgtagccaattctaattaatctccaacaaacattggacaacatactaacattcaaagaacagatgcaatgttgtttctttctgttggttacacatcatacatgtctcttcatacatactatgaacaaccattcatagtatgaagttgtgtttaaaggtaatgaatctcccccaaacttcatggctccagtgagctttgttttgcgagggacaaaacattttatagcattagaaactatgtatttgctctataaaaactgttggtcattcaacaaggatttgatctgatctttaagggagacaagactcttccagtgttagctcccttgaattagagctttgtagctccaccagtcctcatccttaatgtaaatactatggacactgtttttgacatgtggcacaaacgaaagaaccctaggccccacatcctggacaaggcaatcaacctatatgctgggcactgtagtagggcctaagttgacatatggggatatagaggtaagcacttaagttttgtctttcaacagttcaagagaatgggttacgaagacactagaatgatatctggaagctagagatatgagttggacatcttagaagtccacttcggcacctaggtaagcacctagtgcccatgttaattcatgtgccctagatcacatcgatttcgattctaagtttcaataccataggcaaatgactagacaattgcaacaaagtacatggaagacatgccataatcaagtttcaagcctcataaccaattttagaatagatccctacttagggggcacccaagttaacatcatgtgatcctgggcacacaacgacaagtgtttaggttttatgagaacttctttcaacaatgattcctcaaatctatcatggaacaatgtgtgtacttgagtttgtgcagtgggctcccggttggcggacaaataggtactagggccctcattggtagtgtgcactcactgggcgcacaggtcacccaagtgaaaaatctgagcaaatcattcctgctttagatgaaactagatttgcatgaacattttccaccaagaaaattattgggcgaaaaagaagcagaattcaggcatgcttaacctagacccagtccctaggttggccttggacccttagaacatgttttctgaagatgtttcctaagaatttcctccattttaatcaaataagaggaaacaatagctttctaaaactaaatgaatccatctcgatgttgaaacacctaggggtgcctacgttgacatcctcatgttaccagtggccagattgacaattaggtcacacttgggctctattaagctttctgaaaattccttctgagtaaaccttatccaagagctcctaggtgttgtaacgtctcaacataacactttagttcaaaactcaacgctcaagttgacaccctgtgcctaggttatgcacacctagagtaactagcgctcaggttgaataagcacttagagcattatgcttattttgcaccatgaataagcactcatggtaaaggtaaatctcattctagtatattaacctatggcttgattgacatagatgcattcaagtgatctccaatcatcaccttgtgctcaaccaagcatcaatcactaagaatggaagagtggataaatttcttcgttataatcaactatgtggtgctcaatcatgctatttcactaacatttttggagattagtaaaaaacatcacctagtgcctaggcattgggtgtcaagatgatgcctacgccaagctagtgtagcgtgcaccaccgagggctctaatcatgtttttttccaaagtcatgtaagcaaatcatgattttggcttcgtgttgcaccaatatcactcgaaatcttaaaatgtgttaaaatcaagccaaaccgagaaatttgcaactaggttgacgttaaatgcttacctgtccctagtacgccaattttgttgttggtataaaagcagttgcacacattgtagtgttttggtagtatctcaatcaatacaactcgggtttatgtgattccaactaaactagaaagctatttaaataatcttttgatgaatttctcatatgcatatcaaaattagacttatttcttatcaaaaattgtcttacattttgaattgtgatttgtcattatcaaagcaccaagaactgatcgaacgactcgtattcgatctctcaaattgattgtcaccattcaagatcaatataagtaatctcaaccatttatcataagcatgtcatcatttattagtctcatatcatcttaaaagaaatatttcttgtatatttttggtacttgtaatattttattattattttaagaataattagtattattgccccctgaacttttgacactacctaatcatactttttaaaatatatgacttgttaaaaatttgccctaaaatttaatagttacataattatatcccctttgtgaggtttcgtttcttttaccattaaaaattagcatttttttctttgaactttgaccaatatactaaaattttccccttttattaaaagaaactaattataaaaattataattttctattaattctgaaaaagtttaaaaaacctaataaaagtattaaagtaataaaaaatattatgtctacttaaaaaacctgcattatttctaaaaaaaatattttcaaactttattttatttataaacacatcttaaaaaattaaacgaaaattattaaaaattcaataattatatttaaacaaacttagatattgtgtagagaaaatcaagtttattttatatttacaaattcatatcttaaaaataaaaaaaaaaataattaaaaaattcaatgtaaatataaaattatttaaaaaaaaagtagaaattaaactaaaataaatattacatttacttaaaaaatttagatttttggagaaaagaataggctcaaacttgttcttgtaaaatttaatttttacaaaaattgaatttgtattaatatacaattttatttctaaatagattttttttaataaaaataattaattttttaaattacttaattagtttaaaaattttaatttacttttttaattttcttaatcattcaaaacttctttttttttttttttatgatacaaattattttttaagattaaacaaaatgttgaatttttctcatttttatttagaagtgggtacaatgtgatagttgttaaaatttaaggagaaaaattgttaatatacaaagatatgtctgcatttaaataaaataatgagatgcaacttaacacaacaactgcatttctataaatgtaaaagtttagggaaaacttttaacaagtcgtatatttttggagcaccataaggtagtgttgaaagttcacagaaaaaaattactaattattcttcttttaaatttaaacatgcggccataatttcctataaattggagactcatttagatatttttacaagtcattcattctaatcactagactttctctctaaaattatggttctcaaacattagactctacactccaagtctactcttgtaaagcatttggcttcgtgataataaaagctcaactgaacgtacctctattaccaacttacagggaataagtgaaaaacaataaatctgatttccattgtctctacttagcactcatttctttgacaactgtccctcattagacatactatattggcaatttctcaacatcaacaaaatagaattatgtcaagtataggatttgtgtgcatatgtcaactctttcttatattaggtcccaacaatccacaacaatgtcctacgattccttttaagtagccttacgaaaccctagttcataacatgtataacaataagtttagtttcaaactcagttgaaaaactagccataaattctcaatgaatgttactataagcccaaacaacatacattaaatatctttaacaatacccaacgaaccttaagaaaatatctccaattctaagtgtcaaaattcaaactaaacgaatgctagctaaaacttctaccacacaatggtcgactaattgttgaagttcgatcgattggctactaaagcacagaccaatgctccaataacaatttggactctacattgaatgcataacatcataaataacttctgaacataaatgaatctcccaataatatatattttaacacttaagccaaaatttttaaattctaaacctaactacttcatctttaaattcctaaaagtaagcaaaacctactaaattcttaataaatatcatcaatagatgatacatataaaatccataaaattctatcataaatatataaatacataaaattctaatatcatgtaatttcattcactaattcaataaaaagctctttaaacccaatagattttgtaaagtaaatttttttataataaagtatgaacaattatcttaaatcttaacgaatgttaacttacttaggcgatgatcaattttgatgagtaattaaattgctttaatgtttgaattatcttattatttttattattattattattattattattattattattattatactcaccttaatttgttatttgtgttaacaatatataggagcaatgaatcaggtaacaagaaacttagcatgtgaatgggcaaaggacaacattcgtgtaaacactgttgctccaggattcactagaacagacatgttggggagtttttccgtatgtattctactcattttttcaataaatttgttttatttttattttgttcattaagaaatattctttaattaaaataacaattaagaattcataaatataaataacttgggactccatgccccttttcatgtgttagttcaatacttgtagttttatggagactgagtcatgaacaggaattagtgttgaatactcgggacgaaccttgagatactggacaaataaatcttcatccatgtctaagtcgagatgaattatggttccaaggttagacgaggacagaggctaacacccactttgttagggagactctggcctgggtcaaccttaggggctactcgacctaagccgaaccctaaggatacttgacctaggccaactctctataaggtgattgtggcttagtccgtctttgagggtctttcttgctaatggtacaacctaagtccataggggttatacccttgtgtaaggtgaccttacgtcttctttctgggtttattctattgtaatcccatgccacgtgtcttcatacacactaggtcatctttgtgaaaatggccccattatagtagtatgacaatacgctaagaacttatcctgttagagttgcgtgctttagctccgtcttgatggcttagtgggccttataccgagaaccccatgcctctactactacaatacatctcaaacttaagtaaaaaaaaataaagtttctttttacataattttacagcataaccccaataataatttccactataccataaaaaataaattgcgagtaaaaataaatgattacaaggaagataattagttcccttgtgaaaataaaaattagagaagaaaattcaaagttgtggtctgcatgtgggcctcttgtttgtatttcttgtggtcttgggttgtaatcttcgtagtgggtaagtaaaatattgacttttgacaaaatcttgttgtttgatgcttgtgatgtgtagtataggctttgggtaacccaatttttgttttgatttcatgaaatttggactagtaataccccaattttgatatagtgactttgggtgttcttacatttatgaaaaacaccaagaacgctatggtcatgagaaacattatttttttattttttattctcataaaattctctaaaaagtgtttttggatggtgtttgtagataaaggatgtagtatgtactttggtaaaactttgtacccacacttgttagggccagaacaaataacctttgggtgcatggcccaacaccactcgaccatggacgagtacctcactaggcaaagaatggcatggccttactcaactaaaggccgagttttttacttagcataatatctcgttgtcacgcgaccttgggcgatcctgaaagaaatggctcaatactactcaattatgactaagtacatcattattaggtggttagaaattccattcagattgggtacacatcaagctaacttagttaccaattcttaaaattctttactcttgagacttagattacgacccatagtactcagcctaagtaccatgttcatatcaataattgtgtgtgatgcttttgtggtgaaaacggtctgaactacacaaattaatcagtttgagctagcccttaggggtacccgacctatgccaaaccctagggggtacttggcctgtgttgcctaaatttgatatattattgaaagatttttccaacgccactagaatcacgtcaatcacagttatgagtagagagatatgctcaaaacattaaaggttacagtggaagatactcgacttgagccgaccaacatgtgtgatggatgcagttactccattatctcgatgccttgaagatggctggagtgtcttggagtctcgcagcagtggtaagtgaggaaacaacatgacttgagcttgttgctcccacagatggcgacaaactattgacggttaaaactcattaaccaaattatagtcgcaaaatcgaaacttggatgcaatacctaagattaagatgaagatttggaaatctgaaaacttttaaagaaatgtgcaaaatagctatggagaaagatataagtgtatatttctctaggtcaagtgttacaatgattttctaatccctttttacatctgagaaaggggtattcataggctataattgcctagggtacactagtgatcccaagggacatggtgacatccatggcctgcaagctacatgttgcaggtggttgtcttgcaccttgtacctttgtttggtgtcaggtggtccttggttgcaggagtagaggctatagtgcacccttagtcgggtttgtcaggccttgcaggtgtggtgtctccactacttgtacctcattgccattagagcatgcagaagacatagttgtacacacctttcatgcacgccttgttcttgtgattgtactcttgtctccttgttattcaacacttaggaaaattcactaagaatatatatgctattgtaggagggcatgtcaagtgttgatgtcgagcaactcttgagaataatagcctagtgactccatgacgagcatgaccgagtgaatttctctaatgcatgaccgagtgacattgtgagaaacatggtcgagttgcttctctaaagcatggcctaatgacattgtaagaagcatggcagagagtgacatcgtgagaagcatgaccgagttacttctctaatgcatggctgagtgacattgtgaaaagcatagccgagtgaccttggtcttaacatggcttagtgaccttgatgctcacatggaggagtgacttcaagccatgcatggtcgagtggcctcttgaatggtcatggccgagtgacttcaagccatgcttggccgagtgaccatctaccctactcagcctagtgcctctcaagctatggtttagttgagtggccccaggatacatgcgttgacctagtcattccttggccgattcttaaagtcagtttctttcatttctcaagactaatcgtttactaatctaaaaaattaaaccttttaatttttagagttaataagctcgtactgagaaaatggcatgcgtcaacagtgttcatgatgtgcaagtagcttggcaagcttctaatgtaccagaggcaaaagaatttgacaaggggcccaagttctgaaaaagatatggatgaccatgatcctacttccactaatgttgatcccgataaagacctatcatgaatagttccattggagcggtaggcaggacttacacctgaccgagttatttacattggacgcaagttgttgaatcgggtaggctttgtatttttctcttggaagattaattttctcgtggaacatatatagaattattttcatgggtgtaaagatttatggctatccaagcagcttttattcctaagaccttatcctttttgggacacccttcatgctatggcattctttttctttgtatggagctatgcgattctattactatattctactatgtgttaacttgtctggcatgtaccaccctatgcgtaaacatttatttatttattt

SEQ ID NO: 218223 - DNA, 3657 bp, Cannabis indica
gtgtgataattatctaaaattttagatttataagcgctataaacttaataattttttttagcggtataagtacttaatatttataaaactgtaattttctttcagtttcatcagtacagattctgttattgtcttaaacaggacacatataaaacacaaattctagattatttagtttggatgaaaatatgtaatatcaattacttctaaattattttttaataaatttaaaatagagtctgtaccgacgaaaatagagaaaaattacagttatactaacattgaatacttatgcaactaaaaaaaattattaaatttatgccgtttacaaacttaaaactttaagtatttataccgctgtttagctaaaaaaatggtattttttgtaaaagttgaaaaaataaaaacaaagtaaaagacaagacttggatgagcgagccagcatttgagctattctagacgctaaatcactggaaggagaatgataaaagcctgagctcggctgccatagaactgcattgtcggctcacatttctctctctctctctctcattatatctttacatatgcctcaagtcttggatttggagttttaacaatttttatttatttattcaatttttaagacaaaataataaaaagggtatttgggatttttgtatcatttttttcttctcataaccccatatatgctgctgatgtctttgctcaaaaatcacacccaaatagctttgttattcccaaagcaacaaattaaaaacaaactaaacaagagaaagaaagactgcatgtgttacttactgctagtccacttctctctacctatctttaacatgatctataatttttttttattatttaataattatatatttatttttctctcaactgtcttgtctgactgtctttatctcaagtgccctaggcttctccactggctataaacaaactttgcaggctttttttatgtcagaatgtgaggtatctgccaaagagagaacccacaaacacacacaagttcaattcactacttaaaaagcttcctttttttcttcttctatggttgctcaccaaacagaaaaatagtgtttataaactcccaagtcccaaccaaatataaaagacactgtcttaaaactcaaatcttattattattcctttattatttttttttttccttttaggtcacttttttctttatttctctctctctctttctatggacttccatctgaagcaatggagaaatcagcaacatgagtcagaacatcaccaacaacattctgcaaagataccaaaacttgttatcgaaacccatcacatgaaacaagacctctcttctacttgttctgaacctcttcctctgtttgtacctgagccaccaaacatcactaaaatgatcactactggtactctgtctactgattcaactacttctcccactactagaatcccaagtatggctttctttctttttctaaactgttttttctagtttcttggtatggaaagtttctacctttatttatttattttattggggttgtgtttttccttgatggggttttcattattaccatcattatatctttaaatggtgattttttttcttttcttttgtcaggaggaggaatgggtagttactttagtttggcccaatggcaagaactagagttacaagctttgatatttaggtacatgttagctggtgctactgttccttctgagcttcttcaacatattaagaaaagctttaatcttcttaatacgacaccgtatttcttgcatcattctcttcaaccttatccccattttcaaccttcccctacatgtaagtactatcatctcccataattactattacattatatgatctaatgtactttccagtattaaatgtatgtgtatattataatggtgtattatgatgtagtgttgcagtcgggttattggggaaaagcatccatggatccggaacctggtcggtgccggagaaccgacgggaagaaatggcggtgttcaagagatgtggtggttggtcaaaagtactgtgagcgccacatgcaccgtggaagaaatcgttcaagaaagcctgtggaaatccccacacccaccaccaccaccaccggcggcggaagactcgccggggacggcgtcggtagagggactcttgcttctaacaatggtccatatcctttgtcaacgtcatctaatgcagcccatttctcactttcaatgccaacatcctccatagatctcctccatctcaacaaccggaggtaatttttgctttttttttcttgttatggaaaatggcctattttttttcttggtctattaagaaacttggaaagaataataatgttaaatcttacttaatctgatttgggtttccagcttcgataaatggtacttgttattctagtggtaagaatctatttggggtattttattttattttattttttgatttaaaatatactttattttaaggacagaaactcacatgggggacaaataaataagagtatcaaatcttttaaaaaataactataaaatctcaaattttcttagtaactaagctccaagttccaaccgttgcttttcataacaatcctttgtttttttttaatagtaacgcttcagatgttaaaaatgaaaataaggacttgtttaaaccccataatgaggtctccggcgacggcaaatcggacggtcacatactccggcacttctttgatgactggccgagatcacttcaagaatcaggaaatgtagaaattaataataataataataataataataataatagcaataacaataataggatgaggaagagtccaatgagctcagcttcaagcttatcaatttccataacgggaaacaactcatcatcaacttctgatatttcgttgaagttgtcaactggtggaaacggagaggaaatgggccacccagaagcccattctgatcgtcagcagcagtctcagttgggctgggcctcgagtggatgggcttcaaacccaatggcctcaatgggtgggccgctggctgaggccctgcgatcctccaactccaattcatcatctcctactagtgttctccatcagttgcctcctcgttcttctgcctctgacacttgcattgtcagcactttaagttttttttttttttggataatatatttactttgggcctaaattctaacttgatgctcaaatgtataaattgcatgtttttttaatttttctttaatttaatggtttgtttccaccaaaacaaaaagtattgctttgtaacggagtggagtggtaataggatcatttctattgctgaattattttgtttgagttgtgcccttttgttttgtttggtggttgagaataattttggaaagaattcaaaggttaattctttaatgaatttgtctttgtaatccgaatggtgttcaatcccacaccccataattttgagcattgctctagggtacaatactacaatttccatggcacctattctttctttgttggcattaacacacattaaaaaaaaaagtacattaagagtgctaagagtggatatttagtagaataattattctactaaaagtggatatttcatctaaaagtgagtaaaagtaaagatcatattatt

SEQ ID NO: 218224 - DNA, 3954 bp, Cannabis indica
cattctagatgtttttcaatcacatacgggacctgacaccacccctttaaagctatttctagtcataataacaataaaattaggtaatattactattactatctattacacgtggcacatgcttataatgaattagaaattaaatagccactggcccactacacatatgtaacatgtttttaattttttctttataattaaccaaacgttcctggtctatttttaatttttatggtcagttatggtggttgtttttgatgatgaagaactagctcagaagaacttaactggcatattaaatagtaaatgctaggacaagtaaaatctctaacccaacaagataataatttgataagacctatatattaaacaaactaataatgattaatagtaaatactaatgatgtaattagtaagattaagaaggttacctagatcagaagcagccaacctcaaaaacagaacttgtccaccttcagcgtagtcccttaaatcaattagatcgctattccacatgacacaaccagacccaccattagtaacgacggcgtttgcataagccgtgcaagaacagttagccaaacacttttttcgacactccacaatgttcatactccggtcaacaaacacagtcgaactctccggcaacttcatcatcttcatagtcaaaaacttgtctttctcacattctaaattcgtcttcctaaagcaaccgtcggacccatctcttagattccaggcctgtggattcctgggaccaaatcccttcgggcactgacaaacaggggaggcgttcgagtcacagattccgtaaacaccacactctttgtaactgtcgcattgatcttttggggcgtaccagaaccgactccagctttgactactttcgatccacgtgtatcgctcgaggtacccagttgagttcacagacaaacgagagattattgagcttccttccgtggtcaaaaacgagtagtacacctgttgttgagtcgtgacaaagtcgaattcaagaccgtttgccggattcatctccggtacaccactgaatctttctccattccaaggcccgctgcgatacactatcttctgttggtttcgcaagaaaatttctgggaatccttggtaatccaaattgaaagagtaatctccggtggaagggtctgtcgagctcctccacgaggttatgtatctattcacaccggttcttaagtcccatcctagcttcatacccggtaacaaagtatcagtgggaaaatcgaagctctgccacaagaaatgttttgggtcgttgtcgttttcgtctctaacgacaagattacctgaatctaaaagctgtagaactggcttaacggctctggtttgatttgatgaccatgtgaggtttccggttgagtcgaggagagtaagggttccttgatcaccgaactttagagttgcggaagaattggaaagtggggcgtctctgtttgcgacccaaacccaggttttgacttgaattttcttgtagcaaatgcccaagtaccatcctgaagtaccgggtttgaagaaaccaagttcaaagacctggccggctgagacaagggtttggtcatttgagagagaatcagttgaagatagagaatctaaagcagtagtatgttggaagagagttaagaaagcaacgccaaaaatggcgaaaagaaaaggacaacggtgctttggtaaaggttccatcgactcactggtctctacaaagctctttcctttgagaaaatgcagtaggtgtttggtgtgcttgtatttaagacatttgttggtgtttgacagtgaaagcctaagaccaagaaaagaagaaaaaaaacaaacaaaagaaagcagaaagactatagctttctagtatctaactttttttttttttttgttcttattttttcatttataaacttaaatattgagagcaacatatcctatatggattggtcatgccaaacaccgaaatacgcatttaaataaaaaagaaaataaaaatagaacaaatatccattcatatatacgacattgactcaaaaaatgtgatcaatgtcttcctttttttaacgcatttaattattttggagagttgttttctatttttgttttctatttatttatttatttttttttgttgagccgggttagctacatgcttctttgtaaagagaaactaatataataccagtactataagtctataactacgaccacataataaattatgtttttttttaaatggacataataaagtatgtttgataagctaagattagattactacctctactcaaaaataaataaataaaatcactacttcctcttttatcccaattggaaattagaattacaaaattagaaaaaaaaaacgtatccacaaaatgacaagacttatttttttctcagaaaaatcacttacgcatgaaatgatcaaatgtcttctcagttaggtggcacactccatttacgaacaatgtttgacactaaatttaaaatggtactaaaattggataagctcgtttttttttaatgttcaattttcgataaaatataaatcttttttttttttttctgaggaatataaaatataaatcttagagaaaatgttgggtaatctacaataagattcttaattgacattgaactattgaactggtcattgttgaatataaatttactaaagtcattgttgaatatacatataaaatcattgaatatcttaaaatacaaaattaggtgtaatatgattatataagatttttatactactatgtcagttaatctttcataataataaataatattgatatgcagagttttagtttaggcatgtttggacaaatttagataaactctttgattatctatcagtttttaatctataaaaaaaaatctactagaaaatacaatacaatgcagctaagtactaagtagtatcacaccaccaaccatatgtactttcacaacttgattttgagaccaaaatttgatgcaggatgctgctggttttctatactattttaattgctttaattaattactagtatagaaaacgaggttggtcctcaaaaactccaagacgtaccccatggtaacatgcatccttattcttgcaataaagtattaatctgtcaaaaaccacaacaattgattgagtgatatgttattgtattttcggctgctgaagcttccgaaattaaagcaattaactattatttgtgtttataatgattttcagcttttaattctgtatatacatttaagaaaaaatactttaactagaagtagacatccttcgatctaatttaattacaaaaaattaaatatttaattataattaaattgattaaaattcaattaaaaactgatttaatctaattatatttatatatattaaaaaattatttatatttattaaaatattaaaaataaatatatattaattatatttttagtagtattttttttttttgttgaatttgcaatggttactttgtgtatttattttcatgaatttttgttctattttattatttagcaatatttttgttttagttattttaaacttttaattgcatttaattgtatttaattatattttcatagagtattaaatttaaatagaaagtaatatttaatttttaactatttttcttcatatttttaagttaatatattaaaatttaagtgtgtaattagatttctaattaaaaattaatcttgaattgaattgaattttaagatctaatttggatgcccaatcttacttttaaccgtttactaaaagctaaaattagaagtagagaatatcaattaattaaggtggtgttacacttttttaatcagttttctgttttaaaattaaaaagtaaaaataatttttcaaaaacatgttctataaaactgcttttacctttcaatttttttattgtagaatcaaaa

SEQ ID NO: 218225 - DNA, 3680 bp, Cannabis indica
atgattctcaacataccccacttatattttttccataaataagtttgggtgtgtaatcattcagaggaccataatttgttgcatgagatgagataaaactagataagttgtataagagatgttaagagaaaagtatataccacatatatatacttcctcaatgtttaatgggatagtacttcataggacaaagctgtcttgtccaccctaggataagctttgttatatatttctattggagagaagagctgtacttaagagtattattttgtaattaattaaggaaacccaagtgggaaaaaaaagaaaaaaaaaataggaaaaagaaaatatccaaacaataacatatgtagaataatatccaatcatcttctcttggtgtgccatccatccattttcataacaccccatcatcatatataccaccaaacatatatcactcatttgtcttctctctcttctcttctcttctcttctctccttgagtttttggaattggaaatcttttttgatagctctttacaataaaactttttgtttgagagagctagaattagatctcgatctagatgggcagaaagtgctcacattgtggaaacataggtcataattcaaggacctgcaccacatcttctactatgactacttttgttaatagtaataataataataatgcaaattcatcacttcgtttatttggagtgaaagtagatatagtatcatcatcaccatcatcattaacctcatcatcttcttcttcttcttgttctaattccaatattaatataaatgtcttgaagaaaagcttcagcatggattgcttaatgcactcctctttatcttcaccttcttcttcaccttcttcttcttcttctgccataattgccctcgatgaaaccaatatttctgatcatcacaaagcagcaacaagtattggttatctctctgatggtctcattattggcagacctcaggaaagaaaaaaaggtaactaatattataactaactaaatcttttattatgtttgtttgaattgattaatatttatgtatatatatatatatataggtgttccatggacagaagaagagcacaggacatttctgattgggcttgagaagcgtaggaaagggagactggagaggcatttctagaagctttgtcactacaagaacaccaacccaagttgcaagtcatgcccagaaatattttcatatatacatacatatatagaaaggttattcaataatttctctatctatacatatatatgtttgattatttattttactgatgaaaaaaatgatgacaggttggttgtagtcctcctcaacatactagtagtgataatcagcacaacaaggatattaaaaatcaacaaaacggtgtcgtcttgcctctacagctggagcttagttcttcattatcagattacaacaacaatcatcatcatgatcaaaagcctggaggagtagttgactttactcaactagcttcttctcatcatcatcatcatcatggccttcctcttcctcctaataacaaaaataataattcagttcctgtttggatacatggattaatggattcccagttgaaatcatcatcatcatcatcaaattcaaattccaaaccaaacagtactacttgttcaaatattggtgcagcaggggttgatctagagctgaatctgggtggagggccagcaaggcctgctgctgctgctgctgctagtttggaacaaaataataataataagtcatcaaatccatgtccaggtctcctctttgttggccctattactgttacatgatatcaatgataatattacatagatatataaatcattttgcagtctttattaatgtatcccaggaattaagtagaacttcaccaaggaagatcaaattcacagaatctcactgccactataattagaatcttaacagatcttggaggaccggcatatatagcaggaatatctttattaattcttttttaatttttttcttatctttttttctgtaataaacagatgtatcagtactatttgctgtagtataatagttgcagtatataaccatgttctattgaattgaattacatataagatatatgtatatggctgcaaattattatgatgatgattttaagagggtagagccatcccactctttctgtattgccatttggctcattattattgttgttgttattataatatctaatcaaagtttctcaaagtgcttttggtacttattggccaatgtaaaaaaccaaagaacaaaaaacacaattatgaatgctttttcttttcgctaattaagattttttttatctgttttgatatgtacgtgttcctaaattcttagttcgttaaaaaaaatttctgaattatattaagattgttggatttaaatattttcgttcagtactttttttaacagacatttatcatgggtgaaagtttaaaagacatgatttagtacgtattaaagtttaacgatacaatttgatacatgaataatcgtcgtgtcgaaattgaatgaatttggacagaaataattgaattcaacaattttaatttaaagaacaaaatctagtacatattaaaatttcgggacacatttgaatttcctttttttagattataaaactttgtcacaaatatatatattagataagtaggagaagcaacttaattaaatgaaccgcataataatgtacatactatatttatatctacaactgattcaccaatgaatttggagtgtggttagagatgggatcaggaaagtagataaataaataaatatatataaatttatgcattaacatatcttttcagttacttttgagtggtagctagctgtgataataatagtgacaattgatagaatgaagaattcttattcagcttcttctcttttagcataatgttgagaaagggcaacaaaaaatagtataaacacattcctcattttggctggctgctaagttacaaactaggattactcaagttcaaactctaatattatcttcttttctgaaaattttaactaagaaaaaagaaaaagtttagatactaagaaaaaagaaaaagtttagatatctaaaacgaatacacaacatgtaacacaataatttttatttttatttaaagggaaaaacctgatatctttcttaatctatgagattttattttcctttccatgagatttttatcagttctgacaaaatattgatcatttttctcaagtgcatccatcaaaggtgcaagactacaaaatttatgaaaaaggtttactgagagacactgcatattttaagaaaaaaaataaactataaggacctggatataattaatacaccacagcaaataaatgcacagatatagacatagcaagagggtatatatatacatattttgtcttggtattataaatgattgggccaccatttttagtttttttggtaggttgatattcaggtttcattataaaatcttagccagcacctattcttgggtcctactctaaagattatgttagcccaaaaataaataaattaaaatttggggtaagtaaacactccttttgacttttacacatactgtaatttttatggaatttctttgattccactctacattaatgctgtttggttcgaggtaatgaaa

SEQ ID NO: 218226 - DNA, 5077 bp, Cannabis indica
taaaataaaaaaaaaaaatcaatataataatgtttttgttattattatattatttgttttttggacagtaaagtgtatgtcttattgtaagattcttttatgtatatttgtttgtttcaccttagatattttaagctatagataataaagtacaacaagccacatgcatgtgacattttacaaaattaagtaaaatattaaattaaaaaattatattcaatgaattatttgcatatgattcactcaatctcaaaattagggataattatagtatattatttaaatagatcttttagtaaaatttttatctgatttagcatttagtaaaaatttgttagttttatttttatttcttcatgatattggcttttataattaaataggatcatttatatttttttttaaaatttcaaatagtttataacactaaaattaaggtttaaatagtttattacacgtataattattattttttacacatacagtaaataattgtttgaattttatttttaatgctataaattatttaaatttttttaaaagaattttacatgttgaattagtatgcaatgccatcaaatagaaatgtaaaagtcaatttttgggatagttttagaagatgtagcatgtttgagtaagatttttattattattcttttgtgcattttaacaaaatagtaaattttttggtccattcacttgctcaccttacttatcaatgtgtctttggtaaatatgctgacttactttttcagtttatttattttaaggtaattgagagcaaaattccttatgttttaatttcttacttttaatttcttgatttttttgtggtaatattttatttttaaaattgagtcgccaattaaattttattgttaaatattaattgaattgtcaatgtatatatctgtgtattcgtaatatttttattatcatgtgtacataggtattcacagtgacaatttctattgatatttaataataaaatttaattatcatctcaaaattttaaacaaaaataaacttaagggtgtattgccacaaaacaaatgaaaaaattaagtgtataaaattaaaccataaaaaaaatttcgctgctaatttcctttattttattgagcattgctattaagcaccaggccaacaccttttatatgtggcactttacgattgattagcgatatttcttaaaagttattttcttaagttatatgggacctgatacttaattataccaatatcgatatgacactgagaaagtgctaggcacccgtggtgtctttcaacatttctctattttattagagtattgttattggacatcagtggtgcttagcaccttctagaggtggggccctacgattgattaatgatatttcctaaaagctattatatgaaactcgataattaattgcattaatagcgatatgacacataagaatgtgctacacaaccgtggttctttttaatattatcaaataatgataaaataaaagcattgatattttgctctagtggtgcttagtactttttataggtgtcaccttacgattgattagcgatattttctaaaagttattttcttaataagttatatgagaatcgatacttaattacaccaatagcggtatgacaccgaggagggtgctagaccaatgatatttttttaacatttctcttaaaataattcaataaataatgacacgtgtcattctaaagatagatagatagaatgaactaggaagaacttagaagaagaggaagtggatattggataaagctgctaagttaggccaatgattctctgcagagaatgacttaaaacgacactcccccaacgtcgtttcatggcttctctgccttcttcggttgctgctactacaccaatcaatggcggcaacactcccaataatcccaagctccattcctctgacctcagaacacactcctcatcactttttccacccacccaaaatccaaaggtaacaactttaactaaactaaactttgaattcatcataatcagttctttcatgaatgtaaaaaactgatcttgattgatttttgttttgttttatcttctgggcagaaaagggtgtcatcagattccatttctagtgactttcgtgaagcactttctgccattagagaagatgcttctactgagtcatcttactatgttgatcttttgagagaatgtattgagaagaattcaacttcagatgctgaaatggttcatgcccagatcataaaaagggggataattcataaagatgtgtttgtttcaacttttttagttaatgtttatgttaaatgtgggaacttgggaaatgctcgtaaactgtttgataatttgcctgtaagaaatgttgtggcttggacaacacttatgactggttatgttaacaattcagagccagagcttgctattaaagtttttagagatatgttggaagagggctcttatcccactaattatactcttgggattgttataaatgcttgttcttcattgcagtggatcaatatgtgtgagcaactccatggttatatgatcaagtaccatattgattttgacactagtattggtaactcactttgtagtttatatgcaaaatctgggcatttgagttctgctgttaaagtgtttgagaatattagagaaaagaatgtgatttcatggactgccattatatccgcttttagtgataatggtgatgctgcaggtggtttgggatatttcattcagatgctttctgaggatattcagcctaatgagtttactcttactactgttttgagcctttgttgtgttatgttgtcttttggtataggaagccaggttcattctttgagcatcaagcttggatttgaatcgaattcgcgagttaagaattcgatcatgtatttatacttaaaaactggtaggattcaagaggccgaaaggcttttcgatggaatgaatgtcaacagtctggttacttggaacttaatgatttctggccatgcccaaatgatggaacatgaaggttgtaatctttcagcatatgaaagtggaaaccaggcactaaaccttttctcaaaattgaaccgctcggggatgaaacctgatctgttcaccttctcgagtgtcttaactgtgtgtggaagtttggtggccttagaacaaggggaacaagttcatgctcagaccattaaatctggatttctttcggatgtagttgttggaactgcactcattagcatgtataataaatgtggaagcattgagaaagcaagtaaagctttttgttgagatgtccataagaacattgatatcatggacttcaatgattacaagtttggcacatcacggtaggactcagcaagcgttgcagctgttcgaggatatgatactcgcgggagttagaccgaaccagatcacttttgttggtgttttatcagcttgtagtcatgcaggaatggttgaagaagctcttggttactttgagatgatgaaaaagcaatacaaaattaagccagtgatggatcattacgcctgcattgttggcatgtttgtgagattgggaagattagatgaagcttttgatttcatcaagaagatggatttcgaacccagtgagtttatatggtcaactttggttgcagggtgcagaagtcatggaaatatggaactgggattttatgctgctgaacagttactgaagcttaatccgaaacacaccgagacttatggcttgttgttgaacatgtactgcgccgagaaaagatggaaagatgtttccaaggtgaagaaaatgatgaaagaagagagaattgaaaaagtaaaggattggagctggataagtattaaggacaaagtttattcatttaaagctgatgacaagtctgatcatcatagtgaagatttccacaaatttttggtgaatttgactgaccaagctaagagtttgggatatgaatcactgaaagatttggaggtaacagatgaggaagaagtagaggaatcatcatcatcctcttctaccacttatcatagtgagaagttagcacttgcatttgggttattgaacacaccgagttccgcaccaataagagtgatcaagaacttcataatgtgcagagattgtcataattttattaagactgtttcagtacttacaggtagagaaataaccataagagatagcagaagccttcacaaaattgtcaatggaaaatgttcatgtggtgatttttggtagtcttctgtggtaacctttgttatgattctttgtatacttgctatttatgctggtaaaaaaaaaaaaaaaaagctctgatttttagtgttcttacatatttgaaaactcacacaagtaacctgtgaagagatggattatgaaataaataatacacaaaagatgtcatgttaataacacaagtaaaattccatatgaaatggcagtaatcaataagagtgcattcaacttttaagcactgcaatctagcaaccagaatttggatctttccaagtataaataacattatgcagcaccagaaggcagaaatgttattccaaaatgccaattatgacatatttttcaccaaagatacaatacctctactagtcaacatctgaccaaagttctctgagataactcttacaaagaagaaattctttgaaatagaagaattagggaacaaaaacttgtaattctacatacttgaaacaaaagaactgacgaaattaatgtttaatccgcgcacaattattatttaaactgttctctctctctctttcttcaaagatgtgttgagtttcgaaatactagaaaatcaaatctatgcagcagcaacagcttgtttctgagcaaatccaacgcctttcaatgctggccttcaactctggcttaagagcttccaaagccttttgttcatattccgtcaacccttgaaggtctgatggtattaaagcttcaacaccatctcttccaagcttaattcgtgatgcaaagaatggaagctcggtcagatcggactgcacataggcgcattcgtagacatcaccatctccatcaagtgcacgaagaga

SEQ ID NO: 218227 - DNA, 4959 bp, Cannabis indica
taagattaatatgatcttcaaagagaaaaagatagtacatgcaataactacataaatatccacagcaactgtatgttacaccaatgataatagcatgacatacaatatagttttcaatacaaattgcttttaaaaggaagtgcagcatcagatgggaaaaccaaagttaagcccttcttctcccctacaatcttgggtaattggtagccagtaataatctcctgtttaacatagcaaaatgatggcctctaactaaagttacctagtttaattggtgggtatgggtactagaggagtatagacaaaactatcatgcaatgcaagggattgacattcccaagcatcgaaaatggcatcccaaaaagggaaaataatggcaggggagggttcttagaaagcaggtatccgtattaacaggggaaaagtattggggaagggtctcttcgcaacttaccgtccaccagatcaagtttcttcatcttctcctcacaccaaactagctgctcattcgtaatcttcaccattctaaggaccctcgacacgactttgacatcgattaagccaaacaacaacggaacatcttcttgtatcaatggccatgacctctttttccaacctctccttttcttgcgcagttccttgagcttcatctctttctgcattacagaaagacaaatagcagggtcccattatgagactttcgcttaacaaaactaatgcaataaacatttgcttaacatctacacttgttctgagtacataaactcccatctatgtttttgacgtattagcaagtggataaaatatcttaaagttatgccactagcttaaaccctgacctcagatatatactttactaactatgtcaatgatgccacttactttctatatgtttatggagaataatgaatgtccattagagaataaagtaacccataagttgcaagattcaaaactaattcagatagctcagttttttccatttaaaatattagaatccatcttatattgctgcttaagccaagaggatattacagcattaaacaatctgaatgatcaccattcaaccccaaaatgcctacgctaaaacgcatggcataccaggactaatgaaattgaatagatggtataccaggatttactggttattccttttaaaaccttgataaattagaggaacgaaaaatcttgtagtacaaaagcttaggtggcgtttagttggaggtaatgaaatagaatggaatgaaaaggaaacacttttcattctattcttttatttggttgcatattaaagtatccaaatgttattccattttttcactattttcatgaaatgactattctattttcaaatagaaggaaagaccgttccaatgcatgatgactaaaaaatttaataatttttttattaatttttttatgcatttaaaattttattccattcaattccattcctattcccattccactcttattcctatattttcattcctcctaaccaaacgccaccatagtgaatgtacttgttcctacagtaattaccaagcatgatgttgtggtgattcaatcaactcggccagctcattgacatgtaacaattactttagttagctaatttcctaatatatattagtaagtagttagttatctattctttgtttgagccaataaataagagtcctagcatcttttttcattttactgaattttaagacaacttgaaagagagttttgggggatgttaaagagagcattgtgtgtttgatcaatgcctctcaatgtgagcagaattgtagtcgtgtagtgctaggctctttgttcattggagattcaataaagaattcattagcaattgttattgactgtttctccttcagaatagttctttcatctctttctcagttttgattcattttgatttattgttaatgtttggttctcattgttttgtagcatatattgaattctattcttgaattggtgtaggaactcacaccacacatgatatacccattttacattaagagaaagtttttaataaactagcccaactaccttatcatatatctttattggtcatactatctaattttctttaagggcatttgtctttaaacttttacataccttctcgagagatgattgaatctggtgaagtggggttgcattatggttctggtttccaaagagattaagagacccgcttgattttttcttatccatcttgaggaaaaggtggaaagtaagaattgaagactccataatcttgataagatcagcggcaagaacagttaacggtgactcttctccctctatctctttttgatctgaagctgaacagactcatcaacaaaatactaaataaagaaaaaagctcaacaaacaaataaactatgcatgctcccattagtaataggtaagatattataacaaaacactccataaactatgtagcaaatttaagtaggtgtatcttacctttcacattagggacctgtaccaatttaggaagagacttccttgcacgagcataaatttctgccctcagaccttgctcaaatggctcattctctatatacctttgtaacaaaacctggaattgttgaaactgttgagcactgtggttgtagcaggtggaattttcaggttggcacacaattttctgacacatctgggtgtattggcagtgaagtgcctcccaagtcaagcaaatctgagctacatatgctgtttcaatatcctgataagggtcatgctgcaattgctgaagatgctcagtttcatcatcaggttcttcaaactttttcaaagagagacagcggagaggcgatgtcagctttttagatgcagatcttggtgatggggtggtgggagtttgggagcctgcatgacaatcttacaatgagaattccaaagagttcttacgaaattttaaagttgaaaatgctagagaaactaaacaagaaacaatgagtctgaatattgattaatttcgtccaagatttaacttcataaacgttggaataagtcagataaatccctttggatatgcttctccacttgggagattagaattgtataaaaagcataccagggaacaaccctgcccaaaatgataacacatccaatagtatggctggcataatgcacttctaaagatttgtatcaagtccaatagtacaatgctcatctaccaatgaatggtgagagagaaaatacacctatctcgttacaactggcagttcatattatgtttgggaaaagacaagtttctacttttaagcagaggatgaagctatgctttatcttattactgaaataaaagcattattagcttaacaaaattgagcatattgaagaatccaaaagattaataatgaaaaccagacaatggcaaaaccactttaaaccacacatgttcaaacaaatagcaaacctatatcaggctgtcagctaagctcccttaaaatatagaaacaagcacaacttcgttctcactgcattcccacactaatacttggaatgaatctcaaatgcctacattagcatactcattttaaacaaagtgaatagcatcatgatttgagctcaagttacaaaaaggtgatttctaaaaatatatatatatagatgaatcttcagatttgaaataagagtgggaacctggaaaaaataatgaaataacataataatcttttaccattttctttgagctgttgagtgctcatacgatcaaagaacaacatcctctcacagtatttgtcatacaaagcatcaaatccaccccaccattgtcgaccttctgcctcaacatctctccactcacaagagcttctctcaccttcctcatcttcctcttctccttcatcttcttcagcacatgactcttcttcaggaattaaaccataaactattccttctaagttcttttaatcttctttttacctcatttgtgatgaaatcatcatcatcatcatcctcagcttcggcttcagcactgggatcagcatcatttgtcttagttgaaagttcatcacctcctccattctccttctttagctcttctggctgaggcacaggcttgtcctctatttcactttccacaactggtttgtgggctttcctgaatttcttaactttgaagaaatccatattcagttatttatctgtgaagtaagactggttggacttattaagttccagttcacactccctggatcacgacagacccaaaaagctaactttgtggacaataaacaatattcaatcagaaaaggcaccacctttttcgtccagatcggataataaagccaataagaacttgtcggtgcaaatgttctgcaccacaaatgtaagcaaaaatgaccccagaaattttctcaagaagatgtgtgaaatgctctcaagttccttgaacacgttttgagcaaaaaactgataagtaaaaatccatgcagatcttaccagaagcgtccaaatgccattaaagaaaatcagtgatctgaagactgaacagaacgacacccaaataaacttcagccaaaatccactgaagacaaaaacagaaaaggttgcaactttgatgtgaaaaaaaaaaaaaaaaaaaaacccaagaatttcaacaagtttcagagaagaaatagcagaggcactaagaaactttagctgaacatgctcattctactcacgcaaacgcttgataaaacttacaatgcggtagaaagcatgaacagattcgctttaaagctcaaaaaaatctacaccaagcaattcaagttttgttgatcacagctaataagcactcttcaactgatagaaactctagaaaactttcaaaccccaaaaccaagaccaaacaatgtgctccagaatactctgagatcacaaaatgaaaaaatcccacaaacccacaaaccaaaacttgtagagaagaaagataaagaaaaggagaagagggtg

SEQ ID NO: 218228 - DNA, 2055 bp, Cannabis indica
tattaaataatatctcatttgtagcaaataattttgtaacacaacattttatgttattctaaccataatttccccttctcaaataataataataataataataataataataatagtaataataataataatgaaaaccatttacattttgcacacttgtttaaatcttctttttaaaatcaatctaactaatttaacgtgttatattgtcaaattaaaatgtacctactacctaacactacacagcacataaataaatgaaaatgtagaaattgtactcttatatatgactgcactagctttaatatttgttagaacaaatgccactaatgataaagtcactgacagggagaaaacaaagttataactgcttgaacatccactgtacaagaaaagcttagtcctttaaatataataaaagttcatggcatattatatgacttaacctggttgcttatagtaaacatgaataatatataaataaacgaatcaactcaaatcacatctaatttggtagaccaaagcagtcaaagatctaagaaacttgataatcagcaaagttcaaattggtgatagatcaacgactgctgtacctcattgatttttcccataaccaacttttgcttattaattcaaaatatatttacagcagctgtcacttctttggctccttatcatcttcaacatcctgcaagtaggaatttcgaaaagttgtcacaacaaatttaaaaacttgaaagatgcaacaagaaaaatggcaatgcaaaagaatcagaagatccctgtaacttactgaattatcaatcttgtcaaaatcgtcatcgaaactctcttcaccatcatctgaaatacaaataaggtataactactcaacacatttaaacataaagagaattcaaacaatgaaatcatgtgtttgaacaaatcccagttgagcatgtaagtttgagtaatggatcttgcatgacataagcaatggcaggcaaggcacattatgattatgtgccagtttaagccataagcatctaacaaaacaaggattccgtgtgtgaggattatagaactagactgcaacaaatacaatataaaaggatcagctgtatacctagtcccccatcactgtcttcaagatctcccaataggaaagtatccaagtcttgctcagctgaagaggacttggaagttttactgctcaggttcttctccatccctttttctttgtcattccctccaaccacagatgcttgtttggtctcgtcatcttttttttgctctgcttctttgagcttaacctcctccatgtattgcttctcatacctgattgcaactcataactatgtaaatcaaagacaactcactgaggtaaagttacaaataaagattcaccaaagaaaagaccactaactagacgtgctataatttctttggccatttcatctttgtatatattactcctttgacatattaaatacttctttaaatatgatcgctaaataaatagcttcctccaacattcttaagtattgccaccgtggtttgctttgcagtgataaactgatcatacagctatgctgcacaatgggatcccaacaaagctcggtcacaatggtgttaaactaagtttgctgaaataagttgctacttacggagccacatagctgctgacaagggtaaaatatatcttccagaacctcctttctttcattatacgtgggcataattcatatcttaaccttgacatttgctgcaaaaagaggttttaccagtgtgacatcagtactcatttttcagtcctttaaaaattgtcttttgttttgttataattattatcaataaaaaataacacatgaaattatcatcaaataagtgtccgatagtttgaatctaataactataactaaatcttgaacaaacaccaatgcttgttgggactttctccttaaaatgttgcatgacttctaaactgtagatgatttgaaagattctgaggccgagttgccaattcagggaaactacttgtgcgcacgattccagcacataaatttatttatcaat

SEQ ID NO: 218229 - DNA, 4875 bp, Cannabis indica
aaggagtaatcacctatcatgacaactcacaagtctttaccttgcagtaatagtcctccattttcattggcccagttaataaaactttaaaataaattatggaagttttttaagtatttggattaaagaaaaggatattattattattattattatgaaaagtttttaatagggaacttaagggataaagtccattacaaagcataagtaaaaatcaattctgataagggctagcaaagagtgataatgccaatacattgacaaaccaaggcacatatgtttatcgcagtcataatcattgagaagtactatatcattatagatggaaggtaaaacaatagaataagtacaaactctcaaatctcaacaagaagaaattcatatgtggaccaaaaaaccaaagtaaagaaacaaaacaaaacaataaagcttaaatcagtaatagatctaagacaaatggagtcattagactcattacataaatgaaagcacagcgattcctcttgggcaaaaggaaaatggtttatctattaattgcattgatattcacactttttttttttcataaagtaaatgctatttttttttcttaggaaaggattgcttcttttttttaaatggaaaatgaaaaaattttatttatctattaaatttaactaccaaattgattggaacagactacaaaccaaaaatacaataaggatataatacataaaaactatcatattagctgatcgcttaacaaaataaactgaaaatattttccaacttaataataagttgtttatagtgataacttgcccaatcaaattaaatcattaaaataaaactgcacaaggcttgcactattattaaataatcaattttaagcacaacctgctgccattgacattctatgatccaactaagcgcctcatgaacccccatggcctcaacaagttgttccaataataaagagtcacatgtgttgcttgggaaggctatgttgtaacactccccctcatatgtgaggtccctttttaattctcacatgtgatttttaatggggccagagtgcattttcgacactccccctcacatgtgagatctattttaactggagtatagcacatgttctcagttgtgggcctgattctgataccatgttatacggacttgggtcacgcccatcatcaagagagggagtcatcttcacatgtgtaaaaaatattccactttaaaaccatatgatgataaaggaagtagctccttaatcttataaagaaattaattctcttttcttttatcaatgtggccacccatatgtgttgtttggaaatgctatactttaatagccttcaaacaaagcagtatccacattaattttgatactatttttcagaggtaaaattcaacactcatcaccatcactattttgttaattttctattttcaatgagcatacatgaacaacaataataaacacaatcaatgctaattattaatatccatgatcaaataaaagacataaattcttattattggagattatgaccagttgagtctagatgtctaatttgagaaaattagttatcttaaccgaataagctagtcaaagacgttttagagcatttctatgaacttcgagcatgttagtattatgtccattctattataatctgatagtaatatcatgcaatattaattatatagttatctttatatgctaataacgatacttgtaaataatgcttaattatattaaaaatatctgtatatttatataattttattgttaggatagttgttaaaaattattagtgtgtatttagctgaccatttagttttctcattacatttttcaaatttttttttttatttattattattttatttaaacaggtttttatttatttttatttgataacttacctttttcaattcttatgactaaaaaaaattggtgtaatactatttccaactaccaactaccacggacgcgggcgaattcatgttagttgagttggattttctcttcaatcccatgtcgtcttcttcacagtaattgattcagaatgaagcagtgactgagcgcctgagaggtaagctttcatttccgcagttgatctctcttagggtttcattagtaatgtcgttttttttttttgctgattactaataagctccgactactaaagagattttcctataatcgaaacagctgatttgaatcgaagccactggggtggggtagaacaatcgccaatcagaaaagggcattataactcttccaaattttttggtggttctccagtcctctttaggattccattcgccaatgatcaagtatggctttttggtattttttttacatacgatgaacaatcaattgctaagttatttatggtcatgtatctcttatgaagatgttgatatttgttgaatattatttggatattgattataattccttgttggaaatacagtaaaaaggataatttgtaaggttatttaagttaatagccattaaatatcaacagttgctaaaactttgcatataaatttgatccaaaattcttacactgctcaagacttggacagttcatctgttagttaacagactgtttgtatagttttgcttgtggactttgtgagaattcagcagaaaactattttctctttaactttctgttttgaaaccgtgcaaaaaaaatatttgattttataacttcaatttgtctttagttctctagttttgtcttttctttttctaaaagaaaaacatttctgctggaaccaaatacacatatcatgtttgatctaatgttgaattatgtgtgattgaatttaatatctcacttcttttctttcattttatttcagggagcagtaatgttaaagagaattaatgttccagttttgtccattcaatcactgtcaagggcatacgccactataagccctccacctcctaaaatttgtggctcacctggaggaccacccatcactgcacccagaataaagcttagagatggaaggtatttggcctacaaggagtatggcatgccaagagaagatgccaagcataagattatctttgtccatggctttacttcctccagacatgacgcagtggttgcaaaaaccctctccccggtacttcaaattgagattcattaggttattcataattcttttagtatgaagaatatttttttcacataatctaatgtttggaaagattagctaatatttttcattagtttgaactcttaaatataaaattcattatctgttcatctggttttgaattcttttttctagcttggaatcttcttctagttgtatgattgataagtcatgcaagttaagtgaaagcaaagctaaaaatgtatttggtaactcttaatcaatggtgatcagaacgccgaaactggatgatcatgcttgctctattaaaagattttgtagtgattgtaaactaccctgtatgtatgtttacaatttgctgtatatgaatacacgcatttttatctacaaatgttataagggttgcctttaaaggtagatttatcttctcaggaatttattcaagaactaggggtgtacgtagtgggttttgacaaaccggggtatggagaaagtgacccacatcctaatcggacagtaaagagtttggctttggatattgaagaactcggtgatcagctgggacttggatcaaaattctacgtaattggtaattcaatgggcgggcaggctatttggggatgtctcaagtatatcccaagcaggtaaggaataaccaaaatggtaatgatttggtgtaaaaaaattagggaagtatagaggttttcaatatctatattccgggtaaaggaattagcaattgatagtaacaggtttcgaagagtaatataagtaaaagggaactttccatttgagaaaattccttgcaagattgacttgctttgtttcattattacagagaaagaggaaaaaactaatataatgtatttagtgaggattgtatgcaagctcctcctgagtcgctaatcagattaaggcatttattttaaaaaaatatgtattgataatcttcaggttgaattgggaatatggatatctgaatgagagataatagatcaggccattagctcaagtatgtttctgggacacaattgaaatgatataggagataaaactgcattggcctacttggcttgtagttggtcagtcagtttcatcatctttcttgggttatttttcatcactattactagcaaaatgatcaaatgtttcagtcaaccaattagttcttgaagtttacatgcatttgttttccgtatcactttaaatcctcaggttttagagcttgtttcaacttagttgctgacaggcttgcaggagcagtattaatggctccagtaatcaactattggtggccatcatttcctgccaatttgtctagagaagcctattaccaacaaccagtgggcgatcaatgggctctacgtgttgctcattatgcgccatggctaacttattggtggaatactcagaaattttttccctcatccagcgttatagctagaaatcctgatattttttctgctcaagatctaaaaattatgaagaataagctttcaactgatccagagaaagaaaaatctaaggtacttccttcaaaaaaaaaattgattaaatagatgagtagtagcactacatttaacacgttgctaatttaattcttgttccgttgttaccaaatgttattaaattcatttataggaagttagtaaattgaccattgctacataacttgattgtgacaaaacattatccacatgtgacatgtccaaacttcacagaattgaacttattatgctggagcgg

SEQ ID NO: 218230 - DNA, 1235 bp, Cannabis indica
ataataataataatattgagagaaaatttaaaatgtcatatcactactatattctttataaatatagatacgtggtgatgtgaaccgataagattactactatataagattaaagattattactatagttatttgaacacacatattgcatgttaaatattgtgtatgtaccaattcaatcttgctattatataatattgactatttaaacatacatataaatatatatagtgggagttttacattgaaacgcaaccacacgcatatatatatatatacagctctccttgttggccgccggcagggaaatagtaattaagaaagttcgtaacatgtgattgtcctctgagttgaaacttgaaagtaaaaaggaattttaaaactacaaatcatcagtaatatactgcgtaattgcgctcgtcgtcatcatatgatacatactgtcatcattttttttttttttgaatcttacaaaaattattattattattattattattaggttaatttagattttcgtcctctcaactttaatatgtaccaaatcatgttctttaaattttgcgggtcattaaaaaatacttttgaagtattgaaattgttggatttaaggacttttatctaattttactaaacaaagtgtgacgtggatgaaaatttagggggcacaattttatacttttgaaagatcgggggacatgatatagtagatatcaaagttcaaggggcaagaattagtatatggacaatcgtcatattagtaaaattgaatgaaattggacagaagtccttaaatctaacaatttcaatagttcacgagattttttaacggcctgaaaagttcaggaacatgatttggtatatgttaaagttcagggaataaaaatcctaattagccttattattattataattaatattattaatgtaatttttaccttcgttaatttttttttatatttttattgtattaaaattttaaaatactatgttaaaatttcaaaattgtaaaaatattatattttagtgaaataaaaaaaaaatcaacttaagaacaattgaaagagttaaaaaataactctaaaatgacttaataattaaacaacatgaaaacaactataaaaaaataaaataataattacaaaacaatagaaaagtaaaaaaaatattgacctaattacaatatacaaaaaaatatcagctcttcaatatatttttgtattacgatttttttt

SEQ ID NO: 218231 - DNA, 3277 bp, Cannabis indica
atggggtgatccgtaacttggaggaacgaatctcttggatccaacaacagcagctatctcatggattaattgaacaactggtacttattggtaaacttgcaaacgtgtggaaaagcaaagaagacatgtggagacaaaaatctcatgatatttggttaaagctcggcgatagaaacacgaggttctttcattcatcaactgttgttaggagaaggagaaatcatatttggagcctgagagataagcatggtactttgtggaataccaaagagaaggtttaaagtatgatcaacaactactttttggagatttattcttcaaattgtacggtgttttcagaggatttcgaccagtttttttagaagcgaatcagtaatgaagcgaaccaagttattgctgctattccgtcctgtgaagaagttaaagagacggtgttctggcttcatccgcttaaggcacctgggcctgacgggtttttagaatgtttcttcaggaagtattgggatatagtaggcccaatggttaccaaagctattcaggaatttttccaaaccgatgttttgaatcctattctaaaccatacctttatttgtctcattctcaaggtggagcatctagagttgattaaacaattcagacccattagtttgtgtaattttcaatacaaggtgataacaaagattatatctaatagacttcggccttttatggaggatttggtgtctcatgttcagtcagctttcatacggggtcagtggattgctgaatcttcaattttaacccaagaaatggtgcataaaatctgtcacaaacaagggaaaggtggtcttatggccattaaactcgatatgcacaaggcgtacgacaagatggagtggagttttctaagtagagttcttgagagggatggttttagtgaaaaggtttgtaatctcattatggcttgtgtcaagagtgtaaccttttcggtcttgctcaatgggagtcctctcaaaaagttatccccttaaagaggccttcgccaaggtgacccactatccccttatttgttcttgttgtgccaaaaagtgttatccaaacttattcttaaatcagagagtcaaggcaaggttcacgggattaaaatatctaaagacgcgcttgctatttctcaccttatgtttaccgacgatactattttgtttgctcgggcaaatgtgggggaagctgttgaatttatgaagtgtctttcagtgtataaatcttggtcaggacagaagtgtagcaaatcgaagtctagcgtattgttttctaaaaatgtttcaaggaaagcagaggtgctcaaagccttggatgttactcaagttagtggcaaggaaaaacatctagggaatctattcgttttcaagaggaggaaggtggaagagtacctgtttttgaagaataatatgaggagaagacttgaagggtggaagatgaaattattatcctatgcgggtcgtctcacactcattaaattggtaattgcatatattcatgtgtataacatgtccacaaataagataccattatccatttgtcgttctttggatgctatggttaggaagttttggtggcttggtagcgttgaaaaatataggtttatggctttcgaggcatgggatactatttgccaaccaaagagctctgatgggttgagcattcgaagatttgaagattttaatagagctcttatatcaaagctggctttgtgtgtggctcaaagagttgacaaaccttgggttgcttgtctccttagtaaatattgtcgttatgaaatcttttggtttgtggctccaaagaccaatgattcgattttctagaaaaaattgttggatgttagaggtataattttgaaagggtctttatttttggctgctaatggagagtcgattgatgtgtggagacaaccgtaaattccttggatgaacttctcagattttagcctacttatgaagcagctgagaagcaagagatatataattaaaagagtggctgattcatctattgatagatcctggaataaagagattgcacttcaaatttttggagaagagcttaggaagagaattatggagatacataggataccttctcatcactctgatcatattatatggaaggaaaatctgaatggtgaattttttgtgaaaagtgcttattgtgtggatcaagcggtgcgttttaatccaaagaaggaaatataataattgatttggcaagggaatatccatcctagactgacagtggtgctttggaggatcctaaataaggctattcctattaggaacaaactgccttttggtgtgggcaagtattgtcctttgtgtggctttgagatggagtcttgtctccacaccttcagggagtgtagtgtgtcgagggcgctctggttttcagggtgttttatgcttttattagaaattttcttggtgcaaatatgattgagtttgttgaaaatattctactgtctgcctttattaatcttcgttcatttatcttagtgtacatggcatgtatctttgatgaaatttggagcataaggaataaattcttgtttaaaggtggggttgttaacctggatgtttctcttaagtggattcagaagaattttgttgagttctccggttcttctgaggatgctgctactgctttagaggctcaacctcttgatgttgggttatcgaggaatgattttgaattggtgttacttactgatggatcgtggtaccaaggagatgttggtttggctgtggtaatgtataatgtaacaaaatgatcatgggcttataatgttcaaagagtttcaacctcgtatgctcttgatgctgaaacaagggcaatttggctggctttatcctgggcaaatcagtgcaggggttcgaaaattctggttttatcagattcaaaagttgcagttcaggcgttggaggaagggcggtgtgttcataattagaattttcttaatgtttctctttctattttagagttatttaagtgttttcagtcttgtattttttcttttgttaagcggttggctttggattttgtcagggccgacccttagcataggcgggctaggcccgcgcctagggcccactcattttagatttcaactcagggccgaccttgaattatgttgatggtctagctaaaagggctagaatttctagactttctgctggcatttcccctggtttccattttttctgattagttaatgaaatggtagttctttcaaaaaaaaaaagagtaattt

SEQ ID NO: 218232 - DNA, 5939 bp, Cannabis indica
tcaattagaatattatttttttgatcccaagtgtattcttggatagaggttctactgtattaggaacttggtgaagagtcaaggtcattgtgttgaatttgcttgttcgggtccagactcagaatattggtatggattagggtctaagtcttgggatagggtccaagttactggttaaggttcattgtcgaggttcaggtctagaatcttaggtggcgtttggttggaggtaatgaaatggaatggaatggaaaagaaacaattttcatttcattcctttgtttggttgcattttaaagtattggaatggcattccaatggaatgttctttgatctaattttcattcctattcccattcccattcccattgctattcctatattttcattcctcccaaccaaacgcctccgtagatctcagtcaacctcccagtgttaataaaaaaacatttattattatgctaaatttgatataattttatattttgtgttaaatttaatattataagaacatcactaatggctaaaaaagtaatgtattattatattttagtatatttaaaaaaaatactactccaatgacgttttaaaaaatgtgttaaatttgacactgactaaaaattgtgttaaatttagtacaagatatagcccacaataaattttaccttttttatttactatagtgctactcattattattatttattgacttttacataactttatcttttttatttattatattaccattatttaagcaataaaaaaataaaaaataataatgtttgtatatttttaatacaatattaatgatgatcaatataattatatttttttacatcttcacattggagtacaattataaatagtggacaaaatataacacaaacttaatttttgtgttaaatttagcacaaactttacattttgcattagaaatggtgtaatagtagctttaaatttaaattaagcattatatttaaactaaatttgatcatcgtatactagttttcttctctttctccttaattaacttctctgtttttttttggtgtggtgtgacagcaattaataactgccaagtggcaacagaagaaaattaaacgacgcgctagtacatactcatcattaagattttcatatgatggggcacttttaattagttaattttccacaacaattaataaatacgtaaataaatatgatgatatgtagagacagacaataagtaattaataaggacttgaaataagagaaagaaagcctttggtcttaattagtagattagtggcaagcttttaactgagtttttataacacttctttctttgctactcttcaacaatggctaatgttcacacaaagtttactactcctacacctcctcattttttcaagattattcttcagaaaactcttcatgacaacaagatagtaaggacgaagtatctatattatatatgtatatgtatatattttctttctaactattttctgtgttcagttgaggaatattgttaagagtttcaatggctatataaactcaaagactataacagctaacagactatattatgacaaggatgacaatggacaagttatatattaaaaaaatatttatagacttatagttagtcttgtgttacgttgatttttatatatatattttttttaagtactaatcatacagtttatcatgaatttgatagcaaccatgactttctcgaattaattttcagaagttatatatatatgtatttatatatggttttatttttgcaataataatttatcatggtgttgtcttgtgcagcaaataccaaagacattttgggtgaaatattgtggttgtttatcaagtcaagtatttcttaagcttccatgtggatcaacatgggaggtagggttaacaaaaagtagtgatggaaaggtatggatagaaaagggttggaatatttttgcacaaaattgttccttaagccgaggaaatctccttgtctttagatatgaagggaaatctcagttccatgttatcatattcgacataaccactacagagatagattattcttctcattttgagaagcataatgttgttgattttgatgaagatgaggattctattaaagtcttggaaaatagggggaaatctccaataccatgttctgctaggccccataagaaaatgaatactaaatctaaaggtattattgatcactgtaattaaaactgatgaagcaatgttttcatattaattgttaacatttttgttttgtgtaatgtgttgaatatgttttcagtcatgaagtgggatttgtctgataaagaatgtggagaatcttccctaccaaggtggatggaacctgaatattttttagggaaacagaagttgaatgcaaaagacagggctgaagctgtgaagagagctaaaggttttaaatctaaagacccctttttcatggttttcatgcaaccatcctttgttggagctaagtataatatggtaattagtaattatatcatgcttcttaattacaagttcaatttaaatgtttctcatattgacttaatgtattcttcttgatcttttgttgtgaaggttataccatttctctttacaaaatattacctcctcagcagcattagtaattctcaagatgtaatccttaagattcaagatggcagaacctggtctgttaagtactacgtaacattggctgaaggatctcggagagccagattcgagactggttggaaggaatttgctgtagataataatttgaacgtaggtgatatttgtgcctttgttttgaggaagagtattggggtaatgttgtttgaagttgttactttttctggaaattatggagtagtgaactctcctatgttaccaggtaaaaacatgaatttggctcattctatcacaatattataatcccacatcgactaaatgtgggattggttagaagtttataagtactcgagtgtttttattttatgatgctgcagaacttagtgccaggacaaaaggaagccagtcatgtaaagtagaatcttgtgacattgtgaacaaaagaaatggcttaaaaccatttattagctttgctaaaacttcagctcataaaggaccaagttcttctcaaactaaaaggccatcctttacagctactatgagtgatgcctatgcaactggtcgttgttatttggtaagtttgttttctcttcagttttaacaaattatcaagttttgtttactcaaaaactaagtttgactacaattatttctattgtttcacataatgagtgctctttgcttttcattttggacaggtcttgccatgcaagtttgtgaaggagtacattaataacaaagaatgtgaggtaagacttttggttttggatggtagatgttggtttgtccaattgaaggttaggcagataaaccaacgtccgacagctgaattgtgccgaggctggagagcattcgccttggaaaatagtctgcgagccggcgatatttgcacatttgaattaactattgacaatggcaatgaagtttcatttaaagttttcattgataagaagaaaggttagaaattgtcttaaccatttataattgaatgaatttttggttttaagtactaactttaacttacaatttgttgctttcagttgcaaataagagaagaactattacaccatccaagcgaaagagaaacccttgtgtgaaaattgaatcctcttctgattttgagaaagccaagaaaatcaaagttgaacctaattcaggtatatatgtgaatgtgtatgcatgattctagaataatgtcaaaacattaatgttaaattaagaagagtgggcttacattttgtttataaaaattaaatgtaaactagatccttacttccaagtgattttgcagctgagaactctctttagccgggagattgtgtgcattttgagctgaataagaggaatcaagctgagatgaaagttaacacatatttagagaaagtgatttggctcaagactagtaaattttgtaattatatatgtggcaatgacttagagggttgctttaactaacccttaatgttatgattgttgtttttatcagctttttgtagttaatattatgactcttgaactgtataaatatatttattgtgatataatttttggtgtattttaattttttatcttaattttaacgaatccttaatattttttttattaattttataatattattttatatatttaaaaataaaagattatatagatattttatataagaaaattttaatttaaatttaaaaaattttaaaaattgtaaattttttaactatatttttaattttgttggtttaactttgaataaaaaataagagataatttcactcaattggatacacaactattcattacaatatctcacttaagttttattgtacatataaaacatatatgggtacactaatgtagtcgtaatagctaaaaaaaatctttaaaaattaatatctcaaacaccattttaaaaattaaaaaaaaatacataattaatttttttaaaaaattaactatacattattgcatttaatattacttatttaaatttaattaaaaaaaaaactaattatactacaattaacttggtacacaacgatttaccacaatatcttacttaaattttattgtacatataaaatatacatgagtacgttaatgtaactgcaatagctaaaaaataaatcttcaaaaattaaaatctcaaacaaaaattaaaaaaaaaatacataagctaattaaaaaaaattaaatatattaattatacgtccaattaacttagtatatatataaaaaaaacaactacttattttcttctctttgtggtggtgtgggctgggacaggtaattaataactgccaacagaagaaaataaaacgacggctagtagcattaaagcaggccctgctctgcatcatcattaatcatactcatcattaagattttcatatcaaaataaacatatgtggcagttttaatttaattaagtttccacaacaattaataaatacataaataaataaatatgatgatataatatatatatagaaagagagacaataagtaattaataagagaaagaaagagtttgctattatcttcaggggatattgccttttggtcttaattagtagattagtggcaatagcgagcttttacctgagctttcataagagtttctttctttgctactcttcaacgatggccaatgttcacacaaagtttactcctacacctcctcattttttcaagattattcttcaaaaaactcttcatcacaacaagatagtaagtacaaagtatctatatatacaccaaatatgacatatatatatatatattattcaagtatagaattttgtttttccttgtagctattttctgttttgacttgaggaatattgtttgagttttacacagagtatgagtgaagatagcaaataaagtttgagctgaaaatgtcttgtattgatctaacacctatttatactcacggactataacatactgtattatcataaagttgacatctcatacataaaacttttattttaaagattgtttattattattgttgttacattggtattttttggtattttaattcttttttgtgtatttttaaataaatagaaattttacttgtatatagacttgtagttagtcttgtttcatgttatctataatattctttttaagtactgattacagagtttagcatgaagttgttagagcatatatatatgtgtatatatatatatatatttatatatatggtggggtcttaggctgcagtgatgtagctatattttctggccaattattgtctttcattaacattttattttgatcttgtcttgtgcagcaaatcc

SEQ ID NO: 218233 - DNA, 4302 bp, Cannabis indica
gactccatctttaaacccagaccaccaagcttttgggagacaaattttctctcaagaagccacatgaatcttactctatgtcattccaacctaagaaaacctctataaattttttcaacttccttggtaacactatgaggaagtatgaatatgatcatctaataatttcaaaagccaagaagagccaaatgaatcaactagactctccctacatagggtaggtgcctgctagcccaagcatgaaacctttgtctcattttcttaatgattataccacagtcttccactctccatttagttggtcttagaggaactcatttcactgttgttttaatggttctgttttattattttacagttgttttataaaagatagtatttttgtaaaaaaattcgtgtgacaataaaattgtaaatttttatccaaaatttaatatttttgtaaaagtcataagttaattttctttgtattttttgggctcaatttgcattcttacgaaatagtagcctttgtcgtatgtttttaatgttgggcccaatgatataagatctgtcctggtctaaattgacgttttttgctgatgaatttcgcacgtgcgtgaaaaccaataatgttacaataacaaatcctaacaatcacacgatatacagaatatgcctttttccattacaatattataatgagttacatagatgtgttaaacaaaatatcataattttatatgtatttcttttttccaaaatatcattatagaatattagtttagggaccctattaataattttattgcaaagaaaaggatgatcactcattcttatttgtttaagttaataaattatcataattatcattttttacgcaaaaatcatagttttaatcttgatttttattattattattattattattattttcaataaaatttgccaaaaataattaaaggaaataaccctaatattgtttttttaattttttttgcttttcaaatttacgatttgagtttttaaaatagttgcattgcaataaggatttctatatgattttttgttttgaagtataaaaataaaaaagtttctattatttattctttttaaaatattttaaacaatcaaatacctaatttgaatttaaattcgttatctttttattaacttgaattgatattcttgaataatattatttggtattagtatgcctaaacctgataggatttatttatatttgtgtgatttattaaaaaataaattaattttatcctttttattatattcattaagagccattcaacataaaatatatataaaaaacaaattacatatatatatatataaatacataagctttgggtacacatataatatataatcaattaataagaaatagaatattcggaaggtttcaagtacgaccacaagagtagagtaatactaattacaagttcttctttttcttagggttttctcagcttcagtttttcatttttcctggtcttttcttttacccatttcgacattttcaaaccccttttagatttttaattataaaaggggggatttttgcttcttgggatccatgcgagaacaagctcaagcttggtgacttgaattcttttaatttaaaatttttctcatagtggtttggaaactatggaggctcgagctgggattgtcgttgaaggagggcaaagagctttgaatacagctcacggaagcgtcgttgatggtggcgccaggaaattgttgcagccgcagcctcagcctcaacctgttaaacagtctttgaatcaacaaccgcatatgggttcggtgcattttctcgccggaggtattgctggtgcttttagcaagacctgtacggcgcccctcgctcgtctcaccattctttttcaggtttcaattttccctttaattgttattattgttgataattccacttattgaattttggtatttctttctttctttctttcattttattttcttttgggggggaatgatatgggtttttattatgttggtttctttgggaatcggaaaaatattaattttggggaggtgggtattttgggtatggtttacatgtgttctgagatattattaggaattgcaatcgtttatggtagttaattctaaaaatttgtttacttgatcaacatatgtatagaaaagaccctgctttttgagggcttttttttctgagatgttgtaaatatagttttagtgtgaaaacttaaacaaaaatgtaccattgatcgtatctagggcattgaaacctgacgtgagtccccttggttgttttgctttgtagggatatctttctaaattacccatttagtgttttaattttttaaacattgtgcttgcttttaattgatgattgtgttgtaatgcgttgcaaacggatcattctaagtgcaagatctctagtaataagaactataattttgttttgtctttcttcctcaaaaatacttatgaactggggaggcatcaaattgtatattcaaaggggtttatcttttctatgatattataattctcttacagatgcctgctttaaaatatgttattaaaaagtactgaaccaaagttttttttttaccatgttttctgttatagccttgatgatgtttcgtgtcttaatatcttactaatgaggcatcataagtaatatcatttggttttgttttgttttgttaaatgtttcttaatatggtgtttgaaagctctgtttttgatttgttttttttttcatatgttctaggtgcaaggaatgcactctaatgttgcaacaatgagtaagccatgcatatggcatgaggcttctcgtattgtcaaagaagaagggtatagagcactttggaaaggcaatatggttacgattgctcatcgtcttccttattcttctgtcaacttttatgcttatgaacgctacaagaatgtaagaggatatatatttcagtaatcaatacaactatgaaatgcaattattgtaaattaatattttaaacttttagctatttcaatcatcattttctttattgttgcagtttttgaaatcggttattggggaaaattataagggtaatgtgaatacagaacctttagtgcactttgttgctggtggaatggctgggatgacagctgcctcagtaacatatccattagatcttgtgaggacacggcttgcagcacaggtaatttggggaaaacagttacgtccttctttgaattttgtttaatttattacatttcagtgtgatgattagtagcactttgttggtgtggtctgtgactcagtaactgcccattccttgtgaattttcattatggttcatcggtgtttcaattttgcagagaaatgtaatatattataaaggcatgtggcatgcatttcacactatttgcagagatgaaggtttttggggcttatacaaaggacttggaccaaccctgctggtaaatttatgttagtctttgtttcatttattgttggtaaattttaactatgtctatttgcactgattttctttttttcttgttgcagggtgtaggaccaagtttagcaataagcttttctgtttatgaggcactgaggaagcattggaactctcataggtgagggacacatttatagtaaattgcaatttttattgaaaaaaaaatgaaaatgaaagcactttacaagacacacttgtactatgtgaatgtgacctctgtgtgcatttgatttaatatcattatattttttactcaggccgaacgattccactgccgtggtcagtttaacttgtggaggtctctctggcattgcatcatcaacaggtaagttatacacttaaatgttaagttacttgcacaataagttagctgctgttcagttctagaaaaacgcgagtcatctgcatttgcttggtatggcgtaaaaaacgttgtttcaaattattttactacatcaagtagttgagtccaagatgatgataataagctttggtggctgaatactaaggaagtattcctcaccttcacttagatttatgtctggcgtttattagagcacgattcactaaaaaatgttaggacttacagaaaattggtaattgtttacgactattaatggggatactgtttaatggaggaaaagaaaataaaattgtgaattcgtttttttatagttgtcataaaacttttataattggaaaagtagaagaaacctactaaagagttaacgaaaatacatagttgtgtagaaaataaacagtatagctaagtattagtagatcagaaaaatgtttccattat
